United States Patent Application Publication US 2007/0054278 A1 - sequence listing, part 116

SEQ ID NO: 152160 - DNA, 201 bp, Homo sapiens
atttgtgtatttctcagtaattgccttttaaaattttccttttataggtagactggcgtcgttccttcatcaccactgatgttaatccttactatgattcmtttgtcagatggcaatttttaacattaagagaaagaaacaaaattaaatttgggaagcggtaagtttgttatacttgagcataataaagcaaaaatcagt

SEQ ID NO: 152161 - DNA, 201 bp, Homo sapiens
ttttccacaaggtgtcagtatttcctcaagtttggcatttaaagtgcttaaagtaaaaatgtagctttacgcaatgagctgtgtaaaatatcacattgagwtttatataacttggttttcagagttgtggttaaataaggataaatggctgggcatagcaatgtgttgtatttatagtctttttttatatttaatatccta

SEQ ID NO: 152162 - DNA, 201 bp, Homo sapiens
ttcttgttttatataaaacttctggcatatataggacttaatattcagggatagtagcattcttactatgaatataaattcagttatttctcccaggcttrcagataaatagattggctggtttaataactcctttccagccatattagctaggctcttttgtatttttaaatgcatgaacaatacagaaatgtgctcatg

SEQ ID NO: 152163 - DNA, 201 bp, Homo sapiens
ttactctccgaaagatggacagccttgcatggatcatgatagacaaactggagaggtgattatttgtgagacagagtagctattataataatccttaatawgactatagagtttaagaaatagaaacctaaaaataacttctttgtagtgctgagggatgtagtcctgatactctggtggatatgaagaggagatagaata

SEQ ID NO: 152164 - DNA, 201 bp, Homo sapiens
ctctggtctagtgtcttcctttgatgactactatgtgggacatgccctgggatggaattagggttgattgtgtcttctcaccttcattttggcaaacactrttttgggcgattactccaaatctctcctaacatactagacttctgtgtgggtatagttagcacaccactggcaatctcttctctgcaaaaaaaaattaat

SEQ ID NO: 152165 - DNA, 201 bp, Homo sapiens
aacttgcatggacaggcagagtctccgctgggcattaggttggtaaacagataagggaaaggagcataatttgtcagtaagagttgtgatatttgatttaygtatttaaatgttttaataagatttatttcacagaattttgtcatgatatttttgcttttttactattgaactgggaaaaattaataaatagccccttac

SEQ ID NO: 152166 - DNA, 201 bp, Homo sapiens
atgtccatatcattagtactcacctctctcctccaaaggtaaccactgctctgacttcaccaaagattagttgttgttcttgaactttacataatggaatygtgtagtctgactgttttgtgtctagcttcttttgcttaacattatgtttgtgagattcatacatgttgtaggaatagttctttttttattgttgtgtaa

SEQ ID NO: 152167 - DNA, 201 bp, Homo sapiens
cctgtagagccagctacttgggaggctgggacctcaggaggcttgcctgagcccaggagcttgagcctgtagaatgctatgatagcacctgtgaatagccwctacactctagccttggcaacatagcaaggctctgtctcttaaaaaaatctacacagcaattttcaagtataaaatacattgttatttcctatagtcacc

SEQ ID NO: 152168 - DNA, 201 bp, Homo sapiens
atcaggggctgtgcaagtgtgttatgtgtagtcaagtttgaactctgagcacacaattacagatggtatccttggtatgaaactataatcaagaaccgtawaatagttatattgtctaatctcactgaaggtttttttgtttttctttttttaaaagcctgactcaattatgaatgcttcatggcctgtggcaggtcctgt

SEQ ID NO: 152169 - DNA, 201 bp, Homo sapiens
tgcaaattctataaaggcaggttataagtacatatatgaataaagaggggtgggtgggaattatgtggaaaggaaaagtgtgttccttagctagagcaagmagctgcaaattctttgttgccatctgagaatttgggtctaaaattgcttaatcttttggattttttcaagtgaaattagaactatccttttactttgtct

SEQ ID NO: 152170 - DNA, 201 bp, Homo sapiens
aatagttatattgtctaatctcactgaaggtttttttgtttttctttttttaaaagcctgactcaattatgaatgcttcatggcctgtggcaggtcctgtkaatgaagttttaatacactcctcacagtatcttatggaagtaacacatgaccttagactacgactcaagaactatatgatgccagctaaagggaaggtaa

SEQ ID NO: 152171 - DNA, 201 bp, Homo sapiens
tagagacagggtttcatcatgttggccaggctggtcttgaactcctgacctcgggtgatccacccacctcggcctcccaaagtgcagggattacaggcgtragccactgtacccagccttatctactgtattatcaatatttctgagtgtgtttaattccatttagtgaatgctgatctttggtatcttaaataatttttt

SEQ ID NO: 152172 - DNA, 201 bp, Homo sapiens
atagttatattgtctaatctcactgaaggtttttttgtttttctttttttaaaagcctgactcaattatgaatgcttcatggcctgtggcaggtcctgttratgaagttttaatacactcctcacagtatcttatggaagtaacacatgaccttagactacgactcaagaactatatgatgccagctaaagggaaggtaaa

SEQ ID NO: 152173 - DNA, 201 bp, Homo sapiens
tcatgttggccaggctggtcttgaactcctgacctcgggtgatccacccacctcggcctcccaaagtgcagggattacaggcgtaagccactgtacccagscttatctactgtattatcaatatttctgagtgtgtttaattccatttagtgaatgctgatctttggtatcttaaataattttttaaaaagaaaaatatga

SEQ ID NO: 152174 - DNA, 201 bp, Homo sapiens
cttgctttttaatttgtatcttggcaatcattttgtcagtacataaacagcttctttattcttattttttatagctacatagtatttcattgtttggttgyaccacaatttacttaaccattctctattaatggatatttgaattgtttcctgcctttttcttttaaaagcagcactgccacatctctttagttcctaatg

SEQ ID NO: 152175 - DNA, 201 bp, Homo sapiens
ttgccttgatactaaaataatactgatttaaagacaaacgtagatcatgacatgatatttgggaaaaacaaaaacaaaataactcccccaaacattgcctyaataaatgtatgcatcaattataagatatatcccagattcatatatgttgagatgtaagaaaatgtgctttttcagattgaagaaatacggttatagtaa

SEQ ID NO: 152176 - DNA, 201 bp, Homo sapiens
atgtgggacatgccctgggatggaattagggttgattgtgtcttctcaccttcattttggcaaacactattttgggcgattactccaaatctctcctaacrtactagacttctgtgtgggtatagttagcacaccactggcaatctcttctctgcaaaaaaaaattaataatgcaagaacccattttagggacttgaatca

SEQ ID NO: 152177 - DNA, 201 bp, Homo sapiens
gagtaattcaagagtaatgctggattcagcatcataattatgacgggttaaaccagagctatctcctattcagatggatatatgtgcccttatttatatayacaacagtgcatacatatttttaaaaggtgaaaatattgagaaagatataaacaattgttatgagctgcttaaaaacaaagatataggtgtatatttgtg

SEQ ID NO: 152178 - DNA, 201 bp, Homo sapiens
tagctgtgtcactgatagctgagtaacccaaacaaggcactttatcggatgaaattcagttttcaccgctctaaaattagtgtaatatcttttcctttccrtattttgaattcttttttgtttttatctggtcatggccaacctagttaattttatttggctcatttggtttatttatattactgttattaatgattgatc

SEQ ID NO: 152179 - DNA, 201 bp, Homo sapiens
cgccttggcctcccaaagtgctgggattacaggcatgagccaccatgcccggctaatctccatctctaacagatctctgacctaaatgcttgtaatgtgatttttttttttcagggttaggtatcagccactaacctcctactcttggaaggagtaggaggaagatcaaagttacactctttcccctactttttgttttct

SEQ ID NO: 152180 - DNA, 201 bp, Homo sapiens
taattctgctcctagttaagctatgagcattaatataaaggagattaaatctaaaattcagctatactttccaggaaaacatttcaaaattgataaaaacraaggcaaaattgtaattaattgccattaatttgagagcaagcgttttctgaggttttccacaaggtgtcagtatttcctcaagtttggcatttaaagtgc

SEQ ID NO: 152181 - DNA, 201 bp, Homo sapiens
atagggctgtgcacagtggctcaaggctgtaatccaaacactttgggaggctgaggtggaatacttgagcccaggggttcgagaccagcctgggcaacatagtgagaccctatttctataaaaaaattaaaaaattaactgggtgggttgacatgtgcctgtagtcccagctactcaggaggctgcagtgtgaagtagaag

SEQ ID NO: 152182 - DNA, 201 bp, Homo sapiens
tagggctgtgcacagtggctcaaggctgtaatccaaacactttgggaggctgaggtggaatacttgagcccaggggttcgagaccagcctgggcaacatagtgagaccctatttctataaaaaaattaaaaaattaactgggtgggttgacatgtgcctgtagtcccagctactcaggaggctgcagtgtgaagtagaagg

SEQ ID NO: 152183 - DNA, 201 bp, Homo sapiens
agggctgtgcacagtggctcaaggctgtaatccaaacactttgggaggctgaggtggaatacttgagcccaggggttcgagaccagcctgggcaacatagtgagaccctatttctataaaaaaattaaaaaattaactgggtgggttgacatgtgcctgtagtcccagctactcaggaggctgcagtgtgaagtagaaggg

SEQ ID NO: 152184 - DNA, 201 bp, Homo sapiens
tgtcataggaagcccaaccttcaaaccataggattcgaaactgctgaccatcttttgtgtttttttttcctttttgttcactttttaattttcactgaaaygaaataatcagtagctagagaaagtgatccacttgatgaagattcatgcctttttaaaagcaggtgttacatagaaggaaaggtagaagatgactgaccc

SEQ ID NO: 152185 - DNA, 201 bp, Homo sapiens
tttttttttttttttgagacggagtctcgctgtctcccacactggagtgcagtgacgtcatatgggctcactgcaagctccgccccctgcctcagcctctsgagtatctgggactacaggcacccgccatcacgcctggctaatttttttttgtatttttagtagagacgggatttcaccgtgttcgccaggatggtctca

SEQ ID NO: 152186 - DNA, 201 bp, Homo sapiens
cacaaattgcaactgaagtaaagagagaaaaagagagacagagacagggacaggaatcataaagagcttagcattgtgacccagaagagttttcttttccttttttttctttttctttttttttttttttgttgtgatggaatctcactctttcgcccaggctggagtgcagtgacacgatcttggctcactgcaacctcc

SEQ ID NO: 152187 - DNA, 201 bp, Homo sapiens
gaggtcctctcctagctgtgtcactgatagctgagtaacccaaacaaggcactttatcggatgaaattcagttttcaccgctctaaaattagtgtaatatmttttcctttccgtattttgaattcttttttgtttttatctggtcatggccaacctagttaattttatttggctcatttggtttatttatattactgttat

SEQ ID NO: 152188 - DNA, 201 bp, Homo sapiens
gaataaatcaagagtaagtgatttggctaaatccatggcaaagtaaaaatcaatgacaatgccagcatctgaacttatgattccctatgattgcatcattytttattaccatctttgaacatattttcaaaatcagccttcaattttgatgtaacttatctaagtgagagttgatcaaaattttaaaagatttgagagact

SEQ ID NO: 152189 - DNA, 201 bp, Homo sapiens
aaagagagaaaaagagagacagagacagggacaggaatcataaagagcttagcattgtgacccagaagagttttcttttccttttttttctttttcttttyttttttttttgttgtgatggaatctcactctttcgcccaggctggagtgcagtgacacgatcttggctcactgcaacctccacctcccagattcaagcga

SEQ ID NO: 152190 - DNA, 201 bp, Homo sapiens
atcttccttgattaatctacataatcaacttcctgatagtttcatttgttaagtcaatttatgttttataatcttttgttcaataccacaaagccaagatsagtgtgtatttttcagtggtattacctttgacgaagatagaaagctttcattaaataagtaggttgacagtggaactaccataagagtacacataataga

SEQ ID NO: 152191 - DNA, 201 bp, Homo sapiens
agagagacagagacagggacaggaatcataaagagcttagcattgtgacccagaagagttttcttttccttttttttctttttctttttttttttttttgktgtgatggaatctcactctttcgcccaggctggagtgcagtgacacgatcttggctcactgcaacctccacctcccagattcaagcgattctcttgcctc

SEQ ID NO: 152192 - DNA, 201 bp, Homo sapiens
cctccacctcccagattcaagcgattctcttgcctcagcctcctgagtagctgggattacaggcgcatgccaccatgcccggctaatttttgtttttttcygtagagatggggtttcgccatgttggccaggctggtctcgaactcctgacctcaagtgatcgcctgcctcagcttcccaaagtgctgcgattacaggcat

SEQ ID NO: 152193 - DNA, 201 bp, Homo sapiens
tgtaaagaagaaacgtaaaggaaaaattcttagctttgatattctagaccattattggaattttgcctcaacacttttcatagttaattaagaaatgctamgaaaagctgcttttacatatgtaaaatttgatagagaagagcaaatgtttttgtatttcttgtgagtctatttttgtggagaactatttccacctttgag

SEQ ID NO: 152194 - DNA, 201 bp, Homo sapiens
ctgagaagttcttgggaacagtattagggacatacatgttttcctattcttaatgcaacttttctccctgttaatttgagcaaattctggcgtgagggacrtggatgttataaattgcaaaatagtttcaacatttaaaatggttataatatttagctgtcatccatatgactgcaaattctataaaggcaggttataagt

SEQ ID NO: 152195 - DNA, 201 bp, Homo sapiens
aatcacttctttttctcttctaaactaaaaagtatgtgttgttaatttatagagaataggagagttccttctgcattgttcattgagctttcacttccccrtgatgctagggctggacacttttctgctgttctctaaggattgatagaggccaccattctatgcctggtcacatctactgttctgccttattcttgagac

SEQ ID NO: 152196 - DNA, 201 bp, Homo sapiens
ttaatacactcctcacagtatcttatggaagtaacacatgaccttagactacgactcaagaactatatgatgccagctaaagggaaggtaaagtttttttktttttttttttaaaggattattccttaaaagttattgatcagataacatttaacaataatgaaagttaaaaagattttcattaatggtgaagaccgtggt

SEQ ID NO: 152197 - DNA, 201 bp, Homo sapiens
gccttccaaatagctgggactacaggcgcatgccaccacgcctggctaattttttgtattttagtagagacggggtttcaccatgttgcccaggctggtcrcgaactcctaagctcaggcaatctgcctgcctcagcatcccaaagtgctgggtttacaggcgttagccaccgcgctcagcctgtattcattttttaattg

SEQ ID NO: 152198 - DNA, 201 bp, Homo sapiens
aatgatctatcagattttgggtttacttgtggaattgctgagtatgtgaaaaatattattgtgggagaaaaattggtttagaatggctgcactgaactatycccttcatattctaccttcccttctttcaaactcttttggcttacattaggcttatagaggcttgcatttcctagaccctattcctggaaccaggattca

SEQ ID NO: 152199 - DNA, 201 bp, Homo sapiens
ctgcctgcctcagcatcccaaagtgctgggtttacaggcgttagccaccgcgctcagcctgtattcattttttaattgacagaaattgtatttatggtackcaatatgttttgaaatatatatacattgtgaaatggctaaattgaggtaattaacaaatttataccttacgtacttaccattttctgtggtgagaagagt

SEQ ID NO: 152200 - DNA, 201 bp, Homo sapiens
ctgaccaacatggagaaaccctgtctctattaaaagtacaaaattagccgggcgtggtggcgcatgcctgtaatcccagctactcaggaggctgaggcagkagaattgcttgaatccaagaggcggaggttgcactgagccgagatcgcgccattgcattctatcttgggcaacaagagcgaaactccatctcaaacaaac

SEQ ID NO: 152201 - DNA, 201 bp, Homo sapiens
gccaaatgtccgctgggggcagaatcaccttccacttcttaccattgagaattattgggttagacccttagttttcttcatatacgtcgctgatgtattaytggatttcttgacaaaaagaaaccgaaagaaggcttatattgcttaagatcgcaggctatggggccagaaaaatcttggttgaaattctgtgtatcagtc

SEQ ID NO: 152202 - DNA, 201 bp, Homo sapiens
tattcattttttaattgacagaaattgtatttatggtactcaatatgttttgaaatatatatacattgtgaaatggctaaattgaggtaattaacaaattyataccttacgtacttaccattttctgtggtgagaagagttaaaatttaaatcaggtgcagtggtatgcacctgtagagccagctacttgggaggctggga

SEQ ID NO: 152203 - DNA, 201 bp, Homo sapiens
aggccaccattctatgcctggtcacatctactgttctgccttattcttgagacttttttttctacattactctccctccttccttttcttaggccaataayggaaaactgcctgacaacaaagtcattgctagtgaactaggcagtatgccagaactgaagaaatacatgaagaaagtcatgccatttgttgccatgatta

SEQ ID NO: 152204 - DNA, 201 bp, Homo sapiens
tgctggtatgttcatagttcgttggttccccagtggctagtgtcattggtcataatgccaaatctctgtcaacatgtggatccaacaaaatattccattgrtggttgcaaaggcaattaattttgatgacatgttttaaaagaatccagggaaacctatttgaaaagtagttatgtgtatatgtatatatatatagagtgt

SEQ ID NO: 152205 - DNA, 201 bp, Homo sapiens
cacctttaacatcatacaaggtgatctatgttctcccaatgctaactattaaggaggataaaggtaaagagtttatttatttctagaaatattttgataawcacattttggttctagttattaattccacactttgttttctaaggcactggtgtggttacaagtgttccttccgactcccctgatgatattgctgccctc

SEQ ID NO: 152206 - DNA, 201 bp, Homo sapiens
gctgtgggactaggctaaaaagctatgcatttatctttaaactgctatctctaacttgtttcttgatgttaatatattttctgtggtttgaattttaaatrtgtttcacagaattttgaaaaagctttctgatattcacattttcattgaaatctggcatatgaacctcaatttaagtgatatgtgtatgtctatgtacat

SEQ ID NO: 152207 - DNA, 201 bp, Homo sapiens
tctcatttaaatttgaagaaccagcatcagaccgtttgagtggtaatatatttttaaaattatgttggtgatttgccaggcaaattagtggttttgcaaaytttggaagggattaatacatctgggaataagaaaatgactttctagcacttccatgagaaaaagaaatagaacttgcatagtaagcgaaaacagtgagta

SEQ ID NO: 152208 - DNA, 201 bp, Homo sapiens
tttgcttttggttgtgtggtttcatttaggctattcactataactttagctattaaatttttgaaggttacagatcccttttgagatatttggcaaagttrgaaaattgctctctatggagaggagaacaaatagaaactttaaagaaacttttaagaaactttggagattgcttctctcaatgattctcccagtaaagtg

SEQ ID NO: 152209 - DNA, 201 bp, Homo sapiens
gcaaattagtggttttgcaaattttggaagggattaatacatctgggaataagaaaatgactttctagcacttccatgagaaaaagaaatagaacttgcakagtaagcgaaaacagtgagtagcaggaataatatcaggtcactttcattaagtataacatgttctaggtagttatatctgcatatgtacttggatctcta

SEQ ID NO: 152210 - DNA, 201 bp, Homo sapiens
attaaatttttgaaggttacagatcccttttgagatatttggcaaagttagaaaattgctctctatggagaggagaacaaatagaaactttaaagaaactyttaagaaactttggagattgcttctctcaatgattctcccagtaaagtgttgatcattagtgttaacttgcaaatttttctgtaggccttacgagcaaaa

SEQ ID NO: 152211 - DNA, 201 bp, Homo sapiens
tacagatcccttttgagatatttggcaaagttagaaaattgctctctatggagaggagaacaaatagaaactttaaagaaacttttaagaaactttggagrttgcttctctcaatgattctcccagtaaagtgttgatcattagtgttaacttgcaaatttttctgtaggccttacgagcaaaatatggaattagagatga

SEQ ID NO: 152212 - DNA, 201 bp, Homo sapiens
atttgtacacataaggcaccagtgtgtattctcatgtattaaaatgtattttgctacctctaaatgaggctgaaatgttgataagaaaaccacaatgaaakgtgtgtctttatccccagtttatcattttctatctctgcctcattaaagatcactttatctcattaactcaacatgcctgagaagaaacacatattggtg

SEQ ID NO: 152213 - DNA, 201 bp, Homo sapiens
ccagtgtgtattctcatgtattaaaatgtattttgctacctctaaatgaggctgaaatgttgataagaaaaccacaatgaaatgtgtgtctttatccccastttatcattttctatctctgcctcattaaagatcactttatctcattaactcaacatgcctgagaagaaacacatattggtgcttagtggatgcaaatca

SEQ ID NO: 152214 - DNA, 201 bp, Homo sapiens
tgattttcattttgttttatatggcagatagatgccagatttcattatagaaaatgataaacatgactatataaataacaatactatgagacatctaaaaygaatgttaaataactgattacagatttcatttaatatttatatggaaaataataaaattgcacagaccatttcatgttaactggagaacctagttttgtt

SEQ ID NO: 152215 - DNA, 201 bp, Homo sapiens
gctgtatgtgataggctatgctctgaaggctgttttagaagagctgttaatagacttgacagtgttattagcagtgagttctacagtagaacctggagctrtaataaaaatatcatacagttttgcggcagaaaatagacctatttagcaattcatttaacttgaacatcccatctataatgttgataaaggtagtgtttt

SEQ ID NO: 152216 - DNA, 201 bp, Homo sapiens
catattactaagctgtaacacatatattttctaagtatctcttgaatctgtctacatttctctatctttacggtcaccaccatagtccaagaccccatcayctttcaccaggacaattgcaatacccttctgtttccactttcgctcttttccaattcttcctcagaatgatttttataaaatactaataggggccgggcg

SEQ ID NO: 152217 - DNA, 201 bp, Homo sapiens
gatccacctgcctcggcctcccaaagtgctgggattacaggtgtgagacaccgtacccgaccagtctttttttttcccttgagatgaagtctcgctctgcygcccaagatagagtgcagtggtgcgatctcgactcagtgcaccctctgcctcctgggttcaagcaattttcctgcctcagcctcccgagtagccgggact

SEQ ID NO: 152218 - DNA, 201 bp, Homo sapiens
tactgcgtctcaaaaaaaaaaaaggagattgtcaatacgcggttatacaatgtctaaatgctgggctgttgaatgccactgacagtaaaaaatatctgtgyatagtggcaagccataagtagcacctcagtcaccgtatagtaattaactgcgtatcctggcatcccgacaggcaaccagctctaccgggtgaaaaggttg

SEQ ID NO: 152219 - DNA, 201 bp, Homo sapiens
  misc_feature (1)...(201): n = A,T,C or G
agtggactgagtgtgagtctggaggtcctctcctagctgtgtcactgatagctgagtaacccaaacaaggcactttatcggatgaaattcagttttcaccnctctaaaattagtgtaatatcttttcctttccgtattttgaattcttttttgtttttatctggtcatggccaacctagttaattttatttggctcatttg

SEQ ID NO: 152220 - DNA, 201 bp, Homo sapiens
ttgaacccgagaggcagaggttacagtgatttgagaacgtgccattgcactcaggccttgcgcgacaagagtgaaactgcatctcaaaaaaagggaaaaargagaaaatagttgtagctttaaacaaatggcagctgatgtaaattgcattatgtaacatcagacttagcctgtgccctaatattgaaaggtaataaaaga

SEQ ID NO: 152221 - DNA, 201 bp, Homo sapiens
gttaactgtagttaaaccataatccagctcttttattttataataaacctttttataaatttcatcttctgtgtttagtatctttgttaaatatattagtygaaaatatttttggagagaagaaaaatgggtgagtataaaagttgcaggaaaaaaagtgatatgtcatcttatttcatcaattcttaatttacatataat

SEQ ID NO: 152222 - DNA, 201 bp, Homo sapiens
ccatgtcttgccgtgtttttttcctcccaatttataataaaatgaacatccctgaattttctacccaatccaggaactagaacagtaccaatagcttttayatatctgtgacgttctccccatccaatctttgtgccccactcacaactttatatatagatcgtaaataagctggtctcagacaacttaggcaaaaggaaa

SEQ ID NO: 152223 - DNA, 201 bp, Homo sapiens
gacatccattttatgtatatctaaatgttcatatatattcatgtaggtcaaaaaacttcttggatcttttcacttggaccatgcagacgcaccttatgttyagggtcatcttatattcagacatatgcactgtgctatatttctgagcttttcttccatttatttaagtggaagccttttattctcaaatgataaatttct

SEQ ID NO: 152224 - DNA, 201 bp, Homo sapiens
cagggactggttttgtggaagacaatttttccatggaccagcagggtgtggtaggggaatggttttggcatgaaactgtgccaccttagatcatcaggcaktagattctcataaggagcaagcaacctagatccctccatgcacagttcacaatagggttcgtgcttctatgagaatctaatgccacccatgatctgacag

SEQ ID NO: 152225 - DNA, 201 bp, Homo sapiens
gccacccatgatctgacaggaggtgaagctcagggggtgatgctcgcccgttcctcacctcctgctgtgcagcctggttcctaatgccatggactggtacyggtccacatccttggggttgggaacccctggtttacatcattttgctagtttcagtatgaattacttaggtaattatatgccagtggaggatagagtgtt

SEQ ID NO: 152226 - DNA, 201 bp, Homo sapiens
atctttacctaggcatttggttataagcatgagcttgtacagcttttctttcatatttgagtactccttagtcatgattttaaaataccagaattagatcygtctttcattgggcattgaaaacgtagcagagattcctcctccctcagcagtattcaagttaaacaatcattttcttgttgttttcctagcctggtgtgt

SEQ ID NO: 152227 - DNA, 201 bp, Homo sapiens
taaacaatcattttcttgttgttttcctagcctggtgtgtccgtttctctggtgaatccccagccatccaatggccacttctcaaccaaaattgaaatcargcaaggagataactgtgattccataatcaggcgtttaatgaaaatgaatcgaggaattaaaggtaagttgttccccaaaactcccatttgtcagtagctt

SEQ ID NO: 152228 - DNA, 201 bp, Homo sapiens
ccaggagtcaccgtctggttctttgctttgtatacatagcacatctcttgcccaaatagaattctgtttcatcttgagcataaacaccttcaaattttttyttctttttctttctttttttttttttttgagacagagtctcatactgttgcccagggtggtatgcagtgatgcgatcttgggcttgctgaaacttccacc

SEQ ID NO: 152229 - DNA, 201 bp, Homo sapiens
attctgaaagcttaaatttctgtcctttctctgccttgtccccgctctccttgtctcatcaacttgttaatacaaatactttcatcttttgagcaaatgaraaactggtaatgccatttcttagagtagtcattatttatccaaaagtatctctgagaaaagctacaattcttgcaagtttagtgtattccagggagctca

SEQ ID NO: 152230 - DNA, 201 bp, Homo sapiens
ccgtctggttctttgctttgtatacatagcacatctcttgcccaaatagaattctgtttcatcttgagcataaacaccttcaaattttttcttctttttctttctttttttttttttttgagacagagtctcatactgttgcccagggtggtatgcagtgatgcgatcttgggcttgctgaaacttccacctcttgggttc

SEQ ID NO: 152231 - DNA, 201 bp, Homo sapiens
gaacttgtgttccggtttattgaagttcagacacttctcctcgctccattctgtccacatttgtgtgagcacatctggacactcctgggaaaggtaccttyatgcatttaaaatgtttcgagtggttttgattttggcttcattaaataagtgttgtgctaatattgttacttaagagagaaagtctgaaagtgagtaatt

SEQ ID NO: 152232 - DNA, 201 bp, Homo sapiens
agcagtcacccttaatatacagttaaagttgttcaacttttatgtctcagttacaaactgtctgtaaaaaaattctttttttgagaattattagtataaarctgccatatactttggacaaagataaatacttgcagattcttaaagtaaaacctttacagtaatttgttatggatttttaaaagactagaaacttaaaaa

SEQ ID NO: 152233 - DNA, 201 bp, Homo sapiens
tgtgtgtgtgtgtgtgtgtgtgtgtgtgtctatctgacggagtcttgctctgtctcacaggctggagtgcggtggctcaatctcagctcactgcagcctcyaacttccgggttcaagcgattctcctgcctcagactcctgagtagctgggactacaggcacgtgccaccatgaccagctaatttttgtatttttagtaga

SEQ ID NO: 152234 - DNA, 201 bp, Homo sapiens
tctggttctttgctttgtatacatagcacatctcttgcccaaatagaattctgtttcatcttgagcataaacaccttcaaattttttcttctttttctttytttttttttttttttgagacagagtctcatactgttgcccagggtggtatgcagtgatgcgatcttgggcttgctgaaacttccacctcttgggttcaag

SEQ ID NO: 152235 - DNA, 201 bp, Homo sapiens
cctttctctgccttgtccccgctctccttgtctcatcaacttgttaatacaaatactttcatcttttgagcaaatgagaaactggtaatgccatttcttaragtagtcattatttatccaaaagtatctctgagaaaagctacaattcttgcaagtttagtgtattccagggagctcaagaaagggataagttttagattt

SEQ ID NO: 152236 - DNA, 201 bp, Homo sapiens
tactcacctgcagcaggtggggttagaaagaggagcctaattagatgaagccgaatgtacttagttccttcagaaaccaccaggaatgaggtgagtgagtrtaattgaagtctgtctatgtggaaacttaagaagtggaagtgagtattccttcctaatcatgctcacactaggtatctccgtgatacctagtgaggtgtg

SEQ ID NO: 152237 - DNA, 201 bp, Homo sapiens
ggaactcctgacctcaagtgatccacccgcctcggcttcccaaagtgctgggattacaggcatgggccactgcacccagccatttcttttttttttttttycctttttaacaaatccacttttatttattgacttttcattagtttaaatccttgaggggtatagcatcactcagattctgtgtctaatacctttagcagg

SEQ ID NO: 152238 - DNA, 201 bp, Homo sapiens
cctttggaatttgttgtaacttgagcagtgggagtcattcattaaatttattcattcattatattcattcattaaattatttcaaatcgtaaccttgtttrttgtttggaaaaaagtgaagctttgttcttgagtactttaaatgttgtttggtttgataattacctatagaaatgtagagcttgaagacatttttggctg

SEQ ID NO: 152239 - DNA, 201 bp, Homo sapiens
gtggggttagaaagaggagcctaattagatgaagccgaatgtacttagttccttcagaaaccaccaggaatgaggtgagtgagtgtaattgaagtctgtcyatgtggaaacttaagaagtggaagtgagtattccttcctaatcatgctcacactaggtatctccgtgatacctagtgaggtgtgggtatcactgacagaa

SEQ ID NO: 152240 - DNA, 201 bp, Homo sapiens
atagaattctgtttcatcttgagcataaacagtttcacttttttttttttttttttgagatagagtctcgccctgttgcctgggctggtatgcaatgacgyaatctcggctcgctgcaacctccaccttccggattcaagcaattctgcctcagcttcctgagtagctaggactacaggtgcctgccatgatgctcggctc

SEQ ID NO: 152241 - DNA, 201 bp, Homo sapiens
ctcctctcatccctccgtttctgttataactctcttctatttagctgagttaaccctttacatttttatttttgacaactttgtatacccataatactatragagacaatggtctgttaggcttgttgaaataaaaaagcagcaatttcctcatcacttttccataatttaaatttctcttccttggagggggtaacattt

SEQ ID NO: 152242 - DNA, 201 bp, Homo sapiens
ttgagtactccttagtcatgattttaaaataccagaattagatctgtctttcattgggcattgaaaacgtagcagagattcctcctccctcagcagtattsaagttaaacaatcattttcttgttgttttcctagcctggtgtgtccgtttctctggtgaatccccagccatccaatggccacttctcaaccaaaattgaa

SEQ ID NO: 152243 - DNA, 201 bp, Homo sapiens
atcaatatcctcagtaggaggttatgcaaacttgacagacccctcacttgcccctatgatacttctgtgcaaattagagaagggcacccctacttgacttaaaaaaaaaagtacaaaattatttattcctcattaataaaaatggtaacaaattagatttgttacaaccagtgaattttgctgtaaccaacagaatagcaa

SEQ ID NO: 152244 - DNA, 201 bp, Homo sapiens
gtgattctcctgcctcagcctcctgagtagctggaataacaggcatgagccaccatgcctggctaattttgtatttttagtagagatggggtttctccatrttggtcaggctggtctcgaactcccgacctcaggtgatccactcgccttggcctcccaaagtgctgggattacaggcatgagccaccatgcccggctaat

SEQ ID NO: 152245 - DNA, 201 bp, Homo sapiens
aatcgcttgaacccgagaggcagaggttacagtgatttgagaacgtgccattgcactcaggccttgcgcgacaagagtgaaactgcatctcaaaaaaaggraaaaaagagaaaatagttgtagctttaaacaaatggcagctgatgtaaattgcattatgtaacatcagacttagcctgtgccctaatattgaaaggtaat

SEQ ID NO: 152246 - DNA, 201 bp, Homo sapiens
aaatgctgtggggaaaaaatagagcaggaaggggtgctagggagtgtacggtggggtagtacagttgcaatttttaaaaatttttttaaatttgggagatrttctcactctgtgacccagactggaatgcagtggcgtgatcatggctcactgcagcctggaccttagggctcaagcgatcctcacacctcagcctcccca

SEQ ID NO: 152247 - DNA, 201 bp, Homo sapiens
aaaaaaaaaaaaaaattagctgggtgtggtggcaggtgcctgtaatccaggctactttgggaggctgaggcaggagaatcgcttgaacccgggaggcggargttgcagtgggctgagattgcattgcactccagcttaggcaacaagagtgaaactctgtctcaaaaaaaaatgttgagtatgtaggaagcttttccaaga

SEQ ID NO: 152248 - DNA, 201 bp, Homo sapiens
aataatatagttagtctgtttcttacaagatatataagcaattatgaaaccactttatgtatatattaggattgaataaataagtaaacaggtagataatkagaacctctgcctcacagagctcactatcagaaaaagaagctataaataagtaaagagaaaatgctagaatgagccctatggggtcagattggatttggt

SEQ ID NO: 152249 - DNA, 201 bp, Homo sapiens
gtgtgcaaactattcaaaaacaagggaacggtaaaagcaaatttcagaatgtcggttatctcttgtgggacagtagagaggaaacaggtagtttcagtggrttcataagtcagatggtgtgtttacaagtgttcattttattatgcttcataacacagtatgtatgttagatattcttcataagaaaaaagaatacagacc

SEQ ID NO: 152250 - DNA, 201 bp, Homo sapiens
atttttattttgtgtatagatatgtagatataaaactaaacagctgggtgtggtggctcacacttgtaatcgcagcactttgggaggctgaggtgggcagwttacctgagatcgggagtttcagaccagcctgaccaacatggagaaaccctgtctctattaaaagtacaaaattagccgggcgtggtggcgcatgcctgt

SEQ ID NO: 152251 - DNA, 201 bp, Homo sapiens
tgttcccatgtcctgctcatggtaatttttaggtaaaagatatttgttacataacttctgtgtctgtggcattgtactttgtgctaaggtgactataaacratttaaaagttcctgcctgttgagaatttacagcccaactgcataaatgtcttaagatcattggttgcatttaacagaagtcaactcaagttggttaagg

SEQ ID NO: 152252 - DNA, 201 bp, Homo sapiens
atttaacagaagtcaactcaagttggttaaggaggaatttagtaataaagtggaagttggccaaaggcgatggctcaagcctgtaatgtcagcactttggraagccaaggctggtggattgcttgagcctaggagttcaagaccagcctaggcaacatggtgaaaccctgtctctacaaaaaaatacaaaaactatctggg

SEQ ID NO: 152253 - DNA, 201 bp, Homo sapiens
tgcatatgcctgtagtcccagctattcaggaggctgagatgggaagattgattgagcccagtaggtcaaggctgcggtgagctggtgcttgcaccattatrctccagcctgggtggcagagggagaccctctctctctcacacagacacacacacataaatacagtgaaatttcatattacccatgaccgtagggtaggag

SEQ ID NO: 152254 - DNA, 201 bp, Homo sapiens
gtttcgccctgttggccaggctgatctcgaactcctgacctcaagcaatccacccgcctcggcctcccaaagtgctgggattacacgcatgagccaccgcscctggctgataaccctaatttttaatgttcatttaaatttcaagataaccatggaaaaatcagtctttatcagtgagcagctcagttctgtgaacccaat

SEQ ID NO: 152255 - DNA, 201 bp, Homo sapiens
ccttaataaatgtatgcatcaattataagatatatcccagattcatatatgttgagatgtaagaaaatgtgctttttcagattgaagaaatacggttatartaacaacaataatagtaagttaacattgaacacttactgtgtgctagcaaatgtgctagcaaatttttttacatgtatactctcatttaatcttcttttt

SEQ ID NO: 152256 - DNA, 201 bp, Homo sapiens
tgtatactctcatttaatcttctttttctttctttctttttttttttttttttttgagacagtcttgctctgtcatcaggctggagtgcagtggcgccatstcggctcactgcaacccccaactccctggttaaagcgattctcctgcctcagcctccttagtagctgggattacaggcatgtgccaccacgcccagctaa

SEQ ID NO: 152257 - DNA, 201 bp, Homo sapiens
caagaactatatgatgccagctaaagggaaggtaaagtttttttgtttttttttttaaaggattattccttaaaagttattgatcagataacatttaacartaatgaaagttaaaaagattttcattaatggtgaagaccgtggtggtgtatgttgggggagggttcttctcatttttggtttatataaaagctattgaat

SEQ ID NO: 152258 - DNA, 201 bp, Homo sapiens
tgccagctaaagggaaggtaaagtttttttgtttttttttttaaaggattattccttaaaagttattgatcagataacatttaacaataatgaaagttaaraagattttcattaatggtgaagaccgtggtggtgtatgttgggggagggttcttctcatttttggtttatataaaagctattgaatgtttttcctttctt

SEQ ID NO: 152259 - DNA, 201 bp, Homo sapiens
gtgaagaccgtggtggtgtatgttgggggagggttcttctcatttttggtttatataaaagctattgaatgtttttcctttcttttaccgtctagaagacygacaaacaacccctgcagaagccctcacattgcaccatctatgtggcaaagaactatccaccttggcaacataccaccctgtctgttctacgtaaacact

SEQ ID NO: 152260 - DNA, 201 bp, Homo sapiens
ccgacctcaggtgatccactcgccttggcctcccaaagtgctgggattacaggcatgagccaccatgcccggctaatctccatctctaacagatctctgayctaaatgcttgtaatgtgatttttttttttcagggttaggtatcagccactaacctcctactcttggaaggagtaggaggaagatcaaagttacactctt

SEQ ID NO: 152261 - DNA, 201 bp, Homo sapiens
tttttagacagttaaaaggagcttttaaacctcagatgagtcttggtttgattgttattcaaggctgttttgtataaactggattgatgcataatcttaarttatgctggaatagctttttttaacctcttagtttttggctgttattggtgaagacaaaaaggttttggatattctgttttttgtttgtttgtttgtttt

SEQ ID NO: 152262 - DNA, 201 bp, Homo sapiens
tggctttgggctcaagtgatcgtcccacttcagcttcttgagtggctaggactacaggcatgtgcctccatgcctggctgatttgttgtaggatgctgttsttgtttcatagatgggacatcttaatcttatttctctgaggaagaccgttgatatgtaatatatttgggtgtaaaaagaaatgtttttgcttatgggtag

SEQ ID NO: 152263 - DNA, 201 bp, Homo sapiens
tgaatccaagaggcggaggttgcactgagccgagatcgcgccattgcattctatcttgggcaacaagagcgaaactccatctcaaacaaacaaacaaaaarcatagatatgtgtatgtatgggttagtatacaaatatgaactgttaagtggaaaaggcaaagtgcagaacctgaatgctttgattggacaccaaagctaa

SEQ ID NO: 152264 - DNA, 201 bp, Homo sapiens
actgggggagatctagaaagggccatttgggccttggcgactcccggttgttaagtttttttagtattggcttttgggtttgttagatttccctacagaarattctgccaatctctagctcaaaaggtctaggtggccaggcacagtggctcatacctgtaatcccagtactttgggaggctgagaccggtggatcacttg

SEQ ID NO: 152265 - DNA, 201 bp, Homo sapiens
cagcactttcaatgatagagtttttgccaggtaatctgtagatcccaatcattttgtgttttagagttacttagtcctggtgcatttttgttttctttttsttttcttttctttttttttttaataaaataaactaatgataataatagctagtgttcattgaaggcttacttgtgccgggtactatgctaagtattttgt

SEQ ID NO: 152266 - DNA, 201 bp, Homo sapiens
aatgatagagtttttgccaggtaatctgtagatcccaatcattttgtgttttagagttacttagtcctggtgcatttttgttttctttttcttttcttttctttttttttttaataaaataaactaatgataataatagctagtgttcattgaaggcttacttgtgccgggtactatgctaagtattttgtgtccattatc

SEQ ID NO: 152267 - DNA, 201 bp, Homo sapiens
aaattaagaagaacctggattggtatgagaaaatttttttctgatatccagtattagttattgtaaatgcaataattaaaacctggctatggccaggcacygtggctcacgcctgtaaaccaggcactttgaaaggctgaggtgggaggattgcttgagcccaggagtttgagaccagccagggcaacaaagtgagatcct

SEQ ID NO: 152268 - DNA, 201 bp, Homo sapiens
gtcataggaagcccaaccttcaaaccataggattcgaaactgctgaccatcttttgtgtttttttttcctttttgttcactttttaattttcactgaaacraaataatcagtagctagagaaagtgatccacttgatgaagattcatgcctttttaaaagcaggtgttacatagaaggaaaggtagaagatgactgaccct

SEQ ID NO: 152269 - DNA, 201 bp, Homo sapiens
gcctaggagtttgaggctgcagtgagttgtgatcataccactgcattctagcctaggtgacagagaccctgtctcaaaaaaaaaaaaaaaacaaaaaaaamcttggctacaaccttagttaggctattttcatgttgcattttgggctttataagaataaagtgtccatcaggaaatttctgaagaagcatcatttattgt

SEQ ID NO: 152270 - DNA, 201 bp, Homo sapiens
agctagagaaagtgatccacttgatgaagattcatgcctttttaaaagcaggtgttacatagaaggaaaggtagaagatgactgaccctgggaaggcgggsaagacataatgaaaatgtgggctttcagttattggtggtatagcatttttttaaagtaatttttatccttgaggaatgaagattgatttgacatagtatc

SEQ ID NO: 152271 - DNA, 201 bp, Homo sapiens
atgtagagcttgaagacatttttggctgtgccaggtaatgataaatccacttaaagggaactcaataacttagatctaagttttcctgaaagaaaaaaatstatttttcctctgcattcaaaatgtagaaacaaagtatgtttatgaactttggcttttttgcttaggttattaaaacagttattgctagatgcagaccac

SEQ ID NO: 152272 - DNA, 201 bp, Homo sapiens
gacttttttatggagagactccaagcttcaaccatttgtcttttttttcttttttagagacagagtcttgctctgtcgcctaggctggagtgcagtggtgygatctcagctcactgcaacctctgcctcccgggttcaagcgattctcctgcctcaacctcccgagtagctgggattgcaggcacccaccaccatgcctgg

SEQ ID NO: 152273 - DNA, 201 bp, Homo sapiens
aaaggcaattaattttgatgacatgttttaaaagaatccagggaaacctatttgaaaagtagttatgtgtatatgtatatatatatagagtgtgtgtgtgygtgtgtgtgtgtgtataaaatgatattagattcaagagttggcttctttaggatctcatttaaatttgaagaaccagcatcagaccgtttgagtggtaat

SEQ ID NO: 152274 - DNA, 201 bp, Homo sapiens
aagctctacgaatctatggacagtaatgaactacatggtgaaacatcaaagcaaatatgttttgtcacttagaagcctgattgagtattaaggtttctttraactagtttgattcagaattgcttggaatgatgagggaggtctgttttagacagagagaaagagtgtgtgtgtatgagagagaaagaggcagaggcagat

SEQ ID NO: 152275 - DNA, 201 bp, Homo sapiens
tgactgttctcagtacctcatataattggaatcacacaatatttttccttttgtgtctagcttatttcacttagcaaaatatcttcaagtttcatcatgttgttatatgcatttattatgtcctctcagtgaactaggtaccatagaatgatagcttcatcctcagaacttataggccacaagaagcagaaagagcatgat

SEQ ID NO: 152276 - DNA, 201 bp, Homo sapiens
gactgttctcagtacctcatataattggaatcacacaatatttttccttttgtgtctagcttatttcacttagcaaaatatcttcaagtttcatcatgttgttatatgcatttattatgtcctctcagtgaactaggtaccatagaatgatagcttcatcctcagaacttataggccacaagaagcagaaagagcatgata

SEQ ID NO: 152277 - DNA, 201 bp, Homo sapiens
actgttctcagtacctcatataattggaatcacacaatatttttccttttgtgtctagcttatttcacttagcaaaatatcttcaagtttcatcatgttgttatatgcatttattatgtcctctcagtgaactaggtaccatagaatgatagcttcatcctcagaacttataggccacaagaagcagaaagagcatgatag

SEQ ID NO: 152278 - DNA, 201 bp, Homo sapiens
cgattgaaaggaaaatgttgtctgtttccctttggcctgcactgtactggaatgcctattaaggtaagatcgctaataggattggtttctactctttttasttggagcaaatagtaatacccaattcaagagcttaaaaggatttttaagtattgctgcattaaagtatgaaatgagttgaatttattatagtgaaaatta

SEQ ID NO: 152279 - DNA, 201 bp, Homo sapiens
  misc_feature (1)...(201): n = A,T,C or G
caccacgcctgacctagtatattatctttactcaagtattttagctcaaattaaacctctagtatttgttacaaggctatttaattcttaatagcaacctntcaatgtcttatttcttgtaaatctaaagtaattttcaattttagagagttttaaatttgtagatttataaatttacttttaaatattttttaaataacc

SEQ ID NO: 152280 - DNA, 201 bp, Homo sapiens
gattatatgagatttggaccaactcctaattttagaataatatatttcccctgtatgccactaaagaattagtactgttattgttagactagaacctaacrttgcctatgggtctcataacaatgaatacttcactatttgttgaattagaatgtatattgacatattaacaattagtagaaaggagctttattcaaagaa

SEQ ID NO: 152281 - DNA, 201 bp, Homo sapiens
tgaagaaggcaaattgcagaagtctatatgaagtatgccttttttttgtatgaaactcacaagtgagcgaaactaaatgataaatagtttaagggtgctgscaagtgtgcaaactattcaaaaacaagggaacggtaaaagcaaatttcagaatgtcggttatctcttgtgggacagtagagaggaaacaggtagtttcag

SEQ ID NO: 152282 - DNA, 201 bp, Homo sapiens
atattggtgtgctgcacccattaactcgtcatttacattaggtatatctcctaatgctatccctcccccctcctgacagtaatctttaaattgagaaacartgttattaatgttatccaaaatgataacacattatgtttcctacatctttatatatctaatatatatggtatatagtatactatattgaatattctgggt

SEQ ID NO: 152283 - DNA, 201 bp, Homo sapiens
tatctagtatctagtgaaaacaaatctcatttattcagtaaaatattaaattagcctaggttcataagggtattaaagaatttttttttttttgagatggrgtctcattttcgcccaggctggagtgcagtggcatgatctcagctcattgcaacctctgcctctcaggttcaatgatcaggcgattcttgattctcatgc

SEQ ID NO: 152284 - DNA, 201 bp, Homo sapiens
agcacacaattacagatggtatccttggtatgaaactataatcaagaaccgtaaaatagttatattgtctaatctcactgaaggtttttttgtttttcttyttttaaaagcctgactcaattatgaatgcttcatggcctgtggcaggtcctgttaatgaagttttaatacactcctcacagtatcttatggaagtaacac

SEQ ID NO: 152285 - DNA, 201 bp, Homo sapiens
tctttgtcatagtaattatgggcttttctgccagggtcccatttttgcttctactttacaacatggtcatggctgaatagctttaatcaggcaccaattartcccaactctataactcatttaggctgggtctttggtggttgtgctttctcctttcaaactgggagggaaatattagaaaagtaagagcaaacgatctca

SEQ ID NO: 152286 - DNA, 201 bp, Homo sapiens; identical to SEQ ID NO: 28317

SEQ ID NO: 152287 - DNA, 201 bp, Homo sapiens
tatggaacacttagatttttaaggtttttttaattgttttagacaaaaacagtgggaaaaatgacagtttgaaatgtcagtgctaatatataataatataycctgagaagttaagattggcctttatcttgcttgtctgttcaggctgaaatttaaacatccatggaaaatttctaattaagggagctgtataatttgggg

SEQ ID NO: 152288 - DNA, 201 bp, Homo sapiens
taaactggttatcatattaaactcatttttagcagcttatattcacttaagcattgcaccagatggtggctgtcaaaatgtttcttataattagcatcagyaaacttctctcgggcctttgaaattcattgcaaatcacatgttgtctataatcataagattggaaatgttattaatatcctgctcagtattttgctacag

SEQ ID NO: 152289 - DNA, 201 bp, Homo sapiens
cactggaaagagaaactcattagcataaaatgtcacttctggttacaggatttcctagtgaaggtgactaaattttgctcagggttcacgggatgccaagrtcagctaagccctcgaagagagcagcattctaaaccattttacaaccatcctactacaagccctgcaggcattgacacacaatccttagctaaacaaaac

SEQ ID NO: 152290 - DNA, 201 bp, Homo sapiens; identical to SEQ ID NO: 28318

SEQ ID NO: 152291 - DNA, 201 bp, Homo sapiens
gcctcaatctcctcaagtgtgaagtagggaacatcacacatttgttagaattaaataaggaaatgcctctcaaatttcttcattaatgttcccctaatggyagagaaagtgtaagtgtacctatagaaagttcaaatcttttttgaagacttttgtttcaccataagcttttaaatgaattctacattcaaatccacatta

SEQ ID NO: 152292 - DNA, 201 bp, Homo sapiens; identical to SEQ ID NO: 28319

SEQ ID NO: 152293 - DNA, 201 bp, Homo sapiens
attttccacttgtggcattcagggcgacagactttccatcccagaaccattggcccaatttttccgtaaccttgtggaaaagaccctggtgctggtgaacrctgctgtgacttactcaaagccttgattggccacattttggtactacgccaagtttgagctggttcctcccacccctgctgagatccctagagctattca

SEQ ID NO: 152294 - DNA, 201 bp, Homo sapiens
ccttatgttttaattacatgaaacaaagttttgactgccttttgactgtgagccatcacatgaggtcaagtgtagaattttccacttgtggcattcagggygacagactttccatcccagaaccattggcccaatttttccgtaaccttgtggaaaagaccctggtgctggtgaacgctgctgtgacttactcaaagcctt

SEQ ID NO: 152295 - DNA, 201 bp, Homo sapiens
gaaactgcacctcacgttgggcccttgtattagtcagggatctccagaaagacagaaccaataggatgcatataaattctatattagaggagatatgttawgggaattgactcagcaattatgaaggtccagaagtcccacagtctgacatctgcaactggagaccccggcatgatggttaatattaggtgtcacttgatt

SEQ ID NO: 152296 - DNA, 201 bp, Homo sapiens
aaacagtttccctctctttaaaagctttcactcaaataaggaaaacaaaaattgtgtcttcaaattatttatttgatttggtacaggaacaaggtaaatasataagaataaacagaaaaagatgatcataagcataaccaatgagaatagttgctaattcttaaaaagatctagatgtcaacattctaatatattgtacct

SEQ ID NO: 152297 - DNA, 201 bp, Homo sapiens
gaggcaggagaatggcgtgaacccgggaggcggagcttgcagtgagccgagatcgtgccactgtactccagtctgggcgacagagcgagactccatctcaaaaaaaaaaaaaaaaaaaaaaaaaaaaaaaattagccgggcgtggtggcaggcatctgtaatcccagctacccaagacgctgaggcaggagaatcacttga

SEQ ID NO: 152298 - DNA, 201 bp, Homo sapiens
tcccaggcaggaatatctagttggtcacaagggcatggaaaagggaatatctgtctcccattggccacctcatgaggaggcaggactgcctctctaacttkagattttactgaaacagtatgttaggcagccaaattgtaaatgtctgccataacagacaaaataatttagattttgggctgggtgtggtggctcacactt

SEQ ID NO: 152299 - DNA, 201 bp, Homo sapiens
aggcaggagaatggcgtgaacccgggaggcggagcttgcagtgagccgagatcgtgccactgtactccagtctgggcgacagagcgagactccatctcaaaaaaaaaaaaaaaaaaaaaaaaaaaaaaaattagccgggcgtggtggcaggcatctgtaatcccagctacccaagacgctgaggcaggagaatcacttgaa

SEQ ID NO: 152300 - DNA, 201 bp, Homo sapiens
ggcaggagaatggcgtgaacccgggaggcggagcttgcagtgagccgagatcgtgccactgtactccagtctgggcgacagagcgagactccatctcaaaaaaaaaaaaaaaaaaaaaaaaaaaaaaaattagccgggcgtggtggcaggcatctgtaatcccagctacccaagacgctgaggcaggagaatcacttgaac

SEQ ID NO: 152301 - DNA, 201 bp, Homo sapiens
gcaggagaatggcgtgaacccgggaggcggagcttgcagtgagccgagatcgtgccactgtactccagtctgggcgacagagcgagactccatctcaaaaaaaaaaaaaaaaaaaaaaaaaaaaaaaattagccgggcgtggtggcaggcatctgtaatcccagctacccaagacgctgaggcaggagaatcacttgaacc

SEQ ID NO: 152302 - DNA, 201 bp, Homo sapiens
tacttccagtggttcaggtctataaacatttattgaccatctacaagctctatgccaggcgttcagggtatatacagagatatacttagacccctgccctraaggtgcttatagtccagcttttctggtccacattatcccaggttggcgtctcagtcatttctaagtattggcactgtctataagcccctgaggaaatac

SEQ ID NO: 152303 - DNA, 201 bp, Homo sapiens; identical to SEQ ID NO: 28322

SEQ ID NO: 152304 - DNA, 201 bp, Homo sapiens
tccaaaatatcgcagaaagtggacggccccagttggaggcacatcttgaaacccgcgggggaggccatgtcggaagaaggtaaacaaaggcatcgcccctkccctccctccctccaacggcccaactgcagcctcccactcggttcgggccgcgtcacgcaattagccacagtgcccctcacctgctctgctgccccgccc

SEQ ID NO: 152305 - DNA, 201 bp, Homo sapiens
agccacctctaggatcaagtcaagacagtgaatttgtgtttttctgcattttaattgttgggatgtggccacacacagtggtaattggaacaatgcaactrccaccacgcaactgatactctcagcctgagtttcctaaaacaggccaggctgcgagggggaacagaacggaagccataaggaatcaaaccaggacacaaa

SEQ ID NO: 152306 - DNA, 201 bp, Homo sapiens
tttttggagaatttgttttaggaatgctgcaactttgtcagagtgctcagattttagtatatttccatcacctgacattgaactaaagccacttggctgamacctttgttgtgaccacccacaactgcacttacttgaggacctggtgcagaaagcactggtagccaggtgtgcacttgccataatctatctgcttttgcc

SEQ ID NO: 152307 - DNA, 201 bp, Homo sapiens
aaaaaatgttttaaaattgtccttttatgggctcattttcttagattgtaactcttatgcagtcattttctctttctttttttccttctttctctttttcttttttttttttttttttttgtggcagtctcagtctgtcttccaggctggagtgtagtggcgtgatcagggctcactgcaggtcacaacctcctgggctca

SEQ ID NO: 152308 - DNA, 201 bp, Homo sapiens
cacgcaattagccacagtgcccctcacctgctctgctgccccgccctccacgaccacctcttcgaaggaatcccccttcccccagcaaaggacccgtccgyggcgtgaaggctgctgggaagtgtggtccaagcgcggattagggcctgctcggagtcccaggagcccctcttgcagctgccggatcggcctgaaccttaa

SEQ ID NO: 152309 - DNA, 201 bp, Homo sapiens
ttagggccactctaattgtgaaggaatcatatatgacaagagtagaggcaggagcatttcatgaagaaggaatgttgcaggtacagaggccccaggtggamaaggtcttcacatgttggagggactgagaagtcagtgaatgagaggagtgttatgtgagctgggaaagaataagtagtcaggaggtagatcacgcagggt

SEQ ID NO: 152310 - DNA, 201 bp, Homo sapiens
gttttattatgccttttttgtcttcttcctctttacttttactttttcctctttgttctttccatctttctgtcttttctacatctgtatccacgtgaaatatatatatatatataaaatatttatataacatagatacataaagtatatctatattgtacttttagaaatgttgtcataggccgggtgcagtggctcacg

SEQ ID NO: 152311 - DNA, 201 bp, Homo sapiens
tggtgcacgcctgtaatcccaactacttgagaggctgaggcaggggaatcgcttgaactcaggaggtagaggttgcagtgagctgagatcgtgccactgcwctccagcctgggttccagagggagactccatctcaaaaataaataaataaataaataaaaataactaaaagagtaggaggtgccattaaagccatcaaaa

SEQ ID NO: 152312 - DNA, 201 bp, Homo sapiens
ctaaactgggcaacacagctagactctgtctcaaaaaaataaaatacaaatacaaaaattagccaggggtggtggtgcacgcctgtaatcccaactacttragaggctgaggcaggggaatcgcttgaactcaggaggtagaggttgcagtgagctgagatcgtgccactgcactccagcctgggttccagagggagactc

SEQ ID NO: 152313 - DNA, 201 bp, Homo sapiens
tcaaaaaacaaaaaaaaaggatcatgatgaacgtatagtattgcaatttgcttagtgagacattatagacatctttctatatcaataaggtatctatattrtcattttaatggctatataatgccgctctattctactgacatgtacaatttattttaccaaacccctattattgaatattgaagttatttctaatatatt

SEQ ID NO: 152314 - DNA, 201 bp, Homo sapiens
  misc_feature (1)...(201): n = A,T,C or G
tcactccctctcttctctctccgccccctcccccccagcaggatgaggtaatgggattgtgattatgacatcataggcggttcagttgcttgcgtttgccnggggggaggtgcggggaggtggggagaagtgcggtggttagactttccttaaacagaaagggaaggaggaaacaggcagatggggaaaagatgttgacgg

SEQ ID NO: 152315 - DNA, 201 bp, Homo sapiens
cgcaattttgtctcactgcacctccacctcctgggttcaagtgattctcctgcctcagcctcccgcgtagctgggattccaggcatgccccaccgtggccrgctaattttttttgtatttttagtagagacaaggtttcaccatgttggccaggctggtcttgaatatctgacctcaggtgatctgccctcctcagcctcc

SEQ ID NO: 152316 - DNA, 201 bp, Homo sapiens
aaggaggaaacaggcagatggggaaaagatgttgacggcgctatatttccacttcaggaagacaaaaccaccttttattaagtctccaccactaccaccayctcccacatgagccaaaatttaagtcttttttaaagagattgaatgtagacgttagtgtgtgaagaggttgggttgatggtttctggctcttatgtaaat

SEQ ID NO: 152317 - DNA, 201 bp, Homo sapiens
gcagaaatgctgtaccccataaacaataactccccatcttctcccccttccccagcccctagtaaccactattctattttctgccctctatgagtttgctytaggtacctcatataaatggaattttatcatccttttatctctggcatatatctcatagtgtaatgttttcattggtaatcagtgttgtagcatgtatca

SEQ ID NO: 152318 - DNA, 201 bp, Homo sapiens
tatctgagaaatcattgccagattcaatgtcatgtgcctcccccaaccccctcccctttttaaaagaaaatagtagggacagggtctcacccaggctggartatagtgatgcgatcacatagctcactgtaacttcaaactcctgccctcaagggatcctcccacctcagtgtccatagtagctagtactacaggcatgca

SEQ ID NO: 152319 - DNA, 201 bp, Homo sapiens
tcgtcatctataaaatggcctcccagtgcagcccaacactcctacccataattaaatctccttattccacttttagttcccaaggattttttactcatgtsctgctctttccctgctgccccctttttagtcttttgttcttgagccactgctttgaactgcatcttaattatgccctcatgggccaaaccccatctgtga

SEQ ID NO: 152320 - DNA, 201 bp, Homo sapiens; identical to SEQ ID NO: 28326

SEQ ID NO: 152321 - DNA, 201 bp, Homo sapiens
acatctcaaacccttctccacccaagttttgctgtcccttctctatcggtggaaaaatccctgcccccttccttttgggctgggttttgagccattagtgkgctcttccaggttaagtaccatgattcatacagcacaggacaagagtaaagtaatagcaacaatcagcctcagaaaaaagggggagggggtcgtggagaa

SEQ ID NO: 152322 - DNA, 201 bp, Homo sapiens
ccaggcagaagagatttcagatgaattaatggagttttccctgaaagatcaagaagcaaaggtaaagtgttctgtggtagtatctttgtattcttcatatkccttcattctgttaaaagaagaactagacaaattaaacttaggagagtttatttgagcaaaaaaataactagtgaatccagcaaccctcatagccagaac

SEQ ID NO: 152323 - DNA, 201 bp, Homo sapiens
caggcgttcagggtatatacagagatatacttagacccctgccctaaaggtgcttatagtccagcttttctggtccacattatcccaggttggcgtctcastcatttctaagtattggcactgtctataagcccctgaggaaatacttactaaaattcttcttctacagggagccttaaacttatatagtcaggaagaact

SEQ ID NO: 152324 - DNA, 201 bp, Homo sapiens
ggtagagacagccctgaatattcactaaacaagttaaaacttctcagtttaacaactggcacggggctcagcccttcacagagcagcaggccgctaggccytctcagcaaccccaccagacctaactctcagtccaggctttccctccaccagcagcccccaaaaataaagatcagacccccaccccatctcctattggat

SEQ ID NO: 152325 - DNA, 201 bp, Homo sapiens
ttgcgggatctttagggtgttgcttttctggccagaaacctttctgcccagtggtgcctttgcctgagttgttgtcctgcgtcgaggtaagcagacaagtrgagggttagcaagacgaagagaagctttattgagtgttagaacagctcagaggagacccacagggggcagctcctctctgtaggcagtttgtcttatccc

SEQ ID NO: 152326 - DNA, 201 bp, Homo sapiens
aggggtgtgccaccatgcccagcatatttatttctatttttgtagagagaggcgtcttgctatgttgcccagggtagtctcaaactcctggcctcaaacartcttcccatcttggcctcacaaagtgctgggattggcgtggtgtctcacacctgtaatcctagcactttgggaggctgaggcagacggatcacctgaggt

SEQ ID NO: 152327 - DNA, 201 bp, Homo sapiens
taacttagatatattccaacaccctcataaatcaagatataaaagacaatatttgacttccctttaaaataattctaccatttcacagtttgtatgtatgyatgtaaacttacatgtaattagctaagtatgttgcaattagctaagccagctggaatcatgaggagatagtgaaaatgtttgctaggaaaacaacctcat

SEQ ID NO: 152328 - DNA, 201 bp, Homo sapiens
gataggccatgaggccctgggcgcgcgcgcggagattggctgacgcagcttagaggcgagcggggataggttactgggctggcggaaggtttgaatggtcracgcctgcggctgttgatattcttgctcagaggccgtaactttggccttctgctcagggaagactctgagtccgacgttggcctacccagtcggaaggca

SEQ ID NO: 152329 - DNA, 201 bp, Homo sapiens
ctgtgatcccagctatttgggaggctgaggcaggagaatcgcttgaacccgggaggcggaggttgcagtgagccaagatcgtgccactgcacttgagctgsggggacagagcaagactccactgcaaaaaaaaaaaaaaaaaaaaaagaagaggatgacatgatctttgacttttaaggatataataatctaatgggaatt

SEQ ID NO: 152330 - DNA, 201 bp, Homo sapiens
tttcccctgccttctcaggggaaaattgaagttatatgaagtcctgtctgtcatggagaccaggcaccctactcctcagtgcctcaccatatctcctttcytaccctacctttggttgatccattcatgcatcactggcttcgtggccttgactgtatctcttggcttcttccttttgggctttggcttctgctactgcct

SEQ ID NO: 152331 - DNA, 201 bp, Homo sapiens
aaaaaaaagaagaggatgacatgatctttgacttttaaggatataataatctaatgggaatttcgatgtactattatgtctcaacagaggaaccccaaaaygttgcctcgatctttcgaatcttagcagtggggagataactgccactcagcttaccacttctgcagaccttgatgaaactggtagggagaagggagataa

SEQ ID NO: 152332 - DNA, 201 bp, Homo sapiens
  misc_feature (1)...(201): n = A,T,C or G
aatgtgtagttcatctgcaaataaagaaaatgtgagtgtttaatggaaacctagatatattggcagttttattttttgagtgaagaaacttggtatcatantgagacatagaactgtttatacctcgtatgctagacaaggaaactgtattactataggggagaaaatttctttgtttttgttttttcttattaaagtttg

SEQ ID NO: 152333 - DNA, 201 bp, Homo sapiens
cttattccgaggaggccatggtactttttatctaaaccttaggccatccgtcgttccaagttaaatctagcctctccggagccacctcatcactaagatarttctgtatctaatccctcatctaagccccttttctagacatcgttttttcttccctgcctcccatccctttccccaaatcattaccataaaagatagctg

SEQ ID NO: 152334 - DNA, 201 bp, Homo sapiens
agggacggttgaggtgcccgccccgaggccccagcgccacctgccctccaccacctaccgcggttcctccagctcccagggccgcggccggagcagctctsagcgctcggttcgccccacggtgcccttaaaaggcgctggcgcgaaccaacgagtccctgaggagagtagggggacagctccggctcgcagaatcccccc

SEQ ID NO: 152335 - DNA, 201 bp, Homo sapiens
caggctggagtgcagtggtgcaatcttgactcactgcaacctttatctcccaggttcaggtgattcttatgccttaacctccctagtagctgggattacaracatgtgctaccatgcctggtgaatttttttgtatttttagtagagacggagtttcaccatgttggccaggctggtcttaaactcctggcctcatgtgat

SEQ ID NO: 152336 - DNA, 201 bp, Homo sapiens
tgattatgacatcataggcggttcagttgcttgcgtttgcctggggggaggtgcggggaggtggggagaagtgcggtggttagactttccttaaacagaargggaaggaggaaacaggcagatggggaaaagatgttgacggcgctatatttccacttcaggaagacaaaaccaccttttattaagtctccaccactacca

SEQ ID NO: 152337 - DNA, 201 bp, Homo sapiens
cttttatggacctcagaggggagaaagtgcttcctgattggttcatggactgtgagaaaaggcagcacaaatccccatccagtgggtgggactagcagccyggtccccagcctttaagccctccccgtcctgaaggtggggacttacaggaacctcccttctacccaggagcctgtctgtctctctcagcagtccatggca

SEQ ID NO: 152338 - DNA, 201 bp, Homo sapiens
ggatcccaggaatgcagggctcttctccactgcctgatctgggcatcccaggagtgatggctgtacctcctgttcttgtttggtgtttcagggtgaagccygggctgtcactgtgccctggcaacaacatgtatgagtcagactgaggtcaaggtgaaggaacacagctcactgcttatcacagtgaatcaggagcctaga

SEQ ID NO: 152339 - DNA, 201 bp, Homo sapiens
atccacagagaatacattctgagaccccccagtggatgcctaaaattgcagacagtactgaaccctatatataccatgcttttccctatgcatatgtacckgtgatggagttttttacttaggcatagtaagagattaacaataataactaataataaaatagaacaattacaacaacatactataataaaaattatagga

SEQ ID NO: 152340 - DNA, 201 bp, Homo sapiens
agtagaatcgcttgaacttaaacccaggtggcagaggctgcagtgagccgagatcgcaccgctgtactccagcctgggcaacagagtgagactctaactcaaaaaaaaaaaaaaaaaaaagtgctggctgggcatggtgagtcaggcctgtaatcccagcactttaggaggttgagatgggcagatcacctgaagccagga

SEQ ID NO: 152341 - DNA, 201 bp, Homo sapiens; identical to SEQ ID NO: 28325

SEQ ID NO: 152342 - DNA, 201 bp, Homo sapiens
cctccaccagcagcccccaaaaataaagatcagacccccaccccatctcctattggatggcagtaacccctgacactcctgtttcagggatgctgaggttrtgctgtaccaagacaaggtaggatcaggtcaggccaacagggaggagagtcacaaaccctttggggaccttcccctcaggtcccagccccacacctcctg

SEQ ID NO: 152343 - DNA, 201 bp, Homo sapiens
ctaaaaatacacaaattagctgggcatggtggtatgcacctgtaatctcagctacttgggaggctgaggcaggagaattgcttgaacccgggaggtggagkttgcagggagccgagattgcgccactgcactcctgcctgggtgacagagtgagaccctgtctcaaaatataataataataataataataaacggaaataa

SEQ ID NO: 152344 - DNA, 201 bp, Homo sapiens
gtctgatttgttttgtgaagaccactcttgttgatggatggggaacagattagaaaggattaagagttggaagtcaacgggtggtttggctttcacctgtaatcctgtcaatttgagaggctgaggcaggagagttgcttgagctcagtagtttgagaccagtctaggcaacatagcaaaacctcatcactactaaaaata

SEQ ID NO: 152345 - DNA, 201 bp, Homo sapiens
tcagctgcttcccctatattcttacgggagaagctaaagcttatatcacttctgctcttggtttcttaactctgctgccctcaaagatcaaccagagaggraacctaagtgcaggattttaccctagagaccccaggcctcaggctaaccagctatgaggagcagggaatgaagcaaactctccagcttttcatgaggcat

SEQ ID NO: 152346 - DNA, 201 bp, Homo sapiens
gctgggggaggggaaagagggaaggagggagggacggttgaggtgcccgccccgaggccccagcgccacctgccctccaccacctaccgcggttcctccarctcccagggccgcggccggagcagctctgagcgctcggttcgccccacggtgcccttaaaaggcgctggcgcgaaccaacgagtccctgaggagagtagg

SEQ ID NO: 152347 - DNA, 201 bp, Homo sapiens
tgagtccgacgttggcctacccagtcggaaggcagagctgcaatctagttaactacctcctttcccctagatttcctttcattctgctcaagtcttcgcckgtgtccgatccctatctactttctctcctcttgtaggcaagcctcagactccaggcttgaggtaagtccgcagccgtctccgccacggaatcacggagac

SEQ ID NO: 152348 - DNA, 201 bp, Homo sapiens
gctggagtgcagtggtgcaatcttgactcactgcaacctttatctcccaggttcaggtgattcttatgccttaacctccctagtagctgggattacagacrtgtgctaccatgcctggtgaatttttttgtatttttagtagagacggagtttcaccatgttggccaggctggtcttaaactcctggcctcatgtgatctg

SEQ ID NO: 152349 - DNA, 201 bp, Homo sapiens
ggtgtgagccactgcgtccagcctatattttcatttagcgtaatgtcttcaaagttcatctatgtcatagcatgtattagaatttcatttcttttgtatgyatatatcatattttgtttatccattcatctgttgatggacattttgagttgtttccaaccttttggccattgtgagtaatgccgttatgaacataggtgt

SEQ ID NO: 152350 - DNA, 201 bp, Homo sapiens
catcaaatataagacttgcaaatgttttctcccattttgtgggttgccttttcattcccttaatggtgttctttgatgcacaaaagttttccattttgatraagaccaatttatctgtttttttctttcgttacctgtgcttttggtggcattatccaaatccagtgtcatgaattttttcccttatcttttcttctaaga

SEQ ID NO: 152351 - DNA, 201 bp, Homo sapiens
aattaatagtacttaactattattgtgtagtgtaagtgcttaattattgtagtatacgactaaactatgtggagttatgaagaaggctgataggtgagggkatgctcaatggccttgatgtcctccgcaaagtaaacattgaagtaatctgatgattcagaggagagtgcgaggcgagagtcttaaaagtgtgtgaagaag

SEQ ID NO: 152352 - DNA, 201 bp, Homo sapiens
gattctcctgcctcagcctctcgagtagctgggattacaggtgtgcaccaccacacccgggtaatttttagtatttttagtagagacagggtttcaccatrttggccaggctggtcttaaactcctggcctcaggtgatctacccacctcaggcttccaaagtgctgggattgcaagcgtgagccaccatgcccagccaac

SEQ ID NO: 152353 - DNA, 201 bp, Homo sapiens
gagggctccagggcctggagccagtcatccaggaggtcatccaaaggagtggaatccattggttctaagactcttcattccctgcctaggaaggaacagcygagttggaggaacatgcactcgattcagaccttcccttttcacccagtgaaagctaaacctctgcaaagtggggagaagtagggctaagcctaccagtca

SEQ ID NO: 152354 - DNA, 201 bp, Homo sapiens
tccctccaacggcccaactgcagcctcccactcggttcgggccgcgtcacgcaattagccacagtgcccctcacctgctctgctgccccgccctccacgaycacctcttcgaaggaatcccccttcccccagcaaaggacccgtccgcggcgtgaaggctgctgggaagtgtggtccaagcgcggattagggcctgctcgg

SEQ ID NO: 152355 - DNA, 201 bp, Homo sapiens
ctgcagtgaaccacgatcacaccactgctctccagcctgggcaacagagcaagaccctgtctcaaaaaaattaaaaaagtaaaaagatacatagatatatmtattttggatagagaatcaacaggacttgaagggttgggtgcaggctgtgaaggaaggatgagatcaaggatgactttagtcatatgcagtttgaagtgt

SEQ ID NO: 152356 - DNA, 201 bp, Homo sapiens
tagctgtgatcagctggaaagtagagccagtggcgggggtcgtcctcactgagccagggaggggaggaggcaggagccaccaagtctacaaactgaaaaasagtagaggaaaaatgaggtacagtactaactgagaaaataggggtggaaagatttaccttgcactgcttatttccccttggcaaaaggagcagagttagg

SEQ ID NO: 152357 - DNA, 201 bp, Homo sapiens
ttttgcactctaatctttggatactttgagttcaatttgatcttcatgtttagttaaggttgaagctaaggtcattgatttgagacctttttaaataaggrtatttagtactttagctgcatctcacaaattttgatatgttgcattttcagttttattcagttcaaaatactttccaatttccttttttggtttcttttt

SEQ ID NO: 152358 - DNA, 201 bp, Homo sapiens
ctacttgggatactgaggcaggagaaacgcttgaacccaggaggcagaggttgcagtgagctgagatagcaccactgcactccagcctgggtgacagagcragactccatctgaaaaaaaaaaaaaaaaatttttttttttttttgtgtacctctatgttcatgagagatattgatcttcagtgttttagcttttcatgtt

SEQ ID NO: 152359 - DNA, 201 bp, Homo sapiens
aggtggagatctgcctgctcttcttccatatggttctggtggggaaaggggtgacaagtggggaacacccctccccccacccccatgaagaagcaaaaggstaggcccctccaatcttcaacctctccctctgttgccctgcctgtccccgcggggtggggcatggggcgtccgctggtccccggggcgggggggggggtg

SEQ ID NO: 152360 - DNA, 201 bp, Homo sapiens
gaatgagttaattacacataaaacatgtagagcaatacttatcaattaatagtacttaactattattgtgtagtgtaagtgcttaattattgtagtatacractaaactatgtggagttatgaagaaggctgataggtgaggggatgctcaatggccttgatgtcctccgcaaagtaaacattgaagtaatctgatgattc

SEQ ID NO: 152361 - DNA, 201 bp, Homo sapiens
aagcagtgacctccttggagattgtcgtaaccttagtgatttttcattcatttctttacttaaaaaatatttattgagtacttgctacatgttgggaagtrtgctaggcactggtgatacgatggtgaacaaaacagactagaatttatattcttgtcagggatgcatcaaaacaacaaaaatttttttcaagttaataga

SEQ ID NO: 152362 - DNA, 201 bp, Homo sapiens
  misc_feature (1)...(201): n = A,T,C or G
gaggtcatccaaaggagtggaatccattggttctaagactcttcattccctgcctaggaaggaacagccgagttggaggaacatgcactcgattcagaccntcccttttcacccagtgaaagctaaacctctgcaaagtggggagaagtagggctaagcctaccagtcataaaaagaaccaggaatagaaaacacacccct

SEQ ID NO: 152363 - DNA, 201 bp, Homo sapiens
cagtgacctccttggagattgtcgtaaccttagtgatttttcattcatttctttacttaaaaaatatttattgagtacttgctacatgttgggaagtgtgmtaggcactggtgatacgatggtgaacaaaacagactagaatttatattcttgtcagggatgcatcaaaacaacaaaaatttttttcaagttaatagatat

SEQ ID NO: 152364 - DNA, 201 bp, Homo sapiens
gtgggtggattacctcaggtcaggagtttgagaccagcctggccaacacagcgaaaccctgtctcaactaaaaatacaaaaattagccaggtgtggtggcrcatgcctgtaatcccagctactcaggaggctgaggcaagagaatcacttgaacagaggttgcagtgagctgagattgcgccattgcactccagcctaggc

SEQ ID NO: 152365 - DNA, 201 bp, Homo sapiens
ctctttccagctaagcctaaacacagcttcagaaattatgaacttggcagtccagatatgaaataaaatagagttggcaatcaagttgaaacttatttgcyacccttaaactggttcatgctctgttgtttctaactggaataccagcaccacttagaaaacagctgctcaagtgagagagagggatgcccaaatgattat

SEQ ID NO: 152366 - DNA, 201 bp, Homo sapiens
aacagtagagatagggtttctccatattggccaggctggtctcaaactctgggcctcaggtgatccacctgccttggcctcccaaagtacaggcttgagcyattgcacccggccttcttgaacgtttttatccgttatctggtatttcttctggggcctttgttgttaaattttgtttccctgaagcctcccctcctcctc

SEQ ID NO: 152367 - DNA, 201 bp, Homo sapiens
aaactgaggctcagcaggaccccttgggtcctcagcctccacgctcctggacctgcccaggccccggcagagagaccgctgctgtgtctgctgcagggccrctgcccgtgagtgacccctctctcctttctgtctcagggcacagcgtggatcctggcctggccggcctgctgggtcaacgggccccacgctcccaacagc

SEQ ID NO: 152368 - DNA, 201 bp, Homo sapiens
gtgagtttgtgattggaagacatgctatcttcacgagcttgttttttctttttccttctctttcttttttcttttttttgaggcagggtctggctctgtcrctcaggctggaatgcaatggaatgcagtgatctcactgcaacctctgcctcctgggctcaagcaatcctaactcagcctcctgagtagctgggactacag

SEQ ID NO: 152369 - DNA, 201 bp, Homo sapiens
tttttttgaggcagggtctggctctgtcgctcaggctggaatgcaatggaatgcagtgatctcactgcaacctctgcctcctgggctcaagcaatcctaaytcagcctcctgagtagctgggactacaggcgcacatcacaatgcctgcttatttttttttattttttaaatttatttatagaaatggagtttcaccatgt

SEQ ID NO: 152370 - DNA, 201 bp, Homo sapiens
agaatatggtgagaaagggttttttttttgttcagttttttgttttttttaaaaccatgaaaatgaagactgaatcaaccaactaagctgtcagcattgcygcagggtaactgagacctccctgcattggctacgactgcagctctgggaggcgtgggcaggggagggccggctggggaggggacgcaaagtgaagatatg

SEQ ID NO: 152371 - DNA, 201 bp, Homo sapiens
ctgggacctccaacatccagagacctcacaaggaggggccacagagagcccacagagaccagccagggagggagcaggacacctggaggatgaggtgatcyagacgccagagtaaagtgtttccagaagcaagggtttgtcatttgtgtcctgctgtgggcactgaaggcaagaacagagaagtgaccaagggttttgcca

SEQ ID NO: 152372 - DNA, 201 bp, Homo sapiens
gtgtgtgtgtgcgcatgcacgcgtgcacacgtgctgttgacagccaagcctggcctggtgcatgcactgcataagtgtagctctgggggttcccaggccaytgggggcatgtggtcagagtagtaagttctcactggtcaaggacagactttccaggggcccattggagcctcaccctgcaggaaaggccagatcctggga

SEQ ID NO: 152373 - DNA, 201 bp, Homo sapiens
tggtcagagtagtaagttctcactggtcaaggacagactttccaggggcccattggagcctcaccctgcaggaaaggccagatcctgggaaggagagcagrgcagggagagttggcgctcatggagggcacagactgggggtgtggaaaaggggccagggactatggctggggttgggggcttgaaatgaaatgtcatcta

SEQ ID NO: 152374 - DNA, 201 bp, Homo sapiens
gtgtgtggaaaaagtatcttgtttattgttgtattgcccagaacagtgttgtacacacagtaagaactgaataaatttatttctaaattaaacatgatgawcttattagatgagtgaaagaatacatttatttagaaaaacttaattcaaagtattatttctgaccaaaaagtaagacttcaaaagacacccttgggtgct

SEQ ID NO: 152375 - DNA, 201 bp, Homo sapiens
tgctgcaaacctactgtgtgctgttcctcttcctgtttatcttgggggctaataaaagtatagccccagcccaacccaaagtctgctcatttactgagaargagaagcccaaagacaactcaatataaatgatccccaaatggaagaaatgtccattcacccacctggcaaacatgggtgtgagggttcaacagttcagaa

SEQ ID NO: 152376 - DNA, 201 bp, Homo sapiens
tctgaacccagacccactgttagtccccttcaccaccccccatcttgcccagccacatccagctgggccctgcagtttgctggaaaagtatatgacaatcytggctccgacccaccttgctctgggaccttggacagttgctgctctctctgggccttagtttctgcttctgtaaaatgggaacctgggattagctgcttc

SEQ ID NO: 152377 - DNA, 201 bp, Homo sapiens
gtaattatgagagcagcaccatttatggaaacagcccttgaagcaagccagtgatgagacccggctggaaatacctcagcatggagccctgggctcgcctygaggcggtgctgagatttctgggtgggagaagccccttcaggacgcagaaccaacaggtcatgagtcccgccctcccttggcctgcagaggctgtggggc

SEQ ID NO: 152378 - DNA, 201 bp, Homo sapiens
ccgcctgcagctcactgagcaccccctcccacctcctccaaatctgtccccaggagagacgtggactggctggggctggaccaaggactccaggcttcagwtgtggaaactgaggctcagcaggaccccttgggtcctcagcctccacgctcctggacctgcccaggccccggcagagagaccgctgctgtgtctgctgca

SEQ ID NO: 152379 - DNA, 201 bp, Homo sapiens
aaacatatcattgaaatctcagtgctgggttttggggaaggcactgggcggctcccacccctgctttctggaaacacagatttctagagtttgaaacggaygggaggctaaagtgagactgccctaaatatagcgtcctgggtattttcggacacctggggaaatgtgggctttattccgcaactacagcctttgtttgat

SEQ ID NO: 152380 - DNA, 201 bp, Homo sapiens
gcgtggggttgcttccgaagtttgctttatccaaggctggaggaggaggctgagggtttccatcagcacaggttggtgattcatgattgtttattttcccrggagccacattaaggtggtttagaaagcaaattcatttgctgcttccccagacagaagctggttcagcgtgagaccatttggggcagcttttatgatttt

SEQ ID NO: 152381 - DNA, 201 bp, Homo sapiens
tatccaaggctggaggaggaggctgagggtttccatcagcacaggttggtgattcatgattgtttattttcccaggagccacattaaggtggtttagaaarcaaattcatttgctgcttccccagacagaagctggttcagcgtgagaccatttggggcagcttttatgattttgtagaaaataaatatttagaggtgctt

SEQ ID NO: 152382 - DNA, 201 bp, Homo sapiens
ccacgagctgtctcggtgataagtttgacattcacaccccagaaagtgcgggacggaagacagaacacaggtctcggggtccttggaccaaggtgggagcrctggttctcggagtcactggcagtaggactctgggtctcctgtgaagtaggagctgcagggtcactgtaaggacccaatgaggtgatccatgggaaaaat

SEQ ID NO: 152383 - DNA, 201 bp, Homo sapiens
tcttattagatgagtgaaagaatacatttatttagaaaaacttaattcaaagtattatttctgaccaaaaagtaagacttcaaaagacacccttgggtgckgtgggacaaggcacgttctttccttctccgccctgggctgggatgagcggccacctcctcctgcccacacacgtctggccccatcccctgccccgcacag

SEQ ID NO: 152384 - DNA, 201 bp, Homo sapiens
tctgttctctctccgttgtgacctcacttgtcttttcctctgtgccccagctctgttccttgtatttctgctgcttccccataaccttgactcaccgtgamtcaagccctgcccagtggattctctctgggcctccttcccatgttagcatctgcagctcacagcctccctgtctcagcagctcttgtccatgctcgtgag

SEQ ID NO: 152385 - DNA, 201 bp, Homo sapiens
tccatgttccgctgaggccccattagaccccaagtgcagaagtggcgaggggagcaggatccacaagtctggagttcagaagagaggtccaagctgagccwggggagtggagaggtgcgggcacgtgcagggccttgaagtgctgagggcggatgcagtcctctgggggaaggagcagcacaggagaggggcggaggcctg

SEQ ID NO: 152386 - DNA, 201 bp, Homo sapiens; identical to SEQ ID NO: 28344

SEQ ID NO: 152387 - DNA, 201 bp, Homo sapiens
aagtattatttctgaccaaaaagtaagacttcaaaagacacccttgggtgctgtgggacaaggcacgttctttccttctccgccctgggctgggatgagcrgccacctcctcctgcccacacacgtctggccccatcccctgccccgcacagctgttcgcctgcccatggccggaccaggtccccaccacgaggacaggaa

SEQ ID NO: 152388 - DNA, 201 bp, Homo sapiens
ctgttctctctccgttgtgacctcacttgtcttttcctctgtgccccagctctgttccttgtatttctgctgcttccccataaccttgactcaccgtgacycaagccctgcccagtggattctctctgggcctccttcccatgttagcatctgcagctcacagcctccctgtctcagcagctcttgtccatgctcgtgaga

SEQ ID NO: 152389 - DNA, 201 bp, Homo sapiens
gttttattccaagtaacccaagaggctgtcggagctctttagcaaagcagtgttctggtccatgtcaccctccagaaggacctctctctggctgctggggraggctgggattgggggtgggggtggtggtggaaggtggaggagcaggggatgagtgaaggctgctgtggtcacctgacaggtgatggcagctggacgggg

SEQ ID NO: 152390 - DNA, 201 bp, Homo sapiens
gtccccaccacgaggacaggaagtgctccccacatccgcctcggcccgcacagcctggtgcttttacaaacctgaccgtggtcactgagcccagtaaccasagagaatttttaaaaagactcacaaacatatcattgaaatctcagtgctgggttttggggaaggcactgggcggctcccacccctgctttctggaaacac

SEQ ID NO: 152391 - DNA, 201 bp, Homo sapiens
tgtggcaggagagggtgggctggagtcacaggggtctccagagaggaggaggcacaggatggccgagggtcctgctgggctgtttactggagcataaagaygctcataggctgaaggacaggggaggactgggcacagtgtcactctagccattgggagccatggcaggcttctgagctgggtcatggtacaagcagagtt

SEQ ID NO: 152392 - DNA, 201 bp, Homo sapiens
agtaaccacagagaatttttaaaaagactcacaaacatatcattgaaatctcagtgctgggttttggggaaggcactgggcggctcccacccctgctttcyggaaacacagatttctagagtttgaaacggatgggaggctaaagtgagactgccctaaatatagcgtcctgggtattttcggacacctggggaaatgtgg

SEQ ID NO: 152393 - DNA, 201 bp, Homo sapiens
ggtctttctcaggagcctccttcagaatcagctgccccttccctgggagccgcagcccctcatgacctgcggttgtgcctgggcaccctgtgggatcctcrgttgcttatgcgagttttctccccaactgggccaagcccttcaggatcagggacaggcctgacccaaccccgtgccctccttcccagggagtcggccctt

SEQ ID NO: 152394 - DNA, 201 bp, Homo sapiens
tcacaaacatatcattgaaatctcagtgctgggttttggggaaggcactgggcggctcccacccctgctttctggaaacacagatttctagagtttgaaasggatgggaggctaaagtgagactgccctaaatatagcgtcctgggtattttcggacacctggggaaatgtgggctttattccgcaactacagcctttgtt

SEQ ID NO: 152395 - DNA, 201 bp, Homo sapiens
gagctctacgtcagcttccaggacctcggctggctggtaattgctgactctccttgtttctgaaatgacaatcaccacctgtagatcagaagtgaatctgyagggaggacatagaatcatggtgacttcaattttcttatgtatttttttcttctgtgttttccaagttttctaaagtgagaatatggtgagaaagggttt

SEQ ID NO: 152396 - DNA, 201 bp, Homo sapiens
cccgctcccaggccccgcccccgcccccccattggtcagtcccggggtgggggcgggcgacgcggaccgctgggcagggcagggcagggactcgcgggaaycgcaccaagcgggtggctgcaggagctcgcccatcgcccctgcgctgctcggaccgcggccacagccggactggcgggtacggcggcgacagacggattg

SEQ ID NO: 152397 - DNA, 201 bp, Homo sapiens
ggtgacccccatcccaatatgtcccattgaactccagggccactcatttcacactggccccaagtgtgaacatccacatcacaggcctctaatctgacacrggcctctaatctaaccctggaaaccctctgtccctccttggcctcagtttccccatctctgcagggttgcctgaaggcctttccaggtctgaccaaagaa

SEQ ID NO: 152398 - DNA, 201 bp, Homo sapiens
ccgcacagctgttcgcctgcccatggccggaccaggtccccaccacgaggacaggaagtgctccccacatccgcctcggcccgcacagcctggtgcttttmcaaacctgaccgtggtcactgagcccagtaaccacagagaatttttaaaaagactcacaaacatatcattgaaatctcagtgctgggttttggggaaggc

SEQ ID NO: 152399 - DNA, 201 bp, Homo sapiens
gcggctcccacccctgctttctggaaacacagatttctagagtttgaaacggatgggaggctaaagtgagactgccctaaatatagcgtcctgggtatttycggacacctggggaaatgtgggctttattccgcaactacagcctttgtttgattggcaggccagcccctgccacggggccctgctgcccatctcacttcc

SEQ ID NO: 152400 - DNA, 201 bp, Homo sapiens
ctcctgccctctgctgtttcctggtgcttgctttccctgccctgccctcagacccctctgctctggccctctgccttggctggccggcccctgcagggccygtctccctgacaccatggcagattcgcactcatgcctcagcccagctcagctgtcagccctgagccctcccctgccgcacctcccatccaggcagtgggc

SEQ ID NO: 152401 - DNA, 201 bp, Homo sapiens
tgggactacaggcgcacatcacaatgcctgcttatttttttttattttttaaatttatttatagaaatggagtttcaccatgttgcccaggctggtcttgracacttgagctcaagcgatccacttgcctcagcctcccaaagtgctgggattacagacatgagccactgagttgggccaattaaccttagcttactgtaa

SEQ ID NO: 152402 - DNA, 201 bp, Homo sapiens
atattggccaggctggtctcaaactctgggcctcaggtgatccacctgccttggcctcccaaagtacaggcttgagccattgcacccggccttcttgaacrtttttatccgttatctggtatttcttctggggcctttgttgttaaattttgtttccctgaagcctcccctcctcctcccacatctctcctcctgggacct

SEQ ID NO: 152403 - DNA, 201 bp, Homo sapiens
ggcccgtctccctgacaccatggcagattcgcactcatgcctcagcccagctcagctgtcagccctgagccctcccctgccgcacctcccatccaggcagygggcaggctctggatgccttgtgtcccctgagatgccgtcagttatgtcggttatgttcctgtctaccaggtttccctgcagggctggggcccttttctg

SEQ ID NO: 152404 - DNA, 201 bp, Homo sapiens
ccatggcagattcgcactcatgcctcagcccagctcagctgtcagccctgagccctcccctgccgcacctcccatccaggcagtgggcaggctctggatgscttgtgtcccctgagatgccgtcagttatgtcggttatgttcctgtctaccaggtttccctgcagggctggggcccttttctgccttgggtccaatgtcc

SEQ ID NO: 152405 - DNA, 201 bp, Homo sapiens
tctgtgcttataacatggaggtgaaatgtactttcgtgtaaactgaacaactggcactgtttaaagagacatgaaaatgagctggtaatcatgcttctgcmattcagtatcaggaaatttcacccatgcacggagtgaagaggctccattgcactcccatctttatcatgaaagccgggaaataacctacatgtctatgat

SEQ ID NO: 152406 - DNA, 201 bp, Homo sapiens
atttatagaaatggagtttcaccatgttgcccaggctggtcttgaacacttgagctcaagcgatccacttgcctcagcctcccaaagtgctgggattacasacatgagccactgagttgggccaattaaccttagcttactgtaatttttttttcttttttagacagaatctcactctgttatctaggctagagtacagtg

SEQ ID NO: 152407 - DNA, 201 bp, Homo sapiens
aggctctgggctctggaaggagagggctggggatgggggagcttctccaggcctgccagatgcagggctctgaacccagacccactgttagtccccttcaycaccccccatcttgcccagccacatccagctgggccctgcagtttgctggaaaagtatatgacaatcctggctccgacccaccttgctctgggaccttgg

SEQ ID NO: 152408 - DNA, 201 bp, Homo sapiens
ctgggctgtttactggagcataaagacgctcataggctgaaggacaggggaggactgggcacagtgtcactctagccattgggagccatggcaggcttctragctgggtcatggtacaagcagagttccagggatgggctttatgagaccaaatggtttcctgtcattcatttatttgacaaatgtgctcatcagggcatc

SEQ ID NO: 152409 - DNA, 201 bp, Homo sapiens
gtgcaaatcagttaacttctgggatctttagtgctctcatctataacctgggatgaataatgtcccccacagtgttgtcatggtgccgccttcaccatggscctcgatggtcccacttcctgagatgcacagagttctgtgtcccctccaacactgtgccagtgctggtctgtgtgaccaatagaatatgacactagtggt

SEQ ID NO: 152410 - DNA, 201 bp, Homo sapiens
tgggtgagtgcggccgcccgcgcggggaccctcggagtaagctggctgcaggggaggggcgcgcatccgcgggctgtgccgggccctggccgaacggggartcacagacggtggacgcgaaccacaggggagtgggaccgccgtggttagggaaggtctaagggtcatgggggccccctgggctgcggggtggtcaggagc

SEQ ID NO: 152411 - DNA, 201 bp, Homo sapiens
agacgctcataggctgaaggacaggggaggactgggcacagtgtcactctagccattgggagccatggcaggcttctgagctgggtcatggtacaagcagmgttccagggatgggctttatgagaccaaatggtttcctgtcattcatttatttgacaaatgtgctcatcagggcatcccccaccctggtaccccatagta

SEQ ID NO: 152412 - DNA, 201 bp, Homo sapiens
caaaagttggtgatttcctttaactgctggctctatcttgagtagcagccgttccttctgaacagtcctggaccctgcacacatcagggttctggggaagytgatggctgcaagacctgggtgtggagaaagttgactcattcagggctttaagagcagtctatgaacactccttagcaagcactgctgcaaacctactgt

SEQ ID NO: 152413 - DNA, 201 bp, Homo sapiens; identical to SEQ ID NO: 28352

SEQ ID NO: 152414 - DNA, 201 bp, Homo sapiens
gggctttatgagaccaaatggtttcctgtcattcatttatttgacaaatgtgctcatcagggcatcccccaccctggtaccccatagtagctgcacacagyaggaaccccagaaaagaccttgccccttctgtccctgcagatgacgtccacggctcccacggccggcaggtctgccgtcggcacgagctctacgtcagct

SEQ ID NO: 152415 - DNA, 201 bp, Homo sapiens
agacccatcccacccttcaaagccagttcagatgccacctgctcagatcccatcacccagtgagaccctccgacttccccagcacctgactggcctctctrggagttgtcactcctgccctggtttttcttgttcctttccacgtttccctccttcctcttccagcttgttccagaaaggaaacgtgggtctcctgccctc

SEQ ID NO: 152416 - DNA, 201 bp, Homo sapiens
tcagcctcccaaagtgctgggattacagacatgagccactgagttgggccaattaaccttagcttactgtaatttttttttcttttttagacagaatctcrctctgttatctaggctagagtacagtggtccagtctcagctcactgcaacccctgcttcctgggttcaagcaattctcatgtctcagcctctcaagtagc

SEQ ID NO: 152417 - DNA, 201 bp, Homo sapiens; identical to SEQ ID NO: 28373

SEQ ID NO: 152418 - DNA, 201 bp, Homo sapiens
cttgtgtgatggtccgttgtaacccaagaggctgcgaggcatttcctcctgaatctatagtctcaaaaactaaaattaagattgtgtgtgtgtgtgtgtgygcatgcacgcgtgcacacgtgctgttgacagccaagcctggcctggtgcatgcactgcataagtgtagctctgggggttcccaggccattgggggcatgt

SEQ ID NO: 152419 - DNA, 201 bp, Homo sapiens
aggtggtttagaaagcaaattcatttgctgcttccccagacagaagctggttcagcgtgagaccatttggggcagcttttatgattttgtagaaaataaayatttagaggtgcttatggaaccaggtatagcttggtctgtttcctgtgaccaacgaattgctctctgcatatgtcttttcatatttttgccaatacatct

SEQ ID NO: 152420 - DNA, 201 bp, Homo sapiens
gccctggcatgggggccgggagaggctgaaagcctgacctgcctggggtctgaggactgggagccttctcagtcggactgagagggacggggccacccggsgagagcagcttccaggagggactctgcgggaggcgtctgcaggtagaaggcacaagaggccggagggacagatggcagggccagcgaagggagggccctg

SEQ ID NO: 152421 - DNA, 201 bp, Homo sapiens
gcctcagcccagctcagctgtcagccctgagccctcccctgccgcacctcccatccaggcagtgggcaggctctggatgccttgtgtcccctgagatgccrtcagttatgtcggttatgttcctgtctaccaggtttccctgcagggctggggcccttttctgccttgggtccaatgtccatcttccctttagcctggaag

SEQ ID NO: 152422 - DNA, 201 bp, Homo sapiens
ggttgttcagtcaagtggccaagggacaccagggctgaggcacagctgcttaagggctgacctttgagtgggactgagggtggggcaggcagtgtccttgrcctgtagggtgtactggagaactacgtaggaataaatacatctgtgtgtgtgatgtctgtctgagcgtatgtgcatctgtgtgtttatgcaaacatatgc

SEQ ID NO: 152423 - DNA, 201 bp, Homo sapiens
tcagcccagctcagctgtcagccctgagccctcccctgccgcacctcccatccaggcagtgggcaggctctggatgccttgtgtcccctgagatgccgtcrgttatgtcggttatgttcctgtctaccaggtttccctgcagggctggggcccttttctgccttgggtccaatgtccatcttccctttagcctggaagttc

SEQ ID NO: 152424 - DNA, 201 bp, Homo sapiens
tcagccctgagccctcccctgccgcacctcccatccaggcagtgggcaggctctggatgccttgtgtcccctgagatgccgtcagttatgtcggttatgtycctgtctaccaggtttccctgcagggctggggcccttttctgccttgggtccaatgtccatcttccctttagcctggaagttcccagaggaggctccctc

SEQ ID NO: 152425 - DNA, 201 bp, Homo sapiens
gaaccccctgacttcagtggagagagcagactgagatggacaagagtgaagtcagagagacgtgtgggggccccacagtggtccaggtgggcgctgtgagygacttgttggtagcagtggagatggagaaagatgagtcgatttcagtgtcaggacatgcttatagctggcgaggaggtgagggaacaggaggaagcctga

SEQ ID NO: 152426 - DNA, 201 bp, Homo sapiens
gttcccagaggaggctccctcctctgtctcatctctgagtcccaggaccagccgggccgagaagggggcgcaacgggagttcagggtttggagcctggggmctgctgagcaccagccagctgcggggctcagggtgagcctggctgcagggcctcttggccctgtctacaccccgggaccaagcctggaacaaacgtttgc

SEQ ID NO: 152427 - DNA, 201 bp, Homo sapiens
tgtcctgggaagggaaggaggggaagtggctgtaccctcaggcactgaggccaggaggctgggtttgaagcccagcttggcagtgccctgcctcagtgacsttggctgggacttacctttccagaccccgtcttctcttccgcaggatggggattcacgcccttgttcattccacaggtgacactggggagagcctctttt

SEQ ID NO: 152428 - DNA, 201 bp, Homo sapiens
gctgagcaccagccagctgcggggctcagggtgagcctggctgcagggcctcttggccctgtctacaccccgggaccaagcctggaacaaacgtttgcacwaaatgaagccggccccacccaggcctccctgggtccgctccaccttgagtggtgggtggctgggggcggtggctcacaccagctctgccccctccagagc

SEQ ID NO: 152429 - DNA, 201 bp, Homo sapiens
ccagctgcggggctcagggtgagcctggctgcagggcctcttggccctgtctacaccccgggaccaagcctggaacaaacgtttgcactaaatgaagccgrccccacccaggcctccctgggtccgctccaccttgagtggtgggtggctgggggcggtggctcacaccagctctgccccctccagagcccgagccattct

SEQ ID NO: 152430 - DNA, 201 bp, Homo sapiens
tgctcatcagggcatcccccaccctggtaccccatagtagctgcacacagtaggaaccccagaaaagaccttgccccttctgtccctgcagatgacgtccrcggctcccacggccggcaggtctgccgtcggcacgagctctacgtcagcttccaggacctcggctggctggtaattgctgactctccttgtttctgaaat

SEQ ID NO: 152431 - DNA, 201 bp, Homo sapiens
tgtctacaccccgggaccaagcctggaacaaacgtttgcactaaatgaagccggccccacccaggcctccctgggtccgctccaccttgagtggtgggtgkctgggggcggtggctcacaccagctctgccccctccagagcccgagccattctgagtgccagcccagcgctgctttgtcttctagtggagcgagaccgtg

SEQ ID NO: 152432 - DNA, 201 bp, Homo sapiens
aaacaacaggaaaacagatcagttcctcactgtgtttctcgagcactgcaaggcgcaggtctgcagtggtgaggaatggatgtccgctttgctctgtgatstttacacagagcgtgcacagctcagcgcattcacagcaagatttgattcaagcgcctccctcgtacttgaaccatgaaatggagataaaaactgacgagg

SEQ ID NO: 152433 - DNA, 201 bp, Homo sapiens
tgcagatgacgtccacggctcccacggccggcaggtctgccgtcggcacgagctctacgtcagcttccaggacctcggctggctggtaattgctgactctycttgtttctgaaatgacaatcaccacctgtagatcagaagtgaatctgcagggaggacatagaatcatggtgacttcaattttcttatgtatttttttct

SEQ ID NO: 152434 - DNA, 201 bp, Homo sapiens
agaatcatggtgacttcaattttcttatgtatttttttcttctgtgttttccaagttttctaaagtgagaatatggtgagaaagggttttttttttgttcwgttttttgttttttttaaaaccatgaaaatgaagactgaatcaaccaactaagctgtcagcattgctgcagggtaactgagacctccctgcattggctac

SEQ ID NO: 152435 - DNA, 201 bp, Homo sapiens
ggcagattcgcactcatgcctcagcccagctcagctgtcagccctgagccctcccctgccgcacctcccatccaggcagtgggcaggctctggatgccttrtgtcccctgagatgccgtcagttatgtcggttatgttcctgtctaccaggtttccctgcagggctggggcccttttctgccttgggtccaatgtccatct

SEQ ID NO: 152436 - DNA, 201 bp, Homo sapiens
aagacacccttgggtgctgtgggacaaggcacgttctttccttctccgccctgggctgggatgagcggccacctcctcctgcccacacacgtctggccccrtcccctgccccgcacagctgttcgcctgcccatggccggaccaggtccccaccacgaggacaggaagtgctccccacatccgcctcggcccgcacagcct

SEQ ID NO: 152437 - DNA, 201 bp, Homo sapiens; identical to SEQ ID NO: 28339

SEQ ID NO: 152438 - DNA, 201 bp, Homo sapiens
aaccatgaaaatgaagactgaatcaaccaactaagctgtcagcattgctgcagggtaactgagacctccctgcattggctacgactgcagctctgggaggygtgggcaggggagggccggctggggaggggacgcaaagtgaagatatgggggatgttgggcctgagctcctgcccagccttttctgccgggggttcctgg

SEQ ID NO: 152439 - DNA, 201 bp, Homo sapiens
gaaaagaccttgccccttctgtccctgcagatgacgtccacggctcccacggccggcaggtctgccgtcggcacgagctctacgtcagcttccaggacctyggctggctggtaattgctgactctccttgtttctgaaatgacaatcaccacctgtagatcagaagtgaatctgcagggaggacatagaatcatggtgact

SEQ ID NO: 152440 - DNA, 201 bp, Homo sapiens
ctcctggcccgggattcgcaccctcagcaggcaggccgcagcagagctcatgtgccgtccccaacatcgctgacctgtgggcgcctccaccctgtgcatgygaggtcccctctccctagagcaccctccctgccaccttctccacctaccaagacccatcccacccttcaaagccagttcagatgccacctgctcagatcc

SEQ ID NO: 152441 - DNA, 201 bp, Homo sapiens
aatgctctgagcctcagtttcctcatctgtaaaatgggagagctacctcattagatgattaggagtattaaatgagttaatctgtgtaaaattatgaaaaragtggctggtcagtgctcaataaatgtcagctttatttgtttttagcccaaggccagctggttagtggcaagaccagaagcaaaagttggtgatttcctt

SEQ ID NO: 152442 - DNA, 201 bp, Homo sapiens
caaagtgctgggattacagacatgagccactgagttgggccaattaaccttagcttactgtaatttttttttcttttttagacagaatctcactctgttayctaggctagagtacagtggtccagtctcagctcactgcaacccctgcttcctgggttcaagcaattctcatgtctcagcctctcaagtagctgggattac

SEQ ID NO: 152443 - DNA, 201 bp, Homo sapiens
acggggccacccggggagagcagcttccaggagggactctgcgggaggcgtctgcaggtagaaggcacaagaggccggagggacagatggcagggccagcraagggagggccctgggacactcttcctgtgggcctttcagggctggggagggtctgaggggaggtgggatgggtcacaggccacaagattctgctctgag

SEQ ID NO: 152444 - DNA, 201 bp, Homo sapiens
cggggccacccggggagagcagcttccaggagggactctgcgggaggcgtctgcaggtagaaggcacaagaggccggagggacagatggcagggccagcgmagggagggccctgggacactcttcctgtgggcctttcagggctggggagggtctgaggggaggtgggatgggtcacaggccacaagattctgctctgagc

SEQ ID NO: 152445 - DNA, 201 bp, Homo sapiens
gcagggttgcctgaaggcctttccaggtctgaccaaagaatgtgcccaccccctgcctgctgatgggggctcttccgggctgaggcacagggtggggaggygcacccagcccccctcctcccggaacctctttcccataggcaagagaggatgcgtcaccatgaccacttctttctggaaaattcccacagttcattcttt

SEQ ID NO: 152446 - DNA, 201 bp, Homo sapiens
cacagcctggtgcttttacaaacctgaccgtggtcactgagcccagtaaccacagagaatttttaaaaagactcacaaacatatcattgaaatctcagtgytgggttttggggaaggcactgggcggctcccacccctgctttctggaaacacagatttctagagtttgaaacggatgggaggctaaagtgagactgccct

SEQ ID NO: 152447 - DNA, 201 bp, Homo sapiens
aggcaagagaggatgcgtcaccatgaccacttctttctggaaaattcccacagttcattctttcccgggatttcactggaggaattgcgtctttcttgctyacatctcctgggatctattcttggccttggcgggcttgatgtggaggcatgtgtgggtgttcccttttaatttggggtccagaactgtctgaggcctgga

SEQ ID NO: 152448 - DNA, 201 bp, Homo sapiens
gataaaaactgacgagggagaaaatcactcaacccagagtacacctgaagggacattttactactgcagtgagaaataggcgagcaaagatgtgagtttgygattggaagacatgctatcttcacgagcttgttttttctttttccttctctttcttttttcttttttttgaggcagggtctggctctgtcgctcaggctg

SEQ ID NO: 152449 - DNA, 201 bp, Homo sapiens
ctgacgggacctggatctgggcggggtggtgcgctcctcagggcggatgccaccgggttccccaggggaatacatgtccccagctctgggaggggtttgcyactggcctcctactttcctccctaggtggacagtgctcctctagagagctgcgactttaattaaaaacaacaggaaaacagatcagttcctcactgtgtt

SEQ ID NO: 152450 - DNA, 201 bp, Homo sapiens
ccaaagggctctgagttccggacactgagccgctgtcctggggacaagagacccttgggaagaaggggccggggcacccccgctctggggccccgaaacayaggggccgatgagttgacgtgcgagcctcccatgtccacccacgtggctccgtcccggccctccaagggctcgctgtccagaggaacagctgaaccagag

SEQ ID NO: 152451 - DNA, 201 bp, Homo sapiens
ttttataaatttgaaatgtttattgtggagacttatttaaacaaccagaaaaagttttgtgttttgttttttttttcttgaaacacactctcattctgtckcccagctggagtgtggtgacacaatcacacctcactgcagcctcaacctcccaggctcaagcagtcctcccacctcagcttcccgggaagttcaccacca

SEQ ID NO: 152452 - DNA, 201 bp, Homo sapiens
acggcgcgcccgcggagcggcgcctgggccgcgccgacctggtcatgagcttcgttaacatgggtgagtgcggccgcccgcgcggggaccctcggagtaarctggctgcaggggaggggcgcgcatccgcgggctgtgccgggccctggccgaacggggagtcacagacggtggacgcgaaccacaggggagtgggaccgc

SEQ ID NO: 152453 - DNA, 201 bp, Homo sapiens
aaaggtcattagggagaagttatgaaatccagatcgatcatggtgtttacttaataataaggtatcagtattggttcattagttatgagaaaggtaccctrctagtgtaaaatattagcatttcccagaggaaactgggtccaggtgtatgggaactccttgtgtagtttttttttctttgagacagggtttggctctgtt

SEQ ID NO: 152454 - DNA, 201 bp, Homo sapiens
ggggatataacaatgagagaagtaaagtccctgccctcagggagatgactttctagtctagagacacataatacatacatgagccctaaaggtaattgtcrggtgtgctagacagcaacgccccatcgggaaacaggaggggctgaacaatggcaggacagacagggctagattgggggtttctgacctgagacccacaca

SEQ ID NO: 152455 - DNA, 201 bp, Homo sapiens
tcactgtgtttctcgagcactgcaaggcgcaggtctgcagtggtgaggaatggatgtccgctttgctctgtgatgtttacacagagcgtgcacagctcagygcattcacagcaagatttgattcaagcgcctccctcgtacttgaaccatgaaatggagataaaaactgacgagggagaaaatcactcaacccagagtaca

SEQ ID NO: 152456 - DNA, 201 bp, Homo sapiens
tcacacctcactgcagcctcaacctcccaggctcaagcagtcctcccacctcagcttcccgggaagttcaccaccatgcccagctcatttttgtttttatwtttttgttgagacagggtctcactatgttgcccaggctggtctcaaatgcctaggttcaagcaatcctcccacctcggcctcccaaagtgctgggattac

SEQ ID NO: 152457 - DNA, 201 bp, Homo sapiens; identical to SEQ ID NO: 28348

SEQ ID NO: 152458 - DNA, 201 bp, Homo sapiens; identical to SEQ ID NO: 28375

SEQ ID NO: 152459 - DNA, 201 bp, Homo sapiens; identical to SEQ ID NO: 28340

SEQ ID NO: 152460 - DNA, 201 bp, Homo sapiens
ggtaactgagacctccctgcattggctacgactgcagctctgggaggcgtgggcaggggagggccggctggggaggggacgcaaagtgaagatatgggggwtgttgggcctgagctcctgcccagccttttctgccgggggttcctgggtggattcaagcctcttgggggagacggccctgcagggctggaggatgggttt

SEQ ID NO: 152461 - DNA, 201 bp, Homo sapiens
tttagaaaaacttaattcaaagtattatttctgaccaaaaagtaagacttcaaaagacacccttgggtgctgtgggacaaggcacgttctttccttctccrccctgggctgggatgagcggccacctcctcctgcccacacacgtctggccccatcccctgccccgcacagctgttcgcctgcccatggccggaccaggtc

SEQ ID NO: 152462 - DNA, 201 bp, Homo sapiens
ggctcctccgggtctttctcaggagcctccttcagaatcagctgccccttccctgggagccgcagcccctcatgacctgcggttgtgcctgggcaccctgygggatcctcggttgcttatgcgagttttctccccaactgggccaagcccttcaggatcagggacaggcctgacccaaccccgtgccctccttcccaggga

SEQ ID NO: 152463 - DNA, 201 bp, Homo sapiens
atagggtttctccatattggccaggctggtctcaaactctgggcctcaggtgatccacctgccttggcctcccaaagtacaggcttgagccattgcacccrgccttcttgaacgtttttatccgttatctggtatttcttctggggcctttgttgttaaattttgtttccctgaagcctcccctcctcctcccacatctct

SEQ ID NO: 152464 - DNA, 201 bp, Homo sapiens
ggctggtctcaaactctgggcctcaggtgatccacctgccttggcctcccaaagtacaggcttgagccattgcacccggccttcttgaacgtttttatccrttatctggtatttcttctggggcctttgttgttaaattttgtttccctgaagcctcccctcctcctcccacatctctcctcctgggacctatgagatgtt

SEQ ID NO: 152465 - DNA, 201 bp, Homo sapiens
tcccaacagcctttcgtggtcactttcttcagggccagtccgagtcccatccgcacccctcgggcagtgaggccactgaggaggaggcagccgaagaaaascaacgagctgccgcaggccaaccgactcccagggatctttggtgagggtcgggcaggctggggccgaggccctgtgggcttctggctgagagaggcaggg

SEQ ID NO: 152466 - DNA, 201 bp, Homo sapiens
gtggccaagggttctcttttggctggaatattactgacccccctgggatgttactgagatcactggtcctcatggaaatgccattacagggaccggtgagygtgaagacccaggcgagggaggtgctggcatgtaagtggatttaaagcatgggatgggaccaggtcatctagggaaggagggtagtgatggagaagaaag

SEQ ID NO: 152467 - DNA, 201 bp, Homo sapiens
tcttatggggctgttgtgggcttgtgtgagatgatacccagcgatgcccacgtgcccagaacctctgcatctcttccttcattggtatctcacaattgccrtcacatctgtgtttgaaagagaggagagagaggctcagagcagataggtggttttcctaaggccacacagcagattgtccccctgcctccacatcttctg

SEQ ID NO: 152468 - DNA, 201 bp, Homo sapiens
ccactgtgtcttctaattcccctccacccacgccgcctccctgctgcccccgtcccctgtgcttcccactggccagaggcgcagcccaggctcctggcccrggattcgcaccctcagcaggcaggccgcagcagagctcatgtgccgtccccaacatcgctgacctgtgggcgcctccaccctgtgcatgcgaggtcccct

SEQ ID NO: 152469 - DNA, 201 bp, Homo sapiens
tgtggtggtgtgcggatcacttgaggtcaggagttcaagaccagcctggccaacatggtgaaaccttgtctctactaaaaatgcaaaaaaaattagccagkcatggtggcgcgggactgtagtcctaactactcaggcggctgaggcgagagaattgctggaacctgggagatggaggttgcctgggagacagagcaagac

SEQ ID NO: 152470 - DNA, 201 bp, Homo sapiens
ggaggccaagcgggggcggatcacctgaggtcaggagttaaagacaagcctggacaacatggtgaaaccccgtctctactaaaaatacaaaaattagccgkctgtggtggcgggcgcctgtaatcccagctacttgggaggctgaggcaggagaattgcttgaatccaagaggtggaggttgcagtgagccgagatcgcgc

SEQ ID NO: 152471 - DNA, 201 bp, Homo sapiens
gggggcggatcacctgaggtcaggagttaaagacaagcctggacaacatggtgaaaccccgtctctactaaaaatacaaaaattagccggctgtggtggcrggcgcctgtaatcccagctacttgggaggctgaggcaggagaattgcttgaatccaagaggtggaggttgcagtgagccgagatcgcgccattgcactcc

SEQ ID NO: 152472 - DNA, 201 bp, Homo sapiens
gtgacttgcttcccgaaagtgcggtgtggacagggcgtgggggacctgacgcgcagcgcctcagccaggtgaggaaggctcactgcagtgaccggcacggygctagcatgtgccctgggtgaaagggaaggagaaggccactgagcctcagagggccccctccgtgaacccgaaaccccagtccagccacgagaaaaccgt

SEQ ID NO: 152473 - DNA, 201 bp, Homo sapiens
gaggttgcagtgagccgagatcgcgccattgcactccagcctgagcaacaggagcgaaatgccatctcaaaaaaaaacaaaaacaaaaacaaaacttagcragtgtctggcactgctcaataagtggctgtattatgagggaagggcctgcggattatgccccatcccccagtcatttacttagggacctagagcagagta

SEQ ID NO: 152474 - DNA, 201 bp, Homo sapiens
tgttcctgcatcattcacaccagacacttaggccctcctctctgggatggaggcccaaactggccacttgtgtgatggtccgttgtaacccaagaggctgygaggcatttcctcctgaatctatagtctcaaaaactaaaattaagattgtgtgtgtgtgtgtgtgcgcatgcacgcgtgcacacgtgctgttgacagcca

SEQ ID NO: 152475 - DNA, 201 bp, Homo sapiens; identical to SEQ ID NO: 28343

SEQ ID NO: 152476 - DNA, 201 bp, Homo sapiens
ttgtatttttagtagagatggggtttcatcatgttagtcaggctgatcctgaactcctgacctcaggtgatccacccacctcagcctcccaaagtgctggkattacaggcgagagccaccacgccctacccttctctaggtattgattgactgggcctaaagaactgcccaaggttaggcaccatccctggggacacccac

SEQ ID NO: 152477 - DNA, 201 bp, Homo sapiens; identical to SEQ ID NO: 28370

SEQ ID NO: 152478 - DNA, 201 bp, Homo sapiens
ctgcgaggcatttcctcctgaatctatagtctcaaaaactaaaattaagattgtgtgtgtgtgtgtgtgcgcatgcacgcgtgcacacgtgctgttgacarccaagcctggcctggtgcatgcactgcataagtgtagctctgggggttcccaggccattgggggcatgtggtcagagtagtaagttctcactggtcaagg

SEQ ID NO: 152479 - DNA, 201 bp, Homo sapiens
agttcagaagaccgacaagatccttctctcgttttctgggagacaaacaaggccaaaggagaggaggcatggctcccggctggagatggggtctcgctgtrtcacccaggctggagtgcagtggcgcgatcacagcttgctgcagcctcaacctcccagactcaagtgatcctcccacctcagcctcccaagtagctggga

SEQ ID NO: 152480 - DNA, 201 bp, Homo sapiens
gtgtgtgtgtgtgtgtgcgcatgcacgcgtgcacacgtgctgttgacagccaagcctggcctggtgcatgcactgcataagtgtagctctgggggttcccmggccattgggggcatgtggtcagagtagtaagttctcactggtcaaggacagactttccaggggcccattggagcctcaccctgcaggaaaggccagatc

SEQ ID NO: 152481 - DNA, 201 bp, Homo sapiens; identical to SEQ ID NO: 28371

SEQ ID NO: 152482 - DNA, 201 bp, Homo sapiens
gggagcaggatccacaagtctggagttcagaagagaggtccaagctgagcctggggagtggagaggtgcgggcacgtgcagggccttgaagtgctgagggyggatgcagtcctctgggggaaggagcagcacaggagaggggcggaggcctggcctcccagagactggggagggaggccagggtgtgggaggcagagcctc

SEQ ID NO: 152483 - DNA, 201 bp, Homo sapiens
acaagatccttctctcgttttctgggagacaaacaaggccaaaggagaggaggcatggctcccggctggagatggggtctcgctgtgtcacccaggctggmgtgcagtggcgcgatcacagcttgctgcagcctcaacctcccagactcaagtgatcctcccacctcagcctcccaagtagctgggaagtacaggtgccta

SEQ ID NO: 152484 - DNA, 201 bp, Homo sapiens; identical to SEQ ID NO: 28345

SEQ ID NO: 152485 - DNA, 201 bp, Homo sapiens
gagaggaggcatggctcccggctggagatggggtctcgctgtgtcacccaggctggagtgcagtggcgcgatcacagcttgctgcagcctcaacctcccasactcaagtgatcctcccacctcagcctcccaagtagctgggaagtacaggtgcctaccaccatgcccagataatttttaaacatttttttatagagacga

SEQ ID NO: 152486 - DNA, 201 bp, Homo sapiens
tttaatttggggtccagaactgtctgaggcctggaccggtaattatgagagcagcaccatttatggaaacagcccttgaagcaagccagtgatgagacccrgctggaaatacctcagcatggagccctgggctcgcctcgaggcggtgctgagatttctgggtgggagaagccccttcaggacgcagaaccaacaggtcat

SEQ ID NO: 152487 - DNA, 201 bp, Homo sapiens
tcactcaacccagagtacacctgaagggacattttactactgcagtgagaaataggcgagcaaagatgtgagtttgtgattggaagacatgctatcttcaygagcttgttttttctttttccttctctttcttttttcttttttttgaggcagggtctggctctgtcgctcaggctggaatgcaatggaatgcagtgatct

SEQ ID NO: 152488 - DNA, 201 bp, Homo sapiens
tgcagctcacagcctccctgtctcagcagctcttgtccatgctcgtgagagggagggagcctctcctgccagtgcatttgtttgtggcggatgatgtcacrggtcaaaggttggtctctggattcactggttgttcagtcaagtggccaagggacaccagggctgaggcacagctgcttaagggctgacctttgagtggga

SEQ ID NO: 152489 - DNA, 201 bp, Homo sapiens; identical to SEQ ID NO: 28349

SEQ ID NO: 152490 - DNA, 201 bp, Homo sapiens; identical to SEQ ID NO: 28350

SEQ ID NO: 152491 - DNA, 201 bp, Homo sapiens; identical to SEQ ID NO: 28351

SEQ ID NO: 152492 - DNA, 201 bp, Homo sapiens; identical to SEQ ID NO: 28352

SEQ ID NO: 152493 - DNA, 201 bp, Homo sapiens; identical to SEQ ID NO: 28353

SEQ ID NO: 152494 - DNA, 201 bp, Homo sapiens
gcctggccggggagacctgctgggagggagtgcgtcagggcgcgggcgcccgccctgctctgtgacgcgcggcccgaggcgcacgcagggctcacaccacytgtcctggcctccgacccgggccgactatggcggcgctgcggctcctggcgtcagtgctcgggcgcggggtccccgccggcggctcagggctcgcgctgt

SEQ ID NO: 152495 - DNA, 201 bp, Homo sapiens
gcctggcctagagcctgcgcctggccggggagacctgctgggagggagtgcgtcagggcgcgggcgcccgccctgctctgtgacgcgcggcccgaggcgcwcgcagggctcacaccacctgtcctggcctccgacccgggccgactatggcggcgctgcggctcctggcgtcagtgctcgggcgcggggtccccgccggcg

SEQ ID NO: 152496 - DNA, 201 bp, Homo sapiens
cctgctttccggaaacacagatttctagagtttgaaagggacgggaggctaaagtgagactgccctaaatatagcgtcctgggtatttccggatatttccrgacacctggggaaatgtgggctttattccgcaactacagcctttgtttgattggcaggccagcccctgccacggggccctgctgcccatctcacttccag

SEQ ID NO: 152497 - DNA, 201 bp, Homo sapiens
tgagcagcttgtttaaagtccctgaaactcagtttccacacctttgaggcaaggtaagtgagccagcctcccggggttgcatgcagtgtggccagctggargccgacacacagtaggaacttcacaaatgggggctgatcgattgtgccccacttctgcaccattgctcgttgggtagctccttcatagaatacacttacc

SEQ ID NO: 152498 - DNA, 201 bp, Homo sapiens
ctccctgcattggctacgactgcagctctgggaggtgtgggcaggggagggccagctggggagggccggctggggaggggacacaaagtgaagatgggggwtgttgggcctgagctcctgcccagccttttccgccgggggttcctgggtggattcaagcctcttgggggagacggccctgcagggctggaggatgggttt

SEQ ID NO: 152499 - DNA, 201 bp, Homo sapiens
ccgcagggtaactgagacctccctgcattggctacgactgcagctctgggaggtgtgggcaggggagggccagctggggagggccggctggggaggggacrcaaagtgaagatgggggttgttgggcctgagctcctgcccagccttttccgccgggggttcctgggtggattcaagcctcttgggggagacggccctgca

SEQ ID NO: 152500 - DNA, 201 bp, Homo sapiens
atccaaactgtagcaaggggtatattatctgtactgttcaccttgcttttttctttttctttttttgagacggagtctcaccctggagtgccatggcacartgacagctcactgcagtctccacctcccaggctcaagccatcctcctacctcagcctcctgaatagactataagcaaagtgccattgtgtctggctaatt

SEQ ID NO: 152501 - DNA, 201 bp, Homo sapiens
aaccatgaaaatgaagactgaatcaaccaactaagctgtcagcattgccgcagggtaactgagacctccctgcattggctacgactgcagctctgggaggygtgggcaggggagggccagctggggagggccggctggggaggggacacaaagtgaagatgggggttgttgggcctgagctcctgcccagccttttccgcc

SEQ ID NO: 152502 - DNA, 201 bp, Homo sapiens
  misc_feature (1)...(201): n = A,T,C or G
tcatggtgacttcaattttcttatgtatttttttcttctgtgttttccaagttttctaaagtgagaatatggtgagaaagggttttgttgttgttgttgtnttttttgttttttttaaaaccatgaaaatgaagactgaatcaaccaactaagctgtcagcattgccgcagggtaactgagacctccctgcattggctacg

SEQ ID NO: 152503 - DNA, 201 bp, Homo sapiens
gatgaacagagccgtctggatttgggagaagcaggactgagtgggaattcgggacctggcccgggtcctgctctgcccttgccagccgtgtgacctggaasggtggcaccatctccgtgggccccagggccacttcctttggttctttaccagggacctctttcattttcccattcattcattcagcaaatagttctgtag

SEQ ID NO: 152504 - DNA, 201 bp, Homo sapiens
aatcatggtgacttcaattttcttatgtatttttttcttctgtgttttccaagttttctaaagtgagaatatggtgagaaagggttttgttgttgttgttstgttttttgttttttttaaaaccatgaaaatgaagactgaatcaaccaactaagctgtcagcattgccgcagggtaactgagacctccctgcattggcta

SEQ ID NO: 152505 - DNA, 201 bp, Homo sapiens
acatagaatcatggtgacttcaattttcttatgtatttttttcttctgtgttttccaagttttctaaagtgagaatatggtgagaaagggttttgttgttkttgttgtgttttttgttttttttaaaaccatgaaaatgaagactgaatcaaccaactaagctgtcagcattgccgcagggtaactgagacctccctgcat

SEQ ID NO: 152506 - DNA, 201 bp, Homo sapiens
gggaggacatagaatcatggtgacttcaattttcttatgtatttttttcttctgtgttttccaagttttctaaagtgagaatatggtgagaaagggttttkttgttgttgttgtgttttttgttttttttaaaaccatgaaaatgaagactgaatcaaccaactaagctgtcagcattgccgcagggtaactgagacctcc

SEQ ID NO: 152507 - DNA, 201 bp, Homo sapiens
tgcagatgacgtccacggctcccacggccggcaggtctgccgtcggcacgagctctacgtcagcttccaggaccttggctggctggtaattgctgactctycttgtttctgaaatgacaatcaccacctgtagatcagaagtgaatctgcagggaggacatagaatcatggtgacttcaattttcttatgtatttttttct

SEQ ID NO: 152508 - DNA, 201 bp, Homo sapiens; identical to SEQ ID NO: 152439

SEQ ID NO: 152509 - DNA, 201 bp, Homo sapiens
acagagtcagtaacgtcgctaacttcccacagctctgcaggaactggtcctcatacagccacactactacacatagacccacacccaaacacggacacacrtgaacagtcgcgtatgcatgcctgttctatgcactgaacaaactcctgtgggacacttacacacctgcgtgcggcgctcagaggcacagcacatgaaaca

SEQ ID NO: 152510 - DNA, 201 bp, Homo sapiens
aggatgggtttgggccctgaggctcagggaggagcacatggatgggactcaccttctcccttgccccccaggactgggtcatcgccccccaaggctactcrgcctattactgtgagggggagtgctccttcccgctggactcctgcatgaacgccaccaaccacgccatcctgcagtccctggtcagtaccgtgcccatcc

SEQ ID NO: 152511 - DNA, 201 bp, Homo sapiens
tgaatcaaccaactaagctgtcagcattgccgcagggtaactgagacctccctgcattggctacgactgcagctctgggaggtgtgggcaggggagggccrgctggggagggccggctggggaggggacacaaagtgaagatgggggttgttgggcctgagctcctgcccagccttttccgccgggggttcctgggtggat

SEQ ID NO: 152512 - DNA, 201 bp, Homo sapiens
ctccctgcattattcccagccccccttctttgtgtacttcctagcacttagcacataggctaatcttgtttgttaactttcctgtttgttatctgacttcyctgcaagcctgtaaaccccacgggggcaggagctgccccatcttgcttacctcagtgtctcctgcacctaaataatgacttctgcaccattagtactgct

SEQ ID NO: 152513 - DNA, 201 bp, Homo sapiens; identical to SEQ ID NO: 28351

SEQ ID NO: 152514 - DNA, 201 bp, Homo sapiens
ggccccctgggctgcggggtggtcaggagcagagtgtgggggactgtggactcccaggcgctgccttcaccctgccccagacacacccaggagtaagaatyaggtgatgtctttgcccacctgggctgccccgggaagacagcctggtcctggggagacaggtgagtaaacagaggccgggatgctgtcactgtgataagg

SEQ ID NO: 152515 - DNA, 201 bp, Homo sapiens
ccttggcctcagtttccccatctctgcaggacctgaagtcctttccagctctgaccaaagaatatgcccaccccctgcctgctgatgggggctcctccggkctgaggcacagggtggggaggtgcacccagcccccctcctcctggaacctctttcccacaggcaagagaggatgtgtcaccatgaccacttctttctgga

SEQ ID NO: 152516 - DNA, 201 bp, Homo sapiens
caggcctgtaatctaaccctggaaaccctctgcccctccttggcctcagtttccccatctctgcaggacctgaagtcctttccagctctgaccaaagaatrtgcccaccccctgcctgctgatgggggctcctccggtctgaggcacagggtggggaggtgcacccagcccccctcctcctggaacctctttcccacaggc

SEQ ID NO: 152517 - DNA, 201 bp, Homo sapiens
accccaggccaggtccccgcctatcattagatgcagtaagtgctgtcgaattgaactgaatgtgaatgtgtattgtaagctgagaagcctgttgttaaagwatttttattttgggggaatttatagaaataatgcatgctcattctacaaaattcagattctgcagaagcatgtaacttgggtgcccctagggagccccat

SEQ ID NO: 152518 - DNA, 201 bp, Homo sapiens
gtgggcccaggggaccggcactcagcatatggaggacctgcaccggcactggtctctgagttccctcagtatttattgatcactatctctaccatctcagygagggggatgtggcaggactatagggtaatggtggggagagggtcagcaggaaaacatgtgagcaaaggactctgtgtcataaataagtttaaggaaagg

SEQ ID NO: 152519 - DNA, 201 bp, Homo sapiens
atgtttgactttacacgaacatctcaatgcagtaaagagcagtattgtcgccagcatgtctcacctccagccataaggtggttttctcctatctcagtaartagaatgtccaatcgggttttacaccacgacattccaatcccagggatgagcaggagacagatgccttcctcttatctcaactgcaaagagtccttcctc

SEQ ID NO: 152520 - DNA, 201 bp, Homo sapiens
gccgcaggctgcaacctgggctctgggacttggttcaatgtttctgctctgcctggcatctcccttgtgggcatcagggagacagttaatgccctgctctwgggctgtgcccagcagaacaagcactcgctcaacctggcagatgctaccacgagctgtctcggtgataagtttgacattcacaccccagaaagtgcggga

SEQ ID NO: 152521 - DNA, 201 bp, Homo sapiens; identical to SEQ ID NO: 152367

SEQ ID NO: 152522 - DNA, 201 bp, Homo sapiens
tgatgggctcaccctttattagatacaaggttgtcttattccatcttgtgttgctgtaacagactccctaaggctgagtaatttacaaaaaaaaaaaaaaagaggtttattttattttatttttgagacggagtcttgctctgtcaccctggctggagtgcagtggtacagtttcagctcactgcaacctctacctcctgg

SEQ ID NO: 152523 - DNA, 201 bp, Homo sapiens; identical to SEQ ID NO: 152451

SEQ ID NO: 152524 - DNA, 201 bp, Homo sapiens; identical to SEQ ID NO: 152372

SEQ ID NO: 152525 - DNA, 201 bp, Homo sapiens; identical to SEQ ID NO: 152480

SEQ ID NO: 152526 - DNA, 201 bp, Homo sapiens; identical to SEQ ID NO: 28353

SEQ ID NO: 152527 - DNA, 201 bp, Homo sapiens
agggtgagcctggctgcagggcctcttggccctgtctacaccccgggaccaagcctggaacaaacgtttgcacaaaatgaagccggccccacccaggcctscctgggtccgctccaccttgagtggtgggtgtctgggggcggtggctcacaccagctctgccccctccagagcccgagccattctgagtgccagcccagc

SEQ ID NO: 152528 - DNA, 201 bp, Homo sapiens
gaagctcccagaggaggctccctcctgtctcatctctgggtcccaggaccagccgggccaagaaggggcgcaacgggagttcaggatttggagcctggggmctgctgagcaccagccaggtgcagggctcagggtgagcctggctgcagggcctcttggccctgtctacaccccgggaccaagcctggaacaaacgtttgc

SEQ ID NO: 152529 - DNA, 201 bp, Homo sapiens
ccatggcagattcgcactcatgcctcagcccagctcagctgtcagccctgagccctcccctgccgcacctcccatccaggcagcgggcaggctctggatgscttatgtcccctgagatgccgtcggttatgtcggttatgtccctgtctaccaggtttccctgcagggctggggcccttttctgccttgggtccaatgtcc

SEQ ID NO: 152530 - DNA, 201 bp, Homo sapiens
acggtcttcatccccatctcccagatgaggacagtgaggttcagagaggcagcgccatgcctaggacagcgcagcctctatgttgctgagccaggacaggyccaggaagcctgactgtccatccagggctcaatgagatgacatttctgttgtcaggtcaggctttcagggtgcagagagctttctgaggagtctgggctg

SEQ ID NO: 152531 - DNA, 201 bp, Homo sapiens
ggcccgtctccctgacaccatggcagattcgcactcatgcctcagcccagctcagctgtcagccctgagccctcccctgccgcacctcccatccaggcagygggcaggctctggatggcttatgtcccctgagatgccgtcggttatgtcggttatgtccctgtctaccaggtttccctgcagggctggggcccttttctg

SEQ ID NO: 152532 - DNA, 201 bp, Homo sapiens
cagtgatctctgcctatgggaagagatcgtggcctgtgtcacggcatctgagcagcccggctctcaggcgagcttttgctgcatgcccagcaccctcaggygctgtgggacaagacaagttcatttttcctccgccctgggctgggatgagcggccacctcctcctgcccacacacgtctggccccatcccccgccccgca

SEQ ID NO: 152533 - DNA, 201 bp, Homo sapiens
ctcctgccctctgctgtttcctggtgcttgctttccctgccctgccctcagacccctctgctctggccctctgccttggctggccggcccctgcagggccygtctccctgacaccatggcagattcgcactcatgcctcagcccagctcagctgtcagccctgagccctcccctgccgcacctcccatccaggcagcgggc

SEQ ID NO: 152534 - DNA, 201 bp, Homo sapiens; identical to SEQ ID NO: 28364

SEQ ID NO: 152535 - DNA, 201 bp, Homo sapiens; identical to SEQ ID NO: 28363

SEQ ID NO: 152536 - DNA, 201 bp, Homo sapiens; identical to SEQ ID NO: 28365

SEQ ID NO: 152537 - DNA, 201 bp, Homo sapiens
tactttcaacggttattctgcattatccttagctcagtatccttatgggacagtcccagtccgcagggtagccccggcttctaggcggtggcatccacatstgctctgcccggagctgatgcaggtgcctcatggggggcgctctggggaccgcgcagaaaatttacgagcagtgtggaaatatacctgttgggtaaaaga

SEQ ID NO: 152538 - DNA, 201 bp, Homo sapiens; identical to SEQ ID NO: 152432

SEQ ID NO: 152539 - DNA, 201 bp, Homo sapiens
aaacatatcattgaaatctcagtgttgggttttggggaaggcactgggcggctcccacccctgctttccggaaacacagatttctagagtttgaaagggaygggaggctaaagtgagactgccctaaatatagcgtcctgggtatttccggatatttccggacacctggggaaatgtgggctttattccgcaactacagcc

SEQ ID NO: 152540 - DNA, 201 bp, Homo sapiens
aattacggtatactgctccaagggattttataaatttgaaatgtttattgtggagacttatttaaacaaccagaaaaagttttgtgttttgtttttttttycttgaaacacactctcattctgtcgcccagctggagtgtggtgacacaatcacacctcactgcagcctcaacctcccaggctcaagcagtcctcccacct

SEQ ID NO: 152541 - DNA, 201 bp, Homo sapiens
acggcatctgagcagcccggctctcaggcgagcttttgctgcatgcccagcaccctcaggtgctgtgggacaagacaagttcatttttcctccgccctggsctgggatgagcggccacctcctcctgcccacacacgtctggccccatcccccgccccgcacagctgttcgcctgcccttggctggaccaggttcccacca

SEQ ID NO: 152542 - DNA, 201 bp, Homo sapiens; identical to SEQ ID NO: 152405

SEQ ID NO: 152543 - DNA, 201 bp, Homo sapiens
gtgaggttcagagaggcagcgccatgcctaggacagcgcagcctctatgttgctgagccaggacaggcccaggaagcctgactgtccatccagggctcaawgagatgacatttctgttgtcaggtcaggctttcagggtgcagagagctttctgaggagtctgggctgaggaacacagggtactgagctgcagcaggtctt

SEQ ID NO: 152544 - DNA, 201 bp, Homo sapiens
ccttgacaaagatcaggcaggtgaaaaggaggcacccagaagttgaactgatagatttctctcattccatacttttatttagaaaaaaagaaaactagccrggtgcagtggctcacgcttgtaatcccagcactttgggaggccgaggcgggcagatcacaagatcaggagatcgagaccatcctggctaacacggtgaaa

SEQ ID NO: 152545 - DNA, 201 bp, Homo sapiens
ggagtcgtccaagaatgtccccagggagccgcccatcagaatgcgtcaccacccagcccacatccgacctcccctggcatcccctgggtcaaggcatgcayagcctggtggggctgttgctgtgaattgggcagggcccacccctctgtgtgaccttagggaagttcctcaccttctcagccttggttgctccttataaaa

SEQ ID NO: 152546 - DNA, 201 bp, Homo sapiens
tgaagtgggaggatcacctgagcccaggtggttgaggctgcagtgagctgtgactgtgccactgcactccagcctgggtgacagagcaagaccctgtctcmaaaaaaaaaaaaaaaaaaaagtgtcaaggttgaaagggaaggaaagactgaggaacagtcagatcggaggggccccggggaaatgacactaaatgtattc

SEQ ID NO: 152547 - DNA, 201 bp, Homo sapiens
tactcaagactggagaatggcaatgacttttaccaaacatactgcctgcaaacacatttttaacaaaacacatcctgcacagccctaaatccattaaaccytgagtcaatacagtacatgtttctgcaagcacagggttggggctagggttacagattaacagcatctcaaagcagaagaatttttcttagtacagatcaa

SEQ ID NO: 152548 - DNA, 201 bp, Homo sapiens
ggggatgtggcaggactatagggtaatggtggggagagggtcagcaggaaaacatgtgagcaaaggactctgtgtcataaaaaagtttaaggaaagttgcygtgcctcgatgtgcatgtaggccagatttatgtttgactttacacgaacatctcaatgcagtaaagagcagtattgtcgccagcatgtctcacctccagc

SEQ ID NO: 152549 - DNA, 201 bp, Homo sapiens
tgggcccaggcagcactcagcatacggaggacccgcaccagcactggtctctgagttccttcagtatttattgatcactatctaccatctcagtgaggggratgtggcaggactatagggtaatggtggggagagggtcagcaggaaaacatgtgagcaaaggactctgtgtcataaaaaagtttaaggaaagttgctgtg

SEQ ID NO: 152550 - DNA, 201 bp, Homo sapiens
ctggcatcccctgggtcaaggcatgcacagcctggtggggctgttgctgtgaattgggcagggcccacccctctgtgtgaccttagggaagttcctcaccytctcagccttggttgctccttataaaaggaggtgcctggtgatctgtcctcagggttgttgtgtgattggtagaggggcaggagtagaaagcctgtgctg

SEQ ID NO: 152551 - DNA, 201 bp, Homo sapiens
ggcaggactatagggtaatggtggggagagggtcagcaggaaaacatgtgagcaaaggactctgtgtcataaataagtttaaggaaaggcgctgtgcctcratgtgcatgtaggccagatttatgtttgactttacacaaacatctcaatgcagtaaagagcagtattgccaccagcatgtctcagtcggtatagtgtgag

SEQ ID NO: 152552 - DNA, 201 bp, Homo sapiens
tgggtcaaggcatgcacagcctggtggggctgttgctgtgaattgggcagggcccacccctctgtgtgaccttagggaagttcctcaccttctcagccttsgttgctccttataaaaggaggtgcctggtgatctgtcctcagggttgttgtgtgattggtagaggggcaggagtagaaagcctgtgctgctcccctcaga

SEQ ID NO: 152553 - DNA, 201 bp, Homo sapiens
tatctaccatctcagtgagggggatgtggcaggactatagggtaatggtggggagagggtcagcaggaaaacatgtgagcaaaggactctgtgtcataaawaagtttaaggaaaggcgctgtgcctcgatgtgcatgtaggccagatttatgtttgactttacacaaacatctcaatgcagtaaagagcagtattgccacc

SEQ ID NO: 152554 - DNA, 201 bp, Homo sapiens
atgcacagcctggtggggctgttgctgtgaattgggcagggcccacccctctgtgtgaccttagggaagttcctcaccttctcagccttggttgctccttrtaaaaggaggtgcctggtgatctgtcctcagggttgttgtgtgattggtagaggggcaggagtagaaagcctgtgctgctcccctcagagggtgaacctg

SEQ ID NO: 152555 - DNA, 201 bp, Homo sapiens
agaaaagtgggcccaggcagcactcagcatacggaggacccgcaccagcactggtctctgagttccttcagtatttattgatcactatctaccatctcagygagggggatgtggcaggactatagggtaatggtggggagagggtcagcaggaaaacatgtgagcaaaggactctgtgtcataaataagtttaaggaaagg

SEQ ID NO: 152556 - DNA, 201 bp, Homo sapiens
agtaaccagagagaatttttaaaaagactcacaaacatatcattgaaatctcagtgttgggttttggggaaggcactgggcggctcccacccctgctttcyggaaacacagatttctagagtttgaaagggacgggaggctaaagtgagactgccctaaatatagcgtcctgggtatttccggatatttccggacacctgg

SEQ ID NO: 152557 - DNA, 201 bp, Homo sapiens
aatatttaaataaataaataactgtagaagaaaggacaagtcttcctttcaaaagaattccagttaataaatgtagaaggaaagaaggaaatagaaaatcrctattccagcctggacaagatggcaagaccccatctctacaaaaaatacaaaaaaaatagccaggtgtggtggtacatgactgtacatgactgtagtccc

SEQ ID NO: 152558 - DNA, 201 bp, Homo sapiens; identical to SEQ ID NO: 152391

SEQ ID NO: 152559 - DNA, 201 bp, Homo sapiens; identical to SEQ ID NO: 28349

SEQ ID NO: 152560 - DNA, 201 bp, Homo sapiens; identical to SEQ ID NO: 28350

SEQ ID NO: 152561 - DNA, 201 bp, Homo sapiens
ctcccacctcagcctcccaaagtgctgggattacaggcgtgaaccaccatgcctggccacgtgtgaactttcacagccttacaattcctcatttaattcaygtgagactgttttgccagccccatttcatgcgctcagagagattaaatggccagcccagggccacacagcacatccaaggtgacatccatggctgtggat

SEQ ID NO: 152562 - DNA, 201 bp, Homo sapiens; identical to SEQ ID NO: 28352

SEQ ID NO: 152563 - DNA, 201 bp, Homo sapiens
acttgagcctgggaagtcaaggctacagtgagccacgattgcaccactgcaccccagcctgggtgacacagcgagaccctgtctcaaaaaaaaagacaagmtattaacatgaacatgtaggatatctgtcctacttacatgattaaacaaatagtattatgtaaaaagatactagaaatcatggagatcctgggttctcag

SEQ ID NO: 152564 - DNA, 201 bp, Homo sapiens
cacagcacatgaaacagatgtgtacactgtgtgggggctgtgtgatcttaacacacgggcccccgagtacgctggcaagtctgaccgcccgtgatatgtgygcacagtgtgtggggtgtgcgtgtgcactcacccacctgtgccgcaccacaggcaggaagcttctagatggtgtggctctcaaccttttggctttttccc

SEQ ID NO: 152565 - DNA, 201 bp, Homo sapiens
gcgctcagaggcacagcacatgaaacagatgtgtacactgtgtgggggctgtgtgatcttaacacacgggcccccgagtacgctggcaagtctgaccgccygtgatatgtgcgcacagtgtgtggggtgtgcgtgtgcactcacccacctgtgccgcaccacaggcaggaagcttctagatggtgtggctctcaacctttt

SEQ ID NO: 152566 - DNA, 201 bp, Homo sapiens
caaatttcacgccactagtaataagatagattggtatcatattgtcccatttgatgctctgagaagggcatatcactttgaagggggcctgcccctccacrcctgtgggtatttctcgaaaggtggagatgagagactgagaaaagaaataagatacagagagacaaagtatagaggaagaaaagtgggcccaggggaccg

SEQ ID NO: 152567 - DNA, 201 bp, Homo sapiens
agctactcgggaggctgaggcaggagaatcgcttgaacccaggcagcagaggttgcagtgagctgagatcacgccactgcactccagcctggccgacagaktgagactgtctcaaaaaaaaaaaaaaaaagaaaaggaaaccccacactggactggaattggaggtgccagtatgatctcagatatttaaaataaaaaata

SEQ ID NO: 152568 - DNA, 201 bp, Homo sapiens
gcccagccgaaaacaggtttatttggcatacaattctagtggctgaaaggctcaaggctgggcagctgcatctggtgagagcctcaggctacttcaattcmtggcagaaagtggaaggacagtgggtgtgtacaaagagagcatgtggtgagaggaagcaagagagcaagccagactttttaacagcctcccccatctagg

SEQ ID NO: 152569 - DNA, 201 bp, Homo sapiens
ccaacacctgatctcagtgtgatctgggctttccagtcaacctccccaagcctcagtttcctcctctgtaaaatggagatactcatcttatgggactgttstgggcttgtgtgagatgatacccagcgatgcccacgtgcccagaacctctgcatctcttccttcattggtatctcacaattgccgtcacatctgtgtttg

SEQ ID NO: 152570 - DNA, 201 bp, Homo sapiens
ctgacgccaacacctgatctcagtgtgatctgggctttccagtcaacctccccaagcctcagtttcctcctctgtaaaatggagatactcatcttatgggrctgttctgggcttgtgtgagatgatacccagcgatgcccacgtgcccagaacctctgcatctcttccttcattggtatctcacaattgccgtcacatctg

SEQ ID NO: 152571 - DNA, 201 bp, Homo sapiens; identical to SEQ ID NO: 152454

SEQ ID NO: 152572 - DNA, 201 bp, Homo sapiens
tgttgatgaacagagccgtctggatttgggagaagcaggactgagtgggaattcgggacctggcccgggtcctgctctgcccttgccagccgtgtgacctrgaacggtggcaccatctccgtgggccccagggccacttcctttggttctttaccagggacctctttcattttcccattcattcattcagcaaatagttct

SEQ ID NO: 152573 - DNA, 201 bp, Homo sapiens
ccatgttccagattgagaaactgaggcataagcaggactagcaggcagaagtccagccaggatcagaatgcaggcagcttcatttttgtcctgatcccttyctgaaccagacagatttgctcctgtggtctccggtggccatggacaggggtgttgatgaacagagccgtctggatttgggagaagcaggactgagtggga

SEQ ID NO: 152574 - DNA, 201 bp, Homo sapiens
aaggaccacctctgcacactccttctgaatccttctccacccatctcagcagagaggcaggtgcccatgttccagattgagaaactgaggcataagcaggmctagcaggcagaagtccagccaggatcagaatgcaggcagcttcatttttgtcctgatcccttcctgaaccagacagatttgctcctgtggtctccggtg

SEQ ID NO: 152575 - DNA, 201 bp, Homo sapiens
ccaagcccttcaggatcagggacaggcctgacccaaccccgtgccctccttcccagggagtcggcccttgactggcctggtcgtgagccacttgaacctcsggaatgggtgtggcaggagagggtgggctggagtcacaggggtctccagagaggaggaggcacaggatggccgagggtcctgctgggctgtttactggag

SEQ ID NO: 152576 - DNA, 201 bp, Homo sapiens
ggactgggcacagtgtcactctagccattgggagccatggcaggcttctgagctgggtcatggtacaagcagagttccagggatgggctttatgagaccaratggtttcctgtcattcatttatttgacaaatgtgctcatcagggcatcccccaccctggtaccccatagtagctgcacacagtaggaaccccagaaaag

SEQ ID NO: 152577 - DNA, 201 bp, Homo sapiens
agcctggtggggctgttgctgtgaattgggcagggcccacccctctgtgtgaccttagggaagttcctcaccttctcagccttggttgctccttataaaakgaggtgcctggtgatctgtcctcagggttgttgtgtgattggtagaggggcaggagtagaaagcctgtgctgctcccctcagagggtgaacctggacctg

SEQ ID NO: 152578 - DNA, 201 bp, Homo sapiens
aggccctaagacaggagcaggctggccctaagttcagggccagcagggaggagaggggctgggtgcagtgaaggggaggagagtggagggaggtgatgccrgggtgagccaggccagctcccgtagggcctggggttccctgggaaggagggtggattttattccaagcaaccccagaggctgtcagaggtcttcagcaaa

SEQ ID NO: 152579 - DNA, 201 bp, Homo sapiens; identical to SEQ ID NO: 152494

SEQ ID NO: 152580 - DNA, 201 bp, Homo sapiens
gacgcgtggggtggcctggcccagccaccctttatgccgtgtggttctcacagctgcatgtgtgggaggtacatgggaaggtgactgcacctgcagctccyggactccatctcctctgcccttgcccctgcccctcaggggctcaactagagtgagtgctcacagcctacagggcagcaaacaggcactgtgctctagggg

SEQ ID NO: 152581 - DNA, 201 bp, Homo sapiens
cctctcaggccccatggcaggcagggctccccagggagtcacaggacagagctgcaagtggagccaggagggctgccctgggccccaggctgtccccatgkgtcagccagtctgcagagtgacactccagtgcccgggctggtgaccaccaccaccccactcaggctgctctgttctctctccgttgtgacctcacttgtc

SEQ ID NO: 152582 - DNA, 201 bp, Homo sapiens; identical to SEQ ID NO: 152495

SEQ ID NO: 152583 - DNA, 201 bp, Homo sapiens
ttcgcctgcccttggctggaccaggttcccaccacgaggacaggaagtgctccccacatccgcctcggcccgcacagcctggtgcttttccaaacctgacygtggtcactgagcccagtaaccagagagaatttttaaaaagactcacaaacatatcattgaaatctcagtgttgggttttggggaaggcactgggcggct

SEQ ID NO: 152584 - DNA, 201 bp, Homo sapiens
tgctcatcagggcatcccccaccctggtaccccatagtagctgcacacagtaggaaccccagaaaagaccttgccccttctgtccctgcagatgacgtccrcggctcccacggccggcaggtctgccgtcggcacgagctctacgtcagcttccaggaccttggctggctggtaattgctgactctccttgtttctgaaat

SEQ ID NO: 152585 - DNA, 201 bp, Homo sapiens
tgggaggcagcagcaggcattgcatgctgtatattgaggacctgtctagaggcctcgagcgcttttggccagttccagcatggttttaatgccccatttcycagcatcagacggaggtggtccacggtagcagaaggagcccagcgaggagtcagggttccgtttccacgtgtgggaacatgggaggagattgtatttggt

SEQ ID NO: 152586 - DNA, 201 bp, Homo sapiens; identical to SEQ ID NO: 152414

SEQ ID NO: 152587 - DNA, 201 bp, Homo sapiens
tgaaaagccaggcctggtgcccctagggcccaactcttgatggcagcctgtgggacccagagggcggggctctcgctggcttcccacccatgggttcaggyctccgtgcagagcaggtgctttaggaagccaagcctgcgtcctgatgttcagagcctgcactgggaggccagggctggggtcagagccggggccctgcct

SEQ ID NO: 152588 - DNA, 201 bp, Homo sapiens
agaagcagagctgatggagaagggaggctctgggctctggaaggagagggctggggatgggggagcttctccaggcctgccagatgcagggctctgaaccsagacccactgttagtccccttcaccaccccccatcttgcccagccacatccagctgggccctgcagtttgctggaaaagtatatgacaatcctggctccg

SEQ ID NO: 152589 - DNA, 201 bp, Homo sapiens
cagggtcgctgtggtgtcactgcccacacccaggctctcacacctgcttctgccagctccacctctcctatcagcctcatctgagtcctgaaaagccaggyctggtgcccctagggcccaactcttgatggcagcctgtgggacccagagggcggggctctcgctggcttcccacccatgggttcaggcctccgtgcagag

SEQ ID NO: 152590 - DNA, 201 bp, Homo sapiens
tctaatagcagggtcgctgtggtgtcactgcccacacccaggctctcacacctgcttctgccagctccacctctcctatcagcctcatctgagtcctgaawagccaggcctggtgcccctagggcccaactcttgatggcagcctgtgggacccagagggcggggctctcgctggcttcccacccatgggttcaggcctcc

SEQ ID NO: 152591 - DNA, 201 bp, Homo sapiens
ccatgggatctaatagcagggtcgctgtggtgtcactgcccacacccaggctctcacacctgcttctgccagctccacctctcctatcagcctcatctgastcctgaaaagccaggcctggtgcccctagggcccaactcttgatggcagcctgtgggacccagagggcggggctctcgctggcttcccacccatgggttc

SEQ ID NO: 152592 - DNA, 201 bp, Homo sapiens
cacacagcacatccaaggtgacatccatggctgtggattccaaatcccagcttcttcccacaccagctctgagcacttcatgaagactcggggcctccagygccgtgggattaacaagcagatcgttgttagtggaagcccaggctgtgggtgggcgcagccagctgtcagaaaggccttctttattctgctgtgctaact

SEQ ID NO: 152593 - DNA, 201 bp, Homo sapiens
gcctttgtagttagaggacagggtggggatgtgggacagaggagaccatctgtgaagctggggctggggctctgtcatcaggacaggctgacactgggctyaggaccaagaagagttgtggatggagtcgtccaagaatgtccccagggagccgcccatcagaatgcgtcaccacccagcccacatccgacctcccctggc

SEQ ID NO: 152594 - DNA, 201 bp, Homo sapiens
gggtgcagagagctttctgaggagtctgggctgaggaacacagggtactgagctgcagcaggtcttgtggggccatcagccatttgcttcctacactagarcagaagagggcatggccaagcctctgcttcccgcaacccagagctggtggtggaggcgagcagcagaaggcagccattcaccatcgctgagcgcccagtg

SEQ ID NO: 152595 - DNA, 201 bp, Homo sapiens
aagcctgactgtccatccagggctcaatgagatgacatttctgttgtcaggtcaggctttcagggtgcagagagctttctgaggagtctgggctgaggaamacagggtactgagctgcagcaggtcttgtggggccatcagccatttgcttcctacactagagcagaagagggcatggccaagcctctgcttcccgcaacc

SEQ ID NO: 152596 - DNA, 201 bp, Homo sapiens
tccacagcaggctcttctctgtgcggagcctgggtggggtgcggctgtcaggggagcggctggggaaggagcagactcagctcgctggggcagggactgtkgccttgtcaccctgggccctgcacttagcatgtggcctggtatagggtgagtgtccggtcctgtggaatggcccagtgggcagctggacccactgtgttc

SEQ ID NO: 152597 - DNA, 201 bp, Homo sapiens
gtggtcacatcatcggagtgaccagagctgagtcgcgtgccctgagtccacagcaggctcttctctgtgcggagcctgggtggggtgcggctgtcaggggrgcggctggggaaggagcagactcagctcgctggggcagggactgtggccttgtcaccctgggccctgcacttagcatgtggcctggtatagggtgagtgt

SEQ ID NO: 152598 - DNA, 201 bp, Homo sapiens
tctgagcccttggcctgggactcgaggcccctcattagtgccctgcccacctgccccacaccctggggctgccatgtatccctccctgggcactgtgggcyaccacagctcccgctcccagagctctcagggctgctcttattcctgttaataattcttattattgtgctgctcccatgtggcttggagatggccagggca

SEQ ID NO: 152599 - DNA, 201 bp, Homo sapiens
cagcgcctgggccgcgccgacctggtcatgagcttcgtcaacatgggtgagtgcggccgcccgcgcggggaccctcggagtaagctggctgcaggggaggkgcgcgcatccgcgggcggtgccgggccctggccgaacggggaatcacagacggtggacgcgaaccacaggggagtgggaccgccgtggttagggaaggtc

SEQ ID NO: 152600 - DNA, 201 bp, Homo sapiens
tactgcagccacccttctcatctggatcgggccctgcagaggcagaaaacccttaaatgctgtcacagctcaagcaggagtgtcaggggccctcactctckgtgcctacttcctgtcaggcttctggtcctttctcggtacctctgtgcccctcccctggggtttgtggctgtcactctgcccgacactttggtggcctaa

SEQ ID NO: 152601 - DNA, 201 bp, Homo sapiens
ggaggtccagaactctgccatcagtgatctctgcctatgggaagagatcgtggcctgtgtcacggcatctgagcagcccggctctcaggcgagcttttgcygcatgcccagcaccctcaggtgctgtgggacaagacaagttcatttttcctccgccctgggctgggatgagcggccacctcctcctgcccacacacgtct

SEQ ID NO: 152602 - DNA, 201 bp, Homo sapiens
gcctggtatagggtgagtgtccggtcctgtggaatggcccagtgggcagctggacccactgtgttctcccaggcaaagccgggcttttcctgtctgcaaayatcttgtatcaaaccctggagctatttattccttaagatctcagatttttcttttccagtactaaactctttggtctatgctcgtgtagttactgttggt

SEQ ID NO: 152603 - DNA, 201 bp, Homo sapiens
ggaaggtctaagggtcatgggggccccctgggctgcggggtggtcaggagcagagtgtgggggactgtggactcccaggcgctgccttcaccctgccccaracacacccaggagtaagaattaggtgatgtctttgcccacctgggctgccccgggaagacagcctggtcctggggagacaggtgagtaaacagaggccgg

SEQ ID NO: 152604 - DNA, 201 bp, Homo sapiens
gtactgaggagagggacaaagttcagcgtggaaacctgtggtcacatcatcggagtgaccagagctgagtcgcgtgccctgagtccacagcaggctcttcyctgtgcggagcctgggtggggtgcggctgtcaggggagcggctggggaaggagcagactcagctcgctggggcagggactgtggccttgtcaccctgggc

SEQ ID NO: 152605 - DNA, 201 bp, Homo sapiens
aggtgatgtctttgcccacctgggctgccccgggaagacagcctggtcctggggagacaggtgagtaaacagaggccgggatgctgtcactgtgataaggrcagtactgaggagagggacaaagttcagcgtggaaacctgtggtcacatcatcggagtgaccagagctgagtcgcgtgccctgagtccacagcaggctct

SEQ ID NO: 152606 - DNA, 201 bp, Homo sapiens
tgggtgagtgcggccgcccgcgcggggaccctcggagtaagctggctgcaggggaggggcgcgcatccgcgggcggtgccgggccctggccgaacggggartcacagacggtggacgcgaaccacaggggagtgggaccgccgtggttagggaaggtctaagggtcatgggggccccctgggctgcggggtggtcaggagc

SEQ ID NO: 152607 - DNA, 201 bp, Homo sapiens
acggcgcgcccgcggagcagcgcctgggccgcgccgacctggtcatgagcttcgtcaacatgggtgagtgcggccgcccgcgcggggaccctcggagtaarctggctgcaggggaggggcgcgcatccgcgggcggtgccgggccctggccgaacggggaatcacagacggtggacgcgaaccacaggggagtgggaccgc

SEQ ID NO: 152608 - DNA, 201 bp, Homo sapiens; identical to SEQ ID NO: 28359

SEQ ID NO: 152609 - DNA, 201 bp, Homo sapiens; identical to SEQ ID NO: 28361

SEQ ID NO: 152610 - DNA, 201 bp, Homo sapiens; identical to SEQ ID NO: 28362

SEQ ID NO: 152611 - DNA, 201 bp, Homo sapiens
ccgcaacacctgccgccgcccggggctcctagcgggcgcggcctccgcgcccaggccccgcccccgcgcccccattggtcagtcccgggggtgggcgggcrgcacagacggctgagccggggcaaggactcgcgggaatcgcgccgcccgggtcgctgccggagctcgccggtcgcccctgcgctgcgcggaccgcagcca

SEQ ID NO: 152612 - DNA, 201 bp, Homo sapiens
atcaaccaactaagctgtcagcattgccgcagggtaactgagacctccctgcattggctacgactgcagctctgggaggtgtgggcaggggagggccagcwggggagggccggctggggaggggacacaaagtgaagatgggggttgttgggcctgagctcctgcccagccttttccgccgggggttcctgggtggattca

SEQ ID NO: 152613 - DNA, 201 bp, Homo sapiens; identical to SEQ ID NO: 152411

SEQ ID NO: 152614 - DNA, 201 bp, Homo sapiens; identical to SEQ ID NO: 152408

SEQ ID NO: 152615 - DNA, 201 bp, Homo sapiens
tgctgggctgtttactggagcataaagacgctcataggctgaaggacaggggaggactgggcacagtgtcactctagccattgggagccatggcaggcttytgagctgggtcatggtacaagcagagttccagggatgggctttatgagaccaaatggtttcctgtcattcatttatttgacaaatgtgctcatcagggca

SEQ ID NO: 152616 - DNA, 201 bp, Homo sapiens
gcttctttgaatcactgtgctgagttcttggaggctgagaaacaggatttcttggagatgaactggccttgcctgtcactccaacctcctcatacacctcrgccccctgaccactagattccaaccacaccagcctccttgatgtttctcaaacatgcagagcctttgtatccactgttccctctgcctagaaggctgtcc

SEQ ID NO: 152617 - DNA, 201 bp, Homo sapiens
gaggaggcaggtccacagcaacgggaatgtcggtggcttctgatggagtcacatggggacatggtagccacacccagactggcagtgatacccagcccaargggctctgagtgccggacactgagccgctgtcctggggacaagaggcccttgggaagaaggggccggggcacccccgctctggggccccggaacacagcg

SEQ ID NO: 152618 - DNA, 201 bp, Homo sapiens
ttatgccaggcagtaggaatacagaggccaaagtgggcacgagatgggtgtgtttgaggcccggcaagggggcgccatggagcagcggtgagggcgggggwcccaggggccattctgagtcagagtaaaccagggccaggtgctggggttcttagcgtcatttattttatttactagcagtggaggacgacaggatctgat

SEQ ID NO: 152619 - DNA, 201 bp, Homo sapiens
tgtccctggtctctctgtgctcagggaggggagagccctgagctgggaggcaggacccaggttcttgtgctgcctgggcccaccattaactcctgcatgtsctgagccacggcccttcccttccctgggcctctgctttctcgtccattctacggtgatggcatcagaaaagcaaggtgcctcccagccctgaccctgtgg

SEQ ID NO: 152620 - DNA, 201 bp, Homo sapiens
cagcacatccaaggtgacatccatggctgtggattccaaatcccagcttcttcccacaccagctctgagcacttcatgaagactcggggcctccagcgccrtgggattaacaagcagatcgttgttagtggaagcccaggctgtgggtgggcgcagccagctgtcagaaaggccttctttattctgctgtgctaactgcac

SEQ ID NO: 152621 - DNA, 201 bp, Homo sapiens
gctagtgacaggccggggtctgggagccaaggaccacagctcagcccgaagtgggggagctgtggggctgagagcagggagtgggtacctgccccagccaycagcctccctccacagacagcatcattaattcttcatcctcccgacaaccctgataacagccacggtcttcatccccatctcccagatgaggacagtgag

SEQ ID NO: 152622 - DNA, 201 bp, Homo sapiens; identical to SEQ ID NO: 152474

SEQ ID NO: 152623 - DNA, 201 bp, Homo sapiens
gtgcttcccactggccagaggcgcagcccaggctcctggcccgggattcgcaccctcagcaggcaggccgcagcagagctcatgtgccgtccccaacatcrctgacctgtgggcgcctccaccctgtgcatgcgaggtcccctctccctagagcaccctccctgccaccttctccacctaccaagacccatcccacccttc

SEQ ID NO: 152624 - DNA, 201 bp, Homo sapiens
aaagtgcatttctttttttttctttttttttttttcttttttttttttttttttgagatagggactcattctgttgcccactggagtgcagtggcgcaatmtgggctgaccgcaacctccgcctcccaagctcaaactattctcctgcctcagcctcctgagtagctggagttacaggcacatgctaccatgcctggctaa

SEQ ID NO: 152625 - DNA, 201 bp, Homo sapiens
atcctgtgtctgggagaccccccataagacccttgaacacagctgcacagaagcaaatagtgaggaaagcctgcaggactgatggcctctcaggccccatrgcaggcagggctccccagggagtcacaggacagagctgcaagtggagccaggagggctgccctgggccccaggctgtccccatgggtcagccagtctgca

SEQ ID NO: 152626 - DNA, 201 bp, Homo sapiens
caaggtgacatccatggctgtggattccaaatcccagcttcttcccacaccagctctgagcacttcatgaagactcggggcctccagcgccgtgggattarcaagcagatcgttgttagtggaagcccaggctgtgggtgggcgcagccagctgtcagaaaggccttctttattctgctgtgctaactgcactagtagaac

SEQ ID NO: 152627 - DNA, 201 bp, Homo sapiens
atatggtgagaaagggttttgttgttgttgttgtgttttttgttttttttaaaaccatgaaaatgaagactgaatcaaccaactaagctgtcagcattgcygcagggtaactgagacctccctgcattggctacgactgcagctctgggaggtgtgggcaggggagggccagctggggagggccggctggggaggggacac

SEQ ID NO: 152628 - DNA, 201 bp, Homo sapiens
cacccacctgtgccgcaccacaggcaggaagcttctagatggtgtggctctcaaccttttggctttttcccgcagtttctctcttggctgtctgtgttttytctggatcccctggcttttgatgccttggtgtctggggcaaccttaaaggacaaaagcaggcttctgatgggatcactggtgctgctcaccactgagtgc

SEQ ID NO: 152629 - DNA, 201 bp, Homo sapiens
tcacaaacatatcattgaaatctcagtgttgggttttggggaaggcactgggcggctcccacccctgctttccggaaacacagatttctagagtttgaaasggacgggaggctaaagtgagactgccctaaatatagcgtcctgggtatttccggatatttccggacacctggggaaatgtgggctttattccgcaactac

SEQ ID NO: 152630 - DNA, 201 bp, Homo sapiens
accgtgcccatcctgcccagccccctggggtgggaggccctgcagagaggggtctggtccagccagccgggagggcagtgaggccacctgctccatgtctsgggggctttgtctgcacagagtcagtaacgtcgctaacttcccacagctctgcaggaactggtcctcatacagccacactactacacatagacccacacc

SEQ ID NO: 152631 - DNA, 201 bp, Homo sapiens
ccttctcccttgccccccaggactgggtcatcgccccccaaggctactcagcctattactgtgagggggagtgctccttcccgctggactcctgcatgaaygccaccaaccacgccatcctgcagtccctggtcagtaccgtgcccatcctgcccagccccctggggtgggaggccctgcagagaggggtctggtccagcc

SEQ ID NO: 152632 - DNA, 201 bp, Homo sapiens
gcacatggatgggactcaccttctcccttgccccccaggactgggtcatcgccccccaaggctactcagcctattactgtgagggggagtgctccttcccrctggactcctgcatgaacgccaccaaccacgccatcctgcagtccctggtcagtaccgtgcccatcctgcccagccccctggggtgggaggccctgcaga

SEQ ID NO: 152633 - DNA, 201 bp, Homo sapiens
cagccttttccgccgggggttcctgggtggattcaagcctcttgggggagacggccctgcagggctggaggatgggtttgggccctgaggctcagggaggrgcacatggatgggactcaccttctcccttgccccccaggactgggtcatcgccccccaaggctactcagcctattactgtgagggggagtgctccttccc

SEQ ID NO: 152634 - DNA, 201 bp, Homo sapiens
cacacgagcccagaagttcaagacaagcctgagcaacacagcaaaaccctgtctctaaaataaaaattaaaacacacacacacacacacacacacacacamgtgcgcacacaatgccttggtgtgagaggaaagaaattaccaaaagctgctctgagcctatgataatacttcctttctgggcagtcaaatggtgtttgct

SEQ ID NO: 152635 - DNA, 201 bp, Homo sapiens
aggtgtgggcaggggagggccagctggggagggccggctggggaggggacacaaagtgaagatgggggttgttgggcctgagctcctgcccagccttttcygccgggggttcctgggtggattcaagcctcttgggggagacggccctgcagggctggaggatgggtttgggccctgaggctcagggaggagcacatggat

SEQ ID NO: 152636 - DNA, 201 bp, Homo sapiens
gggccccacgctcccaacagcctttcgtggtcactttcttcagggccagtccgagtcccatccgcacccctcgggcagtgaggccactgaggaggaggcarccgaagaaaagcaacgagctgccgcaggccaaccgactcccagggatctttggtgagggtcgggcaggctggggccgaggccctgtgggcttctggctga

SEQ ID NO: 152637 - DNA, 201 bp, Homo sapiens
caacctgagttttgtcagggataaaacacatccaaactgtagcaaggggtatattatctgtactgttcaccttgcttttttctttttctttttttgagacrgagtctcaccctggagtgccatggcacaatgacagctcactgcagtctccacctcccaggctcaagccatcctcctacctcagcctcctgaatagactat

SEQ ID NO: 152638 - DNA, 201 bp, Homo sapiens
gcctggtggggctgttgctgtgaattgggcagggcccacccctctgtgtgaccttagggaagttcctcaccttctcagccttggttgctccttataaaagraggtgcctggtgatctgtcctcagggttgttgtgtgattggtagaggggcaggagtagaaagcctgtgctgctcccctcagagggtgaacctggacctgg

SEQ ID NO: 152639 - DNA, 201 bp, Homo sapiens
cacatgatacagcaaaaggagttcattgcaatactgtctttggatattgtttcagtactgggtgtttaaaggacaaatagctgctagaattcaggggtaartgtaagtgttcagaaaacgtcagaacatttggggttttaaactgatttgttgctccctatccagcctagacaccagtaactcttgtgttcaccaggaccc

SEQ ID NO: 152640 - DNA, 201 bp, Homo sapiens
tatcaaaccctggagctatttattccttaagatctcagatttttcttttccagtactaaactctttggtctatgctcgtgtagttactgttggtcaggtcmcccgtctgctttgcctcctgtctgtggctagtgacaggccggggtctgggagccaaggaccacagctcagcccgaagtgggggagctgtggggctgagag

SEQ ID NO: 152641 - DNA, 201 bp, Homo sapiens; identical to SEQ ID NO: 28367

SEQ ID NO: 152642 - DNA, 201 bp, Homo sapiens
cccctgggctgcggggtggtcaggagcagagtgtgggggactgtggactcccaggcgctgccttcaccctgccccagacacacccaggagtaagaattagrtgatgtctttgcccacctgggctgccccgggaagacagcctggtcctggggagacaggtgagtaaacagaggccgggatgctgtcactgtgataaggaca

SEQ ID NO: 152643 - DNA, 201 bp, Homo sapiens; identical to SEQ ID NO: 28370

SEQ ID NO: 152644 - DNA, 201 bp, Homo sapiens; identical to SEQ ID NO: 28371

SEQ ID NO: 152645 - DNA, 201 bp, Homo sapiens; identical to SEQ ID NO: 28352

SEQ ID NO: 152646 - DNA, 201 bp, Homo sapiens; identical to SEQ ID NO: 28373

SEQ ID NO: 152647 - DNA, 201 bp, Homo sapiens; identical to SEQ ID NO: 152449

SEQ ID NO: 152648 - DNA, 201 bp, Homo sapiens; identical to SEQ ID NO: 28375

SEQ ID NO: 152649 - DNA, 201 bp, Homo sapiens
agaaatttctcagttgattgccctcttgtggtattttatttacttatttttttaaatcttccattacagccatgcctttcttggacatccagaaaaggttyggccttaacatagatcgatggttgacaatccagagtggtgaacagccctacaagatggctggtcgatgccatgcttttgaaaaagaatggatagaatgtg

SEQ ID NO: 152650 - DNA, 201 bp, Homo sapiens
gcgcaaaaactgcttatctgccataaactggaagaacctatttaatgaaaaagtttggtgagaagaaatcaggagaataatatcaaacagtgttctagagrgctacttagcatgattatctaattttttcttagaaatttctcagttgattgccctcttgtggtattttatttacttatttttttaaatcttccattacag

SEQ ID NO: 152651 - DNA, 201 bp, Homo sapiens
agcctctgcctcccaggttcaggcgattcgcgtacctcagcctcccgagtagctgggattataggcacctgccaccacgcctggctaatttttgtattttkagtagaaacgggatttcaccatgctggccaggctggtcttgaactccagacctcaggtgatccgcccccctcagcctcccaaagtagtgggatcacaggc

SEQ ID NO: 152652 - DNA, 201 bp, Homo sapiens
tttcccccgcatctgagtgcctggaacgtaactactcagtaaatgatgactgagggatgggaaggaacttaagaagttaaattcacctttttgttgagatggagtttcgctcttgttgcccaggctggagtgcagagtggcgcgatctcggctcactgcagcctctgcctcccggattcaagcgattctcctccctgagac

SEQ ID NO: 152653 - DNA, 201 bp, Homo sapiens
acattgttattaactagcatcaccatgttgtacaacagttctcttgaacatattcctccagtctaattgaaattttgtatctttagaccaacatctctccrtctaccctccccaggagatagaaattccttatccacaaggatggagacaatgttggtcaacccactttcatttacttaacattacttttattctaggtgt

SEQ ID NO: 152654 - DNA, 201 bp, Homo sapiens
acgcccagctaattttcatatttttagtacagacagggtttcaccatgttgaccaggctggtctcgaactcctgacctcaagtgatccgtgccccccccccgccccggcctcccaaagtgctgggattacaggtgtgagccaccatgcccagcctattttattctttaatattaattttttgagacagggtgtcactgaga

SEQ ID NO: 152655 - DNA, 201 bp, Homo sapiens
gacaaggtttcaccatgttgcccaggctgatctcgaactcctgagctcaggtgatctgcctgccttggcctcccaaaatgctgggattacaggtgtgagayactgcacctggccctaattttgattttatttatataaaatagaaatggggtcttcttgtgttgcccaggctggtctcaaactcctgggctcaagcgatcc

SEQ ID NO: 152656 - DNA, 201 bp, Homo sapiens
tttgagactgtgtcttactctttcacccagcctgagtgcagtgatgccatcactgctcactggagcctcagcctcctgggctcaggctgtccttcctcctsagcctcgcgagtagctgggactacaggtgtgcaccaccacttctgcctgtaacttatttttcataaaacatagacttgagctgggagagggaggcagtgg

SEQ ID NO: 152657 - DNA, 201 bp, Homo sapiens
gggactctttttttttttttttgagacgaagtctcactcttgtcccctaggctggtgtgtgatggcgccacctcgtctcactgtagcctctgcctcccagrttcaggcgattcgcgtacctcagcctcccgagtagctgggattataggcacctgccaccacgcctggctaatttttgtatttttagtagaaacgggattt

SEQ ID NO: 152658 - DNA, 201 bp, Homo sapiens
tttagcagagacaaggtttcaccatgttgcccaggctgatctcgaactcctgagctcaggtgatctgcctgccttggcctcccaaaatgctgggattacargtgtgagacactgcacctggccctaattttgattttatttatataaaatagaaatggggtcttcttgtgttgcccaggctggtctcaaactcctgggctc

SEQ ID NO: 152659 - DNA, 201 bp, Homo sapiens
cgtgctgccacacctggctaatttttgtatttttagtagaaacagggtttcaccatgttggtcaggctggtctcgaactcctgatgtcatgataacacctcggcctcccaacatgctgggattacaggcgttataacagtggcatattagcactagttaacttttttttttctttttaaaatttattttattttgaaatgg

SEQ ID NO: 152660 - DNA, 201 bp, Homo sapiens
gtatattactcgtatctgcaaatctgtaattaaaaggctcacaatacaattttctttaatatgatggagttttgctcttgttgcccaggctggagtgcgayggcatgatctcagcttaccgcaacctccgcctcccgggttgaagcgattctcctgcctcagctgctgagtagctgggattacaggtatgtgccaccacgc

SEQ ID NO: 152661 - DNA, 201 bp, Homo sapiens
tctgcgtgatttcggccccgccggcctcctgagctcatttcattcttttcaccgtcatgcacgctgcgctccattgtcccccaaacatagccagcacttcyggctgtaactccgggctgttgcccaactggaacactctgcccactgatcttcacttggcgaactcgcaagccatgttaaaggcattttcaagtctccggg

SEQ ID NO: 152662 - DNA, 201 bp, Homo sapiens
cgctgaggtcatcctttacggcaggcgtccgcgtcgctagctagtcgttctgaagcggcggccagagaagagtcaagggcacgagcatcgggtaggtaggkgctgcttatgtccgcgcggcagcttagcttaaggaccttccttccgaggtctctttaacagatttcctcttggcttgctgtgtgtccccttctcccagac

SEQ ID NO: 152663 - DNA, 201 bp, Homo sapiens
gcctctgcctcccggattcaagcgattctcctccctgagactcccgagtagctgggattacaggcatgcgcccccacgcccggctaattttgtattttttyagtagagagagggtttcgccatgttggtcaggctggtcttgaactcgcggcctcaggtgatccgcccgcctcggcctcccaaggtgctggaattacaggc

SEQ ID NO: 152664 - DNA, 201 bp, Homo sapiens
gaaagtgctaggggcaggagctaggtggatgctactttaaatagtcagagaagatctcagcaaaagaagacagaccagagacttaaagaaagtgagctatrtggttatgagggaagaatgttccatgcagaggaaacagcaagtgcaaaggtccctgagctgactggagggagctaggggaatattaagagatgaagtcac

SEQ ID NO: 152665 - DNA, 201 bp, Homo sapiens
gaaatgatgttgaagatgaaacccacagtggcagaccatccacatcaatttatgagaaaaacattttgtgtcctaactgaagtggattgacaacagcagarataataatcaataccataggcatctcacttggttcggcttacataattctgactgaaaaactaaagttgagcaaacattccacttggcaggtgccaaacc

SEQ ID NO: 152666 - DNA, 201 bp, Homo sapiens
caccatgcccggcgaattttgtatttttagtagagacggggtttctccatgttggtcagggtggtcttgcactcccagcctcaggtgatctgcctgcctcrgcctcccaaagtgttggggatataggcatgagccactgcacctggccctccaaagaggattttagaagagaggaaaccggtcaaagggattctttaagcc

SEQ ID NO: 152667 - DNA, 201 bp, Homo sapiens
tagagtgtttgcttcggcagaaaacggtaaggaaatgatggaggtggaagctgaattactttcttgttcctttgggactctttttttttttttttgagacraagtctcactcttgtcccctaggctggtgtgtgatggcgccacctcgtctcactgtagcctctgcctcccaggttcaggcgattcgcgtacctcagcctc

SEQ ID NO: 152668 - DNA, 201 bp, Homo sapiens; identical to SEQ ID NO: 28377

SEQ ID NO: 152669 - DNA, 201 bp, Homo sapiens
gagtgcaccaccacgcccagctaattttttgtattttagcagagacaaggtttcaccatgttgcccaggctgatctcgaactcctgagctcaggtgatctscctgccttggcctcccaaaatgctgggattacaggtgtgagacactgcacctggccctaattttgattttatttatataaaatagaaatggggtcttctt

SEQ ID NO: 152670 - DNA, 201 bp, Homo sapiens
agattcaacttgggttcaggtgattcttccacttcagcctcccaagtagctgggactacaggagtgcaccaccacgcccagctaattttttgtattttagyagagacaaggtttcaccatgttgcccaggctgatctcgaactcctgagctcaggtgatctgcctgccttggcctcccaaaatgctgggattacaggtgtg

SEQ ID NO: 152671 - DNA, 201 bp, Homo sapiens
aacaggaggcattgtagtaaggtggaaagaacattggattgggagttaggagagtcaggttctgatgctggttctgccaccactcatttgttgttggttgrttaattttaatttatgttttgagacagcgtctcactcccgtcgcccaggctggagtgcggtagcgtgttcacagctcactgcagattcaacttgggttca

SEQ ID NO: 152672 - DNA, 201 bp, Homo sapiens
ccctcagtttaattaccattttcctttgacagatgagacgtgcaggtaccatcaggaagcagcgggataagctgataaaggaaggaaagtacacccctccmcctcaccacattggcaagggggagcctcggccctgaacagagcagctgctgatgtctggaggctgattttcctgttctctgttctccactggaaaggttg

SEQ ID NO: 152673 - DNA, 201 bp, Homo sapiens
cctgaaactgagaggcagaggttccagtgagctgagaacacaccactgcactccagcctgggcgacagagcgagactccgtctcaagaaaaaaaaaaaaaagatggcccggcacagtagctcactcctgtaatcccagcactttgggaggccgaggcaggcggatcacaaggtcaggagttcgagaccagcctgaccaaca

SEQ ID NO: 152674 - DNA, 201 bp, Homo sapiens
gtagagatggggtttcaccatgttagccagattggtctcaatctcctgacctcagcctcccaaagtgctgggattacaggcgtgagccactgcaccttacyggtcagttgttttttgacaagagtgccaagactattgaatggtcaacaagtggtgctgggataaccaaatagctacatgcaaaagaatgaacttggacct

SEQ ID NO: 152675 - DNA, 201 bp, Homo sapiens
gagggtgaggcaagagaatcgcctgaaactgagaggcagaggttccagtgagctgagaacacaccactgcactccagcctgggcgacagagcgagactccrtctcaagaaaaaaaaaaaaaagatggcccggcacagtagctcactcctgtaatcccagcactttgggaggccgaggcaggcggatcacaaggtcaggagt

SEQ ID NO: 152676 - DNA, 201 bp, Homo sapiens
atttcgtagagtgtttgcttcggcagaaaacggtaaggaaatgatggaggtggaagctgaattactttcttgttcctttgggactctttttttttttttttgagacgaagtctcactcttgtcccctaggctggtgtgtgatggcgccacctcgtctcactgtagcctctgcctcccaggttcaggcgattcgcgtacctc

SEQ ID NO: 152677 - DNA, 201 bp, Homo sapiens
ccccatctctactaaaaatacaaaaattagctgggcgtggtggtgcgcacctgtagtcccagctacttgggaggctgaggcaggagaatcgcttgaacccyggaggaggaggttgcagtgagccaagattgcaccatgcgctgcagcctgggtaacagacggagactccatctcacgtggtaggtgagccaccgctcctga

SEQ ID NO: 152678 - DNA, 201 bp, Homo sapiens
tttcgtatctttgtgaaaagttagtcattggttaaaaaaattatgtcagaaactagtctaggcactaggaatacagtaagcaaaacagcaaaaaaaaaaaatctcagagtcagtgagcttatgctatagtgggaggaagagcagaaaaataacaagtaaaaatacaggtgataataagtgctgtgaggagaataaacagaa

SEQ ID NO: 152679 - DNA, 201 bp, Homo sapiens
actacggggccagggcagggccacacacctgccacttcctcagcagagaccctagcgcgtgggtcactgctggcccagactccttccacgagcaggcgagkgtgcagggccacacctcatccaagagatgatcacgtttaggtttttgatgaaaagcatagctctcaggtaaatacagcagcacctctaagcatattctgg

SEQ ID NO: 152680 - DNA, 201 bp, Homo sapiens
gaggccctgtttctacaaaataataattttttttttttttttgagacagagtcttgctttgttgcccaggctggagtgcagtggcacaatctcggcttgcygcagcctctgcctcctgggttccagtgattcccctgcctcaacctcctgggtagctgggattacaggcgcatgccaccatacctggctaatttttgtatt

SEQ ID NO: 152681 - DNA, 201 bp, Homo sapiens
aggcatttttgaagctctataaaggcttagagccattagaaagggtaggcaactaaaagttctaaacagttttaattatcctctggtttggttttattgtwgggtttttttttttttgtaattttatttggatatattttcaaacttacagatatatagaataagaattctgtaagaatatttcaaggggccaggtgcagt

SEQ ID NO: 152682 - DNA, 201 bp, Homo sapiens
atttttgaagctctataaaggcttagagccattagaaagggtaggcaactaaaagttctaaacagttttaattatcctctggtttggttttattgttgggtttttttttttttgtaattttatttggatatattttcaaacttacagatatatagaataagaattctgtaagaatatttcaaggggccaggtgcagtggtt

SEQ ID NO: 152683 - DNA, 201 bp, Homo sapiens
aactttttctatttctgtaagttttataaacaaaggtcatcaaagtgcttggaaagcaacttcaggttttacgttctatagtggtacaactgaattttatyttattttaattagttaattaatttatttatttttgagatggagtcttgctttgtcacccaggctggagtgcaatggcgtgatcttggctcactgcagcct

SEQ ID NO: 152684 - DNA, 201 bp, Homo sapiens
gccttttacactgtgggtatccctcccctgctggctagccagttcctcaagggcaggggccatatctatctaactgcctatctatttattttttatttttwgattcagggtcttgctctgttgcccaggctggagtgcagtggtaccatcacagctcactgcagctttgaccttccaggctcaagtggtcttcctgcccca

SEQ ID NO: 152685 - DNA, 201 bp, Homo sapiens
aataaaggtactatgtacttttttagatttggagagctggagtttgggtgtgtgtgtgtattttatttcagagacagggtctcactttgtcacctaggagtgtgccaccatgcctagctagtttctgtatttttagtagagatggggttttgccatgttggccaggctggtctcgaactcctgacctcaggtgatccaccc

SEQ ID NO: 152686 - DNA, 201 bp, Homo sapiens
tttttgtttttgtttttttttatggagacagagtctgtctgtgtcacccaggctggagtgcagtggcgcgatctcggctcactgcaacctccgcctcctgrgttcaagcagttctcctacctcagcctcccgaatagctgggactacaggcacacaccgccatgcccagctaattttttgtattttagtagagacggggtt

SEQ ID NO: 152687 - DNA, 201 bp, Homo sapiens
tgaattccttccttagccctcagcacctctctccacattatccttatgccatgtcagccccttctatctcctaaggttataacgatctttcattgtccgaatgatattctgatctctatccctagccctgacctttcacatatttctgtttgggtgtcttataggcaccataaataaagcatatcccaaatgggtttcatc

SEQ ID NO: 152688 - DNA, 201 bp, Homo sapiens
aaacccatcctccagccctgcagggccgtctcccccaagaggcttgaatccacccaggaacccccggcggaaaaggctgggcaggagctcaggcccaacawcccccatcttcactttgtgtcccctccccagccggccctccccagctggccctcccctgcccacacctcccagagctgcagtcgtagccaatgcagggag

SEQ ID NO: 152689 - DNA, 201 bp, Homo sapiens
gaattccttccttagccctcagcacctctctccacattatccttatgccatgtcagccccttctatctcctaaggttataacgatctttcattgtccgaatgatattctgatctctatccctagccctgacctttcacatatttctgtttgggtgtcttataggcaccataaataaagcatatcccaaatgggtttcatca

SEQ ID NO: 152690 - DNA, 201 bp, Homo sapiens
tgcagggccgtctcccccaagaggcttgaatccacccaggaacccccggcggaaaaggctgggcaggagctcaggcccaacaacccccatcttcactttgygtcccctccccagccggccctccccagctggccctcccctgcccacacctcccagagctgcagtcgtagccaatgcagggaggtctcagttaccctgcgg

SEQ ID NO: 152691 - DNA, 201 bp, Homo sapiens
aattccttccttagccctcagcacctctctccacattatccttatgccatgtcagccccttctatctcctaaggttataacgatctttcattgtccgaatgatattctgatctctatccctagccctgacctttcacatatttctgtttgggtgtcttataggcaccataaataaagcatatcccaaatgggtttcatcac

SEQ ID NO: 152692 - DNA, 201 bp, Homo sapiens
ggcggaaaaggctgggcaggagctcaggcccaacaacccccatcttcactttgtgtcccctccccagccggccctccccagctggccctcccctgcccacrcctcccagagctgcagtcgtagccaatgcagggaggtctcagttaccctgcggcaatgctgacagcttagttggttgattcagtcttcattttcatggtt

SEQ ID NO: 152693 - DNA, 201 bp, Homo sapiens
  misc_feature (1)...(201): n = A,T,C or G
cgtagccaatgcagggaggtctcagttaccctgcggcaatgctgacagcttagttggttgattcagtcttcattttcatggttttaaaaaaaacaaaaaanacaacaacaacaacaaaaccctttctcaccatattctcactttagaaaacttggaaaacacagaagaaaaaaatacataagaaaattgaagtcaccatga

SEQ ID NO: 152694 - DNA, 201 bp, Homo sapiens
tagccaatgcagggaggtctcagttaccctgcggcaatgctgacagcttagttggttgattcagtcttcattttcatggttttaaaaaaaacaaaaaacasaacaacaacaacaaaaccctttctcaccatattctcactttagaaaacttggaaaacacagaagaaaaaaatacataagaaaattgaagtcaccatgatt

SEQ ID NO: 152695 - DNA, 201 bp, Homo sapiens
atgcagggaggtctcagttaccctgcggcaatgctgacagcttagttggttgattcagtcttcattttcatggttttaaaaaaaacaaaaaacacaacaamaacaacaaaaccctttctcaccatattctcactttagaaaacttggaaaacacagaagaaaaaaatacataagaaaattgaagtcaccatgattctatgt

SEQ ID NO: 152696 - DNA, 201 bp, Homo sapiens
cttttctggggttcctactgtgtgcagctactatggggtaccagggtgggggatgccctgatgagcacatttgtcaaataaatgaatgacaggaaaccatytggtctcataaagcccatccctggaactctgcttgtaccatgacccagctcagaagcctgccatggctcccaatggctagagtgacactgtgcccagtcc

SEQ ID NO: 152697 - DNA, 201 bp, Homo sapiens
ggaggtctcagttaccctgcggcaatgctgacagcttagttggttgattcagtcttcattttcatggttttaaaaaaaacaaaaaacacaacaacaacaamaaaaccctttctcaccatattctcactttagaaaacttggaaaacacagaagaaaaaaatacataagaaaattgaagtcaccatgattctatgtcctccc

SEQ ID NO: 152698 - DNA, 201 bp, Homo sapiens
agaaaaaaatacataagaaaattgaagtcaccatgattctatgtcctccctgcagattcacttctgatctacaggtggtgattgtcatttcagaaacaagragagtcagcaattaccagccagccaaggtcctggaagctgacgtagagctcgtgccgacggcagacctgccggccgtgggagccgtggacgtcatctgca

SEQ ID NO: 152699 - DNA, 201 bp, Homo sapiens; identical to SEQ ID NO: 106970

SEQ ID NO: 152700 - DNA, 201 bp, Homo sapiens
gaggcaggaggattgcttgagctcaggagttcaagactggcctgggcaaagtttaagaccggcctgggcaacatagtgagacctggtttctataaaaaatwaaaaaattagctgggtatggtggcgtgtgcctgtcatcccagcaactcgggctgaggtgggaggattgcttgagcccagcaggttgaggctgcagtgagc

SEQ ID NO: 152701 - DNA, 201 bp, Homo sapiens
tgtttcatgtgctgtgcctctgagcgccgcacgcaggtgtgtaagtgtcccacaggagtttgttcagtgcatagaacaggcatgcatacgcgactgttcaygtgtgtccgtgtttgggtgtgggtctatgtgtagtagtgtggctgtatgaggaccagttcctgcagagctgtgggaagttagcgacgttactgactctgt

SEQ ID NO: 152702 - DNA, 201 bp, Homo sapiens
tttgctgaagacctctgacagcctctggggttgcttggaataaaatccaccctccttcccagggaaccccaggccctacgggagctggcctggctcacccyggcatcacctccctccactctcctccccttcactgcacccagcccctctcctccctgctggccctgaacttagggccagcctgctcctgtcttagggcct

SEQ ID NO: 152703 - DNA, 201 bp, Homo sapiens
ggatgggcacggtactgaccagggactgcaggatggcgtggttggtggcgttcatgcaggagtccagcgggaaggagcactccccctcacagtaataggcygagtagccttggggggcgatgacccagtcctggggggcaagggagaaggtgagtcccatccatgtgctcctccctgagcctcagggcccaaacccatcct

SEQ ID NO: 152704 - DNA, 201 bp, Homo sapiens
cccctagagcacagtgcctgtttgctgccctgtaggctgtgagcactcactctagttgagcccctgaggggcaggggcaagggcagaggagatggagtccrggagctgcaggtgcagtcaccttcccatgtacctcccacacatgcagctgtgagaaccacacggcataaagggtggctgggccaggccaccccacgcgtc

SEQ ID NO: 152705 - DNA, 201 bp, Homo sapiens
taatcccagctactcaggaggctgaggcaggagaattgcttgaacccaggaggcggaggttgcagtgagttgagatcgcgctactgcactccagtctgggygacagagcaagactccctttccaaaaacaagcaaatgaaaaaatagagttttctctatcacacaaatgggaaggtttgtattgaatgttatatttatcct

SEQ ID NO: 152706 - DNA, 201 bp, Homo sapiens
atccacccaggaacccccggcggaaaaggctgggcaggagctcaggcccaacaacccccatcttcactttgtgtcccctccccagccggccctccccagcyggccctcccctgcccacacctcccagagctgcagtcgtagccaatgcagggaggtctcagttaccctgcggcaatgctgacagcttagttggttgattca

SEQ ID NO: 152707 - DNA, 201 bp, Homo sapiens
atttcagaaacaaggagagtcagcaattaccagccagccaaggtcctggaagctgacgtagagctcgtgccgacggcagacctgccggccgtgggagccgyggacgtcatctgcagggacagaaggggcaaggtcttttctggggttcctactgtgtgcagctactatggggtaccagggtgggggatgccctgatgagca

SEQ ID NO: 152708 - DNA, 201 bp, Homo sapiens; identical to SEQ ID NO: 106958

SEQ ID NO: 152709 - DNA, 201 bp, Homo sapiens
acactgtgggtatccctcccctgctggctagccagttcctcaagggcaggggccatatctatctaactgcctatctatttattttttattttttgattcarggtcttgctctgttgcccaggctggagtgcagtggtaccatcacagctcactgcagctttgaccttccaggctcaagtggtcttcctgccccagcctccc

SEQ ID NO: 152710 - DNA, 201 bp, Homo sapiens; identical to SEQ ID NO: 28383

SEQ ID NO: 152711 - DNA, 201 bp, Homo sapiens
acattttatcccccaaaaggaaacttcataccctttagcagttgctacttatcctgttggtcccctgccctgggaaacccgaatttactttctgtctttayggattttcccattctaggcatttaatataagtggaatcatacaatatgtaggcttttgtgagtgtcttctttcacttagcataatgttttcaaggttcat

SEQ ID NO: 152712 - DNA, 201 bp, Homo sapiens
tttcatttctcttagatgtagccatagaattggaaatgctgggttatataactatttatttatttttttttgagacagaatttcactctagagtgcagtgrcacaatctcggctcactgcaacctccacctccctggttcaagagattctcctgcctcagcctcccctagctaggattacaggcatgcacctccatactcg

SEQ ID NO: 152713 - DNA, 201 bp, Homo sapiens; identical to SEQ ID NO: 28385

SEQ ID NO: 152714 - DNA, 201 bp, Homo sapiens
agattacagatgtgagccaccatgcctagctgaaatactgaattttcatacgtttctgggtctattcgggactttctcttcttttcacctagtctgttctrtctatttgtgtgccacttccacacttaagcatttagtttaaataaaggtactatgtacttttttagatttggagagctggagtttgggtgtgtgtgtgta

SEQ ID NO: 152715 - DNA, 201 bp, Homo sapiens
gaggcacgagaattgcttgaacctgggaggcagaggttgcagtgagccaggattgcaccactgcactccagcctgggtgacagagtgagactctatctggaaaaaaaaaaaaaaaatccccagtggcttcgtggggatgtccagcttattctttttctaatatgctaactgcaccctggaccaaatgagaagaatcccaga

SEQ ID NO: 152716 - DNA, 201 bp, Homo sapiens
tgccctggccatctccaagccacatgggagcagcacaataataagaattattaacaggaataagagcagccctgagagctctgggagcgggagctgtggtrgcccacagtgcccagggagggatacatggcagccccagggtgtggggcaggtgggcagggcactaatgaggggcctcgagtcccaggccaagggctcaga

SEQ ID NO: 152717 - DNA, 201 bp, Homo sapiens
tggccaccaggaaggccacgactgtcacactttgtgctttgctgcataaaaagggagtctcatcatgatcctcaggcctgctgtgcacacctgatgggcayagcagcgtttgcgtcttgaaaacattcatttcacaaactcctagcacacccaaaccatgccaggttacacactgggcactgaagagaccacacatttgtc

SEQ ID NO: 152718 - DNA, 201 bp, Homo sapiens
ttaggccaccaaagtgtcgggcagagtgacagccacaaaccccaggggaggggcacagaggtaccgagaaaggaccagaagcctgacaggaagtaggcacmgagagtgagggcccctgacactcctgcttgagctgtgacagcatttaagggttttctgcctctgcagggcccgatccagatgagaagggtggctgcagta

SEQ ID NO: 152719 - DNA, 201 bp, Homo sapiens
aattaaagagtcctatgtcctcatgttgcagatgagaaactgaagcgtgaataagaaaggggacttgtcctgacaccaagtcagtggctgagttggaaccrgaatacctgtctcctaacactcaggccattgcctcttccaatctctgctagctgagcttgaagccttagactagtggggaactcaccatcttccagacag

SEQ ID NO: 152720 - DNA, 201 bp, Homo sapiens; identical to SEQ ID NO: 106934

SEQ ID NO: 152721 - DNA, 201 bp, Homo sapiens
tacactgaagtctttactccatttgaagttaatttttgtgtatagtgtgaggaaagtggtccagcgttactcttttacatgtggattttcagtcgtcctarcaccatttgttgaaaaggctagtttttttcctgtttaattgtcttggtatccttggtgaatatagttgaccataaatgtaagggtttcttctggattcta

SEQ ID NO: 152722 - DNA, 201 bp, Homo sapiens; identical to SEQ ID NO: 106939

SEQ ID NO: 152723 - DNA, 201 bp, Homo sapiens
gcggagcttgcagtgagctgagatcgcgccactgcactccaacctgagtgacagagccagactccgtctcaaaaaaaaaaaaaaaaaaaaaaaaaaaaaaatctgttggatttgaggttagactttaagttggaaccatttgggggctttgatttctcatcatttaatataaaaagtgtatagtaaaaaggccaggcgcgg

SEQ ID NO: 152724 - DNA, 201 bp, Homo sapiens
tttgtacagatggaggtttcactatgtttcccagctaattttttttttttttttttttgagacggagtcttgctctgttgcccaggctggagtgcaggggygcaatcttggctcactgcaagctccgcctcccaggtttacgccattctcctgcctcagcctcccaattagctgagactacaggtgcccaccaccacgccc

SEQ ID NO: 152725 - DNA, 201 bp, Homo sapiens; identical to SEQ ID NO: 107001

SEQ ID NO: 152726 - DNA, 201 bp, Homo sapiens
ggcggagcttgcagtgagctgagatcgcgccactgcactccaacctgagtgacagagccagactccgtctcaaaaaaaaaaaaaaaaaaaaaaaaaaaaaaatctgttggatttgaggttagactttaagttggaaccatttgggggctttgatttctcatcatttaatataaaaagtgtatagtaaaaaggccaggcgcg

SEQ ID NO: 152727 - DNA, 201 bp, Homo sapiens
aggcggagcttgcagtgagctgagatcgcgccactgcactccaacctgagtgacagagccagactccgtctcaaaaaaaaaaaaaaaaaaaaaaaaaaaaaaatctgttggatttgaggttagactttaagttggaaccatttgggggctttgatttctcatcatttaatataaaaagtgtatagtaaaaaggccaggcgc

SEQ ID NO: 152728 - DNA, 201 bp, Homo sapiens
gaggcggagcttgcagtgagctgagatcgcgccactgcactccaacctgagtgacagagccagactccgtctcaaaaaaaaaaaaaaaaaaaaaaaaaaaaaaatctgttggatttgaggttagactttaagttggaaccatttgggggctttgatttctcatcatttaatataaaaagtgtatagtaaaaaggccaggcg

SEQ ID NO: 152729 - DNA, 201 bp, Homo sapiens
ggaggcggagcttgcagtgagctgagatcgcgccactgcactccaacctgagtgacagagccagactccgtctcaaaaaaaaaaaaaaaaaaaaaaaaaaaaaaatctgttggatttgaggttagactttaagttggaaccatttgggggctttgatttctcatcatttaatataaaaagtgtatagtaaaaaggccaggc

SEQ ID NO: 152730 - DNA, 201 bp, Homo sapiens
tagtctgttctatctatttgtgtgccacttccacacttaagcatttagtttaaataaaggtactatgtacttttttagatttggagagctggagtttgggkgtgtgtgtgtattttatttcagagacagggtctcactttgtcacctaggagtgtgccaccatgcctagctagtttctgtatttttagtagagatggggtt

SEQ ID NO: 152731 - DNA, 201 bp, Homo sapiens
ctgaccacctgaagatttctcgcaggtggatgaagctgtagcagttctacaggctcatcatgccaagaaagaagctgcccagaaggtgggcgctgttgctrctgctacctcttagacaaggaaaaaccgtatgtgtggctattttcatttttgttcctatgagcattgttcctatgagcattgtctttgtggtttgacctg

SEQ ID NO: 152732 - DNA, 201 bp, Homo sapiens
cagcacaggctctgaggctgctgtgtgccttaggccaccaaagtgtcgggcagagtgacagccacaaaccccaggggaggggcacagaggtaccgagaaargaccagaagcctgacaggaagtaggcaccgagagtgagggcccctgacactcctgcttgagctgtgacagcatttaagggttttctgcctctgcagggcc

SEQ ID NO: 152733 - DNA, 201 bp, Homo sapiens
acatatatatgcatatatacacacacatatacatacatacacatatatatacatttttgtatatgtgtgtgtgtgtgtgtgtgtgtatatatatatatatwttttttttttttgagacggaatttcactcttgttgcccaggctggagtaaaatggcatgatctcagcttactgcaaccttcgcctcccgggttcaagtga

SEQ ID NO: 152734 - DNA, 201 bp, Homo sapiens
tgtgtatatatatatatatattttttttttttgagacggaatttcactcttgttgcccaggctggagtaaaatggcatgatctcagcttactgcaaccttygcctcccgggttcaagtgattctcctgcttcagcctcccgagtagctgggattacaggcacatgccaccatgccgagctaattttctgtatttttattag

SEQ ID NO: 152735 - DNA, 201 bp, Homo sapiens
cgggttcacgccattctcctgcctcagcctcccgagtagctgggactacaggcgcctaccaccacgcctggctaatttttttgtatttttagtagagacakggtttcaccgtgttagccaggatggtcttgatctcctgaccttgtgatccgcccgcctcggcctcccaacgtgctgggattacaggcatgagccactgcc

SEQ ID NO: 152736 - DNA, 201 bp, Homo sapiens
cttcctctgcgcttgcacatggaggccctccctggtccaggtggaggggctgctgtcccgcagtgtggccccagcctccacccctgctgctggaccagctytccccaggcccctccctgggggtgcagcacgtgaactccagagaggcgcatccttgggcccatggggaggtggaaccactctgccaggctgtgcctgtgg

SEQ ID NO: 152737 - DNA, 201 bp, Homo sapiens
cctgacactcctgcttgagctgtgacagcatttaagggttttctgcctctgcagggcccgatccagatgagaagggtggctgcagtagggctgggcgggckgactcagtggcagccgcaggccttgaccaccatgttgcggtgcttgcgcaggatgacgttgttgctgctgtcatagtagagcacagaggtggcgctcagc

SEQ ID NO: 152738 - DNA, 201 bp, Homo sapiens
gagaaacgaccagactgtttgaagtggctgtaccattttgcattctttttttttttttgagatggagtctcactctgttgcccaggctggagtgcagtggygcaatctcagcccactgcaagctccgcctcccgggttcacgccattctcctgcctcagcctcccgagtagctgggactacaggcgcctaccaccacgcct

SEQ ID NO: 152739 - DNA, 201 bp, Homo sapiens
gtgagggcccctgacactcctgcttgagctgtgacagcatttaagggttttctgcctctgcagggcccgatccagatgagaagggtggctgcagtagggcygggcgggctgactcagtggcagccgcaggccttgaccaccatgttgcggtgcttgcgcaggatgacgttgttgctgctgtcatagtagagcacagaggtg

SEQ ID NO: 152740 - DNA, 201 bp, Homo sapiens
ccgggttcacgccattctcctgcctcagcctcccgagtagctgggactacaggcgcctaccaccacgcctggctaatttttttgtatttttagtagagacrtggtttcaccgtgttagccaggatggtcttgatctcctgaccttgtgatccgcccgcctcggcctcccaacgtgctgggattacaggcatgagccactgc

SEQ ID NO: 152741 - DNA, 201 bp, Homo sapiens
ccctgacactcctgcttgagctgtgacagcatttaagggttttctgcctctgcagggcccgatccagatgagaagggtggctgcagtagggctgggcgggytgactcagtggcagccgcaggccttgaccaccatgttgcggtgcttgcgcaggatgacgttgttgctgctgtcatagtagagcacagaggtggcgctcag

SEQ ID NO: 152742 - DNA, 201 bp, Homo sapiens
tgaatccacccaggaacccccggcggaaaaggctgggcaggagctcaggcccaacaacccccatcttcactttgtgtcccctccccagccggccctccccwgctggccctcccctgcccacacctcccagagctgcagtcgtagccaatgcagggaggtctcagttaccctgcggcaatgctgacagcttagttggttgat

SEQ ID NO: 152743 - DNA, 201 bp, Homo sapiens
gccattctcctgcctcagcctcccgagtagctgggactacaggcgcctaccaccacgcctggctaatttttttgtatttttagtagagacatggtttcacygtgttagccaggatggtcttgatctcctgaccttgtgatccgcccgcctcggcctcccaacgtgctgggattacaggcatgagccactgccccattttgc

SEQ ID NO: 152744 - DNA, 201 bp, Homo sapiens
caccacgcctggctaatttttttgtatttttagtagagacatggtttcaccgtgttagccaggatggtcttgatctcctgaccttgtgatccgcccgcctyggcctcccaacgtgctgggattacaggcatgagccactgccccattttgcattcttaacggcagtgtatgatgtttctgatgcctctataccctcaccaa

SEQ ID NO: 152745 - DNA, 201 bp, Homo sapiens
tttacattctatagtggtacaactgtattttattttaattagttaattaattaattatttttgagatggagtcttgctttgtcacccaggctggagtgcaraggtgcaatcgaggctcactgcagcctccacctcctggattcaagcgagtctcctgcctcagcgtttcaagtagctaggactacaggcgtgtgccactgc

SEQ ID NO: 152746 - DNA, 201 bp, Homo sapiens
cagcctaattactgcctgtcactccctgggccagggaccttttctttgactcacagacccaagacacaggacagcgctggtgggcacccagggtgacgccrattttggtggccagcttgttcataactcctagacacaagcaaacactggcagtccccacccttgccccatgcctggccggagactgccagtcaccctgct

SEQ ID NO: 152747 - DNA, 201 bp, Homo sapiens
aggcaggaggattgcttgagctcaggagttcaagactggcctgggcaaagtttaagaccggcctgggcaacatagtgagacctggtttctataaaaaatawaaaaattagctgggtatggtggcgtgtgcctgtcatcccagcaactcgggctgaggtgggaggattgcttgagcccagcaggttgaggctgcagtgagcc

SEQ ID NO: 152748 - DNA, 201 bp, Homo sapiens; identical to SEQ ID NO: 28390

SEQ ID NO: 152749 - DNA, 201 bp, Homo sapiens
tggctgtctgcagttctgtgctgaggcctggaggccctgtcctggttcagtgggaaaggtacgtaggttgattactgacatgagccatgggcaaggggagyaggctgcgggggcatttgctctgtgccagcctacactacatgttggagctgctggtcttgcctctgtctcagtgctgagccccaaatgggtcagcatggt

SEQ ID NO: 152750 - DNA, 201 bp, Homo sapiens
tggctcctacttcctcctccccaaccccaggcctacctggaaactgcagtgtggtgtcatggtgcgcagcctgtgctaggatggcctctcaccctgcaccrattttgggccagccaggccacctcatggcctctttcaggtgttgaaactgagccctatcagtctccagaaacctcccccagggctgcccactggctccca

SEQ ID NO: 152751 - DNA, 201 bp, Homo sapiens
tcaggtgttgaaactgagccctatcagtctccagaaacctcccccagggctgcccactggctcccatgacatgtcctaggagctctgtctgaatcaagccttttttttttttttttttttttgagatggagttttgcttttgtcactcaggctggagcatgatctcagctcactacaacctctgcctcccaggttcaagca

SEQ ID NO: 152752 - DNA, 201 bp, Homo sapiens
gttcagcgttacacagttcataatggtggagctgaggtctgaactaaggctgtagagctccaggatctgtgtgccttttacactgtgggtatccctccccygctggctagccagttcctcaagggcaggggccatatctatctaactgcctatctatttattttttattttttgattcagggtcttgctctgttgcccagg

SEQ ID NO: 152753 - DNA, 201 bp, Homo sapiens
ttttcccctgttccagtcgagaagttgaagaccatgcacctttactgccaaatacttcagtatatatttcctaagaaccagaatattcccttgcctaatcagagtacaactatcaaaattataaaatgtaacattgagtgatgagctatattcaaattttatcacttgtcccaatattgtcctttttagtaatttttagca

SEQ ID NO: 152754 - DNA, 201 bp, Homo sapiens
ctcttataaagataccagtcattcagtcattggatttagggtccataacaattcagtatgaccttttcttaactaattacatctgtgaaggccctacttcytttttttttttttttttttttgagacaaggtctcactctatcacccaagctggagtgcagtggtgtgattacagctcactgctgcctcaaactcctgggc

SEQ ID NO: 152755 - DNA, 201 bp, Homo sapiens
tggcccagaggaaggaagagagaaaggctcacctgaccaaccagtatatgcaacgagtggctggaatgagagcacttcctgccaatgccatcttaaatcarttccagcctgcagcgggtggctactttgtgccagcagtcccacaggtgggtgtgctgtttggtcacagctcttgggaacctgccggctggcagtattctg

SEQ ID NO: 152756 - DNA, 201 bp, Homo sapiens
tcttataaagataccagtcattcagtcattggatttagggtccataacaattcagtatgaccttttcttaactaattacatctgtgaaggccctacttcttttttttttttttttttttttgagacaaggtctcactctatcacccaagctggagtgcagtggtgtgattacagctcactgctgcctcaaactcctgggct

SEQ ID NO: 152757 - DNA, 201 bp, Homo sapiens
gaccggcctgggcaacatagtgagacctggtttctataaaaaataaaaaaattagctgggtatggtggcgtgtgcctgtcatcccagcaactcgggctgargtgggaggattgcttgagcccagcaggttgaggctgcagtgagccatgacactgccactgcactccagcctgggcgacaaagcaagaccatgtatgtctt

SEQ ID NO: 152758 - DNA, 201 bp, Homo sapiens
catttgtctcctttcattaaaagaggaagaagcatagacgcctgggtctgctcctacaggggtgtcttgttattgtttttgtaactttttattttatgtartgtcaagctcacggaagagttacaagaatagtgcgatgaaccccatacacctttgctggcatttactcaagttcaccagttgtttatattggtgaacatc

SEQ ID NO: 152759 - DNA, 201 bp, Homo sapiens
acaaaacccttaaatgccccctgccccctgctttttatttttgtgattgatattcatgactaaatatgaaacaaggatgtcatttaatgctagcattccattttttttttaattactgggaataaaattagtacctgatccatcttttttctaagaacaaaggacatacctgtaattataacctcagtcttactaaattaa

SEQ ID NO: 152760 - DNA, 201 bp, Homo sapiens
agtggctgttccaaggagaacagcggtttccgggaacagtggaggccgagacaaacctccccacccaactcagcctaattactgcctgtcactccctgggmcagggaccttttctttgactcacagacccaagacacaggacagcgctggtgggcacccagggtgacgccgattttggtggccagcttgttcataactcct

SEQ ID NO: 152761 - DNA, 201 bp, Homo sapiens
  misc_feature (1)...(201): n = A,T,C or G
aagaagaaatttgatgatgaaaactttatcttcaaacacacaggaccaggtaggaaccactcatcgtgtggtgacaagggaggctgggcgagggcagctgnccgtgcagggtggaaggatgagccgtggttctggctgagaaacagggaatctggaggagacccagctaccagacacaggagaaccgttcagccttgctag

SEQ ID NO: 152762 - DNA, 201 bp, Homo sapiens
tgggaggattgcttgagcccagcaggttgaggctgcagtgagccatgacactgccactgcactccagcctgggcgacaaagcaagaccatgtatgtctttaaaaaaaaaaaaaaaaaggcagccaggacctgatgccaggtcgacttggctccaaaacctgccctctccttttcacagcctcctttcctgtgaaataatag

SEQ ID NO: 152763 - DNA, 201 bp, Homo sapiens
gtgtcccctccccagccggccctccccagctggccctcccctgcccacacctcccagagctgcagtcgtagccaatgcagggaggtctcagttaccctgcrgcaatgctgacagcttagttggttgattcagtcttcattttcatggttttaaaaaaaacaaaaaacacaacaacaacaacaaaaccctttctcaccatat

SEQ ID NO: 152764 - DNA, 201 bp, Homo sapiens
gcactcagtggtgagcagcaccagtgatcccatcagaagcctgcttttgtcctttaaggttgccccagacaccaaggcatcaaaagccaggggatccagaraaaacacagacagccaagagagaaactgcgggaaaaagccaaaaggttgagagccacaccatctagaagcttcctgcctgtggtgcggcacaggtgggtg

SEQ ID NO: 152765 - DNA, 201 bp, Homo sapiens
ggtgtgggtctatgtgtagtagtgtggctgtatgaggaccagttcctgcagagctgtgggaagttagcgacgttactgactctgtgcagacaaagcccccsagacatggagcaggtggcctcactgccctcccggctggctggaccagacccctctctgcagggcctcccaccccagggggctgggcaggatgggcacggt

SEQ ID NO: 152766 - DNA, 201 bp, Homo sapiens
ggctggaccagacccctctctgcagggcctcccaccccagggggctgggcaggatgggcacggtactgaccagggactgcaggatggcgtggttggtggcrttcatgcaggagtccagcgggaaggagcactccccctcacagtaataggctgagtagccttggggggcgatgacccagtcctggggggcaagggagaagg

SEQ ID NO: 152767 - DNA, 201 bp, Homo sapiens
tctgcagggcctcccaccccagggggctgggcaggatgggcacggtactgaccagggactgcaggatggcgtggttggtggcgttcatgcaggagtccagygggaaggagcactccccctcacagtaataggctgagtagccttggggggcgatgacccagtcctggggggcaagggagaaggtgagtcccatccatgtgc

SEQ ID NO: 152768 - DNA, 201 bp, Homo sapiens
agcaaacaccatttgactgcccagaaaggaagtattatcataggctcagagcagcttttggtaatttctttcctctcacaccaaggcattgtgtgcgcacktgtgtgtgtgtgtgtgtgtgtgtgtgtgttttaatttttattttagagacagggttttgctgtgttgctcaggcttgtcttgaacttctgggctcgtgtg

SEQ ID NO: 152769 - DNA, 201 bp, Homo sapiens
gggaaggagcactccccctcacagtaataggctgagtagccttggggggcgatgacccagtcctggggggcaagggagaaggtgagtcccatccatgtgcycctccctgagcctcagggcccaaacccatcctccagccctgcagggccgtctcccccaagaggcttgaatccacccaggaacccccggcggaaaaggctg

SEQ ID NO: 152770 - DNA, 201 bp, Homo sapiens
ccctcttctcctaccttttgccccatggtgtcttccctcagtctcttcccttgtctcttcctcctcctagtctctaaatttttggagggacccagtgctcrccatggcttttctgtatctgtattcactctttacctcaatagttctcacccttttaccctagcacctgcctcttacagctcatgctctagtgtgctgaga

SEQ ID NO: 152771 - DNA, 201 bp, Homo sapiens
atccatgtgctcctccctgagcctcagggcccaaacccatcctccagccctgcagggccgtctcccccaagaggcttgaatccacccaggaacccccggcrgaaaaggctgggcaggagctcaggcccaacaacccccatcttcactttgtgtcccctccccagccggccctccccagctggccctcccctgcccacacct

SEQ ID NO: 152772 - DNA, 201 bp, Homo sapiens
gcagtcactgagatgaatggacgcattgtgggctccaagccactatatgttgccctggcccagaggaaggaagagagaaaggctcacctgaccaaccagtwtatgcaacgagtggctggaatgagagcacttcctgccaatgccatcttaaatcagttccagcctgcagcgggtggctactttgtgccagcagtcccacag

SEQ ID NO: 152773 - DNA, 201 bp, Homo sapiens
aacccctcccagagctggggacatgtattcccctggggaacccggtggcatccgccctgaggagcgcaccaccccgcccagatccaggtcccgtcagggtrccacctgctgcatgggcctgaggttcggggacacagcaaaggcacaccccgtgctctttttgatgtcgtccaccgtcaggccctcccagagctccctcag

SEQ ID NO: 152774 - DNA, 201 bp, Homo sapiens
tcagccagaagcccacagggcctcggccccagcctgcccgaccctcaccaaagatccctgggagtcggttggcctgcggcagctcgttgcttttcttcggytgcctcctcctcagtggcctcactgcccgaggggtgcggatgggactcggactggccctgaagaaagtgaccacgaaaggctgttgggagcgtggggccc

SEQ ID NO: 152775 - DNA, 201 bp, Homo sapiens
accaccccgcccagatccaggtcccgtcagggtgccacctgctgcatgggcctgaggttcggggacacagcaaaggcacaccccgtgctctttttgatgtygtccaccgtcaggccctcccagagctccctcagcgtcagctctttcttcctgtgcacgtcaaacacggccttctcggtgatgatgcggtccacgcaccgc

SEQ ID NO: 152776 - DNA, 201 bp, Homo sapiens
gggaaaaagccaaaaggttgagagccacaccatctagaagcttcctgcctgtggtgcggcacaggtgggtgagtgcacacgcacaccccacacactgtgcrcacatatcacgggcggtcagacttgccagcgtactcgggggcccgtgtgttaagatcacacagcccccacacagtgtacacatctgtttcatgtgctgtg

SEQ ID NO: 152777 - DNA, 201 bp, Homo sapiens
aaaaggttgagagccacaccatctagaagcttcctgcctgtggtgcggcacaggtgggtgagtgcacacgcacaccccacacactgtgcgcacatatcacrggcggtcagacttgccagcgtactcgggggcccgtgtgttaagatcacacagcccccacacagtgtacacatctgtttcatgtgctgtgcctctgagcgc

SEQ ID NO: 152778 - DNA, 201 bp, Homo sapiens
cagcctcccaagtagctaggactataggtgcacatcaccatgtctgcctaatttttaaaatttttatagagatgggggtctcactatattgctcaggctcrtcttcaactcctagcctcaagtcatcctcccacctcagttctccaaagcactgagattacatgtgagctactgcacccagcccaccaccccaaagaccct

SEQ ID NO: 152779 - DNA, 201 bp, Homo sapiens
cgagagtgagggcccctgacactcctgcttgagctgtgacagcatttaagggttttctgcctctgcagggcccgatccagatgagaagggtggctgcagtwgggctgggcgggctgactcagtggcagccgcaggccttgaccaccatgttgcggtgcttgcgcaggatgacgttgttgctgctgtcatagtagagcacag

SEQ ID NO: 152780 - DNA, 201 bp, Homo sapiens
ttttcagtaaggaaaggaacctggggtagaaagctcccccttcagctgcccatgagggcacaggtgggccccacactcactacggggccagggcagggccrcacacctgccacttcctcagcagagaccctagcgcgtgggtcactgctggcccagactccttccacgagcaggcgagggtgcagggccacacctcatcca

SEQ ID NO: 152781 - DNA, 201 bp, Homo sapiens
gagttaaggaaggcttttccagaccaggtgagtgggagcaactcacagattccctgtcatgtccacaactccacaactttggccttgtggccttggctgcttttttttttttttggagatagagtctcattctgtcgcccaggctggagtgcagtggtgtgatcacagctcactgcagtctctgccttccaggttcaagca

SEQ ID NO: 152782 - DNA, 201 bp, Homo sapiens
ccccttcagctgcccatgagggcacaggtgggccccacactcactacggggccagggcagggccacacacctgccacttcctcagcagagaccctagcgcrtgggtcactgctggcccagactccttccacgagcaggcgagggtgcagggccacacctcatccaagagatgatcacgtttaggtttttgatgaaaagcat

SEQ ID NO: 152783 - DNA, 201 bp, Homo sapiens
tagtacttctgtgtgaatgctttggtggacccttaaggtactacatggaccagcctgggcaacatgatgagaccctgtctctacagattaaaaaaaaaaatttttttttttttttaaattagctgagtatggtggtgtgtgcctgtagtcaggaggctgaggtgggaggatcacttgagcttgggaggtcgaagctgcagt

SEQ ID NO: 152784 - DNA, 201 bp, Homo sapiens
atgggatgtttgctatctgtggtgtttctgacagcaagttccgtaccatctgctcctcagtagacaagctggacaaggtaacaacccaagtacttgacttyttttcccagatcccaccctgccttgggaaatggaaaacaagattgagagagagagaggtgcatgcctctatacccaccagaggaaggttagccccaggat

SEQ ID NO: 152785 - DNA, 201 bp, Homo sapiens
tgtgctcaaaacccccaaggtaatatcattcctgtagggagccactgagaaagtctctaactctactcacggggcgcttatgtctgcctccctaaaccagstcattgaggaggatctgaaatgctgcagaggagaggacagtcgctctgggcgctgggctggactggactctacctgagtcattctgggatggcaaagtga

SEQ ID NO: 152786 - DNA, 201 bp, Homo sapiens
gtgggcatttgaataacaaagaagatgacaacaagagagtgagggtccaaagggcccactcctgttgtggacacagaccagtctttgctccaataagaagrgggacaagaatggcttggagggagaggccctgtcttttattatcttggttgtggccagcagattccaaaagagagccattctttggaatggtaattgttc

SEQ ID NO: 152787 - DNA, 201 bp, Homo sapiens
gacatcacagggcaaggactgctgtaatgcccttaagacattccccagtttttacttttgacattattcgaatctcaggcatcaaaaaacatttatgtttrttggtctgataacctattcctagtagtttatcatcaagaaaaatacttttttttaaaaaaaaaaagagctatatacctaaatattagatattgaaatgtt

SEQ ID NO: 152788 - DNA, 201 bp, Homo sapiens
tcaaattcagctcgcaccgggccgctgccatggccaaaaaggccctggtggaaggtaggctggggcgggggtgctggttggggccaaacgcgttctgcccrgcactttatactgagcatagctgttaaagttacaagatcttagagtcaaacatgccagaatttgcaaccttttactatttgatctcagatttttaaaact

SEQ ID NO: 152789 - DNA, 201 bp, Homo sapiens
tccctgaagaccgctggctaaccctctccctgcaggattttgacattgctgggaactttgatcccatgatccctgatgcagagtgcctgaagatcatgtgygagatcctgagttcacttcagataggcgacttcctggtcaaggtcagagctgacaaggctgggagggcaaagttgggcctggcctctcacaagagaagat

SEQ ID NO: 152790 - DNA, 201 bp, Homo sapiens
agacagagtctcactctgtcaccaggctggagtgcagtggcatgaccttggctcactgcagcctccacctcctgggttcaagcaattctcctgcctcagcstcccaggtagctgggactacaggtgtgtgccaccacgcccagctaatttttgtattttttagtagagatggggtttcaccatgttggccaggatagtctc

SEQ ID NO: 152791 - DNA, 201 bp, Homo sapiens
agatcatgtgcgagatcctgagttcacttcagataggcgacttcctggtcaaggtcagagctgacaaggctgggagggcaaagttgggcctggcctctcayaagagaagatccttgtgcagagggaccagtagcctaagtgaccatgactattgcaggtcatgtaagaaaagagattcccccctcactatgcattggttcc

SEQ ID NO: 152792 - DNA, 201 bp, Homo sapiens
gttatgtttattattatgaccacatttatttatgttttctccaggaaacactgatgggaaagtatggggaagactccaagcttatctatgacctgaaggaycagggcggggagctcctgtcccttcgctatgacctcactgtatctttctaaacttgggctcttgagactttggatggattggcactcacttggctcaggt

SEQ ID NO: 152793 - DNA, 201 bp, Homo sapiens
ccaaaacaagcaggccttggagggcctgggagacctgaagttgctctttgagtacctgaccctatttggcattgatgacaaagtgagtcaagttggggacrggatcccttctgagctctggggcttcaggtccctgatcttaatctggcactgaccattttcttatctccacagatctcctttgacctgagccttgctcga

SEQ ID NO: 152794 - DNA, 201 bp, Homo sapiens
agtgggcatgttcgaccccaaagggcgcaaggtgccatgtgtggggctcagcattggggtggagcggattttctccatcgtggaacagagactagaggtaggtcctaggaggtaggtagaagatagtctgagcaggtggtggcacctaagctatctgatctccaagggagcaagtggtgctgctttgggcagggagcatct

SEQ ID NO: 152795 - DNA, 201 bp, Homo sapiens
tgctggtgccttagcatacattaagacagtgacactaaactgtactaatagccagtgtgttcttcactgccatgcactcacagtaagtaaataaataaatwaattaattaattaatttaaaaaattcagttttacttaactatgtcattgataaaatggtaaaactttgtttgttttggggtttctttggagacagaatct

SEQ ID NO: 152796 - DNA, 201 bp, Homo sapiens
acaacagctctccaccttgatccttcagatcatacatgagcccagagtcctctccatacttctcagtcagggtttcctataggggtcaaacagaatgagcsacagttgaaagcatgactccaaaacacagatgagaagccctttgggacactgaacgccattgaagaagtgagtgaggttgcacgtactctttcttctccc

SEQ ID NO: 152797 - DNA, 201 bp, Homo sapiens
tgggattacaggcgggtaccaccacatgcagctaattttttgtatttttacagaaatacaaaaaacatacaagaaacctacaacatgtttcaccatgttgmccaggctggtttggaactcttgagctcaggcaatctgcccaccttggcctcccaaagtgctaggctgagccaccatgcctggccaaaaacttactgattt

SEQ ID NO: 152798 - DNA, 201 bp, Homo sapiens
gcagacatttttacaacaataaacgaagtgagcctcgtcacctcaaggaaaacatctgacagtacttgtaggcagtgaaaaaattcaagtattcaggtgamagttagaattttagaaaacttagtcagggcatggtggctcaagcctataatcccagcactttgggagaccaaggcgggcggatcacctgaggtcgggagt

SEQ ID NO: 152799 - DNA, 201 bp, Homo sapiens
cacaaagcatctgctaagagagcattagaatctttccgaagtaaggcaaaacttaatcagtgacattaccagcacgctgtatgcccttccaaaaatagagratgtggtggttccatactatggcgattatctgccctaagagaagtccaagttcaagtacacaatcccttatctgcaattccaaaatccaaaactctctga

SEQ ID NO: 152800 - DNA, 201 bp, Homo sapiens
taaaagctcacccataatggatcctgccattacttctcaaaagtagagctaagaacagggtgccagcttggacaccctctgtccctgaggacagcagaagscagccttcatcttctgctcttgtcccctgcaggctgagctgctgtacaagaagaacccaaagctactgaaccagttacagtactgtgaggaggcaggcat

SEQ ID NO: 152801 - DNA, 201 bp, Homo sapiens
ggtgcggaagctgcccaggggtccctgactggtgtctgtctgcctaggtgtcctgggaagaggtgaagaatgagatggtgggagagaagggccttgcaccwgaggtggctgaccgcattggggactatgtccagcaacatggtgaggaacagaaccaagcctccccagcagccgtcccactgccctcagtcctaaagttga

SEQ ID NO: 152802 - DNA, 201 bp, Homo sapiens
atctgccttggcctcccgaagtgctgggattacaggcgtgagccactgtgcctggcctcaggtaggtgtttgttattaggccaggaaatgttctgttatcygagagagagtgtttagaaaaatggcttaaagaaaagagttctaagaattttagaaaatagacccaaacttaaaagggaatggagtttggaaggcagatag

SEQ ID NO: 152803 - DNA, 201 bp, Homo sapiens; identical to SEQ ID NO: 28396

SEQ ID NO: 152804 - DNA, 201 bp, Homo sapiens
ggacctaccttcatcctctgctccacaatgtagaagattcgctcaaccccaatgctgagtcccacacatggcaccttgtggcccttggggtcaaacatgcscaccagcccatcatagcgcccaccagcagccacactgcccacattcaggggctcctccccagcctgagttggggtctgcagcagcactgcttcatagatc

SEQ ID NO: 152805 - DNA, 201 bp, Homo sapiens
cagcctcactcacaagtctgtctccccaggtggggtatccctggtggaacagctgctccaggatcctaaactatcccaaaacaagcaggccttggagggcytgggagacctgaagttgctctttgagtacctgaccctatttggcattgatgacaaagtgagtcaagttggggacgggatcccttctgagctctggggctt

SEQ ID NO: 152806 - DNA, 201 bp, Homo sapiens
ccagggtggcagcaaacttaggtgtgctggacacaaactgaataaaagctcacccataatggatcctgccattacttctcaaaagtagagctaagaacagrgtgccagcttggacaccctctgtccctgaggacagcagaagccagccttcatcttctgctcttgtcccctgcaggctgagctgctgtacaagaagaaccc

SEQ ID NO: 152807 - DNA, 201 bp, Homo sapiens; identical to SEQ ID NO: 28399

SEQ ID NO: 152808 - DNA, 201 bp, Homo sapiens; identical to SEQ ID NO: 28401

SEQ ID NO: 152809 - DNA, 201 bp, Homo sapiens
cgcctttttctggtctgtggccaacctgcccagccccttgccatgctcaaaaaagtccagtcaacactacaaaagggaaaggtgccttaatcttttttgarccttcagctacctcatgtggtagcacagctgatgctttctgatgtttgtaagtgctattaatcttatgggtggcagttttacccacatagggaggggtta

SEQ ID NO: 152810 - DNA, 201 bp, Homo sapiens
cccagaacaaatctcctgtggatactgagggatgattctatttaatacatgtatttgaaattgaattccaaaggagaggggagatggtctgttttccttgwgttaaggttaattctttgggatcctaaattcattgagctgtttctttctacatataactaatttttgaaggttaaagagacagtgtaaaatcccaaagtg

SEQ ID NO: 152811 - DNA, 201 bp, Homo sapiens
agaaggccagcgccgagctggtgagatttaggcagcaggggagagggccaaggcaaagcctgggaggacgtaaagccagggtgttcgggacatagggtagrgatgtgagggaagcgaccagtcttgtagggaggagagtgggctgcgtggggagacatccggggtgggtcccgagagaaacaaagctaggcctgagcagag

SEQ ID NO: 152812 - DNA, 201 bp, Homo sapiens
agagaaacaaagctaggcctgagcagagagatgtgatgagggaggaatattgaatgaatggcgggggagggaggagagtgacagatggatagctcagcgcmttctttccctccacagatcgaggaggaggtggcgaaactcctgaaactgaaggcacagctgggtcctgatgaaagcaaacagaaatttgtgctcaaaacc

SEQ ID NO: 152813 - DNA, 201 bp, Homo sapiens
cactgccctcagtcctaaagttgaaactgttctgtgttatgtatgtaggggagtgagtgtgtctatgcatatgtacacacacatgcatgggcgactagagkccaggcaagaaggtcaaccctccttaccttttttgtttccttgtcagcctcactcacaagtctgtctccccaggtggggtatccctggtggaacagctgc

SEQ ID NO: 152814 - DNA, 201 bp, Homo sapiens
aactagaagtataggcaatggacctctaagatcccaaagtcacgttctccacttttgtcagagaaagcccgctggatttggaaagagacaggtcaggctcyagtactcaaaaggatacagtaaggtcatagcggagggacaacagctctccaccttgatccttcagatcatacatgagcccagagtcctctccatacttct

SEQ ID NO: 152815 - DNA, 201 bp, Homo sapiens; identical to SEQ ID NO: 28402

SEQ ID NO: 152816 - DNA, 201 bp, Homo sapiens
gagctgagttgggcctggtctcaaaatcccgactagagcctgctttgtttgctccttgaaggtgttagcccagctctcttttatctgccccttccccaggytttggaggagaagatacggaccacggagacacaggtgcttgtggcatctgcacagaagaagctgctagaggaaagactaaagcttgtctcagaactgtgg

SEQ ID NO: 152817 - DNA, 201 bp, Homo sapiens
tagcccagctctcttttatctgccccttccccaggctttggaggagaagatacggaccacggagacacaggtgcttgtggcatctgcacagaagaagctgstagaggaaagactaaagcttgtctcagaactgtgggatgctgggatcaaggtatgggaggcaagccccagggtggcagcaaacttaggtgtgctggacac

SEQ ID NO: 152818 - DNA, 201 bp, Homo sapiens
tctaaggcattataaacactctagagactatttaaagtatataggaggatgtgcatataattttatgtcaagggcttgagcatccatggatttttggtatycacatggggcccagaacaaatctcctgtggatactgagggatgattctatttaatacatgtatttgaaattgaattccaaaggagaggggagatggtctg

SEQ ID NO: 152819 - DNA, 201 bp, Homo sapiens
gcctaccctcatggagcttacattctactgaaggagagagacttagaacaaataatcccacacagatttttttgttttttttttaaacagagtatcctctrttgcacaggctggagtgcagtggcacatcttggctcactgcagccgctgcctcctgggttcaagcgattctcctgcttcagcctcctgagtagctgggac

SEQ ID NO: 152820 - DNA, 201 bp, Homo sapiens
aagctgattcaaataaatcaaccataaaaagatattattgaggcaactggggaaaactgaccatggcttagcattagataatattaaggagttgctgttasttttgttagttataataaagatagagtctttggggttttttaaatgtccgtatgagttagagattcatactgaagtatttatggatgaaatgatatgacg

SEQ ID NO: 152821 - DNA, 201 bp, Homo sapiens
tgcttcagcctcctgagtagctgggactacaggtgcccaccaccatgcccagctaatttttgtatttttagtagagacggggtttcaccatattggccagratggtcttgaacttctgacctcaagtgatctgcccgcctcagtctcccaaagtgctgggattacagacgtgtgccaccgcacccggccaccacatgtggt

SEQ ID NO: 152822 - DNA, 201 bp, Homo sapiens
aggtcatagcggagggacaacagctctccaccttgatccttcagatcatacatgagcccagagtcctctccatacttctcagtcagggtttcctatagggstcaaacagaatgagccacagttgaaagcatgactccaaaacacagatgagaagccctttgggacactgaacgccattgaagaagtgagtgaggttgcacg

SEQ ID NO: 152823 - DNA, 201 bp, Homo sapiens
cgaagtgagcctcgtcacctcaaggaaaacatctgacagtacttgtaggcagtgaaaaaattcaagtattcaggtgaaagttagaattttagaaaacttaktcagggcatggtggctcaagcctataatcccagcactttgggagaccaaggcgggcggatcacctgaggtcgggagtttgagaccaacctgaccaacata

SEQ ID NO: 152824 - DNA, 201 bp, Homo sapiens
cgggagtttgagaccaacctgaccaacatagagaaaccccatctctactaaaaattagctgggcgtggtggcgcatgcttgtaatgccagctactagggargctaaggcacaagaatcgcttgaacctgggaagcagaggttgtggtgagccgagatcgcgtcattgcactccagcctaggcaacgagtgaaactacatct

SEQ ID NO: 152825 - DNA, 201 bp, Homo sapiens
atgtaagaaaagagattcccccctcactatgcattggttccttgcaggtaaacgatcgacgcattctagatgggatgtttgctatctgtggtgtttctgayagcaagttccgtaccatctgctcctcagtagacaagctggacaaggtaacaacccaagtacttgacttcttttcccagatcccaccctgccttgggaaat

SEQ ID NO: 152826 - DNA, 201 bp, Homo sapiens; identical to SEQ ID NO: 28407

SEQ ID NO: 152827 - DNA, 201 bp, Homo sapiens
ctccccttccccaccctcagccatgactattgtgaaaaggttccttttccgaggattaaattcaaacttctgcttggctcatgtggtctcatgcccacccyagcccatctttctagattcagtcatgctactctcctgctacaaggaaccctcctcattccttatctctgctgcctccagtatctggcccttgctctctgc

SEQ ID NO: 152828 - DNA, 201 bp, Homo sapiens
atgatttatgaattgtggaacctgggattatgggagagtctggcttcaatcaagggctgaaattccatttccactgacatctcttccttccccatcccccrattctgtcctgcaacagggtaacaagaaggggcccttaggccgttgggactttgatacccaggaagaatacagcgagtatatgaacaacaaagaagcttt

SEQ ID NO: 152829 - DNA, 201 bp, Homo sapiens
atatgaggcaacatgaagagtacatcgcagacatggctctggatccagccaaaaagctgctgctgacagccaggtacaacttcaaagctgccttgcctccyctcccctccctgtgtgaaatgtcttcctcaaatagaccttgcgtctaagcctactgctctactctctacagcggggatggctgccttggcatcttcaaca

SEQ ID NO: 152830 - DNA, 201 bp, Homo sapiens
ggaagtagccgatctcccagatgcggtctcttcgctccgctccacccgcaccagcagcggcccacccacctctcctgtaagaggaagaacgtcccggagayacttccggccccgccccccgaggcggaagcggagtgccaggctactcctcccgcagtgtgggtggttccgaggctgactaccctgcggcggcgcggctcg

SEQ ID NO: 152831 - DNA, 201 bp, Homo sapiens
tgctgacatgagaatctggagaaatggtcagggggagtgaaggtgtatgtgtgaatttggccagctagtgatctccattttcccagtatttttgaagacaytggggattacgtaccctccacaaccaagacacctcgggacaaggagcgggagagatatcgggaacgggagcgtgatcgggaaagagacagagaccgtgac

SEQ ID NO: 152832 - DNA, 201 bp, Homo sapiens
agttttaaaaatctgagatcaaatagtaaaaggttgcaaattctggcatgtttgactctaagatcttgtaactttaacagctatgctcagtataaagtgcygggcagaacgcgtttggccccaaccagcacccccgccccagcctaccttccaccagggcctttttggccatggcagcggcccggtgcgagctgaatttga

SEQ ID NO: 152833 - DNA, 201 bp, Homo sapiens
atcttctcttgtgagaggccaggcccaactttgccctcccagccttgtcagctctgaccttgaccaggaagtcgcctatctgaagtgaactcaggatctcrcacatgatcttcaggcactctgcatcagggatcatgggatcaaagttcccagcaatgtcaaaatcctgcagggagagggttagccagcggtcttcaggga

SEQ ID NO: 152834 - DNA, 201 bp, Homo sapiens
tggagtttgtttaaaactttgttagacaaaagggttctatgccttaaaaatgttttttaagtgtgttgtggggaggaggttgtgagagcctcagttcaagrtctgggctgagttctcttttctcctaggacctgggtctaccaaggagttgatcaagtccatcaatgaaaagtttgctgggtctgctggctgggaaggcac

SEQ ID NO: 152835 - DNA, 201 bp, Homo sapiens
ttcgcaggactgagggaagagggagaagactccatggctcaggaagaaaaggaggagactggggatgacagtgactgaaggaatgaattgaatcttgagaygggtcctcaccaggcaagagtcttgcttattgggctgcatccccagagaggatatgaattattttttgaaaagacagggttttgccatcgtccaggctgg

SEQ ID NO: 152836 - DNA, 201 bp, Homo sapiens
aggatggtgggcgcctttgggcagttattatttgttttacatgtatctccttccccactcctaaaaaatctatctcatttactgggccccaccctcctttrgctgcagcagtagaaacagcagcattgagggtcatgagcagcttaactatttcagagtctttgcacaagatcaaatgacatagggtcaaaaatctatttt

SEQ ID NO: 152837 - DNA, 201 bp, Homo sapiens
ggaaccaatgcatagtgaggggggaatctcttttcttacatgacctgcaatagtcatggtcacttaggctactggtccctctgcacaaggatcttctcttrtgagaggccaggcccaactttgccctcccagccttgtcagctctgaccttgaccaggaagtcgcctatctgaagtgaactcaggatctcgcacatgatct

SEQ ID NO: 152838 - DNA, 201 bp, Homo sapiens
acctgagccaagtgagtgccaatccatccaaagtctcaagagcccaagtttagaaagatacagtgaggtcatagcgaagggacaggagctccccgccctgrtccttcaggtcatagataagcttggagtcttccccatactttcccatcagtgtttcctggagaaaacataaataaatgtggtcataataataaacataac

SEQ ID NO: 152839 - DNA, 201 bp, Homo sapiens
tcgagcaaggctcaggtcaaaggagatctgtggagataagaaaatggtcagtgccagattaagatcagggacctgaagccccagagctcagaagggatccygtccccaacttgactcactttgtcatcaatgccaaatagggtcaggtactcaaagagcaacttcaggtctcccaggccctccaaggcctgcttgttttgg

SEQ ID NO: 152840 - DNA, 201 bp, Homo sapiens
agatgctccctgcccaaagcagcaccacttgctcccttggagatcagatagcttaggtgccaccacctgctcagactatcttctacctacctcctaggacctacctctagtctctgttccacgatggagaaaatccgctccaccccaatgctgagccccacacatggcaccttgcgccctttggggtcgaacatgcccact

SEQ ID NO: 152841 - DNA, 201 bp, Homo sapiens
gaggacaaatcaggacaataaagaagattcatgctaagctgtggcagaggggggaaggtatgatcgggtgggggtgggacaaggaacggccatggaagatmactgggtcaggttggaccctgggctgggagcgggagggcaaggcccctcaccacaacttaacccaaacctaagctgcccccaggtgccataggtccctgt

SEQ ID NO: 152842 - DNA, 201 bp, Homo sapiens; identical to SEQ ID NO: 28431

SEQ ID NO: 152843 - DNA, 201 bp, Homo sapiens
tgcgtctaagcctactgctctactctctacagcggggatggctgccttggcatcttcaacattaagaggcgtcggtttgagctgctctcagaacctcagtytggggacctgacctctgtcactctcatgaaagtacagctggttatggtgggatggaggggtgtgtgctgggggcttagtctgaggcagcttccacattgt

SEQ ID NO: 152844 - DNA, 201 bp, Homo sapiens
taaaaaccaacaaagaggacaaatcaggacaataaagaagattcatgctaagctgtggcagaggggggaaggtatgatcgggtgggggtgggacaaggaayggccatggaagatcactgggtcaggttggaccctgggctgggagcgggagggcaaggcccctcaccacaacttaacccaaacctaagctgcccccaggtg

SEQ ID NO: 152845 - DNA, 201 bp, Homo sapiens
tggtggtggatgactaccgtcggcgcaaaaaaaagggaggaccactgcgggctctgagcagcaagacttggagcaccgatgacttcttcgcaggactgagrgaagagggagaagactccatggctcaggaagaaaaggaggagactggggatgacagtgactgaaggaatgaattgaatcttgagacgggtcctcaccagg

SEQ ID NO: 152846 - DNA, 201 bp, Homo sapiens
tcaactttaggactgagggcagtgggacggctgctggggaggcttggttctgttcctcaccatgttgctggacatagtccccaatgcggtcagccacctcwggtgcaaggcccttctctcccaccatctcattcttcacctcttcccaggacacctaggcagacagacaccagtcagggacccctgggcagcttccgcacc

SEQ ID NO: 152847 - DNA, 201 bp, Homo sapiens
cattccagtatggtatcaaaatgtctgaagggcggaaaaccaggcgcttcaaggaaaccaatgacaaagcagagcttgatcgccagtggaagaagattagygcagtaagtaggatggccccttgggtgggagggtttcagctgggagaagacattagcctgcagattcaggaacaggcaaggggctggagagccatggaaa

SEQ ID NO: 152848 - DNA, 201 bp, Homo sapiens; identical to SEQ ID NO: 28420

SEQ ID NO: 152849 - DNA, 201 bp, Homo sapiens
aagccccagagctcagaagggatcccgtccccaacttgactcactttgtcatcaatgccaaatagggtcaggtactcaaagagcaacttcaggtctcccargccctccaaggcctgcttgttttgggatagtttaggatcctggagcagctgttccaccagggataccccacctggggagacagacttgtgagtgaggctg

SEQ ID NO: 152850 - DNA, 201 bp, Homo sapiens
ctcaggtgatccacccgcctcagcctcccaaagtgctgggattacaggcaaaagccaacacacccggcctggatatgaatttataataccctacagtgcarcacaagaagatgcactcaaagcactgatgtgaggaagtacttgccccgtagcagctattcactctaccagtgtaaacaaactctaagctagggcaagaca

SEQ ID NO: 152851 - DNA, 201 bp, Homo sapiens; identical to SEQ ID NO: 28421

SEQ ID NO: 152852 - DNA, 201 bp, Homo sapiens
ctccaagaagttctacatctgtgtctctagtgcccccatcaatagtcttctgctggtggatgagaatgttctggccactggggatgacacaggtggtatcygtctctgggaccagcggaaggagggccccttaatggatatgaggcaacatgaagagtacatcgcagacatggctctggatccagccaaaaagctgctgct

SEQ ID NO: 152853 - DNA, 201 bp, Homo sapiens; identical to SEQ ID NO: 28423

SEQ ID NO: 152854 - DNA, 201 bp, Homo sapiens
gtgaaggtaccatctacctcttcaattggaatggctttggggccacaagtgaccgctttgccctgagagctgaatctatcgactgcatggttccagtcacmgagagtctgctgtgtactggctccactgatggagtcatcaggtgagggaagcctggacagcccttaggtcacaggaagggcagacccagctagccagtac

SEQ ID NO: 152855 - DNA, 201 bp, Homo sapiens
gtgtatgtgcatggaggtgaagggtaaggaccaggaggtccccactgggacagagatgctccaagaagttctacatctgtgtctctagtgcccccatcaayagtcttctgctggtggatgagaatgttctggccactggggatgacacaggtggtatccgtctctgggaccagcggaaggagggccccttaatggatatga

SEQ ID NO: 152856 - DNA, 201 bp, Homo sapiens
tggacggggacgtgttcgtgtgagagcggggcagggccggggcgccgggtctggaagcttcccgggggtggacctgggaacaggagagatgagagaaagtkgcagggagacaaattttgcaagattctttgggtccaatttattcagtaacattcggctcttctatcacaccaatctgttgaaagaactggaatgtcgtga

SEQ ID NO: 152857 - DNA, 201 bp, Homo sapiens
cttggctcatgtggtctcatgcccaccccagcccatctttctagattcagtcatgctactctcctgctacaaggaaccctcctcattccttatctctgctscctccagtatctggcccttgctctctgccaggcaaattctactcttgtatgatccaacccacatgtcaccaccttagctttccagggctctcttctccct

SEQ ID NO: 152858 - DNA, 201 bp, Homo sapiens
tgtgctgggggcttagtctgaggcagcttccacattgttttctctatttccctgcagtgggggaagaaggtagcctgtggctccagtgaaggtaccatctrcctcttcaattggaatggctttggggccacaagtgaccgctttgccctgagagctgaatctatcgactgcatggttccagtcaccgagagtctgctgtgt

SEQ ID NO: 152859 - DNA, 201 bp, Homo sapiens
cctgccgagctgtggccttctctgaagatgggcagagtgagtactggggaagacaaccagcaatgtggtggaagggagcagtgagcagcaccatgacctgrgcaccttttccccagagctcattactgtctccaaggacaaagccatccatgttctagatgtggagcagggccaactggaaagacgtgtttccaaggctca

SEQ ID NO: 152860 - DNA, 201 bp, Homo sapiens
agccacgaaggactagcgtccctctctcctatcccaagggcattaagcctgtctggatgaagtaggagaggaaagatttacacgcagttctcaactttacrtgacgtgactagggagggaattgacggtcgcaccgtctacctagcccaaacggggtcacagcaggacaaggaagtagccgatctcccagatgcggtctct

SEQ ID NO: 152861 - DNA, 201 bp, Homo sapiens
atgtcatcgcgcagcgtgggattttgcggcttcctgacagcccaggctgtcgcttgacttgatcttgggtttcaccaagccacgaaggactagcgtccctstctcctatcccaagggcattaagcctgtctggatgaagtaggagaggaaagatttacacgcagttctcaactttacgtgacgtgactagggagggaattg

SEQ ID NO: 152862 - DNA, 201 bp, Homo sapiens; identical to SEQ ID NO: 28429

SEQ ID NO: 152863 - DNA, 201 bp, Homo sapiens
ccacagttctgagacaagctttagtctttcctctagcagcttcttctgtgcagatgccacaagcacctgtgtctccgtggtccgtatcttctcctccaaarcctggggaaggggcagataaaagagagctgggctaacaccttcaaggagcaaacaaagcaggctctagtcgggattttgagaccaggcccaactcagctc

SEQ ID NO: 152864 - DNA, 201 bp, Homo sapiens
ctcactgaaaatggagaaatgagatggtaaactttttgggcttagaggtgtagaagcaggaactcttaggtaggtgggaaggctgctctgtctagttggtytctgcactcaatgcaacccaggctgggtctggagtcatttaccctccttgccctctccccagcttttcctactcttgccaagagggagaaaccaaggagc

SEQ ID NO: 152865 - DNA, 201 bp, Homo sapiens
atgtacacaaaatgctgatcgtagcttactagtccgttatatgactagaatgtgaaaaaacactgttctggagtgtaatctgtcatcggttttgttctctrttttatctccaacctctagtctagggtagatgctcaacacatgtttgattttgaacaaaagatacaggttagaggcagtggaaaagttgaagatgttatg

SEQ ID NO: 152866 - DNA, 201 bp, Homo sapiens
gcccttccccacaaataaaaaccaacaaagaggacaaatcaggacaataaagaagattcatgctaagctgtggcagaggggggaaggtatgatcgggtggsggtgggacaaggaacggccatggaagatcactgggtcaggttggaccctgggctgggagcgggagggcaaggcccctcaccacaacttaacccaaaccta

SEQ ID NO: 152867 - DNA, 201 bp, Homo sapiens
gtgtccagcacacctaagtttgctgccaccctggggcttgcctcccataccttgatcccagcatcccacagttctgagacaagctttagtctttcctctascagcttcttctgtgcagatgccacaagcacctgtgtctccgtggtccgtatcttctcctccaaagcctggggaaggggcagataaaagagagctgggcta

SEQ ID NO: 152868 - DNA, 201 bp, Homo sapiens
cggggcgccgggtctggaagcttcccgggggtggacctgggaacaggagagatgagagaaagttgcagggagacaaattttgcaagattctttgggtccartttattcagtaacattcggctcttctatcacaccaatctgttgaaagaactggaatgtcgtgacagagcccagataccgtagtaggccaaaaagcccttt

SEQ ID NO: 152869 - DNA, 201 bp, Homo sapiens
  misc_feature (1)...(201): n = A,T,C or G
acaaatatctcctccacagtggtccagacccaatctttgtccaggctggggctttcaaagatgataaagaggggttgggtgggatcacaaagaaatcttgngcaaatataccttgaactaacatatattgaaaaaagcaggacctaacatttcaaactcactgaaaatggagaaatgagatggtaaactttttgggcttag

SEQ ID NO: 152870 - DNA, 201 bp, Homo sapiens
gaacgtcccggagacacttccggccccgccccccgaggcggaagcggagtgccaggctactcctcccgcagtgtgggtggttccgaggctgactaccctgmggcggcgcggctcgcagtccttctcagcatggaccgcacttgtgaggagaggcccgctgaggatgggagcgacgaggaggacccagactccatggaagcc

SEQ ID NO: 152871 - DNA, 201 bp, Homo sapiens
atttcccaaggcagggtgggatctgggaaaagaagtcaagtacttgggttgttaccttgtccagcttgtctactgaggagcagatggtacggaacttgctrtcagaaacaccacagatagcaaacatcccatctagaatgcgtcgatcgtttacctgcaaggaaccaatgcatagtgaggggggaatctcttttcttacat

SEQ ID NO: 152872 - DNA, 201 bp, Homo sapiens
ggaggacccagactccatggaagccccaacccggatccgggacactccggaagacatcgtgctggaagctccggctagtgggctggcgttccatccggccygtgacctactggctgcaggggacgtggacggggacgtgttcgtgtgagagcggggcagggccggggcgccgggtctggaagcttcccgggggtggacctg

SEQ ID NO: 152873 - DNA, 201 bp, Homo sapiens
aggctcagttctgcctacctggaactcactggcaattaagcatgtattcattctgccctttttgaggatctgctctgaggcaggcacttgggggtattccrtaaacagtactcacctcaaagttgtttacaggctggtgcctctcccccacctccattttgatcttgcctctttttcagcacgtactctcaatgtactgta

SEQ ID NO: 152874 - DNA, 201 bp, Homo sapiens
agacacttccggccccgccccccgaggcggaagcggagtgccaggctactcctcccgcagtgtgggtggttccgaggctgactaccctgcggcggcgcggytcgcagtccttctcagcatggaccgcacttgtgaggagaggcccgctgaggatgggagcgacgaggaggacccagactccatggaagccccaacccggat

SEQ ID NO: 152875 - DNA, 201 bp, Homo sapiens; identical to SEQ ID NO: 28435

SEQ ID NO: 152876 - DNA, 201 bp, Homo sapiens
gtcggggcaaagctgggcctgcgtgagattcgcatccacttatgtcagcgctcgcccggcagccagggcgtcaggtgaggcgcggcgtggtgaggcgggcrggcttcgggacgccagggtcacgacctcgacctccctgaagttgagggaagcccccgcccacagcacgcgcggcgctctctccggccccgcagggacttc

SEQ ID NO: 152877 - DNA, 201 bp, Homo sapiens
gctactcaggaggctgaggcaggagaattgcttgaacccaggaggtggaggttgcagtgagtggagatcgtgccaccacactccagcctgggtgacagagygagactccgtctcaaaaaaaaaaaaaaaaaaagagagagaatgggctcccagctgaggctggacccatgcaatacattgctcaccgtagttaataataaa

SEQ ID NO: 152878 - DNA, 201 bp, Homo sapiens
tatatagtctacaaagaatgaaacacaaagatcataacaatagctaaaatatatgacatggtgaccacatgcccaggcaccatgccaagctcttctacatrcatgttctcatactcctacaactaccctatgatgcaagattatcctcagttataagtgaggagactgaagcttaaggtggttagttgatttgtccaagga

SEQ ID NO: 152879 - DNA, 201 bp, Homo sapiens
acagccgctggcagtaagcaggacccttttctgcaacattgcacagaactgtgagcacctgcagatagacacatatatagtctacaaagaatgaaacacamagatcataacaatagctaaaatatatgacatggtgaccacatgcccaggcaccatgccaagctcttctacatacatgttctcatactcctacaactaccc

SEQ ID NO: 152880 - DNA, 201 bp, Homo sapiens
ggcaggcctcagcaacagtggactgctcggagtgagagagctcatgcaggcaccgagccgcctcaagctgcagcagggcctggttgctggtcaggagcccraccagggtccgcatgctgccctccagcctatgtgagtgagtaccagagccctgcttagcttgtggtccatccctcagagccccaactcctccctccacca

SEQ ID NO: 152881 - DNA, 201 bp, Homo sapiens
tccagcctatgtgagtgagtaccagagccctgcttagcttgtggtccatccctcagagccccaactcctccctccaccacaccatccacactgaccggatsaaggtttgctgtgtttcagggtgctgcaagcctcgacgaaggctgaccagagccccctctctctccttttcctctgtcccccgctgggcttgccgcagga

SEQ ID NO: 152882 - DNA, 201 bp, Homo sapiens; identical to SEQ ID NO: 28468

SEQ ID NO: 152883 - DNA, 201 bp, Homo sapiens
cctgcgtagggaccaggagctgacgtttttgtagttaagaatgggcttcagacaggagagaagttagtcaatatagtttctccaaataacgtgtagccagwgtcagtccaggtagtgtgtgagaatctcagtaattttgcacatagagctgggccctgtgctgagtgcttccctgcctaactcatttaatcttcattagtt

SEQ ID NO: 152884 - DNA, 201 bp, Homo sapiens
ttgccacagccccagaaaccccaagaagtctccttgaggatttttagaaagacctagaatactgatcaaagtaacactttcaatcaagcagaaatccacaycaatatttgtaggtgggcagttctcaaactttagagagtatcataaatacctgagggactattaaaagtcattctacttagtagaaagaaataggaagga

SEQ ID NO: 152885 - DNA, 201 bp, Homo sapiens
tcaacccacactgctttgcgttcgcagcctttccgcttcctgtttttccctccgaccaaccccgagcgcaaagaaattgacctcgcagcggtcctacaatrcttttatatcattggccaagctttaccccgcccctgcctcatgcagcctatgggctaggctttagggtccgcggttggtcagaccggagcacttggcctg

SEQ ID NO: 152886 - DNA, 201 bp, Homo sapiens
gggctcccagctgaggctggacccatgcaatacattgctcaccgtagttaataataaatgcctacagtgcccccgaaagcttccctgaaacaacccattgyggccatccagaatcagccaaaattctatttggacttgggcttcctagatgtgtttgagacctattgtattaattctaggcataccaaatgtattttgatc

SEQ ID NO: 152887 - DNA, 201 bp, Homo sapiens
ttggtcagaccggagcacttggcctgaagacctggaattggcgacttcgatattaacaaggatggcggcggccgcagcaagtcgaggagtcggggcaaagstgggcctgcgtgagattcgcatccacttatgtcagcgctcgcccggcagccagggcgtcaggtgaggcgcggcgtggtgaggcgggcgggcttcgggacg

SEQ ID NO: 152888 - DNA, 201 bp, Homo sapiens
  misc_feature (1)...(201): n = A,T,C or G
gctgcaggaagacctgaacagcctaggggcagggaagaaaattcaacacacctggtctctgtgtcctaagactcaattcccacagcctcatgggtcagccnactccagagggtgcattccccaacaagaggatgaagtttctgacatggaacctatataggttagccaggcccagagaaacaactatagttaggactggat

SEQ ID NO: 152889 - DNA, 201 bp, Homo sapiens
  misc_feature (1)...(201): n = A,T,C or G
tgtgtcctaagactcaattcccacagcctcatgggtcagcctactccagagggtgcattccccaacaagaggatgaagtttctgacatggaacctatatangttagccaggcccagagaaacaactatagttaggactggatgggaagggagccactgtgtggcttcagaacaggggtgactgaggatgtgggccagaaac

SEQ ID NO: 152890 - DNA, 201 bp, Homo sapiens
acatcttcacctaccagctccagtcctgcatcctcggttttctggacagccccagccaagtccaacagcagcaaccccagagtagacagagccccatggcyaatgagcagaggattgctgacctggctgggcaacaggaagcaagcagtccctaggtatatagtcaattccacctttaagaagagaagcagttgcctaggc

SEQ ID NO: 152891 - DNA, 201 bp, Homo sapiens
cacacctagattggttgggccctgaggccacacaccaccacctgctggctctcaactaagggtacatctgagggctcaggactgctgtcccatacaatccractaccagatcttggattcaagtaaccccaatacataccattacgctcaccacgttagatactggcaacagctgtaagagaggctcaatcagatccaggg

SEQ ID NO: 152892 - DNA, 201 bp, Homo sapiens
tatgagacttcagttcattcaagaaatacactggttgggccgggcctggtggctcatgcctgtaatcccagcactttgggaggcctgggcgggtggatcarctgaggtcaggaatttgagaccagcctggccaacatggtgaaaccccatctttactaaaaatacaaaaattagccgggagtagtggtgggtgcctgtaat

SEQ ID NO: 152893 - DNA, 201 bp, Homo sapiens
tgtaagaaggaagaggttacctgcattccagagtatcaagaaacatctcccagaatttcacctgacatcttcacctaccagctccagtcctgcatcctcgsttttctggacagccccagccaagtccaacagcagcaaccccagagtagacagagccccatggccaatgagcagaggattgctgacctggctgggcaacag

SEQ ID NO: 152894 - DNA, 201 bp, Homo sapiens
ggagctgaagaaggcgaatcccgacctacccatcctaatccgcgaatgctccgatgtgcagcccaagctctgggcccgctacggtgagtgcgggacgccargggtctggggctccggtaggggaacaagggtttgagaagagaagggaccgcccaaggtcgtgcagaaacccgtggagaaactagaactcggactttagcc

SEQ ID NO: 152895 - DNA, 201 bp, Homo sapiens
ggcgtggtgaggcgggcgggcttcgggacgccagggtcacgacctcgacctccctgaagttgagggaagcccccgcccacagcacgcgcggcgctctctcsggccccgcagggacttcattgagaaacgctacgtggagctgaagaaggcgaatcccgacctacccatcctaatccgcgaatgctccgatgtgcagcccaa

SEQ ID NO: 152896 - DNA, 201 bp, Homo sapiens
ggaggctgaagcaggtggatcacctgaggtcaggagttcaagaccagcctggccaacatggtaaaaccccgtctctactaaacatacaaaaattagccggrtgtggtggcgggcacctgtaatcccagctactcaggaggctgaggcaggagaattgcttgaacccaggaggtggaggttgcagtgagtggagatcgtgcc

SEQ ID NO: 152897 - DNA, 201 bp, Homo sapiens
cttcagaacaggggtgactgaggatgtgggccagaaacctatacctctggctgatacaggaacagcagatgcagcagctccaaactctggcctactacttyagtgtcagaaaaggctagtgtgtgcagcaaggcgggaagcaggggccctggccacagccgctggcagtaagcaggacccttttctgcaacattgcacaga

SEQ ID NO: 152898 - DNA, 201 bp, Homo sapiens
aggctgaagcaggtggatcacctgaggtcaggagttcaagaccagcctggccaacatggtaaaaccccgtctctactaaacatacaaaaattagccgggtrtggtggcgggcacctgtaatcccagctactcaggaggctgaggcaggagaattgcttgaacccaggaggtggaggttgcagtgagtggagatcgtgccac

SEQ ID NO: 152899 - DNA, 201 bp, Homo sapiens
gcctcaagctgcagcagggcctggttgctggtcaggagcccgaccagggtccgcatgctgccctccagcctatgtgagtgagtaccagagccctgcttagyttgtggtccatccctcagagccccaactcctccctccaccacaccatccacactgaccggatgaaggtttgctgtgtttcagggtgctgcaagcctcgac

SEQ ID NO: 152900 - DNA, 201 bp, Homo sapiens
  misc_feature (1)...(201): n = A,T,C or G
tgagggagagtggaggccaagatggagctgctggcagaagcagggctgtaagtaggaaccacgaagatgccagtggttcttaccaaaccctgatagcaggngggagagtgtccaaacccaaagccctgcccagatgggaaagtgtccaaacccaaagcccttcctagccagacacatgaatttaaaatgtgcaacagcttt

SEQ ID NO: 152901 - DNA, 201 bp, Homo sapiens; identical to SEQ ID NO: 28477

SEQ ID NO: 152902 - DNA, 201 bp, Homo sapiens
atgcccagctaatttttctatttttagtagagataggccatgttggccaggctgctcttgaactcctgacctcaggtgatctgcccacctcggcctcccaragtgctgggattacaggtgtgagccaccgcgccgggccttgactggacagttctacgcagaatcccaagcagcttcttaaactcattatgctattgactc

SEQ ID NO: 152903 - DNA, 201 bp, Homo sapiens
tgaactcctgacctcgtgatctgcccgcctcaacctcccaaagtgttgggattacaggcgtgagccacctctccccaccttatttatttatttttttttttgagacagagtttctgcttctgttgcccacgctggaatgcaatggcgcaatctcggctgactgcaacctctgcctcccaggttcaaacagttctcctgcct

SEQ ID NO: 152904 - DNA, 201 bp, Homo sapiens
aaacacaatatgtctcaaacatgaacttgctttttttttttttttttttctctttttgagacggagtctcgctctgtcactcagtctggagtgcagtggcrcaatcttggctcactgcaacctctgcctcccgggttcaagcgactctcctgcttcagcctcccgagtagctgggactataggtgcctgccgccacgcctg

SEQ ID NO: 152905 - DNA, 201 bp, Homo sapiens
caccacgcccagctaatttttgtatttttcgtagagacggggtttctggtctcgaactcctgacctcgtgatccacctgccttggcctcccaaagtgttgrgattacaggcatgagccactgcgcccggtcctaatttttgtatttttagtagagacagggtttcactatgttggccaggctggtctggaactcctgacct

SEQ ID NO: 152906 - DNA, 201 bp, Homo sapiens
tttttgtatttttgtagggttttttttttttttttttttttgagaccgagtttcactctgtcgcccaggctggagtgcagtggcgtgatctcagctcactrcaacctccgcctcctgggttcaagcaattctcctacctcagcctaccgagtagctgggactacaggtgcatgccaccacgcccagctaatttttgtattt

SEQ ID NO: 152907 - DNA, 201 bp, Homo sapiens
tatattaaataagataaatgctgtataagagaaacacagggggcctgtgggaacacagtggaagggcctctattttaggcaattgtattcctgtgggttcytccttttattcctgggaactgatgctatgttctgtttctacaggctgtgctgtcctccagaccctgctaagaagctcttaggcgagccctttgtcctgca

SEQ ID NO: 152908 - DNA, 201 bp, Homo sapiens
ctaatttttgtatttttgtagggttttttttttttttttttttttgagaccgagtttcactctgtcgcccaggctggagtgcagtggcgtgatctcagctyactgcaacctccgcctcctgggttcaagcaattctcctacctcagcctaccgagtagctgggactacaggtgcatgccaccacgcccagctaatttttgt

SEQ ID NO: 152909 - DNA, 201 bp, Homo sapiens
tttttttgagacagagttttgctcttgttgcccaggctggagtgcaatggcacggtctcggctcattgcaacctccacctcccaggttcaagcaattctcrtgcctcagcctcccaagtagctggggttgcaggtacttgccaacatgcctggctaatttttgtatttttgtagggttttttttttttttttttttttgag

SEQ ID NO: 152910 - DNA, 201 bp, Homo sapiens
tgagcaccccaccccccccttttttttttgagacagagttttgctcttgttgcccaggctggagtgcaatggcacggtctcggctcattgcaacctccacytcccaggttcaagcaattctcctgcctcagcctcccaagtagctggggttgcaggtacttgccaacatgcctggctaatttttgtatttttgtagggttt

SEQ ID NO: 152911 - DNA, 201 bp, Homo sapiens
agctcaattgatcctcctgcctcagccactcaaagtgctgggattacagacatgagcaccccaccccccccttttttttttgagacagagttttgctcttsttgcccaggctggagtgcaatggcacggtctcggctcattgcaacctccacctcccaggttcaagcaattctcctgcctcagcctcccaagtagctgggg

SEQ ID NO: 152912 - DNA, 201 bp, Homo sapiens
actcctgagctcaattgatcctcctgcctcagccactcaaagtgctgggattacagacatgagcaccccaccccccccttttttttttgagacagagtttkgctcttgttgcccaggctggagtgcaatggcacggtctcggctcattgcaacctccacctcccaggttcaagcaattctcctgcctcagcctcccaagta

SEQ ID NO: 152913 - DNA, 201 bp, Homo sapiens
cacgatctcagctcactgcaacctccacctcctgagttcaagtgattctcctgcctcagcctcccgagtagctgggattacaggtgtgtgccaccacaccyggctaatttttgtatttttagtagagatggggtttcaccatgtcggctaggctggtcttgaactcctgacctcaagtgatgcacccaccttggcctccca

SEQ ID NO: 152914 - DNA, 201 bp, Homo sapiens
caaaattaagtaaaaggttatcttggttccagctcttatttgagttaacaatattccttatcatctatgacatatccacttactgactttctggttgaagsgtctaacctttcctataatacggggtatttctttcccctcttacaaatgtaatgatttcgcttttatagtagaatatgctttaccagattaaataaatat

SEQ ID NO: 152915 - DNA, 201 bp, Homo sapiens
taagtccaggacaggtttgctgaaaaccaggaacccagaatgatattagatggattagagatgagtaggcccattgcagccatataagcacaaatataccycatttatgcaacaaatgtattttctacatcaaattatattttaaaagcattaggaaggtaagctatttaaagaaacccaacagtgaagccttttgtaata

SEQ ID NO: 152916 - DNA, 201 bp, Homo sapiens
ttttctcttataaggacagcaggcatggtgcggtggctcacggctgtaatcccagcactttaggaggccgaggcaggaggatcacctgaagtcaggagttygtgaccagcctggccaacatggtgaaacctcgtgtctactaaaaatacaaaaattagccaggcttggtggtgggcatctgtgatcccagctactcaggag

SEQ ID NO: 152917 - DNA, 201 bp, Homo sapiens
gcacatgccaccacgcctagctaattttttgtatttttagtagagacggggtttcactgtgttagccaggatggtctcgatctcctgacctcgtgattcgyccacctcagcctcccaaagtgctgggattacaggtgtgagccaccgcacccagcccctcttcctgaatttttttttgagaggggtctcactctgttgccc

SEQ ID NO: 152918 - DNA, 201 bp, Homo sapiens
tgtgccaccacacctggctaatttttgtattttcagtagagatgagatttcaccatgttggccaggctggtctcgaactcctgaccttaggtgatctgccygcctcggcctcccaaagtgctgggattacaggcgtgagccaccgctcacagctcaagatgctttcttcttttattcctttccagtaccatgacccgttgc

SEQ ID NO: 152919 - DNA, 201 bp, Homo sapiens
agagaaacacagggggcctgtgggaacacagtggaagggcctctattttaggcaattgtattcctgtgggttcttccttttattcctgggaactgatgctrtgttctgtttctacaggctgtgctgtcctccagaccctgctaagaagctcttaggcgagccctttgtcctgcagcaagctgtacctgtggatttgttccc

SEQ ID NO: 152920 - DNA, 201 bp, Homo sapiens
gtgactctcctacctcagcctcctgagtagcttggattacaggcatgtgccaccacacctggctaatttttgtattttcagtagagatgagatttcaccaygttggccaggctggtctcgaactcctgaccttaggtgatctgcccgcctcggcctcccaaagtgctgggattacaggcgtgagccaccgctcacagctca

SEQ ID NO: 152921 - DNA, 201 bp, Homo sapiens
tagcacaatcttggctcactgcaacctctgcctcccgagttcaagtgactctcctacctcagcctcctgagtagcttggattacaggcatgtgccaccacrcctggctaatttttgtattttcagtagagatgagatttcaccatgttggccaggctggtctcgaactcctgaccttaggtgatctgcccgcctcggcctc

SEQ ID NO: 152922 - DNA, 201 bp, Homo sapiens
atggcatgatctcagttcactgcaacctccgcctcccgggttcaagcaattctcctgactcagcctcccaagtagctgggattacaggcacgtgccagcaygcccggctaatttttgtatttttagtagagatggggtttcaccatgttggccaggctggtctggaactcctgacctcaactgatctgcctgtcttggcct

SEQ ID NO: 152923 - DNA, 201 bp, Homo sapiens
gagacagagtctcgcttcttcacccaggctggagtgcaatggcatgatctcagttcactgcaacctccgcctcccgggttcaagcaattctcctgactcascctcccaagtagctgggattacaggcacgtgccagcacgcccggctaatttttgtatttttagtagagatggggtttcaccatgttggccaggctggtct

SEQ ID NO: 152924 - DNA, 201 bp, Homo sapiens
cctgatacagtcattggccttttgctcttgcctttactcaaggtactttaaagaaaattttgttttgattgattgattgatttttttttttttttttttttgagactgagtctcactatatcgcccaggctggagtgcagtggtgtgatctcagctcattgcaacctccacctcccgggttgaagcgattctcatgcctca

SEQ ID NO: 152925 - DNA, 201 bp, Homo sapiens
ggatcacctgaagtcaggagttcgtgaccagcctggccaacatggtgaaacctcgtgtctactaaaaatacaaaaattagccaggcttggtggtgggcatctgtgatcccagctactcaggaggctgaggcaggagaattgcttgaacccgggtggcggaggttgcagtgagccgagatcatgccactgcactccagccta

SEQ ID NO: 152926 - DNA, 201 bp, Homo sapiens
gcaacctccacctcccgggttcaagcgattctcctgcctcagcctcctgagtaggtgggattacaggcatgcgccaccacatctggctaattttgtatttytagtagagacagggtttctccatgttggtcaggttggtcttgaactcctgacctcaggtgatccgcctgcctcggcctcccaaagtgctgagattatagg

SEQ ID NO: 152927 - DNA, 201 bp, Homo sapiens
cagctgtgaaacttgctagttttgcttgtgtaataattcggttctcttcctagtactatgaagtattccttcgacagtctccattggagccctgccttgtrtttcatgaaggtggatactggcgtgagctcacagtccgcaccaatagccaagggcacacaatggctatcatcactttccatccccagaaattaagtcagg

SEQ ID NO: 152928 - DNA, 201 bp, Homo sapiens
tctacctgggaacttggagaggtcagttgaaggttgtataaaccaaagactgaagaggaatgaaagggtgcagagaagtgtcagtagaagtggaaaatacrgtggccttaaagaagaagattaaattggaagtctttgatgcagaacgtgatcacaaggttgattacggatactgctaatgggtagtcattgtaacacagt

SEQ ID NO: 152929 - DNA, 201 bp, Homo sapiens
ggcctaagtacttttttttgctggggggacggagtttcgctcttgttgcccaggctggagtgcaatggcgtgatctcggctcaccgcaacctccacctccygggttcaagcgattctcctgcctcagcctcctgagtaggtgggattacaggcatgcgccaccacatctggctaattttgtatttttagtagagacagggt

SEQ ID NO: 152930 - DNA, 201 bp, Homo sapiens
agccacactgtacctggcctaagtacttttttttgctggggggacggagtttcgctcttgttgcccaggctggagtgcaatggcgtgatctcggctcaccrcaacctccacctcccgggttcaagcgattctcctgcctcagcctcctgagtaggtgggattacaggcatgcgccaccacatctggctaattttgtatttt

SEQ ID NO: 152931 - DNA, 201 bp, Homo sapiens
taggcgtgagccacactgtacctggcctaagtacttttttttgctggggggacggagtttcgctcttgttgcccaggctggagtgcaatggcgtgatctcrgctcaccgcaacctccacctcccgggttcaagcgattctcctgcctcagcctcctgagtaggtgggattacaggcatgcgccaccacatctggctaattt

SEQ ID NO: 152932 - DNA, 201 bp, Homo sapiens
ttctcttggcctcccaaagtgctgggattataggcgtgagccacactgtacctggcctaagtacttttttttgctggggggacggagtttcgctcttgttrcccaggctggagtgcaatggcgtgatctcggctcaccgcaacctccacctcccgggttcaagcgattctcctgcctcagcctcctgagtaggtgggatta

SEQ ID NO: 152933 - DNA, 201 bp, Homo sapiens
agtagagacggggtttcaccatgttggctaggctggtctcgaactcctgacctcaggtgatccgcctaccttggcctcccaaagtgctgggattacaggtrtgagccaccatgcccggccaaccccatctcatttttaaaacaaacaaaaaccaggtgctttcacagcaatgtagacataacatagagtcctgtgttgcaa

SEQ ID NO: 152934 - DNA, 201 bp, Homo sapiens
gcctcccgagtagtgggattacaggtgcctgccaccatgcccggctaattttagtatttttagtagagacggggtttcaccatgttggctaggctggtctygaactcctgacctcaggtgatccgcctaccttggcctcccaaagtgctgggattacaggtgtgagccaccatgcccggccaaccccatctcatttttaaa

SEQ ID NO: 152935 - DNA, 201 bp, Homo sapiens
aaatattgcagcacctatgtcgtcatcctccatgttgcttattgatcatggaatgttaatttagcaataattttctctgtgtgtgtgtgtgtgtgtgtgtrtgtgtgtgtgtgtgtatgtgtataaatgtaaaattctgaattaggctatgacttaacattgggatgaaatccaaggtagagcttaagggcaaaatacaaa

SEQ ID NO: 152936 - DNA, 201 bp, Homo sapiens; identical to SEQ ID NO: 28491

SEQ ID NO: 152937 - DNA, 201 bp, Homo sapiens
tttccatagatgggaacgttgtctgtgtgcagtctaatcatctgaaaaacatccctgagaaacacagtcaagtggcgcaggtaaaatggaacaagagctgsttgagaatggcctggagcattgtagtctacaacagcaacatccctgacattttgataatagagccaattctagtgctagagggaaggaggggctctgtac

SEQ ID NO: 152938 - DNA, 201 bp, Homo sapiens; identical to SEQ ID NO: 28495

SEQ ID NO: 152939 - DNA, 201 bp, Homo sapiens
attacaggtgcccgccaccatgtctggcaaaattttgtatttttagtagagacggggttttgccatgttggtcaggctggtcttgaacccctgacctcaartgatctgcccacctcggcctctcaaagtgctggaattacaggtgggagggatcacgcccagtggaactaggctttctttaaatcaccaaccttaaaattt

SEQ ID NO: 152940 - DNA, 201 bp, Homo sapiens
ttcatatttacccattatcttttaggtcaagctcagtttttcaattaccatccttccagaacctatatgactttttttttttttttttttgagacggagtyttgctctgtcacccaggctggagtgctgtggtgtgatctcggctcactgcaacttctgcctcctgggttccagcgattctcctgctcagcctcctaagta

SEQ ID NO: 152941 - DNA, 201 bp, Homo sapiens
gctaataacaaaattaagtaaaaggttatcttggttccagctcttatttgagttaacaatattccttatcatctatgacatatccacttactgactttctrgttgaagggtctaacctttcctataatacggggtatttctttcccctcttacaaatgtaatgatttcgcttttatagtagaatatgctttaccagattaa

SEQ ID NO: 152942 - DNA, 201 bp, Homo sapiens
tgcccaatgcttgccgataggtcaaggaagtgaggacttagagtggaccattggatttcataacaaggaggttgggggtgaccttaatgtgtactgttttygcggagtagtggtgacttgattcagatgggtgagtagaaggagaagaatgggaggcagtgaataggttcagttcttgtgattagttttacgacaaagagg

SEQ ID NO: 152943 - DNA, 201 bp, Homo sapiens
tggagatggatatacattgagggtagaacaacaggatttcctgatggattgagtgagaggtataagagacagagagaagtggctgggcgcagtggctcacrcctgtaattccagcactttgggaggctgaggtgggcagatcacctgaggtcaggagttggagactagcctggccaacatagtgaaaccccatctctacta

SEQ ID NO: 152944 - DNA, 201 bp, Homo sapiens
tagctgggactataggcacgtgccactgtgcctagctaacttttgtatttttagtagggacggggtttcaccatgttggccaggctggtctcaaactcctracctcaaatgatctacccgcctcagcctcccaaagtgatgggattacaagtgtgagccactgcacctggccaacatttgccagttttgcatctagacttt

SEQ ID NO: 152945 - DNA, 201 bp, Homo sapiens
ctcccaagtagctgggactataggcacgtgccactgtgcctagctaacttttgtatttttagtagggacggggtttcaccatgttggccaggctggtctcraactcctgacctcaaatgatctacccgcctcagcctcccaaagtgatgggattacaagtgtgagccactgcacctggccaacatttgccagttttgcatc

SEQ ID NO: 152946 - DNA, 201 bp, Homo sapiens
ctcctgttgcccaggctagagtgcaatggtgcaatcttggctcactgcaacctccgcctcccgagttcaagcaattctcctgcctcagcctcccgagtagytgagattacaggcacatgccaccacgcccagctaatttttgtgtttttaatagagatggggttttgccatgttggccagactggtctcgaactgttgacc

SEQ ID NO: 152947 - DNA, 201 bp, Homo sapiens
ttgcttttttttttttttcctacgacagagttttgctcctgttgcccaggctagagtgcaatggtgcaatcttggctcactgcaacctccgcctcccgagytcaagcaattctcctgcctcagcctcccgagtagctgagattacaggcacatgccaccacgcccagctaatttttgtgtttttaatagagatggggtttt

SEQ ID NO: 152948 - DNA, 201 bp, Homo sapiens
tagtatagacagggtttctccatgttggtcaggttggtctcaaactcctgagctcaggtgacctgtcagcctcggcctcccaaagtgctgggattgcaggygtgagccaccgcacctggccccaagcacttatttaaaacaggacaaaatataaaaagaaaatagtctcttctgtgaacaaatgtctcccctgacattaag

SEQ ID NO: 152949 - DNA, 201 bp, Homo sapiens
atctttctatttgcttttttttttttttcctacgacagagttttgctcctgttgcccaggctagagtgcaatggtgcaatcttggctcactgcaacctccrcctcccgagttcaagcaattctcctgcctcagcctcccgagtagctgagattacaggcacatgccaccacgcccagctaatttttgtgtttttaatagag

SEQ ID NO: 152950 - DNA, 201 bp, Homo sapiens
ttcactcttgttgcccaggctggagtgcaatggtgtgatctcgcctcaccgcaacctctgcctcccaggttcaagcgattctcctgcctcagcctcccgastagctgggattacaggcgtgcgccaccacacccggctaattttgtacttttagtatagacagggtttctccatgttggtcaggttggtctcaaactcctg

SEQ ID NO: 152951 - DNA, 201 bp, Homo sapiens
acattaacttatctttctatttgcttttttttttttttcctacgacagagttttgctcctgttgcccaggctagagtgcaatggtgcaatcttggctcacygcaacctccgcctcccgagttcaagcaattctcctgcctcagcctcccgagtagctgagattacaggcacatgccaccacgcccagctaatttttgtgtt

SEQ ID NO: 152952 - DNA, 201 bp, Homo sapiens
gtggtgcgatctcggctcactgcaacctccgcctcccgggttcaagtgattctcctgcctcagcctctggagtagctaggattacaggcgcctgccaccaygcccagctaatttttgtatttttagtagagactgggtttcactctgttggtcaggctgctctcgaactcctgaccttgtgatccggctgcctcggcctcc

SEQ ID NO: 152953 - DNA, 201 bp, Homo sapiens
cctatttgggctactctggactccaggactcttcctgatcaattcctgaggcaggtatagaacagtcgagcacgactgctcacacgcttttttttttttttgctgaggaaaaaactcccaagcatttttattttttatttgtttgagacggagtctagctttgtcacccaggctggagtgcagtggtgcgatctcggctca

SEQ ID NO: 152954 - DNA, 201 bp, Homo sapiens; identical to SEQ ID NO: 28484

SEQ ID NO: 152955 - DNA, 201 bp, Homo sapiens; identical to SEQ ID NO: 28485

SEQ ID NO: 152956 - DNA, 201 bp, Homo sapiens; identical to SEQ ID NO: 28486

SEQ ID NO: 152957 - DNA, 201 bp, Homo sapiens
aattaaataacttgctcagtggacacagcttatcagtggcagatctgctgggggtggtggcttatgcctgtaatcccagcactttgggaggccgaggcagrcggatcacctgaggtcaggagatcgagaccagcctgaccgacgtggtgaaactccatctctactaaaaatacaaaaattagctgggcgtgatggtgcact

SEQ ID NO: 152958 - DNA, 201 bp, Homo sapiens
cactcataggtgggaactgaacaatgagaacacatggacacaggaaggggaccatcacactctggggactgttgtgggttggggggaggggggagggatakcattgggagatatacctaatgctagatgatgagttagtgggggcagcgcaccagcatggcacatgtatacatatgtaactaacctgcacattgtgcacat

SEQ ID NO: 152959 - DNA, 201 bp, Homo sapiens
gtgcatgtgtctttatagcagcatgatttatcatcattctcagtaaactatcgcaagaacaaaaaaccaaacaccgcatattctcactcataggtgggaaytgaacaatgagaacacatggacacaggaaggggaccatcacactctggggactgttgtgggttggggggaggggggagggatagcattgggagatatacc

SEQ ID NO: 152960 - DNA, 201 bp, Homo sapiens
ggagactgaggcaggaaaatcgcttgaatccaggaggcggaggttgcagtgagacaagactgtgccactgcactccagcctgggtgatagagtgagactcygtctcaaaaaaaaaaaaataataaatttccaatttcatccatgtccctacaaaggacatgaactcatcattttttatggctgcgtagtattccatggtgt

SEQ ID NO: 152961 - DNA, 201 bp, Homo sapiens
gctatttgggagactgaggcaggaaaatcgcttgaatccaggaggcggaggttgcagtgagacaagactgtgccactgcactccagcctgggtgatagagygagactccgtctcaaaaaaaaaaaaataataaatttccaatttcatccatgtccctacaaaggacatgaactcatcattttttatggctgcgtagtattc

SEQ ID NO: 152962 - DNA, 201 bp, Homo sapiens
aggcatgcgccaccacatctggctaattttgtatttttagtagagacagggtttctccatgttggtcaggttggtcttgaactcctgacctcaggtgatcygcctgcctcggcctcccaaagtgctgagattataggtgtgagccactgtgaccagcagcctaggtactttttattaattatcttcaactcttacaaccac

SEQ ID NO: 152963 - DNA, 201 bp, Homo sapiens
tcccagctatttgggagactgaggcaggaaaatcgcttgaatccaggaggcggaggttgcagtgagacaagactgtgccactgcactccagcctgggtgayagagtgagactccgtctcaaaaaaaaaaaaataataaatttccaatttcatccatgtccctacaaaggacatgaactcatcattttttatggctgcgtag

SEQ ID NO: 152964 - DNA, 201 bp, Homo sapiens
gaaccaagcatactgtgttatttcctaatgtcttcctgtgtcagcatttaatctccttaattagattgtaacctttgtaacccctctggtgtctagtgtgkcatgatgtcttgcacatagtaagcacttactaaatattagctgcttgattggctgttggttaggaaggtggaatagggaaagagatttgtcacagaaata

SEQ ID NO: 152965 - DNA, 201 bp, Homo sapiens
tgggaagccttttctgagcactcatcaggaaccaagcatactgtgttatttcctaatgtcttcctgtgtcagcatttaatctccttaattagattgtaacytttgtaacccctctggtgtctagtgtggcatgatgtcttgcacatagtaagcacttactaaatattagctgcttgattggctgttggttaggaaggtgga

SEQ ID NO: 152966 - DNA, 201 bp, Homo sapiens
aataaggacttaaaggaagtgaaggtgttagccatgcaaaggtctgagggaaaaacattttaggcaaaagaaagagctattgcaaagaccccaagatgagmgtgtggctggctttttggaggaattgacagtagacccaggcaaataagaggaagaatagtaggagatgaggtgagagttaatggtagtgactttggcttt

SEQ ID NO: 152967 - DNA, 201 bp, Homo sapiens
cccgggttcaagcaattctcctgcctcagcttcctgaatagctggaattacaggcacatgccaccacgcctagctaattttttgtatttttagtagagacrgggtttcactgtgttagccaggatggtctcgatctcctgacctcgtgattcgcccacctcagcctcccaaagtgctgggattacaggtgtgagccaccgc

SEQ ID NO: 152968 - DNA, 201 bp, Homo sapiens
gtagctgggattacaggcaccagccaccacgcccagctaattttttttatattttattttatttatttatttatttttttgagatggagtctcgctctgtygcccaggctggagtgcagtggcgtgaacttggctcactgctacctctgcctcccgggttcaagcaattctcctgcctcagcttcctgaatagctggaatt

SEQ ID NO: 152969 - DNA, 201 bp, Homo sapiens
gtctctagtcttttttttttttttttttgagacggagtttcagtctttttgcccaggctggagtgtaatggtgcgatcttggctcactgcaacctccaccktccaggttcaagtgattctcctgcctcagcctctcgagtagctgggattacaggcaccagccaccacgcccagctaattttttttatattttattttatt

SEQ ID NO: 152970 - DNA, 201 bp, Homo sapiens
gtggtggtgcatgcctgtaatcccagctacttgggaggttgaggcaggagaatcccttgaacccaggaggcggaggttgcggtgagccaagatcatgccastgtactccagcctgggcaacaagagtgaaactctgtctcaaaaaaaaaaaaaaaaggaaatgttaatagatatttgtgtcttccccgctttcatagttaa

SEQ ID NO: 152971 - DNA, 201 bp, Homo sapiens
ttgctgtgttgctcaggctggccttgaacccttaggatcaagcagtcctcctgtgtcaacctcctagtagctgggactatgggcatgtatcactttccccrcgtacttcacccacttaaagtgtagaatttggctgggtgcagtggctcacacctgtaatcccagcactttgggaggctgaggcgggcagattccttgagc

SEQ ID NO: 152972 - DNA, 201 bp, Homo sapiens
ctacaggcccatgccaccacacccagctactttttgaatttttagtagagatgggttttcaccatgttggccagtctggtcttgaactcctgacctcaagkgatccacccacctcggcctcccaaagtgctgggattacaggtgtgagccactgcgcctggtctttttctagttctttatgtcaaattactgtgtcccttg

SEQ ID NO: 152973 - DNA, 201 bp, Homo sapiens
ctcccaagtagctgggactacaggcccatgccaccacacccagctactttttgaatttttagtagagatgggttttcaccatgttggccagtctggtcttkaactcctgacctcaagtgatccacccacctcggcctcccaaagtgctgggattacaggtgtgagccactgcgcctggtctttttctagttctttatgtca

SEQ ID NO: 152974 - DNA, 201 bp, Homo sapiens
ttactttcagttatcccttcccagattccattcctgagctttttttttttttttttttttgagatggagtctcgcactgtcacccaggctggagtgcagtrgtgtgatctcggctcactgcaacctccgcctcccgagttcaagtgattctcctgtctgagcctctgagtagctgggattacaggtgtgcaccaccacacc

SEQ ID NO: 152975 - DNA, 201 bp, Homo sapiens
gtaatcccagcactttggaaggctgaggcgggcagatcatgaggtcaggagatccgagaccatcctggctaacatggtgaaaccccatctctactaaaaayacaaaaaaattagccaggtgtggtggcatgcgcctgtaatcccagctactcggggggctgaggcaggagaatcgcttgaacccaggaggcggaggttgca

SEQ ID NO: 152976 - DNA, 201 bp, Homo sapiens
gtggctcacgcctgtaatcccagcactttggaaggctgaggcgggcagatcatgaggtcaggagatccgagaccatcctggctaacatggtgaaaccccayctctactaaaaatacaaaaaaattagccaggtgtggtggcatgcgcctgtaatcccagctactcggggggctgaggcaggagaatcgcttgaacccagga

SEQ ID NO: 152977 - DNA, 201 bp, Homo sapiens
tcaattctactgcttaattctaaataagctctactgcttatttagaaaagagaaatttgttctaactaattgacatattagggaaaatttgagcataatgmaaatttcatgtttacttagaagtaattttgtccataagaaacgctagatgaaaggagaccatactcagctgaaccgagctatttaagaacatgtaaaatg

SEQ ID NO: 152978 - DNA, 201 bp, Homo sapiens
attataatggagctgaccgggcgcggtggctcacgcctgtaatcccagcacttcgggaggctgaggtaggcggatcacttgaggtcaggagtttgagaccrgcctggccaacgtggtaaaagcccgtctctactaaaatagaaaaattagctgggtgtggtggtggtgtgtgcctgtaatcccagctatttgggagactga

SEQ ID NO: 152979 - DNA, 201 bp, Homo sapiens
tcaagcaattctcctacctcagcctcccatgtagctgggattacaggcacctgccaccacgcctggctaatttttgtgtttttagtagagacagggtttcrccatgttggccaggctggtctcaaactcctgacgtcagatgatctgcccaccttggcctcccatagtgttgggattacaggcgtgagccactgtgcccgg

SEQ ID NO: 152980 - DNA, 201 bp, Homo sapiens
cacatgcctgtaatcccagctacttggcatgagaatcgcttgaatccaggaggtcaaggctgcagtaaactgaaatcacgccactgtactccagcctgggmgacagagtgagaccctgtctcaaaaaaaaaaaaatcaaaatttaaaaagatgttttgtgctacaaataccattgagaaaggtgaaagacaagccacagaa

SEQ ID NO: 152981 - DNA, 201 bp, Homo sapiens
ccagctgctcgggaggctgaggcaggagaactgcttgaacccaggaggtggaggttgcagtgagctgagactgcgccattgcactccagcctggacaacargagtgaaactccgtctcaaaaaaaaaaaaaaaaaaaaaaccacgaaaattagctgggcgtagtggcacatgcctgtaatcccagctacttggcatgagaa

SEQ ID NO: 152982 - DNA, 201 bp, Homo sapiens
gcaatggtgtgatctcggctcaccacaacctccacctcctgggttcaagcgaatctcctgcctcagcctcccgagtagctgggattacaggcatgcacaaycacgcccctctaatttttgtattttcaatagagacaggatttcttcatgttggtcaggctggtctcgaactcctaacctcaggtgatccacgcacctcgg

SEQ ID NO: 152983 - DNA, 201 bp, Homo sapiens
ccaagatggtaaaaccccatctctactaaaaatacaaaattagccggtcgtggtggcaggcgcctgtaatccaagctactcgggaggctgaggcagagaaytgcttgaacccgggaggtggaggttgcagtgtgccgagatcgcaccactgcattctggtctgggtgacagagtgagactctgtcgcaaaagaaaaaaaaa

SEQ ID NO: 152984 - DNA, 201 bp, Homo sapiens
gccgggcatggtggctcatgcctgtaattccagcactttgggaggctgaggtgggtggatcacgaggtcaggagttcaagaccagcctggccaagatggtraaaccccatctctactaaaaatacaaaattagccggtcgtggtggcaggcgcctgtaatccaagctactcgggaggctgaggcagagaattgcttgaacc

SEQ ID NO: 152985 - DNA, 201 bp, Homo sapiens
ggatgctgaggcaggtggatcacttgaggtcaggagttcgagaccagggtggccaacatgatgagacccccgtctctactaaaaatacaaaaattagttgrgtgcaatggggggtgcctgtaatcccagctacgcgggaggctgaggcaggagaatggcttgacacaggcagcggaggttgcggtgagccaagaatgtgcc

SEQ ID NO: 152986 - DNA, 201 bp, Homo sapiens
atgcctgttatcccaacactttgtgaagcaaggcaggaggattggttgagcccaggagttggagactagcctgggcaacatagtgagaccctgtctctacmaaaaatttaaaaattagctgggcatagtggcgtgaacctgtagtcttagctactcagggggctgagagaggaggattgctttagcccgggaggtcgaggc

SEQ ID NO: 152987 - DNA, 201 bp, Homo sapiens
gtgctgggattgcaggcgtgagccaccgcacctggccccaagcacttatttaaaacaggacaaaatataaaaagaaaatagtctcttctgtgaacaaatgyctcccctgacattaagaaagaaacagaactcaccttgactagtatgagtgtgctgccttgaaaaagaaatttcaccacagaagttactaaatatgacagg

SEQ ID NO: 152988 - DNA, 201 bp, Homo sapiens
gtggttgcttatgcctgttatcccaacactttgtgaagcaaggcaggaggattggttgagcccaggagttggagactagcctgggcaacatagtgagaccytgtctctacaaaaaatttaaaaattagctgggcatagtggcgtgaacctgtagtcttagctactcagggggctgagagaggaggattgctttagcccggg

SEQ ID NO: 152989 - DNA, 201 bp, Homo sapiens; identical to SEQ ID NO: 28490

SEQ ID NO: 152990 - DNA, 201 bp, Homo sapiens
atcaaaatgttggaaagtgcacaaggcgccgtgtgccaggtacggtctgtccaccaactgttgcatggggcaggaggccacggccaggccacagctttgcsgcgcgcagctgcagaaggggcaagtggcgccccatgctgtctggaggaccaaggaggctcaagcctcagtccttcccactcatggtcccagacacttagc

SEQ ID NO: 152991 - DNA, 201 bp, Homo sapiens
aaatctttatattaaacttaatatagaatatattacatattaagatttcaaaatacctcaattttatgaatattttaattcatatataatgaacaattgcyatataagtatataaataaaatataaatatgaattaaattataagcactatattatgtaataaaatatattatttgaataaatggcattgtgctacacaaa

SEQ ID NO: 152992 - DNA, 201 bp, Homo sapiens
atctaacttcaaaaacaaagaatccaaaggctgcttagtaactgtagtgcctaagtttagagtctgttcaaggtggtgtgaaaagttttttggggggggggcatttccctcaaaagcacgtggagaaggaacctattgaccctctggaatgccagaatcgggaagagacaaaaaagtcgcaaccaattgaagattgggcaa

SEQ ID NO: 152993 - DNA, 201 bp, Homo sapiens; identical to SEQ ID NO: 28499

SEQ ID NO: 152994 - DNA, 201 bp, Homo sapiens; identical to SEQ ID NO: 28500

SEQ ID NO: 152995 - DNA, 201 bp, Homo sapiens
aaatgttggaaagtgcacaaggcgccgtgtgccaggtacggtctgtccaccaactgttgcatggggcaggaggccacggccaggccacagctttgccgcgygcagctgcagaaggggcaagtggcgccccatgctgtctggaggaccaaggaggctcaagcctcagtccttcccactcatggtcccagacacttagctctg

SEQ ID NO: 152996 - DNA, 201 bp, Homo sapiens; identical to SEQ ID NO: 28502

SEQ ID NO: 152997 - DNA, 201 bp, Homo sapiens; identical to SEQ ID NO: 28503

SEQ ID NO: 152998 - DNA, 201 bp, Homo sapiens; identical to SEQ ID NO: 28504

SEQ ID NO: 152999 - DNA, 201 bp, Homo sapiens; identical to SEQ ID NO: 28505

SEQ ID NO: 153000 - DNA, 201 bp, Homo sapiens; identical to SEQ ID NO: 28506

SEQ ID NO: 153001 - DNA, 201 bp, Homo sapiens; identical to SEQ ID NO: 28507

SEQ ID NO: 153002 - DNA, 201 bp, Homo sapiens; identical to SEQ ID NO: 28508

SEQ ID NO: 153003 - DNA, 201 bp, Homo sapiens; identical to SEQ ID NO: 28527

SEQ ID NO: 153004 - DNA, 201 bp, Homo sapiens; identical to SEQ ID NO: 28528

SEQ ID NO: 153005 - DNA, 201 bp, Homo sapiens; identical to SEQ ID NO: 28529

SEQ ID NO: 153006 - DNA, 201 bp, Homo sapiens; identical to SEQ ID NO: 28530

SEQ ID NO: 153007 - DNA, 201 bp, Homo sapiens
tgggaagtggtgaggtataggaatgactaaaaatctgaaacaatttttgtccccttaaatgtgcttggctatcaataagaaatactgaataaaattcatayttcaagttataattaaaatccaatttccaaagagtcttttgctagaactattaaaatgcatctaaaccaatgagttcaatttttatctcctctatatttt

SEQ ID NO: 153008 - DNA, 201 bp, Homo sapiens; identical to SEQ ID NO: 28510

SEQ ID NO: 153009 - DNA, 201 bp, Homo sapiens; identical to SEQ ID NO: 28511

SEQ ID NO: 153010 - DNA, 201 bp, Homo sapiens; identical to SEQ ID NO: 28512

SEQ ID NO: 153011 - DNA, 201 bp, Homo sapiens; identical to SEQ ID NO: 28534

SEQ ID NO: 153012 - DNA, 201 bp, Homo sapiens; identical to SEQ ID NO: 28513

SEQ ID NO: 153013 - DNA, 201 bp, Homo sapiens; identical to SEQ ID NO: 28514

SEQ ID NO: 153014 - DNA, 201 bp, Homo sapiens; identical to SEQ ID NO: 28537

SEQ ID NO: 153015 - DNA, 201 bp, Homo sapiens; identical to SEQ ID NO: 28516

SEQ ID NO: 153016 - DNA, 201 bp, Homo sapiens; identical to SEQ ID NO: 28518

SEQ ID NO: 153017 - DNA, 201 bp, Homo sapiens; identical to SEQ ID NO: 28517

SEQ ID NO: 153018 - DNA, 201 bp, Homo sapiens; identical to SEQ ID NO: 28519

SEQ ID NO: 153019 - DNA, 201 bp, Homo sapiens; identical to SEQ ID NO: 28520

SEQ ID NO: 153020 - DNA, 201 bp, Homo sapiens; identical to SEQ ID NO: 28521

SEQ ID NO: 153021 - DNA, 201 bp, Homo sapiens; identical to SEQ ID NO: 28544

SEQ ID NO: 153022 - DNA, 201 bp, Homo sapiens
ccacattatctgacttcaaaatatactaaaaaactatagtaacaaagactgtatggtaatggtaaaaaaatggagacatagaatggaaccaaatagagaaycaagaaataaagccacatacctataaaaaactgaactttgacaaagttgacaaaaataaacagtgaagaaaggatatgaaatattgctttactgaatagc

SEQ ID NO: 153023 - DNA, 201 bp, Homo sapiens
acaaaaataaaatactagaaatatgtttaaccaaggaggttaaagatcactataaggagaaatacaaaacactgatataataaatcatagatgccagaaayagaaaaagatcttatgctcatggactggaagtatcactagttaaaacgaccatactgccaagagcaatctacagactaaacataactcctatcattacaa

SEQ ID NO: 153024 - DNA, 201 bp, Homo sapiens
acgttagtgacgttccacagaataaaaggaaatagttttgccaaaaacaaaaaacaaacaaacaaaaaaaacaagaactgaaaaaagacaaggatctccastctcaccactcctattcaacatagtactggcagttctagccagaggaaagggatccaaatttaaaaagaagtagtcatgttatctctgcttgctgatgac

SEQ ID NO: 153025 - DNA, 201 bp, Homo sapiens
ctgaatgggataaaacatttgtaaaacatatatttgatataggattaatattcaaaatatacaaggaattcatagaacttatcagaaacaaataacttaaytgaaaaattggcaaacaacctgaatagacatttcttcaaaggagacatgcaactggcccctaggtatatgaaaaaaaaaaatcaacaacactaatcatca

SEQ ID NO: 153026 - DNA, 201 bp, Homo sapiens; identical to SEQ ID NO: 28551

SEQ ID NO: 153027 - DNA, 201 bp, Homo sapiens
ttgttacatatgtatacatgtgccatgttggtgtgctgcacccattaactcatcattcacattaggtatatctcctaatgctatccttccccactcccccmaccccacaacaggccctggtgtgtgatgttccccttcctgtgtccaagtattctcattgtacaattcccacctatgagtgaaaacatgcggtatttggtt

SEQ ID NO: 153028 - DNA, 201 bp, Homo sapiens; identical to SEQ ID NO: 28552

SEQ ID NO: 153029 - DNA, 201 bp, Homo sapiens; identical to SEQ ID NO: 28553

SEQ ID NO: 153030 - DNA, 201 bp, Homo sapiens; identical to SEQ ID NO: 28548

SEQ ID NO: 153031 - DNA, 201 bp, Homo sapiens; identical to SEQ ID NO: 28555

SEQ ID NO: 153032 - DNA, 201 bp, Homo sapiens; identical to SEQ ID NO: 28556

SEQ ID NO: 153033 - DNA, 201 bp, Homo sapiens; identical to SEQ ID NO: 28547

SEQ ID NO: 153034 - DNA, 201 bp, Homo sapiens; identical to SEQ ID NO: 28558

SEQ ID NO: 153035 - DNA, 201 bp, Homo sapiens
gtcaagaggtttgggtgagaggggaggagacagagagggtgacaattggacaggggcaagagtccaaggaggcatttgggtgctcttttttttttttttttgtctacttctgctttttattgtgagaagtttgggcttatggaaaggctaacaggatggcaccagtaaagaaagagacactgtgaacactggagagacaca

SEQ ID NO: 153036 - DNA, 201 bp, Homo sapiens
agtcaagaggtttgggtgagaggggaggagacagagagggtgacaattggacaggggcaagagtccaaggaggcatttgggtgctcttttttttttttttttgtctacttctgctttttattgtgagaagtttgggcttatggaaaggctaacaggatggcaccagtaaagaaagagacactgtgaacactggagagacac

SEQ ID NO: 153037 - DNA, 201 bp, Homo sapiens
aacattattattctttaattcctacaaggtactcgaaaaccttaagtgaaaaagatttctatctttttatcttagcgcatttatggaaaaaatattaactrtcctgaatattttataattttgtaggaaaaatatgcatctattttttcttgacttcttttatatagtaataaaagttattttggaagctctttgtgtgtt

SEQ ID NO: 153038 - DNA, 201 bp, Homo sapiens
ctccacctggttgaaggtcttgccgttgtagacgcccaccatgctgcccaccatctcgggtaggatgatcatgtcccgcaggtgcgtcttcaccacttcckgcttctccatgggcggcgcctccttcttggccttgcgcaggcgcttcagcagggagtgctgcttccgccgcaggccccggttcagccgccgccgctggcg

SEQ ID NO: 153039 - DNA, 201 bp, Homo sapiens
ttcacagagttgaggtgagaattataatgaaactgtgaagcacttagatggtacctactacctagcaaggactcaattgtgtgtgtgtgtttgtgtgtctstgtatgtgtgcgtgtgtgtgtaataaatgagcccaacacaggcaagggggagatgtgttattaggtcttcatatatcgcacatttttattttactattgc

SEQ ID NO: 153040 - DNA, 201 bp, Homo sapiens; identical to SEQ ID NO: 28565

SEQ ID NO: 153041 - DNA, 201 bp, Homo sapiens; identical to SEQ ID NO: 28566

SEQ ID NO: 153042 - DNA, 201 bp, Homo sapiens; identical to SEQ ID NO: 28567

SEQ ID NO: 153043 - DNA, 201 bp, Homo sapiens; identical to SEQ ID NO: 28568

SEQ ID NO: 153044 - DNA, 201 bp, Homo sapiens
acctcacaccaagacctgaagccacacacctggtgtagaaagggcggagagtcttctaggtggatggaatagcatgtggggaagagtttgtggtatttgargagtagggaggagaccaggctgtccagagcagggcatagaagatgaattggaggctggacaggtataattatagggagactagcttgcaggtgtttatgg

SEQ ID NO: 153045 - DNA, 201 bp, Homo sapiens; identical to SEQ ID NO: 28569

SEQ ID NO: 153046 - DNA, 201 bp, Homo sapiens
tcttcacctggtaagttgggtggcttccaggacacctgattctcatggctcttctctctttcctggctgccccatcctcagtctcctttgctggttcttcctcatcttcctgatgacggcaggttagagtgctcaagcctcagtcttctgaccacttctttttttctacactcacttctttggtggtcaatcttatccagt

SEQ ID NO: 153047 - DNA, 201 bp, Homo sapiens
acgttggtcaggctggtcttgaactcccgacctcaggtgatctacccgcctcagcctcccaaagtgctgggattagaagtgtgagccaccacgtctggccrggacactttctttacttggcttctctttcttcacctggtaagttgggtggcttccaggacacctgattctcatggctcttctctctttcctggctgcccc

SEQ ID NO: 153048 - DNA, 201 bp, Homo sapiens
ggcggccgcgtgatcccgggggtggggcccatttctgagttggggccagctccccacccgcaagaggccccacattccgggccagcagcccagaaagtccmtccccgcaggcggagacagccccaagaagtcgacgccccggtcccgccgcccggccactacccagagggctgccgccgcctctccaagttcttgtggccc

SEQ ID NO: 153049 - DNA, 201 bp, Homo sapiens
agctactgcctcagttctctgcttgccttactatgaacttttgaaatttttgtccatacctgcagtttctagttcctttcttcctgttctttctcgagcckgttccaattaggttttcatctcctgctccaccaaaattgtgcttaatatggtagctaatgactaccatgtcactaattccattggtcaattctcagtcct

SEQ ID NO: 153050 - DNA, 201 bp, Homo sapiens; identical to SEQ ID NO: 28572

SEQ ID NO: 153051 - DNA, 201 bp, Homo sapiens
taaaaatataacaaaattttttagatattaaaattaaaaaatattttaaagaatttgttatatcatataggtaatatgatattactaaaagtttagaaggrccaaaaagtctgacaaattgtattactcttatgaaacaactattgaagttatacattccctttcaatcttgttgatatgcatgtttttatattaattgta

SEQ ID NO: 153052 - DNA, 201 bp, Homo sapiens
ctccttaatagcaagctttgagagtttacattgaaactgtactagtgtgcattttgagcagataaattcaagactgttttgcatgttgctgtatcatcctstttgtaattggatacatctcttatttcataggagagatcctgcatacagtacattcccgccagaaggtgttttcgtaaatacgcttggccttctgatcct

SEQ ID NO: 153053 - DNA, 201 bp, Homo sapiens
tttttttttttttttttgagacagagtctcgctctgtcgcccaggctggagtgcagtggcgtgatctcgtctcactgcaagctccgcctccctggttcackccattctcctgcctcagcctcccgagtagctgggactacaggtgcctgccaccacgtctggccaattttttgtatttttagtagagacagggtttcaccg

SEQ ID NO: 153054 - DNA, 201 bp, Homo sapiens
aatcaatttcattatatattcctgagtgaattgtagcataatttatatttctccttaatagcaagctttgagagtttacattgaaactgtactagtgtgcmttttgagcagataaattcaagactgttttgcatgttgctgtatcatcctgtttgtaattggatacatctcttatttcataggagagatcctgcatacagt

SEQ ID NO: 153055 - DNA, 201 bp, Homo sapiens
ctttcgcaagtgtggccagcattctcccactctggaatgtagtggaaggtgttactaaccctcagcattcaaaggcttccctggtgtgagatcggcatcasggtgtgagcaccactgggcacctaaggcatttcgttgcgtaactctcagttattttgccactatgcttataagaaaaaaacatactcaagttccaaagta

SEQ ID NO: 153056 - DNA, 201 bp, Homo sapiens
taaatatgttgttttaagttactagatttctggtaatttgttatggtagctctaggggattaatataggctataacagttatcactgcactctgggaagcmcaaagtattggcatcgtcatcaggtatttacagatttttcattgtttctctcagtccagacacagtttaccaattgggtcagtttttattataaccagcg

SEQ ID NO: 153057 - DNA, 201 bp, Homo sapiens
tcttggacaaaaatgtgtaaattttggcaattttcatctgctgctcttacgaaaatcttgtttctttttttctttctttcaagacgtagtcttgctctgtygcccaggctggagtgcagtggcgcaatcttggctcactgcaacctccacctcccaggttcaagcaattctcctgccccagcctccccagtagctgggatt

SEQ ID NO: 153058 - DNA, 201 bp, Homo sapiens
ggtagacgagtaagtggttgttgaatgaatgagtgattatttctgtaccatcattgaattgttagtaacaaaatgcagtttacagccacttacttgtgacrataacaatagtgtctaaagtaaacacaccctcgcttttccctagtgattctcctgttcagccagtttaaaagcactggcttagtcaacctccaggaagaa

SEQ ID NO: 153059 - DNA, 201 bp, Homo sapiens
acaccctcgcttttccctagtgattctcctgttcagccagtttaaaagcactggcttagtcaacctccaggaagaatggacatcatattgcactggaaacscatctttattctgaggcctctagctgatgagaatgttgctgcttaagtacaatctgtacctcctcttcccttcatcccagttctccctcctttttctgca

SEQ ID NO: 153060 - DNA, 201 bp, Homo sapiens
tgagctcaccgcaaactctgcctcccgggttcaagcgattctcctgcctcagcctccagagtagctgggattacaggtatgcaccacgatgcccagctaaktttgtatttttagtagagatggggtttctccacgttggtcaggctggtcttgaactcccgacctcaggtgatctacccgcctcagcctcccaaagtgctg

SEQ ID NO: 153061 - DNA, 201 bp, Homo sapiens
gttgaacagtgccccccaaaaaggtatgtctaaatcctaatcccaggtatccatgaatgtgaccttacttggaaataggatctttgcagatgttaactatrgatctcaagatgagatcaccctggatttagactgggctctaaatcctatgattggtgcccttataagagaaaggagaaggagatttgagacaaagacaca

SEQ ID NO: 153062 - DNA, 201 bp, Homo sapiens
aatatgttgttttaagttactagatttctggtaatttgttatggtagctctaggggattaatataggctataacagttatcactgcactctgggaagcccraagtattggcatcgtcatcaggtatttacagatttttcattgtttctctcagtccagacacagtttaccaattgggtcagtttttattataaccagcgtt

SEQ ID NO: 153063 - DNA, 201 bp, Homo sapiens
tgcagatgacattttccacttctactattgatcataggtaccttcatggttaagaacatgcattttttgtcattgcaattttattcccaaatctattcatrtattcagcagtgaaccgaatacccgttatatgccagataccttgctaggctgggctgtgggtgatacctgttccacaagacaaatgtgggctcaaagaga

SEQ ID NO: 153064 - DNA, 201 bp, Homo sapiens
cccagaaacttgagcccgggcgcgatgccggagcgccgcgcagtcgggccgctgcagcccacgcgccccggaaagtcgcccctgtggaccgagcctgcgcratcgggggcgcggaaacactttcgcctcagccttttgctgaacttgcttccaggctgcagatgaggaggggaaggcagcggggaaaagattgccagagcg

SEQ ID NO: 153065 - DNA, 201 bp, Homo sapiens
tgcgcaatcgggggcgcggaaacactttcgcctcagccttttgctgaacttgcttccaggctgcagatgaggaggggaaggcagcggggaaaagattgccrgagcgagaatttgcccgtatttgtaacatcctcggccctgggtaaaggggctggccaaggggggcgagtgaagcatccgccctgggttcctctcctccta

SEQ ID NO: 153066 - DNA, 201 bp, Homo sapiens
atttaattgtattacttcaaatacatttaaatgtattacttcaaacctacacttcaaaaggtcttttcaggacgtgaatgcatacaagtgcacaatccctstacactggccagaaccggtccatggtcggtcttcttatcatgaaaaagttcctgaaatcagcccagtgaaagctgtagttctggctggtgcaacaggggt

SEQ ID NO: 153067 - DNA, 201 bp, Homo sapiens
cactgtctccagggttcaagtgattctcctgtttcagcctcccaagtagctgggattacaggtacccaccatcgtgccaggctaatttttgtattttagtrgagatggggtttcaccatgttggccaggctagtcttgaactcctgacctcaggtgatccgcctgcctcagcctcccaaagtgctaggattacaggtgtga

SEQ ID NO: 153068 - DNA, 201 bp, Homo sapiens
cactgcaaccactgtctccagggttcaagtgattctcctgtttcagcctcccaagtagctgggattacaggtacccaccatcgtgccaggctaatttttgyattttagtagagatggggtttcaccatgttggccaggctagtcttgaactcctgacctcaggtgatccgcctgcctcagcctcccaaagtgctaggatta

SEQ ID NO: 153069 - DNA, 201 bp, Homo sapiens
gtgtttgagaaccacaatgttaacaatatagccaatatgtacagtctgcacagctgggttggactgatagctgtcatatgctatttgttacaggtcagtayttcagtgtatttacaagcaagttataaaaacaattcagagactgtaaatgttttcttttctttttttttttttttttttttgagacagagtctcgcttag

SEQ ID NO: 153070 - DNA, 201 bp, Homo sapiens
gatccgcctgtcttggcctcccaaagttctgggattacaggcgtgagccaccacacccagccgacattttctaataattaaacccaaattcaagttactgkatttttctcttcattgtcttaagataattatacacaggtattcacttcttcctccctccctttctttctttttaagtttgtcatgctagcatgttccacc

SEQ ID NO: 153071 - DNA, 201 bp, Homo sapiens
aattggtgtttgattgatgaccccaaatgatcaataaaagactgaatatattctattcattctactgctggacagggaaagctagcgtgcagccaatttgygtaaatgtaaaaggtttttaaaaatcaagttttgacactcagagggggcaaagttcagttttacagcaaatttgacacatttctctgtgatgcttcatag

SEQ ID NO: 153072 - DNA, 201 bp, Homo sapiens
atttttagcagagacagagtttcaccatgttggccatgctagtcttgaactcctgacctcaaatgatctgcctgcctcagcctcccaaagtgctgggattrcaagtgtgagctactgcgcccagcctactcttgacttttaatatcagagatgagtttttattttgggaatttttgatataatatgatccagattggggag

SEQ ID NO: 153073 - DNA, 201 bp, Homo sapiens
ggaggagctacatgctttgagtccagggctgccttaggctctggggatacagtggagaaccagcaagacacattaacgccctcagagaagatgaagtaggrgtgagagggggccttgagtttgctttaaaagtgtactttttaaggtattgcattaaatcatttgaaaagattccttgaatatagaaatgattatccaaaa

SEQ ID NO: 153074 - DNA, 201 bp, Homo sapiens
tattgtcctaatggtgaggactgttaagtgttagaatggaaccaaagaataggaaaaatgacatcctgtgctgaaagctttaaagaggctgaattcacatyggtctttgtaggtttagatgtgtttctgtctgaaaaaggaatagataatcccttatatttttataatcctatgaagttcttgggtgtttgtttgtttgtt

SEQ ID NO: 153075 - DNA, 201 bp, Homo sapiens
aggaaaaatgacatcctgtgctgaaagctttaaagaggctgaattcacattggtctttgtaggtttagatgtgtttctgtctgaaaaaggaatagataatyccttatatttttataatcctatgaagttcttgggtgtttgtttgtttgttttttgagacagagtctcattctgttgcccaggctggagtgcaatggtgcg

SEQ ID NO: 153076 - DNA, 201 bp, Homo sapiens
ataagggatataagacaaatcccttctagatctgagtcatgtcttggaagagagctactctgaaatgcctatagaccataagcagactgtgtgtgagcaaraaatatacttttatatgttaagctcttgaaaatggagcctgttagttcctatagcatgttctgtcctaatataatcagattaaaataatcatcttccatt

SEQ ID NO: 153077 - DNA, 201 bp, Homo sapiens
ggttgcctgcctccagaccctacctgccttaaaacaagtgttacagatgctatattattttcatatttattatttttaaatcaatttcattatatattccygagtgaattgtagcataatttatatttctccttaatagcaagctttgagagtttacattgaaactgtactagtgtgcattttgagcagataaattcaaga

SEQ ID NO: 153078 - DNA, 201 bp, Homo sapiens
ctgccaaatctttttagacagcgaaaaccttcatctaaaatatgttttgaaactcttcattcatgttagagtccaatatacggttttctaaaaggtttttwaatttctctaaactttgtacttctcttaatctgttcatacttaactcttggacaaaaatgtgtaaattttggcaattttcatctgctgctcttacgaaaa

SEQ ID NO: 153079 - DNA, 201 bp, Homo sapiens
attctatattccttcctttcctgtgtagaactccttttattgtataaactgaagggagagaaattaaatagtctaatgatctcaagttgatttcgtgagakaatataactacctttaagtaacatttaaaagactaacagaaattaagagcagttcttaaaaaacagttgggatatcctattaatttatctaaaagtgacc

SEQ ID NO: 153080 - DNA, 201 bp, Homo sapiens
attagccgggcatggtggtgtgcacctgtaatcccagctatttgggaggctgaggcaggagaatatcttgagcccaggaagcagaggttgcagtgagccargatcatgccactgcactccagcttgggcgacatagtgagactctgtctcaaaaaaaaagaagactaaaaaataagtatgtgaggtgatggatatgttaat

SEQ ID NO: 153081 - DNA, 201 bp, Homo sapiens
  misc_feature (1)...(201): n = A,T,C or G
aaaagcaagatgcagaacaatatgtatagggataataaattttctggaatgatccatgagaaggtgataaaaggggttacattaggtagtggaactggagngaggaaacttcattttctaccctttggttctatatgaaaggttttgtcatattacacatattgctttttaaataatttaaaattagtttagaacttaaaa

SEQ ID NO: 153082 - DNA, 201 bp, Homo sapiens; identical to SEQ ID NO: 28573

SEQ ID NO: 153083 - DNA, 201 bp, Homo sapiens; identical to SEQ ID NO: 28559

SEQ ID NO: 153084 - DNA, 201 bp, Homo sapiens; identical to SEQ ID NO: 28560

SEQ ID NO: 153085 - DNA, 201 bp, Homo sapiens; identical to SEQ ID NO: 28562

SEQ ID NO: 153086 - DNA, 201 bp, Homo sapiens; identical to SEQ ID NO: 28564

SEQ ID NO: 153087 - DNA, 201 bp, Homo sapiens
gctaatttttgtatttttagtagagatggggtttcaccatgttggccaggctggtcttgaactgctgacctcaagtgataccccgcctcagcctctcaaaktgctgggattacaggcatgagccactgggcccggccaaactgagacatttttaagaagaaaggagacaacaggcataaatcagattgttaagattaggaa

SEQ ID NO: 153088 - DNA, 201 bp, Homo sapiens
cctgaggtcaaaatatcatcttatgctttctactaagagcattaaaattttgtcttttacttttctactctagtacacagaaaaaacaaaccaaaaaaacyccaacaatatgaaaaatagttttgtctttgatatttaagtacttacttcatctggaattaattttaatgtgtgaggtgatgtgattcaacttcatttttt

SEQ ID NO: 153089 - DNA, 201 bp, Homo sapiens
gataggcaattgagtatttggtagataggaagtgttctgggaggcctctcatatagtatgtgagagctctcatataggggataaaggaagtcacacctcayaccaagacctgaagccacacacctggtgtagaaagggcggagagtcttctaggtggatggaatagcatgtggggaagagtttgtggtatttgaggagtag

SEQ ID NO: 153090 - DNA, 201 bp, Homo sapiens
gaaaaaggtttcaaaaagggagtgtccagtgtgtcaaactgttcattttgtgttgtttaaaaaacaaaacaaaacacattctgtgtcctttcgtctttccstagccatcatcgtctacagactgccgtggacctggaaatgcagcaagctcctgatgaaatccatccatgcagggttaaatgcagttgctgccattcttgc

SEQ ID NO: 153091 - DNA, 201 bp, Homo sapiens
ggagtgaagaaaatgccagcaaaggaactcctccaccgtcccctagagggagccactgagaggcaggggtaacatggggaagaggggagaagcaaaagccragggaaaaaggtttcaaaaagggagtgtccagtgtgtcaaactgttcattttgtgttgtttaaaaaacaaaacaaaacacattctgtgtcctttcgtctt

SEQ ID NO: 153092 - DNA, 201 bp, Homo sapiens
cagccaacatggaaactttaaaagtaaacttttattgtctatttctaattataaaagtaatacacattaatgttaaagtttataagatgtagaaagatatraagaaaaaaccctggctattctgggcacactgcctgtggggtattcctgttccacaaggagtagaacctctgctgctgctacaaattaaataaaaaaaca

SEQ ID NO: 153093 - DNA, 201 bp, Homo sapiens
ccaaggggggcgagtgaagcatccgccctgggttcctctcctcctagagtgttaaactcagtcgagtccgggaagctgccaggacttccaagtgtgtttcrccgccctgcccagtcattggacggtcttgagcccgacttgtttatgtggcagaagagtggcgaaagttcccccgcggggcttcctattgggcactggccc

SEQ ID NO: 153094 - DNA, 201 bp, Homo sapiens; identical to SEQ ID NO: 28563

SEQ ID NO: 153095 - DNA, 201 bp, Homo sapiens; identical to SEQ ID NO: 28570

SEQ ID NO: 153096 - DNA, 201 bp, Homo sapiens; identical to SEQ ID NO: 28571

SEQ ID NO: 153097 - DNA, 201 bp, Homo sapiens
tttgggaatttttgatataatatgatccagattggggagaaaatgctactgtggttcattgttcataatttgcttttcgagtgttgaaatcctgagtattktttttttctgtatgtagatgttcaagttcactcatctaagactccttacccggagtggtgtttgcataatgtgatggtgatgatgataacaaaaaaacaa

SEQ ID NO: 153098 - DNA, 201 bp, Homo sapiens
tgtagaatattggcaggagacttaatgaccagtttgagtgtctgttacgtcccttataaaaaaactatgggcatattgtagttggtgctggttagatttatttatttatttatttttaatttttttttaacccctggaagaaaagtgtcattacactggaggaatgcaatttggcaatgacctaagacagcgtttggtccc

SEQ ID NO: 153099 - DNA, 201 bp, Homo sapiens
atgtagaatattggcaggagacttaatgaccagtttgagtgtctgttacgtcccttataaaaaaactatgggcatattgtagttggtgctggttagatttatttatttatttatttttaatttttttttaacccctggaagaaaagtgtcattacactggaggaatgcaatttggcaatgacctaagacagcgtttggtcc

SEQ ID NO: 153100 - DNA, 201 bp, Homo sapiens
gattgtcacgcttctttctgctgctcttgcttccctctcgtcctcaggcaaggctggaagaaacactgtgaggggagagacctgtccgactggaaaaaagrctgtgaggtttcctaaactggaactggacccaggatgctttgcagcaacgccctagggtttgcagtgaatgtccaaatgcctgtgtcatcttgtcccgtt

SEQ ID NO: 153101 - DNA, 201 bp, Homo sapiens
caattgtaaaaaattttagaaaatatacagtaaagacatgaaagcattggtgaacccacagttaagagccaatctttcttaaaatactggtgaattaatgrctatcttttttttttctaaaccagtgctatctaatagaactttccatgatgacaaaaatgtcttccatctgtgctgtcaaacagaaccactagccatgag

SEQ ID NO: 153102 - DNA, 201 bp, Homo sapiens
tgcaacattttatgctaacattatttttggttatttttctggtaataaaagtagtacatttcaattgtaaaaaattttagaaaatatacagtaaagacatraaagcattggtgaacccacagttaagagccaatctttcttaaaatactggtgaattaatggctatcttttttttttctaaaccagtgctatctaatagaa

SEQ ID NO: 153103 - DNA, 201 bp, Homo sapiens
agagtctcactctgtcacccaggctgaagtgcagtggcacgatctcggctcactgcaacctccgcctccagggttcaagcaattctcctgcctcagcctcyggagtagctgggattacaggcgtgtgccaccacagccagctaacttttgtatttttagtagagacaggttttgccatgttggccaggctggtctcaaact

SEQ ID NO: 153104 - DNA, 201 bp, Homo sapiens
gtgtatgagagacagagagagagagagagagagaagaacacttaagatccactatcagcaaatttcaagtaagcagtacagtataattaactatggtcacratagcttaccttagacccccagaccttcctcaccttataactgaaagtttggacccttccatcagcatctccccattttcctaaccagccaccgctctac

SEQ ID NO: 153105 - DNA, 201 bp, Homo sapiens
gaaaggattactcgagccttgttagaatcagacatggcttcaggggatgcaggacgctcccctgagctgcctgtcaccgactaagtggagcagtgtttctyccgcagactcaactgagaagtcagcctctgcggcaggcaccaggaatctgccttttcagtaagacctaaattactcttatgaagccacctgtccctgaga

SEQ ID NO: 153106 - DNA, 201 bp, Homo sapiens
atcatcaggcattagattctcataaggggaatgtaacctaaatcccttgcaagcgcagttcacagtagagttcacacctatataagaatctaatgcggccrctgatctgacaggaggtggagtccaggcagtaatgtgggagatggggagggtctgtaaatacagatgaagattcactcactcacctgctgctcacctcct

SEQ ID NO: 153107 - DNA, 201 bp, Homo sapiens
agaggatggtctccatctcctgacctggcgatctgcccgcctcagcctcccaaagtgctgggattataggcgtgagccaccgcaccaggctggcaagagamttttataagctgatatagctttagttttaactgtagaactataaaccaaatgctagtgaatctgcgtatgttgtttcaattgctatctcttatagacgat

SEQ ID NO: 153108 - DNA, 201 bp, Homo sapiens
catctgggggtgatgggagacagtgacggatcatcaggcattagattctcataaggggaatgtaacctaaatcccttgcaagcgcagttcacagtagagtkcacacctatataagaatctaatgcggccactgatctgacaggaggtggagtccaggcagtaatgtgggagatggggagggtctgtaaatacagatgaaga

SEQ ID NO: 153109 - DNA, 201 bp, Homo sapiens
cttaaccctgagaacacagcattgacttgaaagttactgtatggaaaagcattaaggagacagcctgcagtcacattccttccctggaccgtagagtggcyggttttccctgatggtggcactgaatgaccaaagtgacaggcagcatctaggcagggctgtgcacagtcaccgatgctggatttcgaagttcctgaatca

SEQ ID NO: 153110 - DNA, 201 bp, Homo sapiens
cattccttccctggaccgtagagtggccggttttccctgatggtggcactgaatgaccaaagtgacaggcagcatctaggcagggctgtgcacagtcaccratgctggatttcgaagttcctgaatcaagatcgtctgacctgttctccggctctttggcaggttctgtctccggcaggctttgaggatgaaggctgcggg

SEQ ID NO: 153111 - DNA, 201 bp, Homo sapiens
taaaccaaatgctagtgaatctgcgtatgttgtttcaattgctatctcttatagacgatgtattttgttactttttctcctggttaatagaattttgtttyaaataaaaattaagccacatttagaataaatttgcttaaaaaaaatctatcactacgtttatcttctagtgaagcctaactgagaaagcaacaaaattag

SEQ ID NO: 153112 - DNA, 201 bp, Homo sapiens
gattgggctcttcctctgaaacgtcaggtagtgcaagatgaagatggtcttaaaacaaaagcaaagttcttttcattatgaagaagctcaacagaaatgarattgtggctttgcagggaaaattatagttcttccaaccttcccatcccaaaaagactgagaaaaatgaagtaaacttgagttggggtccctctccaacaa

SEQ ID NO: 153113 - DNA, 201 bp, Homo sapiens
ccctgatggtggcactgaatgaccaaagtgacaggcagcatctaggcagggctgtgcacagtcaccgatgctggatttcgaagttcctgaatcaagatcgyctgacctgttctccggctctttggcaggttctgtctccggcaggctttgaggatgaaggctgcgggcattctgaccctcattggctgcctggtcacaggc

SEQ ID NO: 153114 - DNA, 201 bp, Homo sapiens
ttgattgtttgttttgagatggatgtttgttttgagaggatggtctccatctcctgacctggcgatctgcccgcctcagcctcccaaagtgctgggattayaggcgtgagccaccgcaccaggctggcaagagacttttataagctgatatagctttagttttaactgtagaactataaaccaaatgctagtgaatctgcg

SEQ ID NO: 153115 - DNA, 201 bp, Homo sapiens
agataggcaaaagacttttttgttgttgtttgtttgattgtttgttttgagatggatgtttgttttgagaggatggtctccatctcctgacctggcgatcygcccgcctcagcctcccaaagtgctgggattataggcgtgagccaccgcaccaggctggcaagagacttttataagctgatatagctttagttttaactg

SEQ ID NO: 153116 - DNA, 201 bp, Homo sapiens
catagaaatggttgttctgaggactgatggagattttgcgtgaagagatttaacatgtgcctgacatagagtaagatttcaataaagtattagctagtggyaatagctattattatcctaaatatttatatctcaagaagataggcaaaagacttttttgttgttgtttgtttgattgtttgttttgagatggatgtttgt

SEQ ID NO: 153117 - DNA, 201 bp, Homo sapiens
cattaactgagtgtgtgaacttggtttacggggataaaatggtacccatagaaatggttgttctgaggactgatggagattttgcgtgaagagatttaacrtgtgcctgacatagagtaagatttcaataaagtattagctagtggtaatagctattattatcctaaatatttatatctcaagaagataggcaaaagactt

SEQ ID NO: 153118 - DNA, 201 bp, Homo sapiens
ggggttggagatcccaggtctatatgatttcaaacctttaatatttctttaaccttgttttacagcacagcaaatgtgtcttacggtgaatgtgcatttgraaaaaaaatgtgtattttatatttggtgggtggatgttctataaatgattgttacttcctttctaattttcttacttgttctactatacggtgagaaata

SEQ ID NO: 153119 - DNA, 201 bp, Homo sapiens
aactcctggcttcaagcaatttgcccttttcaccctcacaaagtgctgagattacaggtgtgggccaccatgcccagcctaagctctgcatcttaaacctygtttgtctgtccctcacagcttagcacaatgctgtacaccacggactggcatgatctctctgaaaagggccagataataatatgttaggctttgtggtct

SEQ ID NO: 153120 - DNA, 201 bp, Homo sapiens
agttgaaaatctgcatgtaacttttgactccccagaagcttaacgactaatagcctactgctgactggaagccttaccaataacatgaacagccaataaayacatattttgtacgttctatgtctatactggattcttacaataaagtaagctagagaaaagaaaatgttattaagaaaatcataaggaagagaagatata

SEQ ID NO: 153121 - DNA, 201 bp, Homo sapiens
tactcagcccagctcccatgcaccctctctcacaaaactataggaaaacatactccaccaaaaggataaactaaagcaagtaagaggaaacatagttcggraaacaagggactcgatgagggagaaaggcaagaggaatgcccagcctgagagtgaaggatgatcccagaatgagcttttattaaagatttctagtttcac

SEQ ID NO: 153122 - DNA, 201 bp, Homo sapiens
ggctgaggtggaggaggaagaggaggggttggtcttgctgtctcggggtggcagaggcagaagaaaattcacggataaatggacccacgcagttcaaaccyatgatgttcaagggtcagcagtatagggaatgtttcacccctgtattctatttttcattcatagaattaaaatagaaatcctaaaaatgccccttgtggt

SEQ ID NO: 153123 - DNA, 201 bp, Homo sapiens
tgtaaatattaactatttgttaatagtaaatatttactattatattatatttactatttgttaagtggaagtggatcatcataaagggcttcatcctggtkgtcttcacactgagcaggctgaggtggaggaggaagaggaggggttggtcttgctgtctcggggtggcagaggcagaagaaaattcacggataaatggac

SEQ ID NO: 153124 - DNA, 201 bp, Homo sapiens
tgggttcacgccattctcctgcctcagcctcccgagcagctgggactacagacacatgccaccacacccggctaatttttttgtatttttagtagagacgrggtttcaccgcattagccaggatggtcttgatctcctgacctcgtgatccgcccgtctcggcctcccaaagtgccgggattacaggcgtgagccaccgcg

SEQ ID NO: 153125 - DNA, 201 bp, Homo sapiens
aagattaggtgcttaatcttcacccttcaataaacccccaaacgatgaatctttttttttttgaggcggagtctcgctctgtcgcccaggctggagtgcartggcgcaatctccgctcactgcaagctcagcctcctgggttcacgccattctcctgcctcagcctcccgagcagctgggactacagacacatgccaccac

SEQ ID NO: 153126 - DNA, 201 bp, Homo sapiens
attccttccctggaccgtagagtggccggttttccctgatggtggcactgaatgaccaaagtgacaggcagcatctaggcagggctgtgcacagtcaccgmtgctggatttcgaagttcctgaatcaagatcgtctgacctgttctccggctctttggcaggttctgtctccggcaggctttgaggatgaaggctgcgggc

SEQ ID NO: 153127 - DNA, 201 bp, Homo sapiens
atttcctccattggtttgttagctatacttctattttgtttttagttgttactgtagggtttccaataggcatcattatcttattacatcttaccttcaartaacacaccacttcatatgtaacgtatgagtttcttaacagtatacttcaatttttcctattccatcctttgtgctgtattgtcatgcatttttcttcta

SEQ ID NO: 153128 - DNA, 201 bp, Homo sapiens
ttccttccctggaccgtagagtggccggttttccctgatggtggcactgaatgaccaaagtgacaggcagcatctaggcagggctgtgcacagtcaccgaygctggatttcgaagttcctgaatcaagatcgtctgacctgttctccggctctttggcaggttctgtctccggcaggctttgaggatgaaggctgcgggca

SEQ ID NO: 153129 - DNA, 201 bp, Homo sapiens
aatttgcaactatcattttagctttgtctatttcacctttcagtctcgtccatttttgaagctttgttcttaggcatatattctttgagggttgttatgtmcttgtggtgaattgactcttttatcactggagtccaagtttctccttaactctggtgctatttctcatccagaaatctactttgtttgatagcagtatag

SEQ ID NO: 153130 - DNA, 201 bp, Homo sapiens
cagttaattgatatcgttttccttcagcctaaagaactttctttaactttgttttgttttgttttagagtagaggtctattagcaagcattctttctgtcwgaaaatatctgtacttattttgattttgaggaatattttctttacatataaaattctgggctgacagttcttttccacctcaagttgttattgttgttgt

SEQ ID NO: 153131 - DNA, 201 bp, Homo sapiens
cttgggctgtcatgggcaaaacctagtgtgtgtatttatcacagttatggtggaattgacaaactcacctccgcagagtggtccaaccaatggaaggagaycttgtctatattctcctccatcagtgtgtgggtgtgcagtgaacatagtagtacatagaaagggagcagagacatgggagtgagttaagataatttgcaa

SEQ ID NO: 153132 - DNA, 201 bp, Homo sapiens
gagattgtggctttgcagggaaaattatagttcttccaaccttcccatcccaaaaagactgagaaaaatgaagtaaacttgagttggggtccctctccaayaacaaagtctcgcctaaccctgatgacctctctttttacagccttggtcactgatgacctcacagatgcgattatctgtgccaagaaaattgttaaagag

SEQ ID NO: 153133 - DNA, 201 bp, Homo sapiens
ctctgctggcattgtggggagtggggggacctgactgttggtctagattaggctcagcccctgactgggtgtgcagcttcaggtgtgccatcccagccccygatgtgcccctcgtgtgccccctgggcacatgcccgccctgccctgcccaaggtgtattgggaggaagcagtcaggtaacagggatgaggaaacttgccc

SEQ ID NO: 153134 - DNA, 201 bp, Homo sapiens
tgagattacaggtgtgggccaccatgcccagcctaagctctgcatcttaaaccttgtttgtctgtccctcacagcttagcacaatgctgtacaccacggaytggcatgatctctctgaaaagggccagataataatatgttaggctttgtggtctatacagcctctaacacagctactcaactctgccactgcagcaggaa

SEQ ID NO: 153135 - DNA, 201 bp, Homo sapiens
tgccgggattacaggcgtgagccaccgcgcctggcctagacgatgaatcttaaagttttccattcaggtccacgtgtatttcatctctggctgaaatgggstgtctgtttctacacacccagttgatccttgaacaaatgtaggggtcggggtgccaatgcctgctcagttgaaaatctgcatgtaacttttgactcccca

SEQ ID NO: 153136 - DNA, 201 bp, Homo sapiens
ataaatggacccacgcagttcaaacccatgatgttcaagggtcagcagtatagggaatgtttcacccctgtattctatttttcattcatagaattaaaatrgaaatcctaaaaatgccccttgtggttttcacctggatgtgtattaaggaaggttaattttttcacttacttaaccctgagaacacagcattgacttgaa

SEQ ID NO: 153137 - DNA, 201 bp, Homo sapiens
caaacccatgatgttcaagggtcagcagtatagggaatgtttcacccctgtattctatttttcattcatagaattaaaatagaaatcctaaaaatgccccytgtggttttcacctggatgtgtattaaggaaggttaattttttcacttacttaaccctgagaacacagcattgacttgaaagttactgtatggaaaagca

SEQ ID NO: 153138 - DNA, 201 bp, Homo sapiens
taaccctgatgacctctctttttacagccttggtcactgatgacctcacagatgcgattatctgtgccaagaaaattgttaaagagacacaaggaatgaaytattggtaagagtctttccttggaagacttgggctgtcatgggcaaaacctagtgtgtgtatttatcacagttatggtggaattgacaaactcacctccg

SEQ ID NO: 153139 - DNA, 201 bp, Homo sapiens
gccggttttccctgatggtggcactgaatgaccaaagtgacaggcagcatctaggcagggctgtgcacagtcaccgatgctggatttcgaagttcctgaaycaagatcgtctgacctgttctccggctctttggcaggttctgtctccggcaggctttgaggatgaaggctgcgggcattctgaccctcattggctgcctg

SEQ ID NO: 153140 - DNA, 201 bp, Homo sapiens
acctgactgttggtctagattaggctcagcccctgactgggtgtgcagcttcaggtgtgccatcccagcccctgatgtgcccctcgtgtgccccctgggcrcatgcccgccctgccctgcccaaggtgtattgggaggaagcagtcaggtaacagggatgaggaaacttgcccttagaccaagcttagagcaaaagatggc

SEQ ID NO: 153141 - DNA, 201 bp, Homo sapiens
ttgacctttcccctgagatgttgaaggtcctggctacactccctgctgtgtctccccaactacccctgctctgccctcaccgcacccaggggtggctgctrgcctaactgtggctctctgggtctcctctccttcctcccctgcccctcatttccttattcctggagtcctgtccttatgacactagccagggaaggggaa

SEQ ID NO: 153142 - DNA, 201 bp, Homo sapiens
cccctgatgtgcccctcgtgtgccccctgggcacatgcccgccctgccctgcccaaggtgtattgggaggaagcagtcaggtaacagggatgaggaaactygcccttagaccaagcttagagcaaaagatggcacctcctttgctggcgtttctggctttcccccctccagggatctgcatggcgtattatgagagcggct

SEQ ID NO: 153143 - DNA, 201 bp, Homo sapiens
tcatttgggttttggcagagttcagttccttgggggtgtcgaactgagatccttgttgcttgcaggttgtcacccaagggccattccaggcttctagggamcactcacaccccttgactcatggccccttactccatcttcacagccagcaatagtgggtcgagtccctttcacactttgaatctttcctccttcttctgt

SEQ ID NO: 153144 - DNA, 201 bp, Homo sapiens
atcagtgggagtcctgggcttattttcctgcaactagacagtcccatctgggggtgatgggagacagtgacggatcatcaggcattagattctcataaggrgaatgtaacctaaatcccttgcaagcgcagttcacagtagagttcacacctatataagaatctaatgcggccactgatctgacaggaggtggagtccagg

SEQ ID NO: 153145 - DNA, 201 bp, Homo sapiens
tgtgcatttgaaaaaaaaatgtgtattttatatttggtgggtggatgttctataaatgattgttacttcctttctaattttcttacttgttctactatacrgtgagaaatacatattgaaatttgcaactatcattttagctttgtctatttcacctttcagtctcgtccatttttgaagctttgttcttaggcatatatt

SEQ ID NO: 153146 - DNA, 201 bp, Homo sapiens
cgcccaggggccacagcgcaacagcagagaatccaagaggcccctgctgccctgcggggatcttcagaactcaatgacagaacgtgtcctagttcctttaygaacaggaagtacctgagcccttcacctgcgttccatatagccacttccttgagtgtctcaaatatggcacaaaccctaagccagcccctgaaagatctg

SEQ ID NO: 153147 - DNA, 201 bp, Homo sapiens
tcctgctctctttctgtccttgacctttcccctgagatgttgaaggtcctggctacactccctgctgtgtctccccaactacccctgctctgccctcaccrcacccaggggtggctgctagcctaactgtggctctctgggtctcctctccttcctcccctgcccctcatttccttattcctggagtcctgtccttatgac

SEQ ID NO: 153148 - DNA, 201 bp, Homo sapiens
tagccagggaaggggaaaataatgccacctctgctggcattgtggggagtggggggacctgactgttggtctagattaggctcagcccctgactgggtgtrcagcttcaggtgtgccatcccagcccctgatgtgcccctcgtgtgccccctgggcacatgcccgccctgccctgcccaaggtgtattgggaggaagcagt

SEQ ID NO: 153149 - DNA, 201 bp, Homo sapiens
aaaaggtctgccgggagaggactgccttctaggatctgagatcttccctcaagggacatgacttgtgctgagtgacctgacagaaataaagctggaagatattatatgtatatgccaacctcagtgtccttcttctgtcccttccctgctgatgcctactcttatttaaacccctccagaagtcagaggacatgggaatcc

SEQ ID NO: 153150 - DNA, 201 bp, Homo sapiens
gtaccattcatcattgaggttcctcgttttttagtatttttccctccctgtattttattttcaatagtttccattattatgtcttcaagtcggctgttacttttttttttaatgctaatctgttaaacttattgattggatgtttcttttcagatactgtgttttttatttggcatcataattttgtttctttcatttcat

SEQ ID NO: 153151 - DNA, 201 bp, Homo sapiens
cacatcctctctagcacctgttgtttcctgactttttaataatggccattctaactgatgtgagatggtatctcattgtggtttggatttgcatttctctratggccagtgatgatgagcattttttcatgtgtctgttggctgcataaatatcttcttttgagaagtgtctgttcatatactttgcccacttgttggtgg

SEQ ID NO: 153152 - DNA, 201 bp, Homo sapiens
gtttggatttgcatttctctgatggccagtgatgatgagcattttttcatgtgtctgttggctgcataaatatcttcttttgagaagtgtctgttcatatmctttgcccacttgttggtggggttgtttgtttttttcttgtaaatttgtttgagttctttgtagattctggatattagccttttgtcagatgagtagatt

SEQ ID NO: 153153 - DNA, 201 bp, Homo sapiens
tggttgttctgaggactgatggagattttgcgtgaagagatttaacatgtgcctgacatagagtaagatttcaataaagtattagctagtggtaatagctrttattatcctaaatatttatatctcaagaagataggcaaaagacttttttgttgttgtttgtttgattgtttgttttgagatggatgtttgttttgagag

SEQ ID NO: 153154 - DNA, 201 bp, Homo sapiens
gtctgttggctgcataaatatcttcttttgagaagtgtctgttcatatactttgcccacttgttggtggggttgtttgtttttttcttgtaaatttgtttragttctttgtagattctggatattagccttttgtcagatgagtagattgcaaaaattttctcccattctgtaggttgcctgttcactctgatggtagttt

SEQ ID NO: 153155 - DNA, 201 bp, Homo sapiens
ttcttcctacccatgaacatggaatgttcttccatttgtttgtatcctcttttacttccttgagcagtggtttgtagttctccttgaagaggtccttcacrtcccttgtaagttggattcctaggtattttattctctttgaagcaattgtgaatgggagttcactcatgatttggctctctgtttgtctgttattggtgt

SEQ ID NO: 153156 - DNA, 201 bp, Homo sapiens
taaaaaattttagaaaatatacagtaaagacatgaaagcattggtgaacccacagttaagagccaatctttcttaaaatactggtgaattaatggctatcttttttttttctaaaccagtgctatctaatagaactttccatgatgacaaaaatgtcttccatctgtgctgtcaaacagaaccactagccatgagtggcta

SEQ ID NO: 153157 - DNA, 201 bp, Homo sapiens
ttttattctctttgaagcaattgtgaatgggagttcactcatgatttggctctctgtttgtctgttattggtgtataagaatgcttgtgatttttgcacaytgattttgtatcctgagactttgctgaagttgcttatcagcttaaggagattttgggctgagacaatggggttttctagatatacagtcatgtcatctgc

SEQ ID NO: 153158 - DNA, 201 bp, Homo sapiens
tctgcaaacagggataatttgacttcctcttttcctaattgaatgccctttatttccttctcctgcctgattgccctggccagaacttccaacactatgtkgaataggagtggtgagagaggacatccctgtcttgtgctagttttcaaagggaatgcttccagttttttcttttcttttcttttttttctttttcttttc

SEQ ID NO: 153159 - DNA, 201 bp, Homo sapiens
tcagcccctgactgggtgtgcagcttcaggtgtgccatcccagcccctgatgtgcccctcgtgtgccccctgggcacatgcccgccctgccctgcccaagktgtattgggaggaagcagtcaggtaacagggatgaggaaacttgcccttagaccaagcttagagcaaaagatggcacctcctttgctggcgtttctggct

SEQ ID NO: 153160 - DNA, 201 bp, Homo sapiens
atgtgcccctcgtgtgccccctgggcacatgcccgccctgccctgcccaaggtgtattgggaggaagcagtcaggtaacagggatgaggaaacttgccctyagaccaagcttagagcaaaagatggcacctcctttgctggcgtttctggctttcccccctccagggatctgcatggcgtattatgagagcggctacaaca

SEQ ID NO: 153161 - DNA, 201 bp, Homo sapiens
tagatctggagagagaaattattaggtgaaaggataaaaacctcgttaaggctctaaacacatgctgctatgttggtttcctgagacattgaatccattayactcccaccagcaagtatccagagaacctgcctctctgtgcccttgtcaacatccagcattacccaattctcttaaaaaaaaaatctttgcataattgac

SEQ ID NO: 153162 - DNA, 201 bp, Homo sapiens
  misc_feature (1)...(201): n = A,T,C or G
gcctgtgcctatttctgtaggacataaggaacattttcacatagcgtcttctctaaacacatttccaaaaacccttcaggattgggctcttcctctgaaangtcaggtagtgcaagatgaagatggtcttaaaacaaaagcaaagttcttttcattatgaagaagctcaacagaaatgagattgtggctttgcagggaaaa

SEQ ID NO: 153163 - DNA, 201 bp, Homo sapiens
caaatggacatctccgtctgcccatcctgcttccccccagccgattcctttcataggtgtggattgctgaaaatatctggcatttcaaacccatctcagcmtcagctcctggaggactcaacttgcagtagaagtaatgttgaacttgttttgtttatttgcctttttctgtcatgtttgtgttgaggattttgaggccgc

SEQ ID NO: 153164 - DNA, 201 bp, Homo sapiens
gccttttttttttttttcttaagacagagtctcactctgttgcccaggctggagtacagtgatgtaaacacaactcatttcagctttgacctcctgggctyaagtgattctcccacctcagactcccaagtagctgagaccacaggtgtgtgccatcacactaggctattttttttacattttgtagagatgaggtcttgc

SEQ ID NO: 153165 - DNA, 201 bp, Homo sapiens
aaatgacaatagacaaaatttaatatttacctgtaaagaaaccttacacttcaaactaacccaaatacagaaaacactatactatcctgtcttatgtgccttttttttttttttcttaagacagagtctcactctgttgcccaggctggagtacagtgatgtaaacacaactcatttcagctttgacctcctgggcttaag

SEQ ID NO: 153166 - DNA, 201 bp, Homo sapiens
gcggtgtctgcttcctggtcctgcatggcctgaccctttcaggaatccttacagaacattgccagccaagcaaactgccctgcccccagtacaaatgtgcrctttctgtacatgcctgggatgacctccaatcccagaataatagaatgtgatctgcttcctcctcactgtgtctctccaacccctagagacagccccaaa

SEQ ID NO: 153167 - DNA, 201 bp, Homo sapiens
cattaaatttggaaacatttcagccattctttcttctaatgcttttcttttctccttcaagaattctaacggcatgtatgttcgatcgctgatgctgtacmattcatcattgaggttcctcgttttttagtatttttccctccctgtattttattttcaatagtttccattattatgtcttcaagtcggctgttacttttt

SEQ ID NO: 153168 - DNA, 201 bp, Homo sapiens
gcttaagtggcctctgttggaagaaggaatcagaggaaaacagaatttaagccctctatcggaatacaggctcattaactgagtgtgtgaacttggtttayggggataaaatggtacccatagaaatggttgttctgaggactgatggagattttgcgtgaagagatttaacatgtgcctgacatagagtaagatttcaat

SEQ ID NO: 153169 - DNA, 201 bp, Homo sapiens
actattggtaagagtctttccttggaagacttgggctgtcatgggcaaaacctagtgtgtgtatttatcacagttatggtggaattgacaaactcacctcsgcagagtggtccaaccaatggaaggagaccttgtctatattctcctccatcagtgtgtgggtgtgcagtgaacatagtagtacatagaaagggagcagag

SEQ ID NO: 153170 - DNA, 201 bp, Homo sapiens
ctttgcagggaaaattatagttcttccaaccttcccatcccaaaaagactgagaaaaatgaagtaaacttgagttggggtccctctccaacaacaaagtckcgcctaaccctgatgacctctctttttacagccttggtcactgatgacctcacagatgcgattatctgtgccaagaaaattgttaaagagacacaaggaa

SEQ ID NO: 153171 - DNA, 201 bp, Homo sapiens
gatctgcccgcctcagcctcccaaagtgctgggattataggcgtgagccaccgcaccaggctggcaagagacttttataagctgatatagctttagttttmactgtagaactataaaccaaatgctagtgaatctgcgtatgttgtttcaattgctatctcttatagacgatgtattttgttactttttctcctggttaat

SEQ ID NO: 153172 - DNA, 201 bp, Homo sapiens
tgagcccaggagttccagaccagcctggtgaaaccctgtctctacaaaaataaaaataaaaaatggtcaggcgtggtggtgcatacctgtatttccagctwttttgaaggctgaggtggaagtattgcttgaggccaggaggttgaggctgcagtgagctattatcatgccactgcactccagcctgggtgacagagtgag

SEQ ID NO: 153173 - DNA, 201 bp, Homo sapiens
atttctccatattattaaatatcctgggaaaacataattcaaacagctctttattttattaaatgaaggtattatgactaatttgaatatcactgattatraggcaattagattttttcattttaactcttgtaaataatgctatagtaaaccactttgtaaagaaatatttgtctagtgtcatgactatttccttaggat

SEQ ID NO: 153174 - DNA, 201 bp, Homo sapiens
aagcagtaatgagatcaagtggtttgagtatttttgtccttgattggtggttgtggtggtcatggagatgggcctcccagatcccctgctaagggaagacrtgctgcccccgctgcagttgtgtgatgagcagacagtacctgccacctgcttcaggattggcttcaggtgcaggttgctcccttccggggtgacccacac

SEQ ID NO: 153175 - DNA, 201 bp, Homo sapiens
tctgcacatgaaaaacaccctggataaaatttttttaagacacaaactgaaaaatgacaatagacaaaatttaatatttacctgtaaagaaaccttacacktcaaactaacccaaatacagaaaacactatactatcctgtcttatgtgccttttttttttttttcttaagacagagtctcactctgttgcccaggctgga

SEQ ID NO: 153176 - DNA, 201 bp, Homo sapiens
atttaatatttacctgtaaagaaaccttacacttcaaactaacccaaatacagaaaacactatactatcctgtcttatgtgccttttttttttttttcttragacagagtctcactctgttgcccaggctggagtacagtgatgtaaacacaactcatttcagctttgacctcctgggcttaagtgattctcccacctcag

SEQ ID NO: 153177 - DNA, 201 bp, Homo sapiens
gagacggtttggattgtcacgcttctttctgctgctcttgcttccctctcgtcctcaggcaaggctggaagaaacactgtgaggggagagacctgtccgastggaaaaaagactgtgaggtttcctaaactggaactggacccaggatgctttgcagcaacgccctagggtttgcagtgaatgtccaaatgcctgtgtcat

SEQ ID NO: 153178 - DNA, 201 bp, Homo sapiens
ttagactgtgcatggcaaaacagttcttgattcgtgggtgaacaccacggtattctctgaaggtttataaaccaaaccataaaaaaaatgcaccctgcctwgtacctacatatttgggttcaatttatatattcctagcccactgtcagtgagtgacaatgattaatcttactgtaaatattttgtgctaaccactatgat

SEQ ID NO: 153179 - DNA, 201 bp, Homo sapiens; identical to SEQ ID NO: 28581

SEQ ID NO: 153180 - DNA, 201 bp, Homo sapiens
aggggaactaacatataggaaaagtaagattgcaaaacataaggtgaaggtaacataatgtttccttacaatctacttttaatgaagttgatgttaagcayggtagcaagcaatataaagcggaagaaaagatgaaagatttactgggccagtatggtggttcatgcctctaatcccagcactttgggaggccaaagtggg

SEQ ID NO: 153181 - DNA, 201 bp, Homo sapiens
ataaagcggaagaaaagatgaaagatttactgggccagtatggtggttcatgcctctaatcccagcactttgggaggccaaagtgggaggattgcttgagytcaggagttcgagatcagtctgggcaacatggtgaaaccctgtctctagaaaacctacaaaaattagctgggtgtggtgatgcacacctggtgggaggat

SEQ ID NO: 153182 - DNA, 201 bp, Homo sapiens; identical to SEQ ID NO: 28584

SEQ ID NO: 153183 - DNA, 201 bp, Homo sapiens
ttcagtgggtaccgtcaattctatctgtaggacttttcttttagcctctttaggcttcctggaaagaaatcctccagggaattagaatcagagtaaagaargggggggggctatgatcgttaccattcaacatgtagatttttcagtatggaacctctcactgttttgtggtgttggcatgtactatttctgctctcacct

SEQ ID NO: 153184 - DNA, 201 bp, Homo sapiens
tttgctgctggagcactttgatgggctttctcaatatggaaatttatgtccttcagttctgataattatgataaaacttatttttgaatttctttttcctwtcttatattgtctgttctttctttctcaaactcctattttagggattttggacaccttaaagtgatcttgtgtggtgtggaagattgattctaaagatag

SEQ ID NO: 153185 - DNA, 201 bp, Homo sapiens; identical to SEQ ID NO: 28578

SEQ ID NO: 153186 - DNA, 201 bp, Homo sapiens; identical to SEQ ID NO: 28579

SEQ ID NO: 153187 - DNA, 201 bp, Homo sapiens
agcctaaaaaacaactcagacactaatttcatagctttagtctgctgactttttcccctctgatcattatacagccaaatcattaaaattccagatatccytctgaaaagttttatatttgttattatttggttttttattgcttgatggtagaaattccttcagtactgtttagtgaaattctttttataatgagacaca

SEQ ID NO: 153188 - DNA, 201 bp, Homo sapiens; identical to SEQ ID NO: 28580

SEQ ID NO: 153189 - DNA, 201 bp, Homo sapiens
acctgagcccaggaggttgaggctgcagtgagctgagatcatgccactgcactccagcctgggtgacagtggaagaccctttctcaaaaaaaaaaaaaaaattactgctcatgaaaaccatctactcagattatatacaattattactaatacaggtatcagaaagttatgtattgcaaactcaaaaagaagaaactgtaa

SEQ ID NO: 153190 - DNA, 201 bp, Homo sapiens; identical to SEQ ID NO: 28582

SEQ ID NO: 153191 - DNA, 201 bp, Homo sapiens; identical to SEQ ID NO: 28583

SEQ ID NO: 153192 - DNA, 201 bp, Homo sapiens
acacctggtgggaggatcacctgagcccaggaggttgaggctgcagtgagctgagatcatgccactgcactccagcctgggtgacagtggaagaccctttstcaaaaaaaaaaaaaaaattactgctcatgaaaaccatctactcagattatatacaattattactaatacaggtatcagaaagttatgtattgcaaactc

SEQ ID NO: 153193 - DNA, 201 bp, Homo sapiens
ttagtgtatatatacttttaaaagcatctacaatctggcactttgtgaatacaagtttctgttttttatagttacaaattttgtcaaagttttgatttttyagtgtctcgagattttaaaagatatcattaaaaggataatatgcaatatataagaatttgggttggaatactttttttaattccataagtttggaagatt

SEQ ID NO: 153194 - DNA, 201 bp, Homo sapiens
ctatgtgtagaattttatgatactctatacagttatgattaacttaaatttttttccattatagactccacgttttgcaaagatcggttttgcctcagagycaacaaactcttcagattggttccggtgtgtcctatgtttacaagtcagtggaaattaagcacaacacatataaattgaaaagtcaaataaggaaatgaa

SEQ ID NO: 153195 - DNA, 201 bp, Homo sapiens
cttacgtggaggacaatgtaatattatgtgaataaattcacataccccttgagccagcaattccatttttaggactttatcctgtagagatatactggctygatacaaagacttaggtataagaattttcattgcagtattgtttatattagcatatgactagaaacaagctaaatgttcatcgtagccatacagtgaata

SEQ ID NO: 153196 - DNA, 201 bp, Homo sapiens
aataactggcagagtagctctaaaacatatgcaaggaaataaataaagaaaaaacttacaataaagagagtaactcatattttaacagttttgtgaaaaaratagaaaatattttatgtagcttatagtacatatatttttttacaacagaagaatcgcattctgattttccatatggatcatttccctatgttgctagac

SEQ ID NO: 153197 - DNA, 201 bp, Homo sapiens
atataactgtttttctttgtaatgtaacttttaagtgcacttttgcttaagtatcaaactaaatttttttttttttttttttttttttgagacagagtctmactctgtcacccaggttggagtgtagtggtatgatctcagctcactgcaacctccacctcccctgttcaagcaattatcctgcctcagcctcccaagtag

SEQ ID NO: 153198 - DNA, 201 bp, Homo sapiens
aatataactgtttttctttgtaatgtaacttttaagtgcacttttgcttaagtatcaaactaaatttttttttttttttttttttttttgagacagagtcwcactctgtcacccaggttggagtgtagtggtatgatctcagctcactgcaacctccacctcccctgttcaagcaattatcctgcctcagcctcccaagta

SEQ ID NO: 153199 - DNA, 201 bp, Homo sapiens
taatataactgtttttctttgtaatgtaacttttaagtgcacttttgcttaagtatcaaactaaatttttttttttttttttttttttttgagacagagtmtcactctgtcacccaggttggagtgtagtggtatgatctcagctcactgcaacctccacctcccctgttcaagcaattatcctgcctcagcctcccaagt

SEQ ID NO: 153200 - DNA, 201 bp, Homo sapiens
gtaatataactgtttttctttgtaatgtaacttttaagtgcacttttgcttaagtatcaaactaaatttttttttttttttttttttttttgagacagagwctcactctgtcacccaggttggagtgtagtggtatgatctcagctcactgcaacctccacctcccctgttcaagcaattatcctgcctcagcctcccaag

SEQ ID NO: 153201 - DNA, 201 bp, Homo sapiens
agtaatataactgtttttctttgtaatgtaacttttaagtgcacttttgcttaagtatcaaactaaatttttttttttttttttttttttttgagacagartctcactctgtcacccaggttggagtgtagtggtatgatctcagctcactgcaacctccacctcccctgttcaagcaattatcctgcctcagcctcccaa

SEQ ID NO: 153202 - DNA, 201 bp, Homo sapiens
aactgagtttaggtctttgtcatatatacacattatttaggccatgaacaagttttcaagtatcagttgatttatgatataggcttatccatttggttatraaatcatatgtttattacataatcattgacaaatagtttctgtataataactggcagagtagctctaaaacatatgcaaggaaataaataaagaaaaaac

SEQ ID NO: 153203 - DNA, 201 bp, Homo sapiens; identical to SEQ ID NO: 28603

SEQ ID NO: 153204 - DNA, 201 bp, Homo sapiens
atatcaaattattttttacttaagttggatcacaaggacgagtcataagttttgaggtacgaaaagaccaccatgatctggctaagaagaattacaaacaytggcgtgattcatggaaattaagtcatgtagaagagtggccagacaatgtggattttattcataaggacatttcaggagcaaccgaagacataaaatctt

SEQ ID NO: 153205 - DNA, 201 bp, Homo sapiens
cttgaataatcctaaactataaatgtgcaagaacttattgctatttacctatgtgatggatatttttctccatattttcttttccagttgtttatgttactttttttttttttttgaggcgggttctcactctgttccccagtttggaatgcagtggtatgatcgtggctcactacagccttgaccctcggaactcaagtg

SEQ ID NO: 153206 - DNA, 201 bp, Homo sapiens
agggtgctgggattacaggtgagaacgaccgctcctggccatggtatcataagctcttgaagaaaactaaaagactttcgtaattttatcttgcttccccrtgtctcctttctccccattagacaaaatcaggagagattagttacatttcatgaagttataaatatgcatatttagtatactttctgcctttccatttgt

SEQ ID NO: 153207 - DNA, 201 bp, Homo sapiens
taatcctcataaaatgccatttatatcacctcagtgacacaccctagttgcttatcaggctgagttctaatgcctcatactggcatttaattctctgcctmtctctcctgagataacaaactggatttattctacctctgctttgtttaaagctgtttttaccttgtgattgttcccataaactgtctactctttgtcttt

SEQ ID NO: 153208 - DNA, 201 bp, Homo sapiens
atttttatccaaagcaggtaagagattggactgagctggatctcagtaacaaagaaaacattcaatttgttcataataacagaaaggtataaagatatttkggaaaatacctaacattgaggtagcattctcctagaatctgaaagtaagcaactatttttctttccattctgtacatttattccagtcagtctctttcta

SEQ ID NO: 153209 - DNA, 201 bp, Homo sapiens; identical to SEQ ID NO: 28605

SEQ ID NO: 153210 - DNA, 201 bp, Homo sapiens
tctcagctcactgcaacctccacctcccctgttcaagcaattatcctgcctcagcctcccaagtagctggggttacaggcgcccgccaccacgcccggctrattttttctatttttggtagagaaggggtttcaccatgttggccaggctggtcttgaactcctgacttcaggtgatctgctcacctggtctcccaaggtg

SEQ ID NO: 153211 - DNA, 201 bp, Homo sapiens
atttaaatttataagttttggcaatagaaattcacattgtcagccaggtgcagcggttcacatctgtaatcccagcattttgggaggccgaggcgggcagrtcgcttgaatccaggagttcaagaccagcctgggcaacatggcaaaacctgtatctacataatatacaaaaagttagctgagaatggtggcgcctgcctg

SEQ ID NO: 153212 - DNA, 201 bp, Homo sapiens
attaagaacctgccatgtgtcgtgtgctgtgctaagacaaaaattatacattcaaaagagcttttgaaaacaaaaaatgaataagaaatattaaaaaattaaaaaaaaaatagctgtgggccaggcatgatggttcatggccgtaatcccagcactttgggaggctgagatgggtggatcacttgaggtcaggagtttgag

SEQ ID NO: 153213 - DNA, 201 bp, Homo sapiens
agtcatgtagaagagtggccagacaatgtggattttattcataaggacatttcaggagcaaccgaagacataaaatctttaacatttgacgcagtaagttytctaacgtgggtcctgtgttattactttgactataaagaagataggggtcaggcttcttttgtatgggcaaaggtcttccttcgtttgcttcatgtctat

SEQ ID NO: 153214 - DNA, 201 bp, Homo sapiens
tggtggaatgagcttatttttatccaaagcaggtaagagattggactgagctggatctcagtaacaaagaaaacattcaatttgttcataataacagaaakgtataaagatattttggaaaatacctaacattgaggtagcattctcctagaatctgaaagtaagcaactatttttctttccattctgtacatttattcca

SEQ ID NO: 153215 - DNA, 201 bp, Homo sapiens
gcgagactgcatctcaaaaaagaaagaaagaaagaaagaaaaatacaagaattagccaggcatggcggtgggcgcctacaatcccagctacttgggaggcygagtcaggagaatcgcttgaacctgggaggcggaggttccagtgagccaagatttgcgccactgcactccagcctgggagacagagcaagactctatctc

SEQ ID NO: 153216 - DNA, 201 bp, Homo sapiens
gaaaaattttcacttatctttgtacttactggcatcttctgtgactatagccatgtatactgcaattgaaacaagaataaagaggaaataagggatatgatttttttttttgagacagaatctcactctgtcacccaggcttgagtgcagtggtttaatcttggcttactgcaacctctgcctcccgggttcaagtaattg

SEQ ID NO: 153217 - DNA, 201 bp, Homo sapiens
tggtggtgtatgtgctgtatatgtagtaaagtgagtaatataactgtttttctttgtaatgtaacttttaagtgcacttttgcttaagtatcaaactaaatttttttttttttttttttttttttgagacagagtctcactctgtcacccaggttggagtgtagtggtatgatctcagctcactgcaacctccacctcccc

SEQ ID NO: 153218 - DNA, 201 bp, Homo sapiens
ggtggtgtatgtgctgtatatgtagtaaagtgagtaatataactgtttttctttgtaatgtaacttttaagtgcacttttgcttaagtatcaaactaaatttttttttttttttttttttttttgagacagagtctcactctgtcacccaggttggagtgtagtggtatgatctcagctcactgcaacctccacctcccct

SEQ ID NO: 153219 - DNA, 201 bp, Homo sapiens
gtggtgtatgtgctgtatatgtagtaaagtgagtaatataactgtttttctttgtaatgtaacttttaagtgcacttttgcttaagtatcaaactaaatttttttttttttttttttttttttgagacagagtctcactctgtcacccaggttggagtgtagtggtatgatctcagctcactgcaacctccacctcccctg

SEQ ID NO: 153220 - DNA, 201 bp, Homo sapiens
ataaagattacagatagaaatatgctgaaattaaactcacaccttttgttctttgacctaatgtcttcacatatgaatattatctagattatactaagccrgtaaattcattctgggctcctcaatcaatcttttgtttgacttttctgtacatagttaaaggcagtcattttctcatcatctatgacaaattcctaactg

SEQ ID NO: 153221 - DNA, 201 bp, Homo sapiens
actcatattttaacagttttgtgaaaaaaatagaaaatattttatgtagcttatagtacatatatttttttacaacagaagaatcgcattctgattttccrtatggatcatttccctatgttgctagaccagtacactggcaacctggtcatacaggtgagtaatgttttcagaacatattaaatggtgttttttctttta

SEQ ID NO: 153222 - DNA, 201 bp, Homo sapiens
aagagattggactgagctggatctcagtaacaaagaaaacattcaatttgttcataataacagaaaggtataaagatattttggaaaatacctaacattgwggtagcattctcctagaatctgaaagtaagcaactatttttctttccattctgtacatttattccagtcagtctctttctaatcctccctcaattttctt

SEQ ID NO: 153223 - DNA, 201 bp, Homo sapiens
gtatgtgctcctttgtatctggctactctcattcattattatgtttgtgagattcactcattgcatgcagcagtagttctttcattttagttgctgtatartactctctatttaaatcacaatttacctattttactgttgatagacatttgagttggatattacaaatagtgctgcttggaacctccttgtgtacttgtc

SEQ ID NO: 153224 - DNA, 201 bp, Homo sapiens
gcatttaattctctgcctctctctcctgagataacaaactggatttattctacctctgctttgtttaaagctgtttttaccttgtgattgttcccataaaytgtctactctttgtctttaaactaggccatcctgctactctatgaacttattgtctgtaattttggtattattctgaagtgttgccttatttgttaattg

SEQ ID NO: 153225 - DNA, 201 bp, Homo sapiens
tcagaacgtttggattttttattgtactcaggcttttaaaataaaccaatggttataacttttacatatcatgatgaaaattagcattagggaacggctakattttaattttaacttaggagtctcgagtcccttatttgtaaaatgtggataatagctcaactttctgttagggtgatgtgaactcactacgtacataat

SEQ ID NO: 153226 - DNA, 201 bp, Homo sapiens
atgactttatgtttttcttctcttaaattagcttttcttgtcaagttgaggaaggtcaaaccacaacttaactgagtactccagatgacagtaactgactwgaagatggaaaaatatcaaaatagaactttatattgaaaatcactgcttccatagattggcatttttagctattactatgacttatataacttatacata

SEQ ID NO: 153227 - DNA, 201 bp, Homo sapiens
tttgactataaagaagataggggtcaggcttcttttgtatgggcaaaggtcttccttcgtttgcttcatgtctatctctagggattgaaagaatattttcktttcatgccttttaatctcatggtgggatttgggacagagagacatactgagttaccgagttgggtgctgaagttgtcattgaatgtggggtaatgactg

SEQ ID NO: 153228 - DNA, 201 bp, Homo sapiens
agatgagttgatttttttttttttttttttttttttgatggagtctcgctctgtcaccaggctggagcgcagtggtgcaatctcggctcactgcaacctgygcctcccaggttcaagcaattctcctgcctcagcctcccgagtagctgggactacaggtgcacgccaccacgcccagctaatttttgtattttcagtaga

SEQ ID NO: 153229 - DNA, 201 bp, Homo sapiens; identical to SEQ ID NO: 28611

SEQ ID NO: 153230 - DNA, 201 bp, Homo sapiens
tagaaggtatctgtcccataaaccagactgtaaacatacttattgtttggaggaaggctgaagaaagagcttaagctgggccttgattgactagaatggamaactaccaaagaaaaagaagagaaatagaagaaaactacacacacacacacacacacacacacacacacacacacacacacacaaagggaagtgagggga

SEQ ID NO: 153231 - DNA, 201 bp, Homo sapiens
caccttgggagaccaggtgagcagatcacctgaagtcaggagttcaagaccagcctggccaacatggtgaaaccccttctctaccaaaaatagaaaaaatyagccgggcgtggtggcgggcgcctgtaaccccagctacttgggaggctgaggcaggataattgcttgaacaggggaggtggaggttgcagtgagctgaga

SEQ ID NO: 153232 - DNA, 201 bp, Homo sapiens
tctctgcatccaatgaattaccagcttatctggttgttctttcataatattttgtttctttctttgtttgtttgagatggagttttgcttgttgcccaggstggagtgcaatggtgcgatctcagctcactgcaacctccatctcctgggttcaggcaattcttgtgcctcagccttcccagtagctgggattacaggcat

SEQ ID NO: 153233 - DNA, 201 bp, Homo sapiens
caagatgggaacccagttctatctgaatatataacatatttttataataactaaactactattgtttctccttactgtatgctgttgtaagctttatgacrcctgggctggtccatgtgaaacatagatatatattatgtattatctgaggacccatgagattttagagtgaagccaagggaaaaaaaaatatgccaagct

SEQ ID NO: 153234 - DNA, 201 bp, Homo sapiens
ttgaacctgggaggtggaggttgcagtgagctgagatggtgccactgcactccagcctgtgcaaaaagagcaaaacttcgtctcaaaaaaaaaaaaaaaaattgacttttgggaaagatagatgaagcattcttttttttttagatgaagcattctttacatatttatatacatcacaatcaccaatcacacgctagatac

SEQ ID NO: 153235 - DNA, 201 bp, Homo sapiens
actttagggtgaatactatacctccactcagcagataaggaaactgaagcttagagaagttaaataatttgcccaaggagctggagtgacatgtgaacccmggtctctgactccaaactagagcctgaattcctaaatattatggtctactgcccttttgatgcaatcctgctgttggcagtgaaaataagctgccacgga

SEQ ID NO: 153236 - DNA, 201 bp, Homo sapiens
acacacctgcattatttcaaaattttacctatttgtttttaccacaaagatattaatagtggctactgaagctttactaaaggagaaactagactctaagrttcttgaaggtaggggttatgcctcagtcattgttccatttcttggccatagtaatcactcaacaaatttgcacgacagtatagtctcttccttttcaac

SEQ ID NO: 153237 - DNA, 201 bp, Homo sapiens
cccaggccaaaacctgatttttaattctgacatggtataagtaccataatttctttatatatttcattttgttgggatttaagtggctttcagcaatagartattaattagaaaagaaccttattagctgaaaaaatacaactgcaccataatttcactcaaattatttttatatatagtattatctgacatttcttttct

SEQ ID NO: 153238 - DNA, 201 bp, Homo sapiens
acctccaccactaatactatacttttattgtcacctcttgccttgattactggcataagtttccaaatagtctctcccacccccaccttttttttttttttaaagacagggtcttactctgttacccaggcagtagtgcagtggtgagatcatggctcattgcagccttaacctcctagactcaagcgatctcctgcctta

SEQ ID NO: 153239 - DNA, 201 bp, Homo sapiens; identical to SEQ ID NO: 28610

SEQ ID NO: 153240 - DNA, 201 bp, Homo sapiens
agttgtgtaatttgcccaaggtcatagaagtaacggatttttttttttttttttttgagatagtttcactgttgtcacccaggctggagtgtaatggcaargtgtaagctcactgcaacctccacctcccaggttcaaacgattctcctgccttagcctcccaagtagctgggattatagacatgcgccaccatgcccaac

SEQ ID NO: 153241 - DNA, 201 bp, Homo sapiens
cagctaatttttgtatttttttgtagagatggggtttctccatgttgcccaggctgggtttcgaactcctcagctcaagcactccacctgcctcagccttytaaagtgttgggattacaggtgtgagccactggacccatccccatctttgctattttcttttttcttttctttcttttttttttttttttttttaagaag

SEQ ID NO: 153242 - DNA, 201 bp, Homo sapiens
ggactactggcgcccgccaccacgcctggctaatttgtttgtattttttagtagagacggggtttcaccgtgttagccaggatggtctcaatctcctgacytcgtgatccacccgcctcagcctcccaaagtgctgggattacaggcgtgagccaccgagccgggccaatctttgctattttctatctgtgtttctttggg

SEQ ID NO: 153243 - DNA, 201 bp, Homo sapiens
agcaatcctcccaccttggcctcccaaagttctgggattacagatgtgagccatagtgcctgacctttttttttttttttttaagacagagtttcattctrtcacccaggctggagtgcaatggcgtgatcttggctcactgcaacctccacctcctgggttcaagcgattctcctgcctcggcttcccaagtagctagga

SEQ ID NO: 153244 - DNA, 201 bp, Homo sapiens
gagtgatgaaaatgcttcaaaattgaccgtggttatggttgcttaactctgaatatattgaatatcattgaattgtacatttcaattgggtgattctaagrtattttaattacatttcaaagctgttaaaattaaaagtagttcctcccactattactctgtattccctttctcagttccaattttcctcatagcactcaa

SEQ ID NO: 153245 - DNA, 201 bp, Homo sapiens; identical to SEQ ID NO: 28612

SEQ ID NO: 153246 - DNA, 201 bp, Homo sapiens
tttaaaacaattacaatgtcatagaacttttaaaattaacagtaatgctgtaatatcaaatatacaattcatgtggagttatgatgtgattttttttttttctttttcttttttttttttttttttttgagatggagtctcactctgtcatccaggctggagtgcagtggcgtgatctcagctcactgcaacctccgcctc

SEQ ID NO: 153247 - DNA, 201 bp, Homo sapiens
tttttctttttcttttttttttttttttttttgagatggagtctcactctgtcatccaggctggagtgcagtggcgtgatctcagctcactgcaacctccrcctcccgggttcaagcaattctcctgcctcagcctcccaaatgtctgggattacaggcatgtgccaccacgcccggctaatttttctgtatttttagtag

SEQ ID NO: 153248 - DNA, 201 bp, Homo sapiens
acttacacactgggagcagcgatgtttctatattctttagattttgttgaatggttaaaatttcagctttgtcgctcatacctgtgatcctagcgcttggsatgctgaggcgggcagatcacctgaagtcaggagttcaagaccagcctggccaacatggagaaaccctgtctctactaaaaatacaaaaattagccaggt

SEQ ID NO: 153249 - DNA, 201 bp, Homo sapiens
ccaccttaggcaacactggttcattcatttttgttttatttctaagcaccatgtataatctcttgacatagaaattaattcttcaaaaggaaacattctgyttttaaaagacaagttatagctatcttttgttgtagatgacgatttaattcaagatttcttgtggatggactgctgctgtaaaattgcagacaaggtaaa

SEQ ID NO: 153250 - DNA, 201 bp, Homo sapiens
ttcaatttggcaggactttaggatctaggaagaaagatgggatgagaggagcaattagataagtatattcctctgcctagttcttcaaaatgtagccctgygctatctaatatggtagccactggccacttgtgtctattaaacacttgaaactgaataatttaatttttactttaaaaactgaaggagcatatttttctc

SEQ ID NO: 153251 - DNA, 201 bp, Homo sapiens; identical to SEQ ID NO: 28613

SEQ ID NO: 153252 - DNA, 201 bp, Homo sapiens
gagggctaaatttactataagtgagcataccaggataaatttctttattgctctgtaagtatactttctactaagtgattgttgtgttatctattatatayattacaccttatttaaaacagaggctatttaaaaccttatgtatatctttgaataggccttcctgtataaatgctgtatgttttttactttaataggata

SEQ ID NO: 153253 - DNA, 201 bp, Homo sapiens
ttttcacaaagaatatattgtttccttaatgccaaatcttttaggataaatcagcaagacactaaaaatttaataatcagttattttaccaaatgttctgstttttaataaagtcactatttcaaaccacagaaaaattctagagtagaaaattaaatggaaagcagtggtcactgtaagctctagtattagttaagaaaa

SEQ ID NO: 153254 - DNA, 201 bp, Homo sapiens
aaggattttacctgatgagcacagtttctcctacttctccttctttccctatctcttgcagttcctaaaatggctcatatttttaatttggttttcgttcytttcctcttgcttgctctataagaactctcattctcttagtatatctaagtgaagagcaaaattaaaagatacccttaggtagaaattgaccaagactag

SEQ ID NO: 153255 - DNA, 201 bp, Homo sapiens
cagcagcatgatcttggctcactgcaacctctacctctagggttaaagtgatcttcttgcctcagcctcctgagtagctgggaccacaggcacatagcacsacacccggctaattttttattttttatttttttttaaagatggagttttgccatgttgcccagactggtctcaaactcctgacttcaagccatccttccc

SEQ ID NO: 153256 - DNA, 201 bp, Homo sapiens
ctgtcaatggacataataggtgatccttctcaagcttatactggttctgaaggtatgatttagtaatatgccagaattagatttatgcatgttgtttactragctctagtcagtcctttctggcggggatacataataatttatatactccaacaatatgagttaaattaatcttgaaactttctcccctttcagttactt

SEQ ID NO: 153257 - DNA, 201 bp, Homo sapiens
gggattttatacagaagagacaaggtgttccttacttaaactcaggtcatatttttaaagtggatttcaaactcagggactgcagtatagtggaaaacccyttggcaggggatggagtaggctgcgacttaccttatcttccattacaacagtaacccatggtcattgcagacattttggaaaatatggactggtagaatg

SEQ ID NO: 153258 - DNA, 201 bp, Homo sapiens
tacctccccaaaaatgtctttctgcctgtgagttgttgacactaccctagggccagctatgtcgtcctgctgccattcatgcctggagttaaaaggaaacyggagtatgttaaacaaaaactaaaggttaaggttgcagaatcagaactgagtctaggagtacttagctggggaagaaactggtgggagttggagatagtg

SEQ ID NO: 153259 - DNA, 201 bp, Homo sapiens
gagtacagtacatgaagttggcagcctgcaaacttgacaacagcacagagggtggggccttccagtgctggtccctgggagcacgctgtaactgcagggcsattccctggtcatcctttattcttgtccaccccaccactgatttcatcactgttgtatctgtggttccactgtaccttgtatggatatctgctgtcatat

SEQ ID NO: 153260 - DNA, 201 bp, Homo sapiens
aacaaaaacaaaaacaaaaccactgagcctctatcccatgggtatggtgagaaattcaccgtgggtcatttttggcctattctgggttgtcccaaggcccrgagtccaggcctctggttgtcagcgctgagtcagtggcggatgtgctgtgtcccagcttcctttcactctcctagcccactctctcccccaggtccctgc

SEQ ID NO: 153261 - DNA, 201 bp, Homo sapiens
ctgacctctgcctccacctcccctcttgaagtcttttctgaaggtttcccagacagtgctttcctgtgaacgtagctggtttgaattccccatgcctgacrgatctgctaccctatagtttttttttttctgttgagatggagtcttactctattgcccaggctggagtgcagtggtgcaatcttggcttgctgcaacctc

SEQ ID NO: 153262 - DNA, 201 bp, Homo sapiens
tctccctgagcagcctggtcattcttctgtaccccttatacacatggatcctgacatctgacctctgcctccacctcccctcttgaagtcttttctgaagktttcccagacagtgctttcctgtgaacgtagctggtttgaattccccatgcctgacagatctgctaccctatagtttttttttttctgttgagatggagt

SEQ ID NO: 153263 - DNA, 201 bp, Homo sapiens
ttaaactatatatataaaagatcatatagtactatgcagtgcccaggtatggtggcccctgtaatcccagcactttgggaggccgaggtggaaggattgcytgaagctaggagtgcgagaccagcctaggcaacatagtgagatcccgtctccacaaaaaataaaacgtaaaaaaatgagctgggcatggtggtgcacact

SEQ ID NO: 153264 - DNA, 201 bp, Homo sapiens
acagttgttaaacctcagctggtctcttgattctgagacatgtagaaatggcaaggcctctgaagttcaaggtttgggccagttttctcatcttcctgaaygccccagatcatggatgctgctcatatccttcagtagtctcatccctgcctgcaccttatacctaaccctctccctgagcagcctggtcattcttctgta

SEQ ID NO: 153265 - DNA, 201 bp, Homo sapiens
tggccaaaccacaatgtccagatatttggtcaaatattattctgctgtttctgtgaaggtgtcttttggatgagactaacatttacattggcagactttgygtaaagcaggctgccttccataatgtacgtaggcctcatccgatcagttgaaggtcttaaaagaacaaaactgacctccccaagcaagaaggaattctgc

SEQ ID NO: 153266 - DNA, 201 bp, Homo sapiens
catgtctctgctgcaaccttgtcctttcatccctagtctcaggctaggtgacaaggcaagaacaaggtacccctgagtggctttcagcacatccctgctcytctcagcctcgtttgtcagctgtgaaataaaggtgttagactggctaacctcgaagcttcatcattcctcaagtctccacacaattatagatgaatgcat

SEQ ID NO: 153267 - DNA, 201 bp, Homo sapiens
ttggagcatctaaatctgtttatagtttccactgattcttacattgtagacttgtcttgtcttatagtgacttgtttccttgtgtgtctggtaattttgtrttgtggtttcatcttttgatgagctttgtgggaattctggggtcctaaattggagatgttttcctccacataggacttacatttgcttcttctgggagcc

SEQ ID NO: 153268 - DNA, 201 bp, Homo sapiens
ccagtgctggtccctgggagcacgctgtaactgcagggccattccctggtcatcctttattcttgtccaccccaccactgatttcatcactgttgtatctrtggttccactgtaccttgtatggatatctgctgtcatattgtattttcattctttatttatagatcgttctctctggactgtgggaaggaccagtgtggt

SEQ ID NO: 153269 - DNA, 201 bp, Homo sapiens
gagaaaaatcacaaatgcataatgtttactatgatcacttttccattgtttgattcttcccttcttttccgttctttacccttttccttgtattcccttastgtcctaggggtcacaatttggtggccagcaggccaatgtcagcccatgggcatgttttgttttgcccaagagcaggtttaaagcagtgtaactaggcag

SEQ ID NO: 153270 - DNA, 201 bp, Homo sapiens
ttgggcacgtggattaaggaagggggttccagaataaccttggcagaaaatgtacaactgtgcttcctgccatgcctcctccttcatccttcccaggtctrtctccagacaggcactggttttggaagcctcactctatgaatgatcccctatcatggcagggactttgcaaggttgtgcatggaatctgcgtgcctgggt

SEQ ID NO: 153271 - DNA, 201 bp, Homo sapiens
ctgccctatccatattcagcaggcacagcgtctggatactcggggtctgcttttgacataaaaagagtcctttctattaaaagccagccagcagcccccayagagtcccacgagataaagtcgtttcaaagtcattcgctcccatcccacacctacatattcagcagctgacctagttttgagagagctagagggtatctt

SEQ ID NO: 153272 - DNA, 201 bp, Homo sapiens
cccttgggcgcctcaggtgcctgtatcacccactcctccctaccaaagagggcatcttcctacaggtaggttgactgtgtgtccccaggagtgtgaggtgycagctgcttttctgcccaagcaggccctgggtactgtgggtaggatgatctgccagagctcctgggcgcaccccaggatgtctggagagagaagttgcat

SEQ ID NO: 153273 - DNA, 201 bp, Homo sapiens
gaatggatttgctttgctgtagaggcagtggtgagagcaagggagggagacctgagcaaccattccctcccagggtggagggaatgagagtgggtgtgcaygagggagggccctggaggaccacctaggccaggctaggtcccttggactggacttgaccttctcctctgaccacccagagcacgtgcccacctcaggccc

SEQ ID NO: 153274 - DNA, 201 bp, Homo sapiens
ggagggcgcgcagcccgcgtgccgggtttgcgggctcccgggaaaccagggcgagggtctgggtgctgcgagcaggtaacagccgccggatgtggctaccwtgtgatgtttctggattttaaaacgctcgggggcatctccggacccgcggtgtgcatgagtggcagtgggtgtgggtggtgggcgcgcgctcgcctgcgg

SEQ ID NO: 153275 - DNA, 201 bp, Homo sapiens
acttgaacagagtcaactgcaggagtcagcccaaagacttgtatctgtatgactgtggaataaagacagacagatctttgaattttcactgccgctctttytgctgctgggccagcatgtgtgcgactcatcttctcactgtgctgcaatctgccctgctactgcttacctttccctatggcccagaagaggtaaagacct

SEQ ID NO: 153276 - DNA, 201 bp, Homo sapiens; identical to SEQ ID NO: 28622

SEQ ID NO: 153277 - DNA, 201 bp, Homo sapiens
atatgtctgcctcagggcatgagccttgccctgtgggagctgggattgtgttactcagagaatttcagacttaaagaacttactctgaatgtgcatgaaawggaaaggtcaggtgattgagaatgagggcaagcacatgggaccagcagccatctagggatatagatcacctactatgtgcaaagccccaggctagcactg

SEQ ID NO: 153278 - DNA, 201 bp, Homo sapiens
tacagaaataaagtgatgtatacatgatagataataataagaaatgtagcacttgtcatttgttaacggtgctattcattattcttcacaacagagtggcrtgatagattcaagttatcttcctaaagaggagagaagcaagtgcgatgtgtgcaagttgacatgccatgcctgtggtctgtgctgtggatgtgcagtccc

SEQ ID NO: 153279 - DNA, 201 bp, Homo sapiens
tttgatgcatttctttcctttctgtctcagtgcctgcttctcactgagcaagacagttcatcaccccatcgagatggaggagacaaatgacagcagtaacrtgaactgagcaggattagataaaaccaaagagctatcacacacaacagtggacagtcatttaaaaggaaatccatctcgttgttgcccaaggcctcttgg

SEQ ID NO: 153280 - DNA, 201 bp, Homo sapiens
cagagggagtgatttagagccgggggccagcaactacaaaatgtgtttgacaagagatgaaaagagcgggagaggagatgacagctgggtgggggctgctrtgggagggagacctctgagccgagggtggcagacacaggatggagtgctgagggccacgtgaggccccaggtgactggcaaagtaagcaggcacaatggg

SEQ ID NO: 153281 - DNA, 201 bp, Homo sapiens
aaacccaggacatgcggttttgacaggatctatagtggcaaggaaaatggagaggaacacagaggaaaggggagctgatgtattatttacagtggagaacytgaacagagtcaactgcaggagtcagcccaaagacttgtatctgtatgactgtggaataaagacagacagatctttgaattttcactgccgctctttttg

SEQ ID NO: 153282 - DNA, 201 bp, Homo sapiens
tcctcattcaccacgtggtttaaactattccatcactcactctataagaaagccttgcaggaaacccaggacatgcggttttgacaggatctatagtggcraggaaaatggagaggaacacagaggaaaggggagctgatgtattatttacagtggagaacttgaacagagtcaactgcaggagtcagcccaaagacttgt

SEQ ID NO: 153283 - DNA, 201 bp, Homo sapiens
ttacacttagtcctttttataatgtgcatttcttttctttctgtgccaagacttcccattttccccagtcatactgagcatatttgtgggtcaataaacaytgagccacaattaaagtgttcttttttccttccattctcctgaagaatggggtgagaaagctgatatgcattgagcgccacgtgtaaggtccttggtgaa

SEQ ID NO: 153284 - DNA, 201 bp, Homo sapiens
tttacttccatttgttaaattcttgtctcttttgtatttgttcctttttccccttctgggattattgttattcacaagctgggtttttagagtctgttctygaaatttctttttgcccctgatttttatttctttgtatttttgctcttgtgtgtgcgtgtgtgtatttttctacttgatcttctaagccgctaatttagg

SEQ ID NO: 153285 - DNA, 201 bp, Homo sapiens
gttttcccaggaacaccaagcggacagctgaagtgtggatggatgaatacaagcaatactattacgctgcccggccattcgccctggagaggcccttcggraagtaagtgtcccttcaggttgaggagggcagagactgcaaaagagcccagctcctaggaccgatgcaaatgggtgccgataggccagtcagcttagcta

SEQ ID NO: 153286 - DNA, 201 bp, Homo sapiens
aaaagaagggtgaagaaaccgcatgtgggaggggtctgagcttattaaatttgcttccaattttcttaccacagtaattggattctgatttataggatgcktttggacagtgcctgaaacagagaactattagctgagcattagagcaagtgctgccaggagggcgggtgttggggtgagcagctcaggaatctgaagatg

SEQ ID NO: 153287 - DNA, 201 bp, Homo sapiens
ttaagtcctgtgagatcacaaagatgaataaaatggggctacatgtactgggggtgggaggtaggtgatgtgttttaaataacgaattcactgtaaggaasagacaacttccagctggggtgagtctgagatgattgtccagaggagttctgatgttcatatgttaggttggtgcaaaagtaattgcgttttttgccatta

SEQ ID NO: 153288 - DNA, 201 bp, Homo sapiens
tcttctctcacttggaccatccagcggtctgtaacggtgtccttttagtcttttgcccacagaggctaatgatattttaaaatgtgaatccaagtcaaacyccaagtcacaaccctccagtggctgtttgccacacttacaataaaatgtatagtcctcatcaaggactccaaagccatatatgagctgacatctccttcc

SEQ ID NO: 153289 - DNA, 201 bp, Homo sapiens
tttgggaagacaaaaagggaaagtgtatcagccatatgtctgcctcagggcatgagccttgccctgtgggagctgggattgtgttactcagagaatttcasacttaaagaacttactctgaatgtgcatgaaatggaaaggtcaggtgattgagaatgagggcaagcacatgggaccagcagccatctagggatatagatc

SEQ ID NO: 153290 - DNA, 201 bp, Homo sapiens
aatgtctcagacatttgggggcattacagtgtatgtaatatgggggcttctaggccccccaggcctccctaacagtgtttatgtcctcgagggtaccttarctgctgtgctcagactctaagacatgtttctcctcttcctgccgctcctccacctctatgtggtattaatgatacttaataagattaccgtgttaaatgt

SEQ ID NO: 153291 - DNA, 201 bp, Homo sapiens
gattacagcaagaagggaagagaggatttagacagaatttatactctctttgggaagacaaaaagggaaagtgtatcagccatatgtctgcctcagggcaygagccttgccctgtgggagctgggattgtgttactcagagaatttcagacttaaagaacttactctgaatgtgcatgaaatggaaaggtcaggtgattga

SEQ ID NO: 153292 - DNA, 201 bp, Homo sapiens
acagtgaaactccatctcaaaaaaaaaaaaaagaaagtctaacccagtaagcctagagtggggcccaagaatttgcatttctaacaagtatctaggtgacrgtgatgctgctggctccaggatcccacttgggaaagttatgcatattgctattattagcttcaatattattaatatcaataccaccattcagagagcagc

SEQ ID NO: 153293 - DNA, 201 bp, Homo sapiens
ggctttgcacctagcccagtgtgttccatctgttaagaaagtgtgatctgctgggattacagcaagaagggaagagaggatttagacagaatttatactcyctttgggaagacaaaaagggaaagtgtatcagccatatgtctgcctcagggcatgagccttgccctgtgggagctgggattgtgttactcagagaatttc

SEQ ID NO: 153294 - DNA, 201 bp, Homo sapiens
  misc_feature (1)...(201): n = A,T,C or G
aaacaatttctcgggttctctgcaataatctgcagtctgagctaaggccctcttcctatcatttcctgggaggtctaggtgggccctgtctttgggacctncccaaccccgtgggacatcctgtcacctggccatgacacagtgagggttgccttccaacctttccgcattcttttcttgctcatttcctaccttgtgtcc

SEQ ID NO: 153295 - DNA, 201 bp, Homo sapiens
cctcttcctatcatttcctgggaggtctaggtgggccctgtctttgggacctccccaaccccgtgggacatcctgtcacctggccatgacacagtgagggytgccttccaacctttccgcattcttttcttgctcatttcctaccttgtgtcctccagttatcctatcaaagaacctgagtctcatccaaattcacagcaa

SEQ ID NO: 153296 - DNA, 201 bp, Homo sapiens
ctgtctaaatcagtaagacagtattattgcattattcatagtttccaattttttcaaatggattgagtttcttgaggccactaaatgtatatgtacatgtaaaaaaaaaaaaaatatatatatatatatatgtatacacacccctatctagtgctccttttgcgtttgcaataggaattaaataggacttaccccatggaa

SEQ ID NO: 153297 - DNA, 201 bp, Homo sapiens
aagacagtattattgcattattcatagtttccaattttttcaaatggattgagtttcttgaggccactaaatgtatatgtacatgtaaaaaaaaaaaaaatatatatatatatatatgtatacacacccctatctagtgctccttttgcgtttgcaataggaattaaataggacttaccccatggaaatgttggtgacctc

SEQ ID NO: 153298 - DNA, 201 bp, Homo sapiens
gcagaaagaggatgaaagagaggagaggtcaggcgaaggtgaaaatgaaagagaggaagaaagcaatgagggaacaaaagaaaaaaaaagagagcaagagrgacaaaaattttgacctgtgtatctctgcacgtccgcatgcgtgtgtgtgtgtgtgtgtgtgtgtgtgtgtgtgtgtgtgtgagagagagagagaaaaga

SEQ ID NO: 153299 - DNA, 201 bp, Homo sapiens
tgatctcttatgtttatgggctcctttctggaagctgggtgagtgccaggtcctgactgaacttaggaaggcactttgtgaatgagtagatggtggaatakcccgtggtcaacctgggaagaagtccttggtcgagggatcccactgtatgccctgccatgaggtagtgagcttcctgggacatcactccagtggtggctt

SEQ ID NO: 153300 - DNA, 201 bp, Homo sapiens
cacaggaaggattgtgactttgcccccggttgattaagccatcctcctcctcttctctcggtccaggccagctttgatgcatttctttcctttctgtctcrgtgcctgcttctcactgagcaagacagttcatcaccccatcgagatggaggagacaaatgacagcagtaacatgaactgagcaggattagataaaaccaa

SEQ ID NO: 153301 - DNA, 201 bp, Homo sapiens
ctggagtagagtggcgtgatctctggagtgcagtggcgcaatctgggctcactgcaaccttcgcctgctgggttcaagctattctggtgcctcagcctccygaatagctgggattacaggcgtgtaccaccccacgtggctaatttttgtatttttagtagagacggggtttcgccatgttggccaggctggtctcaaact

SEQ ID NO: 153302 - DNA, 201 bp, Homo sapiens
gtgcctcagcctcccgaatagctgggattacaggcgtgtaccaccccacgtggctaatttttgtatttttagtagagacggggtttcgccatgttggccasgctggtctcaaactcctggccccaagtgatccacctgccttggcctcccaaagtgctgggattacagatgtgaaccattgcacccagccaattatggacc

SEQ ID NO: 153303 - DNA, 201 bp, Homo sapiens
ggggtgatgcagaagtgggctgtacatgaggcctagagtaatgagatcaagactctgagttctggaacgtgaggatcggctctcccttccccagtgaggargagcttggaggtgggcagacactggccctgctgaggggtagcctggcactgaagcaagagaagagagtgctgctggattcacttgcaagcagaatagcag

SEQ ID NO: 153304 - DNA, 201 bp, Homo sapiens
tgtaacaaacttgcacgctctgcacatgtatcccagaacttaaagtaaaataaaaaaaattagtatgacttgattccaaaaacaacaaccacaacaaaaakaatttattgaaactgttttaggcactatattaaatgccggggtatgaatacatgtaaactgtgatcctgtcttcaagggttattcagtgctcatggtagc

SEQ ID NO: 153305 - DNA, 201 bp, Homo sapiens
ggaataatggaaagaacatactcggcaggggaaatagcatgagccaacacttgcaggcattgctgagcctaccttttttcttgaggttgcacagtggtctgggggtacttggagtatcaggtttcttagggaaagtacctggaggtgatagtggtcagagagtttggagaccaagtgggaaagggcatatgagctacagga

SEQ ID NO: 153306 - DNA, 201 bp, Homo sapiens
acctgcagtgcacacaattgtaacacgtaggtccatccctgggcgctcaattggcttaaccttttgtctttgcagctgatgactgtaaacagctcatcaarttgcccaaggtgaaatgcttgcgcaataatgaacggcaaggtaggtctgagctgttgtgcgggagcctccagtgtgagtgtcggggggtcgaaggtgtga

SEQ ID NO: 153307 - DNA, 201 bp, Homo sapiens
atccataccctgcttagtaaggtccgctgggttctttgtgcactggtgccacactgcttcacaaatgacctccagtaaagggaagcacagtataagtgacmgcaagtagaagcaacacaaaaactctagaaagaaggaaatttggctgggtgcggtggcgcatgcctataatcccagcactttgggaggccaaggtggatg

SEQ ID NO: 153308 - DNA, 201 bp, Homo sapiens
gctgggccccaagcaccggaactgatagagctgtttaatttaaacacatcaccccagctgcaccatggctgggcccctggtgtcatgttgacagccgctarccgattaaaggtgcagctagactggcggggcacagttctgaggagctgctattacagcatttattagcaggactgtagttaatggttagcaaatgtttta

SEQ ID NO: 153309 - DNA, 201 bp, Homo sapiens
gtgaattgctgctggctcatatggtaaattgatgcttaacctgcagggacccccaggctgattttgtccctgcagaatgtgttaagggagccttgctttcyttgggcacttaatgaacctctgaagccctttccatcccagtggtcccaagttcatctcagaaaccctctctgaaaagtgctctcctttctacatccatgg

SEQ ID NO: 153310 - DNA, 201 bp, Homo sapiens
cggggcctggtacaaatttgtgactattcatctgcaggggacaattaaagttaggactctgggagatgctattcatcaacttatccatgaaccacaggcayagaatgaagcaccatgggtgtacggttttgcttcttggggctgcagtcttggggtcaccttcccagctgtatcagtccattctaacattgctataaagaa

SEQ ID NO: 153311 - DNA, 201 bp, Homo sapiens
ggatgcccaggactagccaaaggcatctctgtgtctctggtgttgccacatagtaagtatttaatcatttttgttgagttggctgaagtcaaattgaggayaaagggactagcaagagctaagaatgggaatgtgaatggtgaccttccaaatgggggtggggactctgagaactctactgtggggtaggaccttggtctc

SEQ ID NO: 153312 - DNA, 201 bp, Homo sapiens
ttccgggctttgcacctagcccagtgtgttccatctgttaagaaagtgtgatctgctgggattacagcaagaagggaagagaggatttagacagaatttakactctctttgggaagacaaaaagggaaagtgtatcagccatatgtctgcctcagggcatgagccttgccctgtgggagctgggattgtgttactcagaga

SEQ ID NO: 153313 - DNA, 201 bp, Homo sapiens; identical to SEQ ID NO: 28620

SEQ ID NO: 153314 - DNA, 201 bp, Homo sapiens
gaaatcaagtctctcagtgaccctagacatgaggcacctacctttctgataaagctggaactcccatgttactgatggcacctagttcattcactctcttstttgtcttaccagcaatggaccaaaactggttcccacatcgagcacatagcatcccacctctgcctcgatacagatatgttcggtgatggcaccgagaac

SEQ ID NO: 153315 - DNA, 201 bp, Homo sapiens
cgaagaaaaggaaaaaaatatgagggtgtgtgagtttgctagggctgctgtaacagcataccacacacggggctgcttaaacaacagaaatgtatcgtccygcagttctggaggagaggtccgagattaaggtgtccacagggttgcttccttctgagggctgttctaggcctctctccttggccggtagatggccatgtc

SEQ ID NO: 153316 - DNA, 201 bp, Homo sapiens
aggcatatgtggtggtaggtgatgaagaactgagcctgtttccaaggagcccagctcacggtgtccagttccgggctttgcacctagcccagtgtgttccrtctgttaagaaagtgtgatctgctgggattacagcaagaagggaagagaggatttagacagaatttatactctctttgggaagacaaaaagggaaagtgt

SEQ ID NO: 153317 - DNA, 201 bp, Homo sapiens
tgggtcatcggaatagcaggagtcctgagtgagccctgtgtccccatgggagatatgctaatgagtgaatttgcctgtctgcaaggtcaggagatttacartcacaggaaaaaccctggagcttgttctcattttaggtaactggaaaatatactggcccttctcgagaggaacagaaatgggaagaaaatgagagttttc

SEQ ID NO: 153318 - DNA, 201 bp, Homo sapiens
ctacctctcagatggcaatgacagcagccgccctcactccagctcctctgcgcacatattctgtgcacctcagctgcagaggtgaggaggccactgccacrcccacttcacagctgaggaaactgacattggagatactaaatcaaggtccagtgtcgcctagccagtgatagtgaggcaggattccaggccttgcactct

SEQ ID NO: 153319 - DNA, 201 bp, Homo sapiens
ttttttgcacacacacacacacacacatacacacacgcacacgcacatgcacacacagctgccgtctgggtggtgcttggtaccggctaacacaggtcctkccagtgtccctagagaaacctctttgcagcctccatagatctgctgatcttcctgaagagcagaagctgccacttcccccagggtttccaccaaacctca

SEQ ID NO: 153320 - DNA, 201 bp, Homo sapiens
cccagctaggctctgcatttgccttttgagaagattcttttttgcacacacacacacacacacatacacacacgcacacgcacatgcacacacagctgccrtctgggtggtgcttggtaccggctaacacaggtcctgccagtgtccctagagaaacctctttgcagcctccatagatctgctgatcttcctgaagagcag

SEQ ID NO: 153321 - DNA, 201 bp, Homo sapiens
aaagggcattctcgtggagctcgtgagggcaccgactggtaggggggaaccagaccatctgggtttatgttgaggccccaccactcactcattgtgacttkccctctccaccaccatgagaagaggaattgcagcacccacctcggggagttactgtgcaggctgaaagctctgggaagaatacctgagacagagtgagga

SEQ ID NO: 153322 - DNA, 201 bp, Homo sapiens
tgggtgactgcggcaggccctagctgccctcctcattgactctggctttctaaatgcagaaggatcactcctcacctgaaactcttcacatgctgtgggcrcacagctcctgtcaccaccccaaccctgaagtcaaggccgcccccatcaggccatggcctgtgccgactgtgctgtgaggattcaggcctcatcattgct

SEQ ID NO: 153323 - DNA, 201 bp, Homo sapiens
cccttagttagtacccatgcagcttgagacacttgcacggccactgggttcagtaacacatgaatgagcatcccaccctcagggacaatgtcagccccagsataccaacaaccctcatgttccaatcagaacctgatcagcactttcttcctggaaacacagagtcttatgttttatgaacttgaaagttctgagctgttt

SEQ ID NO: 153324 - DNA, 201 bp, Homo sapiens
gtctcctctgagatatctcttgctccctgagatatcttgctgccaaactcagccgctgccccctctcgtctgggtgactgcggcaggccctagctgccctsctcattgactctggctttctaaatgcagaaggatcactcctcacctgaaactcttcacatgctgtgggcacacagctcctgtcaccaccccaaccctgaa

SEQ ID NO: 153325 - DNA, 201 bp, Homo sapiens
cagcatttattagcaggactgtagttaatggttagcaaatgttttatgaacaggttccccatggtctgtgaaggctgattcagtctattcagaatggaatygccttcccctattaagcttaggagtgtataatcagttctttccctccgctgaaggattttccctgtggcaggagtgggacattggccctgtttaagttaa

SEQ ID NO: 153326 - DNA, 201 bp, Homo sapiens
aacctctgacctccaccctcacccctgccacacacatgatgagtcttgggattctccatgacctgagggccagcagttgagcttccaggatggttccatgycccggcccagcaggcacagtggccacttgcttctcctctgaggtagctagtgtcccctggtgaccagggagctgaacagctgagccagctcagctctggc

SEQ ID NO: 153327 - DNA, 201 bp, Homo sapiens
cagggagctgaacagctgagccagctcagctctggctgggagcgttcaggagccctgaacactggactggactttggagatggctgaggagcctcgggtcwtctttctgggtagtcttgagcagaaatcattcctgctttgggcatttagtaagtgtgagcttgcatgggacaccatagaatgagctgaagacacagagcc

SEQ ID NO: 153328 - DNA, 201 bp, Homo sapiens
gctcagctctggctgggagcgttcaggagccctgaacactggactggactttggagatggctgaggagcctcgggtcatctttctgggtagtcttgagcaraaatcattcctgctttgggcatttagtaagtgtgagcttgcatgggacaccatagaatgagctgaagacacagagcccacccctgagaaggagagtccaa

SEQ ID NO: 153329 - DNA, 201 bp, Homo sapiens
ctcccttctcgttcacaagggaaagctggctggacaggacaaggggaaaggaacagaggtggaactgaaggttggagggggcatttggccagtgacgggcrcctgtgggaatgagcaggtcaggcacagggcactggcttgaatcctgatgagtggtagggaagtcaagttcagttcctgatctcaaggacgtggggcact

SEQ ID NO: 153330 - DNA, 201 bp, Homo sapiens
agatatgctaatgagtgaatttgcctgtctgcaaggtcaggagatttacaatcacaggaaaaaccctggagcttgttctcattttaggtaactggaaaatrtactggcccttctcgagaggaacagaaatgggaagaaaatgagagttttcttccctcaatggggttttctttccccaaatgggaaatgggtgtttcagac

SEQ ID NO: 153331 - DNA, 201 bp, Homo sapiens
aagggaaagctggctggacaggacaaggggaaaggaacagaggtggaactgaaggttggagggggcatttggccagtgacgggcgcctgtgggaatgagcmggtcaggcacagggcactggcttgaatcctgatgagtggtagggaagtcaagttcagttcctgatctcaaggacgtggggcacttctctggggtttggga

SEQ ID NO: 153332 - DNA, 201 bp, Homo sapiens
gggctgggttataggacccaaaactgtacaaacagatggttggatctggtcatggtgggatagagctgaggcttgcagccacaggagaaacagcacagtcrgaaagacccattccatctagctagtgatacttaatactcatttcccttgtgtattaaaggtgttaacgtcaggatactagctctacttcttggggctgtt

SEQ ID NO: 153333 - DNA, 201 bp, Homo sapiens
tctgtaactatttgttgaatgaacacatcacagtagagtaaaagggagcctcccaaagtgtcaggacccttccctctctgggtaccgtggcacatgtctgrcacaggctctctgagcaggggctcaggccaagagaatgatccatggggcacatcccagcatttagcagtaatccatgcattgtctgctgccattgttttc

SEQ ID NO: 153334 - DNA, 201 bp, Homo sapiens
tgatccatggggcacatcccagcatttagcagtaatccatgcattgtctgctgccattgttttctcctgtttctgcctccagggtgttttatggctttctycctcagtcactaagagttatttcctggaaatttatggcttctggcctgacccacagcatctgttctcccaaactgggcagtgtagagaaatgcatcagaa

SEQ ID NO: 153335 - DNA, 201 bp, Homo sapiens
atttgcctattctggacatttcatataaatagaatcatacaatacgtggcctcttgcggctggcctctttcatttaccatgatgttctcaaggttcatctrtgctgtagcacgtgccagtactttcttcctttttattagcaaatattattccattgtatggatatgctggctttgtttacccattcatcagctgagggac

SEQ ID NO: 153336 - DNA, 201 bp, Homo sapiens
ctgactgtgaagctaaattcttcctgtttcctttcccccatgttattgccatgattcagtagcagtcatgagaagtgctctcttcctccttgagtctacayggtccccaccctgaggggaatccaggcttcctgggagtgaacagcagtaggcagaggggcaggtgcagagaaggtggtggagtagggctagtgtgaaaga

SEQ ID NO: 153337 - DNA, 201 bp, Homo sapiens
ggaggccgaggtgggtgaatcacaaggtcaggagtctgagacccgcctggccaatatggtgaaaccccaactctactaaaaatacaaaaattagctgggcrtggtggcgggcacctgtagtcccagctattcgggaggctgaggcaggagaatcgcttgaacctgggaggcggaggttgcagtgagccgagatcacgccac

SEQ ID NO: 153338 - DNA, 201 bp, Homo sapiens
cttcacagaattagaaaaaactactttacatttcatatggaaccaaaaaggagcccatatagccaaatcaatcctaagcaaaaagtacaaagctggaggcrtcacactacctgacttcaaactatactacaagattacagtaaccaaatcagcatggtaccggcaccaaaacaaatatatagaccaatggaacagaataga

SEQ ID NO: 153339 - DNA, 201 bp, Homo sapiens
ccaagtgcatagagttcctctgaaagacagtttaataggcagcatcctgcctataggaaattgcccattaagttagcaggagcttaatgagtttgttgtasttggtgtcctacctgctggcagcaaccgtgggcagggtcaggcaaggccaatggcacagctagctcgcagatgtgaaatgcaaagagggagaagactgcc

SEQ ID NO: 153340 - DNA, 201 bp, Homo sapiens
ttcaaggagaactacaaaccactgctcaaggaaataagaggaaacaaacaaacggaaaaacattccatgctcatagataggaagaatcaatatcgtgaaartggccatactgcccaaagtaattaatagattcaatgcaattcccatcaagctactattgattttcttcacagaattagaaaaaactactttacatttcat

SEQ ID NO: 153341 - DNA, 201 bp, Homo sapiens
acaaacgatttcttggagattttttcatgcttccagctttgacagtttcctgtttattgattcacaaattccttatcttcatctatccatgaattcatttrttcattcaacagatacttctttattaactatgaagatgcagagatgaaagactaggttgcaggcctgaagggcccctcaaagggcctaatgtaaaaataa

SEQ ID NO: 153342 - DNA, 201 bp, Homo sapiens
aatagaatacctcggaatacaacttacaagggacattaaggacctcttcaaggagaactacaaaccactgctcaaggaaataagaggaaacaaacaaacgraaaaacattccatgctcatagataggaagaatcaatatcgtgaaagtggccatactgcccaaagtaattaatagattcaatgcaattcccatcaagctac

SEQ ID NO: 153343 - DNA, 201 bp, Homo sapiens
cttcatgttttctgggctactgcttggaaagttattgcctcctaatgagttttcctagtaaacatattgattttgcttttaactttttttaatccaatttwaaaaaagaaaccaacaataatacctggtagagcaattagttgcagttttagtgcttatgaaaccatgaaatcaagtctctcagtgaccctagacatgagg

SEQ ID NO: 153344 - DNA, 201 bp, Homo sapiens
aacttgtttaatcctaaacaggtcctgttaagaattccttcattatcttgtcatgcttcaaggcccaggaaaagcctagacaaactcttggtgggcttttgttacatataagcttttgtaaaagggcactggccctttcagcctttaacatttaacttacccactcagtcagggctgaaagttgtcttagaggcctgcctg

SEQ ID NO: 153345 - DNA, 201 bp, Homo sapiens
accatttctgaaacagattctcttcactgggatccactgtgttttattttcggaaagtattctcacagcaacaatgcatttggaatgagatattgtcttasataaggatgtgttagggaggggcatgcttctcttccatcttatcagcctcagaatgtttgggaggaaccccttacatcttgaggccaaataaaaatcttg

SEQ ID NO: 153346 - DNA, 201 bp, Homo sapiens
agggatgtggtggaaacagatacagccctcaaaggatcctccgcagcttccccaggggacccaattcaggaatcatctttgcccccagacggaggcaaagrgtaaatattaccttattttacaacctgggggagaaaacgcttatgccagtactttctgccccactgacttaagaactgggaagtgcttgtggcttcataa

SEQ ID NO: 153347 - DNA, 201 bp, Homo sapiens
agaagctttcccggatatttgtatgagccaggaaatggaattcacagtatagatacaatgtactgcaaaggccccatgcagagtcagggaggaggctggtrtcctgtgatggtgtggccagaacaccccacactgtgccctcctgtggcactttgggctcttggaagctggatgtggggactcatgaatggaagagcttgg

SEQ ID NO: 153348 - DNA, 201 bp, Homo sapiens
tgcttcctcaccctcctcctcttccctccttgttctgttttcttattaactggaacgaatgggaggaaatgattagaccagacagctcgttaatgattatygattcactacattcctttcaccaagtgccttgaagggaaaagccagaccatgatcctcatacaacaaaaactcagttctacatccaagaacgtgtggtgc

SEQ ID NO: 153349 - DNA, 201 bp, Homo sapiens
ctctcatgataaccgtggcctggccagagctggcgtggtggttgagtctcttctgcttccctgctcctccctgtctctcctccttgattcctcataaggtrgcatcatgtactccttgtcccacaccttcctgccctgcctctcaaggtagcaaacaccctctttgctcccgtctgcttcatctcaggccgggtgccacca

SEQ ID NO: 153350 - DNA, 201 bp, Homo sapiens
tgtctgggagagagagccaatagccaccagtctagatgtgatgtctactctgcatgctcttggagccaaacatgagccttgctgtctctccttctttgccrtctgcaaaagcaaactctctgcccaacaggatgaaatgagaatcaaatccttatttggaagtcccctctgtagggctgccttctcaaatcttttccatcc

SEQ ID NO: 153351 - DNA, 201 bp, Homo sapiens
ggtgactggcaaagtaagcaggcacaatgggatgtgatggaagcaggaatccgctggggactctgtggatcactgagcagtgagggtcccactggcctagygaggggcaagatcagtaaatgtccttgagcttatctttgctgtccctgaggcaacaagaggaatccctgatctccatggaaactttattgtattatccaa

SEQ ID NO: 153352 - DNA, 201 bp, Homo sapiens
cccctgtggatacctggctccctgcctcctagatcacctgctccctgggtaccagagctggaggacacagactcttctcctgttccagtgaccagcttgcygctctggtctctgaacacaaagagaaggggatgcagaaataaagcgtgtgggtaggaccagctctctcagtcctcatgtccaccggcaattgggatgtgt

SEQ ID NO: 153353 - DNA, 201 bp, Homo sapiens
ccgtaagtgtggttgtatcccacgagtggtggcttcctggatcctgaacaaaccttcctggtctctttctccccaggtatgggccttcacatacacccagmagatcctccaggaggagctgtgcctgtcagtcatcaccttgttccctggcgccccagtggttcttgtcctttgcaagaatggagatgaccgacaggtaag

SEQ ID NO: 153354 - DNA, 201 bp, Homo sapiens
gagtgctgagggccacgtgaggccccaggtgactggcaaagtaagcaggcacaatgggatgtgatggaagcaggaatccgctggggactctgtggatcacwgagcagtgagggtcccactggcctagtgaggggcaagatcagtaaatgtccttgagcttatctttgctgtccctgaggcaacaagaggaatccctgatct

SEQ ID NO: 153355 - DNA, 201 bp, Homo sapiens
ggaagtggtgagcaaagtaagcagaggtaccagtggcattggtgcatgagagggagtcttatcaaaggatttgcgtggccatgcaaagatagactggaccraaagtaagattttagtcatcttagtgagcctagatatcatttccttatgactagttctatgaggttagaatcatatctaatagtaattgtttggaaataa

SEQ ID NO: 153356 - DNA, 201 bp, Homo sapiens
ttcaacttggtgagttggaggtgagaggaagtggtgagcaaagtaagcagaggtaccagtggcattggtgcatgagagggagtcttatcaaaggatttgcrtggccatgcaaagatagactggaccaaaagtaagattttagtcatcttagtgagcctagatatcatttccttatgactagttctatgaggttagaatcat

SEQ ID NO: 153357 - DNA, 201 bp, Homo sapiens
gatgccctcggttctagccctccagatatgctttgtccctgaaggtctcacttgccctgtgcctttccttccccagatgcacactgctggtgtattgcacrgaccttccacccactagcatcatcatcaccttccacaacgaggcccgctccacgctgctcaggaccatccgcaggtgaggcatccttgcttgtctgttgg

SEQ ID NO: 153358 - DNA, 201 bp, Homo sapiens
gagtgtgaggtgccagctgcttttctgcccaagcaggccctgggtactgtgggtaggatgatctgccagagctcctgggcgcaccccaggatgtctggagrgagaagttgcatccagcaggaggctctggccatgctctgaataagtggcgcaagtgactgtcaagtgtcctgcattcagtgctagtagaagacctggttt

SEQ ID NO: 153359 - DNA, 201 bp, Homo sapiens
gtgtggtatcttaatcatctttatatgcacaggacctagtaggtaacaggccctcaatatatacttgttgaatgaattaaataatttatggaaaagcactaaaaaaaaaatcacctgatccatcccttccttgtaatgtggaggatcctagagagttttaatatcttgtctggagccccacagccagaccatggcccctgc

SEQ ID NO: 153360 - DNA, 201 bp, Homo sapiens
acaggatttgatggctatttggacctttggtctgagaagtcacaaaggagagaaactgagttaagtcctggctccataattttctgccatttgttcttagrcaatttctctgagccttgtgtcccctcaactatgaaatgagaatagcaatgcttgcctggcctacagcagaggattttgtatggtttaaatgaaatctgg

SEQ ID NO: 153361 - DNA, 201 bp, Homo sapiens
cagtttgagaaatgggggctcagggagcaacccccagagaattgagcatagggaagagcacctgagaactgctaataaatgttctcatccctagccctcattcttcattctagaaagcagcttttttggtttttgaacatggccaatccctcaactttaagctactctcagccgttgctgcttagcatgggagccgtcctt

SEQ ID NO: 153362 - DNA, 201 bp, Homo sapiens
agtttgagaaatgggggctcagggagcaacccccagagaattgagcatagggaagagcacctgagaactgctaataaatgttctcatccctagccctcattcttcattctagaaagcagcttttttggtttttgaacatggccaatccctcaactttaagctactctcagccgttgctgcttagcatgggagccgtccttc

SEQ ID NO: 153363 - DNA, 201 bp, Homo sapiens
gtttgagaaatgggggctcagggagcaacccccagagaattgagcatagggaagagcacctgagaactgctaataaatgttctcatccctagccctcattcttcattctagaaagcagcttttttggtttttgaacatggccaatccctcaactttaagctactctcagccgttgctgcttagcatgggagccgtccttcc

SEQ ID NO: 153364 - DNA, 201 bp, Homo sapiens
gaatcttttcagcagcccagaaatctccatgtgcctctttctagtcattagctctcctccacaaagaaagcttacttcagtaatgaaagtctaccctgggmcctccttccatcctcagaacttcctgcaaagaaatgatccaagaaagcccatctcatacaacaataagtaataaaaaagaaagtaggatcattggtagat

SEQ ID NO: 153365 - DNA, 201 bp, Homo sapiens
gagttctgatctggctttccgccatggtgggaggaggagggagatctgggttgagtagcagctcctgcctgtcatgtcctgagagagaggctcatcatcayctcagaggagggaaatggctgggagacttgtggagcccctcagagaggccaggcattctcacacctggacaacagccaagcaacctcacctgagcaacta

SEQ ID NO: 153366 - DNA, 201 bp, Homo sapiens
ggaggtggtgggcaggggacatggctagaatggttggaagattggttaagagaaaggataatttattgagcaagtaaataaatataaagaggataataggmaccgtgttttttactgtttgaaaggggatttctaaacatggaaagaaggaaggctagaaaagtcctagcatgctggattggaattagaagtgtcagtatg

SEQ ID NO: 153367 - DNA, 201 bp, Homo sapiens
aaatggctgggagacttgtggagcccctcagagaggccaggcattctcacacctggacaacagccaagcaacctcacctgagcaactatgtgggtgaggasctcaacttcctgcactgaggagcaggcagaagaggagaaaaagtgtatgtctgtaacaatgagaacgatgggaatcattaacagggatatttagcattaa

SEQ ID NO: 153368 - DNA, 201 bp, Homo sapiens
ggatcttttgcactatgctaagacccttgaggttgaaggtatatggtctctgaagaggtgccttggcttctcagagtaagaaaatactgagcacagggacygtttttttttttttttttgctttgttttgagttggagttttgctcttgttgcctaggctggagtgcaatggcgcgatctcagctcactgcaacctctgcc

SEQ ID NO: 153369 - DNA, 201 bp, Homo sapiens
ctttttcttttttttttgagacagggtcttgttctgtcactcagactggagtgcagtggtatgatcttggctcactgtaacctctgcctccaggttcaagygattcttttgcctcagcctcccaaataggtgggattacaggcatgggccaccacacctggctaatttttgtatttttagtagagatggggttttaccatg

SEQ ID NO: 153370 - DNA, 201 bp, Homo sapiens
ccacccgccttggcctcccaaagtgttgggattacaggcgtgagccaccgcaactggccagggcctgtttttaacactcatgcaagggcctgtgtttcctrgtttctcatcatacctggatacagtgccagatggaccagcgtttgtttgttttaatatagattatgatgcatcagtgaattttaccttttaaaggcatga

SEQ ID NO: 153371 - DNA, 201 bp, Homo sapiens
catcagtgaattttaccttttaaaggcatgagacagaaggagaaagcattacaggtaaaaaaggagtttcattcataaaatgttggtctccattgcacttdtatgcatgctgtgtagtgtactggctgcagtatacatttcataccttaggttgtactcaaaaaagtgggcagccctgggaagactgaggaagaaaggact

SEQ ID NO: 153372 - DNA, 201 bp, Homo sapiens
actgataaatgtagagagaatgatggagatacatattcaccacttggtcaccgtaactgtggtaattggtagagattggtagttgctgatgggtgctgtcytgtgggtggaggtttcataagaaatagcatattggcacaatattagtaaagcttcccacaaaagtgtaaccaaataacatggaaacatggtaaaatttca

SEQ ID NO: 153373 - DNA, 201 bp, Homo sapiens
tgagaagaacacagcatcatttctgttgtgccaagaatgcatggcttgtatctggttgtgaggaaacatcagatggacacaggctctacagaaggaaaggyctgtactgtttcagactttcaaagatttgagaaacagagaaagactgaggaattcctccagactggatgagactgatgagagatgacaactaaatgcaac

SEQ ID NO: 153374 - DNA, 201 bp, Homo sapiens
gaagaacacagcatcatttctgttgtgccaagaatgcatggcttgtatctggttgtgaggaaacatcagatggacacaggctctacagaaggaaaggtctrtactgtttcagactttcaaagatttgagaaacagagaaagactgaggaattcctccagactggatgagactgatgagagatgacaactaaatgcaacatg

SEQ ID NO: 153375 - DNA, 201 bp, Homo sapiens
gtcaaggcacaggaatggaggaagtcacctgtagggagagtgtaacgagtggagaggagggaccagggctaaatccatgcacacttccaacaatgagaaaycaggggaagggaggagccagagaaggaaatgaagaagatgccaaagtctgagaagcccaggagaaagtattctgaaacagagagacaaggaccctcgaaa

SEQ ID NO: 153376 - DNA, 201 bp, Homo sapiens
gctaatttatttatttatttattttttgtatttttagtagagatggggttttaccgtgttagccaggatggtctggatctcctgacctcgtgatctgcccrccttggcctcccaaagtgttgggattacaggcatgagctaccacgcccagccacagatgtcgtttttaagaaggcgactttgggccaggcgcagtggttc

SEQ ID NO: 153377 - DNA, 201 bp, Homo sapiens
tggcagccgcgagaagttccgagaggagagggagcaggcacagctcagtaattccagagacagagcttcaaaacaggaagactcttgctagagagagaacrctgtatcccagcattttgtgtccagccatgctcttgcccctctgtggagggtggaggggaagtgggagcctctgcccctccatggaagttggaatgtgta

SEQ ID NO: 153378 - DNA, 201 bp, Homo sapiens
tcggggaaaggagaggaagctggaatgggctggggataggagggacaaagactcactcgctggagaagtcaaaacggttagggatgcaggcaggccagggmgggaaggagccaaagggtcagggcaggcttcacagtgttgcaagtcgccagtacctgagacatgaaagagagaagacagccagtcttgggatggggaggt

SEQ ID NO: 153379 - DNA, 201 bp, Homo sapiens
gagggcgttctggagagaaattagtgtcagaactaacacgtgggcatcacctgcatatctcggggaaaggagaggaagctggaatgggctggggataggakggacaaagactcactcgctggagaagtcaaaacggttagggatgcaggcaggccagggcgggaaggagccaaagggtcagggcaggcttcacagtgttgc

SEQ ID NO: 153380 - DNA, 201 bp, Homo sapiens
gctggagggattctgagccagaatgggagagacgggaacgaatgtcatcttgagacagagtctctctctgttgcccaggctggagtgcagtggcgcaatcycggctcactgcaagctccacctcccgggttcacgccattctcctgcctcagcctcccaagtagctgggactacaggtgctcaccaccccgcccggctaat

SEQ ID NO: 153381 - DNA, 201 bp, Homo sapiens
ggccatgtaataatccaggcagctagggacacaaccctagagtggaatagtggcgtagagggtcagggttggtgcaagggagattaagaaggaagagagaygtcacaggatttgatggctatttggacctttggtctgagaagtcacaaaggagagaaactgagttaagtcctggctccataattttctgccatttgttct

SEQ ID NO: 153382 - DNA, 201 bp, Homo sapiens
ctgatcaggcagggccttgggggccacaggaaagagtgaggacagcattctgagtgcagtgggagccgctggagggattctgagccagaatgggagagacrggaacgaatgtcatcttgagacagagtctctctctgttgcccaggctggagtgcagtggcgcaatcccggctcactgcaagctccacctcccgggttcac

SEQ ID NO: 153383 - DNA, 201 bp, Homo sapiens
ctgtagagaatcgctagatgaaatatacgttacgggaccttgagggacttgcaaggcaagaaagggaggtttctgaaggcaacatgctctctcccttctcrttcacaagggaaagctggctggacaggacaaggggaaaggaacagaggtggaactgaaggttggagggggcatttggccagtgacgggcgcctgtgggaa

SEQ ID NO: 153384 - DNA, 201 bp, Homo sapiens
aggaaacgagaagcgaagtgtgagaatccacagcaaaagccgccacagagcatatgcatcggacttcacagcttcctcctgcttccagcttgcatttgctycatatgctgctttacactgctttccgggccataatgggtttcattccatagtttttatactaacatgaatgactcacatctgctccagtacccaatttgc

SEQ ID NO: 153385 - DNA, 201 bp, Homo sapiens
tgaattttaccttttaaaggcatgagacagaaggagaaagcattacaggtaaaaaaggagtttcattcataaaatgttggtctccattgcacttgtatgcrtgctgtgtagtgtactggctgcagtatacatttcataccttaggttgtactcaaaaaagtgggcagccctgggaagactgaggaagaaaggactgtggac

SEQ ID NO: 153386 - DNA, 201 bp, Homo sapiens
gtggcagaggcaggactagaccccattgtgattcttggggcagaccccctccctataagtgataagcacaagagcctcaggaatctctttagaagcaaatmtcttcatgtggctgccagggtgacttggcgtcaccccgactgagggctaactcatctctgagccagggcagggcagccacttaaactatcacaggccacg

SEQ ID NO: 153387 - DNA, 201 bp, Homo sapiens
taagactaagaaggataataacaacagccataattgtgggaagagtaaagcttctacaaggcctcagagacttggcaaaataatacaaggaaaaggaaatsaagatggacactctgacctttgcagatctcctgtagaaaagccagtggccccgccccttactggaagaaatgtccttctgaaagtgcccagcattccaca

SEQ ID NO: 153388 - DNA, 201 bp, Homo sapiens
acttactaggattatttttcatccactggaaactttactccagagaaaattgagatattcaccattctcaattttggtttgagccttcaaacataccttgtttttttttttgttttggtttttgtttttccccactatagctttattggaccagtccattagctatcttagaaaactctcccatatctcaatctgtcaaaa

SEQ ID NO: 153389 - DNA, 201 bp, Homo sapiens
tttcatccactggaaactttactccagagaaaattgagatattcaccattctcaattttggtttgagccttcaaacataccttgtttttttttttgttttkgtttttgtttttccccactatagctttattggaccagtccattagctatcttagaaaactctcccatatctcaatctgtcaaaatgttaccccttcttca

SEQ ID NO: 153390 - DNA, 201 bp, Homo sapiens
aaaaattacccaaatgggcccagaaaggaatccaaaatttctaaggcagaaatttttttaaaaaatttaaataggtatacattcttcaaagaaaaatgcastagtccagagcatagaactctgttctagagcatagaaaaagaagagaaacaagcataacttttaccaaaacctgacaaagtaggcacacatggaaatcca

SEQ ID NO: 153391 - DNA, 201 bp, Homo sapiens
ccctgtgtgggatgggattctgacttggggaaaggtagagtgttgggggaaaaaaaggccttattccagaactgggaggagaaggagaatgtaggcctgcrtaatgggtcaaggtccataatactcagcccaagggaaggctgacccccaagccacttattgagatagggcccagcatcccaccatcccctactgaggggg

SEQ ID NO: 153392 - DNA, 201 bp, Homo sapiens
atgggtggcatttgggagctagatgaagaataccaagtctgttgatcgtggtttggttggctgcatgtaaatatggtcaaatgattttcttcttgagtgtscttatggacctaacccatgtaagcctatgcatgcatgttaaataacagccaccagcatttctatagggctttacaaattcacagactccatttacatata

SEQ ID NO: 153393 - DNA, 201 bp, Homo sapiens
taatactcagcccaagggaaggctgacccccaagccacttattgagatagggcccagcatcccaccatcccctactgagggggaccccctgaggggtacaygcccatatttggggtgtgacagtgtatatgttttaaaaggaggcaggctttgatctgcctgtcattatttcttctgagaaaatcaagtctgtgccagctc

SEQ ID NO: 153394 - DNA, 201 bp, Homo sapiens
ggctaaaacacatccatctcaggctataagccagcattatgcttattgaggaaacactaaaggaattatcactaaagaacaaggatctatgctattagtaytgttactcctcattgcacaggtgataattaccaatgcaattagacaagcaaaaacagtaaaaaagagagggaagaggcagttgttgctgtatgaagatgc

SEQ ID NO: 153395 - DNA, 201 bp, Homo sapiens
cagtctcagtcctcagatgttgagctgattaagaaagaacccctttgggataccgaagaacatgaacacacacatatacacacacaggcacacacacaggygcgcgcgcacacacacacacacacacacacacacacacacacacacacacacacacagaggtaccctggggaattctgcaggagctcctgcaatgtgctg

SEQ ID NO: 153396 - DNA, 201 bp, Homo sapiens
aagccagcattatgcttattgaggaaacactaaaggaattatcactaaagaacaaggatctatgctattagtactgttactcctcattgcacaggtgatamttaccaatgcaattagacaagcaaaaacagtaaaaaagagagggaagaggcagttgttgctgtatgaagatgctgtgattgcatggctagaaaacaaaag

SEQ ID NO: 153397 - DNA, 201 bp, Homo sapiens
cagtcctcagatgttgagctgattaagaaagaacccctttgggataccgaagaacatgaacacacacatatacacacacaggcacacacacaggtgcgcgmgcacacacacacacacacacacacacacacacacacacacacacacacacagaggtaccctggggaattctgcaggagctcctgcaatgtgctggctctg

SEQ ID NO: 153398 - DNA, 201 bp, Homo sapiens
aatgagcccaagtcccctcaaaatgacagtgtggctggggcaggtgagttaggtgtcaggtactaggctctgcagttctggaaagaaggcttcctttcaartgaaaattaaagcaaaacccactcgaaataaactctgataccaacaaattctcaacccaagttggaatttaaattaagacgacattatttcaagttgaaa

SEQ ID NO: 153399 - DNA, 201 bp, Homo sapiens
tccacatcgctcttctctagctcggagcaccataagggctcacaacttatttagaaaattgtgatgaattaaattggaaacaagccagtgggagacagttytatggcccttcccatgaggatgggatttcaaggttaccgtggggtgatgttccaagcagaggtcacagctatcaggctgtgacattgcaaaacacaggct

SEQ ID NO: 153400 - DNA, 201 bp, Homo sapiens
ttagacaagcaaaaacagtaaaaaagagagggaagaggcagttgttgctgtatgaagatgctgtgattgcatggctagaaaacaaaagataattaactgaraaactgtttcaaacaataaaagaattccataaactaacaatgtgcaataattagtaaacataaattaatacttttcacatatacaaacaccaaacagaat

SEQ ID NO: 153401 - DNA, 201 bp, Homo sapiens
agtcctcagatgttgagctgattaagaaagaacccctttgggataccgaagaacatgaacacacacatatacacacacaggcacacacacaggtgcgcgcrcacacacacacacacacacacacacacacacacacacacacacacacacagaggtaccctggggaattctgcaggagctcctgcaatgtgctggctctgg

SEQ ID NO: 153402 - DNA, 201 bp, Homo sapiens
tcccctcaaaatgacagtgtggctggggcaggtgagttaggtgtcaggtactaggctctgcagttctggaaagaaggcttcctttcaaatgaaaattaaarcaaaacccactcgaaataaactctgataccaacaaattctcaacccaagttggaatttaaattaagacgacattatttcaagttgaaatagagtgtcagc

SEQ ID NO: 153403 - DNA, 201 bp, Homo sapiens
aaaagagagggaagaggcagttgttgctgtatgaagatgctgtgattgcatggctagaaaacaaaagataattaactgaaaaactgtttcaaacaataaargaattccataaactaacaatgtgcaataattagtaaacataaattaatacttttcacatatacaaacaccaaacagaatacagtaagtcctcaacattga

SEQ ID NO: 153404 - DNA, 201 bp, Homo sapiens
gtcctcagatgttgagctgattaagaaagaacccctttgggataccgaagaacatgaacacacacatatacacacacaggcacacacacaggtgcgcgcgmacacacacacacacacacacacacacacacacacacacacacacacacagaggtaccctggggaattctgcaggagctcctgcaatgtgctggctctggt

SEQ ID NO: 153405 - DNA, 201 bp, Homo sapiens
tttctcatcaaagttataacaaaaagatgttgaaggaaatggtattcaaggacttattgtacatcattgtgcttaaagtcacagtttccaaccacctatcmatgatgttaagtgaggacttaccgtatatttttagaggaagagccatcacttacaataacaacaagaaatgtaaaagaactaataataaatttaaacaaa

SEQ ID NO: 153406 - DNA, 201 bp, Homo sapiens
tcctcagatgttgagctgattaagaaagaacccctttgggataccgaagaacatgaacacacacatatacacacacaggcacacacacaggtgcgcgcgcacacacacacacacacacacacacacacacacacacacacacacacacagaggtaccctggggaattctgcaggagctcctgcaatgtgctggctctggta

SEQ ID NO: 153407 - DNA, 201 bp, Homo sapiens
tagaggaagagccatcacttacaataacaacaagaaatgtaaaagaactaataataaatttaaacaaaaaatatccagggtctatatgaagatttaaaaaygctactaaagtatataaaaggatcctgaagcaaatggaaagattgctcatggatggaaaaacaatagacatcattctatttaagttaatttataaatcaa

SEQ ID NO: 153408 - DNA, 201 bp, Homo sapiens
atgaagcagcaaggagaagtatgagtgcccagcgaatggggaagccccttataaaaccatcggctctcatgagaactaattcactgtcacaagaacagcascatgggggaaaccaccactatgactcaattatctccacttggtccctcccacaatgtgtggggattatgggaactaaaattcaagatgaaatttgggtgg

SEQ ID NO: 153409 - DNA, 201 bp, Homo sapiens
gacttcccattttccccagtcatactgagcatatttgtgggtcaataaacattgagccacaattaaagtgttcttttttccttccattctcctgaagaatggggtgagaaagctgatatgcattgagcgccacgtgtaaggtccttggtgaagtgtagtctgttttctcagggaagaaataagggctctttcaaggctgga

SEQ ID NO: 153410 - DNA, 201 bp, Homo sapiens
agaggaagagccatcacttacaataacaacaagaaatgtaaaagaactaataataaatttaaacaaaaaatatccagggtctatatgaagatttaaaaacrctactaaagtatataaaaggatcctgaagcaaatggaaagattgctcatggatggaaaaacaatagacatcattctatttaagttaatttataaatcaaa

SEQ ID NO: 153411 - DNA, 201 bp, Homo sapiens
atacacccagcagatcctccaggaggagctgtgcctgtcagtcatcaccttgttccctggcgccccagtggttcttgtcctttgcaagaatggagatgacmgacaggtaagtgctcagcaggtccctgggatgtggccaactccgtaatgtgactgcctgttgagggcttagtctgatgagcaggaaaagagagaaattgt

SEQ ID NO: 153412 - DNA, 201 bp, Homo sapiens
atctgtagtagagcagatgaggactgcaaagaaagcatgcaagtgggtcaaggtgttaggctgtagagaatcgctagatgaaatatacgttacgggacctygagggacttgcaaggcaagaaagggaggtttctgaaggcaacatgctctctcccttctcgttcacaagggaaagctggctggacaggacaaggggaaagg

SEQ ID NO: 153413 - DNA, 201 bp, Homo sapiens
tcagtctctatccctactcaaatcaagcatttgcagcagcttgtctgggagagagagccaatagccaccagtctagatgtgatgtctactctgcatgctcwtggagccaaacatgagccttgctgtctctccttctttgccatctgcaaaagcaaactctctgcccaacaggatgaaatgagaatcaaatccttatttgga

SEQ ID NO: 153414 - DNA, 201 bp, Homo sapiens
aagtgataatatgacaattctgagtctgggttccaagagggctcgcatgagtgttctctctctccctctctctcttttttctctatgtctccctcttagamctctaccactgcctaagaacaagtatagtagccactactgcaggatgaaagattgtgtgtagcagggcctagacttcccagctgagaccatcctgaccca

SEQ ID NO: 153415 - DNA, 201 bp, Homo sapiens
gcagggtatacaggaaatgtggtgctggcatctacttcaggcgaggacctcaggaaacttccaatcatggcagaaggcaaaggggaagcaggcatctcacrtgctctgttcacagagcaggagcaaagagaacagagggtgtgccacactcttttaaacaaccagatcttgtgtgaactcagagcgagagctcactctcat

SEQ ID NO: 153416 - DNA, 201 bp, Homo sapiens
cagtggccagtcccgatgcttgttcagtatgtgttagctgagctgcatttgtggagtggctgagctgagataaacatccaggttctgactttgaatccagygctctttctcccctactgggctatatacaagcaacctctagatatcatgttcctaaatccacccataaatccctgagaaaaccgcgagatccccggcagc

SEQ ID NO: 153417 - DNA, 201 bp, Homo sapiens
agcttggcccttaccaccaggactgtggatggaagggctagggggtgggcaggatgctcccagcacccagagctccagctctaagatagggctcaccccayttaatgtccaaaaatgtgatgggagcaaggatttcccagctacatgtggcctgcattgttctgatgccagcagtgggcaccaccctctcctagagacgtg

SEQ ID NO: 153418 - DNA, 201 bp, Homo sapiens
tcaacaaaccttttaggagcagcttctaggtgggtggaggctcaaagatgcaggagacacatttgcatatgaaagatgtgtgctagtttgcttttgctttkctctaaaggaatacctgagactgggcactttataaaggaaagaggtttaattggctcaaggttctgcagggtatacaggaaatgtggtgctggcatctac

SEQ ID NO: 153419 - DNA, 201 bp, Homo sapiens
agcattttccaaggtaaccttgatgatcattgcctactgggacccttggtgcttcttaccagcctgtgctaatcacacccgtaagtgtggttgtatcccaygagtggtggcttcctggatcctgaacaaaccttcctggtctctttctccccaggtatgggccttcacatacacccagcagatcctccaggaggagctgtg

SEQ ID NO: 153420 - DNA, 201 bp, Homo sapiens
cccttgccttccctgggagcagcaggagggtccggtgcctgggaagtgaccaccagagggagtagccgcagtaggggctgagctacgtgagccacactctrcccagaatgggggacccgtgttgggttgtaggaccgtacatgactaaggaagcccgtggggtgctcttatctgataccaccactttgtgttgtgccagac

SEQ ID NO: 153421 - DNA, 201 bp, Homo sapiens
ctcagttccatttgcagactcaggtctttcttcaagtcaggtaaattctttacttccatttgttaaattcttgtctcttttgtatttgttcctttttcccyttctgggattattgttattcacaagctgggtttttagagtctgttctcgaaatttctttttgcccctgatttttatttctttgtatttttgctcttgtgt

SEQ ID NO: 153422 - DNA, 201 bp, Homo sapiens
aacagaaagagcatgggccagacagactggggtccaaattagaagtctgccatagtggattctagtggctgcttcaaaatgggctcataggtgctgtcatycctgagcttggatgtgggaatatcacactcctgctgtccgtacttgaacggcacctcagcaggttaaaatgcttctggtcacacttggactcagccccgt

SEQ ID NO: 153423 - DNA, 201 bp, Homo sapiens
agttgaaatagagtgtcagcagaagggctgagtggaggcatcgcagttctgtcctctctgagagttgcctactctggggcttctgtcccagaagtgagacrtatgagtggtggtttaggagccctgagttgaagtctggctgccttatgccaggctgtggccctggggacatacttaatctctcctgcctcatggagttgt

SEQ ID NO: 153424 - DNA, 201 bp, Homo sapiens
ctttctgcaattctcctgtcaggagtggatttggggtgccctgcagaggctgtagtcactaactctcaactctcactggcagagagtgagttcccatctctttttttttttttttttttcctttgagatggatgttagctcttgtcacccaggctggagtgcaatggtacgctcttggctcactgcaacctcagcctccca

SEQ ID NO: 153425 - DNA, 201 bp, Homo sapiens
ccagcttggcttttatgacgagagctcctatgattaagcttctacttgtcttttggtgaacaggcatatgtgtttctgtagggtgtacccctagaagcttytgtagatatcatcaaatatttaatgaagtacttacagcagagtccctgttgcaccaagtcctcattatcaatcacttgctattgtctgtctgtttcattt

SEQ ID NO: 153426 - DNA, 201 bp, Homo sapiens
tttctgcaattctcctgtcaggagtggatttggggtgccctgcagaggctgtagtcactaactctcaactctcactggcagagagtgagttcccatctctttttttttttttttttttcctttgagatggatgttagctcttgtcacccaggctggagtgcaatggtacgctcttggctcactgcaacctcagcctcccag

SEQ ID NO: 153427 - DNA, 201 bp, Homo sapiens
gcggacagctgaagtgtggatggatgaatacaagcaatactattacgctgcccggccattcgccctggagaggcccttcgggaagtaagtgtcccttcagrttgaggagggcagagactgcaaaagagcccagctcctaggaccgatgcaaatgggtgccgataggccagtcagcttagctaccctcagctcccgcagggc

SEQ ID NO: 153428 - DNA, 201 bp, Homo sapiens
gcatttgatgtgatcttcactgttgagatggaaaccaatgtcgtcagcctgtagacatgcatgtctctgctgcaaccttgtcctttcatccctagtctcargctaggtgacaaggcaagaacaaggtacccctgagtggctttcagcacatccctgctcctctcagcctcgtttgtcagctgtgaaataaaggtgttagac

SEQ ID NO: 153429 - DNA, 201 bp, Homo sapiens
ggaagcataacaggaagggaaagccagcatcaggatagggaataggctgagcaacccacttttatttagtcagttgaggacacctgtcgtgggttctataygttttgggcaccatggaccaggtagcctatggatcaactgcaacccctactttctccactgtttttgtatggcctgtgagctaagaatggtttttatagt

SEQ ID NO: 153430 - DNA, 201 bp, Homo sapiens
cagtgtgtgggaaccagggttaagccagaccaaaagtccagggcagtacttgcagaccacggcaaagaacttggcctttattctgtgagtgggatccaacygtgtcttagaagagccattccagcagcagtgtgaaaaattaaatacaggtctaaagacataaatccccagcgcttatctgttggtcggctctgcaaagag

SEQ ID NO: 153431 - DNA, 201 bp, Homo sapiens
tggagtgcagtggcgcaatcccggctcactgcaagctccacctcccgggttcacgccattctcctgcctcagcctcccaagtagctgggactacaggtgcycaccaccccgcccggctaatttatttatttatttattttttgtatttttagtagagatggggttttaccgtgttagccaggatggtctggatctcctgac

SEQ ID NO: 153432 - DNA, 201 bp, Homo sapiens
ttttaaatgatcagagaaaaactccaaggaaaaataatatttcatgacacatgaaaattattaatacatgaaattcagactccatggtccatcaataaagtttttttttttttttttttttgagatggagtctcgctctgttgcccaggctggagtgcagtggtgccacctcggctcactgcaagctccgcctcctgagtt

SEQ ID NO: 153433 - DNA, 201 bp, Homo sapiens
tggtttcccttaagggttgtgacatgaactggggatgggcaagggtagaagggaaatgtttcattgcatgcctttttaattttgaaccacatgaatgtatyttttaaagggattattatattaataggattctgacatagtcactgaggtattcatgtcagaagatgatgcacatcctcttgtcctccacatacagaaaag

SEQ ID NO: 153434 - DNA, 201 bp, Homo sapiens
cggctacaggaaacgagaagcgaagtgtgagaatccacagcaaaagccgccacagagcatatgcatcggacttcacagcttcctcctgcttccagcttgcrtttgctccatatgctgctttacactgctttccgggccataatgggtttcattccatagtttttatactaacatgaatgactcacatctgctccagtaccc

SEQ ID NO: 153435 - DNA, 201 bp, Homo sapiens
ggaagagtggtcttgtggctgactggagcatctggtgatatggaaggaacacagttttgaaatgaaaagtcttggattagaatctcagtagtgagttcacttttttttttttgaaatggagtctcactctgtcacccaggttggagcgcagtggcatgaactcggctcacttcagcctccgcctccccacttcaagcaatt

SEQ ID NO: 153436 - DNA, 201 bp, Homo sapiens
acagtggacatggaaatatactcattatgcaccaagtttaaaacaaagaggattcaaaattgtgtccatggctgggcgtggtggctcacgcctgtaatccyagcactttgggggccgaggccagtgggtcaccagaggtcaggagtttgagaccagcctggccaacatagtgaaaccctgtctctactaaaaatacgaaaa

SEQ ID NO: 153437 - DNA, 201 bp, Homo sapiens
aggccagcttgagattactcagttcccaattataatgtaaatttgagaagttctgatcaagtagagcatagggcacaaaatggtggaggtggaacagatcrtggaaattaactaggcaaacatccccatttcagcagttagtaaatactccagcctgggtagaaggtactcagctagttagtgctgagcttgaactagaag

SEQ ID NO: 153438 - DNA, 201 bp, Homo sapiens
ttggatgagactaacatttacattggcagactttgcgtaaagcaggctgccttccataatgtacgtaggcctcatccgatcagttgaaggtcttaaaagarcaaaactgacctccccaagcaagaaggaattctgccagcagaccaccttaggacttcaactgcagctcttccctgggtctccaggctactttgaggattt

SEQ ID NO: 153439 - DNA, 201 bp, Homo sapiens
attcatatcctctccctatttttctactgtacggtttatctttttgttgccaagtaaaagagctctttgcatgttattgatagttctttattagtcatatrtgttgcagatttttttctgattaatttgttaatactgttgactttatggtatatattgccatataactttttggctttgaaaaatacaatcgaatatgtc

SEQ ID NO: 153440 - DNA, 201 bp, Homo sapiens
tctttgatttagaaccagcactatgctaatcatgtgtggtctcaaagcaaggaaggaagaatatggttgtaggaaggcacttttaatgggacgcgattagwggatgggaatccaaagtaaagtggggacctggattcctgagttatcttcagggatcatctgccattgctgtgcctcttcacttagatgagttgtgatgtg

SEQ ID NO: 153441 - DNA, 201 bp, Homo sapiens
ccactgtgtttgaattccttgatgaacccatctgacttcagttggtctagaacagttagaccctttgctacctgtttcacactcctgtgtgttaatttttyggaggtgcaaatctcagtgatggtaccaggggttggaagatctgggaaatattataatagctgccactaaatatttgaagactatgaaagagaaagatta

SEQ ID NO: 153442 - DNA, 201 bp, Homo sapiens
attagtcatatgtgttgcagatttttttctgattaatttgttaatactgttgactttatggtatatattgccatataactttttggctttgaaaaatacartcgaatatgtcttttcaaaaaatagctcatgaatgccctgtcttgattaaaaagatcatcgtaagtcctagattgtacatagaatatcccaaatttccac

SEQ ID NO: 153443 - DNA, 201 bp, Homo sapiens
atattggatatgggcctaatctaggcaggataataaatatgtcttgctttaagctaccaagtttgaggtgatttgctatagtagtgatggaaaactaatayaggtaccatttctcagattttacaaatgagaaaactaggcacacagagagacttttcttgtcatatgtcttacagctactacgagaactttttataggga

SEQ ID NO: 153444 - DNA, 201 bp, Homo sapiens
catacagtattataatcatatgggaccactgtcgtatatgcagtctgtcattgactgaaatgttgttatgcatatgtggctgtatacatatgcacatgaamacacacacacacacacacacacacacacacacacacacacacaacattggttctgcttgtctagaggaccctgactaatatactgccttttatctggctt

SEQ ID NO: 153445 - DNA, 201 bp, Homo sapiens
aatgcatgaggctagaaagggaactgaacttaaagtggtggtgtttgtccaagatgatgattctcctgctctgtcagtgtgttgcagtctcagctcctatwccttgtaggagcactaccaccagccaggctgttggttccttgcagcaccagaaggaataccctgagctaccctagctccaggctacagaggactcagtag

SEQ ID NO: 153446 - DNA, 201 bp, Homo sapiens
caggtaccatttctcagattttacaaatgagaaaactaggcacacagagagacttttcttgtcatatgtcttacagctactacgagaactttttatagggraagtagttgatttgttgaatacaatatattcaataaccattctatgggaatagcctgggaaagattaggacatcaaatagctggccttggaaataaattt

SEQ ID NO: 153447 - DNA, 201 bp, Homo sapiens
acattctggtcccccatgtgccacttttcaatacaggatgtgagcctgttgatagtgggcctaagtgccttcactccagagcatctgagtttgatctctgrgttcactccagagcatctcctcctctgggggaggaagggaagagcaggaagagttgcaggacatcctggaagtggctctgtagcagaactgtgtccacag

SEQ ID NO: 153448 - DNA, 201 bp, Homo sapiens
cctttcccaggggacagttttttatggcattggcaattgaaatgggagctcagttcccagactttggagggtcctcaatggaacaaggagggatacaaagaaaaaaaaaaaaaaaagcaagtacacagttttagtgggagaaggcatccagccccatcactagaggcaacagctgtctgtaggactgtcctgttggtgacc

SEQ ID NO: 153449 - DNA, 201 bp, Homo sapiens
acaaatgagaaaactaggcacacagagagacttttcttgtcatatgtcttacagctactacgagaactttttatagggaaagtagttgatttgttgaatayaatatattcaataaccattctatgggaatagcctgggaaagattaggacatcaaatagctggccttggaaataaattttcttctctctgtagccagcctg

SEQ ID NO: 153450 - DNA, 201 bp, Homo sapiens
gaacttcctgcaaagaaatgatccaagaaagcccatctcatacaacaataagtaataaaaaagaaagtaggatcattggtagattagaagcaatgatattagggggaagaatgtcagcaagagccacgaaaattacccccaaataaggaacattcccaggaaaataatttcagggagcagatgaaaagtctaatcaagtat

SEQ ID NO: 153451 - DNA, 201 bp, Homo sapiens
aaacagccaaataaaaggattttttgagactggggcagcggggagtggtgtttcggctgcagaatccaaagagaaattgtgaataagcaggcccagagccscagcggtaaattattaacaacacactgaatgttcttgcagctttgttttgaatgaaaagtaaaaacacccccaaattccatcttcaagtaaaagcaccag

SEQ ID NO: 153452 - DNA, 201 bp, Homo sapiens
tggaaagaaggaaggctagaaaagtcctagcatgctggattggaattagaagtgtcagtatgtacatatatacatacatttttttcttaactccttcgtcygaaagcagtggaactccagtaacaatgagtgcatggtgagtactcagaccttggtttctttttttctttttcttttttttttgagacagggtcttgttct

SEQ ID NO: 153453 - DNA, 201 bp, Homo sapiens
ctggccttggaaataaattttcttctctctgtagccagcctgcactaccctcatggagggtcaaaagcttcaaaatttctttttcagtgatctagtgtcckgatgagtaggaagtgacttttttttaggacccaagaacatcttaggggcaagtaaaaagtagaaagtcaagacagggattgctcttattaaatggagatg

SEQ ID NO: 153454 - DNA, 201 bp, Homo sapiens
agtaacaatgagtgcatggtgagtactcagaccttggtttctttttttctttttcttttttttttgagacagggtcttgttctgtcactcagactggagtrcagtggtatgatcttggctcactgtaacctctgcctccaggttcaagtgattcttttgcctcagcctcccaaataggtgggattacaggcatgggccacc

SEQ ID NO: 153455 - DNA, 201 bp, Homo sapiens
ggacccaagaacatcttaggggcaagtaaaaagtagaaagtcaagacagggattgctcttattaaatggagatggagactggcatatgaccctttgggggwtgatttcttgtgtgtccagttattactgagtgggaaaaaagtggcttaatacagaacccacgctatgtcagatacttagcttgcaattgctcctttgtca

SEQ ID NO: 153456 - DNA, 201 bp, Homo sapiens
gctggaagccagagcagttccctgagtgtccagcccttgccttccctgggagcagcaggagggtccggtgcctgggaagtgaccaccagagggagtagccrcagtaggggctgagctacgtgagccacactctacccagaatgggggacccgtgttgggttgtaggaccgtacatgactaaggaagcccgtggggtgctct

SEQ ID NO: 153457 - DNA, 201 bp, Homo sapiens
tagttctaattgaatagaatcatgacattagggtttaatagaacccagtgatttccaagttccatcctcaaactaaccctttcatgtaaaaatgaagtgasttgcacaggtcacaaagcctgggatgagaaaccacgtcatctgagactcccagaacagggggttttctttaataagtcatcctgaatttagatttcttct

SEQ ID NO: 153458 - DNA, 201 bp, Homo sapiens
cctgtgtgaggtcacatggcagtcagtggtggagcaaggaccgggatgtgttgtgactgggactgtcacccatagcaggcctgcacttgggacagctgggwtataacatatgcagtttcctgggcaggaatgaactgcccagaaccggttctaccggagagcagaaggttccagaatgggaacccttatgggtgtcttttg

SEQ ID NO: 153459 - DNA, 201 bp, Homo sapiens
agctttctccaggctctctctcaagctcattacttcacatgtgcaacccccagttcttctgggaggtgggcagaacagatcgcagtcccgattttattgaygaaggaactaaggtagagcagcctgtgtgaggtcacatggcagtcagtggtggagcaaggaccgggatgtgttgtgactgggactgtcacccatagcagg

SEQ ID NO: 153460 - DNA, 201 bp, Homo sapiens
gcttctgggccctttgcttggggtctccagactgtcagtgctgagttcctggataagcagacagagcgcatgctgatagcagtagcctggcagggcacccrtaggcggggagtaaatgaattaagctcccatgaacttatccagaattttggcattagaaaatctacagagaacctctgttcatttcagcatactcataag

SEQ ID NO: 153461 - DNA, 201 bp, Homo sapiens
gggctctatgaaggccacaaaactcatctctggccctaccctcacgaggccatcccaagctccctgactcccagctgggctcctctccataagctaagtgsgggtctgttgtcttacaggactacacgcgggtggtgtgccctgtgatcgatatcattaacctggacaccttcacctacatcgagtctgcctcggagctca

SEQ ID NO: 153462 - DNA, 201 bp, Homo sapiens
tcctcaccccatgctgcattcccacaatagtcctgctggaagcagtgcctcctgagcttctgggccctttgcttggggtctccagactgtcagtgctgagytcctggataagcagacagagcgcatgctgatagcagtagcctggcagggcacccataggcggggagtaaatgaattaagctcccatgaacttatccagaa

SEQ ID NO: 153463 - DNA, 201 bp, Homo sapiens
ctttagacacgaatgtctgttcccagccactctgtaacaggcagaggtgagtccactggttttctgggaatggggaaaagcccaggtttgtaataggtacrgaagtctttgagcgtccgtggctaggctcagaaggagagaagctttatatccaaaaaacaatttctcgggttctctgcaataatctgcagtctgagctaa

SEQ ID NO: 153464 - DNA, 201 bp, Homo sapiens
acgtggccacatatattctgtatctgccagaaaatttagtatctgcatctttcaagctgaaacaagtgtcttccagttttgtattcctaggatctagaacrtaagtgcatttcccctattcacatagttctaattgaatagaatcatgacattagggtttaatagaacccagtgatttccaagttccatcctcaaactaac

SEQ ID NO: 153465 - DNA, 201 bp, Homo sapiens
catgtataaatgacttttggatagggtgggctcgattaaaatcaaattgattcaaatcatgatttgaatcactagtcaggaagagtcgattaaatcaatakttttccttcaaaactgcattcatttttgatataattttaatgcacagtcttcacaactctgacagagatagatgtggttttcatttttagaagttacata

SEQ ID NO: 153466 - DNA, 201 bp, Homo sapiens
  misc_feature (1)...(201): n = A,T,C or G
gggccaggtgaagccgtggggtcttacctagtactctgcagctggggaagcccttctagatatcaagcatctggcatagggatgcccacccagatgccctnggttctagccctccagatatgctttgtccctgaaggtctcacttgccctgtgcctttccttccccagatgcacactgctggtgtattgcacggaccttcc

SEQ ID NO: 153467 - DNA, 201 bp, Homo sapiens
tttcaaaaataagtcttggcccaactccacactttctgtcccagctaggctctgcatttgccttttgagaagattcttttttgcacacacacacacacacrcatacacacacgcacacgcacatgcacacacagctgccgtctgggtggtgcttggtaccggctaacacaggtcctgccagtgtccctagagaaacctctt

SEQ ID NO: 153468 - DNA, 201 bp, Homo sapiens
caaaaacaaacaaaagagaaatgagattgtttgtattaataacaaggataaatgcttgaggggatggatactccattctccatgatgtgattattacacaytgcatgcctggatcaaaacatttcctgtgccccataaatatatatatctactatgtgtccataagaattaaagattaaaaatttaaattaaaaattgttt

SEQ ID NO: 153469 - DNA, 201 bp, Homo sapiens
acttttataaagtaaaacgtaaaccaaagcagctctggtgaaatgattaatctgttcccaatgcatctgaattgcaaatctggattcctatccagttaccrgatttgattaaagagcacacctaattctgaaaaagcgaaaagaaggccactgtggatgtaaagaagttggattcatgtgggagacattcgaaatgtcact

SEQ ID NO: 153470 - DNA, 201 bp, Homo sapiens
cttcacaaatgacctccagtaaagggaagcacagtataagtgaccgcaagtagaagcaacacaaaaactctagaaagaaggaaatttggctgggtgcggtggcgcatgcctataatcccagcactttgggaggccaaggtggatggatctcgaggtcaggagattgagaccatcctggccaacatggcgaaaccctgtctc

SEQ ID NO: 153471 - DNA, 201 bp, Homo sapiens
gttcatcccattggttttgacttcctcttcttgggaagaagagagttattttgagaccttggccattctcacagcataacaaaattgcaggagggaaatgycctgctcagaggttgtgggccagagagctttggatccctgccactgcgagttgagggcaagggcataggaaggcagaggcaaaggggtgacaggggtttt

SEQ ID NO: 153472 - DNA, 201 bp, Homo sapiens
tgaggcaggagaatcgcttgaaccagggaggcagtggttgcagtgaatcgagattgtgccactgcactccagcctgggcgacagagcaagactctctctcaaaaaaaaaaaaaaaaaaaaaggaaggaaattatttgtgaggaagaaatatggaaaacatttgagcacctcctggttatagaagtagaggaactctactcc

SEQ ID NO: 153473 - DNA, 201 bp, Homo sapiens
gcatgccctactcattcatgcttgggcttagcaaccttcccatgcccacctcaccccttacatgcatttgatgtgatcttcactgttgagatggaaaccamtgtcgtcagcctgtagacatgcatgtctctgctgcaaccttgtcctttcatccctagtctcaggctaggtgacaaggcaagaacaaggtacccctgagtg

SEQ ID NO: 153474 - DNA, 201 bp, Homo sapiens
agagacaaggaccctcgaaaggggcttttccagggggtaggatgttgctgaagggccaaggaagatgaatgtgccaaattgtgcctcagtgctgagcatcmagtaggtgcccaataaatgtgagatcctcttccttgccctctgcctcctccatttgttcttctttcattctttctgcatatctattggccttttccctca

SEQ ID NO: 153475 - DNA, 201 bp, Homo sapiens
catgggccaccacacctggctaatttttgtatttttagtagagatggggttttaccatgttggccaggctggtctcgaactcctgacctcaagtggtctgsctgccttggcctcccaaagtgctgggattacagagatcttggtttctaaatagtgccctacactgcaagttaccagggggcctcagagaagtggctaact

SEQ ID NO: 153476 - DNA, 201 bp, Homo sapiens
tcaggtagtttaagagcctctcacaaacctcctgctcacaccttcctgagactcagtgccaaggcccacattccatgactgtccatcctgtcatcctcggcccctacccctaggctttttatcctctgccctttatttctaaccctacacagcagagaaggctcagagaggtggtagtgggtagaggaagaacaggaagct

SEQ ID NO: 153477 - DNA, 201 bp, Homo sapiens
ggcatgccctactcattcatgcttgggcttagcaaccttcccatgcccacctcaccccttacatgcatttgatgtgatcttcactgttgagatggaaaccwatgtcgtcagcctgtagacatgcatgtctctgctgcaaccttgtcctttcatccctagtctcaggctaggtgacaaggcaagaacaaggtacccctgagt

SEQ ID NO: 153478 - DNA, 201 bp, Homo sapiens
gtattctgaaacagagagacaaggaccctcgaaaggggcttttccagggggtaggatgttgctgaagggccaaggaagatgaatgtgccaaattgtgcctyagtgctgagcatcaagtaggtgcccaataaatgtgagatcctcttccttgccctctgcctcctccatttgttcttctttcattctttctgcatatctatt

SEQ ID NO: 153479 - DNA, 201 bp, Homo sapiens
aagattattatatcatgttgtaattacgaatgttaccactagaataaaaacacaaaccttcccagaagaatcacactggaagaacaatcacagaaagacgaaaaataatgccaagaaacccagaagacataatataaaatgagatctaggaataagcctatttgtcatatctaaatataaatgaatttaacttacttttta

SEQ ID NO: 153480 - DNA, 201 bp, Homo sapiens
caacacctgctggatgctacagaaataaagtgatgtatacatgatagataataataagaaatgtagcacttgtcatttgttaacggtgctattcattattyttcacaacagagtggcgtgatagattcaagttatcttcctaaagaggagagaagcaagtgcgatgtgtgcaagttgacatgccatgcctgtggtctgtgc

SEQ ID NO: 153481 - DNA, 201 bp, Homo sapiens
aggtagtttaagagcctctcacaaacctcctgctcacaccttcctgagactcagtgccaaggcccacattccatgactgtccatcctgtcatcctcggccyctacccctaggctttttatcctctgccctttatttctaaccctacacagcagagaaggctcagagaggtggtagtgggtagaggaagaacaggaagctgt

SEQ ID NO: 153482 - DNA, 201 bp, Homo sapiens
cctaaaggaaagtgatacaggaaggttgaaaataaaaggatgagtgaaggaacaccagccgaatgctttaaaatgttaatttaaaatagagatataaaaagtagtagttatgaacttgcattagacaaagtggaattcagattaaaatgcattaaataagataaaggaactatgtataaaaggtacatatcacaatgaaaa

SEQ ID NO: 153483 - DNA, 201 bp, Homo sapiens
agtggcgtgatagattcaagttatcttcctaaagaggagagaagcaagtgcgatgtgtgcaagttgacatgccatgcctgtggtctgtgctgtggatgtgyagtcccaggctccccagacactgcctctcaagggggcatggcctctcctctagatggctaatagaaccttagattcccaaggctggaagagactgaggac

SEQ ID NO: 153484 - DNA, 201 bp, Homo sapiens
ttgagcaggaatttcatcccaccagtcttgggccccctgaagcacccccttagctccacatacacatgtgctaagtgggaagacgttgttttgtagcagtrttacatggcaactggaggccctgtgtgggatgggattctgacttggggaaaggtagagtgttgggggaaaaaaaggccttattccagaactgggaggaga

SEQ ID NO: 153485 - DNA, 201 bp, Homo sapiens
gcatgctttgcaggcagaaccaacaggacatggggatgggttagttgtgtgtgggttcaagtgattagagtgagatttagaatgaggaagaaggaattgtmgagggtaactctcagattcctgacttgtgcagctatgtggctggtggtgccatttctttacttgtgaaagcctggaagaggcaccagttccaatgggcaa

SEQ ID NO: 153486 - DNA, 201 bp, Homo sapiens
tatacacaaaagaatgatcaaacatgaattaatcatctaagtcaagaagctatatcagaataaaatgaaatattgcagaaggaaagcagaaaaaaataaataaagtagagattaatgagttagaaaacaaagcagttaaaataaatttcaaagctggtttgggggtgtattagtccattttcatgctgctagtaaagacat

SEQ ID NO: 153487 - DNA, 201 bp, Homo sapiens
ttgatcactacattgtatattcactacactgtacatttgtttttctgtgaatacatgtaatgacagggaactcatcccctgaaacagctcagacagctgargatgattttttatattgactgaaatgggtctccagtcccaggttgactttttgaagccatggagagggagccttatctcctttcttcatgacaggtgttt

SEQ ID NO: 153488 - DNA, 201 bp, Homo sapiens
tacacaaaagaatgatcaaacatgaattaatcatctaagtcaagaagctatatcagaataaaatgaaatattgcagaaggaaagcagaaaaaaataaataaagtagagattaatgagttagaaaacaaagcagttaaaataaatttcaaagctggtttgggggtgtattagtccattttcatgctgctagtaaagacatac

SEQ ID NO: 153489 - DNA, 201 bp, Homo sapiens
gctgaagatgattttttatattgactgaaatgggtctccagtcccaggttgactttttgaagccatggagagggagccttatctcctttcttcatgacagstgtttggataattgaagacaccctgaaattattgaccattcttcccgtgacacatgtctgagtctcagcatgttcctggttgttcttcagaatatgatct

SEQ ID NO: 153490 - DNA, 201 bp, Homo sapiens
acacaaaagaatgatcaaacatgaattaatcatctaagtcaagaagctatatcagaataaaatgaaatattgcagaaggaaagcagaaaaaaataaataaagtagagattaatgagttagaaaacaaagcagttaaaataaatttcaaagctggtttgggggtgtattagtccattttcatgctgctagtaaagacatact

SEQ ID NO: 153491 - DNA, 201 bp, Homo sapiens
ccgaatgtctcatcaagctcaagttcagcagaagggaaagcatgcctaaatcctacttcaaacaatgagacgagctaatcagatgtcccactcgagttgasattgcaaatgctataggaaggagaagggtcatggtaggctaggatttcaaggagaaggaggggcttagagtttagatctacagagaaaattagaaagaca

SEQ ID NO: 153492 - DNA, 201 bp, Homo sapiens
ctatgactcaattatctccacttggtccctcccacaatgtgtggggattatgggaactaaaattcaagatgaaatttgggtgggaacacagccaaaccatrtcatggggaaaaaaacaacaataaaataaactactagttaatctaatcaagaaaatgtgggagcaagtgcagatgcatacaataaggaatgatatgtgga

SEQ ID NO: 153493 - DNA, 201 bp, Homo sapiens
ccctcttgctagaatggaggatgcagccctcctcttatctaaagccagcccctccgctaatcttcaggatcttatcccctcttgttattctcatgggcatygccctgccaaagctgtctcatccctttcaggcagccaaatcctctttcatctcagtacatcattcccattagtatatacacataatctagcatcacccat

SEQ ID NO: 153494 - DNA, 201 bp, Homo sapiens
ggtggattaaatgcatttttggcttatgatattttcaacttatgggtttatcaggacgtaactctaccataagtctaggagcatctgtatagttcaggtatttttttttttaacaggctaaaacacatccatctcaggctataagccagcattatgcttattgaggaaacactaaaggaattatcactaaagaacaaggat

SEQ ID NO: 153495 - DNA, 201 bp, Homo sapiens
tcatctcagtacatcattcccattagtatatacacataatctagcatcacccatcctaaacataaccccacccgactgcatattttcccttgtattagtcrcctttatccacaataattctgcacaaccaataaccacagcatcttagtggcatacaactagcatatgtttttgcttacaggtttgtgggttcgttagagt

SEQ ID NO: 153496 - DNA, 201 bp, Homo sapiens
actaacaatggtttcccttaagggttgtgacatgaactggggatgggcaagggtagaagggaaatgtttcattgcatgcctttttaattttgaaccacatraatgtattttttaaagggattattatattaataggattctgacatagtcactgaggtattcatgtcagaagatgatgcacatcctcttgtcctccacata

SEQ ID NO: 153497 - DNA, 201 bp, Homo sapiens
gttcttccatcttgtgtcccattttttctgtttctcttgatagccagacttctagaagcggttgccaacacatcatgtccccatcatgttccttacccttyaatctctcttcatcccactccagtggcctctgccgcaatcgctatacctgtgcccctcttttttctctgagtttgtttgggctgctataacagaatacca

SEQ ID NO: 153498 - DNA, 201 bp, Homo sapiens
ggagatgaagaaaagaggccatgagccaaggaatatgggtgaacctagaaggtggaaaagagaaggaaacagaatctctcctaagagcctctagaaggaaygcacccttgctgacaccttgattttagctcagggaggcccatattggatatgggcctaatctaggcaggataataaatatgtcttgctttaagctaccaa

SEQ ID NO: 153499 - DNA, 201 bp, Homo sapiens
ttctgcctggaatgctctttgccttcttctccccacccatccctttcttatggctggtgccttatcatcttctgggtcacatggtcaaatgttactatccyagagaagccttctaccattctatctaaaaggccacattcccccatgctgcctcattttttagtttggtcttgggtttttaccagttaccataattaagtg

SEQ ID NO: 153500 - DNA, 201 bp, Homo sapiens
taaaatatagatttatttgaagatattactaagttcacagggcctcttcatcttcatgcgttttcttagttaatgtatgtaaaagtatacccttttatggkttttttttttcacactgaaaggctgaaaaactgctaacatcattcatatgacttctatctttatgtttgtgaaaaccgagatccagagggatgaagttac

SEQ ID NO: 153501 - DNA, 201 bp, Homo sapiens
cttgctaatccaatgagcagtggactctcctctctccctgtgactctcctccagcatccccaaggagtcctccatccagaagggcaatatccgacagagayagaagtgcctggaatctcaaaggcagaacaaccaagaaaccccaaacctaaagttgagcccctgtgccaaggtcaaaggcgaagatgcaaagtcccaggt

SEQ ID NO: 153502 - DNA, 201 bp, Homo sapiens
  misc_feature (1)...(201): n = A,T,C or G
gcctaggttcccccaaggtggtagaaaattcagatttagtcattcttggagctccccagcccctcttagggccaggtgaagccgtggggtcttacctagtnctctgcagctggggaagcccttctagatatcaagcatctggcatagggatgcccacccagatgccctcggttctagccctccagatatgctttgtccctg

SEQ ID NO: 153503 - DNA, 201 bp, Homo sapiens
agtaagattttagtcatcttagtgagcctagatatcatttccttatgactagttctatgaggttagaatcatatctaatagtaattgtttggaaataatgktccagtaatctcagagctgaaatgtgaccaagtcatgtgctttcttttataaagttcccctgtcacctgcttgaagttttgttaggatagagagtttggg

SEQ ID NO: 153504 - DNA, 201 bp, Homo sapiens
  misc_feature (1)...(201): n = A,T,C or G
accacacttattttcagtatatcaactcaattcgtctccaagcctaggttcccccaaggtggtagaaaattcagatttagtcattcttggagctccccagnccctcttagggccaggtgaagccgtggggtcttacctagtactctgcagctggggaagcccttctagatatcaagcatctggcatagggatgcccaccca

SEQ ID NO: 153505 - DNA, 201 bp, Homo sapiens
aaaaggtataattgagagctgacaaatgaagtaatataagcataattatacttaataaatggtagacacttagaaagaggatgttattgactaaaatcagktggtggaagtgagacagtagcattgccagagtaaattgtgcctaggggctatgtaatgtgtgtgtgtgtgtgtgtttccttcttctctatacgcagctgc

SEQ ID NO: 153506 - DNA, 201 bp, Homo sapiens
  misc_feature (1)...(201): n = A,T,C or G
ttgtgttcatgcagctaccaggagccactgtgcactggctcaggcatgcaagaaataccacacttattttcagtatatcaactcaattcgtctccaagccnaggttcccccaaggtggtagaaaattcagatttagtcattcttggagctccccagcccctcttagggccaggtgaagccgtggggtcttacctagtactc

SEQ ID NO: 153507 - DNA, 201 bp, Homo sapiens
  misc_feature (1)...(201): n = A,T,C or G
gaaagggtagagagtgggaagcagagcccgacttggggttgtgttcatgcagctaccaggagccactgtgcactggctcaggcatgcaagaaataccacanttattttcagtatatcaactcaattcgtctccaagcctaggttcccccaaggtggtagaaaattcagatttagtcattcttggagctccccagcccctct

SEQ ID NO: 153508 - DNA, 201 bp, Homo sapiens
tggggaggggtaagtgtggagagtttgcaggttctgatcaggcagggccttgggggccacaggaaagagtgaggacagcattctgagtgcagtgggagccrctggagggattctgagccagaatgggagagacgggaacgaatgtcatcttgagacagagtctctctctgttgcccaggctggagtgcagtggcgcaatcc

SEQ ID NO: 153509 - DNA, 201 bp, Homo sapiens
gaaggatgccagtgtgtgggaaccagggttaagccagaccaaaagtccagggcagtacttgcagaccacggcaaagaacttggcctttattctgtgagtgrgatccaaccgtgtcttagaagagccattccagcagcagtgtgaaaaattaaatacaggtctaaagacataaatccccagcgcttatctgttggtcggctc

SEQ ID NO: 153510 - DNA, 201 bp, Homo sapiens
cttgtcatatgtcttacagctactacgagaactttttatagggaaagtagttgatttgttgaatacaatatattcaataaccattctatgggaatagcctgggaaagattaggacatcaaatagctggccttggaaataaattttcttctctctgtagccagcctgcactaccctcatggagggtcaaaagcttcaaaatt

SEQ ID NO: 153511 - DNA, 201 bp, Homo sapiens
gggtttttgttttgtgtgtgtgggtggtgttgtttttggattttttttcatactgtgttccattttgttggtttgtttggttttggttttggccccacccmcacaggggcatgtttgcatcattgccatgcagttcctttgcatcttgcttgacctacacaccctgattcagggcaagttcattcttaacccttttttcac

SEQ ID NO: 153512 - DNA, 201 bp, Homo sapiens
acagctcgttaatgattattgattcactacattcctttcaccaagtgccttgaagggaaaagccagaccatgatcctcatacaacaaaaactcagttctayatccaagaacgtgtggtgcttggctccctgcttccacccccctctgatccccacagctaaaggcacttaaggccatctgcaggttctgacccaacccatg

SEQ ID NO: 153513 - DNA, 201 bp, Homo sapiens
agcttcaaaatttctttttcagtgatctagtgtcctgatgagtaggaagtgacttttttttaggacccaagaacatcttaggggcaagtaaaaagtagaargtcaagacagggattgctcttattaaatggagatggagactggcatatgaccctttgggggatgatttcttgtgtgtccagttattactgagtgggaaaa

SEQ ID NO: 153514 - DNA, 201 bp, Homo sapiens
tgtttttatttagaattacatattagggagtactataatttcttttctgcttaaggctcccaatgatccttacctggccttgtttgccctccccagttccytaggaagctctatgcttcttgagcaggaatttcatcccaccagtcttgggccccctgaagcacccccttagctccacatacacatgtgctaagtgggaag

SEQ ID NO: 153515 - DNA, 201 bp, Homo sapiens
cccccctctgatccccacagctaaaggcacttaaggccatctgcaggttctgacccaacccatgccatgtcagtcaggctgggcacatggcagggacagamttgtcaaccattccagtttgcctggctctttctagtgatagcactggatgccccatatcctgggaagccctccaatcctgggcaaactggaccactgaat

SEQ ID NO: 153516 - DNA, 201 bp, Homo sapiens
tgatgagtcatgagggtgggaccctcatgaatagattagtgcctttataaaagagatctgtattagtcagggttctctaaagggacagaactaataggagatatatatatatatatatatgaaggggagtttattaaggaaaattggctcacatgatcacaaggtgaggtcccacaatagactgtctgcaagctgaggagc

SEQ ID NO: 153517 - DNA, 201 bp, Homo sapiens
tcataggtgctgtcatccctgagcttggatgtgggaatatcacactcctgctgtccgtacttgaacggcacctcagcaggttaaaatgcttctggtcacayttggactcagccccgtgggtgttgcttcattatccgctgacatggaaagctgccgcggggaagtttgaggtcagctgaacatttccccttctgtaggtga

SEQ ID NO: 153518 - DNA, 201 bp, Homo sapiens
tacagatgctttcaaccttgtcctcacccaccttagagctcttggtctctggtctcttccacctccttccacctgtatctggttggttgacaagcctgccrgtgttttctctgctccctgtcttccatccagccctgtcttgtcattctccagtcagtttcttttaatccacatctagacaattccagtggcctccttagc

SEQ ID NO: 153519 - DNA, 201 bp, Homo sapiens
aatgatttccaagtttagactgaatcagtctcctttggaaaacattcttgctatgtgtagagaagaaatagctgtaatgacaaacttgatatttatcttcrttattgccatgaatccatatacttgacttctgccggctattggtatgaccttcacgaggccttatccttatctttcatgattaactgagctttaccattt

SEQ ID NO: 153520 - DNA, 201 bp, Homo sapiens
gatgagtcatgagggtgggaccctcatgaatagattagtgcctttataaaagagatctgtattagtcagggttctctaaagggacagaactaataggagatatatatatatatatatatgaaggggagtttattaaggaaaattggctcacatgatcacaaggtgaggtcccacaatagactgtctgcaagctgaggagca

SEQ ID NO: 153521 - DNA, 201 bp, Homo sapiens
aaaaccctgtgaaataggcattattctccccattttacaggtgatggaactgaggttcaaacaggttaagcagcttcctccaaatcacataaacagtaagyagtggagccagtgtcagagcataggtcttgagaaaatttaggttcatctgttttcattccttaagtgcagctttcatgaaatcttacagggacagaaact

SEQ ID NO: 153522 - DNA, 201 bp, Homo sapiens
accctgttggttctgtttctctggagaactcacatgcacttgccctctcattgccacctttctttcatgttacagatgctttcaaccttgtcctcacccascttagagctcttggtctctggtctcttccacctccttccacctgtatctggttggttgacaagcctgccagtgttttctctgctccctgtcttccatcca

SEQ ID NO: 153523 - DNA, 201 bp, Homo sapiens
ccggctattggtatgaccttcacgaggccttatccttatctttcatgattaactgagctttaccatttctgaaacagattctcttcactgggatccactgkgttttattttcggaaagtattctcacagcaacaatgcatttggaatgagatattgtcttagataaggatgtgttagggaggggcatgcttctcttccatc

SEQ ID NO: 153524 - DNA, 201 bp, Homo sapiens
acacacccaggaacaatactttggatccttcaatccaatcaggttgactgacactaagtattaaccatcacaagaccccagagggctcccttatcccttcyaccctgttaggcaacagcgagaagatggctgtctgtgaatcagagagcaaaccctcaccacacactgaatctgctggtgctttgatctaggacttttcag

SEQ ID NO: 153525 - DNA, 201 bp, Homo sapiens
cttcctttctctggggttcttgttgaattaattatggcaggaaagactggtgtaagggtacaacccacacagaactttgcactctatatacatggtaaacscaggggtgctttagggatcattgactcctaccctcttattctacgatgaggaaatagggagagttcaagtgacttgctcaaggtcacactgctagtgggt

SEQ ID NO: 153526 - DNA, 201 bp, Homo sapiens
catgattaactgagctttaccatttctgaaacagattctcttcactgggatccactgtgttttattttcggaaagtattctcacagcaacaatgcatttgraatgagatattgtcttagataaggatgtgttagggaggggcatgcttctcttccatcttatcagcctcagaatgtttgggaggaaccccttacatcttga

SEQ ID NO: 153527 - DNA, 201 bp, Homo sapiens
gacactaagtattaaccatcacaagaccccagagggctcccttatcccttccaccctgttaggcaacagcgagaagatggctgtctgtgaatcagagagcraaccctcaccacacactgaatctgctggtgctttgatctaggacttttcaggttccagaactgtgataaataaatttgttatttgtaagccacctagttt

SEQ ID NO: 153528 - DNA, 201 bp, Homo sapiens
ggtttgtctgatgttttctccagattagactgaagctacgtgtttttggcaaaaatactacagacgtggtgttgagcccttgtcagtacatccttataggrgatatgtgatattgatatgttttattactggtaatgttaatcttgattgcttggctagggtggtactggccagcagtctccatcataaaattactctttt

SEQ ID NO: 153529 - DNA, 201 bp, Homo sapiens
tccactggagccagtctcttctcaagatcacctttgcctctttccattttgtcctgcattttcacctctggcacatagcaatgtcctcagcttctgacttragctgttttcttccgacttgctctagcctcttggcctggcctggtctcactctgtcattaagttaggctccacaactctattttgtaacctattatacat

SEQ ID NO: 153530 - DNA, 201 bp, Homo sapiens
gggatggaggagtggacacccacccttgccttacaagttagtccatggtgtcccagttgccaggcaatggagttctctggatcagctctgtttcctctgcatgtaacttggatgagtgttgaaggtggcacacagaaccttgtgaaactgtcagactgagactctaaggtccattcagccagtttgactgaggctggggag

SEQ ID NO: 153531 - DNA, 201 bp, Homo sapiens
ttaattgtaatagtctcttccaatctgtgatgtctttccttgtcttacgtgaccttgacacgctgaagagttctagtcagttgttttgtagaatgtctctscattgggtttgtctgatgttttctccagattagactgaagctacgtgtttttggcaaaaatactacagacgtggtgttgagcccttgtcagtacatcctt

SEQ ID NO: 153532 - DNA, 201 bp, Homo sapiens
ctgacttaagctgttttcttccgacttgctctagcctcttggcctggcctggtctcactctgtcattaagttaggctccacaactctattttgtaacctaytatacatttctctgtggacacaacatgataaatcttgatcaggtgcctcagccaacccataatagccttttaacctagactgtgactgaaaagctatgca

SEQ ID NO: 153533 - DNA, 201 bp, Homo sapiens
aggtggcacacagaaccttgtgaaactgtcagactgagactctaaggtccattcagccagtttgactgaggctggggaggcctttgagaacaagctccctytgctgtctttcaggtataaacaaggtctgcatggtagctttggaactagcacgccagctgcttggtatttctgggatcccttgcacgaaatatgggctcc

SEQ ID NO: 153534 - DNA, 201 bp, Homo sapiens
gctgttttcttccgacttgctctagcctcttggcctggcctggtctcactctgtcattaagttaggctccacaactctattttgtaacctattatacattyctctgtggacacaacatgataaatcttgatcaggtgcctcagccaacccataatagccttttaacctagactgtgactgaaaagctatgcacacgcaatg

SEQ ID NO: 153535 - DNA, 201 bp, Homo sapiens
tagagttccacagatctaagctgggctccaagttgtgggttgtgtcccaagcctgtgccacacatcgctcattctccttcatccagaggctacccaagacrtgttctcacaaagaaaggaaggaccacgagacgccaagcccaatcaggcaagcacatttcaaagtcctactcagggcatatctgcacatcccattggcca

SEQ ID NO: 153536 - DNA, 201 bp, Homo sapiens
cggatgctgcctgcttgcctgcttttcagcctgcagtctcaccatgcaatctagcttctgaatgtttgccttgccctgtcctgagcatgcggtgtggcccyggggcctgagagctccctgattctggtacttctgtagggctagcctcaagacagctcacatcagccaggcacagcacaaggtgaatgggattgatttgat

SEQ ID NO: 153537 - DNA, 201 bp, Homo sapiens
agccactgcactcggccacacactttacctttaatcttcacaccagctgtgggtgagccaggttagatgaagcgactgaggttcagggaggttaaatgacktgcattaggctgctcagctaccaaggagcagagagacccattattccagtcttgtttgacatgtttgcacccatgcttcccttagcagtgtttccaagaa

SEQ ID NO: 153538 - DNA, 201 bp, Homo sapiens
gagtccttgagctgtggattttcccctcttgtttgtctacactgtttcttcttcactcattcattaactgattcctaccttatttattgaggagctactayggacaagacaaagtaaaacaaattttaaaaccccactcatttttattttagcaagggaggatagccaataaataataagcgtagttaacaaggtaaatca

SEQ ID NO: 153539 - DNA, 201 bp, Homo sapiens
agcagtgtttccaagaatataccccactccatggcccaggcaagctgagcatcacctcagggcactaaagtcttttataaacatctggagctagacacatyaactgccgtgctttacatgccatgctggctgcctggtccaaagaaggctcttcctctggccctgagattctttgttccttgaatcagccatcatcagttc

SEQ ID NO: 153540 - DNA, 201 bp, Homo sapiens
agctgacctttgttggacttgtacagggctgcacttagagtctaagaatggaatggacaccacttagttctagcagggatgttagatttaacaaataaaawtagagtacacccagttgaactggaatttcaacaaaacaacaaataattttagtatgacttgtgatatttgggacacactaaaaaattattcattacatat

SEQ ID NO: 153541 - DNA, 201 bp, Homo sapiens
tgccatgctggctgcctggtccaaagaaggctcttcctctggccctgagattctttgttccttgaatcagccatcatcagttcagtacatgttcccagtayctgtcctgacccatgtcttcaagattccagcattacctctttgagcttcagccaacacgctaaaccacgtatgtagtatgttgtcttgaccaggcttacc

SEQ ID NO: 153542 - DNA, 201 bp, Homo sapiens
tccagcattacctctttgagcttcagccaacacgctaaaccacgtatgtagtatgttgtcttgaccaggcttacctctcttagcctcagtttccacctctytgagaccgtttccttatcaataaaatggggcataataatcggttgtgttgaggataaaaggataaaattggaggaagtatcccacacagtggccagtccc

SEQ ID NO: 153543 - DNA, 201 bp, Homo sapiens
tgctctttagacacgaatgtctgttcccagccactctgtaacaggcagaggtgagtccactggttttctgggaatggggaaaagcccaggtttgtaatagktacggaagtctttgagcgtccgtggctaggctcagaaggagagaagctttatatccaaaaaacaatttctcgggttctctgcaataatctgcagtctgag

SEQ ID NO: 153544 - DNA, 201 bp, Homo sapiens
ttgaattccccatgcctgacagatctgctaccctatagtttttttttttctgttgagatggagtcttactctattgcccaggctggagtgcagtggtgcartcttggcttgctgcaacctccacctcccatgctcaagtgatcatcccacctcagcctcctgagtagttgggactacaggtgtgcaccactaatttttgta

SEQ ID NO: 153545 - DNA, 201 bp, Homo sapiens
tgctcagggaattctctgccaaacaaccagatgcagcctctgctcttgtgggacttgggactgtcagagttgtttgtagtgtgctttagagagatttcttyccctaactcacgaatgtgtctgtagaacttcccagagtcgcaaagcccagcatgggggaagggtcttcttacagtgggctttgaacttcctgcctgcctc

SEQ ID NO: 153546 - DNA, 201 bp, Homo sapiens
acagtgctttcctgtgaacgtagctggtttgaattccccatgcctgacagatctgctaccctatagtttttttttttctgttgagatggagtcttactctrttgcccaggctggagtgcagtggtgcaatcttggcttgctgcaacctccacctcccatgctcaagtgatcatcccacctcagcctcctgagtagttggga

SEQ ID NO: 153547 - DNA, 201 bp, Homo sapiens
taaagctccccgcaagcctcgatatccagggtttttattgggtgtcagtaaatagacatggctaactaccctcatggtctccatgccttttcagaggtcargttgagttggtaccacacggcccaaggtcttctccataaaccacattgttagcatagattatctggtgtagcccacagccccaggtaaacaaagacagtc

SEQ ID NO: 153548 - DNA, 201 bp, Homo sapiens
agaggccctcagctggcttggtctggagaagagacagacaatgaccaactggatgagggcttttatgtatatcagaggtgtaagaagaccagttggctccrttcacccctaaaacccggagggaccttatactgaatcaatagcatgaaggattacagttagccagtagcagtatttctcacctgcttgggtttgagccct

SEQ ID NO: 153549 - DNA, 201 bp, Homo sapiens
gaaagagacattggggatgtacacacagagaaaaaaccacatgaggactcagccagaagacggccatctgcgggccaagtggagaggcctcaggagaaacyaaccctgttcgcacgttgatcttggactgccagcgtccagagctgtgagaaaataaacttctgttgtttaagccccgtggtctatggtgttttgtgatgg

SEQ ID NO: 153550 - DNA, 201 bp, Homo sapiens
cttggagcaaagggtcccagtctttaaaccctttacttcattaatctatctaagaacctggatcccctgcaggtaatgattaaaatcttgtgttttctcastaggaaatttaaatatttataaaaatgggtactctgttatatgtattatttacagtaaatttagctgtcattaagatcatagtggagttaggagaattca

SEQ ID NO: 153551 - DNA, 201 bp, Homo sapiens
tcttttctgcctggaaagccttaatgcttaatgtgctgagagtgactctttgacaggactggagacagcaaggctggggggagccatttagtgagtgagaygtggatgtcacacccatgcagatctaaggttctgaaggaagggacctcagagagaatctggtccttggaaactgaagagagctgatggtgttgaaaaatc

SEQ ID NO: 153552 - DNA, 201 bp, Homo sapiens
accaactcatttccatccttccatccccagaagccctcacttttccagatgtcatttgtcaaataccttaaaaataataaaataaaaaaagcagtccccascccttctggattcttgatatgatttggctttgtgtccccacccaaatctcatctcaaattttaatccccacgtgtcaagggagagacctgatgggacgtg

SEQ ID NO: 153553 - DNA, 201 bp, Homo sapiens
tattgggagacacacttgagattcaaaaacacaaatagcttgggataaatggataaatgttgaagatgtaacatccacacagtaaacaaaagagaaccatrtgaatattgcacagaatagactttaagacaaaatttttactagaaacaagaacattttataattataaaagggtcaatctatcaagaagacataacaaat

SEQ ID NO: 153554 - DNA, 201 bp, Homo sapiens
ctaggctctgcagttctggaaagaaggcttcctttcaaatgaaaattaaagcaaaacccactcgaaataaactctgataccaacaaattctcaacccaagytggaatttaaattaagacgacattatttcaagttgaaatagagtgtcagcagaagggctgagtggaggcatcgcagttctgtcctctctgagagttgcct

SEQ ID NO: 153555 - DNA, 201 bp, Homo sapiens
gtagtagatttctttgtttttttctttttcttttttttgagatggagtcatactctgtcaccaggctggagtgcagtggtgcaatctcagctcactgcaayctccgcctcccaagttcaagtgattcttctgcctcagcctccctactagctggaactacaggcgtgtgccatcacgcccagctaatttttgtatatttag

SEQ ID NO: 153556 - DNA, 201 bp, Homo sapiens
acagtgtggctggggcaggtgagttaggtgtcaggtactaggctctgcagttctggaaagaaggcttcctttcaaatgaaaattaaagcaaaacccactcraaataaactctgataccaacaaattctcaacccaagttggaatttaaattaagacgacattatttcaagttgaaatagagtgtcagcagaagggctgagt

SEQ ID NO: 153557 - DNA, 201 bp, Homo sapiens
tgatcccgtgtaatctacaatcccatgaccctggttctactttcattttttccaagcctgaggaggccctggtccctgtttgctaacagagaccagacagwgcttattgctcctgcaagcacagtgcctgtccctgggtagggccagcctctctgcatcctttaaacgtcaaattactcaaacttccaaattttccagttt

SEQ ID NO: 153558 - DNA, 201 bp, Homo sapiens
tccggcctcccatgccagtgctctttctgctgcaccaggactcaacaaacttttccagaaagggctagattgtaaatactatgggctttgtgggccagatsgtctgcagagtgattgcaactactcagctctgctgttgtagtgagaaagtggtcatagagagcatgcaagcaaatgggcttggctatgtttccataaaac

SEQ ID NO: 153559 - DNA, 201 bp, Homo sapiens
actctggttggagttggcttgatttgcagattttggacttgtcagaccccagaatagcatgagccactttgtttaaatctctctttctgtatctgtacacscataccctgttggttctgtttctctggagaactcacatgcacttgccctctcattgccacctttctttcatgttacagatgctttcaaccttgtcctcac

SEQ ID NO: 153560 - DNA, 201 bp, Homo sapiens
ggcatggaaagccacctcagtcatggagctaccatgggcagagccagggaccctattttacagcagacctaatgtcctgagcagaccctgctttcctgagygagtgcaccctctgccggcacaaaaccggctcagaagaggatgctcaaagtctgcaaagtccggggatgtcgtgaagacagcctgagtctctcggtgacc

SEQ ID NO: 153561 - DNA, 201 bp, Homo sapiens
aaaataatctgaattagaaagcagggccagatccccagctcctctcctgggggagtctgtgaaccctgccatggcttttgaatattccaccccagagaccyagaatcgtagactcaccatctgtttggggaagtgagtctggacatgcccgtgccctctaccactggctgcaggcccctgccacttgcctgtatttatcct

SEQ ID NO: 153562 - DNA, 201 bp, Homo sapiens
tgccattcctctctgcagcacagagcactgagactgactatgggaatctcctgtttggccccctgcccttgcctatgtgacaaataaggggaccaaggccrgggaggctgggtgatggggagagaggaccctgggctggcgggaggtaatggcagggcagatactatggtcactgagggatgatgatgccaagactgctgg

SEQ ID NO: 153563 - DNA, 201 bp, Homo sapiens
cgcctgaagcccaggattcctgcacagcttggttttcatgccatctgattttacctcctgtgcctacatcctacaccatgcctccccatcccagctttctraagtggtcttattcattgtcagacacccaggaaccagtttttgaagaccttcattgcttgagcccttgtttcatttctaatgtttgcagttttgtcactc

SEQ ID NO: 153564 - DNA, 201 bp, Homo sapiens
taaatatattttatcttccttgtgattttcttagtagcattttctcttctctagcttactagttgtaagactacagtatataatacatataacacatacayatgattacaaaatatgtgctaatgggctgtttatgttattggtaagtcttctggtgaacaataggctatcggtagttaagttttgtcaaaagttatgtgc

SEQ ID NO: 153565 - DNA, 201 bp, Homo sapiens
acagattttcttgtgcctctgccacccctgacacagcaagaccaacccctcctcttcctcctcctcctcagcctactgtatgtgacgatgaggatgaagaycttgatgatgatcctcttccgcttactgaatagtaaatatattttatcttccttgtgattttcttagtagcattttctcttctctagcttactagttgta

SEQ ID NO: 153566 - DNA, 201 bp, Homo sapiens
tcttttctattttttttttttttgatgatggagttttgctcttgttgcacaggctggagtgcaatggcgtgatttcagctcactgcaacctccgcttcccrgattcaagccatcctcctgccacagcctcccgagtagctggattacaggtgcctgccaccatgcccggctaattttggtattttttaaaagagacggggt

SEQ ID NO: 153567 - DNA, 201 bp, Homo sapiens
cctgcaggccccaaggtcaggagcagccacctctgagagcaccgctctggacacaaagctagttctttcctgaaggaaggaggttgccactctggcctttstatcagcaggagcccttatcgctgggaatacagagccatctgatcccctgcatcctggacaatgctggtttcaagtacaaagccttttctgcgtgccatt

SEQ ID NO: 153568 - DNA, 201 bp, Homo sapiens
tctcagtcataagtgggagttgaaaaatgagaacacgtggacacagggaggggaacatcacacactggggtctgtcgggaggtgggggtcaaagggagggagagcattaggacaaatacctaatgcatgcggtgcttaaaacttagatgatgggttaataggtgcagcaaaccaccatggcacatgtatacctatgtaaca

SEQ ID NO: 153569 - DNA, 201 bp, Homo sapiens
tgggatttgaatgcccagatgaagagaacaaccaccccggctgtcttcttcctaatgatcctgctcttgcaacccgatctgcatgcatgctaggcaaggasagagcctgaaacatctatagaactagtagggccactctctcttgacgagctctctccaaagaggttaactgtctcttttctctgtttgcactatggtttg

SEQ ID NO: 153570 - DNA, 201 bp, Homo sapiens
gaggctgctgatgtcttcctggatattttgtctgcagttccagtaagctcctgggcccatggtggtgtttttgtgacatggcctaaacaataaagttggtrctctgctctaagatcccaagcagaaacatgacttttttactcttgtccttttcccccgagcatggcaatgttaaaggacactgcatttttaaaaactatg

SEQ ID NO: 153571 - DNA, 201 bp, Homo sapiens
cagaacactgcccaccctctccagctggtagtcttgctaatccaatgagcagtggactctcctctctccctgtgactctcctccagcatccccaaggagtyctccatccagaagggcaatatccgacagagacagaagtgcctggaatctcaaaggcagaacaaccaagaaaccccaaacctaaagttgagcccctgtgcc

SEQ ID NO: 153572 - DNA, 201 bp, Homo sapiens
gattcccgaacactgtgttcctcttagatgtattgctgtattactggaaagatacaactgtgtctctggggatgctgtttaatggtggaaggaactgcaaratggatagctgtcttttctcttttgagtcaaagtggaatgtgaggccaaggggaagaagagaatctttgccggggtacatggggatacaagtttgagaca

SEQ ID NO: 153573 - DNA, 201 bp, Homo sapiens
cacggcccaaggtcttctccataaaccacattgttagcatagattatctggtgtagcccacagccccaggtaaacaaagacagtcttctaggcaggacatyccaaggggttagaggttacctcccaggagctgggcaagggccaaacatatctttgggcatggttaatcctttattgcataagagtcacagaaggacctag

SEQ ID NO: 153574 - DNA, 201 bp, Homo sapiens
ttggtccttgtttttcaaggtggctgggatgagcccttgggcgcctcaggtgcctgtatcacccactcctccctaccaaagagggcatcttcctacaggtrggttgactgtgtgtccccaggagtgtgaggtgccagctgcttttctgcccaagcaggccctgggtactgtgggtaggatgatctgccagagctcctgggc

SEQ ID NO: 153575 - DNA, 201 bp, Homo sapiens
ctctaaacagtttaaaggtggtgtagggtgagtagcactctgcaacaggaggtcacgtggagagccagggattgctactcctctgggatgtagagtgttgytctagtctacatgattgcgactggccatcagcatcacatccatgtcctagaccggggaaggggaaagagaggggcggaggacagctcattttcattttaa

SEQ ID NO: 153576 - DNA, 201 bp, Homo sapiens
tgtttgagttcagtgtaaaatgggcaggtttcagaaggaggtggtgttcaggtgagggacacacccagaggtctctcagcatctctgttcctgaggacagracagcctaggcaagacccagatggtgtggccatgtctaggtttcttccagaggaacaatgggacctacgtggtcccctttctaacaccaaaactgatctc

SEQ ID NO: 153577 - DNA, 201 bp, Homo sapiens
cccgccggcccctagctggtccttaaacccacagcatgtctcaggcctttgcagttgttttccctccaggaagctgcatgattaccctatttagaggaggyttctcttgcatcgttccccaaatgctgttcccccccctctttattccccaaatttaatttttgtcatagtagagattatttatcgactgatatgtccatc

SEQ ID NO: 153578 - DNA, 201 bp, Homo sapiens
ggtcataggaggggcgtgactgtcttgcagaaatctccttccgagtgtggatgtgcgggggcagcctagagatcgtcccctgcagccgagtggggcacgtsttccggaagaagcacccctacgttttccctgatggaaatgccaacacgtatataaagtaagtgcccaggggctcagcgcgggtgggcagcagcacaggca

SEQ ID NO: 153579 - DNA, 201 bp, Homo sapiens
gctgaggggagggagggtattttaaagatgggaaattcaccgcatgtatgctaatgggagtggtccagcagagaggggagctttgacaatgtaaggaaagrggcacagttacaggaaagagttccttgaagaggtgagaggaggtgagatccaaatcacacaatgggtgatgaaggccatccatgctgtggtcttaaccta

SEQ ID NO: 153580 - DNA, 201 bp, Homo sapiens
gaaagcaggagtgagtggcatctggaggcagaggagggaagtgtcgcaggggagggatgaggctactgtgccaaccatggatgctgctagatcaagcaggrtgagagtcaggaatgccgattggatttaaccatgtgcaagtcatgatgattctcaggaaggcaatttcagtagaatcactgggataaaagcctaatgggg

SEQ ID NO: 153581 - DNA, 201 bp, Homo sapiens
tctaagcaatggcattaaagaacatctagaaaataaccctctgctttctcaggaaagatgtcagtatgtccacggcaggattgatgaaagaattcttgaarcagtgaagaaaacggaccaagcttcagggaagttggcataagaagtgagaaaaaaaaataaatccaaaccagaaaacgtgtccgtctccagaaacaatag

SEQ ID NO: 153582 - DNA, 201 bp, Homo sapiens
ttcagtgtttagctggaggaggagagtgatgaggggctgccagagaggtgggagggaaagcaggagtgagtggcatctggaggcagaggagggaagtgtcrcaggggagggatgaggctactgtgccaaccatggatgctgctagatcaagcaggatgagagtcaggaatgccgattggatttaaccatgtgcaagtcatg

SEQ ID NO: 153583 - DNA, 201 bp, Homo sapiens
gccagtctaagtctcaaaacctcaaaagtagggaagccaacggtgcaagcttcagtctatggccaaagtcctgagagctccaggcgaaccactggtgtaastccaagagttcaaaagctgaagaacttagagtctgatgtttgagggcaggaagcatccagcacggcagaaagatgaagggtggaagactcatgaagttgg

SEQ ID NO: 153584 - DNA, 201 bp, Homo sapiens
tttagaccttaaagtggaagtgcagtgtaagttgttggatatgagagggttggaggcaaagacataaatttgggagtcacctcggagtctaaatccttggractaaatgaggtcaggtagggtgctggatgcacaactggaacgcttcagtgtttagctggaggaggagagtgatgaggggctgccagagaggtgggaggg

SEQ ID NO: 153585 - DNA, 201 bp, Homo sapiens
gtcccagttgacctggactgttctatttttcccctgaagttttgcattccaaggccagtcatttgatcaagtgaaatgacaaggctgtggttttatatagygcctttaattgaagcgtttaaagtgctattcaaaggtcagaacttccaaagggataagtgcccatgccatttatgttctttaaaatattaggataaatga

SEQ ID NO: 153586 - DNA, 201 bp, Homo sapiens
gagagaagcaagtgcgatgtgtgcaagttgacatgccatgcctgtggtctgtgctgtggatgtgcagtcccaggctccccagacactgcctctcaaggggrcatggcctctcctctagatggctaatagaaccttagattcccaaggctggaagagactgaggacactggccaggttgtcaagatctgagtcttgttccac

SEQ ID NO: 153587 - DNA, 201 bp, Homo sapiens
tgtgaatcatactccacaagaccagctctacattcagtgccacttgtctttattttcttggagttaaatgcgattccaagctcccattcccccatgtgggsatggggattcctctactcacggcttcacagcgattctggaggcttcctccatgccaggtaatgtgggaagagcttgtagtcttccaggtatcaccatcac

SEQ ID NO: 153588 - DNA, 201 bp, Homo sapiens
atgtccattgctcttaaaggggcaattcagtgaaatttgaacttggcattccctttctcttacccttctggcctaaatgagcgttgctgtgtatgttctgyattcctcaccaggcttgattctggcttttctcgaccacctgttttcaattttaatttgtgtagctgctcttagagaaattacctgtggggaagtcatctt

SEQ ID NO: 153589 - DNA, 201 bp, Homo sapiens
aattaaaagaccactttgtcatataatttcccataaatattgggttctagttctgggaactccattttccatggacctctttgtcttttactatggcaatrtcatactttttaccagaattttcttattaaatccagtagttacttctcaattagtctattgaatttcctaagtataaaaatcacatcattatcaaaataa

SEQ ID NO: 153590 - DNA, 201 bp, Homo sapiens
caaaatgaagaaaaaagggcaagctgcacaatagtgtgtattctatactaacttatatataaaaagtggaggcattgtagaattagaataaattcagaacmacatgggtttgaactatgcagattcacttatatacagattttcttgtgcctctgccacccctgacacagcaagaccaacccctcctcttcctcctcctcc

SEQ ID NO: 153591 - DNA, 201 bp, Homo sapiens
tgggttctagttctgggaactccattttccatggacctctttgtcttttactatggcaatgtcatactttttaccagaattttcttattaaatccagtagytacttctcaattagtctattgaatttcctaagtataaaaatcacatcattatcaaaataagtaaaatttgtctctcctttttgagatttatcttgactat

SEQ ID NO: 153592 - DNA, 201 bp, Homo sapiens
agtcctagcatgctggattggaattagaagtgtcagtatgtacatatatacatacatttttttcttaactccttcgtctgaaagcagtggaactccagtarcaatgagtgcatggtgagtactcagaccttggtttctttttttctttttcttttttttttgagacagggtcttgttctgtcactcagactggagtgcagt

SEQ ID NO: 153593 - DNA, 201 bp, Homo sapiens
ctctaagacagtcaatgtgaaggctttattttggtgattgagcaaggaagcggtggaagccccagtaaatggtgtcccagtccctgaacccacagaggcaktcacagcagggcagcagagaaggggcctctgatccctgcccatgatctccaggccctcggcttgcctggtattagtcaaggttcttcaaagaaacagagc

SEQ ID NO: 153594 - DNA, 201 bp, Homo sapiens
tttcttgttttgaatcatccttgcattcctggaatgaactctatttagttacagtttatttttatttatgctactggcttgtatttgttgacatttatttrgaattttaacatctattttcataagttggatttgtttatagttttttttggtactttggttttagatttaggtgtgtattgctttgataaaatgaattag

SEQ ID NO: 153595 - DNA, 201 bp, Homo sapiens
cactgtttgtgtgctacagagtcttctgaaaaagggcatatgatttcaaaggattattttatcaaaggattgtttttatcctcattcttttggaaaaaccraatgcccaatgctccaaccagtgttacctttcttgcattttgctcttgaagatctgggccttccttgaaggagtagcatagggaagagagaacaaaccct

SEQ ID NO: 153596 - DNA, 201 bp, Homo sapiens
ccaggccctcggcttgcctggtattagtcaaggttcttcaaagaaacagagccagtatgagagagagagctggactgattttaaggcattagctcatgcarttgtggagactggcaactctgaaatccaaaggtccggctagcaggctggaagggcagataagagttggtgtagtcttgagcttgagatccgtagggcagg

SEQ ID NO: 153597 - DNA, 201 bp, Homo sapiens
taagttggatttgtttatagttttttttggtactttggttttagatttaggtgtgtattgctttgataaaatgaattagggaagttttttagcagatgagratagtttaaataactttcgccgatttattctttaatgatcatataaaactcagctgtgaaattatctagttctattgacttcttcaatggtagcccttta

SEQ ID NO: 153598 - DNA, 201 bp, Homo sapiens
tgtgtattgctttgataaaatgaattagggaagttttttagcagatgagaatagtttaaataactttcgccgatttattctttaatgatcatataaaactmagctgtgaaattatctagttctattgacttcttcaatggtagccctttagtcaccttctctatctctgccatgatacgtctaattactcaccaaattctg

SEQ ID NO: 153599 - DNA, 201 bp, Homo sapiens
atgatgtaagatgttttggtctctaaataactgaatggaagaaagcttccctattgtccagaacacctacccaagactactgtgtaagcaggaacttctgyttgttagcatagcctatcttccactattgcatatggtaacaggtcttttcacgttttctactacttctttggtcagtttgggtagtatccattttgttag

SEQ ID NO: 153600 - DNA, 201 bp, Homo sapiens
ttgtcctttcccagtaggttgtacagataccacttacttttcctagcaaggttgtgaggcaacatcacagagtattgccaaagggtaaagctccccgcaarcctcgatatccagggtttttattgggtgtcagtaaatagacatggctaactaccctcatggtctccatgccttttcagaggtcaagttgagttggtacca

SEQ ID NO: 153601 - DNA, 201 bp, Homo sapiens
tgcttgtctgttggccagctctgggccagcacttggtgacagtgtgtctgctccccaggtgcccagcgctgtactaggagcaccagacacatctaactacrtgccaggcactattctatatgtcacatgtgtccactcagtcactcctcacattcctgtaagggaggctattatcccattttatagaaagacagaggcctg

SEQ ID NO: 153602 - DNA, 201 bp, Homo sapiens
agtcatcaccttgttccctggcgccccagtggttcttgtcctttgcaagaatggagatgaccgacaggtaagtgctcagcaggtccctgggatgtggccarctccgtaatgtgactgcctgttgagggcttagtctgatgagcaggaaaagagagaaattgttagaagaggaagagttgataagagaggtcaggagaggga

SEQ ID NO: 153603 - DNA, 201 bp, Homo sapiens
tagggtgagcaaaactgaagaaacgtacctcctgggcctgctttgattcagagaagcagaggaggtgcatttatacaaaggatcatccagaagacacctawctgcaagaaacaatgtttttggcagcaaataaaagaggcttccttctttccttccttaacatgtttgttgagatataacatacaggaaagcacacaaata

SEQ ID NO: 153604 - DNA, 201 bp, Homo sapiens
agatactcaattttctttgtctccagaatctgattttaatgcactaaggaaacggataacttaagggaatcttgcagtgagtacttttataaagtaaaacrtaaaccaaagcagctctggtgaaatgattaatctgttcccaatgcatctgaattgcaaatctggattcctatccagttaccggatttgattaaagagcac

SEQ ID NO: 153605 - DNA, 201 bp, Homo sapiens
gattgtttgagcccaggagtttgtggctgcagcaagcaatgattgcactactgaagtccagctgagtgacaaagcaagaccctgtctccaatatataaatraataaatagatctgagggttggggttcatcccattggttttgacttcctcttcttgggaagaagagagttattttgagaccttggccattctcacagcat

SEQ ID NO: 153606 - DNA, 201 bp, Homo sapiens
ggcagagaggagggactcagagaatctgatccaaaaggaacaaaggctgcagcctctgcagtgggctgagcgagaatgatggggagacggctacaggaaaygagaagcgaagtgtgagaatccacagcaaaagccgccacagagcatatgcatcggacttcacagcttcctcctgcttccagcttgcatttgctccatatg

SEQ ID NO: 153607 - DNA, 201 bp, Homo sapiens
gagtggcgtgatagattcaagttatcttcctaaagaggagagaagcaagtgcgatgtgtgcaagttgacatgccatgcctgtggtctgtgctgtggatgtkcagtcccaggctccccagacactgcctctcaagggggcatggcctctcctctagatggctaatagaaccttagattcccaaggctggaagagactgagga

SEQ ID NO: 153608 - DNA, 201 bp, Homo sapiens
acaaaagaatgatcaaacatgaattaatcatctaagtcaagaagctatatcagaataaaatgaaatattgcagaaggaaagcagaaaaaaataaataaagwagagattaatgagttagaaaacaaagcagttaaaataaatttcaaagctggtttgggggtgtattagtccattttcatgctgctagtaaagacatactca

SEQ ID NO: 153609 - DNA, 201 bp, Homo sapiens
cacaaaagaatgatcaaacatgaattaatcatctaagtcaagaagctatatcagaataaaatgaaatattgcagaaggaaagcagaaaaaaataaataaartagagattaatgagttagaaaacaaagcagttaaaataaatttcaaagctggtttgggggtgtattagtccattttcatgctgctagtaaagacatactc

SEQ ID NO: 153610 - DNA, 201 bp, Homo sapiens
ctttggagatggctgaggagcctcgggtcatctttctgggtagtcttgagcagaaatcattcctgctttgggcatttagtaagtgtgagcttgcatgggayaccatagaatgagctgaagacacagagcccacccctgagaaggagagtccaagacagatgacaccaaaaaagacagacagaggccacatctgtagtagag

SEQ ID NO: 153611 - DNA, 201 bp, Homo sapiens
attcactgagcaggcaggtacttggggataccctgagcaggactagtttctacacttaacttcttctaccatttagaggcagaaactaacattttgcaagrgctaggcatatgtggtggtaggtgatgaagaactgagcctgtttccaaggagcccagctcacggtgtccagttccgggctttgcacctagcccagtgtgt

SEQ ID NO: 153612 - DNA, 201 bp, Homo sapiens
attcagcactttagcttccagggagaggtctttccagccttaggcttcttggctgagtcttgcaaccccaccaccattaggactgtctgctaataaagaartagaaccctgtcttccttttgctgaactacctgatcaggctcctcatggggagaagtggctggtgcacatttaggcatttctgtgtcccctattcaaaag

SEQ ID NO: 153613 - DNA, 201 bp, Homo sapiens
aaataaaataagtcagtcttcatgtgagattggctctgtggaggaccagatggtcggatgctggtggagatgatgaggtgtgtgaagatgacggtggtggrggcagtgagatgatgttggttgcagacgtcatgacgtggcctctgtgacagtgaatgtagaggtggcagggtctgtttaataggctggctgactattcct

SEQ ID NO: 153614 - DNA, 201 bp, Homo sapiens
ggtgtgggaaaaacatatacctggtggtccttgcaggtgatggggttatccctgactctgcacatccccttctgggctcagggcaaatggtttcatggccytcgggtctggcccttttcactcagagtggtaggagctggctgttgggcatttggaagcgtctcacctgctcagcagctttggattaaaatgttttaaatc

SEQ ID NO: 153615 - DNA, 201 bp, Homo sapiens
tacaaataaaataagtcagtcttcatgtgagattggctctgtggaggaccagatggtcggatgctggtggagatgatgaggtgtgtgaagatgacggtggkggaggcagtgagatgatgttggttgcagacgtcatgacgtggcctctgtgacagtgaatgtagaggtggcagggtctgtttaataggctggctgactatt

SEQ ID NO: 153616 - DNA, 201 bp, Homo sapiens
gccagcttcggtgcccaccccacagctcctggtgtgtgtcattccctttgtggttgtggctgggaagaagactccatcccagcctgtccctttaggcatayaactcatttgcagagctagtgaaaatgcagattccaggacctgcttgcagagtttatgattcagtacatcctgggtatggctcaggaatccatgtcttga

SEQ ID NO: 153617 - DNA, 201 bp, Homo sapiens
gcggaggacagctcattttcattttaaaggttgtgacctgtgcgttgtacatataacttccactaaccttccattagttatgtggttctatatgattacarggcaggctgagaaatataactacgttgtattgtattacaaataaaataagtcagtcttcatgtgagattggctctgtggaggaccagatggtcggatgct

SEQ ID NO: 153618 - DNA, 201 bp, Homo sapiens
ccagcttcggtgcccaccccacagctcctggtgtgtgtcattccctttgtggttgtggctgggaagaagactccatcccagcctgtccctttaggcatacractcatttgcagagctagtgaaaatgcagattccaggacctgcttgcagagtttatgattcagtacatcctgggtatggctcaggaatccatgtcttgaa

SEQ ID NO: 153619 - DNA, 201 bp, Homo sapiens
cattatagctagtggggatatgggttaatctgttgtaacaaatatacaaaatatacaaatatacaaaaaaattatagtagtcaatcaagatagaagttgcygcttttctctctaaacagtttaaaggtggtgtagggtgagtagcactctgcaacaggaggtcacgtggagagccagggattgctactcctctgggatgta

SEQ ID NO: 153620 - DNA, 201 bp, Homo sapiens
gaagactccatcccagcctgtccctttaggcatacaactcatttgcagagctagtgaaaatgcagattccaggacctgcttgcagagtttatgattcagtrcatcctgggtatggctcaggaatccatgtcttgaaaatgctctcctgggccatcccaatgtgcagctacatttgagaacccttgctcgagtgcacctcct

SEQ ID NO: 153621 - DNA, 201 bp, Homo sapiens
tgtgcttttctgaaaactcaaaatggtcaggctactggagctttatccaaatgaagaaggcacaagttctgttctccagctgctcacagtctagaagacaygaaaataataatcaaataattctgtatgatatgcacaatgctgtcatagaaatgatgttctgtgcctgcgcagagcagagaagaactcactcgttcccaa

SEQ ID NO: 153622 - DNA, 201 bp, Homo sapiens
caaccacctgctgtcaagccctggtctatgttctcctagaggagcatgcactcccctgctaatcactgctgttaggcaacctgtgttcttcagggttctgyggggaaggtgatctatgctgtgagattacaccccacacaggaggttctacttccagccaagccacttcttggcatttgagcccacatgaggagttcaact

SEQ ID NO: 153623 - DNA, 201 bp, Homo sapiens
gactgattaaagagaggacactgaggaattaaccaacagatgctgaaaatacaaaggccatcatgaatggctaaaaactgcagcatcacccctcagagagsaatcgtcctgtatttagcataacaccacattatttggttgtttgtgctgaggagttgaaagctatcatgtgccaggaaaatactcagcatggagcagtaa

SEQ ID NO: 153624 - DNA, 201 bp, Homo sapiens
agtatacacagtgtacaaggccacagaatagacctgagtcacaattggaacagtcctggttcagaggtattacaacatgtgacgaggacgctggagtccakcaggcctggttcaaattccctttgctagttggagtgagttcctcagcctttctgtgcctcagtttcctcattagtgaatctgtaaaccagtagcagcctc

SEQ ID NO: 153625 - DNA, 201 bp, Homo sapiens
atgttttatgtttgtgtttctctttgcctttctggccctggaaattagggaaaatggaacatgatgaaaatgacccattcattttctctttgtggctctgrcctctgcaatgtgtgctggaagtgcaggacttggaaggaaatcctaatttctatttaggtcaacatagctttttgtttagtaatagatgtgcatgaatca

SEQ ID NO: 153626 - DNA, 201 bp, Homo sapiens; identical to SEQ ID NO: 28619

SEQ ID NO: 153627 - DNA, 201 bp, Homo sapiens
gttctccctcccaacaactcttccatctttctcattcccaaccctgggcttaggcgaggatgaaagttctgggatgtcagtggctgggcggtatcttgagygagtggatcctcaaccagccatccccaccagttccccagggatcatgggcacaaaggaccactggagaaaaatcagtgttttgtaggttagggctttgcc

SEQ ID NO: 153628 - DNA, 201 bp, Homo sapiens
tggcctaatagatacttatagaacagtccacccagtaagagcagactatatcttctaaagtgtacgtggaacattctctaggataggccatatgttagacygtaacacaacctgaatacgtttaaaaggattgaaatcatacaaagtagattttccaaccacaatggagtgaacttggaaatcaatgatgaaaggatattt

SEQ ID NO: 153629 - DNA, 201 bp, Homo sapiens
ttctaagttcagggttacatgtgcagatttgttatgtaggtaaagttgtgtcataggagtttattgaacacattattttgtcactcaggtattaagcctastacccattagttatttttccttatcctgtcccccctcccaccatccaccctacagtagtccccagtgtctattgttaccctctagctgtccatgtgttct

SEQ ID NO: 153630 - DNA, 201 bp, Homo sapiens
ccaataaaatggagtagaaatgatgggttctatttataggccacactataaaacctcccatgcacgatctgccatattcttctccttctgccagataatgygggtgacaagactctagggatggcagggccacatgatgtaagatgttttggtctctaaataactgaatggaagaaagcttccctattgtccagaacacct

SEQ ID NO: 153631 - DNA, 201 bp, Homo sapiens
ttactaaacacagactttaaaatctgctgcttaaaatatgttcaaataactaaaggaagtagtgtctagaaaaccaaaagtgagtatgagaacattgtctsattaattaaagaataccagtaagtaggtaaaattattgatttaaaggaactaaatagacattctggagttgaaaagtataataactgaaatgaaaagttc

SEQ ID NO: 153632 - DNA, 201 bp, Homo sapiens
actttatgttttatgtttgtgtttctctttgcctttctggccctggaaattagggaaaatggaacatgatgaaaatgacccattcattttctctttgtggstctggcctctgcaatgtgtgctggaagtgcaggacttggaaggaaatcctaatttctatttaggtcaacatagctttttgtttagtaatagatgtgcatg

SEQ ID NO: 153633 - DNA, 201 bp, Homo sapiens
gctgattttgaggctatgcaaataggaagtgaagaatgaggcagagttataaacagctagtgtagaaagtgtgctccaacacacacacagagcctctcagygaagtctgggagacgtattgattcaaaacatttaaggaaatccctgttcaatcaaggcttcagtgactacactgattagttcaggagagtcactaaacca

SEQ ID NO: 153634 - DNA, 201 bp, Homo sapiens
aggaagggatgaggcattgtctacaaagccatctgtgctagcactggtgatggagtgatggagggatgtggaggagggaaagatgtgcctacgccacctgyacctgggatccatagattgtcacctccatggggacagagagctctctcccaggaagttggtcccattcccactttatgttttatgtttgtgtttctcttt

SEQ ID NO: 153635 - DNA, 201 bp, Homo sapiens
ccccttctcatatcttcctcacccacctgtactcttcctgcccctgggtcctatcttaatcctctcctttatctttttgccttctagcatctgcagtgagygcttcataaaaatgtgccaatggctgtatgaaggtccctgttcttattgatgttttattattgacacgtgctgcactgaattgtaagctttgtgaggtct

SEQ ID NO: 153636 - DNA, 201 bp, Homo sapiens
aaatgaaatctgtgattctaaaagccagtagcaagatcactgccctgagtgctgagataactgacgttctggaaaggtcattggccaagagcttttctcckctcattctttcttcctcacacacattggctctgagttggggctggtggtgaggaaaggaagggatgaggcattgtctacaaagccatctgtgctagcact

SEQ ID NO: 153637 - DNA, 201 bp, Homo sapiens
agcaagggaggatagccaataaataataagcgtagttaacaaggtaaatcagaaaaaggtaaatgctaagtaagaaagaaaaagagcatggactgggggamtactgaggcaggagcaggctacagcattacaggggggtgagtgagaaagtgagatttgagcacttacttaaggaggtgagggactcagtcttgcagatat

SEQ ID NO: 153638 - DNA, 201 bp, Homo sapiens
taagagcagtatatgtttatgtgaatgaacgaattaatctgcatgtgaaatcccagcaaaattgacatgaagcaaaaatttcattccttacagtgtatcartgttgcccatgaaatgagattaaaaggaatttttgattttatagttgtcatacttttcatactgcttgcatttttctcttctaaagggttcagtttgaac

SEQ ID NO: 153639 - DNA, 201 bp, Homo sapiens
ctgccctcctcattgactctggctttctaaatgcagaaggatcactcctcacctgaaactcttcacatgctgtgggcacacagctcctgtcaccaccccarccctgaagtcaaggccgcccccatcaggccatggcctgtgccgactgtgctgtgaggattcaggcctcatcattgctgctttctctattcaggatgccct

SEQ ID NO: 153640 - DNA, 201 bp, Homo sapiens
ttggctggagtccttgagctgtggattttcccctcttgtttgtctacactgtttcttcttcactcattcattaactgattcctaccttatttattgaggarctactatggacaagacaaagtaaaacaaattttaaaaccccactcatttttattttagcaagggaggatagccaataaataataagcgtagttaacaagg

SEQ ID NO: 153641 - DNA, 201 bp, Homo sapiens
ccttgtccatttcttcatgcaggccttctccaccctctcatgccctccacgcagtgcaggtcaccagacctctcctagcctgaggtgcacatgtaggctgrtttgacatgtcttctcacttatctgaaagccccggacctattaaacacagcagcagcagagatgcttgctcctggagttggcacatcacgtagaaggcag

SEQ ID NO: 153642 - DNA, 201 bp, Homo sapiens
agtaggtaacaggccctcaatatatacttgttgaatgaattaaataatttatggaaaagcactaaaaaaaaaatcacctgatccatcccttccttgtaatrtggaggatcctagagagttttaatatcttgtctggagccccacagccagaccatggcccctgcagggaccagatccattgcttcccatcttcaagcacag

SEQ ID NO: 153643 - DNA, 201 bp, Homo sapiens
ggtgggaggtaggtgatgtgttttaaataacgaattcactgtaaggaacagacaacttccagctggggtgagtctgagatgattgtccagaggagttctgmtgttcatatgttaggttggtgcaaaagtaattgcgttttttgccattacctttagtggaaaaaaccacaattacattttaatacaatagagaactattag

SEQ ID NO: 153644 - DNA, 201 bp, Homo sapiens
aaaaggagataacagagagagagagatcaattactggataagctcaccatggtgcccagatgaacatgcacactggccagcagcccctcttaacctgccaygtgggccaagcccctgcactgctgtctgtggagcctgccctgggccaccctggtcaggtttcccgagtgcaggaggtgcattctactcagtaatgggatg

SEQ ID NO: 153645 - DNA, 201 bp, Homo sapiens
atcacaggacattaataaaatcaattattggataaaaatctctggtctccaaagcttcattttatgctattagcaggagaatgctgtttttaaaaaggagrtaacagagagagagagatcaattactggataagctcaccatggtgcccagatgaacatgcacactggccagcagcccctcttaacctgccatgtgggcca

SEQ ID NO: 153646 - DNA, 201 bp, Homo sapiens
tggaaaaattaagatccagagatgaaagggctctatgaaggccacaaaactcatctctggccctaccctcacgaggccatcccaagctccctgactcccakctgggctcctctccataagctaagtgcgggtctgttgtcttacaggactacacgcgggtggtgtgccctgtgatcgatatcattaacctggacaccttca

SEQ ID NO: 153647 - DNA, 201 bp, Homo sapiens
ggagagtgaaggaaaagctcttagttgcttgtcgagaaagctcagcctgcaacctgcactataattaccttagcttggcccttaccaccaggactgtggawggaagggctagggggtgggcaggatgctcccagcacccagagctccagctctaagatagggctcaccccatttaatgtccaaaaatgtgatgggagcaag

SEQ ID NO: 153648 - DNA, 201 bp, Homo sapiens
acaatcacaggaaaaaccctggagcttgttctcattttaggtaactggaaaatatactggcccttctcgagaggaacagaaatgggaagaaaatgagagtyttcttccctcaatggggttttctttccccaaatgggaaatgggtgtttcagactcaaggggccgaagaatttgagagtgatctccccactagaactgatc

SEQ ID NO: 153649 - DNA, 201 bp, Homo sapiens
ttccggccctggtacaggacagggcagctcaggaccgctgggcactgcctggccaatctgcctcattcttcctgccccgctgaaactctgggtgaggaggkagagggcctcggggaggctgggctagaaccccatcctaaattacaacattcagagctgtcgtggactttgaagaccttatcaaccagctactccattcca

SEQ ID NO: 153650 - DNA, 201 bp, Homo sapiens
acagatacaccctgtcctggaaaaagtataggtcaattttatgtcatggagcaaactgggtctatataaaactgggcagtgccaccaggctcagccagagwcctgtcccttggctcccagcatggaaggagaggggtctgtgacccatgttgtcctgccactcactgggctgttttcttggatctctaacttgtgtctact

SEQ ID NO: 153651 - DNA, 201 bp, Homo sapiens; identical to SEQ ID NO: 28651

SEQ ID NO: 153652 - DNA, 201 bp, Homo sapiens; identical to SEQ ID NO: 28652

SEQ ID NO: 153653 - DNA, 201 bp, Homo sapiens; identical to SEQ ID NO: 28653

SEQ ID NO: 153654 - DNA, 201 bp, Homo sapiens
tgaggagccggcacctgctctcacacgatgccatcaaagccctgcaggccacacttcttgccggccacctggcacccgaatctcagtgcttcctgcacgcycctccctggaggaggggcaagtagctaggtcagccaggtgtttggggcagggacaggtcccagtccttttcccctcctgctgccatactcaccctgggag

SEQ ID NO: 153655 - DNA, 201 bp, Homo sapiens
gcagggcgaggcccgggggccttacgtgtcatggagcacaatggtacggttgccattggagttgttgatgatgcagcaggagctgggggtgtcccccttgstctgccaggccacctgagacacgtccacgccccgccgcctgaagtcggccaccaggaagcttagggtggaggccgggccaggaaaagggcaaggagacac

SEQ ID NO: 153656 - DNA, 201 bp, Homo sapiens
tagggagggtcagaactcctgggaacatctctgtccctggagaccccacagtgactctgcttccacaggtgatattgatagtggacaaagtgctcgagacscaggacctgaatggggatgggctcatgacccctgctgagctcatcaacttcccgggagtagccctcaggcacgtggagcccggagagccccttgctccat

SEQ ID NO: 153657 - DNA, 201 bp, Homo sapiens
cagccatcctcccagctccagggcggactcctggagtccaggctcatcctgtaccttctaaagccccttcctggcttccccggctcaccctttcctcacaygaccatacaagcccctcaaggcttcctctgctgactggaaccccaagtgcttggccacatctttgctgacaaacacctgtgggcagtggaagagaagctg

SEQ ID NO: 153658 - DNA, 201 bp, Homo sapiens
cacctgaggtcaggtgttcaagaccagcctgaccaacatggtgaaaccccgtctctactaaaaatacaaaaattagccaggtgtggcggcagttgcctgtmatcccagctactcgggaggctgaggcaggagaatcacttgaaccagggaggtggaggttgcagtgagctgagatcatgccactgcactccagcttgggtg

SEQ ID NO: 153659 - DNA, 201 bp, Homo sapiens
tatgatcatgccaggagttccagcctgggcaacagagtgagaccctgtctctaaataaataaataaataaatttgcttcacctcattctgcaagataattktgctgagaatagaattctagaatatcaattttctcccctctctgaacacattaaaatactatattactgtatttgggcatcattgttgatgtcaagaaat

SEQ ID NO: 153660 - DNA, 201 bp, Homo sapiens
tgagccaactgattggtgggttgtagcagggcgaggcccgggggccttacgtgtcatggagcacaatggtacggttgccattggagttgttgatgatgcascaggagctgggggtgtcccccttgctctgccaggccacctgagacacgtccacgccccgccgcctgaagtcggccaccaggaagcttagggtggaggccg

SEQ ID NO: 153661 - DNA, 201 bp, Homo sapiens
gatttgttcttcagtgggtttttaataaacacaaacagtccatttctctttttgcctgtgtttaagtcttggtctttttgtgactccctgcgtttcttacytggcctttttcttaaactttctgcgctcctttccatctgtaagatgaatgggctgaaggaggtcagatatgcttgcgctgtacttctctgggcaccttgg

SEQ ID NO: 153662 - DNA, 201 bp, Homo sapiens
actgattggtgggttgtagcagggcgaggcccgggggccttacgtgtcatggagcacaatggtacggttgccattggagttgttgatgatgcagcaggagmtgggggtgtcccccttgctctgccaggccacctgagacacgtccacgccccgccgcctgaagtcggccaccaggaagcttagggtggaggccgggccagg

SEQ ID NO: 153663 - DNA, 201 bp, Homo sapiens
cttggcacctagtggggagcaagggaatggggcgtggggtggggatgcgcccccagctctgcttccgccacagcaggcctgcctttatgtgctttatatayaagagctggagtgacatttattttgagcatagttccatgggatccctgctgtctgtctgtgagtcctccctgagcaggagtcctgtctttggggctgcag

SEQ ID NO: 153664 - DNA, 201 bp, Homo sapiens
gagccgggagcagggtgaggggctgggctgatggggccagggacgggaggctctgggcagccagatctgggactgacctcggctgccccattgactcctgycttctccacctcccccggcacctcttctaatccagcttctcttctctttagttctcctctacctctttgccctccatgactatgaccagagtggacagct

SEQ ID NO: 153665 - DNA, 201 bp, Homo sapiens; identical to SEQ ID NO: 28656

SEQ ID NO: 153666 - DNA, 201 bp, Homo sapiens
agtgcaactggagcatctgagccgggagcagggtgaggggctgggctgatggggccagggacgggaggctctgggcagccagatctgggactgacctcggstgccccattgactcctgccttctccacctcccccggcacctcttctaatccagcttctcttctctttagttctcctctacctctttgccctccatgacta

SEQ ID NO: 153667 - DNA, 201 bp, Homo sapiens
aggagtcctgtctttggggctgcaggtagaagcaggcagaaaatgcgcttgtgtctaacccagcccatctgtgacacggtggcagacgcctctttcccccracccctgattctcttccttgttccagttccaggaaggatgttacctttgacgatgacagtgttaatcctgctgctgctccccacgggtcaggctgcccca

SEQ ID NO: 153668 - DNA, 201 bp, Homo sapiens; identical to SEQ ID NO: 28659

SEQ ID NO: 153669 - DNA, 201 bp, Homo sapiens
gtgtgttagggagggtcagaactcctgggaacatctctgtccctggagaccccacagtgactctgcttccacaggtgatattgatagtggacaaagtgctygagacgcaggacctgaatggggatgggctcatgacccctgctgagctcatcaacttcccgggagtagccctcaggcacgtggagcccggagagccccttg

SEQ ID NO: 153670 - DNA, 201 bp, Homo sapiens
cggagggtcattgtgaatgtgtgagtgcacgtgtgtgacataactttattaaattacatggcaactgttaacagttatggtggctttcatgtgtttattarggtaattatgttcatgcacattatagttatagaaaatggttagggacatttttattggacaggcagtggttcaataactattttatttctctcacaaaag

SEQ ID NO: 153671 - DNA, 201 bp, Homo sapiens
agggatgcaagggtgtgttagggagggtcagaactcctgggaacatctctgtccctggagaccccacagtgactctgcttccacaggtgatattgatagtrgacaaagtgctcgagacgcaggacctgaatggggatgggctcatgacccctgctgagctcatcaacttcccgggagtagccctcaggcacgtggagcccg

SEQ ID NO: 153672 - DNA, 201 bp, Homo sapiens
tcacgccactgcactccagcctggtgacagagcgagactctgtctcaaaaaaaaaaaaaaaaaaaaaaaggcacctgctagtatgtaagaacacgtgaagkctggatgatgagttttgacagctctgagggatttaaatgactccagtgcctcctgtcggcctgggtcctagcagtaaacagatagggtggagaaagcaat

SEQ ID NO: 153673 - DNA, 201 bp, Homo sapiens
attaaaccctcaccacagccctgccagaggtgctctcgtcagccccgcattacagatggagaacctgaagcacagaaaagccgcacagctagtgggctgcrgagcccagatttgaacacaggcagcctgaggtcagggcccataccccccaactttgggccgtaccacctattccatagcaattctgtgtttttcttgcgt

SEQ ID NO: 153674 - DNA, 201 bp, Homo sapiens
acagaaaagccgcacagctagtgggctgcggagcccagatttgaacacaggcagcctgaggtcagggcccataccccccaactttgggccgtaccacctaktccatagcaattctgtgtttttcttgcgttaacatttgtatcttttcctacttacatatttgcaagctttagggggaaaaagaaaaagtaattcgacctt

SEQ ID NO: 153675 - DNA, 201 bp, Homo sapiens
tgaggtcagggcccataccccccaactttgggccgtaccacctattccatagcaattctgtgtttttcttgcgttaacatttgtatcttttcctacttacrtatttgcaagctttagggggaaaaagaaaaagtaattcgaccttaagagatcagcttagtgataagagagtgcctcacatatggcaggtgttcaataaat

SEQ ID NO: 153676 - DNA, 201 bp, Homo sapiens
tgtgtagggagaggcgcgagcgcgaaccggggctgcgcgcggcgcttgccggccagcgcgagttccgggtgggcgtgggctcgggggcccagcactcggarctgccggccggccccgccggccccgggcagtgaggggcttagcacctgggccagcagctgctgtgctctacttctcgccgggcctcagctgcctccccgc

SEQ ID NO: 153677 - DNA, 201 bp, Homo sapiens
gatttattgtgtttgcagtttgtacttgagtttagacctatttcaagaagtctgcgcctcttttgatttgttcttcagtgggtttttaataaacacaaacmgtccatttctctttttgcctgtgtttaagtcttggtctttttgtgactccctgcgtttcttacctggcctttttcttaaactttctgcgctcctttccat

SEQ ID NO: 153678 - DNA, 201 bp, Homo sapiens
cacactgggattacaggtgtgaaccacaacacctggctctctttgttcctaattgaaattgccaaaggtttgtctgttttactaggcttttgtttctttgwatatatatattttttattttactagtctttttaaagaaaccacccttgtttggctctgttgcttctctttattgtgtttttaatttctgctattatttca

SEQ ID NO: 153679 - DNA, 201 bp, Homo sapiens
ttgatgatgaccgtggcgatggggacggagcctgtggtctgaaagactgtgtagcgtaggtccacagaatagcggcggaggtcatccaggacaaaactgcyagggcggagtaacccgaagggggtgcagttcgacaagggttttggggactggagggtagctggcagggccactagggaccctgaaaggcaggggtgcaag

SEQ ID NO: 153680 - DNA, 201 bp, Homo sapiens
aattaaatggcagatttgaatccaggtctgtctcactctaaagccctttacattatatgctctttacattataaggccttacccaccctatattggagttrgccccaattccaatatgtgttccagatcggacctccctgaggacagcaacactctgtatcctgggtcacatttgtggctgaggcacgcccttaattccaa

SEQ ID NO: 153681 - DNA, 201 bp, Homo sapiens
tttaaaattccattaatttttttctactggtttgaggctatacattccagttctaattttttaatggttatccttaaaattttaacatgcttttttttttyttttttttttttttgagacggagtcttcctcttgttgcccaggctggagtgcaatggtgtgatctcggctcaccacaacctccgcctcccaggttcaagc

SEQ ID NO: 153682 - DNA, 201 bp, Homo sapiens
attaacataattagcattgtttaacagtctatgtctgtttagatttagccacatactttgtgatttctttgctccacatgttttcttgcatttcaaaccctttttttttttttttaagacagggtcttgctctgttgcccaggctagattacagtggtgtgatcagagctcactgcctccttcacctcctgggctcaagcg

SEQ ID NO: 153683 - DNA, 201 bp, Homo sapiens
acacagcttttccaagtctacttttccctgctattgttttgctggctcttactcagtgtcttatttctttgtatgtttataacgttttggctatgagttcrtattcctggaaactttacctatggaaattctttgaggcctggattagagttgctccagagatgtgtgttttcctctgccagtcatctgggggtgccatca

SEQ ID NO: 153684 - DNA, 201 bp, Homo sapiens; identical to SEQ ID NO: 28647

SEQ ID NO: 153685 - DNA, 201 bp, Homo sapiens; identical to SEQ ID NO: 28646

SEQ ID NO: 153686 - DNA, 201 bp, Homo sapiens
tctgcttccacaggtgatattgatagtggacaaagtgctcgagacgcaggacctgaatggggatgggctcatgacccctgctgagctcatcaacttcccgrgagtagccctcaggcacgtggagcccggagagccccttgctccatctcctcaggagccacaagctgttggaaggcagtccctattagctaaaagcccatt

SEQ ID NO: 153687 - DNA, 201 bp, Homo sapiens
tgcctttatgtgctttatatacaagagctggagtgacatttattttgagcatagttccatgggatccctgctgtctgtctgtgagtcctccctgagcaggrgtcctgtctttggggctgcaggtagaagcaggcagaaaatgcgcttgtgtctaacccagcccatctgtgacacggtggcagacgcctctttcccccgacc

SEQ ID NO: 153688 - DNA, 201 bp, Homo sapiens
  misc_feature (1)...(201): n = A,T,C or G
ttgcacggcagggatgcaagggtgtgttagggagggtcagaactcctgggaacatctctgtccctggagaccccacagtgactctgcttccacaggtgatnttgatagtggacaaagtgctcgagacgcaggacctgaatggggatgggctcatgacccctgctgagctcatcaacttcccgggagtagccctcaggcacg

SEQ ID NO: 153689 - DNA, 201 bp, Homo sapiens; identical to SEQ ID NO: 28655

SEQ ID NO: 153690 - DNA, 201 bp, Homo sapiens
gctaattttttaaaattaattttttgtagagatgggggtctcactatgttgcccaagctggcctccaacttctgggctcaagcaatccttctgcctcagcmtcccaaagtgctggtgagaggtgacagtgtgtgccctcgctcgttctcggcgcctcctcggccttggcgcccactctggccgcgcttgaggagcccttca

SEQ ID NO: 153691 - DNA, 201 bp, Homo sapiens
gacacagaagtttaaacttttgatatactcaaatctgctcattttttccttttaaactttctgagttgatgtattatatttaatggttctatcacataatrtggtttgttcagccattgcctaaatgttagacattcaggttgcttacatttgtttgactaatattaatagcacagctatacatatctttgtaatttcttt

SEQ ID NO: 153692 - DNA, 201 bp, Homo sapiens
gcatgaccctcatctattaaatcctataataaaaaaaacttttggtatgatgacttaatattcctttccccaaagttagtaagctgactttaccttgaccrcagcttctagtttgtcaaaagagccactctgacaggcagcaaatactccatcaattttctcagctggtattacctaggtaattgaatgttcggtattaaa

SEQ ID NO: 153693 - DNA, 201 bp, Homo sapiens; identical to SEQ ID NO: 28677

SEQ ID NO: 153694 - DNA, 201 bp, Homo sapiens
ctgttaactttaacttctaaacattacaggaatggaagttggatacactttgtgacttgtacgagacactgaccattacacaggctgttatttttctcaawacgaggcgcaaggtggactggctgactgagaagatgcatgccagagacttcacagtttctgctctggtaagaggtgttctaaaatgtctggatttccact

SEQ ID NO: 153695 - DNA, 201 bp, Homo sapiens
gcacctgtttgtattccttaaagtgaaatgatggcaatcatctttcgggactgacctgaaatgaagagaatactcattgctgatcacttgattatttgggyataatgttccaaatggaatacatggtgtgaagtagaagtgacaatttgatgtgggatcggtaaatgtgtatcctactttttttagggtatgatgtgattg

SEQ ID NO: 153696 - DNA, 201 bp, Homo sapiens
ggggaaaaaaatcatttgccctagctgtaattacagaacataaatttcactacgtactccctacctacagtgaagaataatgtaggaaacgttattcttgrattgtctagctgatgcgtggagcagcagcatcccaagtttgacaaggcataagaaagacattaagggaattttaccttgcagcagttaggtcgtctgcat

SEQ ID NO: 153697 - DNA, 201 bp, Homo sapiens; identical to SEQ ID NO: 28683

SEQ ID NO: 153698 - DNA, 201 bp, Homo sapiens
ggcacttgctaaacacccagtatttgttggatgaaaatttcctaaaagccacaaaaaagccaactaaaaagaaattcagaatatccagtactcttaccccrgcaatgtctgtaatcactttctctgtgatctcctttccacctgttaatcgagtagcgctttgaagaaatgtaatggcttttcttaagtctccttctgaca

SEQ ID NO: 153699 - DNA, 201 bp, Homo sapiens
actcctgtgcccttccagaagcttccatgatgggtagggcccggattgtggggagataggacggtggtgcgaaagcagtggctaaagggcgtttttcctcyctaagacattacgaaacttcggctgctttccttcccagtgtagagcacgggaaacatggagtaaaaagccgtggcgcagtccgagttcggtacactgtaa

SEQ ID NO: 153700 - DNA, 201 bp, Homo sapiens
gtctggtggctccgcggattataacaggtatgcagtctgttggcggtcgcggtctgtagtgaaggtcatagggcgccaggggagatgatagtggatggcamggaggcaaaaactctaaattaatggacgttttcttagggtacagcactcctgtgcccttccagaagcttccatgatgggtagggcccggattgtggggag

SEQ ID NO: 153701 - DNA, 201 bp, Homo sapiens; identical to SEQ ID NO: 28679

SEQ ID NO: 153702 - DNA, 201 bp, Homo sapiens
taaagtgaaatgatggcaatcatctttcgggactgacctgaaatgaagagaatactcattgctgatcacttgattatttgggcataatgttccaaatggaatacatggtgtgaagtagaagtgacaatttgatgtgggatcggtaaatgtgtatcctactttttttagggtatgatgtgattgctcaagctcagtcaggta

SEQ ID NO: 153703 - DNA, 201 bp, Homo sapiens
ctaggctttacttggggaagggttggaggcagcggtctccactcggccacggcgcggaggcgacgggacaggaccggtgccggtgaaccgttggcatcgcyctcgccaggccgctccgcccgcgtcaatcacccggcttgcgcattgttgggggcggagttcggcgctccgagctctcgcgagacgctccgcagttgaaac

SEQ ID NO: 153704 - DNA, 201 bp, Homo sapiens
ctgaatggatgttaacggtcgggctaaatgccaggcaggtcttcattgtggaattaaacagcggtgggagcaagcggaataaccgagttcccctcccgcayctgagtgccggcagcgagccgcgagccgggacctgtcacccgcgggaagccccggccgcccgacgaacagcatctccggtttccgcctccggctccggcg

SEQ ID NO: 153705 - DNA, 201 bp, Homo sapiens
aacacaagtattcaggtaagcattacttcacccccctcttaaaggtagagatggggtttatttaatgcaggtactgttacaatacaactgatgtgttttgytgtcgttccccctgcttaaagcacttgatgcataactctgtctaccttcattccgtagtaagacagagacgcttggcttcagacattttcctttgggtat

SEQ ID NO: 153706 - DNA, 201 bp, Homo sapiens
atgctatgttttcaaagctcactgctatattggctttgaagtaaaccttcctaataaagctgtaggctttattgaggtcaggattatataaggcacaataycctctgggggaaaaaaatcatttgccctagctgtaattacagaacataaatttcactacgtactccctacctacagtgaagaataatgtaggaaacgtta

SEQ ID NO: 153707 - DNA, 201 bp, Homo sapiens; identical to SEQ ID NO: 28687

SEQ ID NO: 153708 - DNA, 201 bp, Homo sapiens
tcggtattaaagatgtttctaggtgagactagacatacactctgccaactggcccccgtgcccccagtcatttctgttccacacctaagttccatactttyctgggaaggctttgggagaacggaaagggccagagtaactccagccaccactaagcaaccaaggtgctaacaactgtgcttttaaagccctttaatggct

SEQ ID NO: 153709 - DNA, 201 bp, Homo sapiens
tcgtggcagggtagtctcaaccatttccaggctctggtcccagacaccaaagcatgccgccccagggttagggccctggcggggccgggagcaccagggaytcactgcggcttgtgcggcgtctcagcggaccagcgctggcactggacacccttgcgggtcttgctgaccgtgccgcggtactgctcccctgcgccgtgg

SEQ ID NO: 153710 - DNA, 201 bp, Homo sapiens
cgcacgtcgtctgtacaacgccggatctggtagcaaaaggccgcgcgcatgccgggccgcagtgtgaagcaccagggcgcctctgagccgtcggggttccrgcagaagttctcccgaaggtctctaagcaggcgctccactcagccctagcccgccagcctccagccttgagcccgtgactaccttcctcccgtctcaccc

SEQ ID NO: 153711 - DNA, 201 bp, Homo sapiens
ccccaaggcatatggcatcaaggctgggcctaacccagtctcatgaccttgtgaatccagtccacaaacacagagacacgcgtgaagacagctggccagcrggaccttgcgcatactcggttggggattataattccttccaggacccagcagttgtgggtaaagcaggcaagtgggcccccgtagtcaccctggcaggta

SEQ ID NO: 153712 - DNA, 201 bp, Homo sapiens
cccctaagcattgagtcagaagcagcaggagtgggagccaccccatccttctggctggaggctgcactgtgacccaccacagccccatccgggaagttgtraaacctgtccctacgggattgggtggctctggctccacacgtcagctcagggcctgctggaccctgacctgagacctggtgacaggagccatgaggggcc

SEQ ID NO: 153713 - DNA, 201 bp, Homo sapiens
ccaggcagcgggggactggagctccaacatgtggggcagtgatggcattctcagccactcagcaccactgactgttccacagcctttactaacaggtcccsaaggcccctgtctgtgcagacccttacccaaccaacagactagcttccctgctctactgccctttagcactcaactctgttccatgtgtcctggcccagc

SEQ ID NO: 153714 - DNA, 201 bp, Homo sapiens
atttcctggaagcaaaggctaagaagcatctgtacaggcataaagaggaaacatggctttatgtctgacaagaagttttgtcctccccaaggcatatggcrtcaaggctgggcctaacccagtctcatgaccttgtgaatccagtccacaaacacagagacacgcgtgaagacagctggccagcgggaccttgcgcatact

SEQ ID NO: 153715 - DNA, 201 bp, Homo sapiens
acactactccctactgcactgagtaaccatcaccatagctgtccacagccttggtctggccagggctctccaagagggtagagaggaggtaggggagggayccataggtagagggagtactcttggatgtggtcgcacctgtggccttgcctctgcttcaggacctgtttgctgtggacacccaagtgggcactgtgacct

SEQ ID NO: 153716 - DNA, 201 bp, Homo sapiens
caatcgcaggtgagggagtggggcaaggcaaggggccttgcagcccagctggccttgagactgagtgtctgtctcgtggttccaggtcagccctgtattaygtggacctcatcggggggaagtgtggtaagtggctgatgcccacctgtgctttgctgacacatgttggccctgccagcctgcgtgatgctcatgtttcca

SEQ ID NO: 153717 - DNA, 201 bp, Homo sapiens
acgttgtagtggaaggccctggagagaagaaggcacagggtaacgccacagcccaggcttccctgcccccagtcttatctaggcccagtggccactcaccrgcagtccattaagggcccacagcgaccagcacactcttcagcatctgccacatcctcctgccaaggcccgggcaccaccgcatgtagcaggtgctgtagc

SEQ ID NO: 153718 - DNA, 201 bp, Homo sapiens
ggccattccggagagtgggcgtgtacctgagggcccagagcatcactatagtgtgtgctgggggaaggccccaggccgggacggagggaaggtgtttgtcycacttgtgatcattcgggaacttgtggctccaagcctggcagggcaggccacccacggtcgtggccatggtgccccggtacccaaccccattgttcatga

SEQ ID NO: 153719 - DNA, 201 bp, Homo sapiens
ttccggagagtgggcgtgtacctgagggcccagagcatcactatagtgtgtgctgggggaaggccccaggccgggacggagggaaggtgtttgtctcactkgtgatcattcgggaacttgtggctccaagcctggcagggcaggccacccacggtcgtggccatggtgccccggtacccaaccccattgttcatgatgcag

SEQ ID NO: 153720 - DNA, 201 bp, Homo sapiens
agtctgggagcaagagacagaagatcaacttgggctgaggtcccctgtctcccaccctgcccctctccacccccacttgcctttcttctggaagaggtcayagcgcccagaacgccgcagcctcgtgtggggcgagtgttgagtccatggcagcagttggcaaccatggctgctcacgttgtagtggaaggccctggagag

SEQ ID NO: 153721 - DNA, 201 bp, Homo sapiens
ggctgaggtcccctgtctcccaccctgcccctctccacccccacttgcctttcttctggaagaggtcacagcgcccagaacgccgcagcctcgtgtggggygagtgttgagtccatggcagcagttggcaaccatggctgctcacgttgtagtggaaggccctggagagaagaaggcacagggtaacgccacagcccaggc

SEQ ID NO: 153722 - DNA, 201 bp, Homo sapiens
cagtcttatctaggcccagtggccactcaccggcagtccattaagggcccacagcgaccagcacactcttcagcatctgccacatcctcctgccaaggccygggcaccaccgcatgtagcaggtgctgtagctctgtgccccggagcacttggaagtcattcaatggcgagcgctgccctgcagagtaggcatgagtgggt

SEQ ID NO: 153723 - DNA, 201 bp, Homo sapiens
gccgagacctcgccccggccctccggttccaggcttccagcccggctctgtagcccccaagcttgggcctcaccctggggccgcacgtcgtctgtacaacrccggatctggtagcaaaaggccgcgcgcatgccgggccgcagtgtgaagcaccagggcgcctctgagccgtcggggttccggcagaagttctcccgaagg

SEQ ID NO: 153724 - DNA, 201 bp, Homo sapiens
cacaatcccagaccctccccaggaagagctctgggcccctggtaaaagtcagagggacatgcctatctgaggccccttgggcatctggtccaggtcaccaraaaagagatacatcaggcttattccagttcccccatctcctggggctacctgaggcaaaaggggataggcacagggcactgtgccctaagggaactgcct

SEQ ID NO: 153725 - DNA, 201 bp, Homo sapiens
ctcctaacctggggggtccaggattgatggcggctggtcatcagctgaaagacaaagttcactggggttaagggagccagcctttgggtgggggctgaggyagggtcatgggggaagcgtcactagtgctcaccgcagcgtcgcagggcacagtagtcgaatggggtccttgggtccatcgtgtagcaccagggcccatgg

SEQ ID NO: 153726 - DNA, 201 bp, Homo sapiens
tggggattataattccttccaggacccagcagttgtgggtaaagcaggcaagtgggcccccgtagtcaccctggcaggtaggagaactgatgagggccccrggccacagcaatgactagcctgcttcatgataaaatagttcatttctagccccccatacccttccagggctggcccagggccctgccaccaacctcacag

SEQ ID NO: 153727 - DNA, 201 bp, Homo sapiens
ctggggccgcacgtcgtctgtacaacgccggatctggtagcaaaaggccgcgcgcatgccgggccgcagtgtgaagcaccagggcgcctctgagccgtcgrggttccggcagaagttctcccgaaggtctctaagcaggcgctccactcagccctagcccgccagcctccagccttgagcccgtgactaccttcctcccgt

SEQ ID NO: 153728 - DNA, 201 bp, Homo sapiens
tgggcgtgtacctgagggcccagagcatcactatagtgtgtgctgggggaaggccccaggccgggacggagggaaggtgtttgtctcacttgtgatcattygggaacttgtggctccaagcctggcagggcaggccacccacggtcgtggccatggtgccccggtacccaaccccattgttcatgatgcaggtccgtacgt

SEQ ID NO: 153729 - DNA, 201 bp, Homo sapiens
gcgtgcgcggctggaggctcagcgcgcaagcgtgcgcgtgatttggccctgaacggacgccgtagccaagaggttgggcggatgttgtgagccgggtcgckgcggccgaggctccgggtgagtgaggggcggcagggctctgagcctggcgggttccggctattcccttcgcggtccgggctagtccagtgcgagggcacc

SEQ ID NO: 153730 - DNA, 201 bp, Homo sapiens
ggaagaggtcacagcgcccagaacgccgcagcctcgtgtggggcgagtgttgagtccatggcagcagttggcaaccatggctgctcacgttgtagtggaasgccctggagagaagaaggcacagggtaacgccacagcccaggcttccctgcccccagtcttatctaggcccagtggccactcaccggcagtccattaagg

SEQ ID NO: 153731 - DNA, 201 bp, Homo sapiens
tagggaacagttcaatagcaaggagtggtaggaccaagctgagatcagagtggcccaagttgatgatgtattatttcctgtgctgcaggtcataattagakttttcttatttttccaatggctggttcaaaccaaaaccatgactccttcaagtgggtctcaggaagtgcactaggttggaatgtcacactcgagaggctc

SEQ ID NO: 153732 - DNA, 201 bp, Homo sapiens
gggccagtgcgcgtgcgcggctggaggctcagcgcgcaagcgtgcgcgtgatttggccctgaacggacgccgtagccaagaggttgggcggatgttgtgarccgggtcgctgcggccgaggctccgggtgagtgaggggcggcagggctctgagcctggcgggttccggctattcccttcgcggtccgggctagtccagtg

SEQ ID NO: 153733 - DNA, 201 bp, Homo sapiens
gtcccctagcggaggctgggcgcgggccagtgcgcgtgcgcggctggaggctcagcgcgcaagcgtgcgcgtgatttggccctgaacggacgccgtagccragaggttgggcggatgttgtgagccgggtcgctgcggccgaggctccgggtgagtgaggggcggcagggctctgagcctggcgggttccggctattccct

SEQ ID NO: 153734 - DNA, 201 bp, Homo sapiens
gctggccagcgggaccttgcgcatactcggttggggattataattccttccaggacccagcagttgtgggtaaagcaggcaagtgggcccccgtagtcacyctggcaggtaggagaactgatgagggccccgggccacagcaatgactagcctgcttcatgataaaatagttcatttctagccccccatacccttccaggg

SEQ ID NO: 153735 - DNA, 201 bp, Homo sapiens
gcagcctcaaatctctgagtcccttccccttgaccccttgacagtctgtggtatagctggccccagggcctacttcacagatgtgtgaaaagagcgtcgarggggctgggaatgttgcctgactacactgtctggtccctccctgccctcagtgaactatcgtggctccacgggctttggccaggacagcatcctctccct

SEQ ID NO: 153736 - DNA, 201 bp, Homo sapiens
gggtagtctcaaccatttccaggctctggtcccagacaccaaagcatgccgccccagggttagggccctggcggggccgggagcaccagggactcactgcrgcttgtgcggcgtctcagcggaccagcgctggcactggacacccttgcgggtcttgctgaccgtgccgcggtactgctcccctgcgccgtggtagcagtc

SEQ ID NO: 153737 - DNA, 201 bp, Homo sapiens
ggagacaaagagccagtgggttcgtggatggacgtgggcttgtccctccactctcccagcttgacccggcgccgcttaccctcccggcaggatttgatgcygcagctctggaagcgcacagcagggtctgttgtgtagcaccaaggacctccggggtcgccatcagggttacggcagaagttctcttccaggccattccgg

SEQ ID NO: 153738 - DNA, 201 bp, Homo sapiens
tatggcatcaaggctgggcctaacccagtctcatgaccttgtgaatccagtccacaaacacagagacacgcgtgaagacagctggccagcgggaccttgcrcatactcggttggggattataattccttccaggacccagcagttgtgggtaaagcaggcaagtgggcccccgtagtcaccctggcaggtaggagaactga

SEQ ID NO: 153739 - DNA, 201 bp, Homo sapiens
ggccaataccggacggtgcacactggtgtgtgtgcgaaggggaactggctggcgacggggtcgcgcactggggtgggaaggaagggggtgtggagggctcsctgcttgacagtgcgtaagggtatatagggagccggcctggacttggaggttacactcccacaggtccctgcacacaggtgtgtggagggggggaggggg

SEQ ID NO: 153740 - DNA, 201 bp, Homo sapiens
ccgcttaccctcccggcaggatttgatgccgcagctctggaagcgcacagcagggtctgttgtgtagcaccaaggacctccggggtcgccatcagggttayggcagaagttctcttccaggccattccggagagtgggcgtgtacctgagggcccagagcatcactatagtgtgtgctgggggaaggccccaggccgggac

SEQ ID NO: 153741 - DNA, 201 bp, Homo sapiens
agaggacacaacctcagctcctctctgtgggagacaggcagttgtgcctcaccgattccgcaagctgactgtccagggtgagttgcccggatggcccccarccacgcgcagcttggaacgccgctgatccagccgatccaccctcttgccacacttctcaaactgcacctggtctgtaggatggggtgggctggatgaaac

SEQ ID NO: 153742 - DNA, 201 bp, Homo sapiens
atatggcatcaaggctgggcctaacccagtctcatgaccttgtgaatccagtccacaaacacagagacacgcgtgaagacagctggccagcgggaccttgygcatactcggttggggattataattccttccaggacccagcagttgtgggtaaagcaggcaagtgggcccccgtagtcaccctggcaggtaggagaactg

SEQ ID NO: 153743 - DNA, 201 bp, Homo sapiens
ccatgggtgccactctagtctccaggactttctctagcctagacctagtaaccactaccaggaactgctggggcccagcctctggttctgtggcatagtgrtaacaaggactaactcgggacttccaaggaaagggcgctgtggtcactgggtggcagcctcaaatctctgagtcccttccccttgaccccttgacagtct

SEQ ID NO: 153744 - DNA, 201 bp, Homo sapiens
ttcactggggttaagggagccagcctttgggtgggggctgaggcagggtcatgggggaagcgtcactagtgctcaccgcagcgtcgcagggcacagtagtmgaatggggtccttgggtccatcgtgtagcaccagggcccatggctatccccatctgggttccggcagaagttctcctccagttgtgcatgcggttcggag

SEQ ID NO: 153745 - DNA, 201 bp, Homo sapiens
acccctaagcattgagtcagaagcagcaggagtgggagccaccccatccttctggctggaggctgcactgtgacccaccacagccccatccgggaagttgygaaacctgtccctacgggattgggtggctctggctccacacgtcagctcagggcctgctggaccctgacctgagacctggtgacaggagccatgaggggc

SEQ ID NO: 153746 - DNA, 201 bp, Homo sapiens
taggagaatggggccaaccccctcctgaaggcagatggggatcagggttgggggcacttaccagggacccctaagcattgagtcagaagcagcaggagtgrgagccaccccatccttctggctggaggctgcactgtgacccaccacagccccatccgggaagttgtgaaacctgtccctacgggattgggtggctctggc

SEQ ID NO: 153747 - DNA, 201 bp, Homo sapiens
cgtcgtctgtacaacgccggatctggtagcaaaaggccgcgcgcatgccgggccgcagtgtgaagcaccagggcgcctctgagccgtcggggttccggcaraagttctcccgaaggtctctaagcaggcgctccactcagccctagcccgccagcctccagccttgagcccgtgactaccttcctcccgtctcacccgcag

SEQ ID NO: 153748 - DNA, 201 bp, Homo sapiens
ctggtcccagacaccaaagcatgccgccccagggttagggccctggcggggccgggagcaccagggactcactgcggcttgtgcggcgtctcagcggaccmgcgctggcactggacacccttgcgggtcttgctgaccgtgccgcggtactgctcccctgcgccgtggtagcagtctgtggcgggtgcgggcagccatcag

SEQ ID NO: 153749 - DNA, 201 bp, Homo sapiens
aggctcagcgcgcaagcgtgcgcgtgatttggccctgaacggacgccgtagccaagaggttgggcggatgttgtgagccgggtcgctgcggccgaggctcsgggtgagtgaggggcggcagggctctgagcctggcgggttccggctattcccttcgcggtccgggctagtccagtgcgagggcacctgcagcgcagggat

SEQ ID NO: 153750 - DNA, 201 bp, Homo sapiens
tggagagtggtggccactcaataccttttcctctagctttcatgtcttgtttttgctttccccttcctcctccctctctccctttctttccttctctcctyctttatttgaggggggaagagtgctgtacaaagtcaaacaaacaagtttacagttgtaagtgcaatgacccgagtcctccacatgaccttgtgaattgtg

SEQ ID NO: 153751 - DNA, 201 bp, Homo sapiens
ttcgggaacttgtggctccaagcctggcagggcaggccacccacggtcgtggccatggtgccccggtacccaaccccattgttcatgatgcaggtccgtaygtagtctgggagcaagagacagaagatcaacttgggctgaggtcccctgtctcccaccctgcccctctccacccccacttgcctttcttctggaagaggt

SEQ ID NO: 153752 - DNA, 201 bp, Homo sapiens
gatgaagcttgccccacctcatctctcaaatgagaatgctaaggctcagagccatcacattacccagccaggggccctggctaggcattcagactccaaakctgggctctcacctgcacaaaggcatatgctaggttagaggggtagatcaggctcaggaggggtcactgcctgctgtgtgcgtgcatctgtgtggtcctg

SEQ ID NO: 153753 - DNA, 201 bp, Homo sapiens
cagctggctgcagcatgctttgtcccaccctgcagtttgcagtggaacaggtgctccaggaggaacactttgatgcaagccatgtggcccttatgggtggwtcccatggtggcttcatttcctgccacttgattggtcagtacccagagacctacagggcctgcgtggcccggaaccccgtgatcaacatcgcctccatgt

SEQ ID NO: 153754 - DNA, 201 bp, Homo sapiens
tgcctctccccctccaccaccaccttgtgactgatggtttggtttcctctctgctctgcccctgctcagcacagggagaatgttgacttagaagcaatagsgggcagcaggccaccaagagcacaaccccagggcgaggtctggggaggcctcccagcccgcctctgtttactgtgcaattccagtcgttcttaagccatc

SEQ ID NO: 153755 - DNA, 201 bp, Homo sapiens
ctcatgaccttgtgaatccagtccacaaacacagagacacgcgtgaagacagctggccagcgggaccttgcgcatactcggttggggattataattccttycaggacccagcagttgtgggtaaagcaggcaagtgggcccccgtagtcaccctggcaggtaggagaactgatgagggccccgggccacagcaatgactag

SEQ ID NO: 153756 - DNA, 201 bp, Homo sapiens
gacacaacctcagctcctctctgtgggagacaggcagttgtgcctcaccgattccgcaagctgactgtccagggtgagttgcccggatggcccccaaccamgcgcagcttggaacgccgctgatccagccgatccaccctcttgccacacttctcaaactgcacctggtctgtaggatggggtgggctggatgaaacccag

SEQ ID NO: 153757 - DNA, 201 bp, Homo sapiens
ttggggattataattccttccaggacccagcagttgtgggtaaagcaggcaagtgggcccccgtagtcaccctggcaggtaggagaactgatgagggcccygggccacagcaatgactagcctgcttcatgataaaatagttcatttctagccccccatacccttccagggctggcccagggccctgccaccaacctcaca

SEQ ID NO: 153758 - DNA, 201 bp, Homo sapiens
ctccggttccaggcttccagcccggctctgtagcccccaagcttgggcctcaccctggggccgcacgtcgtctgtacaacgccggatctggtagcaaaagsccgcgcgcatgccgggccgcagtgtgaagcaccagggcgcctctgagccgtcggggttccggcagaagttctcccgaaggtctctaagcaggcgctccac

SEQ ID NO: 153759 - DNA, 201 bp, Homo sapiens
tctagccccccatacccttccagggctggcccagggccctgccaccaacctcacaggcccccacaggggccaacagtccctcagtgcacatctcactctcmcgcacacgtcctcggtgcttgatgttacactcctggttggagatgacattcagcaaggccacatttaggactgtgtcattacccgtacctgcagtgaggg

SEQ ID NO: 153760 - DNA, 201 bp, Homo sapiens
gctgggcctcctggccaccagcagtcctgtgcactgtgctcttacctttggtctcaccccagcctgcaatctcacacttggtccctggaggcaccacataycattcagggggcaggcagatcagggccacacgctggttcagggtcacagatctttagcaagaatgggggcactcagggtctgaggccacaaggcccagcc

SEQ ID NO: 153761 - DNA, 201 bp, Homo sapiens
acagaagatcaacttgggctgaggtcccctgtctcccaccctgcccctctccacccccacttgcctttcttctggaagaggtcacagcgcccagaacgccrcagcctcgtgtggggcgagtgttgagtccatggcagcagttggcaaccatggctgctcacgttgtagtggaaggccctggagagaagaaggcacagggta

SEQ ID NO: 153762 - DNA, 201 bp, Homo sapiens
cctcacaggcccccacaggggccaacagtccctcagtgcacatctcactctcccgcacacgtcctcggtgcttgatgttacactcctggttggagatgacrttcagcaaggccacatttaggactgtgtcattacccgtacctgcagtgaggggaatggggagagggagagggtcctgcaggaagatccagggctgggcct

SEQ ID NO: 153763 - DNA, 201 bp, Homo sapiens
ggaatggggagagggagagggtcctgcaggaagatccagggctgggcctcctggccaccagcagtcctgtgcactgtgctcttacctttggtctcaccccrgcctgcaatctcacacttggtccctggaggcaccacataccattcagggggcaggcagatcagggccacacgctggttcagggtcacagatctttagcaa

SEQ ID NO: 153764 - DNA, 201 bp, Homo sapiens
cccagcctgcaatctcacacttggtccctggaggcaccacataccattcagggggcaggcagatcagggccacacgctggttcagggtcacagatctttarcaagaatgggggcactcagggtctgaggccacaaggcccagccccacctcacaccctcccaggttgtccacatacctctccagcttgagcaggacaagct

SEQ ID NO: 153765 - DNA, 201 bp, Homo sapiens
tctgaggccacaaggcccagccccacctcacaccctcccaggttgtccacatacctctccagcttgagcaggacaagctgggagcctgagggcccacacascatcttggctactgggacccgctgtaggcttggctctccatgctgtgggttctggaacagggtgcccaaccatacctcatagcccgtgagaggcatatgg

SEQ ID NO: 153766 - DNA, 201 bp, Homo sapiens
aaggtgggatgagactgggtccccaaacacaagggaggctcaccaggaggagaagcactgccgggcagtcagtatccactgctccttcactagagaccccscgcagaaatgctggccctgcctagaggagtggggaattaggacaggtaacagactcctgggacagatgctagacctgccatcttctggctaggacctctg

SEQ ID NO: 153767 - DNA, 201 bp, Homo sapiens
gtgctcgtggtcaatccacgaaggcccggcagggcagccctggggctcagtgtgctcccttcccatactgtgcctgtcagacctggggaggcactagcttytaggaagcagagcaggtcctatagacaggctgggcattgagtatcttgtgttctcagggggatcagtttgtgttttatgaagactggggagaaaacatgg

SEQ ID NO: 153768 - DNA, 201 bp, Homo sapiens
ctggggaagggggaaggtgggatgagactgggtccccaaacacaagggaggctcaccaggaggagaagcactgccgggcagtcagtatccactgctccttyactagagaccccccgcagaaatgctggccctgcctagaggagtggggaattaggacaggtaacagactcctgggacagatgctagacctgccatcttctg

SEQ ID NO: 153769 - DNA, 201 bp, Homo sapiens
tgagggctgggggccctgggctccgtttccttcacattccagctggcccggatccctctgtggcacagggccctgcccgtcacatgccctctgggtgacawcggagcagacctccatgtggccaggggttgggagaactttacaaacattaggacctaacactgtctcatcgctgaaataagaggccatagcaccgaaaag

SEQ ID NO: 153770 - DNA, 201 bp, Homo sapiens
acctctgggggcagggatagattcccagcccccagtgggataaccacagaggacacaacctcagctcctctctgtgggagacaggcagttgtgcctcaccrattccgcaagctgactgtccagggtgagttgcccggatggcccccaaccacgcgcagcttggaacgccgctgatccagccgatccaccctcttgccacac

SEQ ID NO: 153771 - DNA, 201 bp, Homo sapiens
gccacagcaatgactagcctgcttcatgataaaatagttcatttctagccccccatacccttccagggctggcccagggccctgccaccaacctcacaggsccccacaggggccaacagtccctcagtgcacatctcactctcccgcacacgtcctcggtgcttgatgttacactcctggttggagatgacattcagcaag

SEQ ID NO: 153772 - DNA, 201 bp, Homo sapiens; identical to SEQ ID NO: 28697

SEQ ID NO: 153773 - DNA, 201 bp, Homo sapiens
caaggctgggcctaacccagtctcatgaccttgtgaatccagtccacaaacacagagacacgcgtgaagacagctggccagcgggaccttgcgcatactcrgttggggattataattccttccaggacccagcagttgtgggtaaagcaggcaagtgggcccccgtagtcaccctggcaggtaggagaactgatgagggcc

SEQ ID NO: 153774 - DNA, 201 bp, Homo sapiens
gagtgggcgtgtacctgagggcccagagcatcactatagtgtgtgctgggggaaggccccaggccgggacggagggaaggtgtttgtctcacttgtgatcrttcgggaacttgtggctccaagcctggcagggcaggccacccacggtcgtggccatggtgccccggtacccaaccccattgttcatgatgcaggtccgta

SEQ ID NO: 153775 - DNA, 201 bp, Homo sapiens
ctcaaactgcacctggtctgtaggatggggtgggctggatgaaacccagactgtgtggatgtcgtgggctaaagggcctgacccataactggcccaactcstaacctggggggtccaggattgatggcggctggtcatcagctgaaagacaaagttcactggggttaagggagccagcctttgggtgggggctgaggcagg

SEQ ID NO: 153776 - DNA, 201 bp, Homo sapiens
accttcctcccgtctcacccgcagcagcacgtcccaacgcccgccccccccccccacctcacttgcacgcgtatttttctggcgtaaatcggtgctgatghgggatttgcgcgtcccaacgctggcaaggtacgcccgcagtggtggtattggctgtgccccggtagccctcacccttcccgcggaagcagctgacagttg

SEQ ID NO: 153777 - DNA, 201 bp, Homo sapiens
atcaacttgggctgaggtcccctgtctcccaccctgcccctctccacccccacttgcctttcttctggaagaggtcacagcgcccagaacgccgcagcctygtgtggggcgagtgttgagtccatggcagcagttggcaaccatggctgctcacgttgtagtggaaggccctggagagaagaaggcacagggtaacgccac

SEQ ID NO: 153778 - DNA, 201 bp, Homo sapiens
agccctggggctcagtgtgctcccttcccatactgtgcctgtcagacctggggaggcactagcttctaggaagcagagcaggtcctatagacaggctgggyattgagtatcttgtgttctcagggggatcagtttgtgttttatgaagactggggagaaaacatggtttccaaaagcatccctgtgctctgcgtgctggat

SEQ ID NO: 153779 - DNA, 201 bp, Homo sapiens
tgtgctctgcgtgctggatgtcgagagtggcaacatctctgtgcttgagggggtccctgagaatgtgtcccctggacaggtcagcagcaacagcctgtgtyccccctggagtctgggacccttcttgagctaccaccccttgctcactcctgccctttgatcctgtttacaggcattttgggcccctggagatgctggtgt

SEQ ID NO: 153780 - DNA, 201 bp, Homo sapiens
gggggcagggatagattcccagcccccagtgggataaccacagaggacacaacctcagctcctctctgtgggagacaggcagttgtgcctcaccgattccscaagctgactgtccagggtgagttgcccggatggcccccaaccacgcgcagcttggaacgccgctgatccagccgatccaccctcttgccacacttctca

SEQ ID NO: 153781 - DNA, 201 bp, Homo sapiens
aagctagtgaggacctgccagaattgttgcctgagcgtgccaggctgcagggcaggcagtaaaaggcccccacataccctgcagttttctctgtccaggayagcaggtaaaaaggaatccccagagcagacgcaatggtaggagcctgcacaggatgtgtgtgtatggacattctgaaggtttgctgtaggatatctgtct

SEQ ID NO: 153782 - DNA, 201 bp, Homo sapiens
aattccttccaggacccagcagttgtgggtaaagcaggcaagtgggcccccgtagtcaccctggcaggtaggagaactgatgagggccccgggccacagcmatgactagcctgcttcatgataaaatagttcatttctagccccccatacccttccagggctggcccagggccctgccaccaacctcacaggcccccacag

SEQ ID NO: 153783 - DNA, 201 bp, Homo sapiens
tcgtgggctaaagggcctgacccataactggcccaactcctaacctggggggtccaggattgatggcggctggtcatcagctgaaagacaaagttcactgsggttaagggagccagcctttgggtgggggctgaggcagggtcatgggggaagcgtcactagtgctcaccgcagcgtcgcagggcacagtagtcgaatggg

SEQ ID NO: 153784 - DNA, 201 bp, Homo sapiens
catggactccaacagggttagagggacaggcctaatcaactgaaactcctcggagatgccatctctgtctccctgggtgccagcagccctgctgccatgtkcactggggtggcactggagagccatggcagtcgtgagatattgtatgtgtatgcacatgatcatgtgtgtatgtgcgtgcgtgcgtgtgtgtgtgtgtgt

SEQ ID NO: 153785 - DNA, 201 bp, Homo sapiens
gcagggtcatgggggaagcgtcactagtgctcaccgcagcgtcgcagggcacagtagtcgaatggggtccttgggtccatcgtgtagcaccagggcccatrgctatccccatctgggttccggcagaagttctcctccagttgtgcatgcggttcggaggtaaacgtgaacctaggcggaagcgggagcaaaatcgtggca

SEQ ID NO: 153786 - DNA, 201 bp, Homo sapiens
tgggggaagcgtcactagtgctcaccgcagcgtcgcagggcacagtagtcgaatggggtccttgggtccatcgtgtagcaccagggcccatggctatcccyatctgggttccggcagaagttctcctccagttgtgcatgcggttcggaggtaaacgtgaacctaggcggaagcgggagcaaaatcgtggcagggtagtct

SEQ ID NO: 153787 - DNA, 201 bp, Homo sapiens
atggagggggtcccctagcggaggctgggcgcgggccagtgcgcgtgcgcggctggaggctcagcgcgcaagcgtgcgcgtgatttggccctgaacggacrccgtagccaagaggttgggcggatgttgtgagccgggtcgctgcggccgaggctccgggtgagtgaggggcggcagggctctgagcctggcgggttccgg

SEQ ID NO: 153788 - DNA, 201 bp, Homo sapiens
tcactagtgctcaccgcagcgtcgcagggcacagtagtcgaatggggtccttgggtccatcgtgtagcaccagggcccatggctatccccatctgggttcyggcagaagttctcctccagttgtgcatgcggttcggaggtaaacgtgaacctaggcggaagcgggagcaaaatcgtggcagggtagtctcaaccatttcc

SEQ ID NO: 153789 - DNA, 201 bp, Homo sapiens
cacagtagtcgaatggggtccttgggtccatcgtgtagcaccagggcccatggctatccccatctgggttccggcagaagttctcctccagttgtgcatgyggttcggaggtaaacgtgaacctaggcggaagcgggagcaaaatcgtggcagggtagtctcaaccatttccaggctctggtcccagacaccaaagcatgc

SEQ ID NO: 153790 - DNA, 201 bp, Homo sapiens
aagcgggagcaaaatcgtggcagggtagtctcaaccatttccaggctctggtcccagacaccaaagcatgccgccccagggttagggccctggcggggccrggagcaccagggactcactgcggcttgtgcggcgtctcagcggaccagcgctggcactggacacccttgcgggtcttgctgaccgtgccgcggtactgct

SEQ ID NO: 153791 - DNA, 201 bp, Homo sapiens
actggcccaactcctaacctggggggtccaggattgatggcggctggtcatcagctgaaagacaaagttcactggggttaagggagccagcctttgggtgrgggctgaggcagggtcatgggggaagcgtcactagtgctcaccgcagcgtcgcagggcacagtagtcgaatggggtccttgggtccatcgtgtagcacca

SEQ ID NO: 153792 - DNA, 201 bp, Homo sapiens
cctaacctggggggtccaggattgatggcggctggtcatcagctgaaagacaaagttcactggggttaagggagccagcctttgggtgggggctgaggcarggtcatgggggaagcgtcactagtgctcaccgcagcgtcgcagggcacagtagtcgaatggggtccttgggtccatcgtgtagcaccagggcccatggct

SEQ ID NO: 153793 - DNA, 201 bp, Homo sapiens
agacctcgccccggccctccggttccaggcttccagcccggctctgtagcccccaagcttgggcctcaccctggggccgcacgtcgtctgtacaacgccgkatctggtagcaaaaggccgcgcgcatgccgggccgcagtgtgaagcaccagggcgcctctgagccgtcggggttccggcagaagttctcccgaaggtctc

SEQ ID NO: 153794 - DNA, 201 bp, Homo sapiens
gacacgcgtgaagacagctggccagcgggaccttgcgcatactcggttggggattataattccttccaggacccagcagttgtgggtaaagcaggcaagtrggcccccgtagtcaccctggcaggtaggagaactgatgagggccccgggccacagcaatgactagcctgcttcatgataaaatagttcatttctagcccc

SEQ ID NO: 153795 - DNA, 201 bp, Homo sapiens
gcaggtccgtacgtagtctgggagcaagagacagaagatcaacttgggctgaggtcccctgtctcccaccctgcccctctccacccccacttgcctttctyctggaagaggtcacagcgcccagaacgccgcagcctcgtgtggggcgagtgttgagtccatggcagcagttggcaaccatggctgctcacgttgtagtgg

SEQ ID NO: 153796 - DNA, 201 bp, Homo sapiens
gcaggcagatcagggccacacgctggttcagggtcacagatctttagcaagaatgggggcactcagggtctgaggccacaaggcccagccccacctcacaycctcccaggttgtccacatacctctccagcttgagcaggacaagctgggagcctgagggcccacacaccatcttggctactgggacccgctgtaggcttg

SEQ ID NO: 153797 - DNA, 201 bp, Homo sapiens
caggcttccagcccggctctgtagcccccaagcttgggcctcaccctggggccgcacgtcgtctgtacaacgccggatctggtagcaaaaggccgcgcgcrtgccgggccgcagtgtgaagcaccagggcgcctctgagccgtcggggttccggcagaagttctcccgaaggtctctaagcaggcgctccactcagcccta

SEQ ID NO: 153798 - DNA, 201 bp, Homo sapiens
ggctctgtagcccccaagcttgggcctcaccctggggccgcacgtcgtctgtacaacgccggatctggtagcaaaaggccgcgcgcatgccgggccgcagkgtgaagcaccagggcgcctctgagccgtcggggttccggcagaagttctcccgaaggtctctaagcaggcgctccactcagccctagcccgccagcctcc

SEQ ID NO: 153799 - DNA, 201 bp, Homo sapiens
tacttcacagatgtgtgaaaagagcgtcgagggggctgggaatgttgcctgactacactgtctggtccctccctgccctcagtgaactatcgtggctccaygggctttggccaggacagcatcctctccctcccaggcaatgtgggccaccaggatgtgaaggatgtccaggtagcaggggctggggcttctggacaggct

SEQ ID NO: 153800 - DNA, 201 bp, Homo sapiens
ttcccagctgtgctcaagagggcaaggtcactgccccatgcccactgagcctctggctccccgacttttttctcatcctagaataggagaatggggccaascccctcctgaaggcagatggggatcagggttgggggcacttaccagggacccctaagcattgagtcagaagcagcaggagtgggagccaccccatccttc

SEQ ID NO: 153801 - DNA, 201 bp, Homo sapiens
ttggcaaccatggctgctcacgttgtagtggaaggccctggagagaagaaggcacagggtaacgccacagcccaggcttccctgcccccagtcttatctakgcccagtggccactcaccggcagtccattaagggcccacagcgaccagcacactcttcagcatctgccacatcctcctgccaaggcccgggcaccaccgc

SEQ ID NO: 153802 - DNA, 201 bp, Homo sapiens
tcactgccccatgcccactgagcctctggctccccgacttttttctcatcctagaataggagaatggggccaaccccctcctgaaggcagatggggatcarggttgggggcacttaccagggacccctaagcattgagtcagaagcagcaggagtgggagccaccccatccttctggctggaggctgcactgtgacccacc

SEQ ID NO: 153803 - DNA, 201 bp, Homo sapiens
taattagatttttcttatttttccaatggctggttcaaaccaaaaccatgactccttcaagtgggtctcaggaagtgcactaggttggaatgtcacactcragaggctctggacccgagggcatgatattatcccatccaccatcctaaccccagcaacctttgtccagtctaagccctgaagtcagctgggtcttcagga

SEQ ID NO: 153804 - DNA, 201 bp, Homo sapiens
ggaccctccaaccttaaatgttgctgactaatccctacaggctcctgctctatcccaaaagcacccacgcattatcagaggtggaggtggagtcagacagyttcatgaatgctgtgctctggctacgcacacacttgggcagctgaagccctgccattctgcatgagctgatcagcctgtgccacacttcgctcttgagga

SEQ ID NO: 153805 - DNA, 201 bp, Homo sapiens
gaggcggcggctctgtatcggggccttagccgccagcccgcgctgagcgccgcctgcctgggcccggaggtcaccacgcagtacggcggccaataccggayggtgcacactggtgtgtgtgcgaaggggaactggctggcgacggggtcgcgcactggggtgggaaggaagggggtgtggagggctcgctgcttgacagtg

SEQ ID NO: 153806 - DNA, 201 bp, Homo sapiens
tctggtcccagacaccaaagcatgccgccccagggttagggccctggcggggccgggagcaccagggactcactgcggcttgtgcggcgtctcagcggacsagcgctggcactggacacccttgcgggtcttgctgaccgtgccgcggtactgctcccctgcgccgtggtagcagtctgtggcgggtgcgggcagccatca

SEQ ID NO: 153807 - DNA, 201 bp, Homo sapiens
gccaccaggatgtgaaggatgtccaggtagcaggggctggggcttctggacaggctgaaacatgggctgccagggggatgcctccattcagctgagcgggyagctggctgcagcatgctttgtcccaccctgcagtttgcagtggaacaggtgctccaggaggaacactttgatgcaagccatgtggcccttatgggtggt

SEQ ID NO: 153808 - DNA, 201 bp, Homo sapiens
tgatgagggccccgggccacagcaatgactagcctgcttcatgataaaatagttcatttctagccccccatacccttccagggctggcccagggccctgcyaccaacctcacaggcccccacaggggccaacagtccctcagtgcacatctcactctcccgcacacgtcctcggtgcttgatgttacactcctggttggag

SEQ ID NO: 153809 - DNA, 201 bp, Homo sapiens; identical to SEQ ID NO: 28701

SEQ ID NO: 153810 - DNA, 201 bp, Homo sapiens
ctgtgccccggtagccctcacccttcccgcggaagcagctgacagttgtggcctcttggcggggctgtgcctcggacccttagatggaccgagataggtcsggccccgagcgagagctgagatccctctggggctgggaccaaacccgcctttcccaggtgtacggtactccacggggtatgctctcaggtcacgcccagc

SEQ ID NO: 153811 - DNA, 201 bp, Homo sapiens
cagggccacacgctggttcagggtcacagatctttagcaagaatgggggcactcagggtctgaggccacaaggcccagccccacctcacaccctcccaggktgtccacatacctctccagcttgagcaggacaagctgggagcctgagggcccacacaccatcttggctactgggacccgctgtaggcttggctctccatg

SEQ ID NO: 153812 - DNA, 201 bp, Homo sapiens
cctcttacctccccggccaagccacgcccctccccaaggttcccaggtaccctcccaggcctggtccccgccgcctaccgcagcgggggaggtcacagaaytctcgctcgatctgcggatccgtagtgtagcaccatggccgctcggagccgtcaggattccggcaatagttgtcgtccagaccttggtcgaggaacctgg

SEQ ID NO: 153813 - DNA, 201 bp, Homo sapiens
aagaatgggggcactcagggtctgaggccacaaggcccagccccacctcacaccctcccaggttgtccacatacctctccagcttgagcaggacaagctgrgagcctgagggcccacacaccatcttggctactgggacccgctgtaggcttggctctccatgctgtgggttctggaacagggtgcccaaccatacctcat

SEQ ID NO: 153814 - DNA, 201 bp, Homo sapiens
ccaaggttcccaggtaccctcccaggcctggtccccgccgcctaccgcagcgggggaggtcacagaactctcgctcgatctgcggatccgtagtgtagcaycatggccgctcggagccgtcaggattccggcaatagttgtcgtccagaccttggtcgaggaacctgggggcggtaatggggcgtgaacaagaccctggga

SEQ ID NO: 153815 - DNA, 201 bp, Homo sapiens
aggtaccctcccaggcctggtccccgccgcctaccgcagcgggggaggtcacagaactctcgctcgatctgcggatccgtagtgtagcaccatggccgctsggagccgtcaggattccggcaatagttgtcgtccagaccttggtcgaggaacctgggggcggtaatggggcgtgaacaagaccctgggactctggcttat

SEQ ID NO: 153816 - DNA, 201 bp, Homo sapiens
gcctggtccccgccgcctaccgcagcgggggaggtcacagaactctcgctcgatctgcggatccgtagtgtagcaccatggccgctcggagccgtcaggaytccggcaatagttgtcgtccagaccttggtcgaggaacctgggggcggtaatggggcgtgaacaagaccctgggactctggcttatctggccccgcccaa

SEQ ID NO: 153817 - DNA, 201 bp, Homo sapiens
gtctgacaagaagttttgtcctccccaaggcatatggcatcaaggctgggcctaacccagtctcatgaccttgtgaatccagtccacaaacacagagacamgcgtgaagacagctggccagcgggaccttgcgcatactcggttggggattataattccttccaggacccagcagttgtgggtaaagcaggcaagtgggcc

SEQ ID NO: 153818 - DNA, 201 bp, Homo sapiens
ctccgtgcggtctaccgcgccgcggtattcctcgccattgcaccagacacacgcggctggagacaaagagccagtgggttcgtggatggacgtgggcttgyccctccactctcccagcttgacccggcgccgcttaccctcccggcaggatttgatgccgcagctctggaagcgcacagcagggtctgttgtgtagcacca

SEQ ID NO: 153819 - DNA, 201 bp, Homo sapiens
gctttcctttcagcagtgactgcctgccagacctcagcgtgtgggctgagatgctggacaaatcgcccatcagatacatccctcaggtatgcagccccctscttgccctgtgtgctgcccatccatccagaatccagggcccagctcaacacagctccccactcttccccaaacacccaggtgaagacaccactgttactg

SEQ ID NO: 153820 - DNA, 201 bp, Homo sapiens
ctgacaagaagttttgtcctccccaaggcatatggcatcaaggctgggcctaacccagtctcatgaccttgtgaatccagtccacaaacacagagacacgygtgaagacagctggccagcgggaccttgcgcatactcggttggggattataattccttccaggacccagcagttgtgggtaaagcaggcaagtgggcccc

SEQ ID NO: 153821 - DNA, 201 bp, Homo sapiens
ctaacccagtctcatgaccttgtgaatccagtccacaaacacagagacacgcgtgaagacagctggccagcgggaccttgcgcatactcggttggggattmtaattccttccaggacccagcagttgtgggtaaagcaggcaagtgggcccccgtagtcaccctggcaggtaggagaactgatgagggccccgggccacag

SEQ ID NO: 153822 - DNA, 201 bp, Homo sapiens
gcaagcgtgcgcgtgatttggccctgaacggacgccgtagccaagaggttgggcggatgttgtgagccgggtcgctgcggccgaggctccgggtgagtgasgggcggcagggctctgagcctggcgggttccggctattcccttcgcggtccgggctagtccagtgcgagggcacctgcagcgcagggatctgggtgcgaa

SEQ ID NO: 153823 - DNA, 201 bp, Homo sapiens
cagggtcagaggtagctgacatcattgcagatgatgggctggcggctacgacagctcatgagagctgcaaagcgtgagacatccgcaggcagttcaggttmtgggcgaggtgggcatgacagccgctttcctgccatagctgtccgccgagccctggccagccggcgccgaagctgctcagagaggccaagcaggaactga

SEQ ID NO: 153824 - DNA, 201 bp, Homo sapiens
caattccaggtgcagggcccaagcctccactggaagtgagcacagcctggcccttgggatgggtttttctccctccaccttctacaaggtgcagcaaggtbtgggacacagatgcaagataggatggggtgtgggaactactcaggctcaaggatcattactgactagactggaactccctcagaggatgggtccctggag

SEQ ID NO: 153825 - DNA, 201 bp, Homo sapiens
attctgcagagatgcacagatgcccagagagagccatgcttgtgcatatatgggtgtctacatgtgaggcaaaggcaggcactcaaacagatccacaaatrgacagtgacccccaccccatgcacccatgcctctgttcctgctcttggtctggctgcaggacacacacctcctctacgtactggcagctgccaacctgta

SEQ ID NO: 153826 - DNA, 201 bp, Homo sapiens
acaggggctaaggactgcctcaacatcccctcccctgacaggccctgagcagcagaaggaactgaacaaagccctggaagtctggagtgtgggccctcccstgaagcctctgatgtttgagaaggtgggtgcccaagtggcagtgaggagtggggctggggagtttgtggagaaaggtcaggagctaataaggtagttttg

SEQ ID NO: 153827 - DNA, 201 bp, Homo sapiens
agctaataaggtagttttggagccccttggcctgaattccacagctgcagtgttaacactactttgacttgggccttacaggatgatgacagcaacttccrtgtggactttgtggtagcggcagctagcctgagatgtcagaactacgggattccaccggtcaaccgtgcccaggtaaccccaccccttgaggcttgggcc

SEQ ID NO: 153828 - DNA, 201 bp, Homo sapiens
cttccatgtggactttgtggtagcggcagctagcctgagatgtcagaactacgggattccaccggtcaaccgtgcccaggtaaccccaccccttgaggctkgggcctggaggtggagggcaaaccctggccctacgccttgggcccagaccaaatctcttgtccttggcagagcaagcgaattgtgggccagattatccca

SEQ ID NO: 153829 - DNA, 201 bp, Homo sapiens
cggtcaaccgtgcccaggtaaccccaccccttgaggcttgggcctggaggtggagggcaaaccctggccctacgccttgggcccagaccaaatctcttgtycttggcagagcaagcgaattgtgggccagattatcccagccattgccaccactacagcagctgtggcaggcctgttgggcctggagctgtataaggtggt

SEQ ID NO: 153830 - DNA, 201 bp, Homo sapiens
ccacccctaccagggtgacagaactggttcagcagctgacaggccaggcacctgctcctgggcagcgggtgttggtgctagagctgagctgtgagggtgaygacgaggacactgccttcccacctctgcactatgagctgtgacaaggcagccaccctgtcacctagctcaatggagccccggatcccaagccctgcattg

SEQ ID NO: 153831 - DNA, 201 bp, Homo sapiens
ttgccttctgcttcccatccacaggtatgtgctgggctcacctgccatgcagaggattcagggagccagggtcctggtgtcaggcctgcagggcctggggrccgaggtggccaagaacttggttctgatgggtgtgggcagcctcactctgcatgatccccaccccacctgctggtccgacctggctgcccaggtaagtgt

SEQ ID NO: 153832 - DNA, 201 bp, Homo sapiens
ccatgtggtggcccagagctcccaggaagttcaccatgcccactgcctgcatcaggccttctgtgcactgcacaagttccagcacctccatggccggccascccagccctgggatcctgtgagtagtcctgttgctcccacccccagcctctgtcatttattggggtcccacctgccagaggcaacaatgaccattcacaa

SEQ ID NO: 153833 - DNA, 201 bp, Homo sapiens
cccctaccctgtctgtaccgtgcggtacttccctagcacagccgagcacaccctgcaggtaggaagcaccctggagactcccaccccacccagctcagccytcagctgcagacctgttctccacctgatacctcattcttcctccctcctccacagtgggcccggcatgagtttgaagaactcttccgactgtctgcagag

SEQ ID NO: 153834 - DNA, 201 bp, Homo sapiens
tggcaggagtgcccagcctgaagtgctgcccctaggcaatctccaggaagttcatgcctctggaccagtggctttactttgatgccctcgattgtcttccrgaagatggggagctccttcccagtcctgaggactgtgccctggtgagagcctgggataggggtgcaagccttgtccaaaatcaggactaggggagaagca

SEQ ID NO: 153835 - DNA, 201 bp, Homo sapiens
ggaagttcatgcctctggaccagtggctttactttgatgccctcgattgtcttccggaagatggggagctccttcccagtcctgaggactgtgccctggtragagcctgggataggggtgcaagccttgtccaaaatcaggactaggggagaagcatgaggaatgccctccaggtcctgattcagaaaactcagtataaga

SEQ ID NO: 153836 - DNA, 201 bp, Homo sapiens
gcagctgcccggggcctgaacccagacttacaggtgatcccgctcacctacccactggatcccaccacagagcacatctatggggataactttttctcccrtgtggatggtgtggctgctgccctggacagtttccaggcccgtgagtgcttgacttcggaggtcagtcccttgcccacagctgtgccagtcccacttctg

SEQ ID NO: 153837 - DNA, 201 bp, Homo sapiens; identical to SEQ ID NO: 28743

SEQ ID NO: 153838 - DNA, 201 bp, Homo sapiens
gcttccagtccctgccagtgctccaggcaggcgtctggggtggacttgggccgtggatggtggacaggtggtacactggctacaggggccctgctgggcayggggaggccactgactgagaggcactgcctacgaaggggctgtgctgagggtgctgggcgctgggatacaggcagttcttcctctcgccatgtgctgcct

SEQ ID NO: 153839 - DNA, 201 bp, Homo sapiens
cttggaaaggagcagagccgaggcctctcaagagctcttggctcagctcaacagagctgtccaggtcgtcgtgcacacgggtgacatcactgaggacctgytgttggacttccaggtcagctcaggcctgcagccctcaagagcaggaagggctgggcaatggttttggccctgctgatcactgtgtccacccaggtggtg

SEQ ID NO: 153840 - DNA, 201 bp, Homo sapiens; identical to SEQ ID NO: 28747

SEQ ID NO: 153841 - DNA, 201 bp, Homo sapiens
  misc_feature (1)...(201): n = A,T,C or G
cctggggagtgtctagctatggcctgcaggtgaggacagggtcacagaggtcatgagcacacatgggtgaagactggggcttctagaggggagattgtagnattaattaagggggcttcttgatttgatcagggaatagtaagtgacaggcttggcaaagaccaagaataggcacagggctccaagaagagtgcaggagac

SEQ ID NO: 153842 - DNA, 201 bp, Homo sapiens
  misc_feature (1)...(201): n = A,T,C or G
ctcccgtgtggatggtgtggctgctgccctggacagtttccaggcccgtgagtgcttgacttcggaggtcagtcccttgcccacagctgtgccagtcccanttctgacccactgctcccctgccagggcgctatgtggctgctcgttgcacccactatctgaagccactgctggaggcaggcacatcgggcacctggggca

SEQ ID NO: 153843 - DNA, 201 bp, Homo sapiens
  misc_feature (1)...(201): n = A,T,C or G
gctgctgccctggacagtttccaggcccgtgagtgcttgacttcggaggtcagtcccttgcccacagctgtgccagtcccacttctgacccactgctcccntgccagggcgctatgtggctgctcgttgcacccactatctgaagccactgctggaggcaggcacatcgggcacctggggcagtgctacagtattcatgcc

SEQ ID NO: 153844 - DNA, 201 bp, Homo sapiens
ttaatgttgtcatcatacttgataaactaagttgataaatttataaaatacaagaattctaaaaatgtttcacatgcctagaaagtagggaaatattccamacagtgttcagtaatacaattttaaacaaaataatagaatctcttaattttaaaattgatgtataatttgcaataaaatgcccagatcttaagtattctc

SEQ ID NO: 153845 - DNA, 201 bp, Homo sapiens
tgtttttgaacttcacaataaattgaggcttaatctaaggaaactggatgcattaatgttgtcatcatacttgataaactaagttgataaatttataaaayacaagaattctaaaaatgtttcacatgcctagaaagtagggaaatattccaaacagtgttcagtaatacaattttaaacaaaataatagaatctcttaat

SEQ ID NO: 153846 - DNA, 201 bp, Homo sapiens
gcctgcacttgtgctgtccagcctacccaaggcttccttgctacacacactgcacaaagtaattaaaagaaagtgcatatatttaccacagctgtgccccmaaaaaactatttgagtaaatagtttagtggaaaaatggtagaaatttgggtaaattcaaactaaaaggacaagtataatgtggttaatcatcaggaaaat

SEQ ID NO: 153847 - DNA, 201 bp, Homo sapiens
aaactatttgagtaaatagtttagtggaaaaatggtagaaatttgggtaaattcaaactaaaaggacaagtataatgtggttaatcatcaggaaaattgcmaatcatgatcttgtaagttatctagaattaactctcagtccttcccctcaattcccataatttggagcacactgtattcctaatacagaactatgatggt

SEQ ID NO: 153848 - DNA, 201 bp, Homo sapiens
ggatgatggcaaattatgaaactctcctaataatattatgtattgcatacagtgattcaatactgtaaatcagtatttaaataaagtctttaatatcataygtgcatactatatctgtcatcatagatgtatacatacacacaactatagaaagagagattgatgtaagtatagatatataaaacatcctcatcaccttta

SEQ ID NO: 153849 - DNA, 201 bp, Homo sapiens
taatttggagaggcctgattttattctaagggactgtgaatttttccaattataaattaattcataaagaaaaacagtaatttattatggtgtcctagacstgctcaagaaaccctcctttctgcctaattaaaataaattgatcgaaagttggattgtttgtccctacgacagccacatttgtactacgaaaagggaaac

SEQ ID NO: 153850 - DNA, 201 bp, Homo sapiens
atataaagaagcagattttttgaataaccagtttttccacaccaatttaacttccttccttgattcagtgacagcctgcataaataatgataatatgctakaaataatcaattttgtgtggaggaagattttgttctagtctaaacaatattcttatcactaagccatgatagtgtgaccttaatcatgctaccattacct

SEQ ID NO: 153851 - DNA, 201 bp, Homo sapiens
tctctgcctctgccttttaccactggaagcacaaatgtgttgttaaggaaagaaatataataataaaaaaaaaaagacagaaaagaaaagcctagcaaaasgcccccgccctgcttgattcttttcattgctttcttgtggcctctttctctctggccttttccctccttaatcctcgcctgaggaaattctccttccctc

SEQ ID NO: 153852 - DNA, 201 bp, Homo sapiens
aggaattttaatacttcttttttgagctttgggatcacattagatatctgcaaatgaccataactaaaacctagttttaggaagaggctcaaatggaaacragtattcatgaagtaaatcattaacttcataggtggagtcaaaagactaaaaatgtagaaatgaatgagtaaggaatgcagggcagagtccttggtgacc

SEQ ID NO: 153853 - DNA, 201 bp, Homo sapiens
gggggatgctcaccaagtgggtttgaatttaggatccacatcaggtacatgtgcatgcatatactgaagaagtttgtagaaggccacgtgtcacaagattrggctgaagcaaagtcttgaaattatatccaggacttagattgagaccttgcgagggacccaaatctcacagacaccatcaatctgaggcaggtaatatgg

SEQ ID NO: 153854 - DNA, 201 bp, Homo sapiens
ttttcaatcaatcactgttcaatttaaatgttttttttcaggaggtggactttatttcttatataaatcctccagtttttgattcgctgctttcaaaatcyagaagtaaatctgtagttaagcttggctgttttctaatggagcagtttgaggggctcttacaatataaaatatatgtttgttgagttagttgcaaaaaca

SEQ ID NO: 153855 - DNA, 201 bp, Homo sapiens
aacttaaaagacaagtaccaataagatttttatctcaattagggttagcaaagcaatattataaatgagtcacactgagactaggtgatttaaatgaggcrggctagcaggacagacaattaatcctaccattgcttaagccacaccatcctttagtactcattcaagttttagtcaacatatgttgaaagatatttttta

SEQ ID NO: 153856 - DNA, 201 bp, Homo sapiens
ttgatttatttatttttctgattattgatcttactttcctgcttttttacataccttgtaatctttgattgaataccagactttgttaattttatcctgtkttatattggatgtttttgtattcctagaaattttctcaggctttataccaggatacagttaaattacttggagagagtttgatcactttggttcttgttt

SEQ ID NO: 153857 - DNA, 201 bp, Homo sapiens
ataattcttttgtcccaaatattctagtttttatctctaacagtttaatttaggtcttttttgtattttccatgtctttacttaactttttggccatacasaatatagttataactctttaaaatatccttgcctgctaattctcatctctgagtaatttctgtttaagttaaattgatttatttatttttctgattattg

SEQ ID NO: 153858 - DNA, 201 bp, Homo sapiens
aaagggaggtacctgttgtgggggacaccagaaccaggggtccctttcagaagcagctgagtgatctgattaattaattcacactgaggagttacagatgmccatgaattactacattattgagtgtagctagcatatttaaattttcttagacgtgatccagtatcttggcttccatttggaccatttaaagggtgggat

SEQ ID NO: 153859 - DNA, 201 bp, Homo sapiens
atgggcatttaggttggttctacatttttgcaactgcgaattgtgctgctaaaaacctgcatgttcatatgtcttttttatataatgaaagtttgcttttmtatgtcttaagagtagctatgttgttccttagaatgctggctgtcctttcacccatagaccatgaaaatttggacaagtttctgcatgtatttgagccct

SEQ ID NO: 153860 - DNA, 201 bp, Homo sapiens
ctggctgtgtccagataagcttcccatccacagatccttaactgaatcacatctgcaaagtccctttgtcatgaaaggtcccgtattcacaggctgattakgatgtggacatgttgggggccattattcaatctgccgtaattgtcatgtcagcttctgtaacctacaggtatcttcctctttattacaggcacaagcctc

SEQ ID NO: 153861 - DNA, 201 bp, Homo sapiens
ataaaataattgcaagtttgtggtaagtgctatgaaagaaacaataggctgagatcaagaatcacaagaagagatggggtgaccagggaagaactcctgasatcttaatattaaagtgagacttgaaaaatatgaaagaaccagacctgcaaaattggagagagaagataacagcatgtgcaaaagacaagaggccaaaaa

SEQ ID NO: 153862 - DNA, 201 bp, Homo sapiens
tccttctaatctttattccctgtattcatttgttaccaatttctttcaaacatttcttcaacaggctgtctttgattttcttcattttccttctcatttcyacctccctagtctaggccccaacccatcacttactttgtgcaacccaccaatgcctcctagatattctccaatttctccccctactctgagcaatttatt

SEQ ID NO: 153863 - DNA, 201 bp, Homo sapiens
ttaaaaggttttccattcattgtattagatattttttcatacctcctgaggctaaattcagctagttgatatcaacatggaattggaacataggagcatakaactaatttactcatttgacttttaaattagttttgtgtgtgtgtgtgttaactaaaattgaaatgtttcgattatgagtaatgccaagatgaactggta

SEQ ID NO: 153864 - DNA, 201 bp, Homo sapiens
ttgcactcacatattttatttatgataataccacaatcatagctttttaatttcattaatacaattgaacttaaattttatttaccaacttttccaaaggkttgatgttaccaaaggtgtgcccaacctacttttacataaaagaaagagttggcaatcaatttattaaattcaaattagtttacattttctacattaata

SEQ ID NO: 153865 - DNA, 201 bp, Homo sapiens
tgcaattatctaggttagaaacagggaagcagcagtgcggatgggggagtgggtggatttgagaaatgtttgaagaaggaatgaacaggacttggttatckatgacatgtaagtaatggaggaatgcaagaggaattccaaggcccctgatttgagtgactgagtgccacattccctgagaggcggcacaggagccggagc

SEQ ID NO: 153866 - DNA, 201 bp, Homo sapiens
atatgcaaaagagagaagcaactagggaaattctcaataatgatattaattgcacagtaccttgagtaaggctctttgctaatttttttaagtcaaggagycctttcttgaattaaatctttagaagttgttagaagagtaaaatatgctcagatactcataagtgtatttgaatttcatgtcatggatcagggcctcggg

SEQ ID NO: 153867 - DNA, 201 bp, Homo sapiens
gctgtcagatttaggaaggattttagaagtaaaactgacagcacatgctgatagagtggatgtggaaggatacgaaaacagagataaaggatgactccagrtttaagctgagaacaagctggtgaataatactattagctgagatacagcagacacaagaggatccatttggggggctgaggataaaaggagatttctatt

SEQ ID NO: 153868 - DNA, 201 bp, Homo sapiens
aggtggtttcagtagaaataatgagatgctgtcagatttaggaaggattttagaagtaaaactgacagcacatgctgatagagtggatgtggaaggatacraaaacagagataaaggatgactccaggtttaagctgagaacaagctggtgaataatactattagctgagatacagcagacacaagaggatccatttgggg

SEQ ID NO: 153869 - DNA, 201 bp, Homo sapiens
actacattcaaaacctgactttatttaatgcacttttatcttgttttctctggccatttttcttacctaatctgctagctttcttgccatttaaaaatgtkcatcccaggacatatagataagcaaatatgaagtacattaaatttaatatttttccttaaccttcatggtaacttgaaatggactatatctttctgcagc

SEQ ID NO: 153870 - DNA, 201 bp, Homo sapiens
cccaccctctcccatcatttatcttatcaatgactggagacaattaggtctccttgatggtgtgaagaaatataactgcacttctatctagattcaaggtraatcacaaaagatacattattaagagtaatattataaattactccctgggcagtgccttcaaggcccatgaatccagctgcacctccaccagccaacaac

SEQ ID NO: 153871 - DNA, 201 bp, Homo sapiens
ttaaatgtccctgtctgacagctctgaagagggcagtggttctcccagcacagtgtttgagctctgagaatggagagactgcctcctcaagtgggtccctsatccctgtgtagcctaactgggagacacctcccagtaggtcccagtaggggctgatggacacctcatataggtggctgcccctctgggatgaagcttcca

SEQ ID NO: 153872 - DNA, 201 bp, Homo sapiens
acctacaggtatcttcctctttattacaggcacaagcctcacttattaacttcctcttcattttttttccttctcccattgtatctttttgtttgtttgtktgtttattttcagacagggtctcactatgtttctaggactgtcttgaattcaagggctcaagcaatcctcccacctcagtctcttgagtagctgggacta

SEQ ID NO: 153873 - DNA, 201 bp, Homo sapiens
ttaaaaaaaaaagtagagatgaggtcttgctgtattctcattgtatctttaataatgctatcatctgccagattccctaataaaaacctgagtgttgtccktgcttcttgctcctgtatttcccacattcaatcaatctccagaacctacttcagaaataccacctgctcctggcgtccctcccttcccattctcactgcc

SEQ ID NO: 153874 - DNA, 201 bp, Homo sapiens
aaaaaaccataattgccccccaaattgtctatcgctttaaacataaagcaattgacccagacctgcctgggcaatgctgtttctctctaaaccctctcccstagttagggtagtcatcaccattattctccccaacttccatccatttttgaagacctaattcaaattccaccttctaattattctgattcctgttacaaa

SEQ ID NO: 153875 - DNA, 201 bp, Homo sapiens
tagcctaacattttgcacactgttaggccacagtatgtaaaattagatcctatgtacagtgtattaaattagatataatttaatatccagtttcatagttyacatttgttgacagatggccactagctataatttttagccgcatgtccaaaactattgagaattaaattgacttataattactgtaccttttgttttatt

SEQ ID NO: 153876 - DNA, 201 bp, Homo sapiens
attatttaactgaaaatccccagataagagcattcgtaggacaacagagaagccatgaaactctaaggaaacatgaaacacctcaagtccactcaccccaraagtgaggttatgacttgagtggcagttggaggaattccaagaaaggctaagctttagtgggaaaacagagagacccacaaagggaggtacctgttgtgg

SEQ ID NO: 153877 - DNA, 201 bp, Homo sapiens
tgcttgattcttttcattgctttcttgtggcctctttctctctggccttttccctccttaatcctcgcctgaggaaattctccttccctctgttgctcgcrgtaatttgctcttcctttttacaagcctatctttcattctgttcttcctcccattatgcctggttgtgttcttccactttactgttcttctctgctttca

SEQ ID NO: 153878 - DNA, 201 bp, Homo sapiens
tctggccttttccctccttaatcctcgcctgaggaaattctccttccctctgttgctcgcggtaatttgctcttcctttttacaagcctatctttcattckgttcttcctcccattatgcctggttgtgttcttccactttactgttcttctctgctttcattaggtgtgagactgagttctggttttggtttttatctct

SEQ ID NO: 153879 - DNA, 201 bp, Homo sapiens
aatagatacaatagacagctgagcaattcaagttcaaaggctccctgaacttatttctatggtcttctcttaaaagatctccccttttcaatttccacccrttctgggtagccactctagtttcctggtgggatttcctcattctagcagccttcattctgctaaccctgacttggcccctcaacaagtgatttactgcat

SEQ ID NO: 153880 - DNA, 201 bp, Homo sapiens
taagtcatacctgattttcacacagggtaaaaaaatgaggtgcttatttctaaccaagaaacagatgcctaacttgttcttttaaatagaaatgaccacamacattttaatcaactgtaaatgatatacttgtatactgtgcaacttaaaaccttctaaagtgaatgtatgtcacttgagccatgcagtatagaaatcaat

SEQ ID NO: 153881 - DNA, 201 bp, Homo sapiens
agagtcttttgcataaagagttgaaatgtgaagaaatggaaatgaataagattattcaagggcacaggagagaacttttaggaacacacaatagaatcaayttcttcctgagacaggagaaaaggatgagtggggaaaagctaagatgagtttaaagatggatataaagaaatttgagagagtttatgcctgaaagcttcc

SEQ ID NO: 153882 - DNA, 201 bp, Homo sapiens
caggtcctgccacatttagcacgacattagtaataataatggtcggtattattattaaatgcttgacaagctttttgtgtgtaggcattatgctaaatttyacattaaattatctctcttaaacctcacaacagtgaccctgcgaagtaggaacaaatcaaaagattcatcttagtgaggcgaattagttcgtctaaaatc

SEQ ID NO: 153883 - DNA, 201 bp, Homo sapiens
cctagccccaacaccagaaaataatgcacatagtaggtgctcagtaaatacttcttgggtgaacgtgttgcttattaattcttccagctgaggtaataatstggacatgaaaacaaaatgtgtttaagcaaaatcttgatcatgggaatgaacatttcaaggggaaaatgaatggagtttggtgtctaaatataggaaagg

SEQ ID NO: 153884 - DNA, 201 bp, Homo sapiens
gtaaaaatgtccaagctttgtatctattattatatgaacataacactttataaattccttctgaccattgctttttctccaagttgttcctgaaatctctstttgatatatttaaaatgaaacatcatttataattttcattgctaacgtttcatgtaactgcacattattatcaacataaaatagttatacataagaaat

SEQ ID NO: 153885 - DNA, 201 bp, Homo sapiens
gttctcccagattttttgcagctgtggaagtgccaagatttaaaataaattttcttgaaaaaaaacaacattgatggagtgaagatattattactccatamccaccaagtctcagtatatgtgtttctaacagtagtgtggaggcagaagtgaagataaagatcccatgaagataaggagatttgttgcaaggctgacata

SEQ ID NO: 153886 - DNA, 201 bp, Homo sapiens
ccagacctgcctgggcaatgctgtttctctctaaaccctctcccctagttagggtagtcatcaccattattctccccaacttccatccatttttgaagacmtaattcaaattccaccttctaattattctgattcctgttacaaagacaggtcctatctctgaacttatttttaagttcttaaactcaccatatctctaga

SEQ ID NO: 153887 - DNA, 201 bp, Homo sapiens
ctgcataaatgtcttcaagaagtgtctgttcatatcctttgcccactttttgatggggtttgtttttttcttataaatttacttaagttctttgtagattmtagatattagccctttgtcaaatggatagattgcaaacattttctcctattctgtaggttgcctgttcactctgatgaaagtttcttttgctgtgcagaa

SEQ ID NO: 153888 - DNA, 201 bp, Homo sapiens
agacctaattcaaattccaccttctaattattctgattcctgttacaaagacaggtcctatctctgaacttatttttaagttcttaaactcaccatatctmtagaatttgctcagacatgcaaaagagatatccaatagatagtacaatacagatacttagatatccatattcaagagatattcttgaactccaagaagtg

SEQ ID NO: 153889 - DNA, 201 bp, Homo sapiens
ttccaggtccctgcagctattgtggttagcattgctgttcccatggctcaagtggctttggactagtaggtaatgggtgggggcagaaacagctcccctcwcctcccccaccccaccccaccccaccccatgtatattctgcttcctgagacttgggctatgcctacaggaagtaacagaaagggttggcgtgcccccagc

SEQ ID NO: 153890 - DNA, 201 bp, Homo sapiens
gaaaaattggagcaaataacacattcttacattacagtcttttataggaaacaatcaagcagaaaaacatatttcatggtgtatatacaagactaagcccrtagattgaaaagtgaaaagtatagcaaaaaaactcccaaaagcttgtttttgtccatgtgatacccaaaaaccaatttaattcattttcttttccaaatc

SEQ ID NO: 153891 - DNA, 201 bp, Homo sapiens
caatcaagcagaaaaacatatttcatggtgtatatacaagactaagcccatagattgaaaagtgaaaagtatagcaaaaaaactcccaaaagcttgttttkgtccatgtgatacccaaaaaccaatttaattcattttcttttccaaatccaccatttcttttggctgtcatgtgcaggtgttgtaaagtacaaaaaaatc

SEQ ID NO: 153892 - DNA, 201 bp, Homo sapiens
ccctgcactcagggcattggtgtgcctgattctatgaactgtttgaagcttgtctgtttacaccaatgagcactctctgctctgttaaaataattcctgcmttcaccaagagaaaatgaaagccacttcagtggtgttttattataggaatttaaataaattaatgcatatgattataggcttgctattttgtcattcttt

SEQ ID NO: 153893 - DNA, 201 bp, Homo sapiens
agcttgtctgtttacaccaatgagcactctctgctctgttaaaataattcctgcattcaccaagagaaaatgaaagccacttcagtggtgttttattatakgaatttaaataaattaatgcatatgattataggcttgctattttgtcattcttttttgactttattactacattgtccaggccagacttccatgtcacta

SEQ ID NO: 153894 - DNA, 201 bp, Homo sapiens
acaacaaccctgtgaggaccaggattttaatctccactttatacaggtggaaactcaggcttgaaatcagatttagtaatttttcaggtcctgccacattkagcacgacattagtaataataatggtcggtattattattaaatgcttgacaagctttttgtgtgtaggcattatgctaaattttacattaaattatctct

SEQ ID NO: 153895 - DNA, 201 bp, Homo sapiens
atttctatgagagggtgaggttaaggataactaatggatagagcccatattctaggggaatgttagggggctcctaatcatttcaaatgacaacaaatcaygccatcaggaaatctaaatttgtaacaatagtctgagttttcaagattggaacatactgtttgccactatagtcataaatactacaatcagtctgtggta

SEQ ID NO: 153896 - DNA, 201 bp, Homo sapiens
aattggagtaaaaatgtccaagctttgtatctattattatatgaacataacactttataaattccttctgaccattgctttttctccaagttgttcctgawatctctctttgatatatttaaaatgaaacatcatttataattttcattgctaacgtttcatgtaactgcacattattatcaacataaaatagttatacat

SEQ ID NO: 153897 - DNA, 201 bp, Homo sapiens
cacttctggacatttatcccagagaaatgaagatttatgttcacataataacctgtacaaaaatgtttatagcagctttattcatgatagtcaaaacttakaaactaccaagatatccttcaacgagtaaatggctaaacaaactttggcacatccataccacagaatatatcaaaaataaaaagaaaccaaccacattga

SEQ ID NO: 153898 - DNA, 201 bp, Homo sapiens
aaaaactatggtgcaaaggcagtctctatgtacaaaatccccaccacagacaattgttgatgtcccaattgcccaggagtcctacctgcctgaggacatakttggtggagttgagatccacaatggggattgtaaaataaaggtttccaacaccctgaaaagccgactggatctcaggccagcagatgatgccagaagtcc

SEQ ID NO: 153899 - DNA, 201 bp, Homo sapiens
tagacagattgtaaaagtctctttcttcttgtaaacaactatttctttgttagtactagattttgtttaactggtttcctcctttctgaatcttcttatgyacccaggaattatgtctgttcattgtttaatggcagcatcaagagaagagaaagctggcttcatttcatagcttcccttgagggattcaatttggaacac

SEQ ID NO: 153900 - DNA, 201 bp, Homo sapiens
tctctatgtacaaaatccccaccacagacaattgttgatgtcccaattgcccaggagtcctacctgcctgaggacatagttggtggagttgagatccacamtggggattgtaaaataaaggtttccaacaccctgaaaagccgactggatctcaggccagcagatgatgccagaagtccggggagccttgtttggtccaaa

SEQ ID NO: 153901 - DNA, 201 bp, Homo sapiens
tcacctgaactcgcagagccacattgtgctgaattatacatttggggttgtagtttgaactttgttaggttgccatgagggttaattggagtaaaaatgtscaagctttgtatctattattatatgaacataacactttataaattccttctgaccattgctttttctccaagttgttcctgaaatctctctttgatatat

SEQ ID NO: 153902 - DNA, 201 bp, Homo sapiens
aaaatccccaccacagacaattgttgatgtcccaattgcccaggagtcctacctgcctgaggacatagttggtggagttgagatccacaatggggattgtraaataaaggtttccaacaccctgaaaagccgactggatctcaggccagcagatgatgccagaagtccggggagccttgtttggtccaaatgccaacagct

SEQ ID NO: 153903 - DNA, 201 bp, Homo sapiens
tacttttgtgcctcctcttctctcttcatctctctctctctctcctcctaccccgtaataactggccactctccatattttccagtctacagcccaaaagrgagatggacacattgatttagctagttactctctacccacttggacagtgtcttttgctccaggtcccctcattggttgctcactggcctatggatacta

SEQ ID NO: 153904 - DNA, 201 bp, Homo sapiens
tgattcctttggttttcaattctgagtttcagtatttttgacaaaggaaaggaaaaaaaaaaaacagaacagaacagaaccaaaaaaacaagaacctgctkcaatcctgtctcaagattgaagggccactgaagattcaactctcctgatgatggcagaagaatggaatgccagtattccagaatacttcttgtgagccca

SEQ ID NO: 153905 - DNA, 201 bp, Homo sapiens
aaccggggtggatatctgtaatgtgatcctaccagggatggggtaagaggtagttggagatatcatttagaatctgttccccaaaatgaaaaaagacagcmtaggtctctgtatttacaagcatgttactgagttgaatgtgcacatcatcaagctgcttttctgttgcatttttattacgtggttctcttgtatttaagg

SEQ ID NO: 153906 - DNA, 201 bp, Homo sapiens
gcttgtctgtttacaccaatgagcactctctgctctgttaaaataattcctgcattcaccaagagaaaatgaaagccacttcagtggtgttttattatagraatttaaataaattaatgcatatgattataggcttgctattttgtcattcttttttgactttattactacattgtccaggccagacttccatgtcactaa

SEQ ID NO: 153907 - DNA, 201 bp, Homo sapiens
tgtaattacttttggaaatgcattttatgagacctagtaaagtcaatatcaatgatatggactaaaaatcattatcatgcttggaacacaagtttttagarcacactgcatcagtgatgctatgtactttgaaaaatgaattatagcattatggactacatccttccagaattgattttgaaaatccaaagttgagtattt

SEQ ID NO: 153908 - DNA, 201 bp, Homo sapiens
cttctgatatttgaagaaacaagaatgtctaagtggcttcctctttgctgttcgagtattgctctgtctttttcagtggatgcccctctgtcactaatgtscttgcctaattgctaacaatgggagagagtgtcatgtaatatgatcaggaacccacctctagtttatctcaaagtagcacagctccagttggttctgcag

SEQ ID NO: 153909 - DNA, 201 bp, Homo sapiens
gagcactctctgctctgttaaaataattcctgcattcaccaagagaaaatgaaagccacttcagtggtgttttattataggaatttaaataaattaatgcrtatgattataggcttgctattttgtcattcttttttgactttattactacattgtccaggccagacttccatgtcactaattacccaaaaagacccagag

SEQ ID NO: 153910 - DNA, 201 bp, Homo sapiens
acagtagacaagaacacagggagaggaggctgtttttttcatatgtcactaaaattgtaatagtctaaaagaaggaagtcgaagtgagaaaaaaacatagmccatgagagtgacctcccttaagtccccagggctaaaagttaagaatatgagatctccctttcagctgtcaagtatcattttgtgatcttaaataaattt

SEQ ID NO: 153911 - DNA, 201 bp, Homo sapiens
atattttggcatggctcttggttaaagggtccaaagagacctcctgcccaaagttaggattgccttctctgagcaacagaattcccacagatctatatagycttagctgaacaggattagggttccatctagttgtagggtgttccttttctcagccttgtttgtgtgcatagacacaaacatacaccatggacacttcca

SEQ ID NO: 153912 - DNA, 201 bp, Homo sapiens
gactgttcccatggtcatcttaatctgaagttgggaaagcagcgttatagatgatatgcccggtatttaaagaaaatcagagaagaaaggcatagagacasgatgcattcacattttggagaaacctactatatggcagacactatatgtcaggtactgtactaggtactttataactgcatttatctagttaattctcta

SEQ ID NO: 153913 - DNA, 201 bp, Homo sapiens
tattattcccacaaaatccttgattacacagtcaatctaattcagtgggattacacaggacgtgaatatcaaaagaagagaagatgggaatcatttgggayaccttgatcactacaccatattatttatctcaaatacatacacttccaactttcagaattagtgacttattctaatataggttaaagacactccaaaaag

SEQ ID NO: 153914 - DNA, 201 bp, Homo sapiens
gaagccacaattttcttaaggatcaacctcaaaatcacactatattattcccacaaaatccttgattacacagtcaatctaattcagtgggattacacagsacgtgaatatcaaaagaagagaagatgggaatcatttgggataccttgatcactacaccatattatttatctcaaatacatacacttccaactttcagaa

SEQ ID NO: 153915 - DNA, 201 bp, Homo sapiens
tttaattgtaactttttatgtaaggcactacaaatttatggtttgagagagtaaagttcctactgagatacctagaaaagaagtattttccaaatcccttkgaccaaaaaaaacaaaaagactttgagcaacagatagattcttccagatctatgcatggctgaagaaggtctattagcctcctgccattttccctttttt

SEQ ID NO: 153916 - DNA, 201 bp, Homo sapiens
acattatcttataaaagatttcattgtttaggatttagaggtaactgttaggaaaggttttgttttatattgtttcaaaaggaaatttatacttgcttagyttaagaaattacatgcataacttcccaagcaactttgattttcctaaaataactgcaagcatttcttattcaatcaaccaatcaatatatatttattgac

SEQ ID NO: 153917 - DNA, 201 bp, Homo sapiens
ctaattgctaacaatgggagagagtgtcatgtaatatgatcaggaacccacctctagtttatctcaaagtagcacagctccagttggttctgcagcattakgtgatgggagcagatggtggctgcatgcacttcaccaagatcttcctctggctcccagcaacctagtctagaggtgatgtgtatggtgttctctgccctg

SEQ ID NO: 153918 - DNA, 201 bp, Homo sapiens
tgcttatgcacacagggactgttcccatggtcatcttaatctgaagttgggaaagcagcgttatagatgatatgcccggtatttaaagaaaatcagagaaraaaggcatagagacaggatgcattcacattttggagaaacctactatatggcagacactatatgtcaggtactgtactaggtactttataactgcattta

SEQ ID NO: 153919 - DNA, 201 bp, Homo sapiens
gcacacagggactgttcccatggtcatcttaatctgaagttgggaaagcagcgttatagatgatatgcccggtatttaaagaaaatcagagaagaaaggcrtagagacaggatgcattcacattttggagaaacctactatatggcagacactatatgtcaggtactgtactaggtactttataactgcatttatctagtt

SEQ ID NO: 153920 - DNA, 201 bp, Homo sapiens
atgccgaggaaaaaagccaatccttaaaggctctatgctttatgattcatttgtataacattcctgaaatgacaaaacgacagaaatggaaaacagactaktggttgccagggtttagggaaagcatggaggtggaggggagtgatgtagtgtagtggacaaaaggggagatacttgtggtaaggaaaacactctttctat

SEQ ID NO: 153921 - DNA, 201 bp, Homo sapiens
atatgatcaggaacccacctctagtttatctcaaagtagcacagctccagttggttctgcagcattaggtgatgggagcagatggtggctgcatgcacttyaccaagatcttcctctggctcccagcaacctagtctagaggtgatgtgtatggtgttctctgccctgaagtctctgctcttgagatttaagacacaggtg

SEQ ID NO: 153922 - DNA, 201 bp, Homo sapiens
atgaaatatttaagtgtcaatagaatgcccaactcatagtaggtactaaataaatacttacctgataaaaagaaaattgcaagatctttcaagtatcttaytcctgaaacattgtggttagataattataagttaaaaaaattgtttcattcaaacaaataatttgataaacaataattgactaataaaaagctagtctgc

SEQ ID NO: 153923 - DNA, 201 bp, Homo sapiens
gataatatagatattactggagcattttattttatagctcaggattatactactaataataacactttctctacttagaattttgtttgcagttatatgcyggagaattacttattttaagaaagttgttccacctttctgcatgatcaccaacatttattgattaatagctgtgtgtggatcctaagcactctatagccc

SEQ ID NO: 153924 - DNA, 201 bp, Homo sapiens
tattcctagtgtatttagcattgaatattatttttgtagttggcttgtgtatgctttcagctacaagtaaccaaaaacttgaacttatacccaaaaaggtkaaataacacataacaagaaaacctgatgcagggtggtcccgtggtgcattaattcagaggcttggtgacttcatccttggggtgtgttcccctcagtcat

SEQ ID NO: 153925 - DNA, 201 bp, Homo sapiens
gtcttaaaggcaatgctctttcctttagattttattcctagtgtatttagcattgaatattatttttgtagttggcttgtgtatgctttcagctacaagtraccaaaaacttgaacttatacccaaaaaggttaaataacacataacaagaaaacctgatgcagggtggtcccgtggtgcattaattcagaggcttggtga

SEQ ID NO: 153926 - DNA, 201 bp, Homo sapiens
actgtcttaaaggcaatgctctttcctttagattttattcctagtgtatttagcattgaatattatttttgtagttggcttgtgtatgctttcagctacamgtaaccaaaaacttgaacttatacccaaaaaggttaaataacacataacaagaaaacctgatgcagggtggtcccgtggtgcattaattcagaggcttgg

SEQ ID NO: 153927 - DNA, 201 bp, Homo sapiens
acacaccaatgatgcaatctggtcccctcctccagagatctgatctgggcagagttaggtcagagaattctggcatcccaggtactcagtgcatggtctakgaaaggtgtggatgccatatacagacacctgggccctcctcaccttctgtgaaagtgatgtgtgtgaaagagagcaagagaagatcctctaaagtacagt

SEQ ID NO: 153928 - DNA, 201 bp, Homo sapiens
tggggccattgatacacacatcaaagccccaggaatcctttgaacactcctcgggccttggagcctacacaccaatgatgcaatctggtcccctcctccasagatctgatctgggcagagttaggtcagagaattctggcatcccaggtactcagtgcatggtctaggaaaggtgtggatgccatatacagacacctgggc

SEQ ID NO: 153929 - DNA, 201 bp, Homo sapiens
tcgacttttagtaatagccattctaactggcatgagatgctatctcattgtggttttgatatgcatttctctgataattagtaacgttgagcattttttcwtgtgtttgctgacagcttcctttgagaagtgtctgttcacatcttttgtccattttttaatgaggttgtttgtttttgcttgttcaattgtttaagttcc

SEQ ID NO: 153930 - DNA, 201 bp, Homo sapiens
cctcgccagcatgtgctgtttcgacttttagtaatagccattctaactggcatgagatgctatctcattgtggttttgatatgcatttctctgataattaktaacgttgagcattttttcttgtgtttgctgacagcttcctttgagaagtgtctgttcacatcttttgtccattttttaatgaggttgtttgtttttgct

SEQ ID NO: 153931 - DNA, 201 bp, Homo sapiens
tcttccgtaggggtatttgtggacttaacgcaggagctgaagggtgatttggaccatattaatcacattggtcatgagaaatgattaacatttgtggatgwtttggtgcctttatgtcggcaaaggttgtacaatgggtttcgacatgcttgcattccagaaatgtatagaaattctagaagtctaattacttctgaattc

SEQ ID NO: 153932 - DNA, 201 bp, Homo sapiens
gcagcttcagtaagagaggactgagtgtgcccagttggatcttccgtaggggtatttgtggacttaacgcaggagctgaagggtgatttggaccatattartcacattggtcatgagaaatgattaacatttgtggatgatttggtgcctttatgtcggcaaaggttgtacaatgggtttcgacatgcttgcattccagaa

SEQ ID NO: 153933 - DNA, 201 bp, Homo sapiens
aaaaagccaatccttaaaggctctatgctttatgattcatttgtataacattcctgaaatgacaaaacgacagaaatggaaaacagactagtggttgccasggtttagggaaagcatggaggtggaggggagtgatgtagtgtagtggacaaaaggggagatacttgtggtaaggaaaacactctttctatcaatattaat

SEQ ID NO: 153934 - DNA, 201 bp, Homo sapiens
caatccttaaaggctctatgctttatgattcatttgtataacattcctgaaatgacaaaacgacagaaatggaaaacagactagtggttgccagggtttakggaaagcatggaggtggaggggagtgatgtagtgtagtggacaaaaggggagatacttgtggtaaggaaaacactctttctatcaatattaataccttgg

SEQ ID NO: 153935 - DNA, 201 bp, Homo sapiens
acattcctgaaatgacaaaacgacagaaatggaaaacagactagtggttgccagggtttagggaaagcatggaggtggaggggagtgatgtagtgtagtgsacaaaaggggagatacttgtggtaaggaaaacactctttctatcaatattaataccttggttgtaatattgtactatagcttttcaagatgttaccatta

SEQ ID NO: 153936 - DNA, 201 bp, Homo sapiens
ggaaaacagactagtggttgccagggtttagggaaagcatggaggtggaggggagtgatgtagtgtagtggacaaaaggggagatacttgtggtaaggaamacactctttctatcaatattaataccttggttgtaatattgtactatagcttttcaagatgttaccattaggggaactgggtaaaaagtacaagagatct

SEQ ID NO: 153937 - DNA, 201 bp, Homo sapiens
gggtttagggaaagcatggaggtggaggggagtgatgtagtgtagtggacaaaaggggagatacttgtggtaaggaaaacactctttctatcaatattaayaccttggttgtaatattgtactatagcttttcaagatgttaccattaggggaactgggtaaaaagtacaagagatctctctgcattatttcttacaacta

SEQ ID NO: 153938 - DNA, 201 bp, Homo sapiens
ccttgtttgtgtgcatagacacaaacatacaccatggacacttccaaaggaagagtgtgtataggaagacagaattgagacctcttactatggtaagacasagtgtttggggtcctggatcccagccaacgccttcacttacatttcaacgtttccaaaatagttcttggaattcccactttaaaaatgaggaaacagact

SEQ ID NO: 153939 - DNA, 201 bp, Homo sapiens
tggaggtggaggggagtgatgtagtgtagtggacaaaaggggagatacttgtggtaaggaaaacactctttctatcaatattaataccttggttgtaataktgtactatagcttttcaagatgttaccattaggggaactgggtaaaaagtacaagagatctctctgcattatttcttacaactacatgtgactcaacagt

SEQ ID NO: 153940 - DNA, 201 bp, Homo sapiens
taaacaaccagatctctgaagaactcactcactatcatgaggacagcaccgagccattcatgagggatccgctcccatgacccaaacacctcctaccaggycccacctccaacgttgagggttacctttcaacgtgggatttggaggggacaaaacatccaaactatatcagtgtgtctaaagccttccaattaaaaaaaa

SEQ ID NO: 153941 - DNA, 201 bp, Homo sapiens
agtagacctgcataactggcaaaagcaaggacaacaaaaagcaaggagtgtttgggaaatggcaagttctatagtttacctctaacaggggggtgacatakgacaaggtcaaacctcttttgttcccacttagtgggggacctagagtacctgacatatggtaagtctcaataaacacatcttcattaaataaatgcaaga

SEQ ID NO: 153942 - DNA, 201 bp, Homo sapiens
aagggtgtgaataaacctgagaacaaaccagcagtagacctgcataactggcaaaagcaaggacaacaaaaagcaaggagtgtttgggaaatggcaagttmtatagtttacctctaacaggggggtgacataggacaaggtcaaacctcttttgttcccacttagtgggggacctagagtacctgacatatggtaagtctc

SEQ ID NO: 153943 - DNA, 201 bp, Homo sapiens
tgttgtgggggacaccagaaccaggggtccctttcagaagcagctgagtgatctgattaattaattcacactgaggagttacagatgaccatgaattactrcattattgagtgtagctagcatatttaaattttcttagacgtgatccagtatcttggcttccatttggaccatttaaagggtgggatgatccccatgcct

SEQ ID NO: 153944 - DNA, 201 bp, Homo sapiens
cattgtctgattatttaactgaaaatccccagataagagcattcgtaggacaacagagaagccatgaaactctaaggaaacatgaaacacctcaagtccaytcaccccagaagtgaggttatgacttgagtggcagttggaggaattccaagaaaggctaagctttagtgggaaaacagagagacccacaaagggaggtac

SEQ ID NO: 153945 - DNA, 201 bp, Homo sapiens
acaaacctaagaaataaaatagggccaaacattttgaatgtatttcatttatcaagttgcagctcctcattaaggctttgagtttctttaaaaaaacaagwtattctgctaactaatgtttactgggttagaattagagaactggactacattcctgacttctccattcattttctagagtgaccttgtgcaagttattac

SEQ ID NO: 153946 - DNA, 201 bp, Homo sapiens
ttgtgtgcatagacacaaacatacaccatggacacttccaaaggaagagtgtgtataggaagacagaattgagacctcttactatggtaagacagagtgtktggggtcctggatcccagccaacgccttcacttacatttcaacgtttccaaaatagttcttggaattcccactttaaaaatgaggaaacagactcaggaa

SEQ ID NO: 153947 - DNA, 201 bp, Homo sapiens
catagacacaaacatacaccatggacacttccaaaggaagagtgtgtataggaagacagaattgagacctcttactatggtaagacagagtgtttggggtsctggatcccagccaacgccttcacttacatttcaacgtttccaaaatagttcttggaattcccactttaaaaatgaggaaacagactcaggaatgttaat

SEQ ID NO: 153948 - DNA, 201 bp, Homo sapiens
caactaagcaaatagaaacagacaggagcaagtggagtttatctaaacctgcaggagggcagagaggattcacagccatatagaggctatcctcaatgtckgcggaggctggtgtttaatcagcagcatgaatccagccataaattataaaataaactcctcattcttttataccattgaccacacagaagctatgcagtt

SEQ ID NO: 153949 - DNA, 201 bp, Homo sapiens
tcatttgtataaacaaaggattacaaatgcacacagaaatagaatatcagagatcctcagcctggcttgtgcaaggagtgttaagtcatacctgattttcmcacagggtaaaaaaatgaggtgcttatttctaaccaagaaacagatgcctaacttgttcttttaaatagaaatgaccacaaacattttaatcaactgtaa

SEQ ID NO: 153950 - DNA, 201 bp, Homo sapiens
acatgctttctttaggtggcaggggagaagtattatcttcagctgcatcacaataaatttcacagggtgcctccttgtgtaactgaaaaagagaaactttwatctgtgttgactctttcacaaacaacatgtatgtgtttcttttacccagaagaggaagtggagaataatttcatagttggtgttagccaaaaattactt

SEQ ID NO: 153951 - DNA, 201 bp, Homo sapiens
tttgatgtttaatttggattgctattatactacaccaaacaggatttatttgctcacagttgagactggaaacatgctttctttaggtggcaggggagaartattatcttcagctgcatcacaataaatttcacagggtgcctccttgtgtaactgaaaaagagaaactttaatctgtgttgactctttcacaaacaacat

SEQ ID NO: 153952 - DNA, 201 bp, Homo sapiens
aacagactcaggaatgttaatggactctctgtaagagtgctagctgtgccttcccatatttattcatctcttaacattcttttgcactccagccagacttycaaccaactacccacacctgtgactctgcctgagtgagtccaccctgcccgcctgtagagcagactggaattgccagaactcgccctgcagaaaccttta

SEQ ID NO: 153953 - DNA, 201 bp, Homo sapiens
atcatagccaggaactcagtttttgtttttttgttctgttttgttttttgatacggagttttgctcgtgtcgcccaggctggagtgcaatagtgcgatctyggctcactgcaatctctgcctcccaggttcaagcaattctcctgcctcagccacccaagtagctggaagtacaggcgtgcgccaccacgcccagctaatt

SEQ ID NO: 153954 - DNA, 201 bp, Homo sapiens
ttaaataaaatagaacaatttgttatgaatttctgttttattgcaaaaaaaaatctattttccactttgaacaaaattttacattgggagaaaaaaaaaaaccacaggaaaagagcagatgtctttgagaatcatcaaagcatgtcttatttcttacacatgcacatgcctgctctctttctgcctgcatctacaaagggg

SEQ ID NO: 153955 - DNA, 201 bp, Homo sapiens
gagagtgcagtcaaatgaattgtaagggagaaaatggtcctgagtccaggccaagccattgggacaaaaggaggagtcctttgtgacagaaaagagacagrccctccattatgggacaaactaatgagttgcaggcaggagaagcagcacagtcagttgtcagggatagaattgctgaccagatagaagcgctagaaggag

SEQ ID NO: 153956 - DNA, 201 bp, Homo sapiens
aacttggaaggaagatagaatgataaatctataaaagcatattgaaccccttggggagtagccttatctacttatatacattaaggttatgtcagttttcmgcttctgatggtcttgtcaaaccagagcactgtttccaatagaaacttctccttgacattcacattatgttacgtcctcagtcctcatattttaagcttg

SEQ ID NO: 153957 - DNA, 201 bp, Homo sapiens
aactggcaaataaaaccatagtttcaatccttgaatccaagaggaccatagaaattagctttttggatcaacttgaatagcctcacaacagaaacagctgktttgtgttgaagcagtttaaatattttaaagctcatagcttggagaagactgtaattcagtagtttctctctttacccactctcttcaagtgttcactgt

SEQ ID NO: 153958 - DNA, 201 bp, Homo sapiens
aacttgctcaataatccaccctatattctgtgcctttcctttctcagttccctactctcctgccagtgtttcctggaatcaacactaaattaataacttgytctcaacccttgacttaaggtctgattctaggagccacaaatgatgacattgtcctaaaatcacccaattaataggtggaagacctaggcgatctgacgc

SEQ ID NO: 153959 - DNA, 201 bp, Homo sapiens
taatttttcaggtcctgccacatttagcacgacattagtaataataatggtcggtattattattaaatgcttgacaagctttttgtgtgtaggcattatgmtaaattttacattaaattatctctcttaaacctcacaacagtgaccctgcgaagtaggaacaaatcaaaagattcatcttagtgaggcgaattagttcgt

SEQ ID NO: 153960 - DNA, 201 bp, Homo sapiens
aataacttgctctcaacccttgacttaaggtctgattctaggagccacaaatgatgacattgtcctaaaatcacccaattaataggtggaagacctaggcratctgacgcaaaagcttcatactttgaagatctatccagccaccatgctcctgacctcacaacaactttcttctctcttgtacttccagtctccatctca

SEQ ID NO: 153961 - DNA, 201 bp, Homo sapiens
caattaataggtggaagacctaggcgatctgacgcaaaagcttcatactttgaagatctatccagccaccatgctcctgacctcacaacaactttcttctytcttgtacttccagtctccatctcaggggagcattccaactcccgtcaccagggatgacccatgtctctggccccctggtgcactcaagccaatcccctt

SEQ ID NO: 153962 - DNA, 201 bp, Homo sapiens
tcccactagagatagaaagtcactaggcattccttttattatgcataaattgaaaccaattttatttaagctttatttgacaaagtagcacttgtttttcscagaaaacaaatttccgggaaggagaagaaatgcggacaaatagtgaaaattcagagtaccagtaaggatccagtgaaaactaccttgtccttattatcc

SEQ ID NO: 153963 - DNA, 201 bp, Homo sapiens
gaaatgcggacaaatagtgaaaattcagagtaccagtaaggatccagtgaaaactaccttgtccttattatccttaatgttgaaaaaattcttatacacasaagtgttatgttatattctgtggtcgatcatcaaacaaggatggaataaacaagattcttccctgtttcatcactggtatatgccttgctcaaaatgtat

SEQ ID NO: 153964 - DNA, 201 bp, Homo sapiens
acacattttgaacagtcaacaaaatcccttccctcaaaaaggctaagtcagtcaccatgctctgtgtccctctgggctgaaatgatattagatttagtgargtgagccgtatatcacaagtactcccagtgctggacgaggaaatatttcattgcatgggattggaggtggatttagaattactctgtgccctcaaattct

SEQ ID NO: 153965 - DNA, 201 bp, Homo sapiens
attagagaactggactacattcctgacttctccattcattttctagagtgaccttgtgcaagttattacacaagtctgtcttgatttatttatctgtaaayttgcaaacaaaagagtcatctcatttttcctacaaaacttggaaggaagatagaatgataaatctataaaagcatattgaaccccttggggagtagcctt

SEQ ID NO: 153966 - DNA, 201 bp, Homo sapiens
caattgtcttatccttctctttttttctcactcatttttattgccattgaacatttaactttgctacatgttgtgagagagaaggaagaggagaaagagawgaaaaaagcagaataaaaaacaaatacttacctaaaaactgcttatcatatagaaattgctcaaaaatattcagcgcctaaatcaataaaaatatctaat

SEQ ID NO: 153967 - DNA, 201 bp, Homo sapiens
tcaaagtgtggttcttcagatcaataatatcagcactacctaaaacttgttagaaatgcaaattcttgtccccttccaaagacttactaaatcagaaattctgaagatgggactatattaggccattcttgcattgctataaagaaatacttgaggtgggctaatttataaacaaaagagatttaatcgacccatggctct

SEQ ID NO: 153968 - DNA, 201 bp, Homo sapiens
aaagagaagaaaaaagcagaataaaaaacaaatacttacctaaaaactgcttatcatatagaaattgctcaaaaatattcagcgcctaaatcaataaaaawatctaatatttatggagaacatatttacattaaggaatctctacaggcatttcctataatccaacaaggtagatgttgttattatcttcattttccagat

SEQ ID NO: 153969 - DNA, 201 bp, Homo sapiens
ttcaagacttcacatgtggcaccttcaaaacagttcaagcacccctacagaagtggtcatgctaaatgtaggtgatagtacagaaagagacaatgtcatgraaaaggggagaacagagccaaccagttctttgggagaaaggagcaggctaattgggagcaatggtcttgttcacagttgggtctccagaactttgtaccc

SEQ ID NO: 153970 - DNA, 201 bp, Homo sapiens
ttacctcaggaaattggtatgaaatttttcctgaaattgtatcctgtattttcctttttgctccctctccactggtaccagccaccagtctctctccaggmtcttcgggtttcctcctgcttccactcttaagaggcccaagtctgtttgccacttggctggcagagtacgctttagaaaatgtaaactacggccgggcgc

SEQ ID NO: 153971 - DNA, 201 bp, Homo sapiens
actcaattaaaaaacaggaaaaggatctgaatagacatttctccaaagaagacgtatgaatgtccaataagcacataaaaggtgttcagcattgttagtcrtcagggaaatgcaaatctaaaccatgatgaaatatcactttacactcctaggaatggctaaaataaaaaagacagggctggacatggtggctcacacctg

SEQ ID NO: 153972 - DNA, 201 bp, Homo sapiens
taaaataattgcaagtttgtggtaagtgctatgaaagaaacaataggctgagatcaagaatcacaagaagagatggggtgaccagggaagaactcctgacrtcttaatattaaagtgagacttgaaaaatatgaaagaaccagacctgcaaaattggagagagaagataacagcatgtgcaaaagacaagaggccaaaaag

SEQ ID NO: 153973 - DNA, 201 bp, Homo sapiens
cctgagtccccctgatcctcaactgactgcgtgacctcagtcactggaagattgccctgttaccttctgaatcagcccttgctttacccttcaggcccccrgcagctgagctcctgccttctttcctgagttgtacatgacctggtacccaagtccctccaaagcatggatatgttccttaccaccagtaatcacctgcct

SEQ ID NO: 153974 - DNA, 201 bp, Homo sapiens
tacaatgtgccctacattcatctacacttttccatctctttgccaggatcccccatcctcaaggttaatcttcctagggtaccatttggatcaatctttgrctcaaaattattcaaggactccctcaacaaatattatgtcaaaaaatatttctttaagtatctagagtcctccgtgatactggcccatcatacaattttt

SEQ ID NO: 153975 - DNA, 201 bp, Homo sapiens
gagaactgagtgaagaatgtatcgatgttgctggtatgttgtaagcgcttactgaatactagccattgctataatattcttttattccctaaacattgtamacaagtaaaggtgagtgacaaattaggacaaatattcataaaacatatgatgggcaaaaattattattactagaaggaagagaatactccattagaagaa

SEQ ID NO: 153976 - DNA, 201 bp, Homo sapiens
tggggacatatattcaaactatcagggacccagaaaactactttaataagttctgcaggtcattctgatgtccactaaatttgaaacacactggtctaggrcctatactttctccaaacatactctctacagaggattcccctaacctaccatgcttggttataccaccagtgattgcttattgacagtgcctcttcctgg

SEQ ID NO: 153977 - DNA, 201 bp, Homo sapiens
ctcataagagctgcaatatacgctagtcaaagaggcaatggctgcaccaatttaggagtgtttcatttttctttatcagtgatctacagtctctatttccyagcttttacacataaaaaaaagaaaaacatagtggaaaaacattttctttaaagcattatatttttcctatttggtgactatatactatagatgttaaat

SEQ ID NO: 153978 - DNA, 201 bp, Homo sapiens
cagtgagccgagatcgcgccgctgcactccagcctgggggacagagcaagactccgtttcaaaaaaaaaaaaaaagaaagaaagaaaatgtaaattacttstgtacctgtctaaaactccccatggcttatactgcacccctgtaaaatccaaagccctgaccatgatctgatattcctatacggtgtggtcccgacctcc

SEQ ID NO: 153979 - DNA, 201 bp, Homo sapiens
gtggaaatttagtatgtttgctatctggttggaaaagtttgtaaactgagcgtgacaaatatcaacccaccactggagctccttgcaactaatgaaatgtrtcagccaaaaaaaaaacaaaaaacaaaaaaaacaaaaaaaaaaagcaacccccaaaaccctctcataagagctgcaatatacgctagtcaaagaggcaat

SEQ ID NO: 153980 - DNA, 201 bp, Homo sapiens
ctctcaggaatttaatcctcttcagagagcctattgtcttgaaattgcacatttagataaggaaaccaagttctttttatcaaagtactttatgaatattragaaatgtcagattcagtaatttatcacctggataccatgtgctttgaagcggaggatgcgataacaatggtaatgacacagtaaattatgttaccatgg

SEQ ID NO: 153981 - DNA, 201 bp, Homo sapiens
ccctgccatggaaacatgcttgcttccccttcaccttcctccatgattgtaagtttcctgaggcctccccaaaaacagaagcctgtacagcccacaggctrcgagccaattaaacctcttttctttatagattacccagtctcggttatgtctttatagcagtgtgagaacaaattaatacaatttgtatatttttctgtc

SEQ ID NO: 153982 - DNA, 201 bp, Homo sapiens
gccggggtggacagagtctccctgcgaacctccagaagcagcacaaccctgcccactcacggtagactcccgatctccgggctgtagaataatacatctgygctattttaagccactgtttgtgattgtctgttacagaagtaatagaaaactaatatgatgtttaatattcataaatgttttataggtttgtgacatgat

SEQ ID NO: 153983 - DNA, 201 bp, Homo sapiens
gttgatgagtgtgcgtatttacctgtatatctatatccatctatctacttatatatacataccattcttcagattaaatgtattacctttccttacggctrtctcttcacatggattatatatttctttgtggatccttcatcatttgggttgaaatgagcaataccctgtactttaataacctgtctaacataagatcca

SEQ ID NO: 153984 - DNA, 201 bp, Homo sapiens
tatattatttttgtggtcctagtgattatataattgtgtatatatatatagatataattatatatgatatatgtatatttgtatatatgatataattgtgygtgtatatatatatatatatatattttttttttttttgagacagagtctcactctgtcgcccaggctggagttcagtggcgcaatctcagctcactgtaa

SEQ ID NO: 153985 - DNA, 201 bp, Homo sapiens
ctaataagctgatcagcaagtatttttctccttctcattgaggttcggagtaatctaaagggtcaaggttttcaatctttttctcttgcattaaaatgatstgtcatttccatcatgacaacactcaaaagtcaatttttggggccttgttaaagtgccccatagaataattcagcggtgatggagatggagctcttctca

SEQ ID NO: 153986 - DNA, 201 bp, Homo sapiens
ggcatttcctataatccaacaaggtagatgttgttattatcttcattttccagataaggaaactgaagctcagaaaaacaaaataagataaccgaggtcayccagagagaaaacgacagaagaagacacataaccagttctgtctgactcaaaaatccatgttcttaacgaccatactctcttgtaacaggcatatgcctg

SEQ ID NO: 153987 - DNA, 201 bp, Homo sapiens
caacaaggtagatgttgttattatcttcattttccagataaggaaactgaagctcagaaaaacaaaataagataaccgaggtcatccagagagaaaacgayagaagaagacacataaccagttctgtctgactcaaaaatccatgttcttaacgaccatactctcttgtaacaggcatatgcctggtgctttcctgacatc

SEQ ID NO: 153988 - DNA, 201 bp, Homo sapiens
taacaggcatatgcctggtgctttcctgacatcagttcatttaatggacattaaacaagaaatagattgcttgatatatgatgcagctgaaaaaagccagrcatgactaagacagagatttgagacactagctccagcaatagctgtgttaacttggcacattatttaaattctctgagctcaggttcttaatctgtaaaa

SEQ ID NO: 153989 - DNA, 201 bp, Homo sapiens
aaattactaattatccttgaagacctaattccattcattcattcacttgttcattccacaaatatttgagagaaattattataggctgtagaccattctakacactattggggatacaatggttaaaaattgtgtatacacacacacacatatatatgtactatatatatatatatgcaatcatgtgtatcatgtatatat

SEQ ID NO: 153990 - DNA, 201 bp, Homo sapiens
cctagagactgattatatatggcttatggatatgccaaacgtatcttgtgtatacacacacacacacacacacacacacgaaagagagaagaggtgagaasaaaaagcacatgtaatgagaaggtactcaagacctcattcccagattacatggctcacaagcatccctgggtaggatgagaagttagtccatcgaactcc

SEQ ID NO: 153991 - DNA, 201 bp, Homo sapiens
acatcagttcatttaatggacattaaacaagaaatagattgcttgatatatgatgcagctgaaaaaagccagacatgactaagacagagatttgagacacyagctccagcaatagctgtgttaacttggcacattatttaaattctctgagctcaggttcttaatctgtaaaatgagcttatctgtatctactcttctgtt

SEQ ID NO: 153992 - DNA, 201 bp, Homo sapiens
gcatttgctttcctcttctcaggtcccttcccctcacactctccgaaggatgcgtagtgcctgcacacacacacacacacacacacacacacacacacaamtgcctctctggtgatcatttaaacttcggaaaataaaaagtatgtttctttacactgaaaaattggagaaatgtgccaggatgtctaatcatggggcatg

SEQ ID NO: 153993 - DNA, 201 bp, Homo sapiens
gctatacacgaagctggcatctgctcggcttctggggaggcctcagtgagctgtttttcatggcaaaaggcaaagagggagcaggcatgtcacatgggagragcaggaacaagagagtgagttgggggcgaaataccacacacttaaacaaccagatctcatgagaactcactgtggcaaggacagcaccaagccatgagg

SEQ ID NO: 153994 - DNA, 201 bp, Homo sapiens
tccattgatggcatcttcattcttacttacagttgtttgggcaataaaacttggaatcatctttgattcttttctttctctcacatcccatatctaatccrttagagaattaagaggattccactttcaaatgtcaagcaccacttgtccccattgtcgctgctactgccctggtctaagcccccatcatctcttgtttgg

SEQ ID NO: 153995 - DNA, 201 bp, Homo sapiens
cactgaaacagaaaatgaaaatttaaattagtattgattatatacatagtacccaaaataccttatttttatttaaggttaaagggtatatctcacatacrcttcttcttttctgacatttcaaactaatgggagggatactacatttctcatctttcaattcctttcttcagaaccctttggtcctttttgattttctct

SEQ ID NO: 153996 - DNA, 201 bp, Homo sapiens
agcatttgctttcctcttctcaggtcccttcccctcacactctccgaaggatgcgtagtgcctgcacacacacacacacacacacacacacacacacacaactgcctctctggtgatcatttaaacttcggaaaataaaaagtatgtttctttacactgaaaaattggagaaatgtgccaggatgtctaatcatggggcat

SEQ ID NO: 153997 - DNA, 201 bp, Homo sapiens
ctgggaaagtgagaatctaggatgtgtgggctcaacctcaaagttgggatccccaaacataggaacagggtgggatatgaacaagaacataagtgacagawaacaacatcaatttttccttttttcgctggatcattccttcaccacacaaacatgccgttcttcctcccatcctcaatattctcttctaaccctactttc

SEQ ID NO: 153998 - DNA, 201 bp, Homo sapiens
gctcaccagccatcccaacaccatttattgaatagagagttctttctattgcttatttttgtcgactttgtcaaagatcagatggctgtaggcatgcaacyttatttcttgattctctattctgttttatgtgtctgtttttgtaccagtaccatcttgtttgggttactataaccttatagtatagttcaaagttgagta

SEQ ID NO: 153999 - DNA, 201 bp, Homo sapiens
catttgggagcatggttgattccctcagtcaatggctattcattaaatatatcaaatgcaaggtgctagctcctagtcaagatctttggagataatgaatrtaaacatctcccatgaataacatttgaaacatctggaaaaacctatccaattggacaaaattccaggcacctgtgaaaagacagctccaaagactcatta

SEQ ID NO: 154000 - DNA, 201 bp, Homo sapiens
ctgtgtgtggatcctaagcactctatagccctgtcagtaacatctgctgttattcccttttaaagatgcaaaggtggaattcacagaatgaaacaacatayctacgtagctagcaagtggtaaagcaaaattggaactcaggaggtcagaattccagacccatgctatgactcattgtgctaagatgtttaaaatactaac

SEQ ID NO: 154001 - DNA, 201 bp, Homo sapiens
caaaggggatacaggagtgcaaaccagtgagtgagatccagcgatataggtgccacaataaaatacgagcagggtgccaggagggcacaacggagagagcyaagtcagactgtggggagtgtggaagagctccatgcccatcaccctgtgctgtgtctcaaaagatgagaagctgttcttcagctgggatttggtgttggg

SEQ ID NO: 154002 - DNA, 201 bp, Homo sapiens
gggtttcgccatgttggccaggctgctctcgaactcttgacctcaagtgatcctcccacctcagcctcccaaagtgctgggattataggcatgagccatcrcacccagcccaatctggatatgtttatactctcattaatacttttatttctttatttcatctttcatattatttattctccttgtccattcattgattat

SEQ ID NO: 154003 - DNA, 201 bp, Homo sapiens
tctgtgccagcttatttttcagactggcttccatcaaggcagccagagagctgccagcaacagcaggaactacatgctttcttattcacattcactaggasataaaatattacttcccataaccatccaactgaggctctgagcttcattctcagatcacctgcaaaataatcactgcagcctgggaagccctgagtcacc

SEQ ID NO: 154004 - DNA, 201 bp, Homo sapiens
tttattatgttctcccaagtgaaaagtagctccaattctttcaactgaaatgataaccagaatgacttaaaaggaaatggggctggggaattgtggaaccycctgctacccagagaaaaacccatcggtgccatggacaacgcacctcactgtcccctgagggaaagagcgtggcctcaaaggtccttcccggatgctgcc

SEQ ID NO: 154005 - DNA, 201 bp, Homo sapiens
gactggcttccatcaaggcagccagagagctgccagcaacagcaggaactacatgctttcttattcacattcactaggacataaaatattacttcccatarccatccaactgaggctctgagcttcattctcagatcacctgcaaaataatcactgcagcctgggaagccctgagtcacctggtgtagtgggttgaatggt

SEQ ID NO: 154006 - DNA, 201 bp, Homo sapiens
tcttgtatttaaggggtttcccctcctattttaagaaatgtgctttataaccagctactaaatagttggctttgcatcattacacactgtcccacttaacrtctaagtacccaactaaactgattgtatgtatttgttgtttttatttttattttatccatagacttcccttaatatttagataataataactttactact

SEQ ID NO: 154007 - DNA, 201 bp, Homo sapiens
ttcacgcaaacaacaaatgttatttccaatgccagttttcacacaattattattttaaaattattttcaggatactgttaacttttttaaatttatgtagygctaggtcaaattataagatttctatctagttagccaacccatgtggttgagttacaatgtacagataaattaattttaatttcagttttttaacttagt

SEQ ID NO: 154008 - DNA, 201 bp, Homo sapiens
atcatcagtttttctggtaggaaaatgattaggataattattatgcagattactctagagctttgatttcaataagccactcttagcacctcactctgccytcaacctttaaataaacttttcattcacgcaaacaacaaatgttatttccaatgccagttttcacacaattattattttaaaattattttcaggatactg

SEQ ID NO: 154009 - DNA, 201 bp, Homo sapiens
gctactgatggatctggggagttgaagatactgcaactgaacactcaggtggtctcttactggtggcaggaaataaatgttcttcttcaatgtagaaatcmccatggagatggcattatagagctagcatctcagtgataaaaagccatggggaccaggttccttggtccctgggagtttatcaggggttgaaaggtactt

SEQ ID NO: 154010 - DNA, 201 bp, Homo sapiens
attaagagtgtggggaaaaagagcaatgaaatgtccttgtttcccccagatgaaaatctaggcaggattgtgtgttcattagccacataaattgctatttmaagtgaacaaactcagacttcacaagcatagattctgtttggactcatatcattacctttcctaatgaaatgcttcccgttgttgccttcatacagaaaa

SEQ ID NO: 154011 - DNA, 201 bp, Homo sapiens
cttgggatgcaaagttagttcaacatccacaaatcaataaatatgattcatcacacaaacagaactaaaaccacagactacatgattatctcaatagatayagaaagggctttcaataaaattcaactttccctcatgttaaactgttatacaaatattttaaacaagacccaggatatgttgtcacagacagagacaagg

SEQ ID NO: 154012 - DNA, 201 bp, Homo sapiens
ttgtgctgcaaagcatggcagagaggtcaaagaggaagcagacacgtgcaaagagagccaaaacctaagggatgtcttggttatataactactctccctakaactaatccattccctcaagaactaattcaaccttactggagctagaactgacttattgtcatgagaatagcaccaagccattcatgaaggatcggcccc

SEQ ID NO: 154013 - DNA, 201 bp, Homo sapiens
tgacactggcttctgacaagggcttttgtgctgcaaagcatggcagagaggtcaaagaggaagcagacacgtgcaaagagagccaaaacctaagggatgtsttggttatataactactctccctagaactaatccattccctcaagaactaattcaaccttactggagctagaactgacttattgtcatgagaatagcacc

SEQ ID NO: 154014 - DNA, 201 bp, Homo sapiens
tagcttttcaatttcttttttttttttttttgtcttttggtaatcctcttttatgaagattctcttcaaattctttgtcatttttctgagagattgacttyaccttattgatttatgggagttatttatatatgcttttgtcagatacatgtattgcaatatcttcctattattgataaattttccttttattctgttaat

SEQ ID NO: 154015 - DNA, 201 bp, Homo sapiens
ttcctcatgactaatgaaggattgagtagcttttcaatttcttttttttttttttttgtcttttggtaatcctcttttatgaagattctcttcaaattctktgtcatttttctgagagattgactttaccttattgatttatgggagttatttatatatgcttttgtcagatacatgtattgcaatatcttcctattattg

SEQ ID NO: 154016 - DNA, 201 bp, Homo sapiens
atcttagctatactgatgagtgtgtacaatatagacttttttattttcctcatgactaatgaaggattgagtagcttttcaatttcttttttttttttttktgtcttttggtaatcctcttttatgaagattctcttcaaattctttgtcatttttctgagagattgactttaccttattgatttatgggagttatttata

SEQ ID NO: 154017 - DNA, 201 bp, Homo sapiens
agagatttgagacactagctccagcaatagctgtgttaacttggcacattatttaaattctctgagctcaggttcttaatctgtaaaatgagcttatctgyatctactcttctgtttgacgcagtgattaaaccagcttgctccatgccctagtctattaattaactaggcaaacaaaatggagaagaatattcaagagag

SEQ ID NO: 154018 - DNA, 201 bp, Homo sapiens
tccagcaatagctgtgttaacttggcacattatttaaattctctgagctcaggttcttaatctgtaaaatgagcttatctgtatctactcttctgtttgaygcagtgattaaaccagcttgctccatgccctagtctattaattaactaggcaaacaaaatggagaagaatattcaagagagaggaaataagtcacagaga

SEQ ID NO: 154019 - DNA, 201 bp, Homo sapiens
agattctactaccaattgtggaagagaacaagttctggcagggaggtctctgatttctagagcagctctccctttctcttcagaccacattagactattgrcagtccacagttggtggccactccaaaatgtgaataggaatttaagccataaagcctgcatcctaaaatcatatgatcttagctcataactggggagaat

SEQ ID NO: 154020 - DNA, 201 bp, Homo sapiens
aatggttaaaaattgtgtatacacacacacacatatatatgtactatatatatatatatgcaatcatgtgtatcatgtatatatatatttgcaatcatgtktatattccctaggaaactttccccaccactccctccacctctaggctgatgacaccatgcattatgtccacagcacagaatttattcatttacttttcca

SEQ ID NO: 154021 - DNA, 201 bp, Homo sapiens
agaatgagatcctgaatatcaaaaggtttactctaagatttaattcagccagaccaatgttgggaatctgaaaggggctgttgtttgtcacattaattacrtgcttgtcgggtagatctcagtgggaagaaattttgtacttgggaatttccaagacaacctaaaactgttgtttctcatactgattttactatttcttta

SEQ ID NO: 154022 - DNA, 201 bp, Homo sapiens
cctttttgcttaggattgctttcactattcaggctcctttttcattgaagtgagttttaggataggtttgttttttttttttccagttctgtgaaaaatgycattggtagtttgataggaatagtgttgaatctgcagtttgctttgggaagtacagccactttgtactcccacttatgggtgagaacaggcagtgtttgg

SEQ ID NO: 154023 - DNA, 201 bp, Homo sapiens
taggcaaacaaaatggagaagaatattcaagagagaggaaataagtcacagagacaggaaatggaaatgattctgcctggctcatagtttctcccagataycctccctcacctgcgagccaggattcctctttcatgttttcctgtgccaattttttttttgtcctttaatgcaccaagttttttctccatctcattacct

SEQ ID NO: 154024 - DNA, 201 bp, Homo sapiens
agacaggaaatggaaatgattctgcctggctcatagtttctcccagatatcctccctcacctgcgagccaggattcctctttcatgttttcctgtgccaawtttttttttgtcctttaatgcaccaagttttttctccatctcattacctcccataagtataactttggttttcttatttgtatctccctaccccaccctg

SEQ ID NO: 154025 - DNA, 201 bp, Homo sapiens
ccctttgagttttgttcttctattggaattttactcactggattattcttggcttggccttttgctttttaatctatcctctttccctcctacagtgattrtatctgctcttgtaagccaatgtctcttcttcacttgcttatcttcagaacatgagagccacgtaaccacctgcctattgatatgccattagtgctacct

SEQ ID NO: 154026 - DNA, 201 bp, Homo sapiens
agaacctgctgcaatcctgtctcaagattgaagggccactgaagattcaactctcctgatgatggcagaagaatggaatgccagtattccagaatacttcytgtgagcccagcactgtggcaggtgctaaaggaataagaaagcaaccgagataggtagggaaaagagatagatacaagaggacagggggagcagttgaat

SEQ ID NO: 154027 - DNA, 201 bp, Homo sapiens
gattgttacaaattgcaacaaaatatttaagcagaatcaacaggaccccctttcctctttaagtccttgatatacagtgcaaaaaccctacctgaactatmgaggtatatttctatatgtgtgagagagaagagcacaggacgagagtgagagcactcgcaagtgattcctttggttttcaattctgagtttcagtatttt

SEQ ID NO: 154028 - DNA, 201 bp, Homo sapiens
tcatgtgtggccaatgacttacagtagacaagaacacagggagaggaggctgtttttttcatatgtcactaaaattgtaatagtctaaaagaaggaagtcraagtgagaaaaaaacatagaccatgagagtgacctcccttaagtccccagggctaaaagttaagaatatgagatctccctttcagctgtcaagtatcatt

SEQ ID NO: 154029 - DNA, 201 bp, Homo sapiens
tgtagaaaggcttgcatggaccaaagcacaactagatacatgtgggcctgtgcaccaaaagaggaggagcttgcttccatgttgcaaagggcaaaggcaamggtggtcttgacagtagaaggcaagcaatctaaacttcggatccagtgtgcagggaattgtcaggaatcaccagtggccagcacctgctggccttgtggg

SEQ ID NO: 154030 - DNA, 201 bp, Homo sapiens
cagtacataaattataattaacaaataggaatgtacttatgtatttgtcagtttatggacttgggagcatactagtggcatcagagtctgggcagatgcaygcctcccctttccccagtatcatgtagaaaggcttgcatggaccaaagcacaactagatacatgtgggcctgtgcaccaaaagaggaggagcttgcttcc

SEQ ID NO: 154031 - DNA, 201 bp, Homo sapiens
tttagtctacgataggctatcagtagttaaattttgggggagtcaaaagttatactcagatttttgatggcacaggggggttggctcccccctaaaccctrtattgttcaagggtcaacagtacataaattataattaacaaataggaatgtacttatgtatttgtcagtttatggacttgggagcatactagtggcatca

SEQ ID NO: 154032 - DNA, 201 bp, Homo sapiens
ggtgtgaagaaatataactgcacttctatctagattcaaggtaaatcacaaaagatacattattaagagtaatattataaattactccctgggcagtgccwtcaaggcccatgaatccagctgcacctccaccagccaacaactcctgaatctatacccagcttttcagtcctgctatctacctccagctctctaaggcac

SEQ ID NO: 154033 - DNA, 201 bp, Homo sapiens
aggattagggttccatctagttgtagggtgttccttttctcagccttgtttgtgtgcatagacacaaacatacaccatggacacttccaaaggaagagtgwgtataggaagacagaattgagacctcttactatggtaagacagagtgtttggggtcctggatcccagccaacgccttcacttacatttcaacgtttccaa

SEQ ID NO: 154034 - DNA, 201 bp, Homo sapiens
atttatcttatcaatgactggagacaattaggtctccttgatggtgtgaagaaatataactgcacttctatctagattcaaggtaaatcacaaaagatacrttattaagagtaatattataaattactccctgggcagtgccttcaaggcccatgaatccagctgcacctccaccagccaacaactcctgaatctataccc

SEQ ID NO: 154035 - DNA, 201 bp, Homo sapiens
aagtcatagatgctcagaatggttgagttacatcctattgcattacaggcaaagccaggacaaaaatccagggctctttcctccctatcctgtagatgccrtttctcattgctacattttctgtgaagaagctcactacaaaatgtatgttcagcatgccttgctaaattgttctggcagcttatatgaaatatgctctcc

SEQ ID NO: 154036 - DNA, 201 bp, Homo sapiens
caccatggacacttccaaaggaagagtgtgtataggaagacagaattgagacctcttactatggtaagacagagtgtttggggtcctggatcccagccaaygccttcacttacatttcaacgtttccaaaatagttcttggaattcccactttaaaaatgaggaaacagactcaggaatgttaatggactctctgtaagag

SEQ ID NO: 154037 - DNA, 201 bp, Homo sapiens
cagggctctttcctccctatcctgtagatgccatttctcattgctacattttctgtgaagaagctcactacaaaatgtatgttcagcatgccttgctaaaktgttctggcagcttatatgaaatatgctctccttgatactattttaaaacaaatatgtgaagttccttatccagtatacccacactcgtgactgtgcttt

SEQ ID NO: 154038 - DNA, 201 bp, Homo sapiens
ctctttcctccctatcctgtagatgccatttctcattgctacattttctgtgaagaagctcactacaaaatgtatgttcagcatgccttgctaaattgttstggcagcttatatgaaatatgctctccttgatactattttaaaacaaatatgtgaagttccttatccagtatacccacactcgtgactgtgctttcaaca

SEQ ID NO: 154039 - DNA, 201 bp, Homo sapiens
cttatatgaaatatgctctccttgatactattttaaaacaaatatgtgaagttccttatccagtatacccacactcgtgactgtgctttcaacatttctcyttctttattttaacagaaccccaagtttcacatgcctgaggatgtacgagaaaaaaaggaaaatcttctactcaattctgagagatctactaggctctta

SEQ ID NO: 154040 - DNA, 201 bp, Homo sapiens
ttgctaaattgttctggcagcttatatgaaatatgctctccttgatactattttaaaacaaatatgtgaagttccttatccagtatacccacactcgtgastgtgctttcaacatttctccttctttattttaacagaaccccaagtttcacatgcctgaggatgtacgagaaaaaaaggaaaatcttctactcaattctg

SEQ ID NO: 154041 - DNA, 201 bp, Homo sapiens
tggtataagtaaaaaccaaataaaattttaaaataaaaaagtgcctattatgataaaatttaataaatgggaaggacagaggagcaatcatagttttcaarattactctatctctctttattcctcttattttctctaattcccactcgagtatctgtaacatatacaggttcttatcaatataagcaaataaagtaagca

SEQ ID NO: 154042 - DNA, 201 bp, Homo sapiens
ttattataggctgtagaccattctagacactattggggatacaatggttaaaaattgtgtatacacacacacacatatatatgtactatatatatatatawgcaatcatgtgtatcatgtatatatatatttgcaatcatgtttatattccctaggaaactttccccaccactccctccacctctaggctgatgacaccat

SEQ ID NO: 154043 - DNA, 201 bp, Homo sapiens
ttactctagaaaaatttccacagccaaggacacatgtaacgtacacaaagagttatcgccatctttcactggggataattcaaagatttaaacttatatartgatatgaattatttgaagggagatcagcacacataacacaaaagttagtttttaccccaagaactagaaacaaagaacctgaaaatgaaaagacctcaa

SEQ ID NO: 154044 - DNA, 201 bp, Homo sapiens
ttctgccatgattgtgaggcctccccagccatgtggaactgtgagttcattaaacatctttttctttataaattacccagtctcgggtgtgtctttattakcagcatgagaacagactaatacacggggctatacacggggctatacacgttggcatatggtattcagggggttattcacacagtcctcttgcactagaaa

SEQ ID NO: 154045 - DNA, 201 bp, Homo sapiens
tcaggtttgggtccaagtgaggctgcacatctggccaaggagaactggtctctgtgtaaggcagagtgtcaacttagttacaggtcacacatgtggacacrcaagcctacaacttcgacctctggcacatcctatgtcccctactaacttaaagcatttcatcagcaatgtaaatattgccaagaagttgctaaggaaaag

SEQ ID NO: 154046 - DNA, 201 bp, Homo sapiens
gaccaggtgggaggtaattgaatcatgggggtgggtttttcccatgctgtcctcgtgatagtgaataagtctcacaagatttgatggttttataaagggcmgttcccctgcacactctccctcttgcctgccaccatataagacaggcctttgctcttcctttaccttctgccatgattgtgaggcctccccagccatgtg

SEQ ID NO: 154047 - DNA, 201 bp, Homo sapiens
acaatatgagaatatagcagaaaaaccagatgaggctgtggctttttatattcaacagccaataaaaaatgcacaacatgctaagatcaaagcaacaaaascaaccttcttcttccagaaaaacttaagggaattgattctgttttcttttgagccttccacaaagagacaaaatgaacacaagcactaaaggtctacatt

SEQ ID NO: 154048 - DNA, 201 bp, Homo sapiens
atattctagtgcaatggaggtagagtggggtgaaaaagacaacagagaaggaaataaataaaatcatttctcagtgtgattagtgctatgagaaaaataakcagggttctgcaggaaatattttgaaagggagggaaataacctagacagggtgaatagggaaagcctttctacagaggtgactttccaactgagagctga

SEQ ID NO: 154049 - DNA, 201 bp, Homo sapiens
aagactgacttttgagcaccccaccctctcccatcatttatcttatcaatgactggagacaattaggtctccttgatggtgtgaagaaatataactgcacktctatctagattcaaggtaaatcacaaaagatacattattaagagtaatattataaattactccctgggcagtgccttcaaggcccatgaatccagctgc

SEQ ID NO: 154050 - DNA, 201 bp, Homo sapiens
cttatttgtatctccctaccccaccctgaccacaaggatgctccgtaagatcagggaccaagtctgtcttgctagctataccaccaacgcacagcccagtrcctggagcacagtttgtgctcagaaaacacgtgtttaatgaataactgaaggtggaagggcaaagggtgaggatggagagcgagatggggcagatggcac

SEQ ID NO: 154051 - DNA, 201 bp, Homo sapiens
gaaatgatgcagagtgataaaggaaaagaaggcctgaaaccatgtgtggaatcctctaccctttggtcagcctagtctattggagtataggagcccctacrtaaccctctctgtgacttttgaatttttcaagccattatttcctgctattaggaagtatgtacacatatgctagcacgtatccctccacacagagtcgcc

SEQ ID NO: 154052 - DNA, 201 bp, Homo sapiens
agaattcatagaaatgatgcagagtgataaaggaaaagaaggcctgaaaccatgtgtggaatcctctaccctttggtcagcctagtctattggagtatagragcccctacataaccctctctgtgacttttgaatttttcaagccattatttcctgctattaggaagtatgtacacatatgctagcacgtatccctccaca

SEQ ID NO: 154053 - DNA, 201 bp, Homo sapiens
gctgaagcaaagtcttgaaattatatccaggacttagattgagaccttgcgagggacccaaatctcacagacaccatcaatctgaggcaggtaatatggaytgcagagaaacaagaagcagagaattctactaaaaagggttttaaagaattcatagaaatgatgcagagtgataaaggaaaagaaggcctgaaaccatgt

SEQ ID NO: 154054 - DNA, 201 bp, Homo sapiens
ccttaggcaggtaaaagccacgtgttctaggccaaggtaacaggagaggagagaaacgggtagagtgaggtaggaaagaggcggtggtgagcatgctggtyatgctcaggggtgatagcaaggcagactgctctgcctttcagcagcttataagccaagccacactccttacaaaagaagcatgaggtgtatatagccata

SEQ ID NO: 154055 - DNA, 201 bp, Homo sapiens
gcaatgtgttatcccaaaaaacaaagtgctttgggaatgcacagaatacactgttaaatctaacaggaagagttgggagaatattcagtaacagttatcaygcttgaactgattctttaaagaatgaatggaatttctgcaagtagagaaagggaagggcagcatttcaggcagtacaagcaaaagcatggagacatcaaa

SEQ ID NO: 154056 - DNA, 201 bp, Homo sapiens
acaagacaattaaaaatgcccttggatatatgctttaaatcattctaaaaacagaatagcatatcattgatgcaagtgtaaactggtattttttggcacaygtgaaatttgctaaaaaataacttaaaagacaagtaccaataagatttttatctcaattagggttagcaaagcaatattataaatgagtcacactgagac

SEQ ID NO: 154057 - DNA, 201 bp, Homo sapiens
ttttttgtttttgttttttatttatttatttatctatttatttgagacagagtctcgctctgttgcctaggctgaagcgcagtggcctgatcatggctcastgcagcctccaccattctgggctcaagtgatcctcctacctcaggctttccagtatctgggactagaggcccatggcaccacgctgggctaattttaaaa

SEQ ID NO: 154058 - DNA, 201 bp, Homo sapiens
tgtatttgtgttctctcacttgagtgtgagctctacctggctcagtgctgtgtgaagctctccaaccctcaggataaggatcagtgaaatgctaatttttwaaaaaattaaattttcatcaaagctctagacctattcacttattatgatgtttatgccaagtttcaagaggtaaaacatgcttcaccacaaaaaacgatg

SEQ ID NO: 154059 - DNA, 201 bp, Homo sapiens
gagattcaaattacaatcagcccttcatgtatgtcggtttctgcatccatggataccatcatacgtggatttaaaatatttgggggaaaaaacatggttgygtctgtactcaataactgcagactcttttttcttgtcatttcctaaacaataccatatcacaactatgaacatagcatttatattgtattaggtgttata

SEQ ID NO: 154060 - DNA, 201 bp, Homo sapiens
ctcgccgtcttttaagcttgtgtttccttttaattaactaattttacaatctttaaatcatgaaacaagccatctactcatatactctttacttgtttacycatgttaatcaaataattaatccatggcttgtaatctccttccaaaaagatatttaagctgaattctattttataaaaagaaagttttcaatctcaacca

SEQ ID NO: 154061 - DNA, 201 bp, Homo sapiens
tctgaggagttgtagacaggcatcacattagccagaatgggagaggaagacttctctgaggaggaggcatttgagctaaatcctgagtgatatgaaggaamcagccttgagcagatctgagagaagagtgcaaaggccctgaggcagggcaagcttggtgggttgaggaagaagaaagaaagttgacatggctggagcatg

SEQ ID NO: 154062 - DNA, 201 bp, Homo sapiens
ctgacttttgagcaccccaccctctcccatcatttatcttatcaatgactggagacaattaggtctccttgatggtgtgaagaaatataactgcacttctmtctagattcaaggtaaatcacaaaagatacattattaagagtaatattataaattactccctgggcagtgccttcaaggcccatgaatccagctgcacct

SEQ ID NO: 154063 - DNA, 201 bp, Homo sapiens
ctccgtactcacattcttcccaattgtcctcagggtctgttggaaatgcagtcgcagtcttcacccctctcataactatgccatcagcttctgaagccctkgaatcaagatttaagaggagtagctgtggcacagagggacccaggagagacacactgacctgtgtccccagaaaagactgacttttgagcaccccaccct

SEQ ID NO: 154064 - DNA, 201 bp, Homo sapiens
caaaaatgtagaatcaacccaagtgtccatcaatgaataagataaagaaaatgttatatatatatatatatatatatatatatatacacacacacacacayatatatacacatatatatacacacacatatatacatatatttatatatatatatatatatatacacacatacattggaatactgttcagccattaaaaag

SEQ ID NO: 154065 - DNA, 201 bp, Homo sapiens
ctcccacccatgagaagattgctcgggctcactgggtcctccttgttctcctggttcctccctgtggtgggggacacctcctgctgactggccaataacasaagtatgtgggaatacaaaaggccaactcctttgccccaaggtgaataaattctgagatgtaatttatgctctgcagtgcccctccctcaaaaatcaggt

SEQ ID NO: 154066 - DNA, 201 bp, Homo sapiens
gcttataatatggtgttggtaaatagcttagcaatgcacataggaacaattctactaatggatagggaaagaaaattaaattgctatctgtatagccctakaccttttagattattttcaaaactcatcactgcagcaatgatttctcccatagtattttaactagcatggcagccttggctttctacatgtatgaaaggt

SEQ ID NO: 154067 - DNA, 201 bp, Homo sapiens
tagttgggaagagtaaaaagaaaaattttgagacaaagagatttctaattaaataaaatagaacaatttgttatgaatttctgttttattgcaaaaaaaaatctattttccactttgaacaaaattttacattgggagaaaaaaaaaaaccacaggaaaagagcagatgtctttgagaatcatcaaagcatgtcttatttc

SEQ ID NO: 154068 - DNA, 201 bp, Homo sapiens
ttcacccctctcataactatgccatcagcttctgaagccctggaatcaagatttaagaggagtagctgtggcacagagggacccaggagagacacactgayctgtgtccccagaaaagactgacttttgagcaccccaccctctcccatcatttatcttatcaatgactggagacaattaggtctccttgatggtgtgaag

SEQ ID NO: 154069 - DNA, 201 bp, Homo sapiens
gaggctggtaagtgttagaagcaacactggaagtcagatgtttttctgaacatgtgtttatccctctgcatcacaaaactcacatgatagacacttctgtyttcgctaacaaaaacagacgagtgtttgtgagaacagagaggtgtcttatttttcatctaagtgggttcaggtggctaggaaagttctagcacacgagag

SEQ ID NO: 154070 - DNA, 201 bp, Homo sapiens
ttctttctcagaatgaaatcctgaaaagaaaccccactcagcatggactcagaatccccatggcatgatctgataccacaggcaatctctcttcctaactyagggcccaggtaacacatggtagcaccagagtgtgagctgcctgctctccagtgagggttagaccaggctttggggagctgtcttaagtatagctgagtt

SEQ ID NO: 154071 - DNA, 201 bp, Homo sapiens
caaagggtgaggatggagagcgagatggggcagatggcactggatattaggactccgtactcacattcttcccaattgtcctcagggtctgttggaaatgyagtcgcagtcttcacccctctcataactatgccatcagcttctgaagccctggaatcaagatttaagaggagtagctgtggcacagagggacccaggaga

SEQ ID NO: 154072 - DNA, 201 bp, Homo sapiens
agtgcattagtgccttgaatttgcataacactttgaaatttatgaggcattttcataatgtttactttcattttattttctccacagccctgtgaggtagraaggaccgatattattttttctcattttacagttgaagaaactaagacttagatgaagtttcttccctctggttacgaggctggtaagtgttagaagcaa

SEQ ID NO: 154073 - DNA, 201 bp, Homo sapiens
cccattttggaaaccccaaaaagctgcaaaacttagagttaatgaaataatattctaaaaaataaagatgataaaatgtatctgaatgcatgcatacatakaccttgcaaatatccatttgatgctcgcttagttttgttagtgctctattcactctgacctcatcatatgacaacccacttgactcctgtcttcccttct

SEQ ID NO: 154074 - DNA, 201 bp, Homo sapiens
cacaaggatgctccgtaagatcagggaccaagtctgtcttgctagctataccaccaacgcacagcccagtgcctggagcacagtttgtgctcagaaaacamgtgtttaatgaataactgaaggtggaagggcaaagggtgaggatggagagcgagatggggcagatggcactggatattaggactccgtactcacattctt

SEQ ID NO: 154075 - DNA, 201 bp, Homo sapiens
tggtacgtctataccgtggaatactatgcagccatgaaaaagaatgagatcatgtcctttgtggaaacatggatggagctagaggccattattagacttcrtgtctaaaacaccaaaagcaatggcaacaaaagctaaaattgacaaatgggatctaattaaactaaagagcttctgcacagcaaaagaaactaccatcag

SEQ ID NO: 154076 - DNA, 201 bp, Homo sapiens
atataaccataacaaaacatcctaactctatagtgaagggttatatagaagcacagaggagacacacctaagcttaacaggtagagtgggtagggaaacasaggtggcttcctggaggaaagagtatccatcctgtcttaatgtagtcttgatgaactctgggatatagcttgaaagtgatgaaagtagatccaagttctt

SEQ ID NO: 154077 - DNA, 201 bp, Homo sapiens
gttcttaatctgtaaaatgagcttatctgtatctactcttctgtttgacgcagtgattaaaccagcttgctccatgccctagtctattaattaactaggcraacaaaatggagaagaatattcaagagagaggaaataagtcacagagacaggaaatggaaatgattctgcctggctcatagtttctcccagatatcctcc

SEQ ID NO: 154078 - DNA, 201 bp, Homo sapiens
aagccattgaatgatgttaaggagggaaaataacataatagatttgcttttctaaaggtcattctgactgctgtgtggaggatttactgggaagtgggaargggaggatgggagactggaatacagaagactggttagaagaaatattgcagctgatcgagagagctgataagaacttcaactagggcaatgacggcatgg

SEQ ID NO: 154079 - DNA, 201 bp, Homo sapiens
gctttgagtttctttaaaaaaacaagatattctgctaactaatgtttactgggttagaattagagaactggactacattcctgacttctccattcattttmtagagtgaccttgtgcaagttattacacaagtctgtcttgatttatttatctgtaaatttgcaaacaaaagagtcatctcatttttcctacaaaacttgg

SEQ ID NO: 154080 - DNA, 201 bp, Homo sapiens
tgtaagccattgaatgatgttaaggagggaaaataacataatagatttgcttttctaaaggtcattctgactgctgtgtggaggatttactgggaagtggraaggggaggatgggagactggaatacagaagactggttagaagaaatattgcagctgatcgagagagctgataagaacttcaactagggcaatgacggca

SEQ ID NO: 154081 - DNA, 201 bp, Homo sapiens
tagggccaaacattttgaatgtatttcatttatcaagttgcagctcctcattaaggctttgagtttctttaaaaaaacaagatattctgctaactaatgtktactgggttagaattagagaactggactacattcctgacttctccattcattttctagagtgaccttgtgcaagttattacacaagtctgtcttgattta

SEQ ID NO: 154082 - DNA, 201 bp, Homo sapiens
aggcagctgtaagccattgaatgatgttaaggagggaaaataacataatagatttgcttttctaaaggtcattctgactgctgtgtggaggatttactggraagtgggaaggggaggatgggagactggaatacagaagactggttagaagaaatattgcagctgatcgagagagctgataagaacttcaactagggcaat

SEQ ID NO: 154083 - DNA, 201 bp, Homo sapiens
cattccagagaacaagaagaagaactctgtctagcaactgtatactttagaacaaggtgtcagagtcagggtgcacccctccattgctcctccaaaccctsttggacacacacattgttgttggcattaacctgaaatgcaaggggaggggaggctggctgaccaatactaatttcagacaactaaatacacggaaatatt

SEQ ID NO: 154084 - DNA, 201 bp, Homo sapiens
gaagtaacagaaagggttggcgtgcccccagctccctcccctctgccaactgcacattgcacttactgaggctgggctgctggtggcaggcgcccctctgygatcctcccatggccagaggaactcattctacaccagctcttgggagtaaagttgtacagatactgaagacttccatcctcaggccaaaaggtcaggatc

SEQ ID NO: 154085 - DNA, 201 bp, Homo sapiens
aagaaaacttgacattttgaaattgcaacacaagacagctggttccttcctcttcaccacattccagagaacaagaagaagaactctgtctagcaactgtrtactttagaacaaggtgtcagagtcagggtgcacccctccattgctcctccaaaccctcttggacacacacattgttgttggcattaacctgaaatgcaa

SEQ ID NO: 154086 - DNA, 201 bp, Homo sapiens
atgcctacaggaagtaacagaaagggttggcgtgcccccagctccctcccctctgccaactgcacattgcacttactgaggctgggctgctggtggcaggygcccctctgtgatcctcccatggccagaggaactcattctacaccagctcttgggagtaaagttgtacagatactgaagacttccatcctcaggccaaaa

SEQ ID NO: 154087 - DNA, 201 bp, Homo sapiens
agatggtagagataataatcaataaatactgagggaactcagagaccatatgctgagcgcggatcccctgggcccacttttctttctctatactttgtctstgtatctctttcttttctcagtctctcgtacccccgccccccgacgagaaacgcccacaggtgtggaggggaagacctccccttcacctgtgaaaatctt

SEQ ID NO: 154088 - DNA, 201 bp, Homo sapiens
cagctcccctctcctcccccaccccaccccaccccaccccatgtatattctgcttcctgagacttgggctatgcctacaggaagtaacagaaagggttggygtgcccccagctccctcccctctgccaactgcacattgcacttactgaggctgggctgctggtggcaggcgcccctctgtgatcctcccatggccagagg

SEQ ID NO: 154089 - DNA, 201 bp, Homo sapiens
ccataaatggtctgtgctgaggaggattagtaaaagaggaaggcctctttgcagttgagataagaggaaggcatctgtctcctgctcatccctgtcatcgrcaatggaatgtctcggtgtaaaaccctatggtatattccatctactgagacaggagaaaaccaccttaggactggagttgagacatgctggtggcaatac

SEQ ID NO: 154090 - DNA, 201 bp, Homo sapiens
acctcaaactccttggtttaagtgatcctcctgcctcagcctcccaactaattagggaggtgacagatgtgtgccaccatgcctggctaatctttaaaaamacaatttagagatggtggtctcattttgttgcacaggctggtctgaaactgctggcctcaagtgatcctcctgcctcagcctcccaaagcatagggatta

SEQ ID NO: 154091 - DNA, 201 bp, Homo sapiens
attccttttattatgcataaattgaaaccaattttatttaagctttatttgacaaagtagcacttgtttttcgcagaaaacaaatttccgggaaggagaaraaatgcggacaaatagtgaaaattcagagtaccagtaaggatccagtgaaaactaccttgtccttattatccttaatgttgaaaaaattcttatacacag

SEQ ID NO: 154092 - DNA, 201 bp, Homo sapiens
tttctggtacagtctaatattatgtgttattatgatccaataaactgtgttcacatgaattccacctacaagtggataaagttaattttgtaagaatgtcagactacttggagtcagaatgtattttctcaacactgaatcagaacctaggaaagaatgaatgatactttcagataagaccagttggcagcctagaatttg

SEQ ID NO: 154093 - DNA, 201 bp, Homo sapiens
taatttatcacctggataccatgtgctttgaagcggaggatgcgataacaatggtaatgacacagtaaattatgttaccatggcaggacagcctccaatgkctactcgggtttcagctctgtgcacttcacatctttatcacaacctggatcaagggggtatggggatcacacaggtgttaaaatgttttgagctcctaga

SEQ ID NO: 154094 - DNA, 201 bp, Homo sapiens
aattaattcacactgaggagttacagatgaccatgaattactacattattgagtgtagctagcatatttaaattttcttagacgtgatccagtatcttggyttccatttggaccatttaaagggtgggatgatccccatgcctttctttgaacatctttccaacattgctttcttctagattagcaatatccaataaaaat

SEQ ID NO: 154095 - DNA, 201 bp, Homo sapiens
atataaggaaaaagttttatcttacaaattcaatttttatgaggttatggtccatttttattcatcgcaagtggagtgctgcatccaggtttaagcagaartaagatgcaaaccatattttaatgttttgtttttaaactagaatctgtgataaaataaagcacaactaggacagaatgtgtgttcattattctgaaagcc

SEQ ID NO: 154096 - DNA, 201 bp, Homo sapiens
attgtaaaactctaataaaacaaaatatgtagtaatctatagaaattgtgctttaactgcactcctaataacaggctttattcttttttcatgaaaaggartaattttagatgctaaaatgctgaataatagaacatatttataggtatattgaacaaaccctcttaggaaagaaggaatctaggtgagccctgcttcaaa

SEQ ID NO: 154097 - DNA, 201 bp, Homo sapiens
tttcgacatgcttgcattccagaaatgtatagaaattctagaagtctaattacttctgaattcctcagataaggagttttgcctctagatgacctgcttgrtggccaccaggtgatctttgctctcatcgagaacaagtgtaggtccccttttctttctgccttcatcacagtccctccagcattgcaaggggcctcatgc

SEQ ID NO: 154098 - DNA, 201 bp, Homo sapiens
tattaatgcctgctcattatttgtatgtcctctagcaataatgtcacttttatatgaataatgcacagttcattttgtcctggcagctaatttctcaacamtgtatttatgaggataatacagatattttagtgatttctccaaaagaaacaacaaagtttttgaattgagaaaaaaagtctaatatttaccacttagagg

SEQ ID NO: 154099 - DNA, 201 bp, Homo sapiens
aaaagagacaggccctccattatgggacaaactaatgagttgcaggcaggagaagcagcacagtcagttgtcagggatagaattgctgaccagatagaagygctagaaggaggggagtggaggctgggcaggtgaaagcgtgcagaggacccagaggaccagaggagagcagggagctatgcgtatgatgcagcagtgatg

SEQ ID NO: 154100 - DNA, 201 bp, Homo sapiens
ctcatctctccctgaactctgaatttgaccatgtgcttaaatgatatttcttgtctgaaaagaaaacaaggttattgtgaaaattaagttaaataatcaawataaaatgcttagagtagtagcaccgagaatataactgcttaagaaatattagcatatttattatcatttatttctgattatcatgcaaaaaatgctgta

SEQ ID NO: 154101 - DNA, 201 bp, Homo sapiens
ttcagtaacagttatcacgcttgaactgattctttaaagaatgaatggaatttctgcaagtagagaaagggaagggcagcatttcaggcagtacaagcaaragcatggagacatcaaagcacatgtattgcccaagtaaaacaacgtagacttagagttagttgtatagagctgagggaatgtgggagtagtgtatggtct

SEQ ID NO: 154102 - DNA, 201 bp, Homo sapiens
agttttatctttccacacagtctcccaagcatctgttttgctccaatttgaaatgcttgctctctacacctgttacacagctgttatcctgccaaccaatmgaaattttcttttctctctctcctttttcagatcaggtttctgcatcccatttcttccgctcatctaactcccttgccttgttatgtcctctggtatctt

SEQ ID NO: 154103 - DNA, 201 bp, Homo sapiens
acgcttgaactgattctttaaagaatgaatggaatttctgcaagtagagaaagggaagggcagcatttcaggcagtacaagcaaaagcatggagacatcaragcacatgtattgcccaagtaaaacaacgtagacttagagttagttgtatagagctgagggaatgtgggagtagtgtatggtctatacataaaggtatat

SEQ ID NO: 154104 - DNA, 201 bp, Homo sapiens
agccaggattgtgaagcctttcaaaatagtctgcaggtaaaatgccacaaaggggtcaggaattcagaagatatattttgtgatagcaagaacttgtagcygttaaaaaaggaagttctatgtggctgtggtatttcagtgtggatgtccacttttgtaagcacttagatgtgggttaatgatgaaaaactatttgccagt

SEQ ID NO: 154105 - DNA, 201 bp, Homo sapiens
gcactggatattaggactccgtactcacattcttcccaattgtcctcagggtctgttggaaatgcagtcgcagtcttcacccctctcataactatgccatyagcttctgaagccctggaatcaagatttaagaggagtagctgtggcacagagggacccaggagagacacactgacctgtgtccccagaaaagactgactt

SEQ ID NO: 154106 - DNA, 201 bp, Homo sapiens
gcatcccttaccttccgctcacggccctgcactcagggcattggtgtgcctgattctatgaactgtttgaagcttgtctgtttacaccaatgagcactctstgctctgttaaaataattcctgcattcaccaagagaaaatgaaagccacttcagtggtgttttattataggaatttaaataaattaatgcatatgattat

SEQ ID NO: 154107 - DNA, 201 bp, Homo sapiens
acattttcctaatttcctactctttgtctaattcagtacatatgttcatcactgactgcatcttcgggtcttcatttccctatgaaggctcctgtgccacrtaaaacttatattaaataaatgtgtatgtttttctcctgttgatctgtcttaggccaatttaattattaggtccatctgaaaaagaaaaaagccctaaaa

SEQ ID NO: 154108 - DNA, 201 bp, Homo sapiens
ggtgaggatggagagcgagatggggcagatggcactggatattaggactccgtactcacattcttcccaattgtcctcagggtctgttggaaatgcagtcrcagtcttcacccctctcataactatgccatcagcttctgaagccctggaatcaagatttaagaggagtagctgtggcacagagggacccaggagagacac

SEQ ID NO: 154109 - DNA, 201 bp, Homo sapiens
aactttttggccatacagaatatagttataactctttaaaatatccttgcctgctaattctcatctctgagtaatttctgtttaagttaaattgatttatwtatttttctgattattgatcttactttcctgcttttttacataccttgtaatctttgattgaataccagactttgttaattttatcctgttttatattgg

SEQ ID NO: 154110 - DNA, 201 bp, Homo sapiens
attttccatgtctttacttaactttttggccatacagaatatagttataactctttaaaatatccttgcctgctaattctcatctctgagtaatttctgtktaagttaaattgatttatttatttttctgattattgatcttactttcctgcttttttacataccttgtaatctttgattgaataccagactttgttaatt

SEQ ID NO: 154111 - DNA, 201 bp, Homo sapiens
caatacagtgtggttaactatagtcaccatgctctacattggagctctagaacttattcatcttgcataattatatctatgagttcaacaattttagattmtacgtataattgagattatgtagaatttgtctttctgcctctggcttattttactgaacataaagtcctccaagtccatccacgtcatcacaaatggcag

SEQ ID NO: 154112 - DNA, 201 bp, Homo sapiens
ttttttttgagacggagtctcgctctgtcacccgggttgcagtgtagtggcgcgatcttggctcactgcaagctccgcctcccgggttcatgccattctcstgcatcagcctcccgagtaactgagactacaggcgcccaccaccacgcccagctaattttttgcattttttttttttttttttttagtagagatggggtt

SEQ ID NO: 154113 - DNA, 201 bp, Homo sapiens
aaggccgcagggacctctgcctaggaaagccaggtattgtctgaggtttctccccatgtgatagtctgaaatgtggccttgtgggaagggaaagacctgaycgtcccccagcctgacacccataaatggtctgtgctgaggaggattagtaaaagaggaaggcctctttgcagttgagataagaggaaggcatctgtctcc

SEQ ID NO: 154114 - DNA, 201 bp, Homo sapiens
tttctgtgggtcgggaatccagccagcttagctagaaagttttaccttggggttttcctcaaggctgcagtaatcttttttttttttttttttttgagacrgagtctcgctctgtcacccgggttgcagtgtagtggcgcgatcttggctcactgcaagctccgcctcccgggttcatgccattctcctgcatcagcctcc

SEQ ID NO: 154115 - DNA, 201 bp, Homo sapiens
ttgttaaaagtcatcaccactccctaatgtcaagtacccagggaaataaaacaccacggaaggccgcagggacctctgcctaggaaagccaggtattgtcygaggtttctccccatgtgatagtctgaaatgtggccttgtgggaagggaaagacctgaccgtcccccagcctgacacccataaatggtctgtgctgagga

SEQ ID NO: 154116 - DNA, 201 bp, Homo sapiens
ccacggtttctgtgggtcgggaatccagccagcttagctagaaagttttaccttggggttttcctcaaggctgcagtaatcttttttttttttttttttttgagacggagtctcgctctgtcacccgggttgcagtgtagtggcgcgatcttggctcactgcaagctccgcctcccgggttcatgccattctcctgcatca

SEQ ID NO: 154117 - DNA, 201 bp, Homo sapiens
gtattaggtcctggtttcacattaaagtaccagtaatgtcctattcttggtatcctaattatagttgtaatgtttgaatttcagtgaacttctgaagaagmatttaatatacatacttggcagcaatgctttcttatctgaatggcttgagaattggcagtagtcaaagaccttgagagcttgtaaaaatttaaaaaaaaa

SEQ ID NO: 154118 - DNA, 201 bp, Homo sapiens
tgtgctttgttaaacaaatgcttgaaggcagtgtgcttgttaaaagtcatcaccactccctaatgtcaagtacccagggaaataaaacaccacggaaggcsgcagggacctctgcctaggaaagccaggtattgtctgaggtttctccccatgtgatagtctgaaatgtggccttgtgggaagggaaagacctgaccgtcc

SEQ ID NO: 154119 - DNA, 201 bp, Homo sapiens
tggtgcaatttcagctcactgcagcttccgcctcccaggttcaagtgattctcctgcctcagcctcccaagtagctgggattacaagcacacaccaccacrcccagctaatttttgtatctctagcagagacagggtttcgccatgttggccaggctgctctcgaactcttgacctcaagtgatcctcccacctcagcctc

SEQ ID NO: 154120 - DNA, 201 bp, Homo sapiens
gcctattcttggacttaatataaatggaatcacacagcatgtactttgtaaaggcccctttcacatgccgtaataattttgagattgttgcatatatcagwcattcactccttttttattgatgtgtgatattctactgtatgactacattacaaattacttatccattatcttgtttttgacatttggattgtttctagt

SEQ ID NO: 154121 - DNA, 201 bp, Homo sapiens
gcaattttaccaagccttctctgaaaacgaatagttctctgtttcactgatatccagagacaaacaaaacactacattcaaaacctgactttatttaatgmacttttatcttgttttctctggccatttttcttacctaatctgctagctttcttgccatttaaaaatgttcatcccaggacatatagataagcaaatatg

SEQ ID NO: 154122 - DNA, 201 bp, Homo sapiens
cgactcaacgtttaatggatttagggctatgcaggatgtgctttgttaaacaaatgcttgaaggcagtgtgcttgttaaaagtcatcaccactccctaatstcaagtacccagggaaataaaacaccacggaaggccgcagggacctctgcctaggaaagccaggtattgtctgaggtttctccccatgtgatagtctgaa

SEQ ID NO: 154123 - DNA, 201 bp, Homo sapiens
tcccatttggtatgaatgaaaaagaacagtaagacataatagtctatctggatttctttttttctttctttcttttttttttttttttgttgttgttgttktgttttgttttgagacagagtctcactgtgtcacccaggctggtgcaatttcagctcactgcagcttccgcctcccaggttcaagtgattctcctgcctc

SEQ ID NO: 154124 - DNA, 201 bp, Homo sapiens
aactactccccttgctggcatagtgtggcaatgacattcatctctgaaattttaatcttgattctggacaaggctttttggttttggtttttgtaattctwtatgtttttgaacttcacaataaattgaggcttaatctaaggaaactggatgcattaatgttgtcatcatacttgataaactaagttgataaatttataa

SEQ ID NO: 154125 - DNA, 201 bp, Homo sapiens
agaagcagctgagtgatctgattaattaattcacactgaggagttacagatgaccatgaattactacattattgagtgtagctagcatatttaaattttcytagacgtgatccagtatcttggcttccatttggaccatttaaagggtgggatgatccccatgcctttctttgaacatctttccaacattgctttcttcta

SEQ ID NO: 154126 - DNA, 201 bp, Homo sapiens
ccaaccctgtgctccccgaaacaagtgctgtgtcgactcaacgtttaatggatttagggctatgcaggatgtgctttgttaaacaaatgcttgaaggcagygtgcttgttaaaagtcatcaccactccctaatgtcaagtacccagggaaataaaacaccacggaaggccgcagggacctctgcctaggaaagccaggtat

SEQ ID NO: 154127 - DNA, 201 bp, Homo sapiens
attctaccatggtggtatatgataaaggatggttggatagatagaataatagatagatagagagatagatagatagatagatagatagatagatagatacmaaacaaataaatgatggagagaaagtgctgtacaatgaaaaaggctttaagactgtttctgtaggctgtggactgctaggctagggcttcatcttatgtt

SEQ ID NO: 154128 - DNA, 201 bp, Homo sapiens
ctcaaagtgtaactactccccttgctggcatagtgtggcaatgacattcatctctgaaattttaatcttgattctggacaaggctttttggttttggtttktgtaattctttatgtttttgaacttcacaataaattgaggcttaatctaaggaaactggatgcattaatgttgtcatcatacttgataaactaagttgat

SEQ ID NO: 154129 - DNA, 201 bp, Homo sapiens
cattcagttttaaacattgaccagtgtgcccctggatctaggtctgtgtgatagcaaagcctggtcattttgcactgccctgctatgtgacttggtcaagrtcacttgggttagctagcagatggcagaattgagacttgaacccagacctgtgatccacatctggcttaacacagaccccaaggaattgctgaaaaaaga

SEQ ID NO: 154130 - DNA, 201 bp, Homo sapiens
tggtagaaatagactatggcttatgactgttaaggataataaagtaaaagcagaagaatgattttttgattgtctccagttgtggcccattttcttttttyttttttttttaagttattctagatataaaacccttaagaatcttctccaaaagacaatttaatactgagttacaactatgattatttttaaaattgtttc

SEQ ID NO: 154131 - DNA, 201 bp, Homo sapiens
atggactcatcccccttgcctgtgtgtggggaaaagaaagagaagtcagactgttactgtgtctatgtagaaagaagtagacataagagactccattttgytctgtactaagaaaaattcttctgccttgagatgctgtttatctgtaaccctacccccaaccctgtgctccccgaaacaagtgctgtgtcgactcaacgt

SEQ ID NO: 154132 - DNA, 201 bp, Homo sapiens
atattctaccatggtggtatatgataaaggatggttggatagatagaataatagatagatagagagatagatagatagatagatagatagatagatagatrcaaaacaaataaatgatggagagaaagtgctgtacaatgaaaaaggctttaagactgtttctgtaggctgtggactgctaggctagggcttcatcttatg

SEQ ID NO: 154133 - DNA, 201 bp, Homo sapiens
atctgtgaattttcactcaaatttccataaaatatcatcctccatttatcttttactagctccataatttagagtaaaaagacagtatgtaatgtgcatcrcaagcttcccagtattttcaaagaagaaagtccataatcccttttagtaaatattggtggacaatgaggatgaaatatggtttatagtataaacagttct

SEQ ID NO: 154134 - DNA, 201 bp, Homo sapiens
cctattcccactgtgctaacttgctcaataatccaccctatattctgtgcctttcctttctcagttccctactctcctgccagtgtttcctggaatcaacwctaaattaataacttgctctcaacccttgacttaaggtctgattctaggagccacaaatgatgacattgtcctaaaatcacccaattaataggtggaaga

SEQ ID NO: 154135 - DNA, 201 bp, Homo sapiens
aatattctaccatggtggtatatgataaaggatggttggatagatagaataatagatagatagagagatagatagatagatagatagatagatagatagatacaaaacaaataaatgatggagagaaagtgctgtacaatgaaaaaggctttaagactgtttctgtaggctgtggactgctaggctagggcttcatcttat

SEQ ID NO: 154136 - DNA, 201 bp, Homo sapiens
cacagggactgttcccatggtcatcttaatctgaagttgggaaagcagcgttatagatgatatgcccggtatttaaagaaaatcagagaagaaaggcatakagacaggatgcattcacattttggagaaacctactatatggcagacactatatgtcaggtactgtactaggtactttataactgcatttatctagttaat

SEQ ID NO: 154137 - DNA, 201 bp, Homo sapiens
tactattaattgaattagcatccacctctgtcaactgcttatgcacacagggactgttcccatggtcatcttaatctgaagttgggaaagcagcgttatakatgatatgcccggtatttaaagaaaatcagagaagaaaggcatagagacaggatgcattcacattttggagaaacctactatatggcagacactatatgt

SEQ ID NO: 154138 - DNA, 201 bp, Homo sapiens
ttgaaagaatagataagattggtagatcactaactagactgataaagaataaagagagaagactgaaacaaacacaatcagaagcaacaaagggggcattmccagcaaccccacagaaataaaaaaaaaaaaaacccagcgagtgttatgaacaccactatgagctcaaactagaaaacctacaagaaatgaataaattcc

SEQ ID NO: 154139 - DNA, 201 bp, Homo sapiens
aactgtttttaggagaggtaacccattttggaaaccccaaaaagctgcaaaacttagagttaatgaaataatattctaaaaaataaagatgataaaatgtrtctgaatgcatgcatacatagaccttgcaaatatccatttgatgctcgcttagttttgttagtgctctattcactctgacctcatcatatgacaacccac

SEQ ID NO: 154140 - DNA, 201 bp, Homo sapiens
tgggatgaagcttccagaggaaggatcaggcagctgttctgcaatatttgctgttctgcagcctgcactggtgatacccagacaaacagggtctggaataraactccagcaaactccaacagacctgcagctgagggacctgactgcaccaagcggacctaatagacatctatagaactctccaccccaaatcaacagaat

SEQ ID NO: 154141 - DNA, 201 bp, Homo sapiens
tataggaggtgctcaacaactttgacggggagaaagaaagtataattcatatcagtgttgaggatcgataagaattcacagaggagatatgcttgatacasaaacccttaaaaataacaagaattggccaggcgcaggggctcatgcctgtaatcccagcagtttgggaggccgaggcggctggatcacctgaggtcagga

SEQ ID NO: 154142 - DNA, 201 bp, Homo sapiens
ccactatgtatacatagttcccttataaaagacacaaataaaagtaggaaaaaattagtttccatcacatactttaattctctcattgtgaaaataacccytttgcagatatttaacgtaaaatttgcgtgctccactatatggttttttactttgattctgacttaacatgaagataaaaactaagaacatacacctttt

SEQ ID NO: 154143 - DNA, 201 bp, Homo sapiens
ggatattcatatgcaaaacaataaatttgacccttacctcacatagataaaaacctcaaaattaatcaaagacctaaatgtaagagcctaaactataaaaytcttaggagaaaacataatcataaatcttcatgacaatgggttccttaactctgacaccaaaatcacaagcaacaaaagaaaaataaggtaaattagatt

SEQ ID NO: 154144 - DNA, 201 bp, Homo sapiens
agaccttgtcttacatattcaactccctatgtgatacctcttacttggttttctcattaatatctaaaactcaacaagatcaaaactgaactcttgatttrctccttcaaaaatttccctgtatcataaatgtcatctcaaaaaataatttcaaattctgtcacttctttttatctctagtggtattaccctggccaggtc

SEQ ID NO: 154145 - DNA, 201 bp, Homo sapiens
tctagactgctgttctataaccttcatccaaaaatctcttctgttttgcaggtgtgcccgcttcctcaactctaaaaatcacctgcttcccagccttctcygaagattcttctttctgatttataacatgcctctccaccctacttcctgctattatctgggtgattgtagcaccccctgtaacattctactctcttgctt

SEQ ID NO: 154146 - DNA, 201 bp, Homo sapiens
aagctgttgactgggttttattctcatctgaaactcagagtcatcttccaagcttgaacttgtgggcagaattctgtgttttgcagctataggactgacgrcttcaactcctagaggacacccctctccataggaagttcaagatgtagttttttgcttcttcaaggccagcaggagatcatttctaacttcagggaagtc

SEQ ID NO: 154147 - DNA, 201 bp, Homo sapiens
ggacagaaactggctcccactgctgcctctagactgctgttctataaccttcatccaaaaatctcttctgttttgcaggtgtgcccgcttcctcaactctraaaatcacctgcttcccagccttctccgaagattcttctttctgatttataacatgcctctccaccctacttcctgctattatctgggtgattgtagcac

SEQ ID NO: 154148 - DNA, 201 bp, Homo sapiens
aatttaattttgtaatcaaagtgtagtgatcatctatatgcttatgacttctaaatttatgtattcagcctagacctcttgtattagttttctattgctgkgtgataaattactgtaaatttagcagcttgaaacaacatacatatatcatgtcagtttctatgagttaagagtatgggaacaacttaagtggactctctg

SEQ ID NO: 154149 - DNA, 201 bp, Homo sapiens
agttcattaaacatctttttctttataaattacccagtctcgggtgtgtctttattagcagcatgagaacagactaatacacggggctatacacggggctrtacacgttggcatatggtattcagggggttattcacacagtcctcttgcactagaaaaaaaagcagtgcccttcaacctcagctggtggaatgaccatga

SEQ ID NO: 154150 - DNA, 201 bp, Homo sapiens
gcactttgggaggccgaggcgggaggatcacgacgttaggagatcgagaccatcctggctaacacggtgaaatcccgtctctactaaaagtacaaaaaaawttagccggcatggtggtgggtgcctgtagtcccagctgctcgggaggctgaggcaggagaatggtgtgaacctgggaggcggagcttgcagtgagccaag

SEQ ID NO: 154151 - DNA, 201 bp, Homo sapiens
tatccatgctattctttcttcttgtgataaagaacttgaattaaggactcaaatgaaaacttgatattttctggcgatatgcaaaagaagtattcgagtartcatcatctcagataaaagttgcttggtaacataaaagagttatgttttaagaaacagtgatcgtgaataccaggctaattctgtggaattcgtgttgta

SEQ ID NO: 154152 - DNA, 201 bp, Homo sapiens
tctggccaggcgcagtggctcacgcctgtaatcccagcactttgggaggccgaggcgggaggatcacgacgttaggagatcgagaccatcctggctaacayggtgaaatcccgtctctactaaaagtacaaaaaaaattagccggcatggtggtgggtgcctgtagtcccagctgctcgggaggctgaggcaggagaatgg

SEQ ID NO: 154153 - DNA, 201 bp, Homo sapiens
ctaacacccaataggctggtgaaatatattccatgaataattttctagtcaatctttttctcatctttttcctcctttctgttgagtttttcaaatcatawccttctctgcttgctagcatctgtaccagaagatgaactgagtaactgaaatgtttcagcttagcatattttattagcaaaatggttagcatcatcattt

SEQ ID NO: 154154 - DNA, 201 bp, Homo sapiens
agatttaaaagactctccctggccaaatttgggatcttttgtatataaagagtaataatgtatgtaatggattagagcacattgactaagaaaagtatccrtgaacccagagtgtgtgaatgcacagattgggtggagagaaggaaaggctgtgtttcactgaagaatacaagctgataatgaaaaagaaatagtagagcc

SEQ ID NO: 154155 - DNA, 201 bp, Homo sapiens
ataatccgttgcccactgccagttttccttggcagagcccaggcagaaatatcatggaaataaaaagagaatttgaagtaaaaaccttcattttcactcaytataaaatgttttctttgtgtttcttagaaaagcatgttacttctaaaaactctcttacaagttctttattgttagtaataacagtgtcattgtgtatgt

SEQ ID NO: 154156 - DNA, 201 bp, Homo sapiens
ctgatctcctggcattgttccccacccccaaattcatcctccaatgggataccagatattatatttgcattcaaaatgcaaatatgaaaactatcaccttscaaccacggataacacttaaatgaattaccattgctttgcttaagataaagaccaaaactcagcacctgatttttgtagcccagcaaggacagcctcctc

SEQ ID NO: 154157 - DNA, 201 bp, Homo sapiens
gctctagacttgggttaagacacagcacaaccctcagacgagaccaagaaaggtcacaggctttaggagtctccaagcatcacaaacacagtcatgcaaaracaggtttttttttctgagtctcatgttttaaagtttcatgaccaattgagagcacacaaaacatggaaaggaacatagcagctgaactgggtcatctgg

SEQ ID NO: 154158 - DNA, 201 bp, Homo sapiens
aaatcccaggtaccagagcttgttcatctaatacctcagacctttgattcaccttgggatttctcaacatacatataccaagtactaaccagtaagaatgscttgagattattgatatatatttaatgcagaacactctataaaacataatcgcagctcagaaagtccctctacattgcccacttgtagatacagctcata

SEQ ID NO: 154159 - DNA, 201 bp, Homo sapiens
tgttaacacagatcctgagaccccatctccaatcctaaccccaagacattctgggtcagtagctctagacttgggttaagacacagcacaaccctcagacragaccaagaaaggtcacaggctttaggagtctccaagcatcacaaacacagtcatgcaaagacaggtttttttttctgagtctcatgttttaaagtttca

SEQ ID NO: 154160 - DNA, 201 bp, Homo sapiens
aaagtggtgacctataggtccagcttactttaagcaaatatagtctgtaaggatttaggtaaaatagtgatgttgattatatactttaatgaatacatttwaaaattaaataggcacagttttaaagaaattatcatctaaattaatttagttttttacaggattctttgaacagtcgattagaaggagggtaattttttt

SEQ ID NO: 154161 - DNA, 201 bp, Homo sapiens
ccctgttacccataattgtgatttcttttcttctgttttctttctttgcctttgcctccacttaattttatcttttctctttcccatttctgtctctcaaktgtcttatccttctctttttttctcactcatttttattgccattgaacatttaactttgctacatgttgtgagagagaaggaagaggagaaagagaagaa

SEQ ID NO: 154162 - DNA, 201 bp, Homo sapiens
ataacactaaagaatatggttaagaaaaggaaaaatatacccagctaatgtggtaaaagaaatttcagaaggctctgttagatttatgtgaaaatgggaamaccaaataagatgacaccgtcaattcaaatgaagaaacgatacttacttttccattaatttcagtaccaagaagcccaaaattccacttagttttgcggt

SEQ ID NO: 154163 - DNA, 201 bp, Homo sapiens
tatttttcataagccagaaataacttcacaagagagtatgtatcacttggtatcattcattgtcatttttgaaaacccattcaaattatatcctccttgasactaagcttgaaagtctatgtcatagtcatagaatatggttagaaacatcaaaactaaatttggcgatttggcttggtaaagaatattataaaatatatg

SEQ ID NO: 154164 - DNA, 201 bp, Homo sapiens
gcacagtttgtgctcagaaaacacgtgtttaatgaataactgaaggtggaagggcaaagggtgaggatggagagcgagatggggcagatggcactggataktaggactccgtactcacattcttcccaattgtcctcagggtctgttggaaatgcagtcgcagtcttcacccctctcataactatgccatcagcttctgaa

SEQ ID NO: 154165 - DNA, 201 bp, Homo sapiens
gccaggactatggaataaaactgtcctgtagtctatttagtgacttctatttagagtccgtctacactgattgcagtccgggctattgattcatgtgtgaygctatttttcataagccagaaataacttcacaagagagtatgtatcacttggtatcattcattgtcatttttgaaaacccattcaaattatatcctcctt

SEQ ID NO: 154166 - DNA, 201 bp, Homo sapiens
cggggtttcaccatgttgaccaggctggtctattttgttgttgtttgtttgtttttgagacagagtcttgctcagtcgcctaggctggagtgcagtggcgygatctcagctcactgcaagctccgcctgctgggttcacgccattctcctgcctcagcctcccaagtagctgggactacaggcgcccgccaccacgcccgg

SEQ ID NO: 154167 - DNA, 201 bp, Homo sapiens
taatagctatttttaaattaaattagttgtgatgcttattaatatattgagaatcacaatattttcaacaacaaaaaatgagtcataagataaaattcccrgctcctaaaaggaaggaaaattatacaactctggtaggcatttgtttggtggcttaacaatggaaatttttgttatctcagtgggggaatagcagtgctc

SEQ ID NO: 154168 - DNA, 201 bp, Homo sapiens
atctccctaccccaccctgaccacaaggatgctccgtaagatcagggaccaagtctgtcttgctagctataccaccaacgcacagcccagtgcctggagcrcagtttgtgctcagaaaacacgtgtttaatgaataactgaaggtggaagggcaaagggtgaggatggagagcgagatggggcagatggcactggatatta

SEQ ID NO: 154169 - DNA, 201 bp, Homo sapiens
tctattttaggggaaaggtaaattttatgagatcaaaatattctaccatggtggtatatgataaaggatggttggatagatagaataatagatagatagakagatagatagatagatagatagatagatagatagatacaaaacaaataaatgatggagagaaagtgctgtacaatgaaaaaggctttaagactgtttctg

SEQ ID NO: 154170 - DNA, 201 bp, Homo sapiens
gatggttctggttttggctttctcaagattacagtcaacatgttgcccagagctgctgtcagctgaaggcttgactggggctggtaaatggattgctcatrtgcctagcaagttggtgggggctgctggcaggcctttgttcctcattggcagttgacaggaggcctcagttccatgccacatggacctctccataggcct

SEQ ID NO: 154171 - DNA, 201 bp, Homo sapiens
cttacattacagtcttttataggaaacaatcaagcagaaaaacatatttcatggtgtatatacaagactaagcccatagattgaaaagtgaaaagtatagsaaaaaaactcccaaaagcttgtttttgtccatgtgatacccaaaaaccaatttaattcattttcttttccaaatccaccatttcttttggctgtcatgtg

SEQ ID NO: 154172 - DNA, 201 bp, Homo sapiens
atttagcagctaaaaacaacaataaacttatcagctcacatggtttctgtaggggactctggaatagccaactggatggttctggttttggctttctcaarattacagtcaacatgttgcccagagctgctgtcagctgaaggcttgactggggctggtaaatggattgctcatatgcctagcaagttggtgggggctgct

SEQ ID NO: 154173 - DNA, 201 bp, Homo sapiens
atgagatccacttccacttaatgaatagtgaacatattttctctttcttatgattttcttaaaaatattttcttttctctagcttactttattgcaaaaayacagtatataacatatataacattaaaatatatgttaatcgactacattatcagtaaggcttttagtctacgataggctatcagtagttaaattttgggg

SEQ ID NO: 154174 - DNA, 201 bp, Homo sapiens
acttactgaggctgggctgctggtggcaggcgcccctctgtgatcctcccatggccagaggaactcattctacaccagctcttgggagtaaagttgtacasatactgaagacttccatcctcaggccaaaaggtcaggatcagtgcaacctatacttgccctcacaaagaaagggaacaaaaggagaggctgtggccatgg

SEQ ID NO: 154175 - DNA, 201 bp, Homo sapiens
ttaacagatctgtaattcttttttttttttttttttttttttttttttttttttttttgagacagagtctcgctctgtcgcccaggctggagtgcagtggsgggatctcggctcactgcaagctccgcctcccgggttcacgccattctcctgcctcagcctcagatctgtaattctttaaaaggttttccattcattgta

SEQ ID NO: 154176 - DNA, 201 bp, Homo sapiens
gggggcagaaacagctcccctctcctcccccaccccaccccaccccaccccatgtatattctgcttcctgagacttgggctatgcctacaggaagtaacasaaagggttggcgtgcccccagctccctcccctctgccaactgcacattgcacttactgaggctgggctgctggtggcaggcgcccctctgtgatcctccc

SEQ ID NO: 154177 - DNA, 201 bp, Homo sapiens
gttttaacagatctgtaattcttttttttttttttttttttttttttttttttttttttttgagacagagtctcgctctgtcgcccaggctggagtgcagkggcgggatctcggctcactgcaagctccgcctcccgggttcacgccattctcctgcctcagcctcagatctgtaattctttaaaaggttttccattcatt

SEQ ID NO: 154178 - DNA, 201 bp, Homo sapiens
ctcagtgataaaaagccatggggaccaggttccttggtccctgggagtttatcaggggttgaaaggtacttcagcttgccccccttcacccctgatccagmtaacacacacagctccacaagtgctggcttgttctcccagattttttgcagctgtggaagtgccaagatttaaaataaattttcttgaaaaaaaacaaca

SEQ ID NO: 154179 - DNA, 201 bp, Homo sapiens
tctgtcatcatagatgtatacatacacacaactatagaaagagagattgatgtaagtatagatatataaaacatcctcatcacctttattaagataatgtkctaacacaacctagagcttaggaaagctctaacactatttcctttgattagtgtttattgacccatattgtgctaggcgctggatatacagtggtgagca

SEQ ID NO: 154180 - DNA, 201 bp, Homo sapiens
aagaaagaaaatgtaaattacttctgtacctgtctaaaactccccatggcttatactgcacccctgtaaaatccaaagccctgaccatgatctgatattcmtatacggtgtggtcccgacctcctctttcatcccatcttgggccgttcgcactcacagggcaaccacaacagccttgccctctgtccttccacctggcca

SEQ ID NO: 154181 - DNA, 201 bp, Homo sapiens
aattttccagtgtctccttggtttactctcttttttctgagaaatataaagtagaaatagaaatttgagtgttttgaaaattgtcaggcttgaagtactaraaaaactcagtgtgaggtttgaatgtcccatgtatgataatgactttagataatgatctttatatcacaagtgattttatagcattattcactgtctttc

SEQ ID NO: 154182 - DNA, 201 bp, Homo sapiens
tgttggttctttataaaactatttcatcaacgtactaatccccttctcttcatgtacaaaatttactcatataagacctaactcaaatactaccttctccmtgaagctttcctttatcacatagccaagaataatctcactctcttccatgaccccattttattttctctgcccttttgctatagatattttctaccctat

SEQ ID NO: 154183 - DNA, 201 bp, Homo sapiens
cacatgcctagaaagtagggaaatattccaaacagtgttcagtaatacaattttaaacaaaataatagaatctcttaattttaaaattgatgtataatttrcaataaaatgcccagatcttaagtattctctcaatccagtaagttttgagaattagatacacctgtgtaccagccacccaaaataaggtattgaatccca

SEQ ID NO: 154184 - DNA, 201 bp, Homo sapiens
ttagccacataaattgctatttaaagtgaacaaactcagacttcacaagcatagattctgtttggactcatatcattacctttcctaatgaaatgcttccygttgttgccttcatacagaaaattaactctaaataatattaaaactcttaattcaatatagattccactaattgatcctttagaagtaaatctacccagg

SEQ ID NO: 154185 - DNA, 201 bp, Homo sapiens
aactttggcacatccataccacagaatatatcaaaaataaaaagaaaccaaccacattgacacacacagcaacctggaagaatctccagagaagtatgccsaggaaaaaagccaatccttaaaggctctatgctttatgattcatttgtataacattcctgaaatgacaaaacgacagaaatggaaaacagactagtggtt

SEQ ID NO: 154186 - DNA, 201 bp, Homo sapiens
aaatgaataagattattcaagggcacaggagagaacttttaggaacacacaatagaatcaacttcttcctgagacaggagaaaaggatgagtggggaaaarctaagatgagtttaaagatggatataaagaaatttgagagagtttatgcctgaaagcttccattttcttgccactatactgtgaacaagcatgggatgta

SEQ ID NO: 154187 - DNA, 201 bp, Homo sapiens
aatggctaaacaaactttggcacatccataccacagaatatatcaaaaataaaaagaaaccaaccacattgacacacacagcaacctggaagaatctccasagaagtatgccgaggaaaaaagccaatccttaaaggctctatgctttatgattcatttgtataacattcctgaaatgacaaaacgacagaaatggaaaac

SEQ ID NO: 154188 - DNA, 201 bp, Homo sapiens
ccaagcttcccaaactaaggcatccaatagtgggtcactaataatgccaggagctgtacatggcatctctatctcaatttcacccaaagacatcgagcccragtactcaattttacacaaagattttattaataaatgaaaatattattgtatattagcacattgatctgttatgggatggaatgctgagaatcaaaggaa

SEQ ID NO: 154189 - DNA, 201 bp, Homo sapiens
ttcaatttcccctatacgccttacacttctactgtatctcatatgacatggagcttggtactgaatacttaacaaaatttttaagtatacttattattggktgactaattggccagtaagtttcacttgggacatctttttttgaaaacagtttggcagtttctcaaacaattaagcctacaactattatataacccagca

SEQ ID NO: 154190 - DNA, 201 bp, Homo sapiens
aaactgacaaaagaaatctaaaacatatcaagagtatctgattgagattgcccttaaaaaaatgaagaaaattgattcttattatctggcgagtctgagastggccccaggcatcaggcatttcctaacaatgacaccatgaaatagcccactctgaacatcaccattcaatttcccctatacgccttacacttctactgt

SEQ ID NO: 154191 - DNA, 201 bp, Homo sapiens
gccattaactcttgcctctagaccatacacttaagctgtgctctcagtttttaagacgttttactctggagtaatctaaattacataatttaaaattttgstgcaccatgtagagtagattcctagtaatttagggaaattgaaattatctttttatggagagagaaaataaaaaatattccagaagcctgaaattttatt

SEQ ID NO: 154192 - DNA, 201 bp, Homo sapiens
tgtatagatttaatgctatccccatcaagctaccattgactttcttcacagaattagaaaaaaactactttaaatttcatatggaaccaaaaaagagcacrtatagccaagacaaccctaagcaaaaagaacaaagctggaggcatcataccacccgacttcaaactgtactacaaggctacagtaaccaaaacaggatgg

SEQ ID NO: 154193 - DNA, 201 bp, Homo sapiens
actgcaatgggctgagagatcaaaagtattaaaccttctaatccaaccttttactacttttccatgccattaactcttgcctctagaccatacacttaagstgtgctctcagtttttaagacgttttactctggagtaatctaaattacataatttaaaattttgctgcaccatgtagagtagattcctagtaatttaggg

SEQ ID NO: 154194 - DNA, 201 bp, Homo sapiens
atatttatgccgtatttgagaattaatattagcagaaatgtacaatgtagatttctttttaaaattctaggttactttatggaattgggctcttagagaayaagaaaagactgaagttttacgggaaaacaaatcatgtggtcttcagattctgaaataaggagaaatgcagccatctgaaatggtcatgaaccccaaaca

SEQ ID NO: 154195 - DNA, 201 bp, Homo sapiens
atatacattaaggttatgtcagttttcagcttctgatggtcttgtcaaaccagagcactgtttccaatagaaacttctccttgacattcacattatgttaygtcctcagtcctcatattttaagcttgtttggcttcaagcagaaaaaaaataggaattaaatccaaaaatggaaagaactggcaaataaaaccatagttt

SEQ ID NO: 154196 - DNA, 201 bp, Homo sapiens
attattcagcttaggaatgactttttaaaaactaatataccacttcaaagataggttatgttctagagaataaacataaaaagagcccctagaaatgtgtktaataggcttatgcataagtaaattaaggtattttctttttaagtttaaatattctatactaacaaagtcagataccattgcattcaaatattaaatcaa

SEQ ID NO: 154197 - DNA, 201 bp, Homo sapiens; identical to SEQ ID NO: 28762

SEQ ID NO: 154198 - DNA, 201 bp, Homo sapiens
attttaacagaaccccaagtttcacatgcctgaggatgtacgagaaaaaaaggaaaatcttctactcaattctgagagatctactaggctcttaacaaagmccagtcattcacaaggaggggatcaagctttaagtaagtccacagggtcaccaacagagaagttgattgaaaaacgtcaaggagctaagactgtttttaa

SEQ ID NO: 154199 - DNA, 201 bp, Homo sapiens
tatgtgtgtccattacataaagtttttaagtctgttattcaaatattcttattttcttgctaattttgtctgaatgttctatcaaatactgaaagaagtayatttaaaaaatgctgacgatggatttagccatttcttatagttctatcaatttttgccttatattttttgatgccatgctattaggtgcatataagttta

SEQ ID NO: 154200 - DNA, 201 bp, Homo sapiens
ctaagtagaaaaacctcccctattgttaacagtgattttaaccctgactgggcattatagtcacccctgaaacttgttaacacagatcctgagaccccatstccaatcctaaccccaagacattctgggtcagtagctctagacttgggttaagacacagcacaaccctcagacgagaccaagaaaggtcacaggctttag

SEQ ID NO: 154201 - DNA, 201 bp, Homo sapiens
ccttcttataaggatcccagccatcttggcttagggctttccctcaatgaccttctcttaacttaattgcagttgcaaagaccctattatcaaacaaggtygtattcttaggtactaggagttaggacttcaacatatctgtttgggggacataatatgacccataacaagccggaaacctcagagtcatcctcgactcca

SEQ ID NO: 154202 - DNA, 201 bp, Homo sapiens
aaatgttttaaatcattaccaaccatctgttctctcccactcacttacagcacaatgttttattttcacaggtatcaaaacgtacttactcatttcatacmttcccatgactatcctgaaagctgtaatggtatccaatgttgactcaagttcagtaactgttgtgtttggcttattacaccataagctctgcttctttta

SEQ ID NO: 154203 - DNA, 201 bp, Homo sapiens
gcgccgctgagcattaatcttgccgctaaatccttcccattaggcactatggattgtgtaattaaattgaaattgaaaatcgagtcttttctcccccccayatcaggcaggctatgagtttctcaccaacgtgagaaatcaggagtggaggggaagctctagcctgctggccaatatccagcctgtgcttttagcccacgg

SEQ ID NO: 154204 - DNA, 201 bp, Homo sapiens
attagaattcactttaaatgtcactacacagataaatcaatatgtgaaggtgaaaatgacttgaagagctttgtcaaggtaagtgttctatatcagacgtyatgggatttttgaaaccagaaggatccttagggcttatggagttcaatgacctcatgcactgcagatgaggaaactgagcccaggaagagaagacttgcc

SEQ ID NO: 154205 - DNA, 201 bp, Homo sapiens
aactttggttttcttatttgtatctccctaccccaccctgaccacaaggatgctccgtaagatcagggaccaagtctgtcttgctagctataccaccaacrcacagcccagtgcctggagcacagtttgtgctcagaaaacacgtgtttaatgaataactgaaggtggaagggcaaagggtgaggatggagagcgagatgg

SEQ ID NO: 154206 - DNA, 201 bp, Homo sapiens
tgccccacccacctaatttttccccaggccagcttagctacagtttctccaaaccctgcctgtgccactagagtcagagaatgcagacattgacctgtggraaaatatgcttgggtttcacccataggtacacatttccatatcttctttcttttttcctttcaatggcataaattacagcttacccttaccaaagagaag

SEQ ID NO: 154207 - DNA, 201 bp, Homo sapiens
tcaatcctcacaaatttgggaaagggtggatattgttaaccctttgttatagataggcaaacaagccagagcattaaagtaactagccccagttcaaacamctagtaattgtcagagctgctattagataccatgctgtcctttagtccattttctagagttcagtaggctgctgcattattagggtgtgaatattttatt

SEQ ID NO: 154208 - DNA, 201 bp, Homo sapiens
aatatcaccccaagtcacaatctccaaaggctgggccccttccctcttcccacattccatccccacacctgctaaagtgtatgcgtgtattacataagccrctcagaacttctcacgattcacccacacacaccctacacttacctgcctcttagatttctttacttgtcctgccccaactccctggagtgcccctctctt

SEQ ID NO: 154209 - DNA, 201 bp, Homo sapiens
ggacaacagagaagccatgaaactctaaggaaacatgaaacacctcaagtccactcaccccagaagtgaggttatgacttgagtggcagttggaggaattycaagaaaggctaagctttagtgggaaaacagagagacccacaaagggaggtacctgttgtgggggacaccagaaccaggggtccctttcagaagcagctg

SEQ ID NO: 154210 - DNA, 201 bp, Homo sapiens
attttttccctctttaatcctctaaccaaaagctggagggataagacccaaatatgagacaaaaaagactagttttatcctgaaagttagctttaaaaaawttttgtttcaataatttttgcagaacaggtggttcttgattacatggataagttcttcagtggtgattctgagattttggtgcactcatcgcctaagcag

SEQ ID NO: 154211 - DNA, 201 bp, Homo sapiens
tccctgcaaaggacatgaactcattcttttttatggctgcatagtattccatggtgtatatgtgccacattaagctcatcatcactggtcattagagaaaytgggactataattatttaagttaaaaacatgtgttgaagtgcagtggaggacacaagtagagatttccaagaggctttaaaacctaagtagattttggag

SEQ ID NO: 154212 - DNA, 201 bp, Homo sapiens
ccaaatgactgttcattgcaggaaataagatttccctccggtaaaaactatggtgcaaaggcagtctctatgtacaaaatccccaccacagacaattgttratgtcccaattgcccaggagtcctacctgcctgaggacatagttggtggagttgagatccacaatggggattgtaaaataaaggtttccaacaccctgaa

SEQ ID NO: 154213 - DNA, 201 bp, Homo sapiens
ttttcgctgtaaggcttaggtattacaaatgtgtgatctgaattttgtaacatttttcttcaccttttgaaattactcttttctctatctattatcacttkcccagggtttccaatgagcttgttaagaactaagatcagccagcctattcatactcaggcctgatttttctttacccataatatctagcagtgtcacaac

SEQ ID NO: 154214 - DNA, 201 bp, Homo sapiens
agaagacaggtctattcaaaaaagtcacaatgaattaatatagcaggaatttggaaactggagttatagtgcatatagcccctatgtttcaatagatattkcagagtatgttcagtagtttatagcagatttattgtgctatctgtgtaatggttggcatctgcaatccatcaagactttatgcttgtgaagaaggagtgt

SEQ ID NO: 154215 - DNA, 201 bp, Homo sapiens
ctcaaatgccaactaatttactgctgctgcttggtttactaggattcaaattagaacagtatccttttgctgtaatttgtgtctggtggtgctcaattcartttaggtagcccccaaatcggttttcacatatctgtttaattttcattttgtagcaatagaagacaggtctattcaaaaaagtcacaatgaattaatata

SEQ ID NO: 154216 - DNA, 201 bp, Homo sapiens
cttatagctgtttactacagaataaactttcattcgttctggataatttaaatatccgtggggttgcttgcctcagagccctcttttttatcctagctttstgttcatttactcttccaagcttcccaaactaaggcatccaatagtgggtcactaataatgccaggagctgtacatggcatctctatctcaatttcaccc

SEQ ID NO: 154217 - DNA, 201 bp, Homo sapiens
gcaaggatctacccagagttggattgtacttctcaaacagaaagagaagcccctactggaccaataagtcttaataaggcatacttctatgcttccattamttctagcagttactttaaagccataaactggactaaaaagtcttctgccaaggcttggattactggagcaacaaagccttttgtatctgttaggaaagaa

SEQ ID NO: 154218 - DNA, 201 bp, Homo sapiens
aggcacagtggctcgcgcctgtaatcccagcactttgggaggctgagacgggcggatcacgaggtcaggagattgagaccatcctggctaacatggtgaamccacctctgtactaaaaatacaaaaaaagtagccgggcctggtggtgggcgcctgtagtcccagctactcaggaggctgaggcaggagaacggcgtgaac

SEQ ID NO: 154219 - DNA, 201 bp, Homo sapiens
gcgggcaaacaaactactgaagtcttgctgaagtccagattctgatttggtagatcctgaaatgtaacctgagactcttcataactaatgagttcctggtratcatactgcggcttgtcccccatactttgagttgcaaggatctacccagagttggattgtacttctcaaacagaaagagaagcccctactggaccaata

SEQ ID NO: 154220 - DNA, 201 bp, Homo sapiens
agagacaactgtacttcatttgaagtacagttgctatttttggtcacaaatttccttaagctttatcccacccttggttccttggttccccatgggaccaktgcatcatgggttcttctgtgttgttactgtttgctggagagacgcgatgccctttcaagatttcctcaattttagagttagaaaaaccagttctattag

SEQ ID NO: 154221 - DNA, 201 bp, Homo sapiens
catccagctacatattcacctacaagtacaaaattcccattgccaattagaggatgccctggtgctgattctgctctagtcacttggtgatttagcccaaygcttctcaaatttcagcgggcaaacaaactactgaagtcttgctgaagtccagattctgatttggtagatcctgaaatgtaacctgagactcttcataac

SEQ ID NO: 154222 - DNA, 201 bp, Homo sapiens
gattttggtgtttgcagggtgccccagaaccaatctgccacagataccaagagacaactgtacttcatttgaagtacagttgctatttttggtcacaaatytccttaagctttatcccacccttggttccttggttccccatgggaccattgcatcatgggttcttctgtgttgttactgtttgctggagagacgcgatgc

SEQ ID NO: 154223 - DNA, 201 bp, Homo sapiens
ttttgatggggtttgtttttttcttataaatttacttaagttctttgtagattctagatattagccctttgtcaaatggatagattgcaaacattttctcmtattctgtaggttgcctgttcactctgatgaaagtttcttttgctgtgcagaagctctttggtttaattagatcccatttgtcaattttggctttttttg

SEQ ID NO: 154224 - DNA, 201 bp, Homo sapiens
cagtctgggctactcagtctaagggtttcacttccccactttgacccagcacctgcgctgcccacccccaccccccacccccatcagctgggcgctaccartgcaccagcttaacttgttatcccagcagtggcatcattcttatcctgggttgtctccttaggagatcctagaaaatgcctcagccaggccagcattcca

SEQ ID NO: 154225 - DNA, 201 bp, Homo sapiens
ataaatactccagagatgatttaaagtatatgggagaatgtgcataggtgatatgcacatgatatatatcaaggacttgagtattcacagattttggtgtktgcagggtgccccagaaccaatctgccacagataccaagagacaactgtacttcatttgaagtacagttgctatttttggtcacaaatttccttaagctt

SEQ ID NO: 154226 - DNA, 201 bp, Homo sapiens
tgttatctcattgtggttttcatttgcatttctctaatgaccagtgatgatgagcttttttcatatgtttgttggctgcataaatgtcttcaagaagtgtstgttcatatcctttgcccactttttgatggggtttgtttttttcttataaatttacttaagttctttgtagattctagatattagccctttgtcaaatgg

SEQ ID NO: 154227 - DNA, 201 bp, Homo sapiens
gaccttgactctccttcctgcagcagcctctcagcatcagcccctcgatgacccctctccattacccctaggaaccttcctgtctaggctatgccatcttscctctggtcacactgcaggtttacccattcctgactatatacttgctgctgatgtcacctcagtgtgtcacatagtgttttacagtctgggctactcagt

SEQ ID NO: 154228 - DNA, 201 bp, Homo sapiens
caggtaagaaatacagttcagaaatttaggagtcaccagtgctaatatagttgtcattagagccaacaaaatgaatgagattacccagaaaaggcccatakcataaaaaacaaaaagagactttatttcagatcaaaagaaaaagcttgatgtgtgtcatgctggtgagcaaagcaatcttgaaaatgagaaaaagagaag

SEQ ID NO: 154229 - DNA, 201 bp, Homo sapiens
tcctgtgttagtttgctgagaatgatggtttccagcttcatccatgtccctgcaaaggacatgaactcatccttttttatgactgcatagtattccatggkgtatatgtgccacattttctttatcctgtctgtcattgatgggcatttaggttggttccaagtctttgctattgtgaacagtgctgcaataaacatacgt

SEQ ID NO: 154230 - DNA, 201 bp, Homo sapiens
tatgtcaatgccaggacttggagtaggggaagacaggtagtcaggaggatgggaatgctttgtcatcctcatttcctagagaaagtcaaaatttgacagaygggggaaggataactttagtagattccattttatttaactctataaacacacaaaccttttacccctaggctattttttaaatgctaataattttaaagg

SEQ ID NO: 154231 - DNA, 201 bp, Homo sapiens
tcttatttgagctcaggtaagaaatacagttcagaaatttaggagtcaccagtgctaatatagttgtcattagagccaacaaaatgaatgagattacccasaaaaggcccatagcataaaaaacaaaaagagactttatttcagatcaaaagaaaaagcttgatgtgtgtcatgctggtgagcaaagcaatcttgaaaatg

SEQ ID NO: 154232 - DNA, 201 bp, Homo sapiens
tcatttctacacctttgcatcctcatagcttagctcccacttataaatgagaacatgtgatatttggttttctgttcctaacttacttcacttaggataayggcctctagctccatccaagttgttgcaaatgccattgtttcattccattttatggctgagtagtattccacggtgtatatataccacattttctttatc

SEQ ID NO: 154233 - DNA, 201 bp, Homo sapiens
tgagaaatgtttgaagaaggaatgaacaggacttggttatcgatgacatgtaagtaatggaggaatgcaagaggaattccaaggcccctgatttgagtgastgagtgccacattccctgagaggcggcacaggagccggagcatgtttggaagggaagaggaggacttcatatttagataggctctgttttggtgctcgtg

SEQ ID NO: 154234 - DNA, 201 bp, Homo sapiens
ggttgagttacatcctattgcattacaggcaaagccaggacaaaaatccagggctctttcctccctatcctgtagatgccatttctcattgctacattttstgtgaagaagctcactacaaaatgtatgttcagcatgccttgctaaattgttctggcagcttatatgaaatatgctctccttgatactattttaaaacaa

SEQ ID NO: 154235 - DNA, 201 bp, Homo sapiens
ctcccctagttagggtagtcatcaccattattctccccaacttccatccatttttgaagacctaattcaaattccaccttctaattattctgattcctgtyacaaagacaggtcctatctctgaacttatttttaagttcttaaactcaccatatctctagaatttgctcagacatgcaaaagagatatccaatagatagt

SEQ ID NO: 154236 - DNA, 201 bp, Homo sapiens
tgcatacaaatggccaataggtatatgaaaatatattcaacaccgctaatcatcagggaaatgcaaatcaaaaccacaatgacatattagctcacacttaycagaatggctatcatcaaaaagagaaaagaaaacaagtgttggcaaggatgtggagaaaagggaatcctaatacactgttggtgataatgtaaattagta

SEQ ID NO: 154237 - DNA, 201 bp, Homo sapiens
ctctccacaccatccttttcaagtctaagtgagatcatgttacttttctacccagagccctacaaaagttccctagtttacccagagtaaaagccaaggtscttaaaattttcatccctaccagaggatgccaccttgtaaatcccgtcttccatgtcttcttttactgtgagagttgtaggaaggatgtggcaagatgaa

SEQ ID NO: 154238 - DNA, 201 bp, Homo sapiens
gcctcccaaagtgctgggagtataggcgtgaatcactgcacctggcgctataattatatattttaatttattggaattttactagctcaagggaagaggtrattttttctcatatttaaatggctataactcacagaaatgaactatgtggctcctgagtccccctgatcctcaactgactgcgtgacctcagtcactgga

SEQ ID NO: 154239 - DNA, 201 bp, Homo sapiens
acctgaaagatggatttaatcatctcttgcttttaaataacgtataatgattagtggcaaaaataagcaaacaggtgtctccaatcagcttgcattgtttstcttttttcttttgttttgcttttgagacagggtctctctctgcactcagttgctcaggctggaatccagtggcagaatcacagctcactgcagcttaga

SEQ ID NO: 154240 - DNA, 201 bp, Homo sapiens
cgttctctcattatatcctatcgactgatgttcacagccacctcagtaccggatgccctctagcccgcctgtaaactcctgatccctcctgtggagatgtrtgtggaccaagcgtcagtggtgtttgtacccagatgtgctgtgccagttttgctagttcatataattattcaatgataattatgtaaaccaatgatatat

SEQ ID NO: 154241 - DNA, 201 bp, Homo sapiens
agcctcccaaagtgctgggagtataggcgtgaatcactgcacctggcgctataattatatattttaatttattggaattttactagctcaagggaagaggkaattttttctcatatttaaatggctataactcacagaaatgaactatgtggctcctgagtccccctgatcctcaactgactgcgtgacctcagtcactgg

SEQ ID NO: 154242 - DNA, 201 bp, Homo sapiens
atgttggccaggctggtcttaaactcctggccttgtgatccacctgcctcagcctcccaaagtgctgggagtataggcgtgaatcactgcacctggcgctmtaattatatattttaatttattggaattttactagctcaagggaagaggtaattttttctcatatttaaatggctataactcacagaaatgaactatgtg

SEQ ID NO: 154243 - DNA, 201 bp, Homo sapiens
catgtgcacccataaccctatggtctgtcaaaccacagtcaaattttatattttcagtgacaactttatgtactacaaatcactgatcagagtaaagaagyacaaagggctttgaagtaatcctggcagtctctggagaagacagcagacaaatggttttagagttaaaactccaaatagacggtccaatggtatggaaga

SEQ ID NO: 154244 - DNA, 201 bp, Homo sapiens
ttttcagtagagacagggttttaccatgttggccaggctggtcttaaactcctggccttgtgatccacctgcctcagcctcccaaagtgctgggagtatakgcgtgaatcactgcacctggcgctataattatatattttaatttattggaattttactagctcaagggaagaggtaattttttctcatatttaaatggct

SEQ ID NO: 154245 - DNA, 201 bp, Homo sapiens
gcgccaccacacccagctaatttttagtagagacagggtttagtattttcagtagagacagggttttaccatgttggccaggctggtcttaaactcctggscttgtgatccacctgcctcagcctcccaaagtgctgggagtataggcgtgaatcactgcacctggcgctataattatatattttaatttattggaatttt

SEQ ID NO: 154246 - DNA, 201 bp, Homo sapiens
aaaaacaaagtggtcaaggaactgagagttgattggatgtcagagtcactaaatgtaatgacaggagctgagttagaagctggagtgtgtaaagtggacasatcagtgataaaggtagatgacaacaagaggagggggaaagggagacttaaggagaacacattgatttcacagaagcagagggctttgctgggtgatgtc

SEQ ID NO: 154247 - DNA, 201 bp, Homo sapiens
tgcttattttatttgttttctcttttgccaaaggtttatttaaacacagattctcatcaccttaacaagaattggtcaattgtttattcaagtttaacttsaccttttggtcaatgttgtttttcttcaacaaggtcataaaacagttgtttagaagaccgctattaaattagaagcacatttacttattcaagaattatt

SEQ ID NO: 154248 - DNA, 201 bp, Homo sapiens
ttagcagcatgagaacagactaatacacggggctatacacggggctatacacgttggcatatggtattcagggggttattcacacagtcctcttgcactakaaaaaaaagcagtgcccttcaacctcagctggtggaatgaccatgatgtctggaggtggctccatgaacggtgcttcattcctctgttctattgcttaat

SEQ ID NO: 154249 - DNA, 201 bp, Homo sapiens
ccttttttattgatgtgtgatattctactgtatgactacattacaaattacttatccattatcttgtttttgacatttggattgtttctagtttgaggctrttatgaataggactgctatggacatttttgcacagatctgtttgtgaatatgatgttctttgacttatgatggggttatgtcccaagaagcccatcataa

SEQ ID NO: 154250 - DNA, 201 bp, Homo sapiens
ctgaagaagcatttaatatacatacttggcagcaatgctttcttatctgaatggcttgagaattggcagtagtcaaagaccttgagagcttgtaaaaatttaaaaaaaaaaaaacttaactaaatgacctgaaagatggatttaatcatctcttgcttttaaataacgtataatgattagtggcaaaaataagcaaacagg

SEQ ID NO: 154251 - DNA, 201 bp, Homo sapiens
catcttgcacaactgaaactctgtattccttaaacagtaactccccattcttccatccctctgtccctggcaagcacgatttcactgtctgtctcaataaatttgactactctgggtaatttatataagtagaatcatacaatatttgtggttttgtgactagctaatttcataacatcaaatttcatccatgttgtagta

SEQ ID NO: 154252 - DNA, 201 bp, Homo sapiens
tcatcttgcacaactgaaactctgtattccttaaacagtaactccccattcttccatccctctgtccctggcaagcacgatttcactgtctgtctcaataaatttgactactctgggtaatttatataagtagaatcatacaatatttgtggttttgtgactagctaatttcataacatcaaatttcatccatgttgtagt

SEQ ID NO: 154253 - DNA, 201 bp, Homo sapiens
ctgtaaatgatatacttgtatactgtgcaacttaaaaccttctaaagtgaatgtatgtcacttgagccatgcagtatagaaatcaatcatatacattgtcygattatttaactgaaaatccccagataagagcattcgtaggacaacagagaagccatgaaactctaaggaaacatgaaacacctcaagtccactcacccc

SEQ ID NO: 154254 - DNA, 201 bp, Homo sapiens
gtatatatatatagatataattatatatgatatatgtatatttgtatatatgatataattgtgtgtgtatatatatatatatatatattttttttttttttgagacagagtctcactctgtcgcccaggctggagttcagtggcgcaatctcagctcactgtaacctctgcctcttggattcaagcaattctccttcctca

SEQ ID NO: 154255 - DNA, 201 bp, Homo sapiens
tctttaaggcaacagcatctttgatagggaacacaggtcactagggctatgagaaaaatccctttactagtggaatttttactaatttgccctatctgatytgtagcttgtcaattgcctgatttctatgagagggtgaggttaaggataactaatggatagagcccatattctaggggaatgttagggggctcctaatca

SEQ ID NO: 154256 - DNA, 201 bp, Homo sapiens
tgtatatatatatagatataattatatatgatatatgtatatttgtatatatgatataattgtgtgtgtatatatatatatatatatattttttttttttttgagacagagtctcactctgtcgcccaggctggagttcagtggcgcaatctcagctcactgtaacctctgcctcttggattcaagcaattctccttcctc

SEQ ID NO: 154257 - DNA, 201 bp, Homo sapiens
cagctttatttcctgattttatttccacctttaaattttttaaaatttattattcaaaaattcacactaaaattaatagtttatggtttttgaactgatcratattaatttaattaaaataaattcatacatttagctttctcactttcacatcagttatgcccttttcatccaatcattacattcaaaagaaaatgagat

SEQ ID NO: 154258 - DNA, 201 bp, Homo sapiens
tgtacacaattatattatttttgtggtcctagtgattatataattgtgtatatatatatagatataattatatatgatatatgtatatttgtatatatgawataattgtgtgtgtatatatatatatatatatattttttttttttttgagacagagtctcactctgtcgcccaggctggagttcagtggcgcaatctcag

SEQ ID NO: 154259 - DNA, 201 bp, Homo sapiens
tatttttctaatttgatgttttgtgtgtatgtgtgtgcatgtataaatatatatacacacatatatacatatatatacacacatatatacatatatacacmtatatatacacatatatatatacacacacacctatatatacacacatacatatatataactaagaaatctaagtagattcctgtaacaggactaattcat

SEQ ID NO: 154260 - DNA, 201 bp, Homo sapiens
tatatataaaaaattgtatattatatatataattgtatatatgtacacaattatattatttttgtggtcctagtgattatataattgtgtatatatatatwgatataattatatatgatatatgtatatttgtatatatgatataattgtgtgtgtatatatatatatatatatattttttttttttttgagacagagtct

SEQ ID NO: 154261 - DNA, 201 bp, Homo sapiens
tagtactgtcctaccatgtaatttttatttttctaatttgatgttttgtgtgtatgtgtgtgcatgtataaatatatatacacacatatatacatatatayacacacatatatacatatatacacatatatatacacatatatatatacacacacacctatatatacacacatacatatatataactaagaaatctaagta

SEQ ID NO: 154262 - DNA, 201 bp, Homo sapiens
gcttgtccacctggtagctcctcagtcatcttcccaggctcatctcaggcatcacctcccttgtgaaatttgcccccaaaaatctctccagaaaaattaarcacttttttctttgttttccaaatacctgacctatccttttattatagcaattgtcacattttttcataaactgcttattttcatcagatcaattaaact

SEQ ID NO: 154263 - DNA, 201 bp, Homo sapiens
ctgcaatgaacatatgagtgcatatgtctttttggtagaacaatttctttcttttgtatatataccctgtaatgggattgctgggttgaatggaacttccrttttaagttttttgagaaatcttcaaactgctttccacagtggctgaactaatttacattcccaccaacagtgtataagcattccctttcctccatggcc

SEQ ID NO: 154264 - DNA, 201 bp, Homo sapiens
gtgtttgagataggaaactggagactgtataaatcaaaaggatagtttaaatcaatttgtgtctctcagttttgtacataaattagaccagtatcacaaawatatgagggagcatatgtggtaaacagtgtgatttgtgaaagccctggattctaatccagaatctaatgtttactgggtaatcttgggcaagtttacctc

SEQ ID NO: 154265 - DNA, 201 bp, Homo sapiens
gccatctctggcttgtccacctggtagctcctcagtcatcttcccaggctcatctcaggcatcacctcccttgtgaaatttgcccccaaaaatctctccasaaaaattaagcacttttttctttgttttccaaatacctgacctatccttttattatagcaattgtcacattttttcataaactgcttattttcatcagat

SEQ ID NO: 154266 - DNA, 201 bp, Homo sapiens
gggattgtctgagcccaagagttcgaggctgcagtgagctatgattgcaccattgcactccagcctgggcaatggagccagttgctgtcacaagggcaaaraaaaaaaaggaaacagatgtgcttaaattaaaagtaactcttactcctttcccacccggccttaacgtgtaacaaagtgctaaagtatatctcctctgac

SEQ ID NO: 154267 - DNA, 201 bp, Homo sapiens
caatatacgctagtcaaagaggcaatggctgcaccaatttaggagtgtttcatttttctttatcagtgatctacagtctctatttcctagcttttacacataaaaaaaagaaaaacatagtggaaaaacattttctttaaagcattatatttttcctatttggtgactatatactatagatgttaaatcttataagttatt

SEQ ID NO: 154268 - DNA, 201 bp, Homo sapiens
ggtaaagtctgactgtttatatcagcccaggccctcctggaatgacacccaacccctcctgcctctccctgtcatctgagtctggcccccaagcagactckatgtcaggatgtacagcccttgccatctctggcttgtccacctggtagctcctcagtcatcttcccaggctcatctcaggcatcacctcccttgtgaaat

SEQ ID NO: 154269 - DNA, 201 bp, Homo sapiens
cacttgaacccaggaggcagaggttgcagtgtgctgagatcgcgccactgcaccccagcctgggcgacagagccagacttggtctcaaaaaaaaaaaaaaaaggagactataatttgggataggagtagagggagcagcagaccacggaagatagtatagtaaccccaggttagtaacaggagagtcattaacaccccagg

SEQ ID NO: 154270 - DNA, 201 bp, Homo sapiens
gacttaccaggacacagagtttaggagtttggagatcctgccaagcttagcggaaagtgcacatctagaagaaaaggtgcaaaagcagcccatggttccakgaaatggcagaggagtgagtccttcatgtcaagttttggaaaaatgagatttatcaaatgtttaatagaagacagtttgagacagtggaaagaactctat

SEQ ID NO: 154271 - DNA, 201 bp, Homo sapiens
agctaatttttagtagagacagggtttagtattttcagtagagacagggttttaccatgttggccaggctggtcttaaactcctggccttgtgatccaccygcctcagcctcccaaagtgctgggagtataggcgtgaatcactgcacctggcgctataattatatattttaatttattggaattttactagctcaaggga

SEQ ID NO: 154272 - DNA, 201 bp, Homo sapiens
attctttgtgttcttaaaaatagacccaacggctcagtaataagcaccaacattaatgtttgtttagtcctggtgatgacttaccaggacacagagtttargagtttggagatcctgccaagcttagcggaaagtgcacatctagaagaaaaggtgcaaaagcagcccatggttccaggaaatggcagaggagtgagtcct

SEQ ID NO: 154273 - DNA, 201 bp, Homo sapiens
cccatgctacaggccaggtcaaactaaagggcaagccagatggcctgcttcccaggggttctaatctataaaaagcacaggacattactggagtaaatcartaatgtgttgtcagttcactgaggttctcatacacaaatcttcacatagttataaactgatggcactgctatggagctacactgctcctgcaagtggaaa

SEQ ID NO: 154274 - DNA, 201 bp, Homo sapiens
tattctacttctttcctgccaaatataatttattgggttttgctgttcccatccacatttaatatgtacagacacaaacctaagaaataaaatagggccamacattttgaatgtatttcatttatcaagttgcagctcctcattaaggctttgagtttctttaaaaaaacaagatattctgctaactaatgtttactgggt

SEQ ID NO: 154275 - DNA, 201 bp, Homo sapiens
atcctaatagtgaaaacaccaacttattctacttctttcctgccaaatataatttattgggttttgctgttcccatccacatttaatatgtacagacacamacctaagaaataaaatagggccaaacattttgaatgtatttcatttatcaagttgcagctcctcattaaggctttgagtttctttaaaaaaacaagatat

SEQ ID NO: 154276 - DNA, 201 bp, Homo sapiens
ttgacattttgaaattgcaacacaagacagctggttccttcctcttcaccacattccagagaacaagaagaagaactctgtctagcaactgtatactttakaacaaggtgtcagagtcagggtgcacccctccattgctcctccaaaccctcttggacacacacattgttgttggcattaacctgaaatgcaaggggaggg

SEQ ID NO: 154277 - DNA, 201 bp, Homo sapiens
tatagctgagttgtcaaatatgcaagtgacataagtcagaggggcgtgtgtttcactcaaaggtgctgacacaggccaatctgatctgggaccagtagatrcttaatccagtgagacgaatggagtgcattcctgccagtgcccctactactctcgcacatggcaatgctgctcccaggactcaggtggctttggactagt

SEQ ID NO: 154278 - DNA, 201 bp, Homo sapiens
acttgggattaggctaggactacagtaaacgtctccctcctgtgcattctcatgtggcctctcagggcatcccagcctctaggccttcatggggcgtggtraagcagatgttttgcccagggctaaccctcccaagatgctctgatacttgaaaaaggattggccaaaggcgtttaattatagctcaactacctgagaacc

SEQ ID NO: 154279 - DNA, 201 bp, Homo sapiens
aatacaccctaagaatagcttttgttttcagtttaattattcagcttaggaatgactttttaaaaactaatataccacttcaaagataggttatgttctakagaataaacataaaaagagcccctagaaatgtgtttaataggcttatgcataagtaaattaaggtattttctttttaagtttaaatattctatactaaca

SEQ ID NO: 154280 - DNA, 201 bp, Homo sapiens
tttgagttaagtgggataccagctgagtaaagaaaatgactagaagatatttgactaaaatgaattatttaaactacttttgttactgaaaagaccaagtmtgggaagatgataggttatgtgatagtactgattggtgtcatcaattgattttttttttttttttctgagatggagtctagctctgtcacccaggctgga

SEQ ID NO: 154281 - DNA, 201 bp, Homo sapiens
ctcagaaatcaaccctcatatttatggtcaattgattttcaacagggttggcaagacagtttaatggagaaagaatagtatttttaacaaataatactggsgtaaatggatattcatatgcaaaacaataaatttgacccttacctcacatagataaaaacctcaaaattaatcaaagacctaaatgtaagagcctaaact

SEQ ID NO: 154282 - DNA, 201 bp, Homo sapiens
catagggtagatatatttttttctatcataaatatccaagtaatttaaatataacatacatcttcttatatattgcttcattattatttctatttttcagycattttagggaagaatcatcaaaatttcatatgaaacgtatagttaaaaagtaaagtccagtatgtagattggaaaggagaaactatctcttgaaaaatc

SEQ ID NO: 154283 - DNA, 201 bp, Homo sapiens
ccaactttaagctcaaggcttggtagtgaaaggtcactctacatttagactaaatgtggatagatgtatactccctgcagcaggctattgctttaggactkgctattgtatttgacccaatcttctttctaacccaagcatttagacagcttccatctgggttttgtttaaacttttttttttaagcatcagtacaaatta

SEQ ID NO: 154284 - DNA, 201 bp, Homo sapiens
aatacgtgccaacataaatgcctacaaaatgtaactgttaatcaattttattaatggttaaatagaaataattaatgatttcattatttttgaaaaccatrtaattatttaggcagagattttgatttgcatacggtgggtgatggaaaaggaaaagttagaggaatagtggccattctggcaagactgtgggactacttg

SEQ ID NO: 154285 - DNA, 201 bp, Homo sapiens
tttgtaaactgagcgtgacaaatatcaacccaccactggagctccttgcaactaatgaaatgtatcagccaaaaaaaaaacaaaaaacaaaaaaaacaaamaaaaaaagcaacccccaaaaccctctcataagagctgcaatatacgctagtcaaagaggcaatggctgcaccaatttaggagtgtttcatttttctttat

SEQ ID NO: 154286 - DNA, 201 bp, Homo sapiens
tttgctatctggttggaaaagtttgtaaactgagcgtgacaaatatcaacccaccactggagctccttgcaactaatgaaatgtatcagccaaaaaaaaaacaaaaaacaaaaaaaacaaaaaaaaaaagcaacccccaaaaccctctcataagagctgcaatatacgctagtcaaagaggcaatggctgcaccaatttag

SEQ ID NO: 154287 - DNA, 201 bp, Homo sapiens
gtaagctgtggatagaatggtctgttctggactcattcgggtatacactaatgaaaacctagctgctgtcaataggagttggtagggaagtataggctcayggactgtggaatttcattctgaactcctttggctctcacttgccacactggcccacacctataccaggatttgcttactggtcaggcaccaaagtgttcc

SEQ ID NO: 154288 - DNA, 201 bp, Homo sapiens
gagaaacaataatggataaaataatgaattccttctaccatgtttgatatggtttgattctgtgtccccacccaaatctcaagtcaaattgtaattctcaktgttggaggagggacctggtgggaggtgattggaccatggggtcagacttcccccttgctgttgttgtgatagagttctcacaagatctagtgtttgaaa

SEQ ID NO: 154289 - DNA, 201 bp, Homo sapiens
ttaggtctgtgaattccaaaacccatgctacaggccaggtcaaactaaagggcaagccagatggcctgcttcccaggggttctaatctataaaaagcacasgacattactggagtaaatcagtaatgtgttgtcagttcactgaggttctcatacacaaatcttcacatagttataaactgatggcactgctatggagcta

SEQ ID NO: 154290 - DNA, 201 bp, Homo sapiens
ttattccaaaaaattgaagaggaggaactcctctctaactctttatatgatgccagcatcattctgataccaaaatctggcagagacacaagcaaaaaaaraaaagcaactttgggccaatatccctgatgaacatagatacaaaaatcctcaacaaaatactaccaaaccaaatctagcagcacatcaaaaagctaatcc

SEQ ID NO: 154291 - DNA, 201 bp, Homo sapiens
ctttccttcacttgttcagttgataacaacttgggatcttctccaccactgccaggggagctaggaagctgaaagaatgactggcaaggctgtgtcatgayagaaaggtctgtggccaatccatctgaaggtccaaccattctaaacagctatgtcacaggtacacatacaagtgcacacatgaacgtgtgtgtagtaaga

SEQ ID NO: 154292 - DNA, 201 bp, Homo sapiens
aatcccacaatacattattattatttttgcttagtcaattgtcttttaaaaggtttaaacaacttttttcggttttttatgtttattgttttagtcaattktgtgttgccataacagaatatctgagactgggtcatttataaagaaaaaatgtttatttggcatatgattccacaggctagggagttaaagcacatgaca

SEQ ID NO: 154293 - DNA, 201 bp, Homo sapiens
aaatgaatgattgaataatttactgcaatctacagttggaaaccatccaaaagggcaaagagactcaataaaagggcgaagaagctcagttagaaaggtgrttttgctagtgtttctgctaatgttgggtccagatgagcactgaaagtcacagatactgtcaacagggatgacaagacagaaacatgcttcctgacacct

SEQ ID NO: 154294 - DNA, 201 bp, Homo sapiens
gaaagtaataattaagtcttgttttcttatctccagtaatcatcaaaaacttagccagggacaaccagaaatcctaaaataattcatgtgccttaaaatamccaactttccttcacttgttcagttgataacaacttgggatcttctccaccactgccaggggagctaggaagctgaaagaatgactggcaaggctgtgtc

SEQ ID NO: 154295 - DNA, 201 bp, Homo sapiens
tttttatataccataaatcccacaatacattattattatttttgcttagtcaattgtcttttaaaaggtttaaacaacttttttcggttttttatgtttaktgttttagtcaattttgtgttgccataacagaatatctgagactgggtcatttataaagaaaaaatgtttatttggcatatgattccacaggctagggag

SEQ ID NO: 154296 - DNA, 201 bp, Homo sapiens
aatgggcaaaaactggaagcattccctttgaaaaccagcacaaggcaaagatgccctctctcaccactcctattcaacatagtgttggaaattctggccasggcaatcaggcaagaggaagaaataaagggtattcgattaggaaatcgggaagtcaaattgtccctgtttgcagatgacatgattatatatttagaaaac

SEQ ID NO: 154297 - DNA, 201 bp, Homo sapiens
cgagatatctaccaactggaacattaggaaatcatgtcaatttccagaatcttctgaaactctgcaagagctttttttttttttttttttaaagaaagtartaattaagtcttgttttcttatctccagtaatcatcaaaaacttagccagggacaaccagaaatcctaaaataattcatgtgccttaaaatacccaactt

SEQ ID NO: 154298 - DNA, 201 bp, Homo sapiens
tttataatacttccattttccccaccctgttgttgtcatatattttatttttatataccataaatcccacaatacattattattatttttgcttagtcaaktgtcttttaaaaggtttaaacaacttttttcggttttttatgtttattgttttagtcaattttgtgttgccataacagaatatctgagactgggtcattt

SEQ ID NO: 154299 - DNA, 201 bp, Homo sapiens
gaattttgaataaaagagaggttgctattttgtatatataaaacaccaacaataaacaaatgagagttaagattttctttgaataagattttgttttctttatcaagtgttcaataattttgtcccattccacatccctactgtgaatatgataaggtgttacagtttgatcaagatgtctcagtgttttatgattatgat

SEQ ID NO: 154300 - DNA, 201 bp, Homo sapiens
ccaggccaacccgagatatctaccaactggaacattaggaaatcatgtcaatttccagaatcttctgaaactctgcaagagctttttttttttttttttttaaagaaagtaataattaagtcttgttttcttatctccagtaatcatcaaaaacttagccagggacaaccagaaatcctaaaataattcatgtgccttaaa

SEQ ID NO: 154301 - DNA, 201 bp, Homo sapiens
ttcacattattgatttctaatttaattccattatggccagaaaacatatgttacatgacttgaatacttttaaatttattgagagttgttttatggaccasacttatgttctattttgttaaatattgcatgtgcacttgaaaagtgtgtattatcctattgttggatagagtctttcttaataatcaagccagtttgatt

SEQ ID NO: 154302 - DNA, 201 bp, Homo sapiens
tgaattttgaataaaagagaggttgctattttgtatatataaaacaccaacaataaacaaatgagagttaagattttctttgaataagattttgttttctttatcaagtgttcaataattttgtcccattccacatccctactgtgaatatgataaggtgttacagtttgatcaagatgtctcagtgttttatgattatga

SEQ ID NO: 154303 - DNA, 201 bp, Homo sapiens
cccttttgatttttgccttacactctctcagtattggaaacgtctttcatgatgaatatgattagtgttagaattcacaaaaggaagaataaagccctcartgtttcagtcacactctccttttgacccatcccccaaaaagcgtatctgtagtgtctgcctgagactgaaatgacaagtccccaggccaacccgagatat

SEQ ID NO: 154304 - DNA, 201 bp, Homo sapiens
ttttatttctcttgggaaaaatgcctaggaaggttggatcaagggtagttatatgtttaattttttaagaagctgccaagctattttccagaatggttgcmccatttcatgttaccatcaagaatgtatgatatttgtaatccttttacatcaatgacaatgcaggtatggtcagtctttctcattttagccattctaaat

SEQ ID NO: 154305 - DNA, 201 bp, Homo sapiens
ctgaattttgaataaaagagaggttgctattttgtatatataaaacaccaacaataaacaaatgagagttaagattttctttgaataagattttgttttctttatcaagtgttcaataattttgtcccattccacatccctactgtgaatatgataaggtgttacagtttgatcaagatgtctcagtgttttatgattatg

SEQ ID NO: 154306 - DNA, 201 bp, Homo sapiens
cagtccactgattcaaatgttaatctcctttggcaacacctcacagacacacccaggaacaacaatactttgcatccttcaatccaatcaagttgacacamtattaaccatcacacacaccttttggccacataattccacttctaagaatttaaccgatagaatatacttgcatgagtacacaaagattacaagaagttt

SEQ ID NO: 154307 - DNA, 201 bp, Homo sapiens
caccagagtgtgagctgcctgctctccagtgagggttagaccaggctttggggagctgtcttaagtatagctgagttgtcaaatatgcaagtgacataagycagaggggcgtgtgtttcactcaaaggtgctgacacaggccaatctgatctgggaccagtagatacttaatccagtgagacgaatggagtgcattcctgc

SEQ ID NO: 154308 - DNA, 201 bp, Homo sapiens
gtttcaatcaacattttgagcaaaactgaccagccacctggaagaaaaacatatctggatcctttcctcaaacattaaaccaaaataaatttcaaatgtgycaaatttttaaccataaggtaagaaatcatcaaaataattgtaaaagtcatagaagaaaatagctcatttttaaaaaacagctgtggattgagaaaagcc

SEQ ID NO: 154309 - DNA, 201 bp, Homo sapiens
gagccaccaggcgcagcctcgatgaatatttgagttgctgccagtttctggctggtacaaataatgccactatgaacatttgtttacaagtgtttgtatgsacattcttttatttctcttgggaaaaatgcctaggaaggttggatcaagggtagttatatgtttaattttttaagaagctgccaagctattttccagaat

SEQ ID NO: 154310 - DNA, 201 bp, Homo sapiens
atgatctgataccacaggcaatctctcttcctaacttagggcccaggtaacacatggtagcaccagagtgtgagctgcctgctctccagtgagggttagascaggctttggggagctgtcttaagtatagctgagttgtcaaatatgcaagtgacataagtcagaggggcgtgtgtttcactcaaaggtgctgacacaggc

SEQ ID NO: 154311 - DNA, 201 bp, Homo sapiens
agagtcagaggttgcagtgagccgagactgtgccactgcactctagcctggctgacagagtgagaccctgtctcaaaaataataataataataatagtacrtacctcaaagggctgttgtgtagtttaaatgaatcaatacatacagcatttagaattgtacctggcagataggaagcattcatttggaaagaagagttga

SEQ ID NO: 154312 - DNA, 201 bp, Homo sapiens
atgataccttcctcagccaggcgcattggctcacgcctataatcccagcactttgggaggccgagacaggaggatcacctgggcccagaagctcaagaccygcctgggcaacatggtgaaaccccatctctacaaaaaatacaaaattagccaggtgtggtggcatgtgactgtagtcccagctacttgggaggctgagga

SEQ ID NO: 154313 - DNA, 201 bp, Homo sapiens
gtattaaattagatataatttaatatccagtttcatagtttacatttgttgacagatggccactagctataatttttagccgcatgtccaaaactattgaraattaaattgacttataattactgtaccttttgttttattttggactctgaacttggaaatatatcacctggagtagagttctaagttcactacatcctg

SEQ ID NO: 154314 - DNA, 201 bp, Homo sapiens
ttgtgggacatgtgtttaaaatacaaaggattattgctgacgatagaggaaatatggcccaaatcaaattttctactgcttttctctgacaagcagcatakagtcaaattaagagattaggcatagtttaggtacctgtatatacacatagatatagcatctgatgttagattacacacatacatgcacacagccatgcat

SEQ ID NO: 154315 - DNA, 201 bp, Homo sapiens
aaagagcattgcagttggatgcatcaacaatccccttccaggtccctgcagctattgtggttagcattgctgttcccatggctcaagtggctttggactastaggtaatgggtgggggcagaaacagctcccctctcctcccccaccccaccccaccccaccccatgtatattctgcttcctgagacttgggctatgccta

SEQ ID NO: 154316 - DNA, 201 bp, Homo sapiens
ccaaccatcagtgaaaactacagtgttcagggaaggatcgtggaaggctttaaaaaccgaagtgatgtagacttgattcagcaggaaacacaatgtggtgrcactgaaaatgttcgagttcagaaattacctcaggaaattggtatgaaatttttcctgaaattgtatcctgtattttcctttttgctccctctccactgg

SEQ ID NO: 154317 - DNA, 201 bp, Homo sapiens
taggcattatgctaaattttacattaaattatctctcttaaacctcacaacagtgaccctgcgaagtaggaacaaatcaaaagattcatcttagtgaggcraattagttcgtctaaaatcatgcatgcataagtggtcatgccaggattaaataaggcaatccaatgctatctacagtgtgagcaacagccactattctgg

SEQ ID NO: 154318 - DNA, 201 bp, Homo sapiens
gaaactagcgtaattatgtactttctttccttcaactttttttgttgttgttctacatgtacaaggctgatttttcattaacttttaatgttgcttgtaaycctattccgatttgtattcaatgtaactctgaatagaggtctactcacaatagaatgcaatattataaagctttaatgtaagacaaaagctcttattgaa

SEQ ID NO: 154319 - DNA, 201 bp, Homo sapiens
ttagtaacagatcgttcaataaaaactgatgttttcctatactcttttgcttccacatgcatcaaatttgcctttttctccttcactctttcagctccacytcttcattttggagttcttgctagttctgtatgacaaatgttcattagtaagttgaatggataattacatgggatggagggggagagaatgatctagatt

SEQ ID NO: 154320 - DNA, 201 bp, Homo sapiens
aggtagagactcctggtttgctttgaatcaaaggtgtgtccaataaactaaagctaagggaaaagttataactgcaacctgaaactccatatccaaaaagyaggatgctgtagttttggaagaggtttgaagagttatgagcaatcaagaattgatggaaaaatggtggtgtgcttaaatggaaaactagtggtaatggga

SEQ ID NO: 154321 - DNA, 201 bp, Homo sapiens
ccaatgtaggttttactaagccttcttttaagtttgctcgggagagagacaaatccataaagtgatcaggctgcttattatcactctgccagaaatatackgtaaacaatgaaattgcttcagaattttggactcagaattttgtgattgacattaagggtcagtgcctgcattttagacccatcccagaagcaattcaat

SEQ ID NO: 154322 - DNA, 201 bp, Homo sapiens
gccctgtcaccatcccattgtcctcactgagcctcattgtcctgcttgaagcctgattatcctcctgcttgaagctcttcatgtctccccagtggctctcrggacaaacctcaactccatactcaggctatcaaaacccttcatgatgtggcctctgcctaactctttaggctcatttctggccacattgctcacattgcc

SEQ ID NO: 154323 - DNA, 201 bp, Homo sapiens
aagatataaatataagacacagaatctgctctcagtgtttcttactttattggtatgccaacagagtatttcacagttcattgaaaatcgattaaaataaytactaggtcattagtgtggactttgagtatgagtgtaaagacctcactcactaaataattcatggcagtcagcaagttaagtcctgttagcaagtattga

SEQ ID NO: 154324 - DNA, 201 bp, Homo sapiens
tatatgtttgaaagctgctataaggggctgaattgcgtattctccaaaatcctgtcagcttcaaaattctatgcttccatatcgtatctattcctcggctcacatgaatccaaattagggtttcttaaaacagtagaagtgttcaatgataattctaataaaacatacacagaactatttttttggatacactgattgcta

SEQ ID NO: 154325 - DNA, 201 bp, Homo sapiens
gtgaaaagtattctctaggatactcacttctaacctgctttgtgtctttgaacaaattggaagtctctgtacatgatggtttcttttcttctctcattttygtaccttctttcttgccttcctgaggtaaccccatcctaaatttgatgtttattaccacattcctgtatgtctctataatttttaacacatgcatgtatt

SEQ ID NO: 154326 - DNA, 201 bp, Homo sapiens
aagcaattctcctgcctcagccacccaagtagctggaagtacaggcgtgcgccaccacgcccagctaattttctgtatttttattagagatggggtttcaycatgttggccaggctggtctcgaactcctgacctcaggtgatccacctgcctcatcctcccaaagtgctgagattacaggcgtgcgccaccacgcttggc

SEQ ID NO: 154327 - DNA, 201 bp, Homo sapiens
atatattgttattaactatagccagcatagtgtaccatagatgtcttgatgtaattgtctctgtctaactgaaattttttgttttctgactatctccccakaactcagaaactttttaaatttttcttgtatacttctagttagattttttttcctgacttttaccagtttttttctgatttatgtcaaataagtacaatg

SEQ ID NO: 154328 - DNA, 201 bp, Homo sapiens
tctgaattttgaataaaagagaggttgctattttgtatatataaaacaccaacaataaacaaatgagagttaagattttctttgaataagattttgttttctttatcaagtgttcaataattttgtcccattccacatccctactgtgaatatgataaggtgttacagtttgatcaagatgtctcagtgttttatgattat

SEQ ID NO: 154329 - DNA, 201 bp, Homo sapiens
attagagtgcaattaccttgtctgtaaaaagaagacagaatcttaggctttgaaataaaaaagacagaggtgttgattctgccttagacactagctagctrtgtgatctttgatgagtcacctgaactcgcagagccacattgtgctgaattatacatttggggttgtagtttgaactttgttaggttgccatgagggtta

SEQ ID NO: 154330 - DNA, 201 bp, Homo sapiens
aaaatgtccattttgtggttgttgggggcaatattctgtatatgtctattaggtccaattggtcacatgttcagtttaagtccagaatttcttcgttggtkttctgcctcaatagcctgtctaatgctgttagtggggtattgaagtcccccactatcattgtgtggctgtcaagtctttttggagaactagaagttcttg

SEQ ID NO: 154331 - DNA, 201 bp, Homo sapiens
ttcagtgctattctcactttagaggctgcctcttgagctagtcctgtctctcagacactccccgaatatgattcgattttcactctattttacacaaagcrtgctctaaagtgctggattctcctgcacagggggtctggcacatggacaagcacacccggcagccggcagtgcacaggaagctgcctccgcacaggcaag

SEQ ID NO: 154332 - DNA, 201 bp, Homo sapiens
tcttggagtatgttccatgtgcagattttaaaaaatgtccattttgtggttgttgggggcaatattctgtatatgtctattaggtccaattggtcacatgytcagtttaagtccagaatttcttcgttggttttctgcctcaatagcctgtctaatgctgttagtggggtattgaagtcccccactatcattgtgtggctg

SEQ ID NO: 154333 - DNA, 201 bp, Homo sapiens
ccatgcttcagtttccttatttatgaggtggcaattatgatgataccttcctcagccaggcgcattggctcacgcctataatcccagcactttgggaggcygagacaggaggatcacctgggcccagaagctcaagacccgcctgggcaacatggtgaaaccccatctctacaaaaaatacaaaattagccaggtgtggtg

SEQ ID NO: 154334 - DNA, 201 bp, Homo sapiens
ttttgatgtgctgttgaattcagtttgctagtatttagttgaggatttttgcatctgtgttcttcagggatgttggcctgtagttttcttttttcattgtktctttgccaggtttcagtatcagagggatgctggcttcatagagtgagttggagaagagtttctccttgatttttttggaataggttcagtagaattggt

SEQ ID NO: 154335 - DNA, 201 bp, Homo sapiens
tcaccaaactctgctttttttccgccataatacttgtcatcttctaacatgttctaccatttacttacctatcgtgtctattacttattgtctgtgttcccttgagagactggaataagctccaccaggcagaaatctttgtctgtggggagtcgtgggagctatccatagccatgggcgctctgtccttccaggtctagt

SEQ ID NO: 154336 - DNA, 201 bp, Homo sapiens
gtgcaggcctccaggtaggattctgcagtttgtgcactgcagggtgaatgggggctgaaagctcacttacattgtttctcaagctgtgggtcctggcccastactgaattagcctaaaggaaggagtgactctttctcattcatccacccaaaggatgtgcctttttttttttactttgtcaatcttgagtgggcatttct

SEQ ID NO: 154337 - DNA, 201 bp, Homo sapiens
gcacaaggcctgacatagggtagatatatttttttctatcataaatatccaagtaatttaaatataacatacatcttcttatatattgcttcattattatttctatttttcagtcattttagggaagaatcatcaaaatttcatatgaaacgtatagttaaaaagtaaagtccagtatgtagattggaaaggagaaactat

SEQ ID NO: 154338 - DNA, 201 bp, Homo sapiens
tcggtccccatctgctccaccacactggcttccttgctgcctaaacacacggccatgctctctctccctttagggcttttgcgctcctgctccctctgtcyagaaccctttctcccaggatagctgcatgactgactctgtcacctccttcaattccttgctcaatgtcaccatctattttttcttccttttttttttttt

SEQ ID NO: 154339 - DNA, 201 bp, Homo sapiens
ctctggccttttccctccttaatcctcgcctgaggaaattctccttccctctgttgctcgcggtaatttgctcttcctttttacaagcctatctttcattstgttcttcctcccattatgcctggttgtgttcttccactttactgttcttctctgctttcattaggtgtgagactgagttctggttttggtttttatctc

SEQ ID NO: 154340 - DNA, 201 bp, Homo sapiens
tagcacaaggcctgacatagggtagatatatttttttctatcataaatatccaagtaatttaaatataacatacatcttcttatatattgcttcattattatttctatttttcagtcattttagggaagaatcatcaaaatttcatatgaaacgtatagttaaaaagtaaagtccagtatgtagattggaaaggagaaact

SEQ ID NO: 154341 - DNA, 201 bp, Homo sapiens
ttatggagcttacgttctagcagtaagaaatagaccattgaaaaggaattaggtaaactataggactgcagactgcagtaaccaccatgaaggaaatacasggagtggtgagaccaacgataaacaggagaggcctccttgaggtcagggaaagcctctccaacgggagacatttgagctaagacatgaaaaaggagagaa

SEQ ID NO: 154342 - DNA, 201 bp, Homo sapiens
aaatataataataaaaaaaaaaagacagaaaagaaaagcctagcaaaacgcccccgccctgcttgattcttttcattgctttcttgtggcctctttctctstggccttttccctccttaatcctcgcctgaggaaattctccttccctctgttgctcgcggtaatttgctcttcctttttacaagcctatctttcattctg

SEQ ID NO: 154343 - DNA, 201 bp, Homo sapiens
ttttgatttgcatacggtgggtgatggaaaaggaaaagttagaggaatagtggccattctggcaagactgtgggactacttgggaagaactgacctcaccrgtggctaagtgaaggaagccacctgggcaatccaggagcatgatgatgtttcaaggcagcataggtgagcatggcctcaggggccataggggcaccatgg

SEQ ID NO: 154344 - DNA, 201 bp, Homo sapiens
gtgtaaatgtcgaagtgctgggctttgcctctttaattggaagccaagaaagttaaaatgtgaagggtacctgtggaaaggtatctagattgacaagacamagcaaagctgagaatatggccttcagatgttttaaaagcatgaccaccaagaagaaaatagtggttggaataaacactgtgagaactattcacaatcaaa

SEQ ID NO: 154345 - DNA, 201 bp, Homo sapiens
tctgattatggagcttacgttctagcagtaagaaatagaccattgaaaaggaattaggtaaactataggactgcagactgcagtaaccaccatgaaggaartacagggagtggtgagaccaacgataaacaggagaggcctccttgaggtcagggaaagcctctccaacgggagacatttgagctaagacatgaaaaagga

SEQ ID NO: 154346 - DNA, 201 bp, Homo sapiens
tgtgttgttaaggaaagaaatataataataaaaaaaaaaagacagaaaagaaaagcctagcaaaacgcccccgccctgcttgattcttttcattgctttcktgtggcctctttctctctggccttttccctccttaatcctcgcctgaggaaattctccttccctctgttgctcgcggtaatttgctcttcctttttacaa

SEQ ID NO: 154347 - DNA, 201 bp, Homo sapiens
ggctcatatgtcaccttctttgatcacccccacagtcaatcagtgcctctttctctctctctctctctatacacacacacacacacacacacacacacacmtatatatataaataaatcaatatatacagattatataattatgcatataaatcaatataatcaattatgagtcaatataattaataaataataaattata

SEQ ID NO: 154348 - DNA, 201 bp, Homo sapiens
agaaaatacttaagtgtaaatgtcgaagtgctgggctttgcctctttaattggaagccaagaaagttaaaatgtgaagggtacctgtggaaaggtatctakattgacaagacaaagcaaagctgagaatatggccttcagatgttttaaaagcatgaccaccaagaagaaaatagtggttggaataaacactgtgagaact

SEQ ID NO: 154349 - DNA, 201 bp, Homo sapiens
aacaaagtaaggttagcaggacacagtaggtgtgttatcaaaagacccatgcttgcagctctgccgcgtaacagctctctggcctggagcaaggtgcctakagccccaagcctctctttcctcatttgtgaaatgaaaataagtacgcctgggctgggcgcagtggctcatgcctgtaatcccaacactttggaagtccga

SEQ ID NO: 154350 - DNA, 201 bp, Homo sapiens
gacttccatctgaagttctgccttatactaggttagtgctgtgagttgaaattctgcagttttctaggtaggcagacatttattttttatatatatatatrtgtgtgtgtgtgtgtttcaaataacatcaggagcattaggcatttttaaaggcaatctctttttaaataaataaatatatgaatatgtgctttgatgtta

SEQ ID NO: 154351 - DNA, 201 bp, Homo sapiens
aattgatcactacatcacttgcaactgaaatcttggctcaggagaaccttatctaataaaacagtagatttaaacaacaaagtaaggttagcaggacacastaggtgtgttatcaaaagacccatgcttgcagctctgccgcgtaacagctctctggcctggagcaaggtgcctagagccccaagcctctctttcctcatt

SEQ ID NO: 154352 - DNA, 201 bp, Homo sapiens
agcacaaatgtgttgttaaggaaagaaatataataataaaaaaaaaaagacagaaaagaaaagcctagcaaaacgcccccgccctgcttgattcttttcaktgctttcttgtggcctctttctctctggccttttccctccttaatcctcgcctgaggaaattctccttccctctgttgctcgcggtaatttgctcttcct

SEQ ID NO: 154353 - DNA, 201 bp, Homo sapiens
tacctagaaaatacttaagtgtaaatgtcgaagtgctgggctttgcctctttaattggaagccaagaaagttaaaatgtgaagggtacctgtggaaaggtrtctagattgacaagacaaagcaaagctgagaatatggccttcagatgttttaaaagcatgaccaccaagaagaaaatagtggttggaataaacactgtga

SEQ ID NO: 154354 - DNA, 201 bp, Homo sapiens
tggaagcaattgatcactacatcacttgcaactgaaatcttggctcaggagaaccttatctaataaaacagtagatttaaacaacaaagtaaggttagcasgacacagtaggtgtgttatcaaaagacccatgcttgcagctctgccgcgtaacagctctctggcctggagcaaggtgcctagagccccaagcctctcttt

SEQ ID NO: 154355 - DNA, 201 bp, Homo sapiens
catctcaaccacacttgaaatcaagtgaatggaaattaaataattaaacaggccaaacagcattataataaaaatttatatggcagggaaaactattatakattcagttcatgacccacacattgctggaggttttcagaacaatcaaagtacttatttgtatcaagttcattggaattggtggacttctttctatgaata

SEQ ID NO: 154356 - DNA, 201 bp, Homo sapiens
tgtctgtgtctttctctctcagccaccatctctcactgactatggaaacaggagacagccattttattaaatagttgtaattgaaagggatacttaagcasaaaatgtcataaagaggtagcattgtcaactattcatattttagtgaatccacacttcagtgggtttctccaccatggagactttgataccagagtgggg

SEQ ID NO: 154357 - DNA, 201 bp, Homo sapiens
ttatgtaaggagtacactgtacattatttgggtgatgtataccctaaaatccctgacatcactactgcacaatttctgcatgtaacaaaattatacttgtrtgccatacatttatacaagtaaaaaggaaagtcaggctgagtgtgggctccttcctgttccctatgtctcttccccccaccctcactggcttctcctgga

SEQ ID NO: 154358 - DNA, 201 bp, Homo sapiens
agaaggactgaaaggatcgaaaagtggtgacactaatggtggttaacaaagaagaatttataaaagatgtcttttttaaaggtcagatggcttctacctakaaaatacttaagtgtaaatgtcgaagtgctgggctttgcctctttaattggaagccaagaaagttaaaatgtgaagggtacctgtggaaaggtatctaga

SEQ ID NO: 154359 - DNA, 201 bp, Homo sapiens
tgtattctcccccaccaaaaaataaatcagtcagtaaatgatcttcctgaatcctgtatccttttccagatacagctcttttccttagccatgcatttcaraagagttatctataccctttcctgtccccccagaccctattttctccatgttcaccccagtctggctctgtcccagccactccactgatttgcacttgcg

SEQ ID NO: 154360 - DNA, 201 bp, Homo sapiens
aaagacaaatactgcatgttctcacttataagtgggagctaaataatgtgtgcacatggacttagagtgtgtaatgatggacaatggagactcggagtggkgggggcagtgggaggggccagacaatgaggtattatgtaaggagtacactgtacattatttgggtgatgtataccctaaaatccctgacatcactactgc

SEQ ID NO: 154361 - DNA, 201 bp, Homo sapiens
agaattgagagagttgcacttttagaaaagctatccaatttacgagtctttttcaaaatcctgaaagaaggactgaaaggatcgaaaagtggtgacactawtggtggttaacaaagaagaatttataaaagatgtcttttttaaaggtcagatggcttctacctagaaaatacttaagtgtaaatgtcgaagtgctgggct

SEQ ID NO: 154362 - DNA, 201 bp, Homo sapiens
cacaaagaaagggaacaaaaggagaggctgtggccatggctgcctccagtacccatttaattgatatcttgaatcaagtacaactgtttttaggagaggtracccattttggaaaccccaaaaagctgcaaaacttagagttaatgaaataatattctaaaaaataaagatgataaaatgtatctgaatgcatgcatacat

SEQ ID NO: 154363 - DNA, 201 bp, Homo sapiens
tacaagggaggagtggacccacctcctatcagtggtgagtcgtccctcctatgctgtgggtcctgtctctccgtgtcctcccatgaacctccctgatgagwgactcactttctcttctggatctttaacctcttctctactggatgctttctgtcagcatttgcaatgctctgtattctcccccaccaaaaaataaatcag

SEQ ID NO: 154364 - DNA, 201 bp, Homo sapiens
acaaggtatccttccttcccctcccaggtaaggattctaaaccaaaaacagaaggaacaagccaagactgcacatggtcattatgaataatggtcacacastcaggaaatgaaagaattgaagggcagggagatccagatcttctttttacctgtatgtccatatccatattgcctgcagaacattaaatggtttgcctgg

SEQ ID NO: 154365 - DNA, 201 bp, Homo sapiens
ctatacttgccctcacaaagaaagggaacaaaaggagaggctgtggccatggctgcctccagtacccatttaattgatatcttgaatcaagtacaactgtktttaggagaggtaacccattttggaaaccccaaaaagctgcaaaacttagagttaatgaaataatattctaaaaaataaagatgataaaatgtatctgaa

SEQ ID NO: 154366 - DNA, 201 bp, Homo sapiens
tggcaggtgctaaaggaataagaaagcaaccgagataggtagggaaaagagatagatacaagaggacagggggagcagttgaatgaacgactgcctcctakcctcgcaaggaactcatttaacactttatgcaatttatttttcctttttccaattaaggattgtcaacttaaagaaacatctgctcaatacacactgttt

SEQ ID NO: 154367 - DNA, 201 bp, Homo sapiens
ccctgcccacgagtccccaggctaagtccagggtccgtcctgtttcccccgtgaagttccaagcaatgaatcaggcctctagtgcaggatggccttgaggsacagcagggcttcttaagcctcctagtcccaaagcagtcccttggatgggaacaaggaccaggtcttgggtgcagcttcctttaacactttgaaatagtt

SEQ ID NO: 154368 - DNA, 201 bp, Homo sapiens
ccctgcttcatccaggcccttgtctcatttgctcggtgatttcctgaggctctcctgttagcctcaccacctttctattcatcttccattctcctgcagtktgctttttaaaatatcatcttgctgagaaataaaaactaagtagaaaaacctcccctattgttaacagtgattttaaccctgactgggcattatagtcac

SEQ ID NO: 154369 - DNA, 201 bp, Homo sapiens
gccaccaaaataatttggctcttgaaaaacatttttgaaaacccactttagataatccatacagtattttttatcaaaaaaaaaaggcaaaatggagcgcygctgagcattaatcttgccgctaaatccttcccattaggcactatggattgtgtaattaaattgaaattgaaaatcgagtcttttctcccccccatatca

SEQ ID NO: 154370 - DNA, 201 bp, Homo sapiens
tttcaaatcactatgccaccaaaataatttggctcttgaaaaacatttttgaaaacccactttagataatccatacagtattttttatcaaaaaaaaaagrcaaaatggagcgccgctgagcattaatcttgccgctaaatccttcccattaggcactatggattgtgtaattaaattgaaattgaaaatcgagtcttttc

SEQ ID NO: 154371 - DNA, 201 bp, Homo sapiens
tttagctatttatttataacaattttacatgtttacttaaaactcagaaacttctttaaaaactgtattaaaaaagctttttgtagacaagaatggaagcrttatagtttagcagttattgggtcccaggcaatgctctaaacacatcacacccactatctcatttaatcccacaacaagtctgagataggtaccattagt

SEQ ID NO: 154372 - DNA, 201 bp, Homo sapiens
tagaatcttactgctatatggaactcataccaaaagtcatggtgtataactgtttcgtatgtgccgtaagacagctttgagaccctctaacgacagagtcrccatctcagctttagataagaattcaaagatcctcttgaatccacccgttttttaaaaatacaaattggattatatcactcccatgtttaaaatttttca

SEQ ID NO: 154373 - DNA, 201 bp, Homo sapiens
tttctctatagcacagatgaagcaagggagactcagaaagtttaaatgacttaacctgtagctataaagctacaggtttttgaagtgtaacccatacctargttttcctaattgtcggaatccctgaaagagtctcctaaccaaaacactggattatgtaggcatataattataaatgcagtagtatcagtacagatgttt

SEQ ID NO: 154374 - DNA, 201 bp, Homo sapiens
cagagaactcagagaactggatttgagaaagcatcttaggtagcgctgacaaacagctcttaccctggccccttccaggtcagagttaaaatataaagaaraataactattcaggccaggggcagtggctcacgcctgtaatcccagcactttgggaggctgaggcgggaggatcgcctgaggtcaggagttcaagaccag

SEQ ID NO: 154375 - DNA, 201 bp, Homo sapiens
cttaacaagaattggtcaattgtttattcaagtttaacttgaccttttggtcaatgttgtttttcttcaacaaggtcataaaacagttgtttagaagaccrctattaaattagaagcacatttacttattcaagaattatttccttaacatcttctatgcgccaggcagtgtgcttagtaccacagagagcaagaaagata

SEQ ID NO: 154376 - DNA, 201 bp, Homo sapiens
gagctttattcagcacttcttagtttacatgattaattacgacaactaaaacttgatcatctcatttgagttgctaactgacttacccaatccatagttawcttagctcatcagacacatccctcactgataactccttcaagtcatcttagatatgaccacccaaattaccatttttttgtaccaccgcagaaaaatccc

SEQ ID NO: 154377 - DNA, 201 bp, Homo sapiens
tcattatgaactcttataaattatacaaccttttttttccccaagaaaagtgtggactttttttaaacagatttagcactgataggactgcttgccttagrcagcactaccagtaattaaatctgcatgctgaagtggtaaaccctaagaatttttagaggaaggaaacctgacatataaaatggagtaaaggcaggctga

SEQ ID NO: 154378 - DNA, 201 bp, Homo sapiens
gcgttgagtgactttgaactgatctgatttggcaggcaggttaaacacgaagcctccacatctactttactgcaagcagattcccatgtgcttattttatktgttttctcttttgccaaaggtttatttaaacacagattctcatcaccttaacaagaattggtcaattgtttattcaagtttaacttgaccttttggtca

SEQ ID NO: 154379 - DNA, 201 bp, Homo sapiens
attgtgaatctgttacacttctaggcgctagggattgtaataatttattacatttgcctcttcctttaaaggagctcatagtcttctttggaagaaagacragtaaatatataaccataacaaaacatcctaactctatagtgaagggttatatagaagcacagaggagacacacctaagcttaacaggtagagtgggtag

SEQ ID NO: 154380 - DNA, 201 bp, Homo sapiens
gtacctggggatcttgttgaaattaaagtcaggggccttacactcagacattctgattcaggatgtctgcagtaaggcctggaaatcctgattgctggcakgccctcgacaggtttggagacagcgttgagtgactttgaactgatctgatttggcaggcaggttaaacacgaagcctccacatctactttactgcaagca

SEQ ID NO: 154381 - DNA, 201 bp, Homo sapiens
ccttaccttccgctcacggccctgcactcagggcattggtgtgcctgattctatgaactgtttgaagcttgtctgtttacaccaatgagcactctctgctstgttaaaataattcctgcattcaccaagagaaaatgaaagccacttcagtggtgttttattataggaatttaaataaattaatgcatatgattataggct

SEQ ID NO: 154382 - DNA, 201 bp, Homo sapiens
actgccactggagtacctggggatcttgttgaaattaaagtcaggggccttacactcagacattctgattcaggatgtctgcagtaaggcctggaaatcckgattgctggcaagccctcgacaggtttggagacagcgttgagtgactttgaactgatctgatttggcaggcaggttaaacacgaagcctccacatctact

SEQ ID NO: 154383 - DNA, 201 bp, Homo sapiens
agactatggcttatgactgttaaggataataaagtaaaagcagaagaatgattttttgattgtctccagttgtggcccattttcttttttcttttttttttaagttattctagatataaaacccttaagaatcttctccaaaagacaatttaatactgagttacaactatgattatttttaaaattgtttccatttttaaa

SEQ ID NO: 154384 - DNA, 201 bp, Homo sapiens
ttaagtttaatttctatcaacattatagtctatcagttctagagttagaagatagagtacatgaaataactaaactatttttgtaaattgctcggcttttsgtgggaatgtaaataaaattcttaattgtaattatgtaccagattatacagtttgatatgcataacatttagctaaataggacacataaactttatatgg

SEQ ID NO: 154385 - DNA, 201 bp, Homo sapiens
gatgtctttctcccccagataggatgaaaggaacttttcaaggcttgtgcctttttttatactttcctttcttatattctagttcagtagtccccaaatgmtatgactgccactggagtacctggggatcttgttgaaattaaagtcaggggccttacactcagacattctgattcaggatgtctgcagtaaggcctggaa

SEQ ID NO: 154386 - DNA, 201 bp, Homo sapiens
agttaatgggtgcagcacaccaacatggcacatgtgtacatatgtaacaaacctgcatgttgtgcacatgtaccctaaaacttaaagtataataataatawaattaaaaaaaaagaaaatgtggtacgtctataccatggaatactatgcagccataaaaaggaatgagatcatgtcctttgtggaaacgtggatggagct

SEQ ID NO: 154387 - DNA, 201 bp, Homo sapiens
ttgggataccattgatcccatcacccagatactgagcacagtacccaatagttagtttttcaacccttccccacctccatcactcctccctctagtggtcktcagtgtcgattgtttccatctttatgttcatgtgtacccaatgtttagctcccacttataagtgagaacatgtagaatttggtttatgttcctggatat

SEQ ID NO: 154388 - DNA, 201 bp, Homo sapiens
ctgtgttttttcactctttaatgcaaatgtgtacaaaggcctttggttttagcttgtgcagtctaaagatagactattgttgcttaaaatgaaaaaaaaaagactctacactgaatactagaatgtaaaatatgagtttaaaactttttcttctaaaacaaagaatataagggcaaagggttgtcttgctaaaaattttaa

SEQ ID NO: 154389 - DNA, 201 bp, Homo sapiens
atgatgataccttcctcagccaggcgcattggctcacgcctataatcccagcactttgggaggccgagacaggaggatcacctgggcccagaagctcaagwcccgcctgggcaacatggtgaaaccccatctctacaaaaaatacaaaattagccaggtgtggtggcatgtgactgtagtcccagctacttgggaggctga

SEQ ID NO: 154390 - DNA, 201 bp, Homo sapiens
ccaatagtatcttgctggagcctttgccactatggtaatagattaattaattgtgcagttatttgcttaatatacttttccctatgagaataccaactgtrtatgaataaagtccgcacttgtcttataaaccccaccatctctggcatccagcacagaacctgatgtataggaggtgctcaacaactttgacggggagaa

SEQ ID NO: 154391 - DNA, 201 bp, Homo sapiens
atgggccctaaatctaaggacaagtatctttataagatacaggacagaagagaaggcacacacacacacacacacacatacacacacacacacacacacasagagagagagagagagagagaaagacagagagagacagagacagagacaaagagaaagcaagagagaggaaaaggccatgtgaagtgggaggcagagact

SEQ ID NO: 154392 - DNA, 201 bp, Homo sapiens
gtggtgcattaattcagaggcttggtgacttcatccttggggtgtgttcccctcagtcattcttgaagtgagttggttttgtcctcagataaggagttttrcctccagatgatctgcttgtggccaccaggtgatctttactctcctcaagaaccagtgtaggtcaagaaccagtcatcatgcccagatgtgacaacatgc

SEQ ID NO: 154393 - DNA, 201 bp, Homo sapiens
tcacagaaaactgaggttagagggttagatataagtgaaaacaataaaacaaaagtattacctttttacttttgctggtttaatttagaaactatgccttstggttttacctccaaggctcatgaagtgtgtatttctgatgcaaccccaaataatttaccatggatatgattctaccaaaggtaaaagcagaagaaaaga

SEQ ID NO: 154394 - DNA, 201 bp, Homo sapiens
  misc_feature (1)...(201): n = A,T,C or G
aaatttaataaacttctgcttggtatcaggaactgcgctaggctcaggagcttcagtggtaaataagagacagtcaatccccaccctcagtgattataaantcctttaaaggaaaacataacacttttctttttctcaaactttctgtgtctgaaggctcactagcatctgtttccagcatagatgtggtgtgatttgttc

SEQ ID NO: 154395 - DNA, 201 bp, Homo sapiens
gatttaaaagagtgcacactgacatttaatgaaattaaaatagagagatcattacctaaacaattaaccctaacaactacctagaataaaataaaacacartaaacagaggacttaacactcaaactgggccagtcttttctttgtatcctggacccccatttctgctctcccagcttccaatagtatcttgctggagcct

SEQ ID NO: 154396 - DNA, 201 bp, Homo sapiens
tgagatcatgccagattagctggatgggccctaaatctaaggacaagtatctttataagatacaggacagaagagaaggcacacacacacacacacacacatacacacacacacacacacacacagagagagagagagagagagaaagacagagagagacagagacagagacaaagagaaagcaagagagaggaaaaggcc

SEQ ID NO: 154397 - DNA, 201 bp, Homo sapiens
actagaactttcttttcctcaacaaatttgtgttcatttattaaacacaatattcaaccagtgataatgagcaagacaggagacagattctgcagggtgcmtgaggaatgagacacaaaggaatgaggcacacatagtcttgcagggaagacacagcaaacacctaaattactacagcatgctagagaaaatgatgcatga

SEQ ID NO: 154398 - DNA, 201 bp, Homo sapiens
ctagtgggggttatatagatttaaaagagtgcacactgacatttaatgaaattaaaatagagagatcattacctaaacaattaaccctaacaactacctakaataaaataaaacacaataaacagaggacttaacactcaaactgggccagtcttttctttgtatcctggacccccatttctgctctcccagcttccaata

SEQ ID NO: 154399 - DNA, 201 bp, Homo sapiens
atgagatcatgccagattagctggatgggccctaaatctaaggacaagtatctttataagatacaggacagaagagaaggcacacacacacacacacacacatacacacacacacacacacacacagagagagagagagagagagaaagacagagagagacagagacagagacaaagagaaagcaagagagaggaaaaggc

SEQ ID NO: 154400 - DNA, 201 bp, Homo sapiens
gttagaagatagagtacatgaaataactaaactatttttgtaaattgctcggcttttcgtgggaatgtaaataaaattcttaattgtaattatgtaccagrttatacagtttgatatgcataacatttagctaaataggacacataaactttatatggaatatttttagaaaaactcttcattaaattgggctgcctcccc

SEQ ID NO: 154401 - DNA, 201 bp, Homo sapiens
agtagagttctaagttcactacatcctgtctgtgtgatttgggaaaacttgttctaccttgctgaactgcaggcatttgtcttttttgtttgtttgtttakagtttccatttccatgccaaagtgctctgtaaactgtaaggaactacagttaaccctgggaacaacatgggtttaaactgtatggatccaattatatgtg

SEQ ID NO: 154402 - DNA, 201 bp, Homo sapiens
tctgtctcccaggctagagtgcagtggcatgatcttggctcactgcaatctctgcctcccaggttcaagccattcttgtgcctcagcctcctgagtagccrggattacaggcacctgccaccatgcctaaataattattgtattgttagtagagatggggtttttccatgttggccagactggtctcaaacttctggcctc

SEQ ID NO: 154403 - DNA, 201 bp, Homo sapiens
agaaaaaatacgtttaaaatgttaattgtagtgtagtaacaatatggaaaccagcaattgaggaatttttaaggaaattatagtttatcaactcaatggtmtagagggcagacacacatgatttttgctaagaatttatcataggaattggtagtctattccacaaatatttcttgagcagtttatgccaagcactgatct

SEQ ID NO: 154404 - DNA, 201 bp, Homo sapiens
tcacacactggggcctgttgtggggtggggggaagggggagggatagcattgggagatataactaatgttaaatgatgagttgatgggtgcagcacaccaacatggcacatgtatacatatgtaactaacctgcacgttgtgcatatgtaccctaaaacttaaagtataattaaaaaaacaaaaaaacaaaaaaactttgt

SEQ ID NO: 154405 - DNA, 201 bp, Homo sapiens
atgtaccagattatacagtttgatatgcataacatttagctaaataggacacataaactttatatggaatatttttagaaaaactcttcattaaattgggytgcctcccccatatacactaaaagccaatagcacaccaccactaccaccaccaataatttgtgacaaccctgaacatacccagtcctacctaaaatattc

SEQ ID NO: 154406 - DNA, 201 bp, Homo sapiens
caatctttaaaaaaaataaaataaaataaaataaataaaaaaaacggaaacaacaaaaaccacaaaaaccacagataggccttgtcacatgagtcacctakaaaattcttattggctaaggtcttgactctcccttgggttcgtccctttgtagggaacccactctgttcagctctgagccaggcatcaagtctgccattt

SEQ ID NO: 154407 - DNA, 201 bp, Homo sapiens
tccaaaccctgcctgtgccactagagtcagagaatgcagacattgacctgtggaaaaatatgcttgggtttcacccataggtacacatttccatatcttcyttcttttttcctttcaatggcataaattacagcttacccttaccaaagagaagggtggtaaatctacacttataccagtcaaaggtgcatttttcaacct

SEQ ID NO: 154408 - DNA, 201 bp, Homo sapiens
cagcaaaagaaactaccatcagagtgaacaggcaacctacaaaatgggagaaaatttttgcaatctgctcatctgacaaagggctaatatccagaatctayaaagaactcaaacaaatctacaagaaaaaaacaaacagccccatcaaaaagtgggcgaaggatatgaacagacagacacttctcaaaagaagacatttat

SEQ ID NO: 154409 - DNA, 201 bp, Homo sapiens
cttttgggactaatattatttgtacaaaaatctatattaagctcaaggtttgaaggtagatgtgtcgattcttgttctcttctccctctagattttacacratttagcaggtatgcttgacagttagtggtttttatactttgtatttttgttttctttttttcaaaaaaaggaggcagagtaaaaaagcctttacttcat

SEQ ID NO: 154410 - DNA, 201 bp, Homo sapiens
atgaaataaaagaggatacaaacaaatggaagaacattccatgctcatgggtaggaagactcaatatcgtgaagaaggccatactgcccaaggtaatttayagattcaatgccatccccatcaagctaccaatgactttcttcacagaattggaaaaaactgctttaaagttcatatggaaccaaaaacgagcctgcattg

SEQ ID NO: 154411 - DNA, 201 bp, Homo sapiens
gccacagtatgtaaaattagatcctatgtacagtgtattaaattagatataatttaatatccagtttcatagtttacatttgttgacagatggccactagmtataatttttagccgcatgtccaaaactattgagaattaaattgacttataattactgtaccttttgttttattttggactctgaacttggaaatatatc

SEQ ID NO: 154412 - DNA, 201 bp, Homo sapiens
gtttatttaggttttggctttttttccccagttattgaagtggttgtaaacatccacattgtgatagaaatccttgctcagagagtccatgaccactttgraagtgtttactgtaaacagagcagcatcagtaccgcattttattcattttcatgctttaatgtaaaaattctttttgctttctctttcagtgagtacaga

SEQ ID NO: 154413 - DNA, 201 bp, Homo sapiens
gctggttcaacatacgcaaatcaataaatgtaatccagcatataaacagaaccaacaacaaaaaccatataattatctcaacagatgcagaaaaggccttygacaaaattcaacaactcttcatgctaaaaactctcaataaattaggtattgatgggatgtatctcaaaataataagagctatccatgataaacccacag

SEQ ID NO: 154414 - DNA, 201 bp, Homo sapiens
gccctacccaagctcatacagtaatgaaagaattagatctggaaggcaggactccactgcaccagtttgacagaggtatatgacagaggtgacactgtacrctacaggggtagcctaacattttgcacactgttaggccacagtatgtaaaattagatcctatgtacagtgtattaaattagatataatttaatatccagt

SEQ ID NO: 154415 - DNA, 201 bp, Homo sapiens
gagtagccgggattacaggcacctgccaccatgcctaaataattattgtattgttagtagagatggggtttttccatgttggccagactggtctcaaactyctggcctcaagcaatccaaaagtgctgggattacaggcatgagccaccaggcgcagcctcgatgaatatttgagttgctgccagtttctggctggtacaa

SEQ ID NO: 154416 - DNA, 201 bp, Homo sapiens
tgtataatttgcaataaaatgcccagatcttaagtattctctcaatccagtaagttttgagaattagatacacctgtgtaccagccacccaaaataaggtrttgaatcccacaccctaaatagttttctctttgccctttccagtcaattccaattcaaaacctcatcacctacctccctacccttcttctaccttctctc

SEQ ID NO: 154417 - DNA, 201 bp, Homo sapiens
ttctcccccctcttcttggtcaagttaactcctttatcatctttcaggttttgactcaaatgtcacttctttggggagcccacatttaaacaccagtgatstgtaatttaaaaggccaaccttttcccacaagccatgttgtctcttctttaaacactccgcatataaactgacaaaagaaatctaaaacatatcaagagt

SEQ ID NO: 154418 - DNA, 201 bp, Homo sapiens
cttaattttaaaattgatgtataatttgcaataaaatgcccagatcttaagtattctctcaatccagtaagttttgagaattagatacacctgtgtaccasccacccaaaataaggtattgaatcccacaccctaaatagttttctctttgccctttccagtcaattccaattcaaaacctcatcacctacctccctaccc

SEQ ID NO: 154419 - DNA, 201 bp, Homo sapiens
tagcctctctcacactatgccctgctcacctctccacacctgccatgctggcctcctttctatccttggatccactatgctccctcctatcacatggcccktgtcatgttcttccttctgcctgaaagttctcccccctcttcttggtcaagttaactcctttatcatctttcaggttttgactcaaatgtcacttctttg

SEQ ID NO: 154420 - DNA, 201 bp, Homo sapiens
tccccttgctggcatagtgtggcaatgacattcatctctgaaattttaatcttgattctggacaaggctttttggttttggtttttgtaattctttatgtktttgaacttcacaataaattgaggcttaatctaaggaaactggatgcattaatgttgtcatcatacttgataaactaagttgataaatttataaaataca

SEQ ID NO: 154421 - DNA, 201 bp, Homo sapiens
cccactgttcttgagaggatcttaaatttcccaaaaatggtctacctgacttctttgcagggtttcctgcctatctgtgtagcctctctcacactatgccstgctcacctctccacacctgccatgctggcctcctttctatccttggatccactatgctccctcctatcacatggcccttgtcatgttcttccttctgcc

SEQ ID NO: 154422 - DNA, 201 bp, Homo sapiens
tcagtttcccactgttcttgagaggatcttaaatttcccaaaaatggtctacctgacttctttgcagggtttcctgcctatctgtgtagcctctctcacamtatgccctgctcacctctccacacctgccatgctggcctcctttctatccttggatccactatgctccctcctatcacatggcccttgtcatgttcttcc

SEQ ID NO: 154423 - DNA, 201 bp, Homo sapiens
gcctgaatccccttaatggtcagtttcccactgttcttgagaggatcttaaatttcccaaaaatggtctacctgacttctttgcagggtttcctgcctatstgtgtagcctctctcacactatgccctgctcacctctccacacctgccatgctggcctcctttctatccttggatccactatgctccctcctatcacatg

SEQ ID NO: 154424 - DNA, 201 bp, Homo sapiens
acttgcctgaatccccttaatggtcagtttcccactgttcttgagaggatcttaaatttcccaaaaatggtctacctgacttctttgcagggtttcctgcmtatctgtgtagcctctctcacactatgccctgctcacctctccacacctgccatgctggcctcctttctatccttggatccactatgctccctcctatca

SEQ ID NO: 154425 - DNA, 201 bp, Homo sapiens
aattaactctaaataatattaaaactcttaattcaatatagattccactaattgatcctttagaagtaaatctacccagggaaaataagactattttaaaytatttaccataaattgtgttgaatcttttgagtgtttcagttcagaggatttctacataattctaacaatatatggtaaagttttcgaagcctagataca

SEQ ID NO: 154426 - DNA, 201 bp, Homo sapiens
tagatgtttcaatcaacattttgagcaaaactgaccagccacctggaagaaaaacatatctggatcctttcctcaaacattaaaccaaaataaatttcaamtgtgtcaaatttttaaccataaggtaagaaatcatcaaaataattgtaaaagtcatagaagaaaatagctcatttttaaaaaacagctgtggattgagaa

SEQ ID NO: 154427 - DNA, 201 bp, Homo sapiens
tgtgcctgtggttttaaaagatcagaaacaatcactgtgattaagagactacttccatactgaagtactgaaatgtactgtaaattgacatatatgtaatrtttctccatgaaacaatatccacaacctcaagtctaaaatagcttttaaaaatattgagactcagtttacatagataaatagtcatgagatgcggaactt

SEQ ID NO: 154428 - DNA, 201 bp, Homo sapiens
gcttcactcatgtgttagcatgcaggctggctgtatgtcacactctgttaccctgtttctctcttagagaaacaataatggataaaataatgaattccttytaccatgtttgatatggtttgattctgtgtccccacccaaatctcaagtcaaattgtaattctcagtgttggaggagggacctggtgggaggtgattgga

SEQ ID NO: 154429 - DNA, 201 bp, Homo sapiens
attttaaaaaatgtccattttgtggttgttgggggcaatattctgtatatgtctattaggtccaattggtcacatgttcagtttaagtccagaatttcttygttggttttctgcctcaatagcctgtctaatgctgttagtggggtattgaagtcccccactatcattgtgtggctgtcaagtctttttggagaactagaa

SEQ ID NO: 154430 - DNA, 201 bp, Homo sapiens
gtggaaccaaagtgctaggattattttcctttttattgatgaaaaagatctaggtaaataaaaaggttattttatggaaatagggtagtaagtaggtagaytaacttgccaactgcgatagactggtaaattgttcattgtgaaatttatcaaaattaagaaagaaaattatatgatttctgctttttgacaggcattgca

SEQ ID NO: 154431 - DNA, 201 bp, Homo sapiens
atatttaagtggaaccaaagtgctaggattattttcctttttattgatgaaaaagatctaggtaaataaaaaggttattttatggaaatagggtagtaagyaggtagattaacttgccaactgcgatagactggtaaattgttcattgtgaaatttatcaaaattaagaaagaaaattatatgatttctgctttttgacag

SEQ ID NO: 154432 - DNA, 201 bp, Homo sapiens
aaattggttttgccaagaatacctaaatattatcctttaaccagacaagcaatttcccacagcagtttttaacttttaactggcaccccataaaacacctyttaggcaaaatcaatattttccatcaaagactctcctcaaatattttgaggcaatggaatagaagagataactttttgatgcagcaatgtgcatgatatc

SEQ ID NO: 154433 - DNA, 201 bp, Homo sapiens
gagcgacacagaagacgggtgatttctgcatttccaactgaggtacagggttcatctcattggggagtatcagaaagtgggtgcaggacattgggtgcagygcactgagcgtgagccgaagcagggtgaggcatggcctcacccgggaagtgcaagggatcagggaattccctttcctagtcaaagaaaggggtgacagat

SEQ ID NO: 154434 - DNA, 201 bp, Homo sapiens
gaagaaaagagagaagaatccaatagacgcaataaaaaatgataaaggggatatcaccaccgatcccacagatatacaaactaccatcagagaatactacmaacacctccacgcaaataaactagaaaatctagaagaaatggatacattcctggacacatacaacctcccaagactaaaccaggaacaagttgaatctct

SEQ ID NO: 154435 - DNA, 201 bp, Homo sapiens
ctttgtctgcattccatatttataaaactttgtgtgaaacaagggtggagccaagatggccgaataggaacagctccagtctacagctcccagcatgagcracacagaagacgggtgatttctgcatttccaactgaggtacagggttcatctcattggggagtatcagaaagtgggtgcaggacattgggtgcagcgcac

SEQ ID NO: 154436 - DNA, 201 bp, Homo sapiens
tgccaccatgcctaaataattattgtattgttagtagagatggggtttttccatgttggccagactggtctcaaacttctggcctcaagcaatccaaaagygctgggattacaggcatgagccaccaggcgcagcctcgatgaatatttgagttgctgccagtttctggctggtacaaataatgccactatgaacatttgt

SEQ ID NO: 154437 - DNA, 201 bp, Homo sapiens
tttcatgtaaaggagagaacagatttgttatgagttgttctagaaagctcaactagaacaaccagtacaagttataaacagataggttcaaatattctctratgaagatcaggtattaaatcttactcattctggctttgccacattgtctagcacagggccttaatcatatctgggcctaataggtgtttattgattgat

SEQ ID NO: 154438 - DNA, 201 bp, Homo sapiens
agaaggcaagaaataactaagatcagagcagaactgaaggaaatagagacacaaaaaacccttcaaaaaatcaatgaatccaggagctggttttttgaaargatcaacaaaattgatagacggctagcaagactaataaagaagaaaagagagaagaatccaatagacgcaataaaaaatgataaaggggatatcaccacc

SEQ ID NO: 154439 - DNA, 201 bp, Homo sapiens
tagccagcatagtgtaccatagatgtcttgatgtaattgtctctgtctaactgaaattttttgttttctgactatctccccagaactcagaaactttttamatttttcttgtatacttctagttagattttttttcctgacttttaccagtttttttctgatttatgtcaaataagtacaatgtctgaatttaggattcag

SEQ ID NO: 154440 - DNA, 201 bp, Homo sapiens
aaagatcaaaagagacaaagaaggccattacataatggtaaagggatcaattcaacaagaagagctaactatcctaaatatatatgcacacaatacaggascacccagattcataaagcaagtccttagagacctagaaagagacttggactcccacacaataataatgggagattttaacaccccactgtcaacattaga

SEQ ID NO: 154441 - DNA, 201 bp, Homo sapiens
gaatgcaatattataaagctttaatgtaagacaaaagctcttattgaagttgtaagaacagcatttttattaaggttgtttcatttagtggaaagaacagrcccacacaaatccagaattatatctgggcagtagcaaaatttctgagcagttcagatagtaaatcaatttttaaactttctatgagaaatgtctgtaatt

SEQ ID NO: 154442 - DNA, 201 bp, Homo sapiens
cttaaaggatctagcaaggcaggccaactttcagtttcaggaaatacagagaacgccacaaagatactcctcgagaagagcaactccaagacacataattrtcagattcaccaaagttgaaatgaaggaaaaaatgttaagagcagccagagagaaaggttgggttacccacaaagggaagcccatcagactaacagcgga

SEQ ID NO: 154443 - DNA, 201 bp, Homo sapiens
tagagggctgcttttgtgccaaactgcagtgccgtgtgattttaaagctagagttaatccttgcaggctactgtgggtccacaaaccggcacttggtgccmtagagctttgcatttggtaggcatgttctcctgggcacgggtcctgaaatggactattgtttacctatactcagtgtctttgccctcatttggcaaaggg

SEQ ID NO: 154444 - DNA, 201 bp, Homo sapiens
cctgtgaaaatctttttcttgccaatccatggccataacacacacacataaaaagaaaacttgacattttgaaattgcaacacaagacagctggttccttyctcttcaccacattccagagaacaagaagaagaactctgtctagcaactgtatactttagaacaaggtgtcagagtcagggtgcacccctccattgctcc

SEQ ID NO: 154445 - DNA, 201 bp, Homo sapiens
gcctccactgctgatacccaggcaaacaagtgtctggagtggacctccagcaaactccaacagacctgcagctgagggtcctgactgttagaaggaaaacwaacaaacagaaaggacatccacaccaaaaccccatctgtacgtcaccatcatcaaagaccaaaggtagataaaaccacaaagatggggaaaaaacagagc

SEQ ID NO: 154446 - DNA, 201 bp, Homo sapiens
ttagggtcattgaactgagaaatgttccttggaatttcatgaagaatatcttgaggcagggtttatgtaccagcaaaaggatacacatattcaaggataayacctttttacatattgatagcatactctctctcggagtagagggctgcttttgtgccaaactgcagtgccgtgtgattttaaagctagagttaatccttg

SEQ ID NO: 154447 - DNA, 201 bp, Homo sapiens
gccaggtactcctctgagacaaaacttccagaggaacgatcaggcagcaacatctgctgttcaccaatatccactgttctgcagcctccactgctgatacycaggcaaacaagtgtctggagtggacctccagcaaactccaacagacctgcagctgagggtcctgactgttagaaggaaaactaacaaacagaaaggaca

SEQ ID NO: 154448 - DNA, 201 bp, Homo sapiens
ttctttttgtttactttctaagaatcaccttaacttatcttccaactcatatgtttttcacttggttatatttttcatttgcaaaagcgttttttttttttctttctgatttcttgtctttttattaaacatagggcctttccttttttggtggaaccaatattttctcttatctttctgaggctgtgacatatagttatt

SEQ ID NO: 154449 - DNA, 201 bp, Homo sapiens
gaaactaagacttagatgaagtttcttccctctggttacgaggctggtaagtgttagaagcaacactggaagtcagatgtttttctgaacatgtgtttatmcctctgcatcacaaaactcacatgatagacacttctgtcttcgctaacaaaaacagacgagtgtttgtgagaacagagaggtgtcttatttttcatctaa

SEQ ID NO: 154450 - DNA, 201 bp, Homo sapiens
aagaatataacccagactagcatctccgatttggagatctcgatatagttcaaagcagaatctaaaacttgactcttctgactctgactcctttacgtctmtaggcctccatttacaggaactgaaagaaaatgcttttcctctattttgtaagtggagagtaattcaacatcatttcttagggtcattgaactgagaaat

SEQ ID NO: 154451 - DNA, 201 bp, Homo sapiens
cttgcctgcgcctctagttcataagccactttttgattgttttccattcttgaaggggactaatgatgtggaatggcaggaggtgttgtacacggggagcytacagctccagtgtgggtcttgtttagaatatcctctgtcaccaagtttatttcacttaccctcaagttggaaacatgcaaagcccctaacactgtgttg

SEQ ID NO: 154452 - DNA, 201 bp, Homo sapiens
cagttctgtgcgtccttgacggcaagaatataacccagactagcatctccgatttggagatctcgatatagttcaaagcagaatctaaaacttgactcttytgactctgactcctttacgtctctaggcctccatttacaggaactgaaagaaaatgcttttcctctattttgtaagtggagagtaattcaacatcatttc

SEQ ID NO: 154453 - DNA, 201 bp, Homo sapiens
gtatgtgtgtgaataaccaattgctttgacacaatcacaaaattctctgcatagaaggacatgttttaccaaatcaagagaggcagcttttccgacaaagaggatgcagcaattgtacagaacacaatttgatctgtgattgttttctgtgtattgttcattcttactggaagcttcttggtctgttgaatggcccaacat

SEQ ID NO: 154454 - DNA, 201 bp, Homo sapiens
gggactacaggtgtgcgccaccacacccagctaatttttagtagagacagggtttagtattttcagtagagacagggttttaccatgttggccaggctggkcttaaactcctggccttgtgatccacctgcctcagcctcccaaagtgctgggagtataggcgtgaatcactgcacctggcgctataattatatattttaa

SEQ ID NO: 154455 - DNA, 201 bp, Homo sapiens
gtttctgcatgtatttgagccctggtcacataatctttaaaaacataggaggaataatctctacttttcaggacataatgtctgtgaggtatgtcgcctakgcccagggcacagcagttactcagcagcagtgtgctttcctccccgtaccttgaggaacagctgagaaaaagcataagaacttgtttgaattcatttcct

SEQ ID NO: 154456 - DNA, 201 bp, Homo sapiens
ttatttctttgaccctaattacaccctccttatatttcctcctgtaatcaacatgtctcccatttctgggttctttgtgtatgttctttttcactcttgtktctatcctttacatatctcacagattttagtaatccttggaatatggtcttttagtttatttcccacttagaacacaagactcacatccattcagtggca

SEQ ID NO: 154457 - DNA, 201 bp, Homo sapiens
atatcttgaagtgagcttaaatgtttgaaagttgtttaattaacagagtgtcttctctaaagtatctaaatatcttaattcaacattctataataattccrtaatttatatataagcactaaagaaaaaattatccttagaagaatatgtttcaggcaatgtaggagacaatacataatatgataatatcagtatgtatta

SEQ ID NO: 154458 - DNA, 201 bp, Homo sapiens
tgaagagttaatatgaaatgtaatttgagtgttagctacaccatcttgaatttatcaaattgtgagatattttttcttagatttcttcccagtcagggtcyacgttacatatttttaggccattgtatatattattctttttaaagaaagaagctttttaatgtaagcgcagcacttgagattgaagtcaataatatgtgt

SEQ ID NO: 154459 - DNA, 201 bp, Homo sapiens
caagcatctattcattttatttctttgaccctaattacaccctccttatatttcctcctgtaatcaacatgtctcccatttctgggttctttgtgtatgtkctttttcactcttgtttctatcctttacatatctcacagattttagtaatccttggaatatggtcttttagtttatttcccacttagaacacaagactca

SEQ ID NO: 154460 - DNA, 201 bp, Homo sapiens
tgctggttgcaacaggcaagattgcacttcctcccacacttggaagtgagttatctcaccatccactaggaaaatgttcagcgtcctcttaaaatgtttartgagccttggggaccccaagagagagctgccaagatctatcttgatagttactaaacttacctccgagagagatttgaattgttagagctttcgtcctca

SEQ ID NO: 154461 - DNA, 201 bp, Homo sapiens
taaaaaaattttgtttcaataatttttgcagaacaggtggttcttgattacatggataagttcttcagtggtgattctgagattttggtgcactcatcgcmtaagcagtgtgcacggtaccccatatgttgtcttttctccctcaccctccctcaacccttccctctgagtccctcaagtccattacatcatttctacacc

SEQ ID NO: 154462 - DNA, 201 bp, Homo sapiens
  misc_feature (1)...(201): n = A,T,C or G
taaacctcattccagaatttgctggttgcaacaggcaagattgcacttcctcccacacttggaagtgagttatctcaccatccactaggaaaatgttcagngtcctcttaaaatgtttaatgagccttggggaccccaagagagagctgccaagatctatcttgatagttactaaacttacctccgagagagatttgaatt

SEQ ID NO: 154463 - DNA, 201 bp, Homo sapiens
gagtctcactgcaaagtttggagaatttgaggcagttgtcctggaattataaatcttagagaaataggtccttccccacccatgttgatgatagtgggttrgggctgtttctacaaattttattcctgaagctcatgaatgcacagaagtgtctcaacaccaccttcatcataagatgagccaacagtgtgcgcaacctgc

SEQ ID NO: 154464 - DNA, 201 bp, Homo sapiens
tgcctgaccctcctaccctctcacctcccacccttgtctcacatcccaactgcagcctattcccagcctcccctttcacttgaactttcattcttccctakcacataaggtagtaaaaaagctgtccacctcctctgaaatagaaaggtaaagtttcagctaactattaataaaaaggagccagactgcatgctacctgcc

SEQ ID NO: 154465 - DNA, 201 bp, Homo sapiens
agaatcataactgctcttagattctcaaaggggcctgttacctgaaagaggtttagaaccactgctttaaactgtttaggcagcaaaataactttccctakaattttaatcagttcggggtgattaatcaagcaacttacaatgagaagaattagtgagtctcactgcaaagtttggagaatttgaggcagttgtcctgga

SEQ ID NO: 154466 - DNA, 201 bp, Homo sapiens
gcacatgtattgcccaagtaaaacaacgtagacttagagttagttgtatagagctgagggaatgtgggagtagtgtatggtctatacataaaggtatattmccaagaaaagataccctttaagtggtcgaaaacaataattggagtttagagaaagaaagatttgagagtcttttgcataaagagttgaaatgtgaagaaa

SEQ ID NO: 154467 - DNA, 201 bp, Homo sapiens
gcctagaaattttcctcatctataaatgtgatctaaaatctaagccatgaatgtgctttatttattaaaacaaaagatttatgttgatttaattgtaactytttatgtaaggcactacaaatttatggtttgagagagtaaagttcctactgagatacctagaaaagaagtattttccaaatccctttgaccaaaaaaaac

SEQ ID NO: 154468 - DNA, 201 bp, Homo sapiens
cactgttactgtttgggcctagaaattttcctcatctataaatgtgatctaaaatctaagccatgaatgtgctttatttattaaaacaaaagatttatgtkgatttaattgtaactttttatgtaaggcactacaaatttatggtttgagagagtaaagttcctactgagatacctagaaaagaagtattttccaaatccc

SEQ ID NO: 154469 - DNA, 201 bp, Homo sapiens
gatgtgtatggtgttctctgccctgaagtctctgctcttgagatttaagacacaggtggcacattattccttccagcagtagtagcttcactgttactgtktgggcctagaaattttcctcatctataaatgtgatctaaaatctaagccatgaatgtgctttatttattaaaacaaaagatttatgttgatttaattgta

SEQ ID NO: 154470 - DNA, 201 bp, Homo sapiens
ggccagatttggtccacaggcaatagtttactgatccctgctgtgctcatcttgtacttttgtctttcaatttgcaattgctgcccattggaggcactcamttactgttaaaaatgattatatttataatgatatagtattattaaagtaaaaaacttagaatatcatagaaatgtatacatacagatcttgtgaagttct

SEQ ID NO: 154471 - DNA, 201 bp, Homo sapiens
tatacatatatatatataatgttttaaaggaaagaaatggaaccatgtaacccaaaaagccaaaaactaagtagtcatataattacattcttactgctctstaagattgttctcagaaggaactgaggctcttctctccccataggtgactaggccagaagaaatatactatgttacagtaggccaacttcatctggcaga

SEQ ID NO: 154472 - DNA, 201 bp, Homo sapiens
accacctctgtactaaaaatacaaaaaaagtagccgggcctggtggtgggcgcctgtagtcccagctactcaggaggctgaggcaggagaacggcgtgaamccggaaggcagagcttgccgtgagccgagatcgtgctactgcactccagcctgggcgactgagcgagactccatctcaaaaaaaaaaagaagttactttt

SEQ ID NO: 154473 - DNA, 201 bp, Homo sapiens
agccggcagtgcacaggaagctgcctccgcacaggcaaggctttatgcagggcatcctgaaaagaagcacttatttcagacactgatcttgcatctcgccrtcttttaagcttgtgtttccttttaattaactaattttacaatctttaaatcatgaaacaagccatctactcatatactctttacttgtttactcatgtt

SEQ ID NO: 154474 - DNA, 201 bp, Homo sapiens
tggtggggggatatgtcaaagctgcatgccggaatggcaggaagaagtgtccatataatagacacttgtgcaagttcagaggggtgggtggtttggggacmaggattacaagtttcattcaagtccagctgcacttgaggcaacaatgggacactgatgtggaagctagaatttgaagaagcagaattgaagttcaggaga

SEQ ID NO: 154475 - DNA, 201 bp, Homo sapiens
agatggtggggggatatgtcaaagctgcatgccggaatggcaggaagaagtgtccatataatagacacttgtgcaagttcagaggggtgggtggtttgggkaccaggattacaagtttcattcaagtccagctgcacttgaggcaacaatgggacactgatgtggaagctagaatttgaagaagcagaattgaagttcagg

SEQ ID NO: 154476 - DNA, 201 bp, Homo sapiens
taaagtagggacagtgatgatgcatgcgtggtaaggttaagagcagatgagttcatgtatatataaagggcttggcctggcatgctgctcatgcctgtgcygttgccttcctcccaacgagcaatgcctgctgtagttcagaggatggccactctgaaactgagagaagaaaccatcttagatcttgaagaatctatatga

SEQ ID NO: 154477 - DNA, 201 bp, Homo sapiens
aaaccctgaggtgcgttgttctggcacagggtgtgcataaaacaaatgtttgttgagcaagtgacaaaagaaggaagaaaagaaggaagagagggaaggasggaggctgtactgttcaaagacctttcttcattatctggcccacattctgaaatgtggaaatgtatcgggtatttttattagtagtattactctttttct

SEQ ID NO: 154478 - DNA, 201 bp, Homo sapiens
acctgcaactaggaaatattggacataagggcaagtctcacatccaaagagcaaaacctgcaaccacagagcaggatgataaagaactcagaaactgagaygttgatcttgaactgcgtgtatgaaaggggtggggtaaaggacagaccactgtatatccaggtgattatttgggttgggtgattgtctaccagacagttg

SEQ ID NO: 154479 - DNA, 201 bp, Homo sapiens
aatattttagtggtcttaggccttaactgcttaaatgtatatctccataaagcactgaaagttttcatatatatatatatagagagagagagagagagagacattatcacacatgtatgcatgtacatatatgtatatatgtgcatatttatgaaagcatatatgtatacacacataattttaggctttgaaaaaacagga

SEQ ID NO: 154480 - DNA, 201 bp, Homo sapiens
ctgcgtttgacatcaaagatacccactgggaagttcctgccttttatcatctttattgatagcagtttcaaaaaggactccctttcttccctgtttccccmattatttaccaaaattggattctgattcatcctactgaggtcttctgctaacctatgtaccagctgccatacccacagaaataaatattctgattggcca

SEQ ID NO: 154481 - DNA, 201 bp, Homo sapiens
taatattttagtggtcttaggccttaactgcttaaatgtatatctccataaagcactgaaagttttcatatatatatatatagagagagagagagagagagacattatcacacatgtatgcatgtacatatatgtatatatgtgcatatttatgaaagcatatatgtatacacacataattttaggctttgaaaaaacagg

SEQ ID NO: 154482 - DNA, 201 bp, Homo sapiens
ccaggcccattcacgtgtgatggcctttgcacccactggccatgttcaaaacgctctgcttccagcccttgggttccttgttgtcattaagatctcagccmtagtagcttctcctcagagagatcttccttggacatctatttaacgtaaccttcccactctccctctgacatcttctattgcattactgttttagtgttt

SEQ ID NO: 154483 - DNA, 201 bp, Homo sapiens
gagataatattcatgggagtattttgtggtttctttttcacaaaatgttacaactgaaaaagacttttaatattacctagctagtaatccacaaactgggrtcccaatatcccaggtactcagatctgagaactattaagctaagttcagaacttctaaaagcccaatgaatgttacacctttttctataatgtggctgag

SEQ ID NO: 154484 - DNA, 201 bp, Homo sapiens
aactgaagtacatgctgggtaatattttagtggtcttaggccttaactgcttaaatgtatatctccataaagcactgaaagttttcatatatatatatatwgagagagagagagagagagacattatcacacatgtatgcatgtacatatatgtatatatgtgcatatttatgaaagcatatatgtatacacacataattt

SEQ ID NO: 154485 - DNA, 201 bp, Homo sapiens
aatgcctacaaaatgtaactgttaatcaattttattaatggttaaatagaaataattaatgatttcattatttttgaaaaccatataattatttaggcagmgattttgatttgcatacggtgggtgatggaaaaggaaaagttagaggaatagtggccattctggcaagactgtgggactacttgggaagaactgacctca

SEQ ID NO: 154486 - DNA, 201 bp, Homo sapiens
taaaatattctgtaggtgtgtcacttgccattatgagagccatagagctagataaccaagatttttatgtaggcgtggattatttttcatgcccctacctatctatctttacttcttttaagtaggaccatcccatttgttcactgatacactggctctaatggatcagaaccacagacttcactgccctcaagcaggtca

SEQ ID NO: 154487 - DNA, 201 bp, Homo sapiens
tcatgtgataagcaatgtgttatcccaaaaaacaaagtgctttgggaatgcacagaatacactgttaaatctaacaggaagagttgggagaatattcagtmacagttatcacgcttgaactgattctttaaagaatgaatggaatttctgcaagtagagaaagggaagggcagcatttcaggcagtacaagcaaaagcatg

SEQ ID NO: 154488 - DNA, 201 bp, Homo sapiens
ctaaaatattctgtaggtgtgtcacttgccattatgagagccatagagctagataaccaagatttttatgtaggcgtggattatttttcatgcccctacctatctatctttacttcttttaagtaggaccatcccatttgttcactgatacactggctctaatggatcagaaccacagacttcactgccctcaagcaggtc

SEQ ID NO: 154489 - DNA, 201 bp, Homo sapiens
atgattccacaggctagggagttaaagcacatgacactggcttctgacaagggcttttgtgctgcaaagcatggcagagaggtcaaagaggaagcagacaygtgcaaagagagccaaaacctaagggatgtcttggttatataactactctccctagaactaatccattccctcaagaactaattcaaccttactggagct

SEQ ID NO: 154490 - DNA, 201 bp, Homo sapiens
cctaaaatattctgtaggtgtgtcacttgccattatgagagccatagagctagataaccaagatttttatgtaggcgtggattatttttcatgcccctacctatctatctttacttcttttaagtaggaccatcccatttgttcactgatacactggctctaatggatcagaaccacagacttcactgccctcaagcaggt

SEQ ID NO: 154491 - DNA, 201 bp, Homo sapiens
tcatgaagtagatatccccttagactttattggcaggtaatagtattgaaagtaataaaacaatgttgctttcaataaattctgacttccataattcaggmtagatcttcctctcctcctttccaaactaattattctaatctaatgaggtttgctattgtgtaacatgtggatggaagcatttagtaatagaagatgatc

SEQ ID NO: 154492 - DNA, 201 bp, Homo sapiens
acctaaaatattctgtaggtgtgtcacttgccattatgagagccatagagctagataaccaagatttttatgtaggcgtggattatttttcatgcccctacctatctatctttacttcttttaagtaggaccatcccatttgttcactgatacactggctctaatggatcagaaccacagacttcactgccctcaagcagg

SEQ ID NO: 154493 - DNA, 201 bp, Homo sapiens
tacatatttttctatttttattttaaaagtacttaacactttcctggcacattgcactgtagtctattgtttaaagtgtcttcctctatgaatagagtaamacctcattaattcagatactgctaatacagaattcttgagaatttgatctagactaagctgaaatttagctttgaattttctgcaaggaatggatttgct

SEQ ID NO: 154494 - DNA, 201 bp, Homo sapiens
atgggagagagtgtcatgtaatatgatcaggaacccacctctagtttatctcaaagtagcacagctccagttggttctgcagcattaggtgatgggagcasatggtggctgcatgcacttcaccaagatcttcctctggctcccagcaacctagtctagaggtgatgtgtatggtgttctctgccctgaagtctctgctct

SEQ ID NO: 154495 - DNA, 201 bp, Homo sapiens
ccaaattttcatggtaatgccaggtttcctaataagtgacaccaagcttaatcaggccagaaacacaggggatgacacattttatttcatgaccctctccyttcccatcattttccttgttacaaataaaatatgagaggctttgaggcatctttgtgtagaaagttttataaatgtctttggatgtgatggtaatatatg

SEQ ID NO: 154496 - DNA, 201 bp, Homo sapiens
ttttggaaaaatgagatttatcaaatgtttaatagaagacagtttgagacagtggaaagaactctatgttgagaggcagactgacttgggttcacatatgrccccatgagtgtttttgtttgtttcattcactctatgcccaatacagtgcccggtacataatatgccctcagtattttctgaacgaatgactaaatgggt

SEQ ID NO: 154497 - DNA, 201 bp, Homo sapiens
ttttctataccaaattttcatggtaatgccaggtttcctaataagtgacaccaagcttaatcaggccagaaacacaggggatgacacattttatttcatgmccctctcccttcccatcattttccttgttacaaataaaatatgagaggctttgaggcatctttgtgtagaaagttttataaatgtctttggatgtgatgg

SEQ ID NO: 154498 - DNA, 201 bp, Homo sapiens
aaaggtgcaaaagcagcccatggttccaggaaatggcagaggagtgagtccttcatgtcaagttttggaaaaatgagatttatcaaatgtttaatagaagrcagtttgagacagtggaaagaactctatgttgagaggcagactgacttgggttcacatatgaccccatgagtgtttttgtttgtttcattcactctatgc

SEQ ID NO: 154499 - DNA, 201 bp, Homo sapiens
ttccaccttctaattattctgattcctgttacaaagacaggtcctatctctgaacttatttttaagttcttaaactcaccatatctctagaatttgctcasacatgcaaaagagatatccaatagatagtacaatacagatacttagatatccatattcaagagatattcttgaactccaagaagtgaaaggctaataata

SEQ ID NO: 154500 - DNA, 201 bp, Homo sapiens
gtatgacatatagtatatatgttataatatgttgtattatacatattatatatatacatatatatatataatgttttaaaggaaagaaatggaaccatgtracccaaaaagccaaaaactaagtagtcatataattacattcttactgctctgtaagattgttctcagaaggaactgaggctcttctctccccataggtga

SEQ ID NO: 154501 - DNA, 201 bp, Homo sapiens
cataaagcaattgacccagacctgcctgggcaatgctgtttctctctaaaccctctcccctagttagggtagtcatcaccattattctccccaacttccayccatttttgaagacctaattcaaattccaccttctaattattctgattcctgttacaaagacaggtcctatctctgaacttatttttaagttcttaaact

SEQ ID NO: 154502 - DNA, 201 bp, Homo sapiens
tagttatatattatataaaatatatggtatgacatatagtatatatgttataatatgttgtattatacatattatatatatacatatatatatataatgtkttaaaggaaagaaatggaaccatgtaacccaaaaagccaaaaactaagtagtcatataattacattcttactgctctgtaagattgttctcagaaggaac

SEQ ID NO: 154503 - DNA, 201 bp, Homo sapiens
caacaggctgtctttgattttcttcattttccttctcatttctacctccctagtctaggccccaacccatcacttactttgtgcaacccaccaatgcctcmtagatattctccaatttctccccctactctgagcaatttatttaccagtttaatgttcctttataacccacctctgctgaaaaaaccataattgcccccc

SEQ ID NO: 154504 - DNA, 201 bp, Homo sapiens
atataatatatgtaagtgtattatataatatatatttcattatagttatatattatataaaatatatggtatgacatatagtatatatgttataatatgtkgtattatacatattatatatatacatatatatatataatgttttaaaggaaagaaatggaaccatgtaacccaaaaagccaaaaactaagtagtcatata

SEQ ID NO: 154505 - DNA, 201 bp, Homo sapiens
ccttttttcaagtggcaggaataatccaaaaaaaaaaaaagactgggctaaaaacactctggtgaggaactctacattgaatctttacacttttatagtargatttattttaatgtgttgaaaccctgagacaaaagctctgtctttctccatctgccttcccagaccaccctggtaataaatgactcaactctgcttata

SEQ ID NO: 154506 - DNA, 201 bp, Homo sapiens
gctgctatcacaaacaaagcatttgatatggcccagaattcatcagcagtcaaactcaggccctaatatcatccatctaaagatttttaacccatgtaccytttctttcatgagcaaaccagggccaggagcagctgccctcaatatgttggaggctagtgcaaggcttcacccactgagatcaatatatatattgaacac

SEQ ID NO: 154507 - DNA, 201 bp, Homo sapiens
tcctttagtactcattcaagttttagtcaacatatgttgaaagatattttttaaaaggcatgcagagagcaaaacattacctatatatttataaaatacasaatagaatatatattaatatataatatatgtaagtgtattatataatatatatttcattatagttatatattatataaaatatatggtatgacatatagt

SEQ ID NO: 154508 - DNA, 201 bp, Homo sapiens
agtggaaaaatggtagaaatttgggtaaattcaaactaaaaggacaagtataatgtggttaatcatcaggaaaattgcaaatcatgatcttgtaagttatstagaattaactctcagtccttcccctcaattcccataatttggagcacactgtattcctaatacagaactatgatggtatagatgtgtaaaatacaaaaa

SEQ ID NO: 154509 - DNA, 201 bp, Homo sapiens
caggacagacaattaatcctaccattgcttaagccacaccatcctttagtactcattcaagttttagtcaacatatgttgaaagatattttttaaaaggcrtgcagagagcaaaacattacctatatatttataaaatacagaatagaatatatattaatatataatatatgtaagtgtattatataatatatatttcatt

SEQ ID NO: 154510 - DNA, 201 bp, Homo sapiens
ttcaactcgagagtcttctacgctctcttctccccatcatctctctgcagaagactgcctggtattttcctgatatctatttctgcctcctgtgggatgtkttactggtattttaaaccaaataaatgctaaaccgagcttatcatcccacctcctctgttgctcaccaaacttacttctttaaattggacctatttcctt

SEQ ID NO: 154511 - DNA, 201 bp, Homo sapiens
cacattcttatttgagctcaggtaagaaatacagttcagaaatttaggagtcaccagtgctaatatagttgtcattagagccaacaaaatgaatgagattrcccagaaaaggcccatagcataaaaaacaaaaagagactttatttcagatcaaaagaaaaagcttgatgtgtgtcatgctggtgagcaaagcaatcttga

SEQ ID NO: 154512 - DNA, 201 bp, Homo sapiens
aacaagctggtgaataatactattagctgagatacagcagacacaagaggatccatttggggggctgaggataaaaggagatttctattttatttatcttmaatttgaaatgactgttagctaccaaagcaatgatgcttcttggatatctactgcaattatctaggttagaaacagggaagcagcagtgcggatggggga

SEQ ID NO: 154513 - DNA, 201 bp, Homo sapiens
ccctaccccaccctgaccacaaggatgctccgtaagatcagggaccaagtctgtcttgctagctataccaccaacgcacagcccagtgcctggagcacagwttgtgctcagaaaacacgtgtttaatgaataactgaaggtggaagggcaaagggtgaggatggagagcgagatggggcagatggcactggatattaggac

SEQ ID NO: 154514 - DNA, 201 bp, Homo sapiens
ccctgctcacctctccacacctgccatgctggcctcctttctatccttggatccactatgctccctcctatcacatggcccttgtcatgttcttccttctrcctgaaagttctcccccctcttcttggtcaagttaactcctttatcatctttcaggttttgactcaaatgtcacttctttggggagcccacatttaaaca

SEQ ID NO: 154515 - DNA, 201 bp, Homo sapiens
acaaaaattaactcaagatggattaaagacttaaacgtaagacctaaaaccataaaaaccctagaagaaaacctaggcaataccattcaggacataggctktgcatgctattctgatgtcactacctgtgcacttgcctgaatccccttaatggtcagtttcccactgttcttgagaggatcttaaatttcccaaaaatgg

SEQ ID NO: 154516 - DNA, 201 bp, Homo sapiens
aataatgctatcatctgccagattccctaataaaaacctgagtgttgtccttgcttcttgctcctgtatttcccacattcaatcaatctccagaacctacytcagaaataccacctgctcctggcgtccctcccttcccattctcactgcctgggctcaagcccgcaccccttctgcctggacacagcacatgctcattgc

SEQ ID NO: 154517 - DNA, 201 bp, Homo sapiens
ttaataatgctatcatctgccagattccctaataaaaacctgagtgttgtccttgcttcttgctcctgtatttcccacattcaatcaatctccagaacctrcttcagaaataccacctgctcctggcgtccctcccttcccattctcactgcctgggctcaagcccgcaccccttctgcctggacacagcacatgctcatt

SEQ ID NO: 154518 - DNA, 201 bp, Homo sapiens
caagggctcaagcaatcctcccacctcagtctcttgagtagctgggactacaggcacatgcaaccacacccagctaattaaaaaaaaaagtagagatgagrtcttgctgtattctcattgtatctttaataatgctatcatctgccagattccctaataaaaacctgagtgttgtccttgcttcttgctcctgtatttccc

SEQ ID NO: 154519 - DNA, 201 bp, Homo sapiens
tcaagcactcaatgcttctgaataattgccatcaataattgtgctaatcactcagtgctccatatctcatgttttgttacaacaaccctgtgaggaccaggattttaatctccactttatacaggtggaaactcaggcttgaaatcagatttagtaatttttcaggtcctgccacatttagcacgacattagtaataataa

SEQ ID NO: 154520 - DNA, 201 bp, Homo sapiens
atgtatttgagccctggtcacataatctttaaaaacataggaggaataatctctacttttcaggacataatgtctgtgaggtatgtcgcctaggcccaggrcacagcagttactcagcagcagtgtgctttcctccccgtaccttgaggaacagctgagaaaaagcataagaacttgtttgaattcatttccttttgctgc

SEQ ID NO: 154521 - DNA, 201 bp, Homo sapiens
ttctgatatttgaagaaacaagaatgtctaagtggcttcctctttgctgttcgagtattgctctgtctttttcagtggatgcccctctgtcactaatgtcyttgcctaattgctaacaatgggagagagtgtcatgtaatatgatcaggaacccacctctagtttatctcaaagtagcacagctccagttggttctgcagc

SEQ ID NO: 154522 - DNA, 201 bp, Homo sapiens
tgggagaaaaaaaaaaaccacaggaaaagagcagatgtctttgagaatcatcaaagcatgtcttatttcttacacatgcacatgcctgctctctttctgcstgcatctacaaaggggactcatttagcattcactgatgaacataagagtatttctatactcctgctgagcctgtgaatttttttttttaagttattaagg

SEQ ID NO: 154523 - DNA, 201 bp, Homo sapiens
tactcttccaagcttcccaaactaaggcatccaatagtgggtcactaataatgccaggagctgtacatggcatctctatctcaatttcacccaaagacatmgagcccaagtactcaattttacacaaagattttattaataaatgaaaatattattgtatattagcacattgatctgttatgggatggaatgctgagaatc

SEQ ID NO: 154524 - DNA, 201 bp, Homo sapiens
tgtgaagggtacctgtggaaaggtatctagattgacaagacaaagcaaagctgagaatatggccttcagatgttttaaaagcatgaccaccaagaagaaaatagtggttggaataaacactgtgagaactattcacaatcaaatatacagacagctctcattcaagcactcaatgcttctgaataattgccatcaataatt

SEQ ID NO: 154525 - DNA, 201 bp, Homo sapiens
caaatcacaaataattcccaattgaaatagaaagtaactcaaataaaaatgaatattcaagagctagatgacaaatctcatcaaggcagcatgagacgaarcaggtcttgacaaaattgggctcatgctattaggctcatatgtatgtgttgaatgatcaactaatttatcgtggaagttgtatcaaagggcaacctaggt

SEQ ID NO: 154526 - DNA, 201 bp, Homo sapiens
ttaagcctacaactattatataacccagcaatgtcacttctggacatttatcccagagaaatgaagatttatgttcacataataacctgtacaaaaatgtktatagcagctttattcatgatagtcaaaacttagaaactaccaagatatccttcaacgagtaaatggctaaacaaactttggcacatccataccacagaa

SEQ ID NO: 154527 - DNA, 201 bp, Homo sapiens
atcacaaataattcccaattgaaatagaaagtaactcaaataaaaatgaatattcaagagctagatgacaaatctcatcaaggcagcatgagacgaagcasgtcttgacaaaattgggctcatgctattaggctcatatgtatgtgttgaatgatcaactaatttatcgtggaagttgtatcaaagggcaacctaggtgtg

SEQ ID NO: 154528 - DNA, 201 bp, Homo sapiens
attatgaagagaaacatcagactgtcaaactcacctaggtaactggggcacagccttgaggttaaaaaaaaaaagttgtcggaaccaattttataattcascaggagcccctgtcagacaaatgaagcagcagtgatgaacggattcagatagatcgtgatgggagtcaagcagctggcgtcagcaccaattagatctggc

SEQ ID NO: 154529 - DNA, 201 bp, Homo sapiens
ttaagtcatacctgattttcacacagggtaaaaaaatgaggtgcttatttctaaccaagaaacagatgcctaacttgttcttttaaatagaaatgaccacmaacattttaatcaactgtaaatgatatacttgtatactgtgcaacttaaaaccttctaaagtgaatgtatgtcacttgagccatgcagtatagaaatcaa

SEQ ID NO: 154530 - DNA, 201 bp, Homo sapiens
tcaagacagtataacacacacttcaattcttgcttcatatgtctatacataaaagccattctgctgtgcataaatcatgttttagggtacttatttctgtytcatttatttttttttagaaaattaaagaaaccacctcatgttagagccccacatttcagttaagcaagattatccacacctcatagtctgacaacttcc

SEQ ID NO: 154531 - DNA, 201 bp, Homo sapiens
ggtcagttaatgacccatctctttcttttctgaactcccatatgacatgaaagttcctctaccttgttttatggtcattttagtatttgccagctcctgcmtagattacaggttttaagggcaaggaccatgcatcaattatctttgaactctctatagaacttggaccaattatacatttgtggtaggctgaataagggc

SEQ ID NO: 154532 - DNA, 201 bp, Homo sapiens
ctttacttaactttttggccatacagaatatagttataactctttaaaatatccttgcctgctaattctcatctctgagtaatttctgtttaagttaaatwgatttatttatttttctgattattgatcttactttcctgcttttttacataccttgtaatctttgattgaataccagactttgttaattttatcctgttt

SEQ ID NO: 154533 - DNA, 201 bp, Homo sapiens
cattctaaaaacagaatagcatatcattgatgcaagtgtaaactggtattttttggcacacgtgaaatttgctaaaaaataacttaaaagacaagtaccamtaagatttttatctcaattagggttagcaaagcaatattataaatgagtcacactgagactaggtgatttaaatgaggcaggctagcaggacagacaatt

SEQ ID NO: 154534 - DNA, 201 bp, Homo sapiens
gggatcagttgtactgaaggacctgtgacttactgatgagctatatgactcataaatacctgcctccaaaatgcagatattactaaatcaagtagaatggscagtaccttacaccaggaagttcataacaagacaattaaaaatgcccttggatatatgctttaaatcattctaaaaacagaatagcatatcattgatgca

SEQ ID NO: 154535 - DNA, 201 bp, Homo sapiens
ttgtgtggaggaagattttgttctagtctaaacaatattcttatcactaagccatgatagtgtgaccttaatcatgctaccattacctgggtgaacaggtraatatagagttgcaattacaataaattgggtgggagcaatgcattacatatccaggtccagcccctggggatcagttgtactgaaggacctgtgacttac

SEQ ID NO: 154536 - DNA, 201 bp, Homo sapiens
caaagtctgacaatgctaaagcctagaggatgtgggtgaaataacaaactctcataaattgttggtgggagtgtaaatatatattacttatataatatatmttttttggtcatgtagcaataacaaccaaaaatttcaatttccatactgtattagtcagggttctctggagggatagaacaaatgggatagatgcatata

SEQ ID NO: 154537 - DNA, 201 bp, Homo sapiens
gagtctcttcttattcactatggatgatgtaaaatttgcattccactatctaagttgaataatttgaaacatcaaattattcaaatataaataaaatacamccattttccaaagttcaaatcttgatatttatttcccttcaactcgagagtcttctacgctctcttctccccatcatctctctgcagaagactgcctggt

SEQ ID NO: 154538 - DNA, 201 bp, Homo sapiens
atagttaaagcctttaaagagctatatactatattactattattgagatgtgggagaggatacttttccttaggagacaattcaaaagataaaaaataaaktgtatttatttccctatcatttaatcgatgcttacagaaatagctctttcagaaatttaggttaattcaatatatatgcataagactaaactaggttcag

SEQ ID NO: 154539 - DNA, 201 bp, Homo sapiens
tagtatagtaaccccaggttagtaacaggagagtcattaacaccccaggctggaagagtcagtgggtgtgaacagttatgggaactagaaagggaaaattstgtaagctgtgtctcagtttaaaagctggagccttttggcagtttttcctgacacccccaggccaactttggccctcttcatctgaatggagactggact

SEQ ID NO: 154540 - DNA, 201 bp, Homo sapiens
gggtttcaagttattttcacagttaaccatggaagaatatgcatagctattcagtacatgatcttgtagctagtcagtcagtctatattgattgtatggastgagcccaacatcctacatatttattatgtacaaatatacagaaaaataacaatgatttaaaagatatagttaaagcctttaaagagctatatactatat

SEQ ID NO: 154541 - DNA, 201 bp, Homo sapiens
ggagtagagggagcagcagaccacggaagatagtatagtaaccccaggttagtaacaggagagtcattaacaccccaggctggaagagtcagtgggtgtgmacagttatgggaactagaaagggaaaattctgtaagctgtgtctcagtttaaaagctggagccttttggcagtttttcctgacacccccaggccaacttt

SEQ ID NO: 154542 - DNA, 201 bp, Homo sapiens
aaggatcagtgaaatgctaatttttaaaaaaattaaattttcatcaaagctctagacctattcacttattatgatgtttatgccaagtttcaagaggtaamacatgcttcaccacaaaaaacgatgatcagaataagttatggaatgaaaggcaaagatcctattttatttgattatctaaattaagtcttaattcttttt

SEQ ID NO: 154543 - DNA, 201 bp, Homo sapiens
agactataatttgggataggagtagagggagcagcagaccacggaagatagtatagtaaccccaggttagtaacaggagagtcattaacaccccaggctgraagagtcagtgggtgtgaacagttatgggaactagaaagggaaaattctgtaagctgtgtctcagtttaaaagctggagccttttggcagtttttcctga

SEQ ID NO: 154544 - DNA, 201 bp, Homo sapiens
attattttgaattctttgagaaaagtacaccatggttgtatttgtgttctctcacttgagtgtgagctctacctggctcagtgctgtgtgaagctctccamccctcaggataaggatcagtgaaatgctaatttttaaaaaaattaaattttcatcaaagctctagacctattcacttattatgatgtttatgccaagttt

SEQ ID NO: 154545 - DNA, 201 bp, Homo sapiens
aaaaaaaaaaaaggagactataatttgggataggagtagagggagcagcagaccacggaagatagtatagtaaccccaggttagtaacaggagagtcattmacaccccaggctggaagagtcagtgggtgtgaacagttatgggaactagaaagggaaaattctgtaagctgtgtctcagtttaaaagctggagccttttg

SEQ ID NO: 154546 - DNA, 201 bp, Homo sapiens
atcacatggccagaagaattattttgaattctttgagaaaagtacaccatggttgtatttgtgttctctcacttgagtgtgagctctacctggctcagtgstgtgtgaagctctccaaccctcaggataaggatcagtgaaatgctaatttttaaaaaaattaaattttcatcaaagctctagacctattcacttattatg

SEQ ID NO: 154547 - DNA, 201 bp, Homo sapiens
attcattattgaaaataaagccttggcattccaaatgtaaccctatttcaactttaacaacaaactgccacatagccttaggaagctctctaaccttttcmtatccttgtattctcagttagataaggatgatgacaaacaactaaattaatttatcacatggccagaagaattattttgaattctttgagaaaagtacac

SEQ ID NO: 154548 - DNA, 201 bp, Homo sapiens
ttcatttaataatggcgcatccaggcgattttaaaagaaaagataaaacaaaaggcaaggtgagaccaaatcaatctttcaaaagaaaatattgggataawcttttaaacccagcaaccaaaggacctaaacttcactgtgattatttttttctttgcatccaaatatctgtgtgtaaaattaagaggatattgatgatca

SEQ ID NO: 154549 - DNA, 201 bp, Homo sapiens
gagtttaggagtttggagatcctgccaagcttagcggaaagtgcacatctagaagaaaaggtgcaaaagcagcccatggttccaggaaatggcagaggagygagtccttcatgtcaagttttggaaaaatgagatttatcaaatgtttaatagaagacagtttgagacagtggaaagaactctatgttgagaggcagactg

SEQ ID NO: 154550 - DNA, 201 bp, Homo sapiens
aaaaaaaacagaacagaacagaaccaaaaaaacaagaacctgctgcaatcctgtctcaagattgaagggccactgaagattcaactctcctgatgatggcrgaagaatggaatgccagtattccagaatacttcttgtgagcccagcactgtggcaggtgctaaaggaataagaaagcaaccgagataggtagggaaaaga

SEQ ID NO: 154551 - DNA, 201 bp, Homo sapiens
tatttcctttgattagtgtttattgacccatattgtgctaggcgctggatatacagtggtgagcaaacgtccaggtacctgacctccgggagcttactgtstgaggggagagttaatcaagtaaacaaacgtacagtttttgattttgtgagattttctgcagggaagcaacagagtgctataaagacaggaacaggggcc

SEQ ID NO: 154552 - DNA, 201 bp, Homo sapiens
tgactttagataatgatctttatatcacaagtgattttatagcattattcactgtctttcagcaaggacttcagttccagggaggcagaacatatgatttstgttctttatcctcacctttgcagtgagaggatgatggcaaattatgaaactctcctaataatattatgtattgcatacagtgattcaatactgtaaatc

SEQ ID NO: 154553 - DNA, 201 bp, Homo sapiens
gtactttgtaaaggcccctttcacatgccgtaataattttgagattgttgcatatatcagtcattcactccttttttattgatgtgtgatattctactgtrtgactacattacaaattacttatccattatcttgtttttgacatttggattgtttctagtttgaggctattatgaataggactgctatggacatttttgc

SEQ ID NO: 154554 - DNA, 201 bp, Homo sapiens
atccttcaatccaatcaagttgacacaatattaaccatcacacacaccttttggccacataattccacttctaagaatttaaccgatagaatatacttgcrtgagtacacaaagattacaagaagtttcattgacaaattgcttgtaataagaaatttctaaacacatacaatagttatctgcccacaaaattataggact

SEQ ID NO: 154555 - DNA, 201 bp, Homo sapiens
gtaagtaatggaggaatgcaagaggaattccaaggcccctgatttgagtgactgagtgccacattccctgagaggcggcacaggagccggagcatgtttgraagggaagaggaggacttcatatttagataggctctgttttggtgctcgtggaaaacctgaggccatgtgctctgggcacattcttatttgagctcaggt

SEQ ID NO: 154556 - DNA, 201 bp, Homo sapiens
taatggaggaatgcaagaggaattccaaggcccctgatttgagtgactgagtgccacattccctgagaggcggcacaggagccggagcatgtttggaaggraagaggaggacttcatatttagataggctctgttttggtgctcgtggaaaacctgaggccatgtgctctgggcacattcttatttgagctcaggtaagaa

SEQ ID NO: 154557 - DNA, 201 bp, Homo sapiens
tgacctagaaaaaaactgaacctactaaaatggaccaatactacacacatacacttacacacacacattcattaataacaagtcagtcctttaaattaaawtaaacaggatagagttactgctactgcttctggaattgtcccatatcagaaagagcctaaaatttctaattatctctcatttaactaaactctcaggaat

SEQ ID NO: 154558 - DNA, 201 bp, Homo sapiens
ctttaggacttgctattgtatttgacccaatcttctttctaacccaagcatttagacagcttccatctgggttttgtttaaacttttttttttaagcatcrgtacaaattaaaaggctttatatattggcaagtaactttttttctttagagatgcacatttttcttagaaatctaagaccatagaaaagagtaggcatgc

SEQ ID NO: 154559 - DNA, 201 bp, Homo sapiens
ccttttggccacataattccacttctaagaatttaaccgatagaatatacttgcatgagtacacaaagattacaagaagtttcattgacaaattgcttgtrataagaaatttctaaacacatacaatagttatctgcccacaaaattataggacttctattcagtagaatacaatgcagttattgaaaacaatgaggtaga

SEQ ID NO: 154560 - DNA, 201 bp, Homo sapiens
accacgccggcccttagtttctttattacttcatttaaaattatttgtatgtgctcaagtggtttggtgaggctcagcaatggttagccagtaaagtttaytgctgctatttttatttatttaaatcatataggaatacttttccttataaaaagccctgttttccttataaatgtaacaacctacctgtttcccttatta

SEQ ID NO: 154561 - DNA, 201 bp, Homo sapiens
ttaacaataaaaggaaaaggttagagaaggtgtctctaaggtctgttgaagccaaggaattccaaaattctatttgtcatttaagtggccatttttccctkcttttttccactgtctacaaacacacttagttgaagacttgggcaacaacaagaatacatttggctactatcacattttcaagactaatgagtctctttg

SEQ ID NO: 154562 - DNA, 201 bp, Homo sapiens
aaaattataggacttctattcagtagaatacaatgcagttattgaaaacaatgaggtagatctatagggaccaacaaaaaggtgtttacaatatacaggtrtattgtaatatacaaaagcaaaaaacaagtagctgaagagcatctacaccatggccctactacacgtgtaaaaagcaaaaagacaaatataaatatccct

SEQ ID NO: 154563 - DNA, 201 bp, Homo sapiens
aaagagcaaaacctgcaaccacagagcaggatgataaagaactcagaaactgagacgttgatcttgaactgcgtgtatgaaaggggtggggtaaaggacasaccactgtatatccaggtgattatttgggttgggtgattgtctaccagacagttgaggacagcagatgacaaactggaagtaataggtacaaaccacggt

SEQ ID NO: 154564 - DNA, 201 bp, Homo sapiens
gtctgagagaataagaagctgttgctaagacaacaattacaacaaaataggaacaaattggttgggctagtaggcgaatttatccaactccaataatggcrttaacaaaattagagagctacttttcaaatggagctaatcattaagacgggaaactaagaagaatgatccttagtcaataatgttgttcaaagttgaggc

SEQ ID NO: 154565 - DNA, 201 bp, Homo sapiens
tccatgttagctgttattgtggttattattcatttaataatggcgcatccaggcgattttaaaagaaaagataaaacaaaaggcaaggtgagaccaaatcwatctttcaaaagaaaatattgggataaacttttaaacccagcaaccaaaggacctaaacttcactgtgattatttttttctttgcatccaaatatctgtg

SEQ ID NO: 154566 - DNA, 201 bp, Homo sapiens
aatattataaagctttaatgtaagacaaaagctcttattgaagttgtaagaacagcatttttattaaggttgtttcatttagtggaaagaacaggcccacrcaaatccagaattatatctgggcagtagcaaaatttctgagcagttcagatagtaaatcaatttttaaactttctatgagaaatgtctgtaattcattca

SEQ ID NO: 154567 - DNA, 201 bp, Homo sapiens
gcattcaatccatgttagctgttattgtggttattattcatttaataatggcgcatccaggcgattttaaaagaaaagataaaacaaaaggcaaggtgagmccaaatcaatctttcaaaagaaaatattgggataaacttttaaacccagcaaccaaaggacctaaacttcactgtgattatttttttctttgcatccaaa

SEQ ID NO: 154568 - DNA, 201 bp, Homo sapiens
atgtggctatattctatatgcagaaatcctggtagtatttccatgggattcttatgatactaaattagataaggttcacataacgcactcagcagcatgtstgatatttaataagcattcaatccatgttagctgttattgtggttattattcatttaataatggcgcatccaggcgattttaaaagaaaagataaaacaa

SEQ ID NO: 154569 - DNA, 201 bp, Homo sapiens
tgtcccagagatgcagcactagcaagtaagccaaaggccacaagaataaaatgaggcatcccaaagaaacttgaacctctgacttccatactatgtgaatraatatagggtacaaattcaactaccctagtagtatgttggtaagttaaaataataaatggtccaaaattgatgaaatacctggatatcatcaggagcaaa

SEQ ID NO: 154570 - DNA, 201 bp, Homo sapiens
gagtgggccttcatccattctgacagtcattcttataagaggcaatttgaacacaaagagagacatcaaatctgtaagggcagagaggaaagaccatgtgragacaaggtgagaagagaaagagggccatcccccagccgaggagagaggccccagaatgaaacgtgccctgccggcaccttgcccttggacttctaacct

SEQ ID NO: 154571 - DNA, 201 bp, Homo sapiens
ctatacatttgtgaggggtggcaataaatgaaaagattattaatacttaataaacttaataaatgaaaggatttaaaaataaatatacaagtcctaaataragtatctaaatagatattgtcattgtccttagcaatctactctgaagagcagcacacacacacacacacatacacacactcacacacacacatcagaaaa

SEQ ID NO: 154572 - DNA, 201 bp, Homo sapiens
tcctttctaggggactaggaagttcttcaaaactggtgcttaaatagtattacctaaagaaggacttgatggaaatagaacatatgaaacccaaagattakaaaaaggtggatgatgagattcaaattacaatcagcccttcatgtatgtcggtttctgcatccatggataccatcatacgtggatttaaaatatttgggg

SEQ ID NO: 154573 - DNA, 201 bp, Homo sapiens
ggaaaaacttacatattttgcacaacaaaggaaaaagaatagaaatgacccatttccacaagacttcagagaacattttatacacatgacagtggattgtstgtatcctataaaataatgctaggaggaaaggctaactccatcccactttatttacttcacaccagtataggatttttaaaaagaatttcttcaattttt

SEQ ID NO: 154574 - DNA, 201 bp, Homo sapiens
caaaaacagacgagtgtttgtgagaacagagaggtgtcttatttttcatctaagtgggttcaggtggctaggaaagttctagcacacgagagatgctctayacatttgtgaggggtggcaataaatgaaaagattattaatacttaataaacttaataaatgaaaggatttaaaaataaatatacaagtcctaaataaagt

SEQ ID NO: 154575 - DNA, 201 bp, Homo sapiens
cagggataccagcttgcagacagttgtaatttgatgtgctaaggaccttggccagaatgctgcagcgctgaaaagctaaaaagaatgattatgagatatakaaagaaaggatcaaaaggtggctggaagcaagtgttggggagaggagatggtggggggatatgtcaaagctgcatgccggaatggcaggaagaagtgtcc

SEQ ID NO: 154576 - DNA, 201 bp, Homo sapiens
aagctttgctaggtgtgtttgagataggaaactggagactgtataaatcaaaaggatagtttaaatcaatttgtgtctctcagttttgtacataaattagmccagtatcacaaaaatatgagggagcatatgtggtaaacagtgtgatttgtgaaagccctggattctaatccagaatctaatgtttactgggtaatcttg

SEQ ID NO: 154577 - DNA, 201 bp, Homo sapiens
taacaaaaacagacgagtgtttgtgagaacagagaggtgtcttatttttcatctaagtgggttcaggtggctaggaaagttctagcacacgagagatgctmtatacatttgtgaggggtggcaataaatgaaaagattattaatacttaataaacttaataaatgaaaggatttaaaaataaatatacaagtcctaaataa

SEQ ID NO: 154578 - DNA, 201 bp, Homo sapiens
ggcaaatctgtgacctagacaagttattaacctctctgagccacatttgctcctctaaagtagggacagtgatgatgcatgcgtggtaaggttaagagcasatgagttcatgtatatataaagggcttggcctggcatgctgctcatgcctgtgccgttgccttcctcccaacgagcaatgcctgctgtagttcagaggat

SEQ ID NO: 154579 - DNA, 201 bp, Homo sapiens
ttacgaggctggtaagtgttagaagcaacactggaagtcagatgtttttctgaacatgtgtttatccctctgcatcacaaaactcacatgatagacacttytgtcttcgctaacaaaaacagacgagtgtttgtgagaacagagaggtgtcttatttttcatctaagtgggttcaggtggctaggaaagttctagcacacg

SEQ ID NO: 154580 - DNA, 201 bp, Homo sapiens
ggacctctaaggcttcacatacggggtgtttctgtgtgccagtcacaggctacagagcacagagacaaagagccttcccttaaggagcttgcaaatgctakagaccagtggcacaaaaggatttttagagcaacagaagctttgatagatcgtgtggtgtaaaggttagaagcacaaactctatggcccgaccaccaagat

SEQ ID NO: 154581 - DNA, 201 bp, Homo sapiens
tgtttactttcattttattttctccacagccctgtgaggtaggaaggaccgatattattttttctcattttacagttgaagaaactaagacttagatgaartttcttccctctggttacgaggctggtaagtgttagaagcaacactggaagtcagatgtttttctgaacatgtgtttatccctctgcatcacaaaactca

SEQ ID NO: 154582 - DNA, 201 bp, Homo sapiens
tggaatactgttcagccattaaaaagaataagatcatgtcctttgaagcaatgtggatgaaactgaatgccattattttaagtgaaataagtcagacatakaaagacaaatactgcatgttctcacttataagtgggagctaaataatgtgtgcacatggacttagagtgtgtaatgatggacaatggagactcggagtgg

SEQ ID NO: 154583 - DNA, 201 bp, Homo sapiens
ttactctttttctgatctatgaaatatgcagtcagcacttttgtcagagtagaggaaagatcaagaaggaaggtgtatgtctctgtgtgttttgagcccasagacactgtcaggggtttgctcttgtttctactgctaaactccatctctggacctctaaggcttcacatacggggtgtttctgtgtgccagtcacaggct

SEQ ID NO: 154584 - DNA, 201 bp, Homo sapiens
gcccacattctgaaatgtggaaatgtatcgggtatttttattagtagtattactctttttctgatctatgaaatatgcagtcagcacttttgtcagagtakaggaaagatcaagaaggaaggtgtatgtctctgtgtgttttgagcccagagacactgtcaggggtttgctcttgtttctactgctaaactccatctctgg

SEQ ID NO: 154585 - DNA, 201 bp, Homo sapiens
gttcagctctgagccaggcatcaagtctgccatttactcagtgcattagtgccttgaatttgcataacactttgaaatttatgaggcattttcataatgtktactttcattttattttctccacagccctgtgaggtaggaaggaccgatattattttttctcattttacagttgaagaaactaagacttagatgaagttt

SEQ ID NO: 154586 - DNA, 201 bp, Homo sapiens
tgcaatatcttcctattattgataaattttccttttattctgttaatggtgtctttggataataaaaaaattcttaattttaatgtagttgactttaccasattttccccttattgctagttcttttatatcctgtttgagaaactgttgcctactccaagtttatgaagatattaccctatgttttcttctaaaagcttt

SEQ ID NO: 154587 - DNA, 201 bp, Homo sapiens
tcagaaattgctgaatacccaatgggaagcctcagcagatgttcagcattctctctttgaactgcatgcacctttctggttctttgtcttgagaactctakacaccttgttcatggattctcatatttgtcccttaaactcaaagagtcttctgggctctattgtagttttctctccttgtgttacaacctgggaactcaa

SEQ ID NO: 154588 - DNA, 201 bp, Homo sapiens
tttatttaatgcacttttatcttgttttctctggccatttttcttacctaatctgctagctttcttgccatttaaaaatgttcatcccaggacatatagawaagcaaatatgaagtacattaaatttaatatttttccttaaccttcatggtaacttgaaatggactatatctttctgcagcaataggagcaatatagcta

SEQ ID NO: 154589 - DNA, 201 bp, Homo sapiens
ccaacaaaaaggtgtttacaatatacaggtatattgtaatatacaaaagcaaaaaacaagtagctgaagagcatctacaccatggccctactacacgtgtraaaagcaaaaagacaaatataaatatccctgtaaatgcaacataaactttcagaatgttagataagcagtccgttatataagcagcttcctacatagcat

SEQ ID NO: 154590 - DNA, 201 bp, Homo sapiens
caggtaaagtgtgtgatgatagtggaggcattcctgttgtaccctgatactgtttatggagctattttcaaaggatatgaaactaattttaaatatgcctstggtatgttgcaaagctgtatctacttctggcggaagtcaagtgtaaagggtaagagtgcaggctctcgtttcaaactacccaaactagaatccttgctt

SEQ ID NO: 154591 - DNA, 201 bp, Homo sapiens
aggctgaggcaaagaatcacttgaacccaggaggcagaggttgcagtgagccaaggttgcaccactgcacttcagcctgagcaatagagcaaaaccctgtscaccccccagccccgcaaaaaaagaatcaataaatccagcccacactcaagtggatacacaagggcatgaagaacaggaggtgcagaccactgagagcca

SEQ ID NO: 154592 - DNA, 201 bp, Homo sapiens
ttgtaatatacaaaagcaaaaaacaagtagctgaagagcatctacaccatggccctactacacgtgtaaaaagcaaaaagacaaatataaatatccctgtraatgcaacataaactttcagaatgttagataagcagtccgttatataagcagcttcctacatagcattcagaaagctttcattgcatatacaaggatttt

SEQ ID NO: 154593 - DNA, 201 bp, Homo sapiens
aaagtgtgtgatgatagtggaggcattcctgttgtaccctgatactgtttatggagctattttcaaaggatatgaaactaattttaaatatgcctctggtrtgttgcaaagctgtatctacttctggcggaagtcaagtgtaaagggtaagagtgcaggctctcgtttcaaactacccaaactagaatccttgcttgtccc

SEQ ID NO: 154594 - DNA, 201 bp, Homo sapiens
tattagggcttaacacacacacacacacacacacacacacagagagagagagagagaatcaaaaaaggaagactagctagtaaagagtattaaaatataaractgcataaattcgtggccaggcgcggtggctcacgcctgtaatcctagcactttgggaagctgaggcgggtggatcacaaggtcaggagatcgagacca

SEQ ID NO: 154595 - DNA, 201 bp, Homo sapiens
tctacaccatggccctactacacgtgtaaaaagcaaaaagacaaatataaatatccctgtaaatgcaacataaactttcagaatgttagataagcagtccsttatataagcagcttcctacatagcattcagaaagctttcattgcatatacaaggatttttgtatttgtcttcttgcttttaaagacatagggggtgtga

SEQ ID NO: 154596 - DNA, 201 bp, Homo sapiens
tacgctcaaatgtcactcagaaaatcttccccaaataacttatctaaaatacctccctcctccctcactctctagctcatcaccctaatttatcttcttcrtttcacttcatggcacaataagaccgtatacatttgcttatttgctaattgtttgtatgctcctccccaactctctaatgtaagctcagcaagaacagga

SEQ ID NO: 154597 - DNA, 201 bp, Homo sapiens
ttgttttgactggctgttgttcaaatttttcttcggtccttttcatctcttcatcatttatctgtgaaagtttaatacattctgctggtatcacccttatwggatttccactccattttctgttatctttgcctaacacagtttatttaggttttggctttttttccccagttattgaagtggttgtaaacatccacattg

SEQ ID NO: 154598 - DNA, 201 bp, Homo sapiens
acccaccccccagtccctggctccatttccctgccataaagagtacaggctcaaagcccaggcttttctataccaaattttcatggtaatgccaggtttcmtaataagtgacaccaagcttaatcaggccagaaacacaggggatgacacattttatttcatgaccctctcccttcccatcattttccttgttacaaataa

SEQ ID NO: 154599 - DNA, 201 bp, Homo sapiens
tatgcttttggccttgtaaaaagaaacccttggctctttcttaccaatatctttttaagtcaaaagcctttaacatgtaaaattcagcctgtaaccaattmtaatttcccaatctacttcttaacttgagaaactagaaaaaatgcaataatccaactctgctattagagaatgtgaatataagaaaaagggagcctcctg

SEQ ID NO: 154600 - DNA, 201 bp, Homo sapiens
agaaatataatgataacactgaccaaaatggtgaagatcagaggggaacagattttaagggaaatataacaaattctattttagacactaaagtatcaagrtcaaactatttagaaagaaattagatacgataaactgaagcttaacttaaggctacgctcaaatgtcactcagaaaatcttccccaaataacttatctaa

SEQ ID NO: 154601 - DNA, 201 bp, Homo sapiens
agcaaaggcttatatagttaaaacatatccccctaaatttcattccgccttttcaagtatgatttgaataaatttgagaatgacttaagttttcgttaagygggattccctcctcttttcttgcataggccagagaatattgtcatctccaccaggctaaggctatccataagcaagagacaaacattatcattagcagaa

SEQ ID NO: 154602 - DNA, 201 bp, Homo sapiens
ccgatgggttgctaggaaataatcccatagcctctttcatacctctttgctcattttctgcccttggtaaaatattcattatgaactcttataaattatamaaccttttttttccccaagaaaagtgtggactttttttaaacagatttagcactgataggactgcttgccttaggcagcactaccagtaattaaatctgc

SEQ ID NO: 154603 - DNA, 201 bp, Homo sapiens
gtcttttagcagctcagtagaaaccattagtaacaaaccctgaggtgcgttgttctggcacagggtgtgcataaaacaaatgtttgttgagcaagtgacamaagaaggaagaaaagaaggaagagagggaaggacggaggctgtactgttcaaagacctttcttcattatctggcccacattctgaaatgtggaaatgtat

SEQ ID NO: 154604 - DNA, 201 bp, Homo sapiens
taatgtctacctggtggtatgctcacaatacattttagcaatttttttgttgcttttggtaatcacctaatatcacttggctctgtcttttagcagctcaktagaaaccattagtaacaaaccctgaggtgcgttgttctggcacagggtgtgcataaaacaaatgtttgttgagcaagtgacaaaagaaggaagaaaaga

SEQ ID NO: 154605 - DNA, 201 bp, Homo sapiens
tatctacttctggcggaagtcaagtgtaaagggtaagagtgcaggctctcgtttcaaactacccaaactagaatccttgcttgtcccttatgagtcctatsaccttcacctttctcaccttatatgtaaaatggagataataatctttttatctcatagagttttaataaggattaagtgagataatatctgccaagccct

SEQ ID NO: 154606 - DNA, 201 bp, Homo sapiens
agcaagagaagatcctctaaagtacagtgcctggctggggaagagtctcacgcctacaatttttggaactgtcttaaaggcaatgctctttcctttagatwttattcctagtgtatttagcattgaatattatttttgtagttggcttgtgtatgctttcagctacaagtaaccaaaaacttgaacttatacccaaaaagg

SEQ ID NO: 154607 - DNA, 201 bp, Homo sapiens
tttaattttacaaatgaattgaataaagccctgggaacacctgctttcaggtaaagtgtgtgatgatagtggaggcattcctgttgtaccctgatactgtktatggagctattttcaaaggatatgaaactaattttaaatatgcctctggtatgttgcaaagctgtatctacttctggcggaagtcaagtgtaaagggta

SEQ ID NO: 154608 - DNA, 201 bp, Homo sapiens
tacaatagcgttgcagacattaagtacctatctttctgtctctcacataatagacactcaacaagatgtgctctggttgttttctcctaagtgcccaagtkgtggggagcctcttctacacctaaaatgaactagacaattaacaattttcctagtaaactccattcaaccaagtttatgggggatagtctttacaagctt

SEQ ID NO: 154609 - DNA, 201 bp, Homo sapiens
gccctggagaaggtgctctggacctaccaatgggtcatgtgggaaaggaaacaaagaagtaaatggccccaaaatttcagggtctggatgaccaagaaatrtaatgataacactgaccaaaatggtgaagatcagaggggaacagattttaagggaaatataacaaattctattttagacactaaagtatcaaggtcaaac

SEQ ID NO: 154610 - DNA, 201 bp, Homo sapiens
actgagacgttgatcttgaactgcgtgtatgaaaggggtggggtaaaggacagaccactgtatatccaggtgattatttgggttgggtgattgtctaccasacagttgaggacagcagatgacaaactggaagtaataggtacaaaccacggtgacaggaactgatagcaagggtgctgggctattcaaagaaacctcatt

SEQ ID NO: 154611 - DNA, 201 bp, Homo sapiens
tcgaacattattcccctggcagccatcaaaggacatagagtatgataaatgaataaacctttccttttaagccactgtgacttggcaattgtttgttattrcaacacaacctagtctattctgactatgtctcacatgttcaggaatgcctcctgagtactgacaacaatgccaggtgcacagcatatgctccataagtgt

SEQ ID NO: 154612 - DNA, 201 bp, Homo sapiens
agaaaacctgatgcagggtggtcccgtggtgcattaattcagaggcttggtgacttcatccttggggtgtgttcccctcagtcattcttgaagtgagttgrttttgtcctcagataaggagttttgcctccagatgatctgcttgtggccaccaggtgatctttactctcctcaagaaccagtgtaggtcaagaaccagtc

SEQ ID NO: 154613 - DNA, 201 bp, Homo sapiens
tacagcccacaggctgcgagccaattaaacctcttttctttatagattacccagtctcggttatgtctttatagcagtgtgagaacaaattaatacaattygtatatttttctgtctttatatgagcaagatacattatttacctactaataattggcaagttataagttttcctcacagtattacatttcagaggtgtag

SEQ ID NO: 154614 - DNA, 201 bp, Homo sapiens
caagatagttgcagtcatacttatttcattttgattttctatttcatggctgagtattcatgaattgcttcgctccttacacacacctgccgtgtcccatstgtgtctcctaaggagtaagtaaactgcaatgggctgagagatcaaaagtattaaaccttctaatccaaccttttactacttttccatgccattaactct

SEQ ID NO: 154615 - DNA, 201 bp, Homo sapiens
ccccttcgctctgttattcccctgtctggaattactatcagggtaacaagttggcaattaaatccaaaaccacagttatgtaacctgtaaactatctatakatgtgcaatattgatgtgattgtgcccagaaactgccataaacttcaatggaaatgtatgtacaggacatccagttttcggattttctcaaacgtttgga

SEQ ID NO: 154616 - DNA, 201 bp, Homo sapiens
tggtcattttccaatgctacccaccccccagtccctggctccatttccctgccataaagagtacaggctcaaagcccaggcttttctataccaaattttcrtggtaatgccaggtttcctaataagtgacaccaagcttaatcaggccagaaacacaggggatgacacattttatttcatgaccctctcccttcccatcat

SEQ ID NO: 154617 - DNA, 201 bp, Homo sapiens
taaaattttgctgcaccatgtagagtagattcctagtaatttagggaaattgaaattatctttttatggagagagaaaataaaaaatattccagaagcctraaattttattcctaagaaacacaaaacttgctttatatgaaatccactataaagaataaaggcaatttcctcaaaagtattcctaaaactatataaggaa

SEQ ID NO: 154618 - DNA, 201 bp, Homo sapiens
aaaagtggtcaaagaattgcaaaccaggaaataacactgaactggaaggtgagacaagagtggtcagaaagatggtgggaatagtaaaggctctggtgatraccaagtttgatgtgaagtggagagctcctctgttaaaaacaaagtggtcaaggaactgagagttgattggatgtcagagtcactaaatgtaatgacagg

SEQ ID NO: 154619 - DNA, 201 bp, Homo sapiens
actcacagttggccagcatcttcctgtctgcatcatggttttcttatcccatcttcttactgatctatttttgtatttctaggtagatggtgtccttctayagaactgttttaggagcttgagacctgcagccacacaaacaaagagaggccttccccaaaagcatatcttgccccacccacctaatttttccccaggcca

SEQ ID NO: 154620 - DNA, 201 bp, Homo sapiens
ccgtgattttctcaggttttcgttcaatcagctaaaagtcactgcctcccaaacagctaagaactggccccctatataccacaagttgatcttccattctsgtcttttgtttctactcacagttggccagcatcttcctgtctgcatcatggttttcttatcccatcttcttactgatctatttttgtatttctaggtaga

SEQ ID NO: 154621 - DNA, 201 bp, Homo sapiens
gagcaatatatatgttattggttctggggaaaaaaacatatttggtcatatgtagatgaccatgcgctttctttgtctcctcccaagccaagtccttcccwaccacatcctatccaaacaggaaacagtagactaatgagactctgccagttctaacttgcaagtatctctgtgaccttattgtgacctctgtattgatac

SEQ ID NO: 154622 - DNA, 201 bp, Homo sapiens
gaggctggtgtttaatcagcagcatgaatccagccataaattataaaataaactcctcattcttttataccattgaccacacagaagctatgcagtttctrcagttttatgtagacttctacagaccagttggttttcaaattggcccagttaaacttctctgttcctcctcttacaatgtagtacataaaatcctttcac

SEQ ID NO: 154623 - DNA, 201 bp, Homo sapiens
aaaaaaggcagggggtaatgttagctgttagttatgagcaatatatatgttattggttctggggaaaaaaacatatttggtcatatgtagatgaccatgcrctttctttgtctcctcccaagccaagtccttcccaaccacatcctatccaaacaggaaacagtagactaatgagactctgccagttctaacttgcaagta

SEQ ID NO: 154624 - DNA, 201 bp, Homo sapiens
ttgtcttccttgtgatggtcattttccaatgctacccaccccccagtccctggctccatttccctgccataaagagtacaggctcaaagcccaggcttttmtataccaaattttcatggtaatgccaggtttcctaataagtgacaccaagcttaatcaggccagaaacacaggggatgacacattttatttcatgaccct

SEQ ID NO: 154625 - DNA, 201 bp, Homo sapiens
attactactaaggattttattttcctctacttaagacatacataacgttgatcactttcaggctattttcacaatgacagagaaatatattatattagaawccttattttttatgtcccttggttgcctgtcatacattactctgcatgtttttcatcctgatcaagatacaatttatagaactgttggtttgtacttcaa

SEQ ID NO: 154626 - DNA, 201 bp, Homo sapiens
ttctcaccttatatgtaaaatggagataataatctttttatctcatagagttttaataaggattaagtgagataatatctgccaagcccttgcctaatgtmtacctggtggtatgctcacaatacattttagcaatttttttgttgcttttggtaatcacctaatatcacttggctctgtcttttagcagctcagtagaaa

SEQ ID NO: 154627 - DNA, 201 bp, Homo sapiens
atgctttataacctttgggggcactgatctccaatgtgggttgctcatatcccaaggggtatgcaagatcatctactagggagaaatgattagaacttccrtttgttctaagagcaaagtagatgtgattagacaattcagagatgggggggtgaatcttgagagcatggttagctatatacacaactttggaaacccaca

SEQ ID NO: 154628 - DNA, 201 bp, Homo sapiens
ataagcagcttcctacatagcattcagaaagctttcattgcatatacaaggatttttgtatttgtcttcttgcttttaaagacatagggggtgtgactaarggtgaagtgacccttttgatttttgccttacactctctcagtattggaaacgtctttcatgatgaatatgattagtgttagaattcacaaaaggaagaat

SEQ ID NO: 154629 - DNA, 201 bp, Homo sapiens
cactctccttttgacccatcccccaaaaagcgtatctgtagtgtctgcctgagactgaaatgacaagtccccaggccaacccgagatatctaccaactggracattaggaaatcatgtcaatttccagaatcttctgaaactctgcaagagctttttttttttttttttttaaagaaagtaataattaagtcttgttttct

SEQ ID NO: 154630 - DNA, 201 bp, Homo sapiens
ctgtcttgaattcaagggctcaagcaatcctcccacctcagtctcttgagtagctgggactacaggcacatgcaaccacacccagctaattaaaaaaaaaagtagagatgaggtcttgctgtattctcattgtatctttaataatgctatcatctgccagattccctaataaaaacctgagtgttgtccttgcttcttgct

SEQ ID NO: 154631 - DNA, 201 bp, Homo sapiens
accaactggaacattaggaaatcatgtcaatttccagaatcttctgaaactctgcaagagctttttttttttttttttttaaagaaagtaataattaagtmttgttttcttatctccagtaatcatcaaaaacttagccagggacaaccagaaatcctaaaataattcatgtgccttaaaatacccaactttccttcactt

SEQ ID NO: 154632 - DNA, 201 bp, Homo sapiens
ggaaaataagactattttaaattatttaccataaattgtgttgaatcttttgagtgtttcagttcagaggatttctacataattctaacaatatatggtaragttttcgaagcctagatacatattttaatgtcattgtttcaaatgggtaccccaattgatggtttacaagttctgatgtgctggaccactggcaagtct

SEQ ID NO: 154633 - DNA, 201 bp, Homo sapiens
tagatggaagctgctccactgggcttgctccctgagtgattaattcgaacattattcccctggcagccatcaaaggacatagagtatgataaatgaataarcctttccttttaagccactgtgacttggcaattgtttgttattgcaacacaacctagtctattctgactatgtctcacatgttcaggaatgcctcctgag

SEQ ID NO: 154634 - DNA, 201 bp, Homo sapiens
caaatgggtaccccaattgatggtttacaagttctgatgtgctggaccactggcaagtctccactttacttttactccactttacagggtaaaattgtaamactctaataaaacaaaatatgtagtaatctatagaaattgtgctttaactgcactcctaataacaggctttattcttttttcatgaaaaggaataatttt

SEQ ID NO: 154635 - DNA, 201 bp, Homo sapiens
aaatgggtaccccaattgatggtttacaagttctgatgtgctggaccactggcaagtctccactttacttttactccactttacagggtaaaattgtaaawctctaataaaacaaaatatgtagtaatctatagaaattgtgctttaactgcactcctaataacaggctttattcttttttcatgaaaaggaataatttta

SEQ ID NO: 154636 - DNA, 201 bp, Homo sapiens
aatcatctgctccactgtgtagtagtgggtgatacatcctaaaactgtcctgagagttcaggggtggaagccactaatgaggatgaggctggtgagagaargggataggaggctacctgagctgggccttgaggacatagacaagcaaaaatagagctgagaaaagatttctgccagaaggaacaacattcaatcacacac

SEQ ID NO: 154637 - DNA, 201 bp, Homo sapiens
ttatgattacactggctgtgtccagataagcttcccatccacagatccttaactgaatcacatctgcaaagtccctttgtcatgaaaggtcccgtattcayaggctgattaggatgtggacatgttgggggccattattcaatctgccgtaattgtcatgtcagcttctgtaacctacaggtatcttcctctttattacag

SEQ ID NO: 154638 - DNA, 201 bp, Homo sapiens
agaaggaaataaataaaatcatttctcagtgtgattagtgctatgagaaaaataagcagggttctgcaggaaatattttgaaagggagggaaataacctakacagggtgaatagggaaagcctttctacagaggtgactttccaactgagagctgaagaatgaagagccagtcatgctggctgttaagacctgggtaacag

SEQ ID NO: 154639 - DNA, 201 bp, Homo sapiens
tgtgcttagtaccacagagagcaagaaagataagacctctctgcagttatattctagtgcaatggaggtagagtggggtgaaaaagacaacagagaaggarataaataaaatcatttctcagtgtgattagtgctatgagaaaaataagcagggttctgcaggaaatattttgaaagggagggaaataacctagacagggt

SEQ ID NO: 154640 - DNA, 201 bp, Homo sapiens
gtgtctggagcacgtttttaaagatggaaagtagaagctgcctgatgctcaaggcctaagcttagggattggaaaaacatcatttctgctgtatccgactrggtaagcaagttactaggcctgcagagattcgaggggaagggaattaaactctaactcttaatgtgttatcatttttttctagcacaggagtgaataaac

SEQ ID NO: 154641 - DNA, 201 bp, Homo sapiens
ctcaagtgatccgcccgcctcggcctcccaaagtgctgggattgcagacgtgagccacggcgtctggcccaatgtaaccatcttaatgaaaaccccatttycctccacacccctgccacacctccatcacaacctcctcaccaaactctgctttttttccgccataatacttgtcatcttctaacatgttctaccatttac

SEQ ID NO: 154642 - DNA, 201 bp, Homo sapiens
ccaggcagtgtgcttagtaccacagagagcaagaaagataagacctctctgcagttatattctagtgcaatggaggtagagtggggtgaaaaagacaacasagaaggaaataaataaaatcatttctcagtgtgattagtgctatgagaaaaataagcagggttctgcaggaaatattttgaaagggagggaaataaccta

SEQ ID NO: 154643 - DNA, 201 bp, Homo sapiens
acacctaacttactagaaacacgttcaatgctcagaggaaagtacaaatgctcacatccctcctttagtcagtagctgcagcttacgcaattaagactagyattcctattttgcaaagctatttaaaacctggcaataattaggtatttactattgccagtctgacttcaacctctaaaggtcttccaaaaatcttctctg

SEQ ID NO: 154644 - DNA, 201 bp, Homo sapiens
tacttattcaagaattatttccttaacatcttctatgcgccaggcagtgtgcttagtaccacagagagcaagaaagataagacctctctgcagttatattmtagtgcaatggaggtagagtggggtgaaaaagacaacagagaaggaaataaataaaatcatttctcagtgtgattagtgctatgagaaaaataagcaggg

SEQ ID NO: 154645 - DNA, 201 bp, Homo sapiens
cctcaagtgatccgcccgcctcggcctcccaaagtgctgggattgcagacgtgagccacggcgtctggcccaatgtaaccatcttaatgaaaaccccattyccctccacacccctgccacacctccatcacaacctcctcaccaaactctgctttttttccgccataatacttgtcatcttctaacatgttctaccattta

SEQ ID NO: 154646 - DNA, 201 bp, Homo sapiens
gttgtttagaagaccgctattaaattagaagcacatttacttattcaagaattatttccttaacatcttctatgcgccaggcagtgtgcttagtaccacasagagcaagaaagataagacctctctgcagttatattctagtgcaatggaggtagagtggggtgaaaaagacaacagagaaggaaataaataaaatcattt

SEQ ID NO: 154647 - DNA, 201 bp, Homo sapiens
tgctcttgtctgtttttttccccagcctgagaatggctcaaagttttcttcatggggccctggctcttctattctgcctgggcggcatcccttaccttccrctcacggccctgcactcagggcattggtgtgcctgattctatgaactgtttgaagcttgtctgtttacaccaatgagcactctctgctctgttaaaataa

SEQ ID NO: 154648 - DNA, 201 bp, Homo sapiens
gaatccactaaaatgggaagcccctttttccttggaaacaaaaagaagggaagagagggaggtgatgtaaacatatcagaaaactcccaaagtctcaactktataatattcataatggaagtcatcgaccttaaggatataaagaattattatatgctattaaggacaacctgatacagaatacttataaagaggagcacc

SEQ ID NO: 154649 - DNA, 201 bp, Homo sapiens
cacacacacacacacacacacgaaagagagaagaggtgagaacaaaaagcacatgtaatgagaaggtactcaagacctcattcccagattacatggctcasaagcatccctgggtaggatgagaagttagtccatcgaactccaaatccgtgttccttttgttatatcatgctatttcctgtaggaagaaattgactaaga

SEQ ID NO: 154650 - DNA, 201 bp, Homo sapiens
tttcttacaactacatgtgactcaacagttatttcaattaaaattaaagtttgtttttttaaaagggacacatttaataaaatgtttgtaacacactaagrtgttcacaaacacataataactgtgatgccactaaatgtcttctctcttttcttttctcatggtttgttttttatttattactactaaggattttatttt

SEQ ID NO: 154651 - DNA, 201 bp, Homo sapiens
ttagaaactaccaagatatccttcaacgagtaaatggctaaacaaactttggcacatccataccacagaatatatcaaaaataaaaagaaaccaaccacaytgacacacacagcaacctggaagaatctccagagaagtatgccgaggaaaaaagccaatccttaaaggctctatgctttatgattcatttgtataacatt

SEQ ID NO: 154652 - DNA, 201 bp, Homo sapiens
ctttattcatgatagtcaaaacttagaaactaccaagatatccttcaacgagtaaatggctaaacaaactttggcacatccataccacagaatatatcaaraataaaaagaaaccaaccacattgacacacacagcaacctggaagaatctccagagaagtatgccgaggaaaaaagccaatccttaaaggctctatgctt

SEQ ID NO: 154653 - DNA, 201 bp, Homo sapiens
ctatacgccttacacttctactgtatctcatatgacatggagcttggtactgaatacttaacaaaatttttaagtatacttattattggttgactaattgrccagtaagtttcacttgggacatctttttttgaaaacagtttggcagtttctcaaacaattaagcctacaactattatataacccagcaatgtcacttct

SEQ ID NO: 154654 - DNA, 201 bp, Homo sapiens
ttaactgaatcacatctgcaaagtccctttgtcatgaaaggtcccgtattcacaggctgattaggatgtggacatgttgggggccattattcaatctgccrtaattgtcatgtcagcttctgtaacctacaggtatcttcctctttattacaggcacaagcctcacttattaacttcctcttcattttttttccttctccc

SEQ ID NO: 154655 - DNA, 201 bp, Homo sapiens
gtgtgctttcctccccgtaccttgaggaacagctgagaaaaagcataagaacttgtttgaattcatttccttttgctgctgtaacaaatcaccaaaaactytgtggcttaaaacaacacaaatgtatgcatcttacaattctaaaggtcagagttcagatgggcctcaccagactaaaatcagggtatcagcaaggctgcg

SEQ ID NO: 154656 - DNA, 201 bp, Homo sapiens
gagagagtaaagttcctactgagatacctagaaaagaagtattttccaaatccctttgaccaaaaaaaacaaaaagactttgagcaacagatagattcttscagatctatgcatggctgaagaaggtctattagcctcctgccattttcccttttttcctgtgtgttggcatttttctgaaatgcagaatcataactgctc

SEQ ID NO: 154657 - DNA, 201 bp, Homo sapiens
gaataaaaatagcctaaaagcaaatgtacttggaaacaggaaagaatcagtatgcaaagtccacaaacctctgagcaaaataatgttgatccaaccagagwtttcaaacattgtatattcaagttgctagaaaaaaataattaaaagatgctaagccacatacttcttaatcttttattagcaaaggcttatatagttaaa

SEQ ID NO: 154658 - DNA, 201 bp, Homo sapiens
tttcctttagtcttgttctggaagggcacagctcaaagctcctccttctccaagaaagtgttttccatcctttcccacatcacagcacacatggaagaagrtggtatttgtgtagcacacacagtggacaagactgctctgctggaggtgggaaggcaatgagcttagagatttgggctggcccaggccctgactggtaga

SEQ ID NO: 154659 - DNA, 201 bp, Homo sapiens
cctgtgccgttgccttcctcccaacgagcaatgcctgctgtagttcagaggatggccactctgaaactgagagaagaaaccatcttagatcttgaagaatmtatatgaatttttcaaacagaaggatgagggctgtttcaagcttgggattagaagtggcctattcaggggactttcagaatttgtagagaattctgagtt

SEQ ID NO: 154660 - DNA, 201 bp, Homo sapiens
cctatctaaatgaatagaccattgaatcttgcaagagccaagttacttgttcaagattctactaccaattgtggaagagaacaagttctggcagggaggtstctgatttctagagcagctctccctttctcttcagaccacattagactattgacagtccacagttggtggccactccaaaatgtgaataggaatttaagc

SEQ ID NO: 154661 - DNA, 201 bp, Homo sapiens
taagtaacatgcactaaatgggaaataggaatttgaagtcctatttgtttgaagtccagaaaaatatttgtttctggagagaaataataaaacaggtgggmggttgagaatgaacatacatttcatgtaaccaataccttgttaaggtcgtcaactgaaaattataagagctgcctctgaaaacatccataaagtattgca

SEQ ID NO: 154662 - DNA, 201 bp, Homo sapiens
atagtggtgaaaattgtcatttattatgacgatgatgattgtgattgctattgtcgttattaaagtccagatctgatgcttggctatttttttttttttttgcagtgtagttataaacaatgaatacagggttttaaaacaaaggatcaaggtagtagctaagtatgacagctaaaaattcctatttctaaatagctctca

SEQ ID NO: 154663 - DNA, 201 bp, Homo sapiens
tttttactattattgtccaattccacatcccacttttctaaaaaatcttgcattaaaatagctaaacatggcaatagtggtgacctgggttttaggtctgrccctgcaaatcaactagcactataacctagttaccctgtctgtaaaggaagcatttgaagcatttcaagctccttcctctcttaaatccctatgaaatga

SEQ ID NO: 154664 - DNA, 201 bp, Homo sapiens
tcagcaaaaaggacacttttatatttttgtagtgaaaaaccaagctggtaaaggggttgaaaaccactgggaatgtgggagtgaagaggggttgaccctakaaaagaacagggtcttgaatagtgtcttttgtatatcaagactcagtaacagtttactgaattgcaaaagttatccacttttaaataactgcaaagcttt

SEQ ID NO: 154665 - DNA, 201 bp, Homo sapiens
ctgaaagcctttctattattttatcacccacttttctaatataatagttttcttggttgtcagttgtaatatacatacctgctaaaagctctattcttggktgtactttcactgcattttagcagtactaaaattgacttcatgttctccagcatttcagagtgagttggagcatttgtgtttaaggcacggtgctagaca

SEQ ID NO: 154666 - DNA, 201 bp, Homo sapiens
atgacccatgtacaaacattttgaacaatttaacataattttattgaagggatagccatttgagagcttgacctttttatgaattccttgtgaagtcatakaaatctgagtacctttcaaattttcttcttgaaggaaataacttgggaagtgccaaggaaattaacggagaaagcatttaacataaactgaaatcattaa

SEQ ID NO: 154667 - DNA, 201 bp, Homo sapiens
atttcattttatcttcacaaaatccctataaatgtttccccattttatatattggaaaagttacaattaagtgagttaaattaatttccatagctcatggmtagtcaggtgtaaatttgggttttgagcttaggtcttgactccaaacttgcctaaggttatcttaagtcaatgtcagcaaaaaggacacttttatatttt

SEQ ID NO: 154668 - DNA, 201 bp, Homo sapiens
acagccacctcagtaccggatgccctctagcccgcctgtaaactcctgatccctcctgtggagatgtatgtggaccaagcgtcagtggtgtttgtacccasatgtgctgtgccagttttgctagttcatataattattcaatgataattatgtaaaccaatgatatatgggtgtgtagaagagaactgctatttctattaa

SEQ ID NO: 154669 - DNA, 201 bp, Homo sapiens
aacatcacagcagggtgagtctgggttgaaagtgggagacactggaggcagagacactggtttagaggcagacatgataatctcactgtgggcaattttargcacccaaccatggtaatggccaaggaagaaacatgctggagacgccctggagaaggtgctctggacctaccaatgggtcatgtgggaaaggaaacaaag

SEQ ID NO: 154670 - DNA, 201 bp, Homo sapiens
attctgttaatggtgtctttggataataaaaaaattcttaattttaatgtagttgactttaccagattttccccttattgctagttcttttatatcctgtktgagaaactgttgcctactccaagtttatgaagatattaccctatgttttcttctaaaagctttatcatttaccaatctccagtacttctacaatctatc

SEQ ID NO: 154671 - DNA, 201 bp, Homo sapiens
atgtaatgtgcatcgcaagcttcccagtattttcaaagaagaaagtccataatcccttttagtaaatattggtggacaatgaggatgaaatatggtttatmgtataaacagttctgccattattagagcataggagggcttcagagtacgcccactcattgccacaagctgatgatggagacaaatacctgtgggacccca

SEQ ID NO: 154672 - DNA, 201 bp, Homo sapiens
tattattgataaattttccttttattctgttaatggtgtctttggataataaaaaaattcttaattttaatgtagttgactttaccagattttccccttaktgctagttcttttatatcctgtttgagaaactgttgcctactccaagtttatgaagatattaccctatgttttcttctaaaagctttatcatttaccaat

SEQ ID NO: 154673 - DNA, 201 bp, Homo sapiens
ggtacaaagtcaagaaatacatgggttaactcaaggaaaacagaatcagagtgctcttcttttgcaagaattgtcttttttctaaaactatttaatcactktgtggtttcttctatcttcttttgctctgttctcctgctgaccaggagaactgtcttgagccccctttctggtctgcagcagcacacccaacccaccaca

SEQ ID NO: 154674 - DNA, 201 bp, Homo sapiens
gtggggtattgaagtcccccactatcattgtgtggctgtcaagtctttttggagaactagaagttcttgttctatgtatctgggtgctccaattttaggtrtgtatatttttagaataattaagtcttcttgaattgaaccatttaacattatgtagtgcccttctttgtcctcttttactgtttttggtttaaaatctgt

SEQ ID NO: 154675 - DNA, 201 bp, Homo sapiens
cttattgatttatgggagttatttatatatgcttttgtcagatacatgtattgcaatatcttcctattattgataaattttccttttattctgttaatggkgtctttggataataaaaaaattcttaattttaatgtagttgactttaccagattttccccttattgctagttcttttatatcctgtttgagaaactgttg

SEQ ID NO: 154676 - DNA, 201 bp, Homo sapiens
aaaaaaaaaaaaggaaaaaaaaaagaaagaaaataagtatgcctgctctgcctactatatgcttgttgggaggaccggatgagatcatggatgatggaagwatctgaaagctgccaggcaccatgcaaatataaggaaactaatttttaaattggaaacaaaattataacctaaagctaaagtcactgatagggtttcaga

SEQ ID NO: 154677 - DNA, 201 bp, Homo sapiens
tccggcatcccccagagggagtgatccaaaagaaaggaatattgaagccatagttttttgtctttgttttttgagatggggtcctgctttgttgttcaggmtagagtgctgtggtgcagtcatagttcatggtaacctcaaactccttggtttaagtgatcctcctgcctcagcctcccaactaattagggaggtgacaga

SEQ ID NO: 154678 - DNA, 201 bp, Homo sapiens
agctcctcgggaggctgaggcaggagaatcgtctcagcttgggatgcagaggttgcggtgagccgagatcgggccactgcactccaatctgggtgacagartgagaccctgtctcaaaaaaaaaaaaggaaaaaaaaaagaaagaaaataagtatgcctgctctgcctactatatgcttgttgggaggaccggatgagatc

SEQ ID NO: 154679 - DNA, 201 bp, Homo sapiens
aaatgtccgaggcctctagtattcataagtgaataatccaacagtaagcagtggcttgcccagtggaaaacttaaatgagaaggtaccctgtcacacttcrtaatgaatgaggcctttaaatggattattcatgctatttatctgttggaatcattgaaataaattgcatcaaacaagtcctctggaaatcacccaaatga

SEQ ID NO: 154680 - DNA, 201 bp, Homo sapiens
aactgggctttcatcttattttcatcatattctcatgactccatgctgtaacttatcttccacttctcatttcagggagagtggagaagagaagagaacamaaagtaacttcaggtaagattttgtccaatgggctccagctttatttcctgattttatttccacctttaaattttttaaaatttattattcaaaaattca

SEQ ID NO: 154681 - DNA, 201 bp, Homo sapiens
aatagtaaaagcaatagccaaagaaattaaaagagaacttccatattcaattgggtcccttgcaggacttgaaagaggtgtaattcattgcacatagggayatttctcaaaagtttctttccttttcttcttaacttctcttctcttctcctctactttggggctgcttcagaatttctcatacaccaaacctacaaaact

SEQ ID NO: 154682 - DNA, 201 bp, Homo sapiens; identical to SEQ ID NO: 28765

SEQ ID NO: 154683 - DNA, 201 bp, Homo sapiens
cctacaaaactttctctcagtaaacatgcataacttttctgcagatcatcctcctttctctctgttctttattatgagactctccaggttctaaatcacartgagtcctcagattggtctgacaaagacagaagtcttcttagggagaagtcaaggagaagaaattgatcaaagagagattttctttattgctttcttttc

SEQ ID NO: 154684 - DNA, 201 bp, Homo sapiens
taataaaacttcatttccataaattactggaaggcgaacagttcctatgcttaaagtgactagtatttgcatcttttattcatttaacaactatgtctttmgtgccgtctatgagccaggcactaaagaggcatcctgcttcctcagatccaaatgctaaacaaatttcattttttttcaagtattcaaaacgaaagcatg

SEQ ID NO: 154685 - DNA, 201 bp, Homo sapiens
cagtgcagtgcctagttcttagtaggtgctcgatgtgtggtggttttggtggcaggaatagtggtaagatagcaggtaatggcttttttaaaagtatgatmgaagattttaaatatcatattatatatttaatgcacatttaacatagtatgcatttagagtttattaaaataagttgaattctcacccccttgcatcagg

SEQ ID NO: 154686 - DNA, 201 bp, Homo sapiens
acaatttctgcatgtaacaaaattatacttgtatgccatacatttatacaagtaaaaaggaaagtcaggctgagtgtgggctccttcctgttccctatgtstcttccccccaccctcactggcttctcctggaagcaattgatcactacatcacttgcaactgaaatcttggctcaggagaaccttatctaataaaacagt

SEQ ID NO: 154687 - DNA, 201 bp, Homo sapiens
caggtagtattgattagtaaattacctgtaaatcctagaaatctcataatattcagggacttcagggtaatgaacctcttgcttctctgtactctttactrtagtatttataaacagctatgtgagagcaagaaaagcattaattccaattgtgtggttggttattacaattaattacttgccttggactctgctaatgac

SEQ ID NO: 154688 - DNA, 201 bp, Homo sapiens
ctgcagcctattcccagcctcccctttcacttgaactttcattcttccctagcacataaggtagtaaaaaagctgtccacctcctctgaaatagaaaggtraagtttcagctaactattaataaaaaggagccagactgcatgctacctgcccctcacacctttagcaccaagtctaaacctcattccagaatttgctggt

SEQ ID NO: 154689 - DNA, 201 bp, Homo sapiens
gctcttcctccttgtccttccattttaaacgttttaataattttatcaaagtaatgaattttatcaaatgcatacatagttaaagtataaaatacaatagragttacttttactggccaggcacagtggctcgcgcctgtaatcccagcactttgggaggctgagacgggcggatcacgaggtcaggagattgagaccatc

SEQ ID NO: 154690 - DNA, 201 bp, Homo sapiens
aagtatgtcccaaaggaacccaatctcatccaaagattaatgtgtgaataaacttatctgtgcaaagcttaatatcaaattttgaggtgataatatcgttrtctaagaagttgttacacattgttaactgaataagattctatatttccccaatgaagaatgctacatgtgcatagaaaaatttatcatttaggatggggt

SEQ ID NO: 154691 - DNA, 201 bp, Homo sapiens
aaactcatgctcttcctccttgtccttccattttaaacgttttaataattttatcaaagtaatgaattttatcaaatgcatacatagttaaagtataaaayacaatagaagttacttttactggccaggcacagtggctcgcgcctgtaatcccagcactttgggaggctgagacgggcggatcacgaggtcaggagattg

SEQ ID NO: 154692 - DNA, 201 bp, Homo sapiens
taatcatcacaacaccttcataaattttgccatggccatcaatctgttctataaattactaatacttttcctcaaattgacttaaaaatgcttacttacakttaccctaaacaaggatatccataaattagtacaaaagttttaacatactaattatattgttttattaacttttaaaatgaatgcatatctcttcaaata

SEQ ID NO: 154693 - DNA, 201 bp, Homo sapiens
tttctgagagattgactttaccttattgatttatgggagttatttatatatgcttttgtcagatacatgtattgcaatatcttcctattattgataaattytccttttattctgttaatggtgtctttggataataaaaaaattcttaattttaatgtagttgactttaccagattttccccttattgctagttcttttat

SEQ ID NO: 154694 - DNA, 201 bp, Homo sapiens
taggatacctaaactcatgctcttcctccttgtccttccattttaaacgttttaataattttatcaaagtaatgaattttatcaaatgcatacatagttaragtataaaatacaatagaagttacttttactggccaggcacagtggctcgcgcctgtaatcccagcactttgggaggctgagacgggcggatcacgaggt

SEQ ID NO: 154695 - DNA, 201 bp, Homo sapiens
taatttaccttcccaccgacagtgtataagcattcccttttctctgcagccttgccaatatctgttgttgttgttgttgtttttaatttgtaaaccaatasctattctgactggtgtgagataatatctcataatggttttgatttgcatttctcttgtgattgatgatgtggaacattttctcacatgtttcttggccac

SEQ ID NO: 154696 - DNA, 201 bp, Homo sapiens
ctttgtcatttttctgagagattgactttaccttattgatttatgggagttatttatatatgcttttgtcagatacatgtattgcaatatcttcctattaktgataaattttccttttattctgttaatggtgtctttggataataaaaaaattcttaattttaatgtagttgactttaccagattttccccttattgcta

SEQ ID NO: 154697 - DNA, 201 bp, Homo sapiens
gctggagagacgcgatgccctttcaagatttcctcaattttagagttagaaaaaccagttctattagcaaaatttgtatgctaaaacccttttgttttgamccagtgaggtacaaagtcaagaaatacatgggttaactcaaggaaaacagaatcagagtgctcttcttttgcaagaattgtcttttttctaaaactattt

SEQ ID NO: 154698 - DNA, 201 bp, Homo sapiens
tttaatttgtaaaccaatacctattctgactggtgtgagataatatctcataatggttttgatttgcatttctcttgtgattgatgatgtggaacattttytcacatgtttcttggccacttgtatgtactcttttgagaagtgtctgttcatgtcttttgaccatttctcagtgggattatttgttttttgtttgttttg

SEQ ID NO: 154699 - DNA, 201 bp, Homo sapiens
gtgttgttactgtttgctggagagacgcgatgccctttcaagatttcctcaattttagagttagaaaaaccagttctattagcaaaatttgtatgctaaamcccttttgttttgaaccagtgaggtacaaagtcaagaaatacatgggttaactcaaggaaaacagaatcagagtgctcttcttttgcaagaattgtcttt

SEQ ID NO: 154700 - DNA, 201 bp, Homo sapiens
ccccatgggaccattgcatcatgggttcttctgtgttgttactgtttgctggagagacgcgatgccctttcaagatttcctcaattttagagttagaaaamccagttctattagcaaaatttgtatgctaaaacccttttgttttgaaccagtgaggtacaaagtcaagaaatacatgggttaactcaaggaaaacagaat

SEQ ID NO: 154701 - DNA, 201 bp, Homo sapiens
tactcactacattctacttttacaaaatattctttgagttgaaatagatgttttcatttgtagagacactgaaataattgtttccttttttttttttttttaatactccttaaaaacagaagctggaatctgcgctgcccagcaccctagggctctgtgaagtttttccatttgaacagatgggggagcttgtaggcagct

SEQ ID NO: 154702 - DNA, 201 bp, Homo sapiens
agttactaaacttacctccgagagagatttgaattgttagagctttcgtcctcaatttgccaaatggcagtaataaaggaaatataggctatatcttgcaygttattgactcctattttaattaatataagacacattcctcatttgggagcatggttgattccctcagtcaatggctattcattaaatatatcaaatgca

SEQ ID NO: 154703 - DNA, 201 bp, Homo sapiens
aatagcagatacgcttttaaaaattgcaaaaaaacataatgtcatgttttaagaaagtttacaaatttgtgttcggccacattcaacgccattctgggcckcatgccgcctgcaggccgcaggttggataagcttgatctaaagcaacaccttctccagcttttatgagactacttgaacccggggccttctacgcactgt

SEQ ID NO: 154704 - DNA, 201 bp, Homo sapiens
taaacatctcccatgaataacatttgaaacatctggaaaaacctatccaattggacaaaattccaggcacctgtgaaaagacagctccaaagactcattakgggttgagagaccgagagtattttcttctctcttctcagccttggctcccaaagcccactcttctgtgacttccaacatgaatcacgtgaaattcacttc

SEQ ID NO: 154705 - DNA, 201 bp, Homo sapiens
ttgcactaatttcttagtggctaagttagatatgagcaataaaataaaggaaattatatggatttctatttggtctccaatttttataaagcattagaacrttaataaatgttgtccaacttgtgttagccacatcagcgttctgcttctattttttattttaaatgtctgtggttttcctttaaattaatcaaaaatgct

SEQ ID NO: 154706 - DNA, 201 bp, Homo sapiens
ttaattaaaataaattcatacatttagctttctcactttcacatcagttatgcccttttcatccaatcattacattcaaaagaaaatgagatgggaatgtkgcttaattttttcatgattatctatttaaaggtaagtcttgcaaccaacagtattaaaatacagacattgtgatgtgatagttgacaaccagtttacttt

SEQ ID NO: 154707 - DNA, 201 bp, Homo sapiens
aactataggactgcagactgcagtaaccaccatgaaggaaatacagggagtggtgagaccaacgataaacaggagaggcctccttgaggtcagggaaagcstctccaacgggagacatttgagctaagacatgaaaaaggagagaacatgttctaggtaaagggaatgtccgcgaggctggaagaatttgttgtaatcaag

SEQ ID NO: 154708 - DNA, 201 bp, Homo sapiens
tcagttatgcccttttcatccaatcattacattcaaaagaaaatgagatgggaatgttgcttaattttttcatgattatctatttaaaggtaagtcttgcraccaacagtattaaaatacagacattgtgatgtgatagttgacaaccagtttactttcccaaatgactatgaatctcaattttatttcttaaaaccgtat

SEQ ID NO: 154709 - DNA, 201 bp, Homo sapiens
aatcattacattcaaaagaaaatgagatgggaatgttgcttaattttttcatgattatctatttaaaggtaagtcttgcaaccaacagtattaaaatacasacattgtgatgtgatagttgacaaccagtttactttcccaaatgactatgaatctcaattttatttcttaaaaccgtatatgtagtggatgcttttcagg

SEQ ID NO: 154710 - DNA, 201 bp, Homo sapiens
ataagggaagattgtacattttccaccttatatgttaggattttaaaagactcgaagggctgttagaaaagcttggataaagtttacatgtagcttcaacrtgtggcctaacttctcagtaactagctccagctgtggaatgttgatagatgacaaaaaaaagtgacagctggaaggatggtcttcacttatcccaaacca

SEQ ID NO: 154711 - DNA, 201 bp, Homo sapiens
ctggatgctccaatgtcagatgcgtatatattaggatagttaaattttctgacctcttacaagctccttgtccccatagtacttcaaagtcagtaggtctracactgaacttgttattcccagcctcatcacattctataataccatttccccaacttgcatctctatacccaaagtcacctagctaaccactcatcttga

SEQ ID NO: 154712 - DNA, 201 bp, Homo sapiens
atgggaactagaaagggaaaattctgtaagctgtgtctcagtttaaaagctggagccttttggcagtttttcctgacacccccaggccaactttggccctyttcatctgaatggagactggactttgccttattcctatggcaactctcactccgaatctgtcctgtgtgtctccctgccagactgagaggagggactgat

SEQ ID NO: 154713 - DNA, 201 bp, Homo sapiens
ttggaagaaagacaagtaaatatataaccataacaaaacatcctaactctatagtgaagggttatatagaagcacagaggagacacacctaagcttaacasgtagagtgggtagggaaacagaggtggcttcctggaggaaagagtatccatcctgtcttaatgtagtcttgatgaactctgggatatagcttgaaagtga

SEQ ID NO: 154714 - DNA, 201 bp, Homo sapiens
ctgttttccccataatggtttctatggggatttgccctttgtaagtttattgttgagtaaacgactctggctaacaagattttaaaaatccaacagcacawttaatgcatagttatttattttttactttcataaattggtttgtaagcagttcttatgcctgtcagctgagcccagtcatctctaggagcacactggaca

SEQ ID NO: 154715 - DNA, 201 bp, Homo sapiens
gtaaggttaagagcagatgagttcatgtatatataaagggcttggcctggcatgctgctcatgcctgtgccgttgccttcctcccaacgagcaatgcctgstgtagttcagaggatggccactctgaaactgagagaagaaaccatcttagatcttgaagaatctatatgaatttttcaaacagaaggatgagggctgttt

SEQ ID NO: 154716 - DNA, 201 bp, Homo sapiens
ctcctctaaagtagggacagtgatgatgcatgcgtggtaaggttaagagcagatgagttcatgtatatataaagggcttggcctggcatgctgctcatgcstgtgccgttgccttcctcccaacgagcaatgcctgctgtagttcagaggatggccactctgaaactgagagaagaaaccatcttagatcttgaagaatct

SEQ ID NO: 154717 - DNA, 201 bp, Homo sapiens
gacaagactgctctgctggaggtgggaaggcaatgagcttagagatttgggctggcccaggccctgactggtagacccagaagccagggggcaaatacagwggcatacctgtttacggcccacagtctgctgcctgagaagctctgccctgaagaacactagaacttccataactgtaagctgggcctagatctgattttc

SEQ ID NO: 154718 - DNA, 201 bp, Homo sapiens
tcctggatattaatttgcttaggataatggcctctagctgcatctgtgttcctacaaaggacatggtttcattttttcatggctgcatagtagtccatggkgtatatgtaccacattttctttatccaatccactattgatgggcacctaggttgatttcatgtcttgctattgtgaatagtgctgcaatgaacatatgag

SEQ ID NO: 154719 - DNA, 201 bp, Homo sapiens
gccacatttgctcctctaaagtagggacagtgatgatgcatgcgtggtaaggttaagagcagatgagttcatgtatatataaagggcttggcctggcatgstgctcatgcctgtgccgttgccttcctcccaacgagcaatgcctgctgtagttcagaggatggccactctgaaactgagagaagaaaccatcttagatct

SEQ ID NO: 154720 - DNA, 201 bp, Homo sapiens
gaaaaaggagagaacatgttctaggtaaagggaatgtccgcgaggctggaagaatttgttgtaatcaagtgaccaaaaggaggccagtgtagctggcttcrgtaaacgaggagcggggtgccagggggtgaagccagagggtgaagctcggccgtcttctgggtcgtgggaagaaactggatttcattcttagtgccacgc

SEQ ID NO: 154721 - DNA, 201 bp, Homo sapiens
ctctctgagccacatttgctcctctaaagtagggacagtgatgatgcatgcgtggtaaggttaagagcagatgagttcatgtatatataaagggcttggcstggcatgctgctcatgcctgtgccgttgccttcctcccaacgagcaatgcctgctgtagttcagaggatggccactctgaaactgagagaagaaaccatc

SEQ ID NO: 154722 - DNA, 201 bp, Homo sapiens
cttcacttgcttatcttcagaacatgagagccacgtaaccacctgcctattgatatgccattagtgctacctgcctcacccctggccctcttccaaaatcyctcagttcagtaagtgtcacctccttgctactgctggaaacttaggactggacactttccctcttctttagtctgcattttcaattaagggctatctatc

SEQ ID NO: 154723 - DNA, 201 bp, Homo sapiens
gtgggaagaaactggatttcattcttagtgccacgcagtgttggaagccaaaactgcattttaaaacacacacttgaaaggaaatctggtatcagagcccrtggcaaggaaaagcgccatccccgggtgagccgcctcagctctcatctggatcactgtcttgctcgccgccgccccctgcctccatctttaccctcccag

SEQ ID NO: 154724 - DNA, 201 bp, Homo sapiens
taaggagcttgcaaatgctagagaccagtggcacaaaaggatttttagagcaacagaagctttgatagatcgtgtggtgtaaaggttagaagcacaaactmtatggcccgaccaccaagatttgggtccagcacttggcaaatctgtgacctagacaagttattaacctctctgagccacatttgctcctctaaagtaggg

SEQ ID NO: 154725 - DNA, 201 bp, Homo sapiens
cacatcagtcctttctccaaggtgctttaatctcctagtgtcatgccagacacccacccccgccagtgccctctacaactcccattttatttctgcctggkttgtacccagttgcctgctcaagaaagcaactcaccactcattaaaaacaaatgcaaagacaagcatctattcattttatttctttgaccctaattacac

SEQ ID NO: 154726 - DNA, 201 bp, Homo sapiens
tctggacctctaaggcttcacatacggggtgtttctgtgtgccagtcacaggctacagagcacagagacaaagagccttcccttaaggagcttgcaaatgmtagagaccagtggcacaaaaggatttttagagcaacagaagctttgatagatcgtgtggtgtaaaggttagaagcacaaactctatggcccgaccaccaa

SEQ ID NO: 154727 - DNA, 201 bp, Homo sapiens
cttaaagttgtgaggtaagatagattttcatttaccaagtcgatctttgcataggagcagtgttgcagctcacagtgcccagaaattgccaacaatcatakagaacgctaatttggcatgtgtacctatgcccgccatccttcccaagtttctaccaacccactactcctgtgataagcaagagctaccaatcactcccat

SEQ ID NO: 154728 - DNA, 201 bp, Homo sapiens
tgctaaactccatctctggacctctaaggcttcacatacggggtgtttctgtgtgccagtcacaggctacagagcacagagacaaagagccttcccttaargagcttgcaaatgctagagaccagtggcacaaaaggatttttagagcaacagaagctttgatagatcgtgtggtgtaaaggttagaagcacaaactctat

SEQ ID NO: 154729 - DNA, 201 bp, Homo sapiens
tccctcacaggtatgattaccttcattattgctccttgggggagaaattatttctaaataatttctaaattgcttctaaatgctatttccataatgctgtrtgtactaccttcttagttaaagaaaatgcacagtttggaagaaagctaagttggccaaagtgttaagtctgatgcctcattaggttccctcaatagtcat

SEQ ID NO: 154730 - DNA, 201 bp, Homo sapiens
ggccttgtaaatcaaatcagcaaaacatggggagctaccaaaggaagatgaggaagaacatgagttttgaatgataagagggcagaaaaaaatggaaataraggaaatttcttattttaccttatgtgggaaacaaaagcagactataacattggatatgcagtttgtccataactatataaaaccaaatatagttttttt

SEQ ID NO: 154731 - DNA, 201 bp, Homo sapiens
gaaatgtatcgggtatttttattagtagtattactctttttctgatctatgaaatatgcagtcagcacttttgtcagagtagaggaaagatcaagaaggarggtgtatgtctctgtgtgttttgagcccagagacactgtcaggggtttgctcttgtttctactgctaaactccatctctggacctctaaggcttcacata

SEQ ID NO: 154732 - DNA, 201 bp, Homo sapiens
tcactttaatgctttgttcagttacttgcttaataaaacacttttcaacaaatggaaaatctttaaggcaacagcatctttgatagggaacacaggtcacyagggctatgagaaaaatccctttactagtggaatttttactaatttgccctatctgatttgtagcttgtcaattgcctgatttctatgagagggtgaggt

SEQ ID NO: 154733 - DNA, 201 bp, Homo sapiens
atctctgtgtacaaaaagacaaatagacgtggctcctacttgaaggagctcttggtaaaatgacaaatatagacaattaaattaactcttagaagaagaaragagatggattctagtggcagaaacatgtcattagaatgcagatgaggccttgtaaatcaaatcagcaaaacatggggagctaccaaaggaagatgagga

SEQ ID NO: 154734 - DNA, 201 bp, Homo sapiens
gctgtatctacttctggcggaagtcaagtgtaaagggtaagagtgcaggctctcgtttcaaactacccaaactagaatccttgcttgtcccttatgagtcmtatgaccttcacctttctcaccttatatgtaaaatggagataataatctttttatctcatagagttttaataaggattaagtgagataatatctgccaag

SEQ ID NO: 154735 - DNA, 201 bp, Homo sapiens
actgatctgatctctgtgtacaaaaagacaaatagacgtggctcctacttgaaggagctcttggtaaaatgacaaatatagacaattaaattaactcttakaagaagaagagagatggattctagtggcagaaacatgtcattagaatgcagatgaggccttgtaaatcaaatcagcaaaacatggggagctaccaaagga

SEQ ID NO: 154736 - DNA, 201 bp, Homo sapiens
ccacggtgacaggaactgatagcaagggtgctgggctattcaaagaaacctcattctgactccaagattagtgaacactcactgcccaacagctgcctttstggaataatacaaggtctgtgtctgggaggaattctggagattgcttggtgctaatttttaattttacaaatgaattgaataaagccctgggaacacctg

SEQ ID NO: 154737 - DNA, 201 bp, Homo sapiens
gcagtttatgccaagcactgatctgatctctgtgtacaaaaagacaaatagacgtggctcctacttgaaggagctcttggtaaaatgacaaatatagacamttaaattaactcttagaagaagaagagagatggattctagtggcagaaacatgtcattagaatgcagatgaggccttgtaaatcaaatcagcaaaacatg

SEQ ID NO: 154738 - DNA, 201 bp, Homo sapiens
ttgagcagtttatgccaagcactgatctgatctctgtgtacaaaaagacaaatagacgtggctcctacttgaaggagctcttggtaaaatgacaaatatakacaattaaattaactcttagaagaagaagagagatggattctagtggcagaaacatgtcattagaatgcagatgaggccttgtaaatcaaatcagcaaaa

SEQ ID NO: 154739 - DNA, 201 bp, Homo sapiens
catgtccaaaactattgagaattaaattgacttataattactgtaccttttgttttattttggactctgaacttggaaatatatcacctggagtagagttmtaagttcactacatcctgtctgtgtgatttgggaaaacttgttctaccttgctgaactgcaggcatttgtcttttttgtttgtttgtttatagtttccat

SEQ ID NO: 154740 - DNA, 201 bp, Homo sapiens
tttttactaatttgccctatctgatttgtagcttgtcaattgcctgatttctatgagagggtgaggttaaggataactaatggatagagcccatattctakgggaatgttagggggctcctaatcatttcaaatgacaacaaatcatgccatcaggaaatctaaatttgtaacaatagtctgagttttcaagattggaaca

SEQ ID NO: 154741 - DNA, 201 bp, Homo sapiens
tgtaaagtttgtttatggtcaacattttaaaaattggaaagctgagattgggaaggttaaattacttgctttaggccccatttattaactggtggaaccasaaatggaacctaggctgtggcttgctggagccagcttataatatctggaaagctgtctggagaaaactgattgtgctcctctcttcccagctctgcattc

SEQ ID NO: 154742 - DNA, 201 bp, Homo sapiens
tatggtcaacattttaaaaattggaaagctgagattgggaaggttaaattacttgctttaggccccatttattaactggtggaaccagaaatggaacctakgctgtggcttgctggagccagcttataatatctggaaagctgtctggagaaaactgattgtgctcctctcttcccagctctgcattcagtgaggtcatgc

SEQ ID NO: 154743 - DNA, 201 bp, Homo sapiens
gttatgcatatttatgcttttggccttgtaaaaagaaacccttggctctttcttaccaatatctttttaagtcaaaagcctttaacatgtaaaattcagcstgtaaccaattctaatttcccaatctacttcttaacttgagaaactagaaaaaatgcaataatccaactctgctattagagaatgtgaatataagaaaaa

SEQ ID NO: 154744 - DNA, 201 bp, Homo sapiens
gcctcttcctttaaaggagctcatagtcttctttggaagaaagacaagtaaatatataaccataacaaaacatcctaactctatagtgaagggttatatakaagcacagaggagacacacctaagcttaacaggtagagtgggtagggaaacagaggtggcttcctggaggaaagagtatccatcctgtcttaatgtagtc

SEQ ID NO: 154745 - DNA, 201 bp, Homo sapiens
cttacagtcaataagaatgtattgtgaatctgttacacttctaggcgctagggattgtaataatttattacatttgcctcttcctttaaaggagctcataktcttctttggaagaaagacaagtaaatatataaccataacaaaacatcctaactctatagtgaagggttatatagaagcacagaggagacacacctaagc

SEQ ID NO: 154746 - DNA, 201 bp, Homo sapiens
aagtaataggtacaaaccacggtgacaggaactgatagcaagggtgctgggctattcaaagaaacctcattctgactccaagattagtgaacactcactgyccaacagctgcctttctggaataatacaaggtctgtgtctgggaggaattctggagattgcttggtgctaatttttaattttacaaatgaattgaataaa

SEQ ID NO: 154747 - DNA, 201 bp, Homo sapiens
attattatcttcattcatgggtcattttttttatatagttggattaagcactggtttcttacagtcaataagaatgtattgtgaatctgttacacttctakgcgctagggattgtaataatttattacatttgcctcttcctttaaaggagctcatagtcttctttggaagaaagacaagtaaatatataaccataacaaa

SEQ ID NO: 154748 - DNA, 201 bp, Homo sapiens
ctgtatatccaggtgattatttgggttgggtgattgtctaccagacagttgaggacagcagatgacaaactggaagtaataggtacaaaccacggtgacasgaactgatagcaagggtgctgggctattcaaagaaacctcattctgactccaagattagtgaacactcactgcccaacagctgcctttctggaataatac

SEQ ID NO: 154749 - DNA, 201 bp, Homo sapiens
agggctgcttttgtgccaaactgcagtgccgtgtgattttaaagctagagttaatccttgcaggctactgtgggtccacaaaccggcacttggtgccctakagctttgcatttggtaggcatgttctcctgggcacgggtcctgaaatggactattgtttacctatactcagtgtctttgccctcatttggcaaagggagg

SEQ ID NO: 154750 - DNA, 201 bp, Homo sapiens
aaagggatacttaagcagaaaatgtcataaagaggtagcattgtcaactattcatattttagtgaatccacacttcagtgggtttctccaccatggagackttgataccagagtggggattgcgcctgttgaatgtggaattttaggagcttgaagtaagctccacggaatgcccacacacgcatatacacgcacacacac

SEQ ID NO: 154751 - DNA, 201 bp, Homo sapiens
gactttgataccagagtggggattgcgcctgttgaatgtggaattttaggagcttgaagtaagctccacggaatgcccacacacgcatatacacgcacacmcacatgcacgtacacatgctcacatacacacaagggggactggaatacggaaagcataatatgtgctctctcctgctttcatgctgtgtttgatattgcc

SEQ ID NO: 154752 - DNA, 201 bp, Homo sapiens
ctgttcaaatgacccggctttgctggctttgactcaatctatctcagggagattggacttttctctgcagtttttatgtgacaggttgaaccgaaataacrtctaaaaattgcagcaatcccagaaagactgagaagcaatcacataaatcatttgaatctggaatggtggaggaggcaagcaaatgtagtacaaaaagag

SEQ ID NO: 154753 - DNA, 201 bp, Homo sapiens
ttcatctctgaaattttaatcttgattctggacaaggctttttggttttggtttttgtaattctttatgtttttgaacttcacaataaattgaggcttaakctaaggaaactggatgcattaatgttgtcatcatacttgataaactaagttgataaatttataaaatacaagaattctaaaaatgtttcacatgcctaga

SEQ ID NO: 154754 - DNA, 201 bp, Homo sapiens
atatacagaaaaataacaatgatttaaaagatatagttaaagcctttaaagagctatatactatattactattattgagatgtgggagaggatacttttcyttaggagacaattcaaaagataaaaaataaattgtatttatttccctatcatttaatcgatgcttacagaaatagctctttcagaaatttaggttaattc

SEQ ID NO: 154755 - DNA, 201 bp, Homo sapiens
aggtaaaaggagtttagctttgataaatttatccacaattttgtaatcagaactgttttaagaaactattttaactacaacatacatatgtgtttcatgtkttatagtttcttcccttcttaattacatgtggatgaagagacgaggaagtagaaagtggatcactgtaatcttttcagtgttgagggactcagaattcag

SEQ ID NO: 154756 - DNA, 201 bp, Homo sapiens; identical to SEQ ID NO: 28769

SEQ ID NO: 154757 - DNA, 201 bp, Homo sapiens
tcacgtccagggtccacagctaaggggccctcagctcgggcagcacccccctcctctgccttccagtccaaactcgactccttggggtcacagccaggggmgtgtggagcagtcctccctggcacttgcctctcaccgctgcctgttgcccctgctcagggcatcccccgcacccccgcccgcagcacccttccctaccct

SEQ ID NO: 154758 - DNA, 201 bp, Homo sapiens; identical to SEQ ID NO: 28770

SEQ ID NO: 154759 - DNA, 201 bp, Homo sapiens
  misc_feature (1)...(201): n = A,T,C or G
cctttaagcagcggcccgcagtcggccttggacccttggccgggcgactgcactgcaagtgggtggggtggcggcccccgccctggcggggagtccagggntcatggaggtggcgggcagaagtgcgtctgtgactgtggccataagcgcttgcagggtctcccaggtggcatggggcaggcacatgtcctggtacacacg

SEQ ID NO: 154760 - DNA, 201 bp, Homo sapiens
atacagagggcaaggacgtgcgtgtactctagtgtatgtccagcccacgcgtgtgcacatattcacgcgtgggtacttgcacacagggcaggtggattgtrggtaaggagcaccagccctgtgtgtggagtgggtgtgcaaagaggtgtgttctggcacgcacagagggcagtgtgcacgcagcactggagccaggcgtgc

SEQ ID NO: 154761 - DNA, 201 bp, Homo sapiens
gtgactgcacctgccctcccctccaggcagcaaggtgacagctgcctgcctcccatcatctgatgcccttactattcccttgagccagcatatctgggacrgggccagggcatcgataggtggaggcggcatgctgatctctgccccatggcccccaggtggaggctacggagccacaggacgtggtggtctatgaccaga

SEQ ID NO: 154762 - DNA, 201 bp, Homo sapiens
catacagagggcaaggacgtgcgtgtactctagtgtatgtccagcccacgcgtgtgcacatattcacgcgtgggtacttgcacacagggcaggtggattgygggtaaggagcaccagccctgtgtgtggagtgggtgtgcaaagaggtgtgttctggcacgcacagagggcagtgtgcacgcagcactggagccaggcgtg

SEQ ID NO: 154763 - DNA, 201 bp, Homo sapiens
agctgggacatgggaggactcaagtgggatggccactggccaggagtccgcccgccccaaggccagaatcggctccctttggtttccaacaaggggaatcyggtgattaatgacccccagcaaggactcccggcagagtgcgatcccattggctgccggtgacgtcacccagcccagggttggcggctcagctggcttaag

SEQ ID NO: 154764 - DNA, 201 bp, Homo sapiens
tgacagtcctggcagctgtctctgaaggtagtgagtccccatttctaggtgctgagcagaaggtaacatggtaaggatgctgtcagttgagagctgggggwggcctgggactccctggtcccgtctgtgctcagggacaggaatgtgctgcacagagacgctgggtgtgggagctcgtgtttgtaaggagtctgaagctga

SEQ ID NO: 154765 - DNA, 201 bp, Homo sapiens
tgtgtgagtgcagggtccctgcctcccagagttgccacccaccagtctctcctcagcctccttagtgtgacgatttctgcctccagaagcatccctgggtracagtgagccggacagctccaagagcctgcctaggtgtgagggggagacacagtcccatccccccatgcttgacagtcctggcagctgtctctgaaggta

SEQ ID NO: 154766 - DNA, 201 bp, Homo sapiens
tgctcagcttctgcacagaggtgccgggccctccccacgcagataggactgtgtggccagggccaacccaggctcacagaggggagcagtgagtggaatarcaaggtgtgaccacatggcagtgggagcagcccagctggcctacacgggacagggacagctgtgtggtccacttccactgctgtgaggacaggaggggtg

SEQ ID NO: 154767 - DNA, 201 bp, Homo sapiens
ctgacctgtgtgagtgcagggtccctgcctcccagagttgccacccaccagtctctcctcagcctccttagtgtgacgatttctgcctccagaagcatccytgggtaacagtgagccggacagctccaagagcctgcctaggtgtgagggggagacacagtcccatccccccatgcttgacagtcctggcagctgtctctg

SEQ ID NO: 154768 - DNA, 201 bp, Homo sapiens
ccggcagtctgaggcctttgcaggccatgccgagggcctggcacctgcggggtccccgacactgaccctcctcccagggctgccccgcccctcccatcctkggccctatcagcccatgaaggagcctcctagaccccaggctccgctaggggagaggcactgtgtgggtgcaacacgcccctgcaggagctgggcactcac

SEQ ID NO: 154769 - DNA, 201 bp, Homo sapiens
agtggcctgtccccaggcagctcccaggaggaagctctgggaaggaaaggggaagacgccgcttaccccttccccgccaggaattctgctgccccccccccaccaagtccagtgccctcccactctgccccagcacatgcgccctcatggctgagcgcacctgcagaacgcactcccgccccccacacacctggggcctcc

SEQ ID NO: 154770 - DNA, 201 bp, Homo sapiens
cagtgcccatctgtgtgtgacccaggtgtgacccaggtcccaaccctgccccaagcctcggtttccccatagttaaagcaaactcatcatccttaacactrtgcgcctcctaggggctgtgagtgtaaagtggacccagaggaaggccagtcctggcaggtgacagggagatggggcccggcagtggggcagtgacaggct

SEQ ID NO: 154771 - DNA, 201 bp, Homo sapiens; identical to SEQ ID NO: 28771

SEQ ID NO: 154772 - DNA, 201 bp, Homo sapiens; identical to SEQ ID NO: 28772

SEQ ID NO: 154773 - DNA, 201 bp, Homo sapiens; identical to SEQ ID NO: 28773

SEQ ID NO: 154774 - DNA, 201 bp, Homo sapiens
ctgtggggtgcaggcacggtggggtgaggagtaggcagccaagccaggcccttggccctgcatccagtggaagcagggaccttcacccagcctgagggcgrctgtgggggatgaaggggtggcagccgctttggccaggccgacctcccgacatggcatgtcctgggacctaaagggcacctgggaggcttgagggtggtc

SEQ ID NO: 154775 - DNA, 201 bp, Homo sapiens; identical to SEQ ID NO: 28774

SEQ ID NO: 154776 - DNA, 201 bp, Homo sapiens; identical to SEQ ID NO: 28775

SEQ ID NO: 154777 - DNA, 201 bp, Homo sapiens; identical to SEQ ID NO: 28777

SEQ ID NO: 154778 - DNA, 201 bp, Homo sapiens; identical to SEQ ID NO: 28776

SEQ ID NO: 154779 - DNA, 201 bp, Homo sapiens
cactgagtcagacatccagggattcacgttcgggtccttccagctggtgcagggcaggggacttcctcccaccagcctgtggcctcggacttggacgtgtrtggaaggcagcagcacacgctggtcacgtgtgcagcgggtgcccactgcctgctctgcgtgcccccagtgccccgggcttctccactctccgtcctcccc

SEQ ID NO: 154780 - DNA, 201 bp, Homo sapiens
agtgggacggtttggggggctggggccctcacccagcactggtgggtgggacagcatgggtgtgcaggtgggcgtggatgagtatgggcatgggaggggcmgggcctgtgctaggatttgccaggagggcactcccagggcctggtcatgccaccctcagaactgcctttctgtgctgacatctgccctgcaaggttgagg

SEQ ID NO: 154781 - DNA, 201 bp, Homo sapiens
cgcccgcagcacccttccctaccctccctccagggcctccttgctcagcttctgcacagaggtgccgggccctccccacgcagataggactgtgtggccasggccaacccaggctcacagaggggagcagtgagtggaatagcaaggtgtgaccacatggcagtgggagcagcccagctggcctacacgggacagggacag

SEQ ID NO: 154782 - DNA, 201 bp, Homo sapiens
gggggcaggggtgctgcccctcacccaggagaagggatgttccaggatcccgcggcacaggcaacacagctccttggtccatttgcagggacagtagaggycggaatgtgaggaccaagcctctgtcctccccacagcagggcaggtttgcgggaagcgggagagaaacagtggcaggacaggctgtgctggggtcccagg

SEQ ID NO: 154783 - DNA, 201 bp, Homo sapiens
tcccagggctgccccgcccctcccatcctgggccctatcagcccatgaaggagcctcctagaccccaggctccgctaggggagaggcactgtgtgggtgcmacacgcccctgcaggagctgggcactcacccccagcaggcacgtggcgcacactaaacctcagcctgcaggtcaggagggcagcagtggcaaaggagccg

SEQ ID NO: 154784 - DNA, 201 bp, Homo sapiens; identical to SEQ ID NO: 28778

SEQ ID NO: 154785 - DNA, 201 bp, Homo sapiens
gtgcgtctgtgcatggctctgggcgtctggtgaccagcatctgcctctgcgagtgtgtacgtgagcatgtgtgtgcatgtatgtgtgtgtgtgcatgtgcrtgcatgtatgtgtgtgcatgtacatgtgtgcatgtatgggcatatgcatgcctgtgtgtgcgcatatgtgcatgtacgtgtgtgcacgtgtatatgcatg

SEQ ID NO: 154786 - DNA, 201 bp, Homo sapiens
agagagtagtttggggctttttacagctcaccaggtgtaacaggacccctcccaaaggccagtttgctgccctagccaggaatgggagtcaggagactctwcttggaggctgagaaaggtcccagagtggcacctccctacctgcaggcagatcccaggaaagtcccaagcctggaagggcctgtctccctcgaggccaga

SEQ ID NO: 154787 - DNA, 201 bp, Homo sapiens
ggcagtgacaggcttgtcatcaagcctgcaggaggggcttccggagactccatcctcagacatccctactccacctgcccacccggcagtctgaggccttygcaggccatgccgagggcctggcacctgcggggtccccgacactgaccctcctcccagggctgccccgcccctcccatcctgggccctatcagcccatga

SEQ ID NO: 154788 - DNA, 201 bp, Homo sapiens
tccaagctggtgaagcggcggctgcagcagggcaaggtgaccattgcggagctcatccagccggctgcacgcagccaggtacccagcccactgcccaccasgcatgcatcacgtccagggtccacagctaaggggccctcagctcgggcagcacccccctcctctgccttccagtccaaactcgactccttggggtcacag

SEQ ID NO: 154789 - DNA, 201 bp, Homo sapiens
gggtgtctgtgcgtctgtgcatggctctgggcgtctggtgaccagcatctgcctctgcgagtgtgtacgtgagcatgtgtgtgcatgtatgtgtgtgtgtkcatgtgcatgcatgtatgtgtgtgcatgtacatgtgtgcatgtatgggcatatgcatgcctgtgtgtgcgcatatgtgcatgtacgtgtgtgcacgtgta

SEQ ID NO: 154790 - DNA, 201 bp, Homo sapiens
gtggacccagaggaaggccagtcctggcaggtgacagggagatggggcccggcagtggggcagtgacaggcttgtcatcaagcctgcaggaggggcttccrgagactccatcctcagacatccctactccacctgcccacccggcagtctgaggcctttgcaggccatgccgagggcctggcacctgcggggtccccgaca

SEQ ID NO: 154791 - DNA, 201 bp, Homo sapiens
cctctggcctgggacacccgggaaggggccttcccctgtcgggggggagggctgcagatccatccccccagtgtccaggccgcactgcctccccatcccgkggtgcccagccggcccctgagggataaagcccccgcgcccttccgcctgctgcagaggcagccgcggcgctgggggaggggctggcacagccaggctgct

SEQ ID NO: 154792 - DNA, 201 bp, Homo sapiens
aagcactggatgcggatggcagatcatgtgaccccagctggaagttcatcctgaagtctcgctgaaatacctcctgctgcagccagccgggggctgcacgagtgtggctgggcaggttctattcccctggtatcctctgtcctcggggaggcttctgggaataaagtcccattaacagaggtgcagaaagacgcttagagt

SEQ ID NO: 154793 - DNA, 201 bp, Homo sapiens; identical to SEQ ID NO: 28779

SEQ ID NO: 154794 - DNA, 201 bp, Homo sapiens
gacggcctctggcctgggacacccgggaaggggccttcccctgtcgggggggagggctgcagatccatccccccagtgtccaggccgcactgcctccccaycccggggtgcccagccggcccctgagggataaagcccccgcgcccttccgcctgctgcagaggcagccgcggcgctgggggaggggctggcacagccagg

SEQ ID NO: 154795 - DNA, 201 bp, Homo sapiens
gaagcagggaccttcacccagcctgagggcgactgtgggggatgaaggggtggcagccgctttggccaggccgacctcccgacatggcatgtcctgggacctaaagggcacctgggaggcttgagggtggtccagtgtcctgggcaagagcattgaggccaggctccctccccacctctctgtgggtgagaccagcaccct

SEQ ID NO: 154796 - DNA, 201 bp, Homo sapiens
acctcgtctctactaaaaatacaaaaaattagctgggcatggtggcgggcacctgtagtcccagctactcgggaggctgaggcaggagaatggcgtgaacmcaggaggcagagtttgcagtgagccgagatcacgccactgcactccagcctgggcgacagagcaagactccgtctcaaaaataaataaataaaaaataat

SEQ ID NO: 154797 - DNA, 201 bp, Homo sapiens
aaaaaaaaaaaaaaaaaagtataaaaattaggtaggcatggtggttcacacctgtatcccagctacttggaggctgaggcatgagaatcccttgaaccctsgaggcagaggctgcagtgagccaagatcacgacactgcactccagcctgggtggcagagtaagactgtctcaaaaaaaaaagaacaatctgtcttgtaag

SEQ ID NO: 154798 - DNA, 201 bp, Homo sapiens
ttgaaacagggaggcagaggttgcagtgagccaagatcacattactgcactccagcctggatgatagagcgagactctgtctccaaaaaaaaaaaaaaaaagaactagaggccaggcgtggtggttcacgcctgtaatcccaacactttgggaggtcaaggtgggtggatcatctgaggtcaagagtttgagaccagcctg

SEQ ID NO: 154799 - DNA, 201 bp, Homo sapiens
aggagtagatgtattggtttcttcagagaagccaacagtggatcacatgaaaatggaaccttttttcctatccttttgaatacatttctgtgtttaaaatrtaatttttttggctgggtgtggtgacccacacctgtaatcccagcactttgggaagccaaggcaggtggatcacttgaggttaggggttcgagaccagcc

SEQ ID NO: 154800 - DNA, 201 bp, Homo sapiens
tctcagctcacacggattaccagcaaaccagtgaatttattcgtgctttgaaaccgcctcatgtggttagtctatgaatttcatttattgtattaaagggraaaaaagtgcatacccaggaaactgtgcagcaggcagttcacaaagcaggcatcatcacctactaatgcgacaccccctgagcagagcctttcacatgca

SEQ ID NO: 154801 - DNA, 201 bp, Homo sapiens
gagcacagaggtgaaggctacagtgagccgtgatcataccactacagtccatcctgggcaacagtgcaagaccctgtctctaaataaataaataaataaawgcacacctccgaaaaggaaccccatatcccttacgtatgatgccccaatctctatattctcaccaactcaaagcaaccactaatctacttcctgcctccc

SEQ ID NO: 154802 - DNA, 201 bp, Homo sapiens
acagacgcatgcacacgcacactgacgcacgcacacagacgcacgcacacacgcgcgcgcgcgcacacacacacgcacacacccacgcactcgcacacacrcgcacgcgcacacacgcacacgcgcacacacgcgcacacacacaaaattagctgggcatggtgatgcatgcatgtagtcccagctacctgggaggctgag

SEQ ID NO: 154803 - DNA, 201 bp, Homo sapiens
ggagaaaaaaaaagttttgcagtcagacagtttagaagatgaattgaactgagttcaggaaaagttgggtttcttatcggagtgttctgtttctcacccataattttaatgatttaaaatcattacctttagttatttttctctctcaagtacatcactgtattaaaattagtctcctaggagcaaaggttcttttctgaa

SEQ ID NO: 154804 - DNA, 201 bp, Homo sapiens
cacacacgcacacaaagacgcacacacacgtgcgcacacagacgcatgcacacgcacactgacgcacgcacacagacgcacgcacacacgcgcgcgcgcgcacacacacacgcacacacccacgcactcgcacacacacgcacgcgcacacacgcacacgcgcacacacgcgcacacacacaaaattagctgggcatggtg

SEQ ID NO: 154805 - DNA, 201 bp, Homo sapiens
gcacacacgcacacaaagacgcacacacacgtgcgcacacagacgcatgcacacgcacactgacgcacgcacacagacgcacgcacacacgcgcgcgcgcgcacacacacacgcacacacccacgcactcgcacacacacgcacgcgcacacacgcacacgcgcacacacgcgcacacacacaaaattagctgggcatggt

SEQ ID NO: 154806 - DNA, 201 bp, Homo sapiens
cgcacacacgcacacaaagacgcacacacacgtgcgcacacagacgcatgcacacgcacactgacgcacgcacacagacgcacgcacacacgcgcgcgcgcgcacacacacacgcacacacccacgcactcgcacacacacgcacgcgcacacacgcacacgcgcacacacgcgcacacacacaaaattagctgggcatgg

SEQ ID NO: 154807 - DNA, 201 bp, Homo sapiens
ctgtctcagaaaaataaataaatgaaacttttttttttttttttttgagaaaaagtctcgctctgtctccaggctggagtgcagtggcgcgatctcagctyactgcaagctccgcctcccaggttcacgccattctcctgcctcagcctcccgagtagctgggactacaggcgcccgccaccacggccagctagttttttg

SEQ ID NO: 154808 - DNA, 201 bp, Homo sapiens
tccaaatgtattggaaagcaggagaaatggccttttgttagttttgtttgtttgcttgttgtttggggtgttttttggtttgtttgtttgtttgtttgtttggatgaagtcttgctctgttgcctaggctggagtgcagtggcgccaatctcagctcactgcagcttctgcctcctgggttaaagcaattctcctgcctca

SEQ ID NO: 154809 - DNA, 201 bp, Homo sapiens
gcgcacacacgcacacaaagacgcacacacacgtgcgcacacagacgcatgcacacgcacactgacgcacgcacacagacgcacgcacacacgcgcgcgcgcgcacacacacacgcacacacccacgcactcgcacacacacgcacgcgcacacacgcacacgcgcacacacgcgcacacacacaaaattagctgggcatg

SEQ ID NO: 154810 - DNA, 201 bp, Homo sapiens
aagccgaggcaggtggatcacgaggtcaagagatcgagaccatcctgaccaacatggtgaatccccgtctctactaaaaatacaaaaattagctgtatgtkgtggcacgtgcctgtggtcccagctactcaggaggctgaggcaggagaattgcttgaaagtgggaggtggaggttgcagtgagctgagataatgccactg

SEQ ID NO: 154811 - DNA, 201 bp, Homo sapiens
atgagtttgcagccagcctgagggagtgcatgtgtgcgtttcacggggacttcccggccttccctactgcagtgcagctagtgagagctttcttaagcccyggcacctagtaagttacttgcttgttgaactgattagaactgaactgtgccagatctgccactgtgactcttccctttgacattggtagcaatgcaactg

SEQ ID NO: 154812 - DNA, 201 bp, Homo sapiens
cgcacgcacgcgcacacacgcacacaaagacgcacacacacgtgcgcacacagacgcatgcacacgcacactgacgcacgcacacagacgcacgcacacacgcgcgcgcgcgcacacacacacgcacacacccacgcactcgcacacacacgcacgcgcacacacgcacacgcgcacacacgcgcacacacacaaaattag

SEQ ID NO: 154813 - DNA, 201 bp, Homo sapiens
aaattagctgtatgtggtggcacgtgcctgtggtcccagctactcaggaggctgaggcaggagaattgcttgaaagtgggaggtggaggttgcagtgagcygagataatgccactgcattccagcctagtgacacagcaagactccatctcaaaaaaaaggaaaaattgcacaaaactaataagattacatttaagtttgt

SEQ ID NO: 154814 - DNA, 201 bp, Homo sapiens
ttccaaatgtattggaaagcaggagaaatggccttttgttagttttgtttgtttgcttgttgtttggggtgttttttggtttgtttgtttgtttgtttgtttggatgaagtcttgctctgttgcctaggctggagtgcagtggcgccaatctcagctcactgcagcttctgcctcctgggttaaagcaattctcctgcctc

SEQ ID NO: 154815 - DNA, 201 bp, Homo sapiens
tactctttttttttttttttttttttgagatggagtctcactctgtctcccaggctggagtgcagtggcgtgccgtctctgcttactgcaagctccacctyccgggttcatgccattctcctgcctcagcctcccaagtagctgggactacaggcgcctgccaccatgcccggctaattttttgtatttttagtagagacg

SEQ ID NO: 154816 - DNA, 201 bp, Homo sapiens
tttccaaatgtattggaaagcaggagaaatggccttttgttagttttgtttgtttgcttgttgtttggggtgttttttggtttgtttgtttgtttgtttgtttggatgaagtcttgctctgttgcctaggctggagtgcagtggcgccaatctcagctcactgcagcttctgcctcctgggttaaagcaattctcctgcct

SEQ ID NO: 154817 - DNA, 201 bp, Homo sapiens
aaagaacatatctaaagcacttaatatggtgcctggcacatagtaaatgcttaatatatatattatatatatatatatatatatatatattttttttttttgaggcggagtcttgctctgtcacccaggctgactgcaactccgcctcccgggttcaagcagctctctgcttcagcctcctgagtaactgggattacaggt

SEQ ID NO: 154818 - DNA, 201 bp, Homo sapiens
gaaagaacatatctaaagcacttaatatggtgcctggcacatagtaaatgcttaatatatatattatatatatatatatatatatatatattttttttttttgaggcggagtcttgctctgtcacccaggctgactgcaactccgcctcccgggttcaagcagctctctgcttcagcctcctgagtaactgggattacagg

SEQ ID NO: 154819 - DNA, 201 bp, Homo sapiens
aaggatgaagtgaaagaacatatctaaagcacttaatatggtgcctggcacatagtaaatgcttaatatatatattatatatatatatatatatatatatattttttttttttgaggcggagtcttgctctgtcacccaggctgactgcaactccgcctcccgggttcaagcagctctctgcttcagcctcctgagtaact

SEQ ID NO: 154820 - DNA, 201 bp, Homo sapiens
aatcccagctactagggaggctgaggcaggagaatcacttgaatccgggaggcggaggttgtagtgagccaagattgtgccactgcgctccagcctgggcmacagagcaagactccatctcaaaaaaaaaaagaaaaaaagtaaatacagtattctgctttagaactaggacctatcttcagttttattttttcctcaaat

SEQ ID NO: 154821 - DNA, 201 bp, Homo sapiens
gtaaggatgaagtgaaagaacatatctaaagcacttaatatggtgcctggcacatagtaaatgcttaatatatatattatatatatatatatatatatatatattttttttttttgaggcggagtcttgctctgtcacccaggctgactgcaactccgcctcccgggttcaagcagctctctgcttcagcctcctgagtaa

SEQ ID NO: 154822 - DNA, 201 bp, Homo sapiens
ttgtaaggatgaagtgaaagaacatatctaaagcacttaatatggtgcctggcacatagtaaatgcttaatatatatattatatatatatatatatatatatatattttttttttttgaggcggagtcttgctctgtcacccaggctgactgcaactccgcctcccgggttcaagcagctctctgcttcagcctcctgagt

SEQ ID NO: 154823 - DNA, 201 bp, Homo sapiens
tattgtaaggatgaagtgaaagaacatatctaaagcacttaatatggtgcctggcacatagtaaatgcttaatatatatattatatatatatatatatatatatatattttttttttttgaggcggagtcttgctctgtcacccaggctgactgcaactccgcctcccgggttcaagcagctctctgcttcagcctcctga

SEQ ID NO: 154824 - DNA, 201 bp, Homo sapiens
ttctcagctcacacggattaccagcaaaccagtgaatttattcgtgctttgaaaccgcctcatgtggttagtctatgaatttcatttattgtattaaagggaaaaaaagtgcatacccaggaaactgtgcagcaggcagttcacaaagcaggcatcatcacctactaatgcgacaccccctgagcagagcctttcacatgc

SEQ ID NO: 154825 - DNA, 201 bp, Homo sapiens
tgccctcgctgagatgcccggttacagtcattagtagtaataatgggcttttcttcctccagttttccttccagcagggtggatggggagcatcgctggcygacaggctggtcaggtgagaatggtttccgatacttgagttcttatggatggaaaatgtcttagggatccgtcttatggatgaaggatagttctgaacag

SEQ ID NO: 154826 - DNA, 201 bp, Homo sapiens
aatatatttcatatatttaattcaacttaaggaccatgattaagctgaatgatgtttccatatattcttttaacatttattctatgtagattttagtccayggagaacagaatgaaatggccagattgaaagcagcactgattcgagaatatgaagataacgatgaagttcacatagaggttcataatcctcggaatacag

SEQ ID NO: 154827 - DNA, 201 bp, Homo sapiens
gcatgaacccgggaggcggaacttgcagtgagcggagatcgcgccactgcactgcagcctgggcgacagagtgagactccatctcaaaaaaaaaaaaaaaagaaattacagatgtaaattatataataggcatataatacattttcaaactgcagaggcacctattagaataaagggtgtctttcagccatactaccctga

SEQ ID NO: 154828 - DNA, 201 bp, Homo sapiens
agggaaaaaaagtgcatacccaggaaactgtgcagcaggcagttcacaaagcaggcatcatcacctactaatgcgacaccccctgagcagagcctttcacrtgcactcggatttggcctttacaactcccctttgatttcagcaagctgccccctttctccagaactgactgactcagacctaccaaccccaatcctaatg

SEQ ID NO: 154829 - DNA, 201 bp, Homo sapiens
ataaaaagaacatgaaattaaatgatgaaaatatccatttcctttagcaggcaaataatacaaatccctgcttgtcactttaaggattccatagttattcmctttaacttatcagtaaccagattctgattattgatttggaaattattctgaataggaatttagaaactgaactctctgtcgcttttttttttcccaggt

SEQ ID NO: 154830 - DNA, 201 bp, Homo sapiens
tgcactccaatctgggtgacggagcaagactccatctccaaaaaaaaaagaaaaaaaaaatttccaggcctggcacagtgcctcacatctgtaatcctagyacttcaggaggccacagcaggtggatcacttgagctcaggagttggggaccagcttgggcaacatggagaaatcccatctctacaaaaaatacaaaaatt

SEQ ID NO: 154831 - DNA, 201 bp, Homo sapiens
ggccaaggcgggcggatcacctgaggtcaggagttcgagaccagcctggccaacatggcgaaaccccgtctctactaaaaatacaaaaaattagctgggcrtggtggcgtatgcctgtaatcccagctactcgggaggctgaggcagggagaattgcttgaaactggaggcggaggttgcagtcagccgagattggcgcca

SEQ ID NO: 154832 - DNA, 201 bp, Homo sapiens
gcgcacgcacgcgcacacacgcacacaaagacgcacacacacgtgcgcacacagacgcatgcacacgcacactgacgcacgcacacagacgcacgcacacacgcgcgcgcgcgcacacacacacgcacacacccacgcactcgcacacacacgcacgcgcacacacgcacacgcgcacacacgcgcacacacacaaaatta

SEQ ID NO: 154833 - DNA, 201 bp, Homo sapiens
tgtaggaaaaaattgtgttacagatgagtaattacatactttgcacataatatattaagtcaaccaaaaaagtagagttcaaaactatatttactctgggytggacgtggtggctcacgcctgtaatcctagcacttagggaggctgaggtgggcagatcacttgaggccaggagttcaagaccagcctggccatcatggt

SEQ ID NO: 154834 - DNA, 201 bp, Homo sapiens
acgtgcgcgcacgcacgcgcacacacgcacacaaagacgcacacacacgtgcgcacacagacgcatgcacacgcacactgacgcacgcacacagacgcacgcacacacgcgcgcgcgcgcacacacacacgcacacacccacgcactcgcacacacacgcacgcgcacacacgcacacgcgcacacacgcgcacacacaca

SEQ ID NO: 154835 - DNA, 201 bp, Homo sapiens
cacacgtgcgcgcacgcacgcgcacacacgcacacaaagacgcacacacacgtgcgcacacagacgcatgcacacgcacactgacgcacgcacacagacgcacgcacacacgcgcgcgcgcgcacacacacacgcacacacccacgcactcgcacacacacgcacgcgcacacacgcacacgcgcacacacgcgcacacac

SEQ ID NO: 154836 - DNA, 201 bp, Homo sapiens
cacacacacgtgcgcgcacgcacgcgcacacacgcacacaaagacgcacacacacgtgcgcacacagacgcatgcacacgcacactgacgcacgcacacasacgcacgcacacacgcgcgcgcgcgcacacacacacgcacacacccacgcactcgcacacacacgcacgcgcacacacgcacacgcgcacacacgcgcac

SEQ ID NO: 154837 - DNA, 201 bp, Homo sapiens
agctaatcccagtattgctcagtggcatatagaagctcatgatacatatgtgaagagaaactgtgcacctcaggagctggaaaaagctttgtaaattaggyagcccttgtgccaggtggtgaaagattgttgggagttaccaaggaaagaaggcagatgacagctggcataccagctctgtggcatccaagaacctggtat

SEQ ID NO: 154838 - DNA, 201 bp, Homo sapiens
acgcacacacacacgtgcgcgcacgcacgcgcacacacgcacacaaagacgcacacacacgtgcgcacacagacgcatgcacacgcacactgacgcacgcrcacagacgcacgcacacacgcgcgcgcgcgcacacacacacgcacacacccacgcactcgcacacacacgcacgcgcacacacgcacacgcgcacacacg

SEQ ID NO: 154839 - DNA, 201 bp, Homo sapiens
aaagccagcagtatttcctgttggattagctgtaagtggtgacagaaagagaacagacaggatgaactttaagataatgatccagggtatgtatgtgataygtcagcatggacagttgtcactcgtggggctaagtgacaggttttaataagtagcacttgctcctttcaaaggtgacaagtattgcaagaactggtacat

SEQ ID NO: 154840 - DNA, 201 bp, Homo sapiens
cacacgcacgcacacacacacgtgcgcgcacgcacgcgcacacacgcacacaaagacgcacacacacgtgcgcacacagacgcatgcacacgcacactgacgcacgcacacagacgcacgcacacacgcgcgcgcgcgcacacacacacgcacacacccacgcactcgcacacacacgcacgcgcacacacgcacacgcgc

SEQ ID NO: 154841 - DNA, 201 bp, Homo sapiens
acacacgcacgcacacacacacgtgcgcgcacgcacgcgcacacacgcacacaaagacgcacacacacgtgcgcacacagacgcatgcacacgcacactgacgcacgcacacagacgcacgcacacacgcgcgcgcgcgcacacacacacgcacacacccacgcactcgcacacacacgcacgcgcacacacgcacacgcg

SEQ ID NO: 154842 - DNA, 201 bp, Homo sapiens
agccaaacctgcagacgctaatgaatatcctttcttgaaggtgaattggaggaaaaaaagaaattagcaaaacttagggtatgaggtttttgttgtaaatrgtcgtagttactcctgagtcttactgtccacaaaacttttcaggggccgatttaatagtatttttcttatacctgtagaaaaatatactcagttgagaat

SEQ ID NO: 154843 - DNA, 201 bp, Homo sapiens
cacacacacacgcgcacacacgcacgcacacacacacgtgcgcgcacgcacgcgcacacacgcacacaaagacgcacacacacgtgcgcacacagacgcaygcacacgcacactgacgcacgcacacagacgcacgcacacacgcgcgcgcgcgcacacacacacgcacacacccacgcactcgcacacacacgcacgcgc

SEQ ID NO: 154844 - DNA, 201 bp, Homo sapiens
cctgtctctacacgcacacacacacgcgctcacacacacacgcgcacacacgcacgcacacacacacgtgcgcgcacgcacgcgcacacacgcacacaaagacgcacacacacgtgcgcacacagacgcatgcacacgcacactgacgcacgcacacagacgcacgcacacacgcgcgcgcgcgcacacacacacgcacac

SEQ ID NO: 154845 - DNA, 201 bp, Homo sapiens
aattgcttgaaactggaggcggaggttgcagtcagccgagattggcgccactgcactccaatctgggtgacggagcaagactccatctccaaaaaaaaaaraaaaaaaaaatttccaggcctggcacagtgcctcacatctgtaatcctagcacttcaggaggccacagcaggtggatcacttgagctcaggagttgggga

SEQ ID NO: 154846 - DNA, 201 bp, Homo sapiens
tgttttcaaacacattagtaacctcaaggtgagtgcttgtggaagaaagacaaggatggataaaaccaaatcagtcattagtagtaggaggtacgaggccrtgagtgatggctcacagctgtaatttagcactttgggagtctaaggcaggaggatcactagaactcaggagtttgagaccggcctgggcaagatagtgag

SEQ ID NO: 154847 - DNA, 201 bp, Homo sapiens
ccctgtctctacacgcacacacacacgcgctcacacacacacgcgcacacacgcacgcacacacacacgtgcgcgcacgcacgcgcacacacgcacacaaagacgcacacacacgtgcgcacacagacgcatgcacacgcacactgacgcacgcacacagacgcacgcacacacgcgcgcgcgcgcacacacacacgcaca

SEQ ID NO: 154848 - DNA, 201 bp, Homo sapiens
ctggaggctggggcatgagaattgcttgagcctgggaggcagaggttgcagtgagccgagattgcaccactgcactccagcctcggtgacagagggagacygtctcaaaacaaacaaacaaacaacaacaaaaaaaaaactatatgtactctgatcctagttaggtaaaaaatgcacacacaaatgactgaaaagctacta

SEQ ID NO: 154849 - DNA, 201 bp, Homo sapiens
tgctgaaaataactgttgaatcaaaatctggaggcgcagcttggccttttccttttcgagtttgctaggtgattctaacgtcagccagagaaccaatgctmtagtgtcacgtcctaaatttttcacagctgcttatacatttggaacttttagacattgaattgtaaagtatatcactaaatcacttattcttgcagtttg

SEQ ID NO: 154850 - DNA, 201 bp, Homo sapiens
atgttcatgattgagatcgcaggcgtgaaggtaccctctggctgtggcgcttttctccccagagaaatcagtacagagctttgtgccaccaagtactattwaaaaaaaaaattccctaagacttgcaaagtgtcagaacacggaaacataagataaaaatacagttaacgcttgttccttttaaatattgcagttcctacc

SEQ ID NO: 154851 - DNA, 201 bp, Homo sapiens
aatgcttaccacatactaggcccaatcctaaattcctaatgtatattaacttcacacaaagataaataaatatacatattttttttttctttttttttttyttttttttttgagacggagtcttgtgctgttgaccaggctggagtgcagtggcgctatcttagctcactgcaacctctgctcccgggttcaggcaattct

SEQ ID NO: 154852 - DNA, 201 bp, Homo sapiens
gtggtaacactcgttaacacttcaataatgcttaccacatactaggcccaatcctaaattcctaatgtatattaacttcacacaaagataaataaatatayatattttttttttctttttttttttcttttttttttgagacggagtcttgtgctgttgaccaggctggagtgcagtggcgctatcttagctcactgcaac

SEQ ID NO: 154853 - DNA, 201 bp, Homo sapiens
gctgagatgcccggttacagtcattagtagtaataatgggcttttcttcctccagttttccttccagcagggtggatggggagcatcgctggctgacaggstggtcaggtgagaatggtttccgatacttgagttcttatggatggaaaatgtcttagggatccgtcttatggatgaaggatagttctgaacagaacattc

SEQ ID NO: 154854 - DNA, 201 bp, Homo sapiens
taaacttcagaggagaaaaactagccaaggtaaaaggttatggttcctgtctgtccaatccatgttttttcttcaggaaagactgtacttcttaagaaaayagatctttagtcaaaagaatatgcttatttctgtctacttgttacactacaggaattttatccttatcctttttggcttcttttggttctgtgcattcat

SEQ ID NO: 154855 - DNA, 201 bp, Homo sapiens
tcatagactagttatctttttagctcccagaaaaatgttatagtacatgtaatctatgctgtatagtgttaatgagaaaaactaatacacacttctacttrgtaatttagttgattaagaagatatattctatgactgtaaaattgtcagctagatctgttgaactgttacctcttcaaagtccctcttccactcctgaag

SEQ ID NO: 154856 - DNA, 201 bp, Homo sapiens
ccatctctactaaaaatacaaaaattagccgggcacagtgacagatgcctgtaatcccagctactcaggaggctgaggcagagaattgcttgaacctgggrggtggaggttgtagtgagccgagattgcgccactgcactccagcctgggcgacagagcgagactccatctcaaaaaataataataataataataataggg

SEQ ID NO: 154857 - DNA, 201 bp, Homo sapiens
aggcatgcgccaccatgcccagctaatttttgtatttttagtagagacggggtttcatcctgttggtcagactggactcctgacctcaggtgatccacccrcctcggccttccaaaatgctgggattacaggcatgagccaccatgcccggcctctttttgttgttgttgttaaattttatttttttgagatggagtcttg

SEQ ID NO: 154858 - DNA, 201 bp, Homo sapiens
gagccaagatcacgctgctgcactcgagcctgggctacaaagcaagactcagtctcaaaaaaaaaaaaaattggggcaggtgcttctttttgtagtgcagyttcactttcttgctgttaaatgcattaactctagtctaatatcagagatgccaggctgcctctgggcaggatcagcaggctgtctctgggcaggatcatt

SEQ ID NO: 154859 - DNA, 201 bp, Homo sapiens
atcaaactgtgggctttgatgtaaatgtagtttactagactttccccagtctttcaccccagcctcaagtcatcactaattaggaccgtgctgctgtcagraagcactgcacgcccacaagtgtgtagggcggccgttctgtttcatggtaatcagtcccaccatgacctctgcacacacagatgattgttctttttttta

SEQ ID NO: 154860 - DNA, 201 bp, Homo sapiens
ttgggaggctgaggtgggcagatcacttaaggccaggagttagagaccaccttggccaacacagtgaaaacccatctctactaaaaaaatacaaaaattakctgggtgtggtggtgcagttacctgggaggctgaggcacaagaatcacttgaacccagaaggtggaggttgcagtgagccaagatcacgctgctgcactc

SEQ ID NO: 154861 - DNA, 201 bp, Homo sapiens
tcacactcaacagtctactgttgcatattggcatttgcttccagtgtttccaacatttttttcacattgttctttttatattattatggttgaagttttcygtgtttttccgggttactgcatagtacaaggttcgcgtgtatgccactccattgctgtcctcttccataatacagcttagttcacctcatcccttctcta

SEQ ID NO: 154862 - DNA, 201 bp, Homo sapiens
tttgctccagggcacaaaaaataagtagcacaaatgcagatgtgaattctcttggaatttgatgcagaccctcttatgattttatctccggttttagaccrtgtacctcagtgcactcctttccttgtctgcatgccctttttctctaagaagttcagagcacttctcaagtggattaatgttatataggttatcattgtg

SEQ ID NO: 154863 - DNA, 201 bp, Homo sapiens
actcatgccacaaaagctatttatagatggcttctttctgattatgtcaaagttaggtaaattactttattagattatacacgactttggctctatatggyatgtatggttcaagatatggaccattttgtgttttaaaatgaggtgctcccttttcatgtataaggatatcagtaatttcatcattcattaacaaggtca

SEQ ID NO: 154864 - DNA, 201 bp, Homo sapiens
ggatcacttgaggctaggagttcaagaccagcctggccaacatggtgaaaccctgactctactaaaaatacaaaaattagctggctgtggtggtgcacacytgtaatcccagctactagggaggctgaggcaggagaatcacttgaatccgggaggcggaggttgtagtgagccaagattgtgccactgcgctccagcctg

SEQ ID NO: 154865 - DNA, 201 bp, Homo sapiens
gatcatgagtaagtagtggtacagaagttaggaacggtgacgtggggaagagggttaggtgcggagagcagaatcacgcccagggctttgggccacgcagytttcagctgtaaggcccccatccttctaagagcacagctggccttcacttcctatcttagtctgttcagttcaaatcaaatgccaccagggttgctttct

SEQ ID NO: 154866 - DNA, 201 bp, Homo sapiens
ctgcatgccctttttctctaagaagttcagagcacttctcaagtggattaatgttatataggttatcattgtgagatgatactgggaatagattattcccrtttactagaggaaataattgaagcactgaaccgtttactgactgaactacacattttgaattggacacaagcactgcatgtaaatttcatcagttttaga

SEQ ID NO: 154867 - DNA, 201 bp, Homo sapiens
tggatggtaaagagcagacagtgaggaaaatgtcaatgacacagcagtgttgagttcctcagaaggagggagggagtacgtagagtagaatggtggaaagwttcattgtggaaagagaggtctattctatctatagaggagaaatagaaggagacagatgtgggcaggttggtaccctgttggtacatgtattcttaatta

SEQ ID NO: 154868 - DNA, 201 bp, Homo sapiens
accctgtctctacacgcacacacacacgcgctcacacacacacgcgcacacacgcacgcacacacacacgtgcgcgcacgcacgcgcacacacgcacacaaagacgcacacacacgtgcgcacacagacgcatgcacacgcacactgacgcacgcacacagacgcacgcacacacgcgcgcgcgcgcacacacacacgcac

SEQ ID NO: 154869 - DNA, 201 bp, Homo sapiens
ctccagccctaagcaaccactaatctacttctttatagatttgcctgttctggacatttcatgtaagtgtgatcatacaatacatactcttttgtctctgrcatctttcatttagcataatctttccaaggttcaaaattgaggagttttgttcattcaataagtattttttgtgatgtgctacatgccaggtactgtagc

SEQ ID NO: 154870 - DNA, 201 bp, Homo sapiens
aaccctgtctctacacgcacacacacacgcgctcacacacacacgcgcacacacgcacgcacacacacacgtgcgcgcacgcacgcgcacacacgcacacaaagacgcacacacacgtgcgcacacagacgcatgcacacgcacactgacgcacgcacacagacgcacgcacacacgcgcgcgcgcgcacacacacacgca

SEQ ID NO: 154871 - DNA, 201 bp, Homo sapiens
aaaaccctgtctctacacgcacacacacacgcgctcacacacacacgcgcacacacgcacgcacacacacacgtgcgcgcacgcacgcgcacacacgcacacaaagacgcacacacacgtgcgcacacagacgcatgcacacgcacactgacgcacgcacacagacgcacgcacacacgcgcgcgcgcgcacacacacacg

SEQ ID NO: 154872 - DNA, 201 bp, Homo sapiens
ttttcgtggttaaatccatatgttgttttcatagttcaaaggtgttatggtcttcattatgatgaactgcattttattacctgaaaaactgcattttaccrggttctattttcttcaagtattttttttttacaggttatgggatttttagcagacaaaaaaccagaacaaggccagcgggtctcaggaatacttgttaaa

SEQ ID NO: 154873 - DNA, 201 bp, Homo sapiens
taaaaccctgtctctacacgcacacacacacgcgctcacacacacacgcgcacacacgcacgcacacacacacgtgcgcgcacgcacgcgcacacacgcacacaaagacgcacacacacgtgcgcacacagacgcatgcacacgcacactgacgcacgcacacagacgcacgcacacacgcgcgcgcgcgcacacacacac

SEQ ID NO: 154874 - DNA, 201 bp, Homo sapiens
ctaaaaccctgtctctacacgcacacacacacgcgctcacacacacacgcgcacacacgcacgcacacacacacgtgcgcgcacgcacgcgcacacacgcacacaaagacgcacacacacgtgcgcacacagacgcatgcacacgcacactgacgcacgcacacagacgcacgcacacacgcgcgcgcgcgcacacacaca

SEQ ID NO: 154875 - DNA, 201 bp, Homo sapiens
gctaaaaccctgtctctacacgcacacacacacgcgctcacacacacacgcgcacacacgcacgcacacacacacgtgcgcgcacgcacgcgcacacacgcacacaaagacgcacacacacgtgcgcacacagacgcatgcacacgcacactgacgcacgcacacagacgcacgcacacacgcgcgcgcgcgcacacacac

SEQ ID NO: 154876 - DNA, 201 bp, Homo sapiens
gctgtggcgcttttctccccagagaaatcagtacagagctttgtgccaccaagtactattaaaaaaaaaaattccctaagacttgcaaagtgtcagaacayggaaacataagataaaaatacagttaacgcttgttccttttaaatattgcagttcctacctccattacaatactttctttatcaagactgaggaaaaaaa

SEQ ID NO: 154877 - DNA, 201 bp, Homo sapiens
atgctaaaaccctgtctctacacgcacacacacacgcgctcacacacacacgcgcacacacgcacgcacacacacacgtgcgcgcacgcacgcgcacacacgcacacaaagacgcacacacacgtgcgcacacagacgcatgcacacgcacactgacgcacgcacacagacgcacgcacacacgcgcgcgcgcgcacacac

SEQ ID NO: 154878 - DNA, 201 bp, Homo sapiens
catgctaaaaccctgtctctacacgcacacacacacgcgctcacacacacacgcgcacacacgcacgcacacacacacgtgcgcgcacgcacgcgcacacacgcacacaaagacgcacacacacgtgcgcacacagacgcatgcacacgcacactgacgcacgcacacagacgcacgcacacacgcgcgcgcgcgcacaca

SEQ ID NO: 154879 - DNA, 201 bp, Homo sapiens
acatgctaaaaccctgtctctacacgcacacacacacgcgctcacacacacacgcgcacacacgcacgcacacacacacgtgcgcgcacgcacgcgcacacacgcacacaaagacgcacacacacgtgcgcacacagacgcatgcacacgcacactgacgcacgcacacagacgcacgcacacacgcgcgcgcgcgcacac

SEQ ID NO: 154880 - DNA, 201 bp, Homo sapiens
ataatgccactgcattccagcctagtgacacagcaagactccatctcaaaaaaaaggaaaaattgcacaaaactaataagattacatttaagtttgtaaaytgcttttttcccatagttgatacacatttccatatgcattctttgtctttataaatttactgagccatcaataagtcattttccaatgaatatggtatta

SEQ ID NO: 154881 - DNA, 201 bp, Homo sapiens
aacatgctaaaaccctgtctctacacgcacacacacacgcgctcacacacacacgcgcacacacgcacgcacacacacacgtgcgcgcacgcacgcgcacacacgcacacaaagacgcacacacacgtgcgcacacagacgcatgcacacgcacactgacgcacgcacacagacgcacgcacacacgcgcgcgcgcgcaca

SEQ ID NO: 154882 - DNA, 201 bp, Homo sapiens
ttccagcctagtgacacagcaagactccatctcaaaaaaaaggaaaaattgcacaaaactaataagattacatttaagtttgtaaattgcttttttcccawagttgatacacatttccatatgcattctttgtctttataaatttactgagccatcaataagtcattttccaatgaatatggtattattttcgagtaaata

SEQ ID NO: 154883 - DNA, 201 bp, Homo sapiens
tggtgcacacctgtaatcccagctactagggaggctgaggcaggagaatcacttgaatccgggaggcggaggttgtagtgagccaagattgtgccactgcrctccagcctgggccacagagcaagactccatctcaaaaaaaaaaagaaaaaaagtaaatacagtattctgctttagaactaggacctatcttcagtttta

SEQ ID NO: 154884 - DNA, 201 bp, Homo sapiens
tgggaagttagaattgttaatggcatatttgccacatttaataagaatcatgttccaagtgctagtgcctggagtccatcttgagtatatgggtgatggawctagaattattgcctatttgccgaatgaattttaataaaatgtgcaggagattgtgatctcttttcctgtttctttcagctcgactgtgggatccaccct

SEQ ID NO: 154885 - DNA, 201 bp, Homo sapiens
gggaggcggaggttgtagtgagccaagattgtgccactgcgctccagcctgggccacagagcaagactccatctcaaaaaaaaaaagaaaaaaagtaaatmcagtattctgctttagaactaggacctatcttcagttttattttttcctcaaatatataaagccgggcattttcactaatcctgcatttctgcttatttt

SEQ ID NO: 154886 - DNA, 201 bp, Homo sapiens
aagtaaatacaggctgggcatggtgactcctgcctgtaatcccaacactttgggaggccaaggcaggtggatcacttgaggctaggagttcaagaccagcytggccaacatggtgaaaccctgactctactaaaaatacaaaaattagctggctgtggtggtgcacacctgtaatcccagctactagggaggctgaggcag

SEQ ID NO: 154887 - DNA, 201 bp, Homo sapiens
gtatctcctttacacaatcattcagtaaggcttcattgagcacctgcttgggacatagtccgtttccttctgcttagttcacacctgtcatgtcttcctgygatgagcaaacactgagcaagtgtcaagcaccacacatggggatatagacgcaacagagggcccagttaattgctctcgctcttttggagagaattacag

SEQ ID NO: 154888 - DNA, 201 bp, Homo sapiens
tgccgtgagtttcgatcttctcagctcaggccctagtagaataaggaaggtgtaaagctggagaagagaaagtgcagaggtgttagggacaaaaactcagycctcgactgtccataaggagagtggcctttcagtggacacgatcctcatcagtcgggaatgctgctgaaggggagatgcaaatgtagagaacttgaattc

SEQ ID NO: 154889 - DNA, 201 bp, Homo sapiens
agtggcgcgatctcagctcactgcaagctccgcctcccaggttcacgccattctcctgcctcagcctcccgagtagctgggactacaggcgcccgccaccwcggccagctagttttttgtatttttagtagagacggggtttcattatattggccaggatggtctcaatctcgtgacctcatgatccgcctgccttggcct

SEQ ID NO: 154890 - DNA, 201 bp, Homo sapiens
tgctcttggaagggctcaggagctgctcttgattctaggtatgccatttcctttgtatttaggcgatgatcaaaatcttgtcattttatcaagataataaygtggtcttggatgagtcattccaccgttctggacttcagttttcttcatttaaaaatagagatttggggccgggcgcggtggctcacgcctgtaatccca

SEQ ID NO: 154891 - DNA, 201 bp, Homo sapiens
aaggaaacaaaaagtattaaccggtttaagttgaaacacaacgaatgtatttactaaaactatttaatcaaaaccagaaatctcaaatattctatagactrtttaaatataaaccaaactaaactatttaagttccaggatattagtgactttttacctgagatacttgctcagattatctatctgttgtgaactccattt

SEQ ID NO: 154892 - DNA, 201 bp, Homo sapiens
ctctccctgctttatgattctgttccaaattccatttccctaccttgctcttagtactgatttcgctactttgggaactgctactactgtgtcgttttttrcccttgcgaaacatttttcaccaccattgcttgatccagagaagatcccctgaaaaaacaaatattggtaacagttacatcgggaaaagcaacttttttt

SEQ ID NO: 154893 - DNA, 201 bp, Homo sapiens
agcactttgggaggcacaggggagcagattgcttgaacccaggagtttgagaccaacttgggcaacatgctaaaaccctgtctctacacgcacacacacacgcgctcacacacacacgcgcacacacgcacgcacacacacacgtgcgcgcacgcacgcgcacacacgcacacaaagacgcacacacacgtgcgcacacag

SEQ ID NO: 154894 - DNA, 201 bp, Homo sapiens
cagcactttgggaggcacaggggagcagattgcttgaacccaggagtttgagaccaacttgggcaacatgctaaaaccctgtctctacacgcacacacacacgcgctcacacacacacgcgcacacacgcacgcacacacacacgtgcgcgcacgcacgcgcacacacgcacacaaagacgcacacacacgtgcgcacaca

SEQ ID NO: 154895 - DNA, 201 bp, Homo sapiens
acaacaatctcactgaacccgttttctcatatggaaataagataaaacttgaagagtgaacatcgcggtaggtgctttgtaaataatagctaatctaagarcgcaggcaggcattgcactgagcactgtgaaagtatggaaaagggatttctgacagattgaggaaaaaaggatacctcgtggatcctgaaaaatgtgatg

SEQ ID NO: 154896 - DNA, 201 bp, Homo sapiens
gtcttatattatattttcctgtttataggtgaggccataagattatttctggtattttcccccatatcatacacacacacacacacacacacacgcgcgcgtttatatataaaaaatatataaaagaggaaattggttatgtatatttattatttatcaaactgacttcttcccatccaaacttgagattttcacatttgg

SEQ ID NO: 154897 - DNA, 201 bp, Homo sapiens
agtcttatattatattttcctgtttataggtgaggccataagattatttctggtattttcccccatatcatacacacacacacacacacacacacgcgcgcgtttatatataaaaaatatataaaagaggaaattggttatgtatatttattatttatcaaactgacttcttcccatccaaacttgagattttcacatttg

SEQ ID NO: 154898 - DNA, 201 bp, Homo sapiens
gcccggcacggtggctcacgcctgtaatcccagcactttgggaggtcgaggtgggcagatcacaaggtcaggagttcgagaccatcctggccaacgtggtraaaccccatctctactaaaaatacaaaaattagctgggtgtggtggcatgtgcctgtagtcccagctacttgggaggctgtggcaagagagttgcttgaa

SEQ ID NO: 154899 - DNA, 201 bp, Homo sapiens
gtctcgctctgtctccaggctggagtgcagtggcgcgatctcagctcactgcaagctccgcctcccaggttcacgccattctcctgcctcagcctcccgaktagctgggactacaggcgcccgccaccacggccagctagttttttgtatttttagtagagacggggtttcattatattggccaggatggtctcaatctcg

SEQ ID NO: 154900 - DNA, 201 bp, Homo sapiens
gaacctgggaggcggagcttgcagtgagccgagatcacgccactagactctagcctgggcgacggagcgagactcggtctcaaaaaaaaaaaaaaaaaaaagtataaaaattaggtaggcatggtggttcacacctgtatcccagctacttggaggctgaggcatgagaatcccttgaaccctggaggcagaggctgcagt

SEQ ID NO: 154901 - DNA, 201 bp, Homo sapiens
tttgggaggccaaggcgagcagatcacgaggtcaggagatggagaccatcctggctaacacggtgaaaccccgtctctactaaaaatacaaaaaaattagmcgggtgtggtggcaggtgcctgtagtcccagctactcgggaggccgaggcaggagaatggcgtgaacctgggaggcggagcttgcagtgagccgagatca

SEQ ID NO: 154902 - DNA, 201 bp, Homo sapiens
gtcttgctctgttgcctaggctggagtgcagtggcgccaatctcagctcactgcagcttctgcctcctgggttaaagcaattctcctgcctcagccttccrggtagctgggattacaggcacgtgccaccacgcccagctaatttttgtatttgtagtagagacaggttttcaccatgttggccaggctgttctcaaactc

SEQ ID NO: 154903 - DNA, 201 bp, Homo sapiens
ccaaatgtattggaaagcaggagaaatggccttttgttagttttgtttgtttgcttgttgtttggggtgttttttggtttgtttgtttgtttgtttgtttggatgaagtcttgctctgttgcctaggctggagtgcagtggcgccaatctcagctcactgcagcttctgcctcctgggttaaagcaattctcctgcctcag

SEQ ID NO: 154904 - DNA, 201 bp, Homo sapiens
aatctggaaaggatagaaattattaaattaagtgatatggttcctattagaattttaaactccaccttgtggagtttggaagacagataccaaaggaattrcatggttgattttgatagattggcacctattaagtttaaagaaggactttcaaagtgagtcctatcattgaatagtccagggaggtaccttgtctactgc

SEQ ID NO: 154905 - DNA, 201 bp, Homo sapiens
ttacttttctgcctgcctgctaggcgctgaagatggtcctgatggttctgatggccctctagctaccaacagaaggttttgaagatcggggtgaacttacygctttttattacttggtttttctaccattcctagcctaaactgtttaggaatttggcaactgaacttaaaatgtttacagatcttgtgaaggctctttca

SEQ ID NO: 154906 - DNA, 201 bp, Homo sapiens
ttgttagctttctgaaaaacatgttcacatttacttgcttttatttcttttttctttgctcctggtatgtgttttgtaggactagtatttcttcaagtctmttctcattttctcttcagattatactgacctggccatgagcacggtgaagcagacccaagccattccatatactggtccctttaatttgctctgttacca

SEQ ID NO: 154907 - DNA, 201 bp, Homo sapiens
gagacccggtctcgcagtgccgcccaggctggagtgcagtggtgcagtcacagctcactgcagcctcaaccttcccggctcagtgatcctcccacctcagmctcttatctgggaccacaggcacacgccaccacagctggctaattttttatgagatgatggtttttttaaagagtattcatttatcttctatataatcat

SEQ ID NO: 154908 - DNA, 201 bp, Homo sapiens
atgcaaagctattgtgagtctttgggaatattttttcagagttgtgtcttgggtagatcaagacccatttgactcttccttttacttttctgcctgcctgytaggcgctgaagatggtcctgatggttctgatggccctctagctaccaacagaaggttttgaagatcggggtgaacttaccgctttttattacttggttt

SEQ ID NO: 154909 - DNA, 201 bp, Homo sapiens
gggattttcacatttagagcagagtcagcgactgtggcccacaagccacacctagcccgcctgctttggtaagtatagtgttaccgaaacacagccgtgcrcactggttcatcatctctgatgcctctttcctgctacagcagcagaactgagtcattgcaacagcgaccctgtggtttacaaagcctagaatgccatctg

SEQ ID NO: 154910 - DNA, 201 bp, Homo sapiens
aaaagcctccacatctttggactatgatcatagcattctttttaggtcatgcactatttagaaataagttttggttttgtaaatttaagttagttacaacsaggataattttgcttaaactctttaaaatatagttgtgtgctttatttcttggttgtatgtgtatcatttcttgttctgtgtgtatcatttgttatttga

SEQ ID NO: 154911 - DNA, 201 bp, Homo sapiens
tactgagcacctgctccccagcaggcatgcctcaaagtgcttaggaaacatcagtgaacaaagcaaacagatctgccccctccaaggatctgacattctgscatgtcccagggcttcctgatagggtttggagttgggcagatcccatagggtcttgttggctattgtaaggacctcagactttcagtgtgagtaaaatga

SEQ ID NO: 154912 - DNA, 201 bp, Homo sapiens
tgttgttttttaaatacgttttactgtggtaaaatatctaacataaaatttgcagttttaaccatttttaagtgtacaaaccagtggcattaattatattsacagtgttgtacaaccatcaccactgtctattttcacagcttttcatcactccaagcagaaactctgtaccgttacacagtaactccccattcccttccg

SEQ ID NO: 154913 - DNA, 201 bp, Homo sapiens
acagtaactccccattcccttccgccaaccctggtaatctcaaatctactttctgtttctatgaatttgactattctaggtatttcatataagaggaatcrtaatgcctatgatgttttcaaggttcatcatgttgtggcatgtatcagcacttcatgccgaagtcatggtccgttatatgtagaccacatgttgtttatc

SEQ ID NO: 154914 - DNA, 201 bp, Homo sapiens
agtcatggtccgttatatgtagaccacatgttgtttatccattcacctgtgggtggacactcgggttgtgtcactttacagcaaatgtgaagtggtatctygttgtggtttttattttcatttctctaatgactaatgatgttgagcaccttttcatgcagtcttttgttcgtttttgagttttttctagcatgataggcc

SEQ ID NO: 154915 - DNA, 201 bp, Homo sapiens
gtgctggctatgcccagccacaagccatctaccacatgtgagaggctaagaacaatctatcttggccgggctgcagtcccagcactttgggaggccgatgygggtggatcacttgaggccaggagttcgagaccagcctggccaacatagtgaaaccccatctctactaaaagtataaaaattaggcagggcacggtggct

SEQ ID NO: 154916 - DNA, 201 bp, Homo sapiens
tgattcctctttcttctcaactcctcccaatctgaaaagaacatgtataggtcagacatagtcatccttttagtcatctgttttgttaatttggtagtaaygccataaaaataagtaactttaatgactgagtcttaagaatttgttccctaatgccttaaaatatttaaattaccctgatcaggtaagtttcccatttct

SEQ ID NO: 154917 - DNA, 201 bp, Homo sapiens
ctcgatatcctgatctcgtgatctgcctgcctcggcctcccaaagtgctgggattacaggcgtgagccaccgcacccggccatttaaatttaagccatttrgcaaatacacattatgatcttaaagaagatgacagtgttgaaatgcttatggctttctacttaagtgctaattctagaagtattattatataatctgcgt

SEQ ID NO: 154918 - DNA, 201 bp, Homo sapiens
aataaccacaaatctattttataattgtcttaataataaatcacctattccctaggagtttaattttactaataactatgttaaataaattataggatgcrtttgaattttcaggatgattgtttgaaagttgttgtttcccccagtggtaccatttggtcatttgtacctctcttgtcctcagacccttcctgctgcact

SEQ ID NO: 154919 - DNA, 201 bp, Homo sapiens
gaaaaatagtgaaattaaatgtttttcaatttatcacataattatcttatatttcttgctggtttacatataaaaataaccacaaatctattttataattgtcttaataataaatcacctattccctaggagtttaattttactaataactatgttaaataaattataggatgcgtttgaattttcaggatgattgtttga

SEQ ID NO: 154920 - DNA, 201 bp, Homo sapiens; identical to SEQ ID NO: 28803

SEQ ID NO: 154921 - DNA, 201 bp, Homo sapiens; identical to SEQ ID NO: 28804

SEQ ID NO: 154922 - DNA, 201 bp, Homo sapiens
ctacgtcccaagttcaagcgattctcctgcctcagcctcccaagtagctgggactacaggcacgcaccactgcgcccgcctcatttttgtatttttagtaragatggggtttcaccatgttggccagactggtcttgaactcctgccctcaagtgatccagccgcctcagcctcccaaagtgctgggattacatgtatgag

SEQ ID NO: 154923 - DNA, 201 bp, Homo sapiens
gaaaactggtaaaattcaagtaaggtctatagtctcattcattgtattatgccagttgttttcctgatcctaataaagcataattatgaaagatgtcaccrtagggggaagctgggtgatgagtacaaagatcttctttgtattacatttgcagcttattgtgagcatataattagttttattaaaaagtttaaggctggg

SEQ ID NO: 154924 - DNA, 201 bp, Homo sapiens
gtcccaccaacagtgtaaaagtgttcctatttctccacatcctctccagcacctgttgtttcctgactttttaatgatcgccattctaactggtatgagayggtatctcattgtggctttgatttgcatgtctctgatggccagtgatgatgagcattttttcatgtgtcttttggctgcagaaatgtcttcttttgagaa

SEQ ID NO: 154925 - DNA, 201 bp, Homo sapiens
tttacagtcccaccaacagtgtaaaagtgttcctatttctccacatcctctccagcacctgttgtttcctgactttttaatgatcgccattctaactggtrtgagatggtatctcattgtggctttgatttgcatgtctctgatggccagtgatgatgagcattttttcatgtgtcttttggctgcagaaatgtcttcttt

SEQ ID NO: 154926 - DNA, 201 bp, Homo sapiens
caatggtggaactagtttacagtcccaccaacagtgtaaaagtgttcctatttctccacatcctctccagcacctgttgtttcctgactttttaatgatcrccattctaactggtatgagatggtatctcattgtggctttgatttgcatgtctctgatggccagtgatgatgagcattttttcatgtgtcttttggctgc

SEQ ID NO: 154927 - DNA, 201 bp, Homo sapiens
acttcatgggaggagcaacgagcatctcatgaaactctgttctgtacgaagcccttgcatcaagtgtttgcctcatttacaagaaaaggagaaaagttggwtatgagtctggtctcctaatagattgttttcactgcactgggagcacatcagaggtaagtaaccagtactgaagacagtaccaggtgggtagtactgtct

SEQ ID NO: 154928 - DNA, 201 bp, Homo sapiens
ccctgaggaatcgccacactgacttccacaatggtggaactagtttacagtcccaccaacagtgtaaaagtgttcctatttctccacatcctctccagcayctgttgtttcctgactttttaatgatcgccattctaactggtatgagatggtatctcattgtggctttgatttgcatgtctctgatggccagtgatgatg

SEQ ID NO: 154929 - DNA, 201 bp, Homo sapiens
ctagttctagatccctgaggaatcgccacactgacttccacaatggtggaactagtttacagtcccaccaacagtgtaaaagtgttcctatttctccacakcctctccagcacctgttgtttcctgactttttaatgatcgccattctaactggtatgagatggtatctcattgtggctttgatttgcatgtctctgatgg

SEQ ID NO: 154930 - DNA, 201 bp, Homo sapiens
tagcagcatgttttataatcctttggatatatacccagtaatgggatggctgggtcaaatggtatttctagttctagatccctgaggaatcgccacactgwcttccacaatggtggaactagtttacagtcccaccaacagtgtaaaagtgttcctatttctccacatcctctccagcacctgttgtttcctgacttttta

SEQ ID NO: 154931 - DNA, 201 bp, Homo sapiens
tctcattttttattctgatattggtcatttgtgcttgctttcactccatttctgtctcctcgatcagtcttggtgtgttttatcacttttgtgcctttttkcaaagaaccaacttttggctttgctgattttctctcgttcatttgttttgtattttcattgatttctgctcattattattttcttccattactctctgaa

SEQ ID NO: 154932 - DNA, 201 bp, Homo sapiens
ttttatttatagtttgtgaagagttttaatcatgatattatgatattaaattttctcaaatatttttactgcatatattaagggaatcatatgttttctcycttattttattaatttgtggtatatattgattgctgtttaaatgataaattgccctcacattctcatagtaaacctaatttggtttgatgtatcatcttt

SEQ ID NO: 154933 - DNA, 201 bp, Homo sapiens
ctaatgataaggctgagtcatgggtcagttatggtggatggagccagaagactcatttcactgtgaagacaaatggacatgacacgtcagcacacacttaytcctccctacggagcagtctctaaatggaaatccttccagactggctgagagagagattttttggtgaacctgtttcagttaaatgtgacatgggcaata

SEQ ID NO: 154934 - DNA, 201 bp, Homo sapiens
ttcttttatattgcctttgtccttcctccattgccacagctcaaatattagtcatatatggagtaaatatcaggtgatttggatatcaggattatgacagyagtctgccagttggtgcatcttctagtatttctgcttttccaataaatcctgcacagccaagaaaatgcttcatgaaacaccgcaccattgctctgctca

SEQ ID NO: 154935 - DNA, 201 bp, Homo sapiens
aatagcttgattctgttgagaaacactgatctaaataaatggaaaaataacccacattcactaatgaagataataaggaagacccaatatttttttttttwaaaaaggaaagtatttttagcttttatgaaagctttaagtaatttttcctcattttcctgtttgaaacttttgaaaaggaagttcttcagtgtttggtta

SEQ ID NO: 154936 - DNA, 201 bp, Homo sapiens
ctaggaaacttgtaataggccagaaatggtagtagcttgaactacaatggtggcattgcagatggggaaaatggaaatattttagagatactaggaatgtwtattcaataggatctggtaatggattgggactgggtcagggagaaggtgtaaggaagaaagtactggtttacacagctatagatggataatggttccagt

SEQ ID NO: 154937 - DNA, 201 bp, Homo sapiens
atagcttgattctgttgagaaacactgatctaaataaatggaaaaataacccacattcactaatgaagataataaggaagacccaatatttttttttttawaaaaggaaagtatttttagcttttatgaaagctttaagtaatttttcctcattttcctgtttgaaacttttgaaaaggaagttcttcagtgtttggttag

SEQ ID NO: 154938 - DNA, 201 bp, Homo sapiens
agttttaaaaagaatttctgagcgcgtcagtgaatttggttatcctatttttctctgggtcatcattatcattgataacagagaagtaactatattcagcytaagatgacttaagctgagactttagataataaaagtatatggggtaagatttattgttactttaagactaaaaataagtttggtgactttatgtagtgg

SEQ ID NO: 154939 - DNA, 201 bp, Homo sapiens
cctatggctggcgcccataattttaagtgcctctgactttaagagctgcctagtggaagtttttttttttttttcttttgagacagagtcttgctctgtcrcctgggctagagtacagtggcacgattatcagctcactgcagtctctggctcccgagttcaagcaattctcctgcctcagcctcccgagtagctgggatt

SEQ ID NO: 154940 - DNA, 201 bp, Homo sapiens
tcagtgtgtctcatattttgtttcctaaaagtttagtagagctgtgaatgtactaggaagtcccctctgaaaaagcacagttagttagaaatctgcccatwaactcagggggactcaggcgccccccgggtcttccctctcctgcaggctctccggttagtgtcctgatttgccgtaaccatgggcctctgacctgctggc

SEQ ID NO: 154941 - DNA, 201 bp, Homo sapiens
tagttagaaatctgcccataaactcagggggactcaggcgccccccgggtcttccctctcctgcaggctctccggttagtgtcctgatttgccgtaaccaygggcctctgacctgctggcacctctggttccttggcgtgtgggtcactcacagatatgaaaacctgtgtctggctgaccaggttctcctgtagccctccc

SEQ ID NO: 154942 - DNA, 201 bp, Homo sapiens; identical to SEQ ID NO: 28806

SEQ ID NO: 154943 - DNA, 201 bp, Homo sapiens
cttgcttgtttctttttggtattttatccagcttgcatagttgttctcagagggcgggtcagcctggtaccttctgctgggccatagctagcagcgtaagmcttggagccctggcacttgaaaccccacactgtccaagcacaacttacccagccttgcctcttcacagccacctgttgtgtccaccctgtgcttagccta

SEQ ID NO: 154944 - DNA, 201 bp, Homo sapiens
agcgtaagccttggagccctggcacttgaaaccccacactgtccaagcacaacttacccagccttgcctcttcacagccacctgttgtgtccaccctgtgsttagcctagactttccacacaaccttttcttgctgctctctcagtcctgtccattcccatcaaaaatcgaattgttcttcagacctgtacaatctccact

SEQ ID NO: 154945 - DNA, 201 bp, Homo sapiens
accctgtgcttagcctagactttccacacaaccttttcttgctgctctctcagtcctgtccattcccatcaaaaatcgaattgttcttcagacctgtacartctccacttctgattcctggcattgtgacccatgagattcttcctctgcagtgaattcatagcaataactgaccggccactgtagcatttcttgatgtat

SEQ ID NO: 154946 - DNA, 201 bp, Homo sapiens
ttattctctgcctctgtttcttcatctggaaaatggaggtgaaaatagcactgtagttgtggttgtggaaaaagtatttcttttgtggtggaaaagtattkaactcagacttttcaagtgaagcatttagcacatgtctaatatataggaaatattcaatgaaaggcttaattctttacatactttgtgtcttaaaatgta

SEQ ID NO: 154947 - DNA, 201 bp, Homo sapiens; identical to SEQ ID NO: 28805

SEQ ID NO: 154948 - DNA, 201 bp, Homo sapiens
acgtgctatttgtaggcctatcttcacctacaagattgactggcccctttgtacagcagctcagttggtggctggcttattccactcatcttaacagttcktcatgtgccagaccttgtactagaactgtctttactgctggcttgttttctgccactagtgaaatagtttgaactttccaagtctccgtttcaccgtaaa

SEQ ID NO: 154949 - DNA, 201 bp, Homo sapiens
ctggttttataaattgacagatatctaacaattcagctggccacaaagttctggtaaaaaaaaaaaagagtcacctgttcttccctgagatgcttcctgtkgccacagtgagaaatcctcagcttcttgtaaaattctccttttactctccttaggtgttttagctcacttggaaaggctagagacccaagtgagcagatc

SEQ ID NO: 154950 - DNA, 201 bp, Homo sapiens
agccgtggcctcgggagcgcgccggggccgcgggatgggcgcgggggtgggcatggactctgctggctcggacgatgggagagggcgggcggctcaggaarggggatcctagccgtgacatttgtgtcatccgcggcccaggggttgtgcctgagtggtgtgtgccctgccgtctgggtttgaatgggactagatgtgatg

SEQ ID NO: 154951 - DNA, 201 bp, Homo sapiens
tctccagttcctatgaaagcacagagccttagggggcctggccacagaacacaaccatcttaggcctgagctgtgaacagcagggggttgtgtgtctgttytgtttctctgcttgccgaactttctcaataaaccctatttcttatttatatttacgtggtgctggtggtgtgtgtctgggaccactttgcacagcagttc

SEQ ID NO: 154952 - DNA, 201 bp, Homo sapiens
gtaaatactgccagtttttgaaagtgattgtactagttttacattcccagcaatagttgtataagatttcccttgttttgcatttttaccaatacttaaartggcctgccttgagttgttgatacttgtgtcatttttgacatctgtcatccagactcaacctcctagggagcttgacccttcccttttttcagttttctc

SEQ ID NO: 154953 - DNA, 201 bp, Homo sapiens
taagcccaggaagttgaggttgcagtgagctgagatcgtgccaccgcactccagcctgggtgacagagtgaaaccctatctcaaaaaaaaaaaaaaaaaaatttctcaatagtttgacatttaggttgttttttcatttttaccattcttccatggttttaacaactcagtctcaaagtgagccggagccaaggggaagaa

SEQ ID NO: 154954 - DNA, 201 bp, Homo sapiens
tcaatgatgagtattgtgtatgaaaaaatatacggaggtcaggtgctgtggctcacgcctgtaatcccagcactttgggaggccaaggcgggtggatcatstaacgtcaggagttcaagaccagcctggccaacatggtgaaaccctgtctctactaaaaatacaaaaattagcgaggcgtggtggcgcacacctgtaatc

SEQ ID NO: 154955 - DNA, 201 bp, Homo sapiens
caacctccgcctcctgattcaagcgattctcctgcctcagcctcctgagtagctgggattacagatgcccgccaccacacccagctaattttttgtttttygttttttgtttttttttttgagacggagtctcgctctgtcgcccaggctggagtgcagtggtgcggtctcggctcactgcaagttccacctcctgggttc

SEQ ID NO: 154956 - DNA, 201 bp, Homo sapiens
gcagagcagcgaatgttggtgaacagcaaatgctgctgcctgatcgttcctctggaagttttgtctcagaggagtacccagctgtgtgaggtgtcagtctrcctctactgggggatgcctcccagttaggctactcgggggtcagggacccacttgaggaggcagtctgtctgttctcagacctccagctgcgtgctggga

SEQ ID NO: 154957 - DNA, 201 bp, Homo sapiens
atgtgtctttatagcagcatgttttataatcctttggatatatacccagtaatgggatggctgggtcaaatggtatttctagttctagatccctgaggaaycgccacactgacttccacaatggtggaactagtttacagtcccaccaacagtgtaaaagtgttcctatttctccacatcctctccagcacctgttgtttc

SEQ ID NO: 154958 - DNA, 201 bp, Homo sapiens
ggttattttgcccattaattcatgcagtttcttcatagcattgctggtctttacaatttggcatgtttttgcagtggctggtaccggttgttcctttccaygtttagtgcttccttcaggagctcttttagggcaggcctggtggtgacaaaatctctcagcatttgcttgtctgtaaaggattttatttctccttcactt

SEQ ID NO: 154959 - DNA, 201 bp, Homo sapiens
tgtggatttgcgataaactgcagacctagataagacactgctgcctaatcagcgtgtgatagttcatatcctctctcgggctgtctttgaggaggatcctsttttacatcactctccaacctaggaggttgatgatctttgatttcaattgttagctcccctggttttataaattgacagatatctaacaattcagctggc

SEQ ID NO: 154960 - DNA, 201 bp, Homo sapiens
cttattatttgaattctccccactcatttgagaaggaaggacatggagttgtagttgcaaccagatgatttattcaaataggcagggattttgactttttytgggacaaagctgactggctaggatgagatgcaatcataacttccaaggtaaagcaggcccagcagatacactccctcttttctgtagtagcaacgctaa

SEQ ID NO: 154961 - DNA, 201 bp, Homo sapiens
aatattgttatgtgtgaatttgatcctgtcattatgatgttagctggttattttgcccattaattcatgcagtttcttcatagcattgctggtctttacartttggcatgtttttgcagtggctggtaccggttgttcctttccatgtttagtgcttccttcaggagctcttttagggcaggcctggtggtgacaaaatct

SEQ ID NO: 154962 - DNA, 201 bp, Homo sapiens
ttttgcttattatttgaattctccccactcatttgagaaggaaggacatggagttgtagttgcaaccagatgatttattcaaataggcagggattttgacyttttttgggacaaagctgactggctaggatgagatgcaatcataacttccaaggtaaagcaggcccagcagatacactccctcttttctgtagtagcaac

SEQ ID NO: 154963 - DNA, 201 bp, Homo sapiens
tggtagatcttcctccatccctttattttgagcctaagtgtgtctctgcacgtgagatgggtctcctgaatacagcacactgatgggtcttgactatccartttgccagtctgtgtcttttaattggagcatttagtctatttacatttaaggttaatattgttatgtgtgaatttgatcctgtcattatgatgttagctg

SEQ ID NO: 154964 - DNA, 201 bp, Homo sapiens
cccattattactgtgtgggagtctaagtctctttgtaggtctctaaggacttgctttatgagtctgggtgctcctgtattgggtgcatatatatttaggayagttagctcttcgtgttgaattgatccctttaccattatgtaatggtcttctttgtctcttttgatctttgttggttgaaagtctgttttatcagagact

SEQ ID NO: 154965 - DNA, 201 bp, Homo sapiens
atggtatctcattgtggctttgatttgcatgtctctgatggccagtgatgatgagcattttttcatgtgtcttttggctgcagaaatgtcttcttttgagwagtgtctgttcatgtcctttgcccactttttgatggggttgtttgtttttttcttgtacatttgtttgagttcattgtagattctggatattagcccttt

SEQ ID NO: 154966 - DNA, 201 bp, Homo sapiens
  misc_feature (1)...(201): n = A,T,C or G
gtgcagaaattctcatatcccagtttatttgagtgaaacagggaaaataggtagaatccatgaagtagacctcttgagacactttctctgtttatatactntacattactcagaccggtaagatagaacattcttgtttctaccagtcttttccttcctctttgtaaatggtaaacatgattgtccccattttcccttctc

SEQ ID NO: 154967 - DNA, 201 bp, Homo sapiens
gtgactttgcagccctcctgactgggcccttgcagagaaacccactgtgtaacttgctgtcatttacttacaaactggatccagggggtcagtccttcccrttctgtgctagattgctgtataaggacctcacagcaactcttcccactgacgtcaccgtgacatgtcaaggtaagaagggtgcctcagtgcagaaattct

SEQ ID NO: 154968 - DNA, 201 bp, Homo sapiens
cagaccaaaaaaaaaaaaaaaaaactgtatgggtccagtgggtccagaatatcagtgatccaggttccgattcccccagctgcactgagtgagattgaatrtcagtgatccaggctccgattcccccagctgcactgaatgagattgaatatcagtgatccaggctccgattcccccagctgcactgaatgagattgatgg

SEQ ID NO: 154969 - DNA, 201 bp, Homo sapiens; identical to SEQ ID NO: 28808

SEQ ID NO: 154970 - DNA, 201 bp, Homo sapiens; identical to SEQ ID NO: 28807

SEQ ID NO: 154971 - DNA, 201 bp, Homo sapiens
gtctgggtctgcctctagtgagttagtttgctagatgtgttatcagtcctggaattatttcataatttatagtattttacaccctctgccctcatcactcwcacacacacacacacagacacacacacagctgacgtgctatttgtaggcctatcttcacctacaagattgactggcccctttgtacagcagctcagttgg

SEQ ID NO: 154972 - DNA, 201 bp, Homo sapiens
gagaaatcctcagcttcttgtaaaattctccttttactctccttaggtgttttagctcacttggaaaggctagagacccaagtgagcagatcccgtaaacrgtctgaagagctgcagagcgtgcaggcccaggaaggtgctcttggaaccaagattcataaactaaggcgtctgcgagatgagctgagggctgtggtgcgg

SEQ ID NO: 154973 - DNA, 201 bp, Homo sapiens
gtttctctggcctctgcagcctattgtaggatgtgatgtggaatgggccggcttcatggccagagtgcagggtgggatgggcactcacagagtcaaaatcygagatgatttcattgaggaaacgcagacactcaataccaccattgttgatgctctcctctgtgtagaagtcagcaaagttgggcagggaggcaaacatga

SEQ ID NO: 154974 - DNA, 201 bp, Homo sapiens
tatcccaccctcttttcttttgaaactctggatggcgttgaagcctgggtactggttaaaggattatgcacccctgaatggtggtcttcaagcttttatcstaagattgtacagagtgcagttgctatacttttgatccatcagggatttatggcgtgcctactatgtaccataccgagtgccttgctgaaccttgggtat

SEQ ID NO: 154975 - DNA, 201 bp, Homo sapiens
tgttgtagtgtacctctttgtaccaagattgatttgctgcatatcttgcaggtgaaagcatgtattgccaatgtagaacccaaccaaacagtggagatcartgagcaagaagcattggaagagaaattggaaaatgtgaaagccattctgcaggcatatcattttacaggttttgtttgtttttttaacctaatttagtct

SEQ ID NO: 154976 - DNA, 201 bp, Homo sapiens
cattcttccatggttttaacaactcagtctcaaagtgagccggagccaaggggaagaatgagcctatgatactcattgaacaaacatttgtgtacaaagtrtacatattctaggcactgtggaagctactggaggcacagatgagtaagacatcaccttggcctgctgtctattgaggtgtcttcttgtttgcctcaggcc

SEQ ID NO: 154977 - DNA, 201 bp, Homo sapiens
aatgaaaaattgggtgaaatgtttttaggaggcagaaattttgaagctgccccagatttcacaccatcggtctttgatttctctgcgcagttagattccaktccccagtctctagattgcattggtccagtaaggggcagccttagtccagaccaaaaaaaaaaaaaaaaaactgtatgggtccagtgggtccagaatatc

SEQ ID NO: 154978 - DNA, 201 bp, Homo sapiens
gtgagttagtttgctagatgtgttatcagtcctggaattatttcataatttatagtattttacaccctctgccctcatcactcacacacacacacacacasacacacacacagctgacgtgctatttgtaggcctatcttcacctacaagattgactggcccctttgtacagcagctcagttggtggctggcttattccac

SEQ ID NO: 154979 - DNA, 201 bp, Homo sapiens
ctgcagtgaattcatagcaataactgaccggccactgtagcatttcttgatgtattatatcatgtgccttgtatttagctttcatccagttgggggagggyggggatgttgtagtgtacctctttgtaccaagattgatttgctgcatatcttgcaggtgaaagcatgtattgccaatgtagaacccaaccaaacagtgga

SEQ ID NO: 154980 - DNA, 201 bp, Homo sapiens
tcttattgcccttgtttcttgtttaataaatctttgtctaacttaagatcatgctgatcttttccaggtattttattttttttattttttttgtttttgaracagagtctcactttgttgcccaggcaggagtgcagtggcacgatccggcaccctccacctcctgggttcaagagattcttctgcctcagcctcccgagt

SEQ ID NO: 154981 - DNA, 201 bp, Homo sapiens
gtgtccgtgccagtttttctacctacagacacagacaaggcgaggcatgtgctctaagctggccactggatagaaggatgaaaaacaggaatggccaggcrtggcggttcatgcctgtaatcccagcactttgggaggccgaggcaggcggatcacctgaggtcaggagttcgagaccagcctgaccaacatggtgaaacc

SEQ ID NO: 154982 - DNA, 201 bp, Homo sapiens
gtatgagatggtatctcattgtggctttgatttgcatgtctctgatggccagtgatgatgagcattttttcatgtgtcttttggctgcagaaatgtcttcytttgagaagtgtctgttcatgtcctttgcccactttttgatggggttgtttgtttttttcttgtacatttgtttgagttcattgtagattctggatatta

SEQ ID NO: 154983 - DNA, 201 bp, Homo sapiens
cattctaactggtatgagatggtatctcattgtggctttgatttgcatgtctctgatggccagtgatgatgagcattttttcatgtgtcttttggctgcakaaatgtcttcttttgagaagtgtctgttcatgtcctttgcccactttttgatggggttgtttgtttttttcttgtacatttgtttgagttcattgtagat

SEQ ID NO: 154984 - DNA, 201 bp, Homo sapiens
accaaggcctcgttccagcgtcgcatctcatagacacgttccttctggtcgtggacctcaatcttccacaagaaaagtgtccgtgccagtttttctacctrcagacacagacaaggcgaggcatgtgctctaagctggccactggatagaaggatgaaaaacaggaatggccaggcgtggcggttcatgcctgtaatccca

SEQ ID NO: 154985 - DNA, 201 bp, Homo sapiens
taatgatcgccattctaactggtatgagatggtatctcattgtggctttgatttgcatgtctctgatggccagtgatgatgagcattttttcatgtgtctkttggctgcagaaatgtcttcttttgagaagtgtctgttcatgtcctttgcccactttttgatggggttgtttgtttttttcttgtacatttgtttgagtt

SEQ ID NO: 154986 - DNA, 201 bp, Homo sapiens
ttcctgactttttaatgatcgccattctaactggtatgagatggtatctcattgtggctttgatttgcatgtctctgatggccagtgatgatgagcatttwttcatgtgtcttttggctgcagaaatgtcttcttttgagaagtgtctgttcatgtcctttgcccactttttgatggggttgtttgtttttttcttgtaca

SEQ ID NO: 154987 - DNA, 201 bp, Homo sapiens
gggactcggggcgcggggagatcactctggaaggtctggggtagacaaaaggaagggtcagtctggcttctgtgacaccatctttctatccttctctagtrgaccctgatgacatacatggttgagggtggtggctcaagcaccatggctcaggccaagcgctggctctatcagagacctcaggctagtcaccagctgctt

SEQ ID NO: 154988 - DNA, 201 bp, Homo sapiens
cggggcgcggggagatcactctggaaggtctggggtagacaaaaggaagggtcagtctggcttctgtgacaccatctttctatccttctctagtggacccwgatgacatacatggttgagggtggtggctcaagcaccatggctcaggccaagcgctggctctatcagagacctcaggctagtcaccagctgcttcgcatc

SEQ ID NO: 154989 - DNA, 201 bp, Homo sapiens
tcgcggcacgaaagccagcgctgctggcagcggccgcccggcgcggaggctccgcgctgcctctgccaagaagcgcacgcggcccagcagctgccgggggractccagcaccgcgcccgggccaggacccgccatggcgaagtggcggaggtgagcacctagaggcgaccctgcccggggaacagctggcgcgaccgcgga

SEQ ID NO: 154990 - DNA, 201 bp, Homo sapiens
aaacttcctctttgtgtgttacatatttttcttcaccataccctaactaggcattgcagctgtttgagtcccatgcagggcatcttggcccacagctcttmaacaagtttgcactgccttacatccgtgatgtggccaagcaagtgaaggccaggttgcgggaggcaggcctggcaccagtgcccatggtgaggattggga

SEQ ID NO: 154991 - DNA, 201 bp, Homo sapiens
ccattaagagaagagcaggacctagaacgcctacgggatccagaagtggtagcctctgagctaggctatgtgttccaagccatcacccttacccgacaacsactggctggacgtgtgccgctgattggctttgctggtgccccagtaatgtgggacagggcagggactcggggcgcggggagatcactctggaaggtctgg

SEQ ID NO: 154992 - DNA, 201 bp, Homo sapiens
agatcactctggaaggtctggggtagacaaaaggaagggtcagtctggcttctgtgacaccatctttctatccttctctagtggaccctgatgacatacakggttgagggtggtggctcaagcaccatggctcaggccaagcgctggctctatcagagacctcaggctagtcaccagctgcttcgcatcctcactgatgct

SEQ ID NO: 154993 - DNA, 201 bp, Homo sapiens
accctgatgacatacatggttgagggtggtggctcaagcaccatggctcaggccaagcgctggctctatcagagacctcaggctagtcaccagctgcttcscatcctcactgatgctctggtcccatatctggtaggacaagtggtggctggtgcccaggtgagtcctgagagagagagaaataggcttggatttggtctg

SEQ ID NO: 154994 - DNA, 201 bp, Homo sapiens
caccatggctcaggccaagcgctggctctatcagagacctcaggctagtcaccagctgcttcgcatcctcactgatgctctggtcccatatctggtaggayaagtggtggctggtgcccaggtgagtcctgagagagagagaaataggcttggatttggtctgtaaggaccagaagcaagagtgtcctaaacctgagaggg

SEQ ID NO: 154995 - DNA, 201 bp, Homo sapiens
ctctttgtgtgttacatatttttcttcaccataccctaactaggcattgcagctgtttgagtcccatgcagggcatcttggcccacagctcttcaacaagyttgcactgccttacatccgtgatgtggccaagcaagtgaaggccaggttgcgggaggcaggcctggcaccagtgcccatggtgaggattgggatgggttg

SEQ ID NO: 154996 - DNA, 201 bp, Homo sapiens
gtcatttggggaaaattgaggtggattttgtatgtgggggaaacttcctctttgtgtgttacatatttttcttcaccataccctaactaggcattgcagcwgtttgagtcccatgcagggcatcttggcccacagctcttcaacaagtttgcactgccttacatccgtgatgtggccaagcaagtgaaggccaggttgcgg

SEQ ID NO: 154997 - DNA, 201 bp, Homo sapiens
ttggggaaaattgaggtggattttgtatgtgggggaaacttcctctttgtgtgttacatatttttcttcaccataccctaactaggcattgcagctgtttragtcccatgcagggcatcttggcccacagctcttcaacaagtttgcactgccttacatccgtgatgtggccaagcaagtgaaggccaggttgcgggaggc

SEQ ID NO: 154998 - DNA, 201 bp, Homo sapiens
gactggagtgaccactggagggcagcagaagtacagtcaagaaagattagtggttgtagcaaggccctctgtagcctgagatctgcttttttctagatcayctttgctaaggatgggcattttgccctggaggagctggcccaagctggctatgaggtggttgggcttgactggacagtggccccaaagaaagcccggtaa

SEQ ID NO: 154999 - DNA, 201 bp, Homo sapiens
gagcacatcattgatggctgggtgagtatcctggttgtaggccaggttaagatggctcatggccaatgaggccagcttgaaggcacgtagcgggtagccayggagctccatgtagcgggcgatggtgaacagctgtgaatgggtcataccaccagcagcagcatcaatggcaatctggtaggctgcctcaaaggcaatgtg

SEQ ID NO: 155000 - DNA, 201 bp, Homo sapiens
agcctccagcgtagcatactgacacctacccccacccccacctgatcgccagacctcagggttttccggagctgaagaatgacacattcctgcgagcagcytggggagaggaaacagactacactcccgtttggtgcatgcgccaggcaggccgttacttaccaggtaagagtcagggtctggaaatctagataaaactcc

SEQ ID NO: 155001 - DNA, 201 bp, Homo sapiens
gatcatctttgctaaggatgggcattttgccctggaggagctggcccaagctggctatgaggtggttgggcttgactggacagtggccccaaagaaagccsggtaagccatggaagggtgaggccttgaggttgaggtgggggtgttggctgggggagctgccatgtatgcagttaccagaacgtggcgctggctttgctt

SEQ ID NO: 155002 - DNA, 201 bp, Homo sapiens
caaaggcaatgtggtctttctcacagagtgtaagggctgacagggcacagctctgtggatccttcatagcacactgtagagccagtgtgcgagcacagctrgccagttcctcccgctgtggatagtcaagactgaggcgcaggatagtggtgtgggatacggctgtggcagctacaatactagtagcctcagtaggggtga

SEQ ID NO: 155003 - DNA, 201 bp, Homo sapiens
ccatgtatgcagttaccagaacgtggcgctggctttgcttccagggagtgtgtggggaagacggtgacattgcagggcaacctggacccctgtgccttgtrtgcatctgaggtaacagccagggcccctctgtgtgtctgttactgtgcactcctgtggctgtggttgtattattctgtgtgcacttgtttttaatgtctg

SEQ ID NO: 155004 - DNA, 201 bp, Homo sapiens
gagccagtgtgcgagcacagctagccagttcctcccgctgtggatagtcaagactgaggcgcaggatagtggtgtgggatacggctgtggcagctacaatrctagtagcctcagtaggggtgaagagtgtgtaccagctctgcaagatgctcaccagggcccgcacacctgtcagggggagcctgagctcagccgtggcca

SEQ ID NO: 155005 - DNA, 201 bp, Homo sapiens
gaagagtgtgtaccagctctgcaagatgctcaccagggcccgcacacctgtcagggggagcctgagctcagccgtggccatctgggtcctgattcaggtcracccagattaccatttggggtttgaacttggcctgcagagatgaattcttcctcctcagcaaccttgagatgatatgaggcaaaccagggcaaggggagc

SEQ ID NO: 155006 - DNA, 201 bp, Homo sapiens
ccgtggccatctgggtcctgattcaggtctacccagattaccatttggggtttgaacttggcctgcagagatgaattcttcctcctcagcaaccttgagaygatatgaggcaaaccagggcaaggggagcatcccagatggccagaccctgtttggggtctcttcctatcccttctttccccaggtcagagagttgaaggt

SEQ ID NO: 155007 - DNA, 201 bp, Homo sapiens
ggaaaattgaggtggattttgtatgtgggggaaacttcctctttgtgtgttacatatttttcttcaccataccctaactaggcattgcagctgtttgagtyccatgcagggcatcttggcccacagctcttcaacaagtttgcactgccttacatccgtgatgtggccaagcaagtgaaggccaggttgcgggaggcaggc

SEQ ID NO: 155008 - DNA, 201 bp, Homo sapiens
taggccatctcctgatggacctaagatctcataggaatatgagagctctaaggattgattgtcctgtcccaagagtagggcctagaaactcctttcccctgggggtagagggaggtgggagactcacccacttctgtagcacaggtcaccaaccatcgtaccatctccctgcgtctccagttaagggttgataaggtcatc

SEQ ID NO: 155009 - DNA, 201 bp, Homo sapiens
gtggtcatacaagaagtggatcaggtcctcgtcgcactcgtaggtccatgtcgggggtacatagctaagcaaccccaagcccctaattagactgggcccaracgcagagctccttcctccccaccccattccagctcactcacagtagcctttgtacagcttctgcgtatgcctctgccggctgaggtctcgatcccaggc

SEQ ID NO: 155010 - DNA, 201 bp, Homo sapiens
gtagcacaggtcaccaaccatcgtaccatctccctgcgtctccagttaagggttgataaggtcatccgcatcacctgggcacaaaagaggcctttccagtgggctatgcctaactgttgtgacctctccctccccttgcattcatttatgcgacaaatattttctggtgctttaaacagtggtctctccgctgataaacat

SEQ ID NO: 155011 - DNA, 201 bp, Homo sapiens
ttcttttgggcctttgttgttgcgtcgctacagcaaactttacggtgaaaaaaggtaggggtcctacgggcagcagccagggcagccctggagctgtcgckggagtccgatcatgtgatcttcaacatggcgacgctcttggttccctacagaaaggggcggagcctggactggggggcaggctcagattcaggttaaatt

SEQ ID NO: 155012 - DNA, 201 bp, Homo sapiens; identical to SEQ ID NO: 28844

SEQ ID NO: 155013 - DNA, 201 bp, Homo sapiens
ccatcacccttacccgacaacgactggctggacgtgtgccgctgattggctttgctggtgccccagtaatgtgggacagggcagggactcggggcgcgggsagatcactctggaaggtctggggtagacaaaaggaagggtcagtctggcttctgtgacaccatctttctatccttctctagtggaccctgatgacataca

SEQ ID NO: 155014 - DNA, 201 bp, Homo sapiens
acctagaacgcctacgggatccagaagtggtagcctctgagctaggctatgtgttccaagccatcacccttacccgacaacgactggctggacgtgtgccrctgattggctttgctggtgccccagtaatgtgggacagggcagggactcggggcgcggggagatcactctggaaggtctggggtagacaaaaggaagggt

SEQ ID NO: 155015 - DNA, 201 bp, Homo sapiens
caaaggcttgctggtcctcctgtagccagtgccctgttggtcccccaggaggagatcgggcagttggtgaagcagatgctggatgactttggaccacatcrctacattgccaacctgggccatgggctttatcctgacatggacccagaacatgtgggcgcctttgtggatgctgtgcataaacactcacgtctgcttcga

SEQ ID NO: 155016 - DNA, 201 bp, Homo sapiens
gagccaccaggcctggccgctggcgggacagcagtaggaactgcttcacttgctagtgaggagaggtggccagagcaggaatgagtgggcagtcagcctcygtccaggccctggaactttcccctctgcctgtatccaattccaccgtttcagttcaagtctagtccatccctgtccttgtctccagtcccctccttagtt

SEQ ID NO: 155017 - DNA, 201 bp, Homo sapiens
cttgctggtcctcctgtagccagtgccctgttggtcccccaggaggagatcgggcagttggtgaagcagatgctggatgactttggaccacatcgctacaytgccaacctgggccatgggctttatcctgacatggacccagaacatgtgggcgcctttgtggatgctgtgcataaacactcacgtctgcttcgacagaac

SEQ ID NO: 155018 - DNA, 201 bp, Homo sapiens; identical to SEQ ID NO: 28848

SEQ ID NO: 155019 - DNA, 201 bp, Homo sapiens; identical to SEQ ID NO: 28849

SEQ ID NO: 155020 - DNA, 201 bp, Homo sapiens
gcatgcctacatatgcgtttgtcactagtatatatagggaggacaaaggcttgctggtcctcctgtagccagtgccctgttggtcccccaggaggagatcrggcagttggtgaagcagatgctggatgactttggaccacatcgctacattgccaacctgggccatgggctttatcctgacatggacccagaacatgtggg

SEQ ID NO: 155021 - DNA, 201 bp, Homo sapiens; identical to SEQ ID NO: 28850

SEQ ID NO: 155022 - DNA, 201 bp, Homo sapiens
gtggtggctcaagcaccatggctcaggccaagcgctggctctatcagagacctcaggctagtcaccagctgcttcgcatcctcactgatgctctggtcccrtatctggtaggacaagtggtggctggtgcccaggtgagtcctgagagagagagaaataggcttggatttggtctgtaaggaccagaagcaagagtgtcct

SEQ ID NO: 155023 - DNA, 201 bp, Homo sapiens; identical to SEQ ID NO: 28854

SEQ ID NO: 155024 - DNA, 201 bp, Homo sapiens
cccagagccattaagagaagagcaggacctagaacgcctacgggatccagaagtggtagcctctgagctaggctatgtgttccaagccatcacccttaccygacaacgactggctggacgtgtgccgctgattggctttgctggtgccccagtaatgtgggacagggcagggactcggggcgcggggagatcactctggaa

SEQ ID NO: 155025 - DNA, 201 bp, Homo sapiens; identical to SEQ ID NO: 28855

SEQ ID NO: 155026 - DNA, 201 bp, Homo sapiens
tcctcctgtagccagtgccctgttggtcccccaggaggagatcgggcagttggtgaagcagatgctggatgactttggaccacatcgctacattgccaacytgggccatgggctttatcctgacatggacccagaacatgtgggcgcctttgtggatgctgtgcataaacactcacgtctgcttcgacagaactgagtgta

SEQ ID NO: 155027 - DNA, 201 bp, Homo sapiens
atcgccagacctcagggttttccggagctgaagaatgacacattcctgcgagcagcctggggagaggaaacagactacactcccgtttggtgcatgcgccrggcaggccgttacttaccaggtaagagtcagggtctggaaatctagataaaactccggagggagaaaagttttcgaggggcaggggagggctctggaggg

SEQ ID NO: 155028 - DNA, 201 bp, Homo sapiens
cgccaagcctccggatacccagactgtcagatgagaacaaattcctcatgacaccgtaagatacatttacagcggagttttcttttgggcctttgttgttkcgtcgctacagcaaactttacggtgaaaaaaggtaggggtcctacgggcagcagccagggcagccctggagctgtcgctggagtccgatcatgtgatctt

SEQ ID NO: 155029 - DNA, 201 bp, Homo sapiens
gatttggtctgtaaggaccagaagcaagagtgtcctaaacctgagagggcaggggtcttaatgccagggatgaaagaaccttggcctccagtgatctagckgagcagccaagcccatcctgacactgacagtggggcttaatgctctaagtattcagacaccaaagttagtgctgggatctgaggaaagtaaatttttttt

SEQ ID NO: 155030 - DNA, 201 bp, Homo sapiens
gcgtaggatggggacagccgtcagggaactgcccagccgcctgtcgtgcccagcccagggcaaagggcgccgaacgcaatgccaactcaatacaggggagraaaggcaaacagccagaggtttctctggccccaggggtcttttaccgggtcctgggcagggaagagcgcacctttgtcagcttcacccagagcccgtggc

SEQ ID NO: 155031 - DNA, 201 bp, Homo sapiens
ggggctgtcttgagcagagctaacctctgcacctactataggtccaggctatagtatggacctggctggataagactgttggtatcatgagtgggacttgmgccaagcctccggatacccagactgtcagatgagaacaaattcctcatgacaccgtaagatacatttacagcggagttttcttttgggcctttgttgttg

SEQ ID NO: 155032 - DNA, 201 bp, Homo sapiens
tgttacatatttttcttcaccataccctaactaggcattgcagctgtttgagtcccatgcagggcatcttggcccacagctcttcaacaagtttgcactgycttacatccgtgatgtggccaagcaagtgaaggccaggttgcgggaggcaggcctggcaccagtgcccatggtgaggattgggatgggttgagtgaaggt

SEQ ID NO: 155033 - DNA, 201 bp, Homo sapiens
gatgacatacatggttgagggtggtggctcaagcaccatggctcaggccaagcgctggctctatcagagacctcaggctagtcaccagctgcttcgcatcytcactgatgctctggtcccatatctggtaggacaagtggtggctggtgcccaggtgagtcctgagagagagagaaataggcttggatttggtctgtaagg

SEQ ID NO: 155034 - DNA, 201 bp, Homo sapiens
ccagagccattaagagaagagcaggacctagaacgcctacgggatccagaagtggtagcctctgagctaggctatgtgttccaagccatcacccttacccracaacgactggctggacgtgtgccgctgattggctttgctggtgccccagtaatgtgggacagggcagggactcggggcgcggggagatcactctggaag

SEQ ID NO: 155035 - DNA, 201 bp, Homo sapiens
ccagcgtagcatactgacacctacccccacccccacctgatcgccagacctcagggttttccggagctgaagaatgacacattcctgcgagcagcctgggragaggaaacagactacactcccgtttggtgcatgcgccaggcaggccgttacttaccaggtaagagtcagggtctggaaatctagataaaactccggagg

SEQ ID NO: 155036 - DNA, 201 bp, Homo sapiens
catgcagggcatcttggcccacagctcttcaacaagtttgcactgccttacatccgtgatgtggccaagcaagtgaaggccaggttgcgggaggcaggccwggcaccagtgcccatggtgaggattgggatgggttgagtgaaggtggtcctgtggagctttcaggctaagtcctgcatggactggagtgaccactggagg

SEQ ID NO: 155037 - DNA, 201 bp, Homo sapiens
  misc_feature (1)...(201): n = A,T,C or G
ggagctttcaggctaagtcctgcatggactggagtgaccactggagggcagcagaagtacagtcaagaaagattagtggttgtagcaaggccctctgtagnctgagatctgcttttttctagatcatctttgctaaggatgggcattttgccctggaggagctggcccaagctggctatgaggtggttgggcttgactgga

SEQ ID NO: 155038 - DNA, 201 bp, Homo sapiens
  misc_feature (1)...(201): n = A,T,C or G
gtggttgtattattctgtgtgcacttgtttttaatgtctgtctgtccttttcttctactctgtacaacataagccctagaaagaccggactttttgttgcngttgttcatttgtgtttatgcttcatgcctgggtccatactagggatctgataaattttattgaatgactgaataacactgagtagaagcatgcctacat

SEQ ID NO: 155039 - DNA, 201 bp, Homo sapiens
accagctgcttcgcatcctcactgatgctctggtcccatatctggtaggacaagtggtggctggtgcccaggtgagtcctgagagagagagaaataggctkggatttggtctgtaaggaccagaagcaagagtgtcctaaacctgagagggcaggggtcttaatgccagggatgaaagaaccttggcctccagtgatctag

SEQ ID NO: 155040 - DNA, 201 bp, Homo sapiens
gagtctttgtgaacccacagggacatagcccacccaccctgtcctgcccagagcctacttacttgacaatggtgcccttcttcatagtaagccgtacccartgttggcactgggacccatcgctctcccagtaggtatcggcattgctgtctgtcaggcaggacacgttgaactcctcctggggaggggcagagacgtgaa

SEQ ID NO: 155041 - DNA, 201 bp, Homo sapiens
ggttgcttcgagcttggaagagtagagactaagtggagggaagaggccccagggcgggcccttctggagtttgtgcaccacctgataggcagagaggaggyggaacgggcggaaagccagggtttgggagctggcctggaggaggtagatagcggtcctggactgaatcggccttatgaacccgcgctttccccagcctcc

SEQ ID NO: 155042 - DNA, 201 bp, Homo sapiens
ttgtcagcttcacccagagcccgtggccattgcacagctcctcgcccgtggtgcgcacgcaggcgccgcgccggagctcaatgctgtcgcgggcggcgcgraggggcccggagccggtaccgggggctgggcctgcggcgcccacacgcagccccaggccctctgcctcccacaccggcagaagcacgcgcgacggtcccg

SEQ ID NO: 155043 - DNA, 201 bp, Homo sapiens
cagcagaagtacagtcaagaaagattagtggttgtagcaaggccctctgtagcctgagatctgcttttttctagatcatctttgctaaggatgggcatttwgccctggaggagctggcccaagctggctatgaggtggttgggcttgactggacagtggccccaaagaaagcccggtaagccatggaagggtgaggccttg

SEQ ID NO: 155044 - DNA, 201 bp, Homo sapiens
gatccagaagtggtagcctctgagctaggctatgtgttccaagccatcacccttacccgacaacgactggctggacgtgtgccgctgattggctttgctgrtgccccagtaatgtgggacagggcagggactcggggcgcggggagatcactctggaaggtctggggtagacaaaaggaagggtcagtctggcttctgtga

SEQ ID NO: 155045 - DNA, 201 bp, Homo sapiens
tcaccttaatctcactgaaggtgcccagtgtgtggtcccaggcaggtaccaggtggtgcaggacactatcgaggatcttgatgaatctggcatgggtagayagactgcagctaaagagtttagcatacctgtaacacccccaactccccaacataaagggacaggaaaaggcaggacctgggggcttctctgacccttgaa

SEQ ID NO: 155046 - DNA, 201 bp, Homo sapiens
ggaggccgaggcggatggatcacctgaggtcaggagttcaagtccagcctggtcaacatggtgaaaccccgtctctaccaaaaatacaaaattagccaggygtggtggcacatgcctgtaattccagctactcggaaggctgaggcaggagaacctgggaggtggaggttgcagtgagccaagattgtgctactgcactcc

SEQ ID NO: 155047 - DNA, 201 bp, Homo sapiens
aatccatttaggatgatggcctccacctccatccatattgcttgttcttttctatggctgcatagtgttccatggtgtatacgcaccacattttctttacscagtctattgtagataggcatttagatttgattccatgtctttgctgttgtgaatagtgctgtgatgaacatacacatgcatgtgtctttatggtagaac

SEQ ID NO: 155048 - DNA, 201 bp, Homo sapiens
cctttcttgaggggaggggtaaaatcattcttggggaaagtagggaaaaaaatcttactctttttatgtgcaaagcacagatattggtacagtacataaayagtacatgcaaatgaccaaggattccatccaataagaagaaactatgcaaataatatacaaagacttttttccagccagtcatttatcagttctaaaata

SEQ ID NO: 155049 - DNA, 201 bp, Homo sapiens
tccaatgaattcagtggccttaatgtgtcttcctcaaatgtcactgaagactgggtctcctctcccacttcaccccctcctgtagcccaacttgtgagacrcgcgcgcacacgcgcacgtttagatggagggggatttcctagccatccaggcttgcctgaaactccatcttacactggtgcataactcctgcccccacct

SEQ ID NO: 155050 - DNA, 201 bp, Homo sapiens
agcgtgaataaagaggacagggtgctcacataggcttccgcctggccaatgttgagattaccggaagacatttaaattgtctggcaggcaactgagaactrgagatttagtcatttgggtaaagatggggctgaaagatgagattttgaaaaaggagtgtgggatgaaggaagcaggcagtttgaatcttgtccacactgc

SEQ ID NO: 155051 - DNA, 201 bp, Homo sapiens
gagcctcctgtgtgacaagaaccattctagacgctagcagtaagcaagatagtcaaagtcctgatcttttgagactttcatttccagcaagggcaaacagrcaacacagactgtattgtaacatatcagctgtggtaggtacgatgcagagaatcaaagcagagtgacgtgatggcaagtttagattgggtggtcagaaaa

SEQ ID NO: 155052 - DNA, 201 bp, Homo sapiens
cagcttgcagggtgctaatgcaccaagtggataggaaagggaggggtagctgtagggagtggcagcagtgacatggagcaagtgaaacacatttggaggaygaagggagaggttaaacatgcaagggaggggggttgctgagcacctggcactcaccccttctctccctacaccttgttcctgctccagctccaacgtagg

SEQ ID NO: 155053 - DNA, 201 bp, Homo sapiens
agggaggggtagctgtagggagtggcagcagtgacatggagcaagtgaaacacatttggaggatgaagggagaggttaaacatgcaagggaggggggttgstgagcacctggcactcaccccttctctccctacaccttgttcctgctccagctccaacgtaggatcccagccacttccgcttttcttgcccatggatcct

SEQ ID NO: 155054 - DNA, 201 bp, Homo sapiens
acatgcaagggaggggggttgctgagcacctggcactcaccccttctctccctacaccttgttcctgctccagctccaacgtaggatcccagccacttccscttttcttgcccatggatcctgcaatggtctggcttctggccaaatgctgggtccatagctctgacttccagctccgtgagctgcagcctcatcctctga

SEQ ID NO: 155055 - DNA, 201 bp, Homo sapiens
ggtagtgaccatcaggatgaagaggacagatggatgtgaggttagaaggagatcaaggaggaaggaaagggaagccaggccaggtgcctgcagaaatagcrtgaataaagaggacagggtgctcacataggcttccgcctggccaatgttgagattaccggaagacatttaaattgtctggcaggcaactgagaactggag

SEQ ID NO: 155056 - DNA, 201 bp, Homo sapiens
tatttttaacttttaggttcggggtacatgtgcagtttgttatatcagtaaattatgtgtcacaggagtttggtgtacagattattttgttacgcaggtartaagcatggtacccgataggtagttttgggatccttccctcctcccaccctccaccttcagatagatgctagtgtctgttgttcccttctttatgtccat

SEQ ID NO: 155057 - DNA, 201 bp, Homo sapiens
ctagtgtctgttgttcccttctttatgtccatgtgtattcaatgtttagctcccacttataagtgagaacatgccatatttggctttctgttcctgtgtcratccatttaggatgatggcctccacctccatccatattgcttgttcttttctatggctgcatagtgttccatggtgtatacgcaccacattttctttacc

SEQ ID NO: 155058 - DNA, 201 bp, Homo sapiens
tagtgtctgttgttcccttctttatgtccatgtgtattcaatgtttagctcccacttataagtgagaacatgccatatttggctttctgttcctgtgtcartccatttaggatgatggcctccacctccatccatattgcttgttcttttctatggctgcatagtgttccatggtgtatacgcaccacattttctttaccc

SEQ ID NO: 155059 - DNA, 201 bp, Homo sapiens
tccattgcaactggtgatgggaggcacaggccccaccgggcatgtaagagcatctgtaggctccactggtggcttacctctggaggcttaaaatgccaccygtagcacccattgttcaaactcagtggtgctccctgctgtaaaggtatgaagcagagccttcccagtcacctcctgcttctagaacttgaattctagtat

SEQ ID NO: 155060 - DNA, 201 bp, Homo sapiens
ccattgcaactggtgatgggaggcacaggccccaccgggcatgtaagagcatctgtaggctccactggtggcttacctctggaggcttaaaatgccacctrtagcacccattgttcaaactcagtggtgctccctgctgtaaaggtatgaagcagagccttcccagtcacctcctgcttctagaacttgaattctagtatg

SEQ ID NO: 155061 - DNA, 201 bp, Homo sapiens
gacagcagccacagccaactgctgctcctgccagccatacaaattccccatgattcattttgtcctacctattgtaatgcctttatcagcagtgtcctcaytgctaatgaagaatacacacacgtgaaaaccaacacatctgtgactcattgattgtttgatggggcctccacgtattgcccaggctgctctcaaactcct

SEQ ID NO: 155062 - DNA, 201 bp, Homo sapiens
cctcccaaagtgctgggattacatgcgtgagccaccgcgcccggccttggtcatttacttgttttttttttgagacagaatctcgctctgttgcccaggcwggagtgcagtggcgcgatcatggctcacttcaacctctgcctcctgggttcaagcgattcatctgcctcagcttcccgagtagctgggactacaggtgca

SEQ ID NO: 155063 - DNA, 201 bp, Homo sapiens
gcagtggcgcgatcatggctcacttcaacctctgcctcctgggttcaagcgattcatctgcctcagcttcccgagtagctgggactacaggtgcatgccawcacgcccggctaatttttgtatttttagtagagacagggtttcaccatattggccaggttggtctcgaactcctgagctcatgatctgcccaccttggcc

SEQ ID NO: 155064 - DNA, 201 bp, Homo sapiens
gtgtctgcagcacctccttccacacgggcccaggagttctctatacgcgctctcaccgcaggtcttggaattccaagccatttccaattccaggtcttggraatggctgtgcaatttgtcttcactgttaggtttccaagatggcaactatcaagagtgaacttattaagaatttcgcggaagaggaggccattcatcaca

SEQ ID NO: 155065 - DNA, 201 bp, Homo sapiens
ccaatctagtgattatcacagcaggtgcacgccagaaaaaaggagaaacacgccttgatttagtccagcgaaatgtatccatctttaaattaatgattccsaatattacccagtacagtcctcactgcaaactgcttattgttactaatccaggtcagctttgttgttttaaattttcaacttttagattcgggggtacac

SEQ ID NO: 155066 - DNA, 201 bp, Homo sapiens
ttcatctttctttcgtgctggatgcttcctgccctcaaacatcagactccaagttcttcagcttttgaactctgagacctacaccagtggtttgccagggrctctcgggcctttggctacagactgaaggctgcactgttggcttccctacttttgaggttttgggacttggactggcttccttgctcctcggcttgcaaa

SEQ ID NO: 155067 - DNA, 201 bp, Homo sapiens
ctgaactcctaacctcatttgatggacccacctcgacctcccaaagtgctgggattacaggggtgagccactgcacatgacttacgtttttttttttttttttattattaaaaaaaatgtacaagggaaacttagtgctaatttcctgaaattaaaaagtagtctaggcatactagaagatttaagggaacccactctttg

SEQ ID NO: 155068 - DNA, 201 bp, Homo sapiens
cctgaactcctaacctcatttgatggacccacctcgacctcccaaagtgctgggattacaggggtgagccactgcacatgacttacgtttttttttttttttttattattaaaaaaaatgtacaagggaaacttagtgctaatttcctgaaattaaaaagtagtctaggcatactagaagatttaagggaacccactcttt

SEQ ID NO: 155069 - DNA, 201 bp, Homo sapiens
gacatgattttgttttttatggctgcataggacagctttattttcactgttcagtgaaggagtttttgggggtgggtttagtaactttgaggagaaaaagmatttaatgaatattaaatcgtaaaccaccagtataattccagaatctctttctgttttgttagtgtaatatgtactttgcacagtggtaatcagtgtata

SEQ ID NO: 155070 - DNA, 201 bp, Homo sapiens
ggtcctgaactcctaacctcatttgatggacccacctcgacctcccaaagtgctgggattacaggggtgagccactgcacatgacttacgttttttttttwttttttattattaaaaaaaatgtacaagggaaacttagtgctaatttcctgaaattaaaaagtagtctaggcatactagaagatttaagggaacccactc

SEQ ID NO: 155071 - DNA, 201 bp, Homo sapiens
gtgaaaccctgtctctactaaaaatacaaaaaaattggccgggtgcggtgtctcatgcctgtaatcccagcactttgggaggcagaggcgggcggatcackaggtcaggagatcaagaccatcctggctaacacggtgaaaccccgtctctactaaaaatacaaaaaattagccaggtgtggtggcgggcgcctgtagtcc

SEQ ID NO: 155072 - DNA, 201 bp, Homo sapiens
caaatgtttaaccactgtggcagggcatggtggctcatgcctataatcccagcactttgggaagctgaggtggtaggatcacttgagcccaggagtatgasaccagcctgggcaacatagggagaccccatctctgctgaggtgtgggaggatcacttgagcccaggagtatgagaccagcctgggcaacatagggagacc

SEQ ID NO: 155073 - DNA, 201 bp, Homo sapiens
tcctgaccccaggtgatccgcccgccttggcctcccaaagtgctgggattacatgcgtgagccaccgcgcccggccttggtcatttacttgttttttttttgagacagaatctcgctctgttgcccaggctggagtgcagtggcgcgatcatggctcacttcaacctctgcctcctgggttcaagcgattcatctgcctca

SEQ ID NO: 155074 - DNA, 201 bp, Homo sapiens
atttatgttaaatattaatttatcttacctaagtgcataattttgtccatgtagtggtagaattgtaaaactaaactttagaagtttttttttttttttttgagagagggttttgctctgttgctcaggctggagtgcagtggcgcaaacttggctcactgcaacctccgcctcctgggttcaagtgattctcgtgcctca

SEQ ID NO: 155075 - DNA, 201 bp, Homo sapiens
atgtctttcagtttataccacttggcattcattgagcagcttggatgtataggtttttttttttttctttttttgagatggagtcttgccctgtggcccaractggagtgcagtggcatgatctcggctcattgcaacctccgcctcctggattcaagtgattcttgtgcctcagcctcctgagtagctgggattatgggc

SEQ ID NO: 155076 - DNA, 201 bp, Homo sapiens
gaacccgggaggcagaggttgcagtcagccaagatcgcaccattgcactccaccctgggcaacaagagcagaaactccgtctcaaaaaaaaaaaaaaaaaatgccaggtgcggtggtacatgctagtagtactagctacttgggaggctgaggcaggaagcttgcctgagaccaagagattaatgctgcagtgagccatga

SEQ ID NO: 155077 - DNA, 201 bp, Homo sapiens
tctttcgtgctggatgcttcctgccctcaaacatcagactccaagttcttcagcttttgaactctgagacctacaccagtggtttgccaggggctctcggscctttggctacagactgaaggctgcactgttggcttccctacttttgaggttttgggacttggactggcttccttgctcctcggcttgcaaatggcctgt

SEQ ID NO: 155078 - DNA, 201 bp, Homo sapiens
ggtggcccttcacccctgtgagtgtggccagaagtacctctcacctggacctgcggaccccgggcgcagtcctggagctgagaactggaggttgggggaamagcagggtaaaggggagagaaaagggggtcagctgcgggacggagtgccgtcccagctgtagtttcatgtttggtggagcaacccctgttcctttcctct

SEQ ID NO: 155079 - DNA, 201 bp, Homo sapiens
ccagctgctgcttggctttggttgcaggagtggagggaattttggggcttctgatgggaggttccagggcccaggatagggcagtgccatggggctgcacytgtttcatggccctatccatgatgggaggtcctagatagatctcaggtggaggtggtggataggagtacagaagggcaggagtgcattccattgcaactg

SEQ ID NO: 155080 - DNA, 201 bp, Homo sapiens
aaagatgcttctctatgcattatggcagaagtctattaaagaatatttaatttattgactaatatttctaataagcacattcagaggatactctttctacrttttatatactggctgtctgccattaacagcagtaaaaataaggaaaaataaaaaaatctcaatctcaaatgatttaacagcttagttctgtatttgctt

SEQ ID NO: 155081 - DNA, 201 bp, Homo sapiens
cactgtgcctggctaatttttgtatttttagtagagatggggttttgccatgttggccagtctggtcctgaactcctaacctcatttgatggacccacctygacctcccaaagtgctgggattacaggggtgagccactgcacatgacttacgtttttttttttttttttattattaaaaaaaatgtacaagggaaactta

SEQ ID NO: 155082 - DNA, 201 bp, Homo sapiens
gcaggagtggagggaattttggggcttctgatgggaggttccagggcccaggatagggcagtgccatggggctgcacttgtttcatggccctatccatgawgggaggtcctagatagatctcaggtggaggtggtggataggagtacagaagggcaggagtgcattccattgcaactggtgatgggaggcacaggccccac

SEQ ID NO: 155083 - DNA, 201 bp, Homo sapiens
ctcactgcaaactgcttattgttactaatccaggtcagctttgttgttttaaattttcaacttttagattcgggggtacactgtgtaggttcattacatgrgtatactgtgtgatgctgaggtttggggtaggattgatcctgccacccaggtactgagcaaagtacctaatagtttttcagcccttgctgctctcactcc

SEQ ID NO: 155084 - DNA, 201 bp, Homo sapiens
tcaggtggaggtggtggataggagtacagaagggcaggagtgcattccattgcaactggtgatgggaggcacaggccccaccgggcatgtaagagcatctrtaggctccactggtggcttacctctggaggcttaaaatgccacctgtagcacccattgttcaaactcagtggtgctccctgctgtaaaggtatgaagcag

SEQ ID NO: 155085 - DNA, 201 bp, Homo sapiens
aaaatactagtgtgaggccagatgcagtggctgaagcctgtaatcccagcactttgggagcccaaggtgggtgaagtgcttgaatccaggagtttgagaayggcctgggcaacatgacagaactccatctctacaaaaaaatacaaaaattatcagggcatggtggagcattcctgtagtcccagctactcaggaggctga

SEQ ID NO: 155086 - DNA, 201 bp, Homo sapiens
tcatatctttttaaagtgtctaatttctactatttgagtacttaaatctgccataaaaaatatggatttacaaaaaagacaaattagaaattatgtccttyacagagatccactacaggattctgaatcttaaattgtcttcatatgtttaggatagaatttgatgcatttattatttttaaagtatgagttattacataa

SEQ ID NO: 155087 - DNA, 201 bp, Homo sapiens
ctttttgttactacatacgtttttctccatcttctttcatttttaacttaatatatcatgaagctcaactccatagtagtatttataaatatgttgattaytgtagctttgtggtaagttttgaaatcaggatgtattaagtcttctgactattctttaagattattttgggtcaggcgtggtggctcacacctggaatcc

SEQ ID NO: 155088 - DNA, 201 bp, Homo sapiens
cattttcagtaccttagaagttgtgagcctgaactctgttagaaggttgagattagtcccttaaatatatgttgttgtatttcccatatttttatttgcayttctgcttttctgtgtgatcatattcaccagattataaattcttcaacagtcaggaactgattctgtgttgcttattcctgagcctaacccagtattgag

SEQ ID NO: 155089 - DNA, 201 bp, Homo sapiens
attaactcaacataaaataggggggtaaagaacatttttgaggcactctggttttgggtttgatctcgtgggaagcacctctcttcctgaagtctgttctytgctgctgaagagtggggagattggggaaagagcctatctttgtagacctttgtcctggtctagtgtgacatttctttttattagataaaagtaagtgtt

SEQ ID NO: 155090 - DNA, 201 bp, Homo sapiens
gtgtgaatgtctttcagtttataccacttggcattcattgagcagcttggatgtataggtttttttttttttctttttttgagatggagtcttgccctgtrgcccagactggagtgcagtggcatgatctcggctcattgcaacctccgcctcctggattcaagtgattcttgtgcctcagcctcctgagtagctgggatt

SEQ ID NO: 155091 - DNA, 201 bp, Homo sapiens
ccaggaggcagaggctgcagtgagctgagatcgcaccactgcactccagcctgggcaacagggcaagactgtctcaaaaaaaatatatatatatacacacatatatatatatatatatatatatatatatatatacacacacacacatatatatatacacacacatatatatatacgtatatatatacatatatatatacg

SEQ ID NO: 155092 - DNA, 201 bp, Homo sapiens
cccaggaggcagaggctgcagtgagctgagatcgcaccactgcactccagcctgggcaacagggcaagactgtctcaaaaaaaatatatatatatacacacatatatatatatatatatatatatatatatatatacacacacacacatatatatatacacacacatatatatatacgtatatatatacatatatatatac

SEQ ID NO: 155093 - DNA, 201 bp, Homo sapiens
catggtgaaaccccatgtctacaaaaaatacaaaaattagccagatgtggtggcaggctcctgtgatgtggtggtaggcgcctgttgtcccagctacccaraaggctgaggtgggaggatcatctgagcctgagaaagttgaggctgcaatgagtcatgatcatgctactgtactcctacctgggggacagagcaagcccc

SEQ ID NO: 155094 - DNA, 201 bp, Homo sapiens
ttcagccagggaggtcaaggctgcagtgagccatgattgcgccactgcactccagcctgggtcacagtgagaccctgtctcaaaaaaaaaaaaaaaaaaaagtagtgtgtatgggaagataatatgcttaatcatatgagttcaaggtttatattctaaaggctgaggtttgttttccaaattactgtttgagaagtgaaa

SEQ ID NO: 155095 - DNA, 201 bp, Homo sapiens
aaattagccagatgtggtggcaggctcctgtgatgtggtggtaggcgcctgttgtcccagctacccagaaggctgaggtgggaggatcatctgagcctgaraaagttgaggctgcaatgagtcatgatcatgctactgtactcctacctgggggacagagcaagcccctgtctcagaaacaaaaagtaaaagtaaaattca

SEQ ID NO: 155096 - DNA, 201 bp, Homo sapiens
gtgaaggagtttttgggggtgggtttagtaactttgaggagaaaaagaatttaatgaatattaaatcgtaaaccaccagtataattccagaatctctttctgttttgttagtgtaatatgtactttgcacagtggtaatcagtgtatatactataatgactttaaaaaatactagtgtgaggccagatgcagtggctgaag

SEQ ID NO: 155097 - DNA, 201 bp, Homo sapiens
agtgaaggagtttttgggggtgggtttagtaactttgaggagaaaaagaatttaatgaatattaaatcgtaaaccaccagtataattccagaatctctttctgttttgttagtgtaatatgtactttgcacagtggtaatcagtgtatatactataatgactttaaaaaatactagtgtgaggccagatgcagtggctgaa

SEQ ID NO: 155098 - DNA, 201 bp, Homo sapiens
cagtgaaggagtttttgggggtgggtttagtaactttgaggagaaaaagaatttaatgaatattaaatcgtaaaccaccagtataattccagaatctctttctgttttgttagtgtaatatgtactttgcacagtggtaatcagtgtatatactataatgactttaaaaaatactagtgtgaggccagatgcagtggctga

SEQ ID NO: 155099 - DNA, 201 bp, Homo sapiens
tcagtgaaggagtttttgggggtgggtttagtaactttgaggagaaaaagaatttaatgaatattaaatcgtaaaccaccagtataattccagaatctctttctgttttgttagtgtaatatgtactttgcacagtggtaatcagtgtatatactataatgactttaaaaaatactagtgtgaggccagatgcagtggctg

SEQ ID NO: 155100 - DNA, 201 bp, Homo sapiens
gaactcctaacctcatttgatggacccacctcgacctcccaaagtgctgggattacaggggtgagccactgcacatgacttacgtttttttttttttttttattattaaaaaaaatgtacaagggaaacttagtgctaatttcctgaaattaaaaagtagtctaggcatactagaagatttaagggaacccactctttggt

SEQ ID NO: 155101 - DNA, 201 bp, Homo sapiens
tgaactcctaacctcatttgatggacccacctcgacctcccaaagtgctgggattacaggggtgagccactgcacatgacttacgtttttttttttttttttattattaaaaaaaatgtacaagggaaacttagtgctaatttcctgaaattaaaaagtagtctaggcatactagaagatttaagggaacccactctttgg

SEQ ID NO: 155102 - DNA, 201 bp, Homo sapiens
gcactttgagaggctggggcaggaggattgcttgaggccaggagttagatcagcctgggcagcacagcaagaccctgtctctattaaaaaaataatttttycctactattcaatgctctttgcttccttctattttatggttaaaataacacttgtcattgattttttaaaaatctttgttttaaaaatgcattaaagaat

SEQ ID NO: 155103 - DNA, 201 bp, Homo sapiens
gaaagaattgctaaaagatgcccattaaaatggaatgcactggattgtgaatataaagatgggatattctgtttactttcatttttataaataaggaaagrgagtccagagagattgttaggatatatttttatagactttattttttagaatagttttagatttacagaaaaattgaaaggataacagtttataccccac

SEQ ID NO: 155104 - DNA, 201 bp, Homo sapiens
ggggaatgactctgactttgagacggtgtaccagcagtgtgtcaggtgctgcagagcgttcttggagaaggcccactgaggcaggttcgtgccctgctgcrgccagcctgactagaccccaccctgaggtcctgcatttctcagtcggtgtgtaatcacgttccagggcccaaagcccagctctttgttcagttgacttac

SEQ ID NO: 155105 - DNA, 201 bp, Homo sapiens
caaaaaaaaaaaaaaaattccatgtttcttcccctgcagtggagggtagacagcgcggcaacttccgggtatgagatagggaacccccctgactaccgagrgcagagctgcatgaagaggcacggcattcccatgagccacgttgcccggcaggtaccgtccttggacttgaagttgtgtgttttgtgtttcagtgggtca

SEQ ID NO: 155106 - DNA, 201 bp, Homo sapiens
aaaaaaaaaaaaaattccatgtttcttcccctgcagtggagggtagacagcgcggcaacttccgggtatgagatagggaacccccctgactaccgagggcwgagctgcatgaagaggcacggcattcccatgagccacgttgcccggcaggtaccgtccttggacttgaagttgtgtgttttgtgtttcagtgggtcattg

SEQ ID NO: 155107 - DNA, 201 bp, Homo sapiens
aaaaaattccatgtttcttcccctgcagtggagggtagacagcgcggcaacttccgggtatgagatagggaacccccctgactaccgagggcagagctgcmtgaagaggcacggcattcccatgagccacgttgcccggcaggtaccgtccttggacttgaagttgtgtgttttgtgtttcagtgggtcattgacagcggt

SEQ ID NO: 155108 - DNA, 201 bp, Homo sapiens
cagggtctaccctcactggttggacaaaggcgtcaaaggatagtgttggcctttgtttttcctgagggatagcacagcccccgtgtgtcaggtgtgtaaaraaggggagctggcatgtgcccttccatccaacctaaccctgtttccccacccctccctttttttaaaggtaacatttgtcgatcacccattgcagaagca

SEQ ID NO: 155109 - DNA, 201 bp, Homo sapiens; identical to SEQ ID NO: 28873

SEQ ID NO: 155110 - DNA, 201 bp, Homo sapiens
tattctgctgccctgtcattaggccagattgtgcattagacttaggcctgcctgcagttctcattcctgcacctaatcctgagctgtaaaacttcgtgcaygggagctcttggctgttccgttcccacataaagcacgtacctgactcatcaactcatctgtcgcaggtgctcagtcgaaatttgttaaataaatggaggc

SEQ ID NO: 155111 - DNA, 201 bp, Homo sapiens
tcggcgtgcggaacgccgcggtgtctcggcgcctctgcgcgcgggaagatggcggaacaggctaccaagtccgtgctgtttgtgtgtctgggtaagagggygccgacttactcatgttctgacgtcctctggagagttggatcgggcttgtgcgctgtaggttgtgccgccggcctaggaaccatgagggggaggaggcca

SEQ ID NO: 155112 - DNA, 201 bp, Homo sapiens
tggatcgggcttgtgcgctgtaggttgtgccgccggcctaggaaccatgagggggaggaggccagggactgggaggcctagggtgttctaggagtgtgccrcagcgcccctgttccccatccgccccgtgcacccgcccagcctgcccgctaaacctgggtcccctcgcgcctgccatatatccggggctcttggcatctg

SEQ ID NO: 155113 - DNA, 201 bp, Homo sapiens; identical to SEQ ID NO: 28878

SEQ ID NO: 155114 - DNA, 201 bp, Homo sapiens
acagatggaaaataccgtgttgtctgaatgagaaacccatctgtatggagggctgacttttcctatacttgggctccacattctcaggggccaactatagracctgagtatgcacgttttggtatactgggtaggggtgggagggtgtcctgaaccagctcctgagtctactgagggacagaccactgtattttattttta

SEQ ID NO: 155115 - DNA, 201 bp, Homo sapiens
tgtttgtttgtttgtttgtttttgtttttgttgctgttactataatgaaattgtaatggtaagtgttctgctttcctgagtttggggagtaattctagggrattatcaaacctgagggagccctggggaacctggatttctcacttgctggtctaaagtaaggatggccctgatgtcgacatcgtggtctggagagtggtg

SEQ ID NO: 155116 - DNA, 201 bp, Homo sapiens; identical to SEQ ID NO: 28867

SEQ ID NO: 155117 - DNA, 201 bp, Homo sapiens
ttctggttgcacggtgttgaaagacttgcctgactttggaatttacttattaaaatgcacataaaagctaggtaatttataatgagagagcctgactgtgmgctggggctgagcggtgctctgtcttctgttccttcctgcataatttttattaaacatttaggccatagtaatcatcctgctgatattgcaagtttgttg

SEQ ID NO: 155118 - DNA, 201 bp, Homo sapiens
acctgtagttcgcggctgcttttgtgctagagcagcacagccagagcggcctggtggccacaaagcccgactgtctctgcagcactggttttttatatggsgtttctagttgtttttagtagtaggggtgatttgccacaagctgtttcatttatagctgcaagtggaaatcctttattgtgcatttgttacataagttat

SEQ ID NO: 155119 - DNA, 201 bp, Homo sapiens
taaatggcattttacttggtagccatatagaggacagtaagagttgtatgcttttgaaatgtaaaaaactttgttcattcaaagcatttgtttggaccctrttgagattgaagtgtagaaaagcatcagaggtttttcattggtgaagctaatgatggaaaataattgagctccttactacagcacaattatgaagggtgc

SEQ ID NO: 155120 - DNA, 201 bp, Homo sapiens
ctttttttaaaggtaacatttgtcgatcacccattgcagaagcagttttcaggaaacttgtaaccgatcaaaacatctcagagaatgtaagtaccattcaktatcttaaagaggccaacctgaactcctctgggcaggaaattgcaaaaaaaaaaaaaaaattccatgtttcttcccctgcagtggagggtagacagcgcg

SEQ ID NO: 155121 - DNA, 201 bp, Homo sapiens
ttttcacatgtcacaaggtactctacttttagattttttccaactactcaacaatgtaaaaattattcttaccgctgtgggctgtacataaaggcagtggwccatgagccgattttcagacccctgttttaggtccagatcttgggaggccatgtgaagacttgggcttactctgaataaacattggagggttttgagcag

SEQ ID NO: 155122 - DNA, 201 bp, Homo sapiens
cagatggaaaataccgtgttgtctgaatgagaaacccatctgtatggagggctgacttttcctatacttgggctccacattctcaggggccaactataggmcctgagtatgcacgttttggtatactgggtaggggtgggagggtgtcctgaaccagctcctgagtctactgagggacagaccactgtattttatttttat

SEQ ID NO: 155123 - DNA, 201 bp, Homo sapiens
aaaagaggggactattgtatttcaatacaattcagtgattttttgttgttgttgagcatctactatatggcatgcattcctctaagtggtgtggtgaacamaacagacaaaaatcccagcctctctggagctcacgttctctcagtcaccagcaagtattaattgatgtgctcaatcggttgatgtgaagattaagaaaaa

SEQ ID NO: 155124 - DNA, 201 bp, Homo sapiens
aaaactaaacaaaatttagaatgtcgaaaggaaaaacttcacaacacaaattagcatatagagggtattcaaggctaatttgttgtctttccctttatggkttgtaggtaagattttttactgctgtggaaactacagtctctgtgggaaaaaagtacataatatgcttaggtcttacaatgtagaaactgaaggctgtag

SEQ ID NO: 155125 - DNA, 201 bp, Homo sapiens
aagctactgctagcctttaggacagttaataatgcaagttttcatattgttgtggggaaagtaagctgttattttacagttaaagataattatttgtaaasgtgtggggctagtctttattatatttttagatgctgagatactaggcatctgttgttctacagatccaaaataataattgtcttaatttggaatacaatg

SEQ ID NO: 155126 - DNA, 201 bp, Homo sapiens
aaatggcattttacttggtagccatatagaggacagtaagagttgtatgcttttgaaatgtaaaaaactttgttcattcaaagcatttgtttggaccctaktgagattgaagtgtagaaaagcatcagaggtttttcattggtgaagctaatgatggaaaataattgagctccttactacagcacaattatgaagggtgct

SEQ ID NO: 155127 - DNA, 201 bp, Homo sapiens
tccataagaagtcaaaaactttcacctttttacttaagggtagtgcttatggcttctctttgccgtatctgaattgctagcttcactattcttatgatttsgggccattattagtaaactaagggtgactcgaactcaggcactgtgatagcatcacaatggatctgataagctagagggcaataggtggatagacagcat

SEQ ID NO: 155128 - DNA, 201 bp, Homo sapiens
tttttttttctttccataagaagtcaaaaactttcacctttttacttaagggtagtgcttatggcttctctttgccgtatctgaattgctagcttcactaytcttatgatttggggccattattagtaaactaagggtgactcgaactcaggcactgtgatagcatcacaatggatctgataagctagagggcaataggtg

SEQ ID NO: 155129 - DNA, 201 bp, Homo sapiens
gtgtatccttgcatatacagtagtcccactttagctgtaggggatacattccaagactccccagtggatcccgaaactgtgggtagtaccaaacccaattsctgtcaattggaacatgtgtctgctcgtttcttacacccacaaatgtaataccgttgccaccttaactaagcatttaaaactgtggtcgcaacttttgca

SEQ ID NO: 155130 - DNA, 201 bp, Homo sapiens
ctaggagtgtgccgcagcgcccctgttccccatccgccccgtgcacccgcccagcctgcccgctaaacctgggtcccctcgcgcctgccatatatccgggsctcttggcatctgcagccacagcccctacaagccaaggtactttctttgcgactactagaatccctctcgttcccctccaatgggcccaggtaggcctgg

SEQ ID NO: 155131 - DNA, 201 bp, Homo sapiens
gcaggaaattgcaaaaaaaaaaaaaaaattccatgtttcttcccctgcagtggagggtagacagcgcggcaacttccgggtatgagatagggaaccccccwgactaccgagggcagagctgcatgaagaggcacggcattcccatgagccacgttgcccggcaggtaccgtccttggacttgaagttgtgtgttttgtgtt

SEQ ID NO: 155132 - DNA, 201 bp, Homo sapiens
ttgcaaaaaaaaaaaaaaaattccatgtttcttcccctgcagtggagggtagacagcgcggcaacttccgggtatgagatagggaacccccctgactaccragggcagagctgcatgaagaggcacggcattcccatgagccacgttgcccggcaggtaccgtccttggacttgaagttgtgtgttttgtgtttcagtggg

SEQ ID NO: 155133 - DNA, 201 bp, Homo sapiens
ttcgttgttcggtagcacttcacatgcttactgagccttcatcgctgggtgcccattatgcattttgcctggaaagcctttttattttataaagtcaaacstaaatatttcctcctttgctttcccagatcatgagttgcttccttatcgacatcttttattacacaaattttactataatttgtgtaatatagtaaaaga

SEQ ID NO: 155134 - DNA, 201 bp, Homo sapiens
cctgtccatttaggggaatgactctgactttgagacggtgtaccagcagtgtgtcaggtgctgcagagcgttcttggagaaggcccactgaggcaggttcrtgccctgctgcggccagcctgactagaccccaccctgaggtcctgcatttctcagtcggtgtgtaatcacgttccagggcccaaagcccagctctttgtt

SEQ ID NO: 155135 - DNA, 201 bp, Homo sapiens
tcctgccatattaaataacagatgagattgtgttaaggatgtttttgttatgcaggttttgccattttcttctttttcctgtccatttaggggaatgactytgactttgagacggtgtaccagcagtgtgtcaggtgctgcagagcgttcttggagaaggcccactgaggcaggttcgtgccctgctgcggccagcctgac

SEQ ID NO: 155136 - DNA, 201 bp, Homo sapiens
catttgtatcctgccatattaaataacagatgagattgtgttaaggatgtttttgttatgcaggttttgccattttcttctttttcctgtccatttagggraatgactctgactttgagacggtgtaccagcagtgtgtcaggtgctgcagagcgttcttggagaaggcccactgaggcaggttcgtgccctgctgcggcc

SEQ ID NO: 155137 - DNA, 201 bp, Homo sapiens
ccctgttggcgttggtgcgggactgcgcaggcgcgcggggcaagaggctggcagtgcgcctgcgccgcgtcggcgtgcggaacgccgcggtgtctcggcgyctctgcgcgcgggaagatggcggaacaggctaccaagtccgtgctgtttgtgtgtctgggtaagagggcgccgacttactcatgttctgacgtcctctgg

SEQ ID NO: 155138 - DNA, 201 bp, Homo sapiens
aggaggccagggactgggaggcctagggtgttctaggagtgtgccgcagcgcccctgttccccatccgccccgtgcacccgcccagcctgcccgctaaacstgggtcccctcgcgcctgccatatatccggggctcttggcatctgcagccacagcccctacaagccaaggtactttctttgcgactactagaatccctct

SEQ ID NO: 155139 - DNA, 201 bp, Homo sapiens
tagagggtattcaaggctaatttgttgtctttccctttatggtttgtaggtaagattttttactgctgtggaaactacagtctctgtgggaaaaaagtacrtaatatgcttaggtcttacaatgtagaaactgaaggctgtagtaaggcagtgagttggttttctgaactagggaattagctgtgttttacaacactagaa

SEQ ID NO: 155140 - DNA, 201 bp, Homo sapiens
agctgcatgaagaggcacggcattcccatgagccacgttgcccggcaggtaccgtccttggacttgaagttgtgtgttttgtgtttcagtgggtcattgayagcggtgctgtttctgactggaacgtgggccggtccccagacccaagagctgtgagctgcctaagaaatcatggcattcacacagcccataaagcaagac

SEQ ID NO: 155141 - DNA, 201 bp, Homo sapiens
cagaacaccctagcagatgtccctgtttaacttgaaaccgtagatcagaaaactaagttcatatttcaattttacagagatttgaatagaaaaagtaatcragttaaaacctgcaaagctaaaattgaactacttgggagctatgatccacaaaaacaacttattattgaagatccctattatgtaagtacagttcacgtt

SEQ ID NO: 155142 - DNA, 201 bp, Homo sapiens
tcattatcttaaagaggccaacctgaactcctctgggcaggaaattgcaaaaaaaaaaaaaaaattccatgtttcttcccctgcagtggagggtagacagygcggcaacttccgggtatgagatagggaacccccctgactaccgagggcagagctgcatgaagaggcacggcattcccatgagccacgttgcccggcagg

SEQ ID NO: 155143 - DNA, 201 bp, Homo sapiens
ttcctgagggatagcacagcccccgtgtgtcaggtgtgtaaagaaggggagctggcatgtgcccttccatccaacctaaccctgtttccccacccctcccyttttttaaaggtaacatttgtcgatcacccattgcagaagcagttttcaggaaacttgtaaccgatcaaaacatctcagagaatgtaagtaccattcatt

SEQ ID NO: 155144 - DNA, 201 bp, Homo sapiens
agctactgctagcctttaggacagttaataatgcaagttttcatattgttgtggggaaagtaagctgttattttacagttaaagataattatttgtaaacstgtggggctagtctttattatatttttagatgctgagatactaggcatctgttgttctacagatccaaaataataattgtcttaatttggaatacaatgt

SEQ ID NO: 155145 - DNA, 201 bp, Homo sapiens; identical to SEQ ID NO: 28872

SEQ ID NO: 155146 - DNA, 201 bp, Homo sapiens
tgctgtttgtgtgtctgggtaagagggcgccgacttactcatgttctgacgtcctctggagagttggatcgggcttgtgcgctgtaggttgtgccgccggsctaggaaccatgagggggaggaggccagggactgggaggcctagggtgttctaggagtgtgccgcagcgcccctgttccccatccgccccgtgcacccgc

SEQ ID NO: 155147 - DNA, 201 bp, Homo sapiens; identical to SEQ ID NO: 28874

SEQ ID NO: 155148 - DNA, 201 bp, Homo sapiens
gaaaagaggggactattgtatttcaatacaattcagtgattttttgttgttgttgagcatctactatatggcatgcattcctctaagtggtgtggtgaacmcaacagacaaaaatcccagcctctctggagctcacgttctctcagtcaccagcaagtattaattgatgtgctcaatcggttgatgtgaagattaagaaaa

SEQ ID NO: 155149 - DNA, 201 bp, Homo sapiens
gtgctgtttgtgtgtctgggtaagagggcgccgacttactcatgttctgacgtcctctggagagttggatcgggcttgtgcgctgtaggttgtgccgccgscctaggaaccatgagggggaggaggccagggactgggaggcctagggtgttctaggagtgtgccgcagcgcccctgttccccatccgccccgtgcacccg

SEQ ID NO: 155150 - DNA, 201 bp, Homo sapiens
atagagttggcatacaaaatatgtttgttgaataagtcatattacccttttccataggactttctatttctcctcatagtggctacgcaaagttcaaatgytggcccagtgttttagggctcctgtataccagcccgtcagtttccagacactggctctctgtacctgaagcatcgcagcctcacctgcttagtgccacaa

SEQ ID NO: 155151 - DNA, 201 bp, Homo sapiens; identical to SEQ ID NO: 28877

SEQ ID NO: 155152 - DNA, 201 bp, Homo sapiens
gggcaagaggctggcagtgcgcctgcgccgcgtcggcgtgcggaacgccgcggtgtctcggcgcctctgcgcgcgggaagatggcggaacaggctaccaaktccgtgctgtttgtgtgtctgggtaagagggcgccgacttactcatgttctgacgtcctctggagagttggatcgggcttgtgcgctgtaggttgtgccg

SEQ ID NO: 155153 - DNA, 201 bp, Homo sapiens
gccataaaacctagaaagatcactctctcccttttgccttctcttgaagacagcatttcagaggggccctgcctcattcctgggggaggaaatgctgtggycctgctgggtttccctcagtctgctaccattggatcatttccttttgtccagtgccatttctacacagctgtgcattggtcatctaagcatcaaaaccgt

SEQ ID NO: 155154 - DNA, 201 bp, Homo sapiens
taaccagacttgtatattaatgaatgtgtttatttagggtgagcttaaccagctatggtgtgtccattttgtttcacttctggttgcacggtgttgaaagrcttgcctgactttggaatttacttattaaaatgcacataaaagctaggtaatttataatgagagagcctgactgtgagctggggctgagcggtgctctgt

SEQ ID NO: 155155 - DNA, 201 bp, Homo sapiens
agaaaactaaacaaaatttagaatgtcgaaaggaaaaacttcacaacacaaattagcatatagagggtattcaaggctaatttgttgtctttccctttatsgtttgtaggtaagattttttactgctgtggaaactacagtctctgtgggaaaaaagtacataatatgcttaggtcttacaatgtagaaactgaaggctgt

SEQ ID NO: 155156 - DNA, 201 bp, Homo sapiens
taaccgatcaaaacatctcagagaatgtaagtaccattcattatcttaaagaggccaacctgaactcctctgggcaggaaattgcaaaaaaaaaaaaaaaattccatgtttcttcccctgcagtggagggtagacagcgcggcaacttccgggtatgagatagggaacccccctgactaccgagggcagagctgcatgaag

SEQ ID NO: 155157 - DNA, 201 bp, Homo sapiens
tttttttaaaggtaacatttgtcgatcacccattgcagaagcagttttcaggaaacttgtaaccgatcaaaacatctcagagaatgtaagtaccattcatkatcttaaagaggccaacctgaactcctctgggcaggaaattgcaaaaaaaaaaaaaaaattccatgtttcttcccctgcagtggagggtagacagcgcgg

SEQ ID NO: 155158 - DNA, 201 bp, Homo sapiens
tttttcctccatcctctcacctaggtacccaagatattgtatttggagaagtagatcggtgagcaggggagcagcgtttgatcccccctgcctatcagctycttctgtggagcctgttcctcactggaaattggcctctgtgtgtgtgtgtgtgtgtgtgtgtgtgtgtatgttcatgtacacttggctgtcaggctttct

SEQ ID NO: 155159 - DNA, 201 bp, Homo sapiens
aatacctgccctggtgcctatcacttcctggatcacccacccccttgtgactgccagacccacctcttgacccaccacttgcctgaccctggttctaagcmaacggggctgggactagaggagtcggacaaagggtgggagaccagaaggggcaggggcaagaggagctatcaccagagaactctactgcccctttccact

SEQ ID NO: 155160 - DNA, 201 bp, Homo sapiens
acccaaccttcttccttgaacagggagagtttggggtgtacctggtgtctgatggcagcagccgcccttatcgatgcaagatcaaggctcctggttttgcycatctggtaagaatcaatcccagtaactataactccaatgaattaaacctgaccttggttgaggtttttatgaactcttctttctcctcccaccttgcaa

SEQ ID NO: 155161 - DNA, 201 bp, Homo sapiens
tgttcttctcttgctctgtctcatcttcttgaggtacctgtgccgggtggaggagatgcgccagtccctgagaattatcgcacagtgtctaaacaagatgsctcctggggagatcaaggttgatgatgccaaagtgtctccacctaagcgagcagagatgaaggttggctgcagggagggggaaagtgtggggtgttggaa

SEQ ID NO: 155162 - DNA, 201 bp, Homo sapiens
ggagtgatgcttcggggctcaggcatccagtgggacctgcggaagacccagccctatgatgtttacgaccaggttgagtttgatgttcctgttggttctcraggggactgctatgataggtaaggccccaatcctttcttggctgatattccagctagtttcccctgcctcactcttctctttgccacttccttctttacc

SEQ ID NO: 155163 - DNA, 201 bp, Homo sapiens
caacaaagcaagagtccgtctcaaaaaaaaaaaaaaaaaaaaaaatctgaaccaggtggagtggaaaatggcagatgtagacagcctttcctgagcgtgaragtctcctcattctgtgggttaggagttggtcattgaagggctgacgcttaagagcccagatctcccaactcccttagttggcccttccgggagccgccc

SEQ ID NO: 155164 - DNA, 201 bp, Homo sapiens
taggtcaattcccaggccagaagtctggctttcccctctttctctgcagtgaagaattccaccatctctgcttcctggtctgtctgcctcaccctgctgcrctgctggtgggctgtgtccctgggatcctgtctaggggatatctggggaaggcctctttccaggctcagagttggagagttgtacaaactctacgggtgg

SEQ ID NO: 155165 - DNA, 201 bp, Homo sapiens
aagctgcagtgtcctaggcagcccctcaggagccccccaccccagtcccagctcaagctgcctccagggccaagcagcccaaagtctatcctgacttctcycaggctggatcaaggcaaataaatgcagtccttcccatcccccaccaccatggccacatttgctgtgtttcaacaatagaaagaaggcccagggaaagag

SEQ ID NO: 155166 - DNA, 201 bp, Homo sapiens
ggcgagggaggggagagggtctagagttcgttcgtgccgaggtgaaatcagcggagtgggagactctgctttttagcttcagtaatttgaatgcacctctyctgtcatacctgagtagagctcagccaaagagccagaatgctcgctgtctctctgtcgttgaccttgaacaaacacttttctcacgttcatattcacctg

SEQ ID NO: 155167 - DNA, 201 bp, Homo sapiens
cctctggctgcttgtttccccaggaaatccccaggaaggagagtgcagtcagcagtctctttcctttcccagaagtggaccacctcctcttgcctctattyccctattcactctgctttgtcacctcctgtcccccgcatatcatatccgtcagaatacttcctttccccctcccttcctgctcaggtcggtaatacctgc

SEQ ID NO: 155168 - DNA, 201 bp, Homo sapiens
cccttccgggagccgcccggtctcttgtgcaggaaggggaaggggccaaagcatgggggaaggcgtggcaggaagagggggactctgtggtcagggaactkctcgctgagcacagctgcacagtgctgtcagaacggccgatctccagcccaagatgattccagcagtggtcttgctcttactccttttggttgaacaagc

SEQ ID NO: 155169 - DNA, 201 bp, Homo sapiens
catcactaggacccagaatgtccaggaaggtagagggaggaatgatggtgaaagaacctgaatttcctgaaggagcctgactgcttgctgcaaccagaacsgtcccctccgcacaccatgcacttgtcaaacttcttcttggagccaatgatgcgatcacagccagcatggatgcatcggccctggacacagaccgaggag

SEQ ID NO: 155170 - DNA, 201 bp, Homo sapiens
  misc_feature (1)...(201): n = A,T,C or G
aaagcagagggagcactgcgggtgtgtgtgaccatagacagggcctgggggtgtcctgaccctcacccgtggctccagcacatagtagtagcccagtgccngggcctggcaggtgagtttgcactggtcctggggggccacgcctgtgtagcgaggaacccagtccatgggccctgggaagctcttgaagaggtcggtgcg

SEQ ID NO: 155171 - DNA, 201 bp, Homo sapiens
tggttcttccagccctcatggttggcatcacatatgcctgcatgccattaacaccagctggccctacccctataatgatcctgtgtcctaaattaatatayaccagtggttcctcctccctgttaaagactaatgctcagatgctgtttacggatatttatattctagtctcactctcttgtcccacccttcttctcttcc

SEQ ID NO: 155172 - DNA, 201 bp, Homo sapiens
catctaagagtcctcttcctggttatagtggagattaggaaattaacaaagtatggaatggtgagttagaaaatctatagggagaggctaactccttgctrtcttttgggggatcccaagggaataaccatgtggctctgaactatttcttacttctcagatgtggaccctccaaaggacacaattgtgaagaacattacc

SEQ ID NO: 155173 - DNA, 201 bp, Homo sapiens; identical to SEQ ID NO: 28954

SEQ ID NO: 155174 - DNA, 201 bp, Homo sapiens
tgcactgtcagcccctcgacctgcacaccggagtcctgctccagctctagtagcagcgtctccccaaaggcctgcaagcggcacaacagcctggcaggggygcccgagccaggcaggacgctgccgttgagcttctctggaaacacgatctcctcctcccgggggagggggctggccagccgggctgagggcaggagagag

SEQ ID NO: 155175 - DNA, 201 bp, Homo sapiens
gtgccaggctctgctccacccagcagctcaggcgcctggcccaggtactgcactgtcagcccctcgacctgcacaccggagtcctgctccagctctagtarcagcgtctccccaaaggcctgcaagcggcacaacagcctggcaggggcgcccgagccaggcaggacgctgccgttgagcttctctggaaacacgatctcc

SEQ ID NO: 155176 - DNA, 201 bp, Homo sapiens
agacctttactgctggggactgtgtcagtaggagatgccatggccaggaaggggtggggtggggagagggagcagttattcccagcccagagtctgtgacycacctctgagaaccctcggtgggtctggctaggagaagggtgaaggggagaggcctgagccttaccaagaaaggaggctcatggagaaaggaaaggcagg

SEQ ID NO: 155177 - DNA, 201 bp, Homo sapiens
aaggcaccatgtcacacaactccaggaacatcatttgcatcatagtctatgtagtggcgcttcttagaattgtgcagtgcatggcctgcggtgctgactgsggcctcacctgacgggtaaacagaatggctgtgtcaaagtggtcagggtccgagtcctcaggggtgttgaggccccgctgccaggcacagaagctgcgca

SEQ ID NO: 155178 - DNA, 201 bp, Homo sapiens
gggggcctgggactttgacactaattcccagcacgttctatgaagatgtttgagttctacgagcgagtgtctggagcccgaatgcatgctgcttatatccrgccaggaggagtgcaccaggtgagcaggtccccggcttccccaaatgtccagcccaggcctattttccctgtggccactggagggcagtgctggatgatg

SEQ ID NO: 155179 - DNA, 201 bp, Homo sapiens
catgagccatcacaggggccatgacatggcgagaggtgctcaaaggcccattcaaactgatgcatggcttggagttgtcatggagcatgttgaagacatgrcctgtgggagcaaaggccctgataggatctgagggtcccttccccatgccctgagggactccataataaatctggctgcagctgtggatgatcagatcca

SEQ ID NO: 155180 - DNA, 201 bp, Homo sapiens
ggcctgggactttgacactaattcccagcacgttctatgaagatgtttgagttctacgagcgagtgtctggagcccgaatgcatgctgcttatatccggcmaggaggagtgcaccaggtgagcaggtccccggcttccccaaatgtccagcccaggcctattttccctgtggccactggagggcagtgctggatgatggaa

SEQ ID NO: 155181 - DNA, 201 bp, Homo sapiens
tgggacctgcggaagacccagccctatgatgtttacgaccaggttgagtttgatgttcctgttggttctcgaggggactgctatgataggtaaggccccartcctttcttggctgatattccagctagtttcccctgcctcactcttctctttgccacttccttctttaccctacttctcagtgtctgtgggagctcttgt

SEQ ID NO: 155182 - DNA, 201 bp, Homo sapiens
ctcctgacctcaggtgatccttggcctcccaaagtgctgggattacaaagcgtgagccaccacacccaacccagttttcttttaatagagaatttactgtrtagtaagagattcgggttttttttatttttttattttttttgagacggtgtcacgctctttcaccaggctggagtacagtggcatgatcttggctctctg

SEQ ID NO: 155183 - DNA, 201 bp, Homo sapiens
tgcttgaacctggcaggcagacattgcagtgagccgagatggtgctgctgcactccagcctgggtgcagagtgagactctgtctcaaaaaaaaaaaaaaaaggtaatcttcttgagggtaaaagttcatttagtgcgagtaagcattaggtataccatttcctgactggttggccattcattggatacatttggaggacag

SEQ ID NO: 155184 - DNA, 201 bp, Homo sapiens
cccagggaaagagcaaggaatgaggacaacagagggaccaaacctctgccctggctctgtggcagctgccttgtctagcccaggtcctggtcagttcccayagctaaggatctggccccaccctttggtacagttcccattaggtcaattcccaggccagaagtctggctttcccctctttctctgcagtgaagaattcca

SEQ ID NO: 155185 - DNA, 201 bp, Homo sapiens
tcagccctcagctgtctctttccctttttggtgggacagagccccaggagaggcagagagtgagggaaagggcctggccggcatgcacagataggatcackgtcctgggagaattcctgctcttatagtctaacctaccatggcttctcttttctcaaggctccctcatgctgccctttggccctagtggctggtttccag

SEQ ID NO: 155186 - DNA, 201 bp, Homo sapiens
  misc_feature (1)...(201): n = A,T,C or G
ggaggagaactggacaccacccccacaggtccgagagcagtcaccccatggtccccaaggaccccagccaccagcctgtggaatctgcaaaggcacagaanggaagtggggcataagtgaactctctcctgggcttaaggccagtccccacacccccgggccctttaccccacccctgccctaggatctcacattgaagtc

SEQ ID NO: 155187 - DNA, 201 bp, Homo sapiens
tgagccaccgcgcctgaccagtatgtcagttttttaaatttttattattttttgagatggagttttgctcttgttgcctaggctagaatgcagtggcatartcttgtctcactgcaacctctgcttcctgggttcaagtgattttcctgcctcagcctcccaagtagctgggattacaggcatgcaccaccacgccctgct

SEQ ID NO: 155188 - DNA, 201 bp, Homo sapiens
ttttcctccatcctctcacctaggtacccaagatattgtatttggagaagtagatcggtgagcaggggagcagcgtttgatcccccctgcctatcagcttyttctgtggagcctgttcctcactggaaattggcctctgtgtgtgtgtgtgtgtgtgtgtgtgtgtgtatgttcatgtacacttggctgtcaggctttctg

SEQ ID NO: 155189 - DNA, 201 bp, Homo sapiens
agttaggggtgcctccctccaggggctggaggtggagttcagccccccgatattgtaacacgcctaacagggctcccccatcccagtgcagagatgccacygactccggatctccattgatggtgccagtcaggtaggtgccaggctctgctccacccagcagctcaggcgcctggcccaggtactgcactgtcagcccct

SEQ ID NO: 155190 - DNA, 201 bp, Homo sapiens
  misc_feature (1)...(201): n = A,T,C or G
gagaagggtgaaggggagaggcctgagccttaccaagaaaggaggctcatggagaaaggaaaggcaggcagaagggagggaagcagaacggccagaagtgnaagtgggtggagagagggtgaataggggtcagtaggacagacatggcgggaggacaccgcaggacacagactccagagatgcctaccttggctcttcggg

SEQ ID NO: 155191 - DNA, 201 bp, Homo sapiens
cttgatgagttggaggaggtaagctaggagtcaatgggaaaaatctctcccccacaagaagggctagagaaatacagagatatttgaagagtgtgaggaaragtattaacacaccagttttcttgatcaatagttgctgaccaacaataggatctggcgaaatcggacaattgacattggggttgtaacagcagaagaagc

SEQ ID NO: 155192 - DNA, 201 bp, Homo sapiens
agtaccacatctgtgggggagggcatcagcgtgtattcaccattgagggcataggagccatctggcagcttcagggccaagtagatgctccggtggccagsgtttccctgctgccggacaagaatgtgggtggcccccgcggggatagtgaccacattgttgtatccgtacctgtgtggaaggagtagatggggagctcag

SEQ ID NO: 155193 - DNA, 201 bp, Homo sapiens
  misc_feature (1)...(201): n = A,T,C or G
ccactggagggcagtgctggatgatggaaactccaaacctgtatcgctgggggagggggtgctgagagggctctccttagtgaaggctatgccacattcantagcacttccgtttggcttctaggacctaccccttgggcttatggatgacatttatcagttttctaagaacttctctcttcggcttgatgagttggagga

SEQ ID NO: 155194 - DNA, 201 bp, Homo sapiens
gcacagtggatccgaggtatgtccccccaactttttctgtggcccactgtgagcatagcatagtgccttttccaccacttccccgttgaacccaagcttaktgttcagaccccaggctctgcccagacctctctgtccgcctcagtgcttggctcctatatcctgtcttctccttgtcttcacagtgctgtttggagaaat

SEQ ID NO: 155195 - DNA, 201 bp, Homo sapiens
tgtgtgaaggggattgaccagaaggaggtatgggataccctccctctcttgccactcctgccctagtttgcagtttgccacagtgattttaaaggcagcakcagaagccagacaccaagccctagggcctcaaacctgactcctatagctgggagtgggggatgaaaatcaaatttggagcagagaaaagagccaaggcca

SEQ ID NO: 155196 - DNA, 201 bp, Homo sapiens
attttaccacattttactatgctctgcctttgaggtatttgctttgaatgtgtctgtatggtggaaatactgtataatggtgtggtattcttcccaatgcygcattcagttacatgatattggtaacttaaaattggccattgtgggagtatttttaccatggaaattggcaaacatgacaaatcagagtcctccctcact

SEQ ID NO: 155197 - DNA, 201 bp, Homo sapiens
agtctcctcattctgtgggttaggagttggtcattgaagggctgacgcttaagagcccagatctcccaactcccttagttggcccttccgggagccgcccrgtctcttgtgcaggaaggggaaggggccaaagcatgggggaaggcgtggcaggaagagggggactctgtggtcagggaactgctcgctgagcacagctgc

SEQ ID NO: 155198 - DNA, 201 bp, Homo sapiens
tgcatacctcactgcgtgacaaggtaatcacctccttcatagccagcccattccagtggtggacagttctggccctcagaaagtcagttctaattctactragccaaaattcgcctcctctagctatgctatttattctgggaggaagtgagaactacacaaagacagcagcatttctcaccccttcccacactgcagagg

SEQ ID NO: 155199 - DNA, 201 bp, Homo sapiens
cctgctctactgtcccctcccaagggctcccatcccccctactcctcacctgagccagttgggcagtcctcagtgttgcaggagcggaagcgggtacggcrgccctcacagtacttgccaccattccgggggacaggcctcgtgcagtctcgggaggagaactggacaccacccccacaggtccgagagcagtcaccccat

SEQ ID NO: 155200 - DNA, 201 bp, Homo sapiens
ttttctttctttctttttttttttttttttttttgagacagtgtctgtctctgttgcccacgctggagtgcagtggtgtggtcacacctcactgcagcctygacctctggggctcaagtgatcctccctccattgcctcccaagtagctaggactacaggcatacaccaccacactgactaattaaaaaaaaaaaaagatt

SEQ ID NO: 155201 - DNA, 201 bp, Homo sapiens
gcgcggcctggccccggagcagcgggttacgctgcgcgcgtccctgcgcgacgagaagggcgcgctcttccgggcccacgcgcgctactgcgccgacgccygcggcgagctggacctggagcgcgcacccgcgctgggcggcagcttcgcgggactcgagcccatggggctgctctgggccctggaacccgagaagccttt

SEQ ID NO: 155202 - DNA, 201 bp, Homo sapiens; identical to SEQ ID NO: 28969

SEQ ID NO: 155203 - DNA, 201 bp, Homo sapiens
tgcaaacacctgggaggtacccagaaaacagctgtccctaaattgtaatgcatttgtctgttgttgacatgagagattcaagatcagattctagtgttcartaaccctatgtgaatcagatgtctcctggataacattaaagccatgtctttgtcattaatggtgtattttacgtaactttgttgaataagctttgtcgtt

SEQ ID NO: 155204 - DNA, 201 bp, Homo sapiens
gctggagtgcagtggcgcaatctcggctcactgcaacctccgcctcctgggctcaagcaattctcctgcctcagcctcccaggtaactgggattagaggcrtgcgccaccacactcggctaatttttttttgtatttttaatagagacagggttctgccatgttggccaggctggtctcaaactcctgacctcaagtgatc

SEQ ID NO: 155205 - DNA, 201 bp, Homo sapiens
ttggccaggctggtctcaaactcctgacctcaagtgatccgcccgcctccgcctcgcagagtgttgggattacaggcatgagccaccgcacccaatctggrtaagttattgactcaactctcctctcttcttttcttccaggtaaaaggcccaggcattgggcttttgggcatttctctaggagctgatatttgtctctca

SEQ ID NO: 155206 - DNA, 201 bp, Homo sapiens
tagagggtttggtaccgggcgtggtgactaacgcctgtaatcccagcactttgggaggccgagatgggcggatcacttgagatcaggagtttgagaccagmctggccagcatggtgaaaccctgactctaccgaaaatacaaaaattagtccagcctggtggcacacgcctgtagtcccagccactcaggaggctgaggca

SEQ ID NO: 155207 - DNA, 201 bp, Homo sapiens; identical to SEQ ID NO: 28965

SEQ ID NO: 155208 - DNA, 201 bp, Homo sapiens; identical to SEQ ID NO: 28966

SEQ ID NO: 155209 - DNA, 201 bp, Homo sapiens
aatgtttttgcattggataagttatttatttatttatttatttatttatttatttatttatcttttgagacggagtctcgctttgtcacccaagctggagygcagtggcgcaatctcggctcactgcaacctccgcctcctgggctcaagcaattctcctgcctcagcctcccaggtaactgggattagaggcgtgcgcca

SEQ ID NO: 155210 - DNA, 201 bp, Homo sapiens
ccagcctccttgctggccatggctttgccacgttggctctagcttattataactttgaagatctccccaataacatggacaacatatccctggagtacttygaagaagccgtatgctacatgcttcaacatccccaggttctcctcatgtcctttatttaatcagtctctctagaaatatttccatagagagtgtaacctt

SEQ ID NO: 155211 - DNA, 201 bp, Homo sapiens
aatgggcagtagatagtagcatggcaaagattcaaaggggcgatgtggataaaaaacaagagatgctctgccggaagtgaaacacacaaagcaacagagakccagccatggggaggaaactggactttgccgtgcataatgtatatttcatattctaataacctgcttaatcctttctcgaataaggtagggtattaaata

SEQ ID NO: 155212 - DNA, 201 bp, Homo sapiens
gtaggtataatatcacgcaaccacactcatgggttttttaaatgaatagcattgaaaaactctctgtcaaaaagaacaaatcagtttttttttaatataamaataagttttcaatattgtgtgaagttccaaactatagacttattctgatatgtaaagaggtatttgtgaagaccatcatttacctaaccatggagttgc

SEQ ID NO: 155213 - DNA, 201 bp, Homo sapiens
ttagaagaaatgtccaaaaagatacaggtaggtataatatcacgcaaccacactcatgggttttttaaatgaatagcattgaaaaactctctgtcaaaaakaacaaatcagtttttttttaatataaaaataagttttcaatattgtgtgaagttccaaactatagacttattctgatatgtaaagaggtatttgtgaaga

SEQ ID NO: 155214 - DNA, 201 bp, Homo sapiens
tgaataaatctcctcactttatagttgaggaaaatcgagatccagaaccaactgaagtggcttgtcagagagtatacagtaagtggcagaaccaagatcaraagccagatttcttggttcccaatccaactctctttccactatgcagtgctataattattaataggaaggtaaatagcagtcatttattattaatattgc

SEQ ID NO: 155215 - DNA, 201 bp, Homo sapiens
ggggaactgcttgagcctgggagacagaggttgcagtgagccaaggtgacagtactgcactccagcctgggtgacagggagaccccatctagaaaaaaaaraataaagaaagtcgattttttcaaaattagctaccaaaaaagttacctctaagcaataagcaatcctaaaaatatgacttgaaaattacatttgatgata

SEQ ID NO: 155216 - DNA, 201 bp, Homo sapiens
tattaaatataaaatgctgtaccctgtcactagttatttaataacatattatttttctgtcatgttccattagtagctgcttgtctcctactatacctgtytgacacaatatcaccagagcaagccatagacagcctgcgagacctaagaggatccggggcaatacagaccatcaaggtgaggaggtgggcggtgcttgct

SEQ ID NO: 155217 - DNA, 201 bp, Homo sapiens
tgacttttgaatgggggtttctgcgtgggcgtcctttccgttgatgttgatgctattgctttctgtttgttagttttccttgtaacagtcaggcccctctyctgcaggtctgctggagtttgctcgaggtccactccagaccctgttttcctgggtatcaccagtggaggctgcagaacagcaaagattgctgcctgctcc

SEQ ID NO: 155218 - DNA, 201 bp, Homo sapiens
agtggaggctgcagaacagcaaagattgctgcctgctccttcctctggaagtttcgtcccagaggggcacctgccggatgccagctggagttctcctgtaygaagtgtctgtcgacccctgctgggaggtgtctccccgttaggaggcgcggggttcagggacccacttgaggaggcagtctgtcccttagcaaagctcga

SEQ ID NO: 155219 - DNA, 201 bp, Homo sapiens
tacaggcataagccaccgcaccctccctttcctatcttctttaaaacctgctcttccttcaaaacccagctaaagcgtttcctctgtgaagccttctccakctacctacgtggtcactctcttctctgttccacagtgtatagttctgcttccatttcagcacttatataatacctttcttctgtaatctatgcacacatc

SEQ ID NO: 155220 - DNA, 201 bp, Homo sapiens
cttcctctggaagtttcgtcccagaggggcacctgccggatgccagctggagttctcctgtacgaagtgtctgtcgacccctgctgggaggtgtctcccckttaggaggcgcggggttcagggacccacttgaggaggcagtctgtcccttagcaaagctcgagcactgtgctgggagatctgttgctctcttcggagcca

SEQ ID NO: 155221 - DNA, 201 bp, Homo sapiens
aagtgctgggattataggcctgagccatcatgcccagcctctccctttatatggtagatccagatctctgaaacagttctatgtctggaacactttgtggraagcaagttcacgagtaagactaggggtcaatacctattcagtcctctatttcacatcctaaagcaaaatatatatctacagctttacctacaatacaat

SEQ ID NO: 155222 - DNA, 201 bp, Homo sapiens
gctggcagtgagaatttcaagccagtggatcttagcttgttgggctccgttgggggtgggatccacagagcaagaccactcagctccctggcttcagcccyctttccaggggagtgaatggttctgtcttgctggcattccaagtaccactcagttggaaatgcagaaatcacccgtcttctttctgcattggtcttgctg

SEQ ID NO: 155223 - DNA, 201 bp, Homo sapiens
tttgccaatcttaataaagcttaaagcctggagtacaaatgaggctgaggactacaaccaggtacttgttacagaagaaacacagaatacagaatccttgmttaggatgaatccctgtaattatattcctagaaatataagaaattgaaattcatattcaaaatataattgaaacatataaatgattacgtgaaatgactt

SEQ ID NO: 155224 - DNA, 201 bp, Homo sapiens
gagtacaaatgaggctgaggactacaaccaggtacttgttacagaagaaacacagaatacagaatccttgcttaggatgaatccctgtaattatattcctrgaaatataagaaattgaaattcatattcaaaatataattgaaacatataaatgattacgtgaaatgactttataaagtagctatataagtgtttaaacat

SEQ ID NO: 155225 - DNA, 201 bp, Homo sapiens
acatatgacgaaaaactgacttttttacttgctttattattacttataggttgtaaatttaaagatgttagaagaaatgtccaaaaagatacaggtaggtrtaatatcacgcaaccacactcatgggttttttaaatgaatagcattgaaaaactctctgtcaaaaagaacaaatcagtttttttttaatataaaaataag

SEQ ID NO: 155226 - DNA, 201 bp, Homo sapiens
ttttttgttttcttgttttttgtagagacaggatttcaccttgttgtccaggctggtcttgaactcctggactcaaacagcctgcctgccttggcctctctaagtgctgggatcataggcatgagccactgcacccagcctaacttgtcatttttaagacttaaataataacaaagcaaataagtccctgttttaaaactt

SEQ ID NO: 155227 - DNA, 201 bp, Homo sapiens
ggttttttgttttcttgttttttgtagagacaggatttcaccttgttgtccaggctggtcttgaactcctggactcaaacagcctgcctgccttggcctctctaagtgctgggatcataggcatgagccactgcacccagcctaacttgtcatttttaagacttaaataataacaaagcaaataagtccctgttttaaaac

SEQ ID NO: 155228 - DNA, 201 bp, Homo sapiens
aatgaataaatctcctcactttatagttgaggaaaatcgagatccagaaccaactgaagtggcttgtcagagagtatacagtaagtggcagaaccaagatsagaagccagatttcttggttcccaatccaactctctttccactatgcagtgctataattattaataggaaggtaaatagcagtcatttattattaatatt

SEQ ID NO: 155229 - DNA, 201 bp, Homo sapiens
aagtggcagagccaggactgaagcccaggcagtggtgctccagagcccatgctccagacttcggtgataccctatctctggactcctttagatacatgaayggttattatctacatggcatttgtgcagtaaccactcagattttgtttagacagaggaataatcaaagtgacagttggtaaaagtctgatttctatctat

SEQ ID NO: 155230 - DNA, 201 bp, Homo sapiens
ggtaggtataatatcacgcaaccacactcatgggttttttaaatgaatagcattgaaaaactctctgtcaaaaagaacaaatcagtttttttttaatataraaataagttttcaatattgtgtgaagttccaaactatagacttattctgatatgtaaagaggtatttgtgaagaccatcatttacctaaccatggagttg

SEQ ID NO: 155231 - DNA, 201 bp, Homo sapiens
taactccatgattcatttactatctataatacagaataagacccttttttttttttggcccttctttatacattctaactccatgattcatttactctttwataagaccctttttttttttttggcccttctactaacttagtagaaggaagtaagtaggaaatagaggtaggattgaaataatctcccatttagtatcaa

SEQ ID NO: 155232 - DNA, 201 bp, Homo sapiens
attcatttactatctataatacagaataagacccttttttttttttggcccttctttatacattctaactccatgattcatttactctttaataagaccctttttttttttttggcccttctactaacttagtagaaggaagtaagtaggaaatagaggtaggattgaaataatctcccatttagtatcaaaatctactta

SEQ ID NO: 155233 - DNA, 201 bp, Homo sapiens
acatctcagggattagttcatgagaaggtactttgtacttaaatagctacatgtccttggatttaagggacagggagagggctggagttgggagcacttasatcatccagttatttattttaaaccaaatgctcaatagttaatattgccataaagaagtcctagtgtatagaatgcctatagtattcatatcattataat

SEQ ID NO: 155234 - DNA, 201 bp, Homo sapiens
ctccagtgaccgggtgcagtcactcacacccgtaatcccagcactttgggaggccgaggccggcagatcacgaagtcagaagatagagactatcctggacaacatggtgaaaccccgtctctactaaaaatacaaaaattagctgggcatggtggcacgtgcctatagtcccagctacttgggaggctgaggtaggagaat

SEQ ID NO: 155235 - DNA, 201 bp, Homo sapiens
aaaaaaaaaaagaataatagtctccagttccacccgggttgctgtgaatgccattttgttccttttcatggctgagtagtattccatggcatgtgtgtgcktgtgtgtgtgtgtgtgtgtgtgtgtatgtatatctcacattttctttttttattatactttacaaccccactttttgatggggatgtttgtttttttctt

SEQ ID NO: 155236 - DNA, 201 bp, Homo sapiens
caagcccacgtggcaacagctttaagctgcatactccatttgatatacaataataaaactccatttctttatctttcaattggtttcaactagggagtgasaaaagggtatgggttttgttctgttttgtttttgtttttctttttcttttgattccttaaaatttcaacaaggagtgtagaagtcttccatgtcaaaatg

SEQ ID NO: 155237 - DNA, 201 bp, Homo sapiens
tgcattgatccctttaccattatgtaatccccttctttttctttttttatctttgttggtttaaagtctgttttatcagaaactaggactgcaacccttgmttttttttgcattccatttgtttggtaaatatttctccatccctttattttgagcctatgtgtgtctctgcacgtgagatgggtttcctgaatacagcac

SEQ ID NO: 155238 - DNA, 201 bp, Homo sapiens
agactgtccatggccacctgtgactgggtggatacatttgtctaattctggggtgaacaaggggcaagcccacgtggcaacagctttaagctgcatactcsatttgatatacaataataaaactccatttctttatctttcaattggtttcaactagggagtgagaaaagggtatgggttttgttctgttttgtttttgtt

SEQ ID NO: 155239 - DNA, 201 bp, Homo sapiens
accaatgggtcttgactctatccaatttgccagtctgtgtcttttaattggggcatttagcccatttacatttaaggtcaatattgttatgtgtgaatttkatcctgtcattatgatgctagctggttattttgcccattagttgatgcagtttcttcatagcgttgatggtctttgcatttttgtatgtttttgcagtgg

SEQ ID NO: 155240 - DNA, 201 bp, Homo sapiens
ttggctggatatgaaattctgggttgaaaattattttctttaagaatgttgaatattggcccccactctcttctggcttgtagggtttctgcagagagatrtgctgttaatctgatgggcttccttttgtgggtaacccagcctttctctctggctgctctttacatttttttccttcatttcaatcttggtgaatctgat

SEQ ID NO: 155241 - DNA, 201 bp, Homo sapiens
gtccaaaaagatacaggtaggtataatatcacgcaaccacactcatgggttttttaaatgaatagcattgaaaaactctctgtcaaaaagaacaaatcagtttttttttaatataaaaataagttttcaatattgtgtgaagttccaaactatagacttattctgatatgtaaagaggtatttgtgaagaccatcatttac

SEQ ID NO: 155242 - DNA, 201 bp, Homo sapiens
cttatataatacctttcttctgtaatctatgcacacatctgtctctccagccatactgaaggcaggctatttatcttatagatcttttgcatctccagtgyttggcaaatgaaggtggccaagaaatatttgtgaatgaataaatctcctcactttatagttgaggaaaatcgagatccagaaccaactgaagtggcttgt

SEQ ID NO: 155243 - DNA, 201 bp, Homo sapiens
aaaccccgtctctactaaaaatacaaaattagctgggcgtggtgacacatgcttgtaatcccagctacttgagaggctgaggcaggagaatcacttgaacstgggaggcagaggttgcagtgagctgagatcgtgccattgcactccggcctggtgacagagcaagactccatctcaaaaaaaaaaaaaaaaaaaaagagg

SEQ ID NO: 155244 - DNA, 201 bp, Homo sapiens
cacttagaataatagtctccagtgaccgggtgcagtcactcacacccgtaatcccagcactttgggaggccgaggccggcagatcacgaagtcagaagatmgagactatcctggacaacatggtgaaaccccgtctctactaaaaatacaaaaattagctgggcatggtggcacgtgcctatagtcccagctacttgggag

SEQ ID NO: 155245 - DNA, 201 bp, Homo sapiens
ttggttttttgttttcttgttttttgtagagacaggatttcaccttgttgtccaggctggtcttgaactcctggactcaaacagcctgcctgccttggcctctctaagtgctgggatcataggcatgagccactgcacccagcctaacttgtcatttttaagacttaaataataacaaagcaaataagtccctgttttaaa

SEQ ID NO: 155246 - DNA, 201 bp, Homo sapiens
aaagaaaaaaaagtccgtagcctaaattagccgtcctgtgatcttctagtaccaagaccgttgtagaatatagcttcagagctagaaagagcattaggtgsttacaattgctaatccctatgttgccatgtggagggacatcagctgtccttcactcctggcctctttctccacctgtccccattgagttatctgatcccc

SEQ ID NO: 155247 - DNA, 201 bp, Homo sapiens
atcacctcagcattctgtggcaaacaggcttgctggtgttagcaatgcagtttccacatctcaataaggatatgaaatgagatgattggcagagtaagaayatcttttgggaggctattaaaactccaaataaattatttaaagcttttattttgcttatctgctgagattagcaatacagtttgtttttaaaaaatattg

SEQ ID NO: 155248 - DNA, 201 bp, Homo sapiens
caagtttcttagtttccttgcattgggttagaacatgctcctttaacttggaggagtttgttattacccaccttctgaagcctacttctgtcagttcatcraactcattctctgtccagttttgttcccttgctggcgaggagttgtgatcctttggaggagaagaggtattctggtttttggaattttcagcctttttgc

SEQ ID NO: 155249 - DNA, 201 bp, Homo sapiens
gacataatgggaccatctttagacaagcaaagatggaagagcataatgcctgggggtggggtaattagttgcgatacgagctacgcagcatgcaaggttgrcgtattgaaatggaggatgcacatacggctgtgattgctttgccaagtggacttgaaaggtggtcattctttgctgtgtataacgggcatcctggttctc

SEQ ID NO: 155250 - DNA, 201 bp, Homo sapiens; identical to SEQ ID NO: 28973

SEQ ID NO: 155251 - DNA, 201 bp, Homo sapiens; identical to SEQ ID NO: 28974

SEQ ID NO: 155252 - DNA, 201 bp, Homo sapiens; identical to SEQ ID NO: 28975

SEQ ID NO: 155253 - DNA, 201 bp, Homo sapiens
tgtagatcactgtttcttttagagcatttgatatggtcatattatttgattaatgtgtatcacctccagtagactaagccctatgtgatctgttttaactyatgattctatctccagcagtgagaacagtacctcacacaagagttactcaaatattttgaaagagtgactctagccatcacttgttagactgctaacaag

SEQ ID NO: 155254 - DNA, 201 bp, Homo sapiens
aaatcagactttaccatttaataggttatttctaaatagtatattaccatatctttaaataaaatgtgctgttgggttttgcttggaaaattagatacagygaagccttataatgtttggaagcatctgctatgatttgttatcaatcacagaaatttctaaacagcatcataacaaggattccttatatccaaattgaca

SEQ ID NO: 155255 - DNA, 201 bp, Homo sapiens
actgagacatcttacagatggccactggactcttttaagttagcactaaattatgtctacaatgttaggaagatggttgtgatattttcatggaacttttwaattttttttcctttttctttcttttttcttttctttttttttaatagaacattcacattaagccagaagcactcatttcttaagtcctggggacagtta

SEQ ID NO: 155256 - DNA, 201 bp, Homo sapiens
cgctcggacgctgacagaagactgcgccgctgctttgggattggtagctgagttttgtgtcgcgccttttctgacgatgcgaacaacatggcggcggaaartggtagcgattttcagcagagacgtagaaggcgccgggacccggaggaaccggaaaaaacagaactcagcgaaagagagctggcagtagcagtggcggtg

SEQ ID NO: 155257 - DNA, 201 bp, Homo sapiens
ttcaaaacagatgagtaggttcgtggagaaggataataatagtacaagttgagcaccccaaatataaaatgctccaaaatccaatagtttttgagtgctgacatgatactcaaaaaatgctctttggagcatttgagattttctgattagggatgttcaaccagcaagtataatgtaaatattctaaaatctgagaaattg

SEQ ID NO: 155258 - DNA, 201 bp, Homo sapiens
aaatagcagtttccctaccccaaccaaccttccatctaaatgggtaaatacttttaagatgagaatttcatttacacctttcaaaattattactaaaaatktattagtatatgaaggaaaaaaattaatcgttttacctttaatttaactttgttaggaagtaaaaattacccataaaagataattcttggccaggaatgg

SEQ ID NO: 155259 - DNA, 201 bp, Homo sapiens
ttgtaaactgatgtaatgctattaaggttaacagcatttgataaatgtatgaaatagcagtttccctaccccaaccaaccttccatctaaatgggtaaatwcttttaagatgagaatttcatttacacctttcaaaattattactaaaaatttattagtatatgaaggaaaaaaattaatcgttttacctttaatttaact

SEQ ID NO: 155260 - DNA, 201 bp, Homo sapiens
tttggcctctgacgctgtgctcttcttctgaagataaaatccataaatacaggcactatgtcttcttcactgttaaatccagaaagttaggaaatgactayagcattacagtatattcattcattcctccaaaacattgtaaactgatgtaatgctattaaggttaacagcatttgataaatgtatgaaatagcagtttcc

SEQ ID NO: 155261 - DNA, 201 bp, Homo sapiens
tttttgtgtgaacatcaataatttatttttttggcctctgacgctgtgctcttcttctgaagataaaatccataaatacaggcactatgtcttcttcactrttaaatccagaaagttaggaaatgactacagcattacagtatattcattcattcctccaaaacattgtaaactgatgtaatgctattaaggttaacagca

SEQ ID NO: 155262 - DNA, 201 bp, Homo sapiens
agtgctgggattacaggtgtgagccaccgtgcctggcctcatttctgttttttaaacctgaaaattatagctgcctaccagtttaaattgataccttttgkggggtagagaaacacttttaaaaatctttcactagttattttgtacatagataagatagttgattcccagcttttatctgtaaagttgtcataattggaa

SEQ ID NO: 155263 - DNA, 201 bp, Homo sapiens
gggtaagaattgcacctcattttcttgtagctctttcctaaactatactaattaaagtttaaattttttaaattttttttctttgaatcatgcacacttaytttactgttatttactagaatgttttaatttcatttattgaaataggagttattgagagtattgcagttagctctgagggagcattgttctgttctgtgg

SEQ ID NO: 155264 - DNA, 201 bp, Homo sapiens
tttctgtggtctcttggttgtttataatcttatgtagaaagtttccactcatgtttgtaaaagaaatggaaagaagatatgcatagtttcaagttgttgtrtgttttttttaacaagtttgtctgtcttttgcttattgatttaaattagcctggttcatgttaaatgttgccaaagattttaaccacagaattcagcatt

SEQ ID NO: 155265 - DNA, 201 bp, Homo sapiens
aaatatttaaaattttgtctaaatggacaagtatttaacaatttcagctttctagaaatggagtcaccccctttaacatgttctttggacattggactgtkgtatatattttcagaaagacatgattatatagcactatatctcttcaggacaggaactgtgttttactcttctttatgcccatgtgacctagaacgtatt

SEQ ID NO: 155266 - DNA, 201 bp, Homo sapiens
tgttacaaaaatatttaaaattttgtctaaatggacaagtatttaacaatttcagctttctagaaatggagtcaccccctttaacatgttctttggacatkggactgttgtatatattttcagaaagacatgattatatagcactatatctcttcaggacaggaactgtgttttactcttctttatgcccatgtgacctag

SEQ ID NO: 155267 - DNA, 201 bp, Homo sapiens
catagaatgttacaaaaatatttaaaattttgtctaaatggacaagtatttaacaatttcagctttctagaaatggagtcaccccctttaacatgttcttkggacattggactgttgtatatattttcagaaagacatgattatatagcactatatctcttcaggacaggaactgtgttttactcttctttatgcccatgt

SEQ ID NO: 155268 - DNA, 201 bp, Homo sapiens
ccaccccagccaatcccgaaactcgctcggacgctgacagaagactgcgccgctgctttgggattggtagctgagttttgtgtcgcgccttttctgacgakgcgaacaacatggcggcggaaagtggtagcgattttcagcagagacgtagaaggcgccgggacccggaggaaccggaaaaaacagaactcagcgaaagag

SEQ ID NO: 155269 - DNA, 201 bp, Homo sapiens
cattattttcattaaagcccaaactccctcacatggcatataaagccctttatgatgtgatctctccttaccttcttagtgcatcttccattaccttcctytcccaaccccttactttgtactccacccattctaaaatcactcgagaatcggtcttgtacttttttttcctctggattcctacccagatatggtgtttct

SEQ ID NO: 155270 - DNA, 201 bp, Homo sapiens
gtggcggtgtcccaggagaacgatgaggagaacgaagagcgctgggttggacctttacctgtggaggcaacactggccaagaagaggaaaggtagctgcaracatagtaccgggacgaattggagtgctgcgtccgctgagtaggagggttcaagccagatccgaagagggatgatgtgtggagttttgtgccctcagaac

SEQ ID NO: 155271 - DNA, 201 bp, Homo sapiens
ctagggaaaatgacgtaagcttcctagatcacagatttgttttcatccaaaacccgaagtctggttttgaaatcacgctcttgatacgatgggctgaggcwttttgtcactaacgaggaataatcacaaattattatcaaataaaaggggtgggaaaaggggtagattaagttttcttgtctttgttgttttgttatcttg

SEQ ID NO: 155272 - DNA, 201 bp, Homo sapiens
atctagggaaaatgacgtaagcttcctagatcacagatttgttttcatccaaaacccgaagtctggttttgaaatcacgctcttgatacgatgggctgagkcattttgtcactaacgaggaataatcacaaattattatcaaataaaaggggtgggaaaaggggtagattaagttttcttgtctttgttgttttgttatct

SEQ ID NO: 155273 - DNA, 201 bp, Homo sapiens
cgaaatagtgatttaagcgtagtacaacgtctttttgataatatctaacacttttgatcattgatttgttatgacagatgctaaaactaacattttcctawtcttatgtgtttggctcctctcatttactccccacagcagccacatgaagttggaatttcgaactcttatttaggtatgcaaaagggtaccagttctctt

SEQ ID NO: 155274 - DNA, 201 bp, Homo sapiens
tttcaactctgacacttccactaataaattttcgcatctagggaaaatgacgtaagcttcctagatcacagatttgttttcatccaaaacccgaagtctgrttttgaaatcacgctcttgatacgatgggctgaggcattttgtcactaacgaggaataatcacaaattattatcaaataaaaggggtgggaaaaggggta

SEQ ID NO: 155275 - DNA, 201 bp, Homo sapiens
gctgagaaattattgtacttctttttaaatatatgctaaaggggagcgtaaacttaaattctctttaatttgctcaaccagaggatataatttaaagaaaytggggtttaccaagattttccatttgtcctccaacacagccttggcttgataataagcatacagtatttggacgagtgactaaaggaatggaagttgtac

SEQ ID NO: 155276 - DNA, 201 bp, Homo sapiens
gatcaggtacttaccaggttggataacatttatggaatacttatatagggacagatgaccacctacagaccttatgccttaaaaactgagtcttctctccrgcagaaatgatcattagcccttccctgcaaaatgtgtagtccagcatcctaggctattcctggcacatgaataagcagcgtaatatgtatcagtctccct

SEQ ID NO: 155277 - DNA, 201 bp, Homo sapiens
gacggggtttcaccttgttagccaggatggtctcgatctcctgacctcatgatccacccgcctcggcctcccaaagtgctgggattacaggcgtgagccascgcgcccggccggcacaaatctcttaacacacatactctgagctgctcaatccactctatttgctcattgttgtcttcaacatttgcttaaatgattagc

SEQ ID NO: 155278 - DNA, 201 bp, Homo sapiens
tcattatttatggttagaatggcacaaacatacctgtcttgatcacctgtcctactccccaggtttgtttcctcaaagctttccattcacagatattgaaygtttgccctttgagaatacttggaagagtatatttcagactttgatagaaattcttgaagaagaggtctggaaggttttgaacatcagcaccgtggttag

SEQ ID NO: 155279 - DNA, 201 bp, Homo sapiens
ttccatcagggtttgatttctgatgagggctgtctttcttacttctccctatgttctcccatggttggaggaagaaggaagggagagggaagaaggaaagrgagatctttttttcttcttataaggctacaagcccatcagattaggaccccaccctgactcttatgagctcattaaccttaattacctcctgaagaccat

SEQ ID NO: 155280 - DNA, 201 bp, Homo sapiens
gttctgtaatatagtggtctgcttaaagaagggtttttttttaaaaaaaacctattatgcacaagtcagattcttagtgaatgattgctttgggaatactragtgattcatagatctgtcttagaaattaacttttaacatttcatatatgcagaacagattttattattactgccagtcatgatggacatgtcaagttct

SEQ ID NO: 155281 - DNA, 201 bp, Homo sapiens
taaaattagtacagctgtaactgttttgacatccagaaaggagtttcaaaatttgcagtgttctgtaatatagtggtctgcttaaagaagggttttttttwaaaaaaaacctattatgcacaagtcagattcttagtgaatgattgctttgggaatactgagtgattcatagatctgtcttagaaattaacttttaacatt

SEQ ID NO: 155282 - DNA, 201 bp, Homo sapiens
gagtgcagtgacgtgacttcagctcactgcagcctctgcctcctgggttccagcaattcgcctgcctcagtctcctgggtagctgggattataggtgcatrccaccatacccagctaatttttgtatttttagtagtgacagggtttcaccatgttggccaggctggtctcgaactcttgacctcaggtaatccacctgac

SEQ ID NO: 155283 - DNA, 201 bp, Homo sapiens
cctaataggaaagattcttctgtacaaaatctttttgatacttaagtaaccaaaataccttgtataggatataaaaaaaacttttgttgaattttgttgcrtatgaaagtagtatgtttagatttacttatcagctactgacaaatagtttattttcttgtgaaaagactgtctgtagggtaattttagcaataaggaatc

SEQ ID NO: 155284 - DNA, 201 bp, Homo sapiens
cagccacacacctctctccaactcctaactcatacttcaagtttcagtttggaagcccctctgttttttggagatggcatcttgctctgttgcccaggctrgagtgcagtgacgtgacttcagctcactgcagcctctgcctcctgggttccagcaattcgcctgcctcagtctcctgggtagctgggattataggtgcat

SEQ ID NO: 155285 - DNA, 201 bp, Homo sapiens
taatggcgatggggtttcaccacgttggccaggctggtctcgaactcctgacctcaagtgatctgcctgcctcggcctcccaaagtgctgggattacaggygtgagccaccgtgcctggcctcatttctgttttttaaacctgaaaattatagctgcctaccagtttaaattgataccttttgtggggtagagaaacactt

SEQ ID NO: 155286 - DNA, 201 bp, Homo sapiens
acaaatttaatttcatatataaatctaaataaaatatttatatttcatgtaaaataggataattctgaccaaatattagcaccttttctagtctcaagttmtcagtgtggtaaaacagtatatatatacatattagcattgctgtcactctcttctcaaatatttttgttttgtttttttaacccaagacaatggaaggta

SEQ ID NO: 155287 - DNA, 201 bp, Homo sapiens
atatatatgtatatacatatatatatacatatatatatacacacatatatgtgtatatatatatacatatatatgtgtatatatatatacatatatatgtrtatatatatacttttttttaaaaaaagagttttttatatattttggataacagtcctttatgagccgttctcctagtctgtgacttttcattctcttgat

SEQ ID NO: 155288 - DNA, 201 bp, Homo sapiens
tctttttttatctatcaagttaaggctttttcataaattttcttatttatcataaggataatcttgtgagttagtacatgctcttcattttagagatgacraaactgaagtttagagaggttagatagcatattaggctgctatttaaaaggcaagggctaaatcctagaagactttttatttcttgtacgggttttgaac

SEQ ID NO: 155289 - DNA, 201 bp, Homo sapiens
taagagttctttatatatatgtatatacatatatatatacatatatatatacacacatatatgtgtatatatatatacatatatatgtgtatatatatatwcatatatatgtgtatatatatacttttttttaaaaaaagagttttttatatattttggataacagtcctttatgagccgttctcctagtctgtgactttt

SEQ ID NO: 155290 - DNA, 201 bp, Homo sapiens
cttattgttgtgttttaagagttctttatatatatgtatatacatatatatatacatatatatatacacacatatatgtgtatatatatatacatatatatgtgtatatatatatacatatatatgtgtatatatatacttttttttaaaaaaagagttttttatatattttggataacagtcctttatgagccgttctcc

SEQ ID NO: 155291 - DNA, 201 bp, Homo sapiens
tcttattgttgtgttttaagagttctttatatatatgtatatacatatatatatacatatatatatacacacatatatgtgtatatatatatacatatatatgtgtatatatatatacatatatatgtgtatatatatacttttttttaaaaaaagagttttttatatattttggataacagtcctttatgagccgttctc

SEQ ID NO: 155292 - DNA, 201 bp, Homo sapiens
aattaccatcttttgagatgtataatttcttaaaacatactatgtgcaaagttacttttaaccacaaaacttcaaacaactgctgcctttaaaatcaagcmacatccaatactccagcagctacaagttgccgtgagagccagtccaacccttcatacagtcccataccacttcgagcatcacagccctgaatataccagc

SEQ ID NO: 155293 - DNA, 201 bp, Homo sapiens
aggtccttgggacattttttaattgggttgtgttcttattgttgtgttttaagagttctttatatatatgtatatacatatatatatacatatatatatayacacatatatgtgtatatatatatacatatatatgtgtatatatatatacatatatatgtgtatatatatacttttttttaaaaaaagagttttttatat

SEQ ID NO: 155294 - DNA, 201 bp, Homo sapiens
cctttaaaatcaagcaacatccaatactccagcagctacaagttgccgtgagagccagtccaacccttcatacagtcccataccacttcgagcatcacagscctgaatataccagctacggccacagcataatttatggagactgagtagttcagtgatttcttctactgacagtgctccagcaacatcctgaaagatata

SEQ ID NO: 155295 - DNA, 201 bp, Homo sapiens
gtgaaggtccttgggacattttttaattgggttgtgttcttattgttgtgttttaagagttctttatatatatgtatatacatatatatatacatatatatatacacacatatatgtgtatatatatatacatatatatgtgtatatatatatacatatatatgtgtatatatatacttttttttaaaaaaagagtttttt

SEQ ID NO: 155296 - DNA, 201 bp, Homo sapiens
atccagagtatttggggaaagggagagggagaagaggagggcaattatataaaacataacatacagatcctaaaattgatagtattaactggctttatttrggttattgagaaagacagaacatgtctataaatgagaagacgacctttgcatttatgtttcaatcaaggtggtggttgggcaatggaaatacatcatcca

SEQ ID NO: 155297 - DNA, 201 bp, Homo sapiens
  misc_feature (1)...(201): n = A,T,C or G
aatatcaacatctagaatcaacaggaatagtggcatgattagaaacactgaagcaatattttgtcagcagctaaagtaaagggtaagataatgaataaagngtcatgctgagattacatcagtaacctaggtaacctctttgtcgtggctagatagggtctagatctagaagatatgatttttcaatcatagaggagccac

SEQ ID NO: 155298 - DNA, 201 bp, Homo sapiens
caagatagggatggaggcactagctttacgttcccataattaagttacatcagatagaggttgcttaggagagagcatttctacttaaagaaacaggcctkgagaagtccagagttttaacaactgaaaggtttttctcaattcttcctagaccccaaggatctgagatttctacaacttcactgaaaatttgcattcttt

SEQ ID NO: 155299 - DNA, 201 bp, Homo sapiens
gggtgatgataaagcaatgaaggtgtttgatgtagtgaactttgacatgatcaacatgctgaaacttgggtgagtctttttaaaagtatatatattttaayttattgaagtaatttgtaaatcagactttaccatttaataggttatttctaaatagtatattaccatatctttaaataaaatgtgctgttgggttttgct

SEQ ID NO: 155300 - DNA, 201 bp, Homo sapiens
tgagtgttcctgtcactccacatctgtgccaccatttggtattgtcagtgttccagatttgggccattttaatagatgtgtaatggtatcttgttttagtktggatttccctggcaacatatgaggtggagtatcttttcatatgctatttaccatttgtatatctctttgatgaagtatatgtgaaggtccttgggacat

SEQ ID NO: 155301 - DNA, 201 bp, Homo sapiens
agtaactggtacctggcctctttggcactagtggagaaaatgtgggctaacataccctaggaatagcaaaggaccttcaaaacagatgagtaggttcgtgkagaaggataataatagtacaagttgagcaccccaaatataaaatgctccaaaatccaatagtttttgagtgctgacatgatactcaaaaaatgctctttg

SEQ ID NO: 155302 - DNA, 201 bp, Homo sapiens
tttcctatatcgtacaaataatgcattctctaagatagaacccctgagtttatatgtatgtctttggagataaatgccaagaggggagtgaaccaggtagygtctgagcttccctgaagaagagggtacattagttaagatatgagtaactggtacctggcctctttggcactagtggagaaaatgtgggctaacataccc

SEQ ID NO: 155303 - DNA, 201 bp, Homo sapiens
cctcagattactactctttcaggtggattttttccaggttttgccgttggaaaaaatttgagatacattcaactggatactccctaggatgttctcaggcrtaaaaatctaagaattttaccatgtttaaatgtttcaaacacagtgtcaataacttgaaagagaatcagtgctttaaatattaactgagacatcttacag

SEQ ID NO: 155304 - DNA, 201 bp, Homo sapiens
gctccagaagttcctaggctctctccagctttctgcccaacataactaaggtacagccctcatcttcatttctctgaatgattattaagattacagcagtyatatcccagttccaagctataggattgaggaaaggaagaagggtacactttttcaagacttcctgtgacaaaacatttccacttttactcattagcatat

SEQ ID NO: 155305 - DNA, 201 bp, Homo sapiens
tgtgaaggtccttgggacattttttaattgggttgtgttcttattgttgtgttttaagagttctttatatatatgtatatacatatatatatacatatatatatacacacatatatgtgtatatatatatacatatatatgtgtatatatatatacatatatatgtgtatatatatacttttttttaaaaaaagagttttt

SEQ ID NO: 155306 - DNA, 201 bp, Homo sapiens
ttcagaaagacatgattatatagcactatatctcttcaggacaggaactgtgttttactcttctttatgcccatgtgacctagaacgtattttgttcttartaagtatttgtccacaagtgaactatcacacagaaaaaggaatctggatcagataggattaagtttatctacatactacagaaaaacccaaaataacgat

SEQ ID NO: 155307 - DNA, 201 bp, Homo sapiens
tactccattgtctggatgtaccacagtttatccattcacgtactgaaagacatcttggttgcttccaagttttggcagttatgtataaaagctgctataawcatctgtgtacaggtgtttgtgtagtcatttcagctccttttggtaaataccaaggagcacaattgctggatcatatggtaacagaatgtttagttttgt

SEQ ID NO: 155308 - DNA, 201 bp, Homo sapiens
gtatatattttcagaaagacatgattatatagcactatatctcttcaggacaggaactgtgttttactcttctttatgcccatgtgacctagaacgtattktgttcttaataagtatttgtccacaagtgaactatcacacagaaaaaggaatctggatcagataggattaagtttatctacatactacagaaaaacccaa

SEQ ID NO: 155309 - DNA, 201 bp, Homo sapiens
tttggaatctatccaagcagatcaaggaatgacattaggcaagatagggatggaggcactagctttacgttcccataattaagttacatcagatagaggtkgcttaggagagagcatttctacttaaagaaacaggccttgagaagtccagagttttaacaactgaaaggtttttctcaattcttcctagaccccaaggat

SEQ ID NO: 155310 - DNA, 201 bp, Homo sapiens; identical to SEQ ID NO: 28979

SEQ ID NO: 155311 - DNA, 201 bp, Homo sapiens
cttttttaattaaacgagtaaggagaaatgtaaaaatccagaaatatcgaaatgctgatattagtgttaccggacaagtgtcttataaacttaatataacsgagacagatataaattagtaggtgtgaaaatctttcctcttaatcagttatttattgttttaagacagccaatagttggccgggtgtggtggctgatgcc

SEQ ID NO: 155312 - DNA, 201 bp, Homo sapiens
tttacaaatccatatatcagctaagtcataactttaaaaaattcatataaacaaatagtacaacagacatgccattcctttgaaaactggagaataggatrttaaggtgatagcatcctaacttggttgtttatttggaatctatccaagcagatcaaggaatgacattaggcaagatagggatggaggcactagctttac

SEQ ID NO: 155313 - DNA, 201 bp, Homo sapiens
ggtaatatgcatttaagtttcctccatgcctcaccacagcttgatagctcatttctttttagcactgaataatactccattgtctggatgtaccacagttkatccattcacgtactgaaagacatcttggttgcttccaagttttggcagttatgtataaaagctgctataatcatctgtgtacaggtgtttgtgtagtca

SEQ ID NO: 155314 - DNA, 201 bp, Homo sapiens
ctccacccattctaaaatcactcgagaatcggtcttgtacttttttttcctctggattcctacccagatatggtgtttctaccgggaataatttccctcarctcttccactgaactgacttttggtcaacctttagcacttagctatcatcttctctgggaagcctgtgacttctccagtctggactggatttctgaagca

SEQ ID NO: 155315 - DNA, 201 bp, Homo sapiens
cttgggtgagtctttttaaaagtatatatattttaacttattgaagtaatttgtaaatcagactttaccatttaataggttatttctaaatagtatattamcatatctttaaataaaatgtgctgttgggttttgcttggaaaattagatacagtgaagccttataatgtttggaagcatctgctatgatttgttatcaat

SEQ ID NO: 155316 - DNA, 201 bp, Homo sapiens
atacaatttttttttttttttttttttgagacggagtctcactctgtcccccaggccagagtgcagtggcgcaatttcggctcactgcagcgtctgcctcstaggttcaagcgattctcttgccccagcctcccgagtagctgggattacaggcacacatcaccatgcccggctaagtttttatgtttttagtggagacgg

SEQ ID NO: 155317 - DNA, 201 bp, Homo sapiens
gttatctcaattttttatattgttaatgttgagatgatattctggatattttgagtttaatcaaacattaaaatgaaattcacctgttttctttatacttkaatgttactagacactttaaaattacctatgtggcttgtgttatatttcattggaaagtgctactctgtgacttttaaaaggcagcagatgtattctgta

SEQ ID NO: 155318 - DNA, 201 bp, Homo sapiens
gctagtccaaactgagatatgctgaaagtgtaaaatacaagatttcaaagacttaattttttttaaaagaatgtaagttatctcaattttttatattgttaatgttgagatgatattctggatattttgagtttaatcaaacattaaaatgaaattcacctgttttctttatactttaatgttactagacactttaaaatt

SEQ ID NO: 155319 - DNA, 201 bp, Homo sapiens
acagaagtctggcttattttcatctgcaatggagagctatttttgaatgctactgtttgatgccctgattgtgtagaaaagaatgtaaagatcgttactatcttttggaaggttcataatatgttaatacagttattgagatgtgatgcctatcttgaaatttgtgtaatatcaaaagaaaagtaaaccaaatttccaaac

SEQ ID NO: 155320 - DNA, 201 bp, Homo sapiens
gacagaagtctggcttattttcatctgcaatggagagctatttttgaatgctactgtttgatgccctgattgtgtagaaaagaatgtaaagatcgttactatcttttggaaggttcataatatgttaatacagttattgagatgtgatgcctatcttgaaatttgtgtaatatcaaaagaaaagtaaaccaaatttccaaa

SEQ ID NO: 155321 - DNA, 201 bp, Homo sapiens
tcaccttgttagccaggatggtctcgatctcctgacctcatgatccacccgcctcggcctcccaaagtgctgggattacaggcgtgagccaccgcgcccgkccggcacaaatctcttaacacacatactctgagctgctcaatccactctatttgctcattgttgtcttcaacatttgcttaaatgattagcctgaggtga

SEQ ID NO: 155322 - DNA, 201 bp, Homo sapiens
ttcagactggagatccaacaggtactggtatgggaggagaaagcatatggggaggagaatttgaagatgaatttcattcaacattacgacatgacaggccrtacacactcagcatggctaacgcgggatcaaatactaatggatcccagtttttcataacggtagtaccaacggtaagtacagtatcattgtttataaact

SEQ ID NO: 155323 - DNA, 201 bp, Homo sapiens
tactctgtgacttttaaaaggcagcagatgtattctgtagagaaagcagtagttctattaaccaaccgggttttgttttaaattagaagaaccagttaccrttttgaaatacaatttttttttttttttttttttgagacggagtctcactctgtcccccaggccagagtgcagtggcgcaatttcggctcactgcagcgt

SEQ ID NO: 155324 - DNA, 201 bp, Homo sapiens
acgtaaccttgctcaaggacctcatagtctatagctgcattatccagtataaacagtcactagccacgtgtctactgagcatttgatagatggctagtccmaactgagatatgctgaaagtgtaaaatacaagatttcaaagacttaattttttttaaaagaatgtaagttatctcaattttttatattgttaatgttgag

SEQ ID NO: 155325 - DNA, 201 bp, Homo sapiens
ttaaagttgaataaatttagatgtcatttctatgattaaggttttggccaagagtatgtcgctgtagcataacaatgcttttgtaagaaaatgacctttcycaggaacttaacctatactactacatgcagacctataatactatatggagtaaactaacttaagatattgggccaggtacagtggctcaggcctgtaatc

SEQ ID NO: 155326 - DNA, 201 bp, Homo sapiens
gcagtggcacgcacttgtaatcccagctattcaggaggttaagacaggaagatcagtggaggccagcagtttgagactagcccgagcaacacggcaagacyctatctcttaaaaaaaatttttttttattagctgggcatggtggcacgcacctgtattcctggctatgctagaggctgaggtcaaaagatgtcttgagct

SEQ ID NO: 155327 - DNA, 201 bp, Homo sapiens
ccaagtttacttgtgtgttgatcaaagtatatatattcattataaagtttgaaaaaatagagaaacaaaataagtcattcactgtagctttatacagctarcattgttacgaattttctttgagtcttactagtacatattcttaagcaaaactaaaatggtatgcatatatatgaattttgtgtcccatttttcagatcc

SEQ ID NO: 155328 - DNA, 201 bp, Homo sapiens
aaaaggatatttcttgatatacactcaaaacacatacactaattttccatccactttattcaaaaaacttatattttttcttttccaagtttacttgtgtrttgatcaaagtatatatattcattataaagtttgaaaaaatagagaaacaaaataagtcattcactgtagctttatacagctaacattgttacgaatttt

SEQ ID NO: 155329 - DNA, 201 bp, Homo sapiens
  misc_feature (1)...(201): n = A,T,C or G
ctgttctgtgggtgatgataaagcaatgaaggtgtttgatgtagtgaactttgacatgatcaacatgctgaaacttgggtgagtctttttaaaagtatatntattttaacttattgaagtaatttgtaaatcagactttaccatttaataggttatttctaaatagtatattaccatatctttaaataaaatgtgctgttg

SEQ ID NO: 155330 - DNA, 201 bp, Homo sapiens
ttgtctttgttgttttgttatcttgtttttctgtgaaatgttttccttaagtatttaagacattttaaatgtggtctaagctcaaatcgtactttagcacyttcccttaaaaaacttcaatgatttgtcattattttctctctcttttttttttttttttgagacggagtctcgctctgtcgcccaggctggagcgcatgc

SEQ ID NO: 155331 - DNA, 201 bp, Homo sapiens
cagtggctcaatcgcggctcactgcaagctccgcttcccgggttcacgccattctcctgcctcagcctcccgagtagctgggactacaggcgcccgccacygcgcccggctaattttttgtatttttagtagagacggggtttcaccttgttagccaggatggtctcgatctcctgacctcatgatccacccgcctcggcc

SEQ ID NO: 155332 - DNA, 201 bp, Homo sapiens
atattcagaatctagtctctggacacaaatctcttttttttttttttttttttttttgagacggagtctcgctctgttgcccaggccggactgcggactgyagtggctcaatcgcggctcactgcaagctccgcttcccgggttcacgccattctcctgcctcagcctcccgagtagctgggactacaggcgcccgccacc

SEQ ID NO: 155333 - DNA, 201 bp, Homo sapiens
gctcttccaagatcccttaggcaaagaaatattcagaatctagtctctggacacaaatctcttttttttttttttttttttttttgagacggagtctcgcyctgttgcccaggccggactgcggactgcagtggctcaatcgcggctcactgcaagctccgcttcccgggttcacgccattctcctgcctcagcctcccga

SEQ ID NO: 155334 - DNA, 201 bp, Homo sapiens
cttatatagggacagatgaccacctacagaccttatgccttaaaaactgagtcttctctccggcagaaatgatcattagcccttccctgcaaaatgtgtartccagcatcctaggctattcctggcacatgaataagcagcgtaatatgtatcagtctccctgtctttgagactagagacaagaaaacctaacaactaggc

SEQ ID NO: 155335 - DNA, 201 bp, Homo sapiens
ttgttgtcttcaacatttgcttaaatgattagcctgaggtgacaagaagtcagtagtagaacttaagacagaagtggagattcagaatgagagtttgccaraaaagccaaccatcagttaaattacttacagtgctagtgactagtaaatgactggaatctcaaggaggtggtagtggaggagggtagtttctaaccagtc

SEQ ID NO: 155336 - DNA, 201 bp, Homo sapiens
gcttcccaagtagctgggactataggcgtgtgccaccacacttagctaatatatatatatatatatattatatatatatatatatatatatatataattttattagagatgggttttttttagtacagatggttttttttttttttttagtacagacgggtttcaccgtgttagccaggctggtcttgaactcctggcctc

SEQ ID NO: 155337 - DNA, 201 bp, Homo sapiens
taattgggttgtgttcttattgttgtgttttaagagttctttatatatatgtatatacatatatatatacatatatatatacacacatatatgtgtatatrtatatacatatatatgtgtatatatatatacatatatatgtgtatatatatacttttttttaaaaaaagagttttttatatattttggataacagtcctt

SEQ ID NO: 155338 - DNA, 201 bp, Homo sapiens
ctgtctcagcttcccaagtagctgggactataggcgtgtgccaccacacttagctaatatatatatatatatatattatatatatatatatatatatatatataattttattagagatgggttttttttagtacagatggttttttttttttttttagtacagacgggtttcaccgtgttagccaggctggtcttgaactc

SEQ ID NO: 155339 - DNA, 201 bp, Homo sapiens
acacaagcctgaaacagctcgtcatgtttaatttagcaactttttttaggcacgtttggtcatcgttcagttattttatttgggatacatataattctccyctcccctcgttccctccttccttcccttctttctcttccttcttctctccctccctcccttcgtctttctttccctcccttctttccttccttacttccc

SEQ ID NO: 155340 - DNA, 201 bp, Homo sapiens
ttgaacccaggaggcagaggttgcagtgagctgagattgtgccactgtacttcagcatgggcaacagagcaagactccgtctcaaaaaaaaaaaaaaaaaagccaatagtttattcagtttgaagaaaaaaattgaaactaaaaaacatacatagaatgttacaaaaatatttaaaattttgtctaaatggacaagtattt

SEQ ID NO: 155341 - DNA, 201 bp, Homo sapiens
agtagactaagccctatgtgatctgttttaactcatgattctatctccagcagtgagaacagtacctcacacaagagttactcaaatattttgaaagagtkactctagccatcacttgttagactgctaacaagaatttgttacagcatgtagtcgtggaataagagtttttaatccatgcagttaagcggtttctgtgat

SEQ ID NO: 155342 - DNA, 201 bp, Homo sapiens
aatggccaaagccctctgccacctcaacgtccctgtcactgtggtgctagatgctgctgtcgggtgagtgcccatcttccccagccataatcacctccccmaccccatgctggcttacagcaagttttcagattgaaagtttgagtcccgttcataaagccacaccaggtagcgtcctacttcttaattaatagctgccct

SEQ ID NO: 155343 - DNA, 201 bp, Homo sapiens
taaagcatgaaaagctttttttccccttagctacatcatggagaaagcagatcttgtcatagttggtgctgaaggagttgttgaaaacggaggaattattwacaaggtaagagcatcagttctccccagttccctgctcaagacttggaggtgtcttgctgacctaggacaccacagcagtgttgattatggttccttcta

SEQ ID NO: 155344 - DNA, 201 bp, Homo sapiens
aatttatatttatacaaaattggcttgaattggaattggggtttgtctggtttttgctttatttatgtgtatatgtatgttttatttatgcatatatatayacacacataatatatatacacaaatatttttaaaatattatttatatatttacatataaagtatgtatgtataaaatacgtgtatttatatataaatatt

SEQ ID NO: 155345 - DNA, 201 bp, Homo sapiens
caggaaagtcttctaatgactcttagaaatgtagaaagtgagagatgcatgtttgcctgcataaagtagtaatacagctccaagctcagcttctgccttcrtttcagacctttcaatctggagagagctcttacgttgtcatgaaaaggatccctttcataagtgaaacagactttgaatcgagagtgactatgttatatt

SEQ ID NO: 155346 - DNA, 201 bp, Homo sapiens
tagtgacagacattctcagcattaactggatcttccctgtcccctcagtttgctcttttcttcctaggattactccaaatgtaaaaagatcatgattgagmggggagaactttttctcaggagaatatcactgtcaagaaacaaaattgcagatctgtgccatactttcatcaaagatggagcggtgagtggataatcatc

SEQ ID NO: 155347 - DNA, 201 bp, Homo sapiens
tgtcagtgtatttcccaagaaaaaacaagagtagtgatctcttggaatgaaaacaagatagatgattaaggaaattaggaatgtgttcaaaagtaaggatwttgaggaattctactaattgctcattttaaagactaaattggccttcatcctaccagaaagattcttaaggttgggcacagtggctcatacctgaggcag

SEQ ID NO: 155348 - DNA, 201 bp, Homo sapiens
ggcaatatggcgaaaccccatctctagggcatggtggcatatgctgtggtcccagctacctgggaggctgaaatgggaggatcgcttgagcctaagaggtrgaggtttgggctgagatcatgccactgcactctagcctgggcaacagagtgagatctggtctcaaaaaaaaaaagaaagatttttaaaactgcataacac

SEQ ID NO: 155349 - DNA, 201 bp, Homo sapiens; identical to SEQ ID NO: 28981

SEQ ID NO: 155350 - DNA, 201 bp, Homo sapiens
agtctgggcaatatggcgaaaccccatctctagggcatggtggcatatgctgtggtcccagctacctgggaggctgaaatgggaggatcgcttgagcctargaggtagaggtttgggctgagatcatgccactgcactctagcctgggcaacagagtgagatctggtctcaaaaaaaaaaagaaagatttttaaaactgca

SEQ ID NO: 155351 - DNA, 201 bp, Homo sapiens
cagcttgtgtcgcaaagccaagtcacatgttcctgggattgtcagtgtatttcccaagaaaaaacaagagtagtgatctcttggaatgaaaacaagatagrtgattaaggaaattaggaatgtgttcaaaagtaaggatattgaggaattctactaattgctcattttaaagactaaattggccttcatcctaccagaaag

SEQ ID NO: 155352 - DNA, 201 bp, Homo sapiens
cagtctgggcaatatggcgaaaccccatctctagggcatggtggcatatgctgtggtcccagctacctgggaggctgaaatgggaggatcgcttgagcctragaggtagaggtttgggctgagatcatgccactgcactctagcctgggcaacagagtgagatctggtctcaaaaaaaaaaagaaagatttttaaaactgc

SEQ ID NO: 155353 - DNA, 201 bp, Homo sapiens
caacacttgggggtttataggcattttcctatgcgtggaagcatgtattaggaatatatgctgactttgaagaaagtaattgtaattttcacatgtggtgktatgtattgcttttttcatttagacattctattgtgtgtttctgcaagaactgataatatttgaaagtacttttaattgctaccaatacagtatcacgat

SEQ ID NO: 155354 - DNA, 201 bp, Homo sapiens
tagagttcaggagttggagaccagtctgggcaatatggcgaaaccccatctctagggcatggtggcatatgctgtggtcccagctacctgggaggctgaartgggaggatcgcttgagcctaagaggtagaggtttgggctgagatcatgccactgcactctagcctgggcaacagagtgagatctggtctcaaaaaaaaa

SEQ ID NO: 155355 - DNA, 201 bp, Homo sapiens
ctagagttcaggagttggagaccagtctgggcaatatggcgaaaccccatctctagggcatggtggcatatgctgtggtcccagctacctgggaggctgaratgggaggatcgcttgagcctaagaggtagaggtttgggctgagatcatgccactgcactctagcctgggcaacagagtgagatctggtctcaaaaaaaa

SEQ ID NO: 155356 - DNA, 201 bp, Homo sapiens; identical to SEQ ID NO: 28984

SEQ ID NO: 155357 - DNA, 201 bp, Homo sapiens
gcgcagcccaacgtccggcgccgccaagtgacgcacgaggtgctgtgactcgtgccagccccctaatctgcggaagtggagtgcggggagtgcgccggaasaggggtacggaagtgcgccggaagtggggtgcggaggtgtgcagcgcgctgtcagactggctcgcaggcggcgcggccggcggacccgttcgagacagcg

SEQ ID NO: 155358 - DNA, 201 bp, Homo sapiens
aggcaggtggatcgctagagttcaggagttggagaccagtctgggcaatatggcgaaaccccatctctagggcatggtggcatatgctgtggtcccagctrcctgggaggctgaaatgggaggatcgcttgagcctaagaggtagaggtttgggctgagatcatgccactgcactctagcctgggcaacagagtgagatct

SEQ ID NO: 155359 - DNA, 201 bp, Homo sapiens
acagtggctcatacctgaggcaggtggatcgctagagttcaggagttggagaccagtctgggcaatatggcgaaaccccatctctagggcatggtggcatrtgctgtggtcccagctacctgggaggctgaaatgggaggatcgcttgagcctaagaggtagaggtttgggctgagatcatgccactgcactctagcctgg

SEQ ID NO: 155360 - DNA, 201 bp, Homo sapiens
ctaaattggccttcatcctaccagaaagattcttaaggttgggcacagtggctcatacctgaggcaggtggatcgctagagttcaggagttggagaccagyctgggcaatatggcgaaaccccatctctagggcatggtggcatatgctgtggtcccagctacctgggaggctgaaatgggaggatcgcttgagcctaaga

SEQ ID NO: 155361 - DNA, 201 bp, Homo sapiens
aaaatccgggctctgccactcacttgctgtggagacttgaacaagtaacttaacctgtctgtgcagctttctcatctgttaaataaggatgacaatagtayctacctccttgggttgttgtgaggattaaatgaggcaagacatgtaaggggcaaggggtgtgagggcttggtattgtgcctggcacttagtaagtgctgc

SEQ ID NO: 155362 - DNA, 201 bp, Homo sapiens
gcagtgtggcaggagagctgctaccttcaatgaagcccacccacctttgcaatttgcggaactccatgaagatcttattgcgtttatatttcatctttccrtgaatgcacataatcttcacgcccttcaccagcacttccagagccttcccatagtattccacacaggcacaggtgctgcaagagggacagagggcttaga

SEQ ID NO: 155363 - DNA, 201 bp, Homo sapiens
ggaattctactaattgctcattttaaagactaaattggccttcatcctaccagaaagattcttaaggttgggcacagtggctcatacctgaggcaggtggrtcgctagagttcaggagttggagaccagtctgggcaatatggcgaaaccccatctctagggcatggtggcatatgctgtggtcccagctacctgggaggc

SEQ ID NO: 155364 - DNA, 201 bp, Homo sapiens
atagcagagctgctcagatttgcacatgcagaggagtcagctggggtcttattaaatgcagatcgggattcagtgggtttgggctagggtccacgaacctsccttcctaacgggttctcaggtgagacccagaaaggagctagagagctggttctgcccccttgtcttattctgtcttctgcactcttccatagaaaagag

SEQ ID NO: 155365 - DNA, 201 bp, Homo sapiens
aatgcacataatcttcacgcccttcaccagcacttccagagccttcccatagtattccacacaggcacaggtgctgcaagagggacagagggcttagagtsattggccactttggtccttctacaaccgggagaggggaacagtgagcaatagctgcagcagacgcaacctaactacaagccctccctaggggaatgacaa

SEQ ID NO: 155366 - DNA, 201 bp, Homo sapiens
ctgcctctcaagttcaagcgattctcctgcctcagccttctgagtagctgggattacaggcatgcaccaccacgcctggcaaaatttttttttttttttttgagacggagtctcgctctgtcacccgggctggagtgcagtggtgccatcttggctcactgcaggctccgcttcccaggttcatgccattctcctgcctca

SEQ ID NO: 155367 - DNA, 201 bp, Homo sapiens; identical to SEQ ID NO: 28982

SEQ ID NO: 155368 - DNA, 201 bp, Homo sapiens
tacaatctctctctccattatttaatttagaaaagcttcatgaaagctttttttagttaaaatatatgtaacataaggccgggcgtagtagctcacgcctrtaatcccagcactttgggaggctgaggcaggtagatcatctgaggtcaggagttcgagaccagcctggccaacatggtgaaaccccatatctactaaaaa

SEQ ID NO: 155369 - DNA, 201 bp, Homo sapiens
ctacgcccggctaattttttgtatttttagtagagacggggtttcaccgttttagccgggatggtctcgatctcctgacctcgtgatccgcccgcctcggmctcccaaagtgctgggattacaggcgtgagccaccgcgcccggccaccagtagctttttcaaaataaaaaagagctcttgcaaacagcaaagtggtattt

SEQ ID NO: 155370 - DNA, 201 bp, Homo sapiens
tcgctttgctgctggccccacccaacctgctgcagtgacttctgctacctacttggttcctgtaggcctgcgtgtgcaaaccatgtcttagaaataggaaraccaacccaagggaacctcatggagccttcagctatccaggcttttgtatcctttgggtaacactgtgtgggagttccatttctgcacctgctacaggat

SEQ ID NO: 155371 - DNA, 201 bp, Homo sapiens
tgttggggagagtgggagttgtgtctatagctttatggctgtaagtgttgagtttgttgttgttgttgtttttgtttgtttgttttttgtttttttgagayggagtcttgccctgttgcccaggctggagtgcaatggcatgatcttggttcactgcaatctccacctcccaggttcaagcgattctcctgcctcagcctc

SEQ ID NO: 155372 - DNA, 201 bp, Homo sapiens
agaatgttccagtaattttttcacttcctattgctactttccccaacacttggaatacaaagataaattggtgattggactcacacatttgtccctagaayttcagtctttcagtctctttaagtagcaccatagatgggtggagaggaagcccgaagctggtgggtaagtcccagctttgggcttaactgagctcagctc

SEQ ID NO: 155373 - DNA, 201 bp, Homo sapiens; identical to SEQ ID NO: 28997

SEQ ID NO: 155374 - DNA, 201 bp, Homo sapiens; identical to SEQ ID NO: 28986

SEQ ID NO: 155375 - DNA, 201 bp, Homo sapiens
ttttatttatgcatatatatatacacacataatatatatacacaaatatttttaaaatattatttatatatttacatataaagtatgtatgtataaaataygtgtatttatatataaatattatatatattttaaaatagagacacattcactctgttgcccaggctgtagtgtagtacagtgatcatagcttactgcagt

SEQ ID NO: 155376 - DNA, 201 bp, Homo sapiens; identical to SEQ ID NO: 28987

SEQ ID NO: 155377 - DNA, 201 bp, Homo sapiens
gttgctccaggagtttctgcctctgcttttctctgattttatctttaaatggaatcgtgtcggtattaacgtccacgggcacaaaatctggaaactgcttycctctcaattctggcatcttgggcatcctcagcagggcaaaacctcgagcaaggctggcaaaatcaagatctgattcaatcagaagatcagagttagcgc

SEQ ID NO: 155378 - DNA, 201 bp, Homo sapiens
gagcccaggaatttgaggttgcagtaagttatgatcacactactgcattccagcctgggcgatggtgagaccctgtctcagtaaaaaaaaaaaaaaaaaaagtgtaatttatatttatacaaaattggcttgaattggaattggggtttgtctggtttttgctttatttatgtgtatatgtatgttttatttatgcatata

SEQ ID NO: 155379 - DNA, 201 bp, Homo sapiens
tgtgtgcttgtttactatccgcttcctctattacaatcaaaactccatcacagcagaaccctacctgtcttgttcactgatgtatccctagcatctagaayagtgcctggtatatagtatgtacctagtaaatattcactgaatgaatgaatgaattgaagatacaggtcggggctgtggccctaatgtgaacatcacatt

SEQ ID NO: 155380 - DNA, 201 bp, Homo sapiens; identical to SEQ ID NO: 28988

SEQ ID NO: 155381 - DNA, 201 bp, Homo sapiens; identical to SEQ ID NO: 28989

SEQ ID NO: 155382 - DNA, 201 bp, Homo sapiens; identical to SEQ ID NO: 28990

SEQ ID NO: 155383 - DNA, 201 bp, Homo sapiens
tggaccctttcaaaaaatgagctttcctctcactgtgcgtttgtgtgctgtcacagtgggctctaagggctgactgctctgcttggaggccccgctctgcygtttcctcaggatggagctttgagcagatgactaacttctctctgcctcagtttcctcatctgtaaaatgggactaaaaacaggagctggttcatagtat

SEQ ID NO: 155384 - DNA, 201 bp, Homo sapiens
cggatcacctgaggtcaggagtttgagaccagtttggccaacatggcgaaaccctttctctactaaaaatacaaaaatcagccaggcatgctggtccagcyactcaggaggctgaggcaggagaatcgcttgaacccaggaggtggaggttgcagtgaaccaagattgcgccactgcactccagcctggttgacagagcga

SEQ ID NO: 155385 - DNA, 201 bp, Homo sapiens
cttcctcgtatatgtgaacttttaaaaacccttgatctcgaaagaaatggtatggagtgttagagctgaaaggaagcgtgaggttattatggtgcttattggggtagttgtttggaatgggaaaagtgttaatagaaagaaaatggggaagtactcacgcctgtaattccagcactttgggaggccgaggcgggcagatca

SEQ ID NO: 155386 - DNA, 201 bp, Homo sapiens
aggccgaggcaggcggatcacctgaggtcaggagtttgagaccagtttggccaacatggcgaaaccctttctctactaaaaatacaaaaatcagccaggcrtgctggtccagctactcaggaggctgaggcaggagaatcgcttgaacccaggaggtggaggttgcagtgaaccaagattgcgccactgcactccagcctg

SEQ ID NO: 155387 - DNA, 201 bp, Homo sapiens
gaagtaagtgtcccatagctggtgatgctctgggtggaaagcatgtttcctagaccttcctcctcccaggtcagcctcctcactctgctttttgttacagygacagcgtcgttagacacaacagcattttgcagctggatccaagcattcctggagtgttccgaggcccttatccccttggcattgatcctgtgagtgcac

SEQ ID NO: 155388 - DNA, 201 bp, Homo sapiens
ctgcacccgtgtctcccaaacggctgctttcattccgttttgccagaagatgtgccggggaggtgaacgtgtttagttctagtgctgacagatgtgagacygtgttcaactcttgtcttccagctaccactgccacgtgtacccctatccaaacacagccgaggagcggagggagatccaggaggggctgaacacccgcat

SEQ ID NO: 155389 - DNA, 201 bp, Homo sapiens
tacctcatttctgagtcttttaaaatctgattcctggtgctttttcctgtcctgtattttttttttaattcttttaactccttttgaaacagtaagttacratggttttatttgttttgtggacattctttctggcatcttctcactgtctgtggggatggtattctactccttggcttttttcttcttatgaccttatgt

SEQ ID NO: 155390 - DNA, 201 bp, Homo sapiens
ttggtggtggttttgttaatttcataaacgttctcctgaattatagtttttggtatttgctctactgtcttgctttggttttcttcttttaggacctcctrtcatctttcagtggaaccttctttgcttatcttcagtatctgtcactttcctttgaatcctttttgtctttcgttacttctttttgatttgtaagatttc

SEQ ID NO: 155391 - DNA, 201 bp, Homo sapiens
gtctggaactcctgacctcaagtgatccacctgcctttacctcccaaaatgctgggattacaggcgtgagccatcgcgcctggcccagaatgtgtctcttmacgtggtctttctgtatgttctttcaatatatagtctttggtggtggttttgttaatttcataaacgttctcctgaattatagtttttggtatttgctct

SEQ ID NO: 155392 - DNA, 201 bp, Homo sapiens
ggtcatttttacacaactttattgaggtgtatggtagagtttacccatgatttttagaaagtttatggaggccgggtgcagtggctcacacctgtaatccyggcactttgggaggctgaggcagccacatcacttgagcccaccagtttgagaccagcctgaacaacatggcgaaaccccatctctacccaaaatacaaaa

SEQ ID NO: 155393 - DNA, 201 bp, Homo sapiens
tgtatggtagagtttacccatgatttttagaaagtttatggaggccgggtgcagtggctcacacctgtaatcccggcactttgggaggctgaggcagccasatcacttgagcccaccagtttgagaccagcctgaacaacatggcgaaaccccatctctacccaaaatacaaaaattagccgggtgtggtggcacgtgcct

SEQ ID NO: 155394 - DNA, 201 bp, Homo sapiens
cgggtgtggtggcacgtgcctttaatcccagctactcaggaggctgaggcaggaggatcgcttgaacctgggaggcagaggttgcagtgagctgagattgygccactggacttcagcctaggcgacagtgagatcctgtctcaaaaaaaaaaaaaaagagtttatagagtcatgcatccattgccacaattgttttagaac

SEQ ID NO: 155395 - DNA, 201 bp, Homo sapiens; identical to SEQ ID NO: 29013

SEQ ID NO: 155396 - DNA, 201 bp, Homo sapiens
ctgtgccaggaatgtgaatttaagcctcaaacctgagtgaattttaacctgtggttataaattcttagggaagacttctccctccatctagaaccaaaatrgaaataaacaagtttacatgcaggctccaggctcctttgcaaggtagattttttttctggtccatcccttcactgagggtgtagctctttgtgcatggag

SEQ ID NO: 155397 - DNA, 201 bp, Homo sapiens
gacatgagaaataaagtgtcacttttaatgagacacacttggtttcatatgtttatttctagtttgaacccacttatgaagaattcccttccttagagagygattctttgttggattacagctgtatgcagaggctgggagcaaaactggggtaggtgacaaggcctggggtgtcaggcttcatactgcccttcttgtaaa

SEQ ID NO: 155398 - DNA, 201 bp, Homo sapiens
ttcacttgatatgatagtgacctttgataaagttactctatcttggatgaaggcaatgaactaaattataactgtcttttatgtaaatgtcttcaattggyttacaaataaaggatggggaagttatcttttcatttatgaggattgagttataaatctaagttacctcagaagtctttgcacccagatctaagtagttag

SEQ ID NO: 155399 - DNA, 201 bp, Homo sapiens
ccatcttggccaggctggtctcgaactcctgacctcgtgatccacccaccttggcttcccaaagtgctgggattacaggcgtgagccaccacgcctggccrattgtcatgaatttttatcctcaattaattgtgtaaatgtgagtgcatagtaactcatatgctagagactaggaaaataagttagaaaagattatctaaa

SEQ ID NO: 155400 - DNA, 201 bp, Homo sapiens
ctgaggcaggagaattgcttgaacccagcaggcagaggttgcagtgagccgagatcatgccattttactccagcctgggggacgagcgaaactctgtgtcaaaaaaaaaaaatgtattttgattctgaactattatcactgacaagtaaaagtaagtttaagtttgcagaatactaacgtatgtttcatactcctaattca

SEQ ID NO: 155401 - DNA, 201 bp, Homo sapiens
tttttaaggatgtttagtatgtaactaattattaaagattctcatgaatttttttttttttttgagacagagtcttgctctgtcgcccaggctagagtgcrtgtagtggtgcgatctcggctcactgcagcctgtgcctcccgggttcaagcaattctcctgcctcagcctcccaagtagctgggattataggcacgtgcc

SEQ ID NO: 155402 - DNA, 201 bp, Homo sapiens
tcatattctctgaattctcatgttgatcacagtggctgtctgctgctttttataattaggagtgagtttttctggaaataaaattctgggctcattttttycccccttgagtatcttacacatgttcctccatcttgttctggcaccttgctcccaacagaaagcctgatgttaatctaattttcttttccttgtaattca

SEQ ID NO: 155403 - DNA, 201 bp, Homo sapiens
ggggaatctcagcctccagcctgcagatcccagttcttgggttcacttggctgcctgaagctctctagtcacttggctgcctgaagctcattccctagagragcctcagagaggcttgcaagaatcatattctctgaattctcatgttgatcacagtggctgtctgctgctttttataattaggagtgagtttttctggaa

SEQ ID NO: 155404 - DNA, 201 bp, Homo sapiens
gtccacctccggctgcatagctgttctttgctccgctcgtgggcaccgactcttcgtttcccgtcaagggtactgagctctcagcccacctcttactgctyatagtccctgtctcttcgctttcctcatctgtcctgtcctgtgttatttttctccataagtaggtgactgagacgttctccagtgttgatgaaagctggc

SEQ ID NO: 155405 - DNA, 201 bp, Homo sapiens
atgttcctgtgaggtttttcttctacattaaactcagattttggtcatggaaagaacaggtttacatatttcaagtgacagttaagggaacacctttttcrtgagttttttggttatgtaaccttgtctcattacataattctgtgatgatacaaatgtaaaatataatgtccattatgacataaacatgaaatacccagt

SEQ ID NO: 155406 - DNA, 201 bp, Homo sapiens
ggaggccgaggcgggtggatcacgaggtcaggagtttgagaccagcctgaccaacatggtgaaaccccatttctactaaaaatacaaaattagctgggcgkggtggcacatgcctgtaatcccagctacttgggaggctgaggcaggagaattgcttgaggcggaggttgtggtgagccaagatggcgccattgcactgca

SEQ ID NO: 155407 - DNA, 201 bp, Homo sapiens
atagatgttgtcagctattgtatttctctcattgtgagtgaaggggaataccttttttttgtttaagagccttttggctgggcacggtggctcacgcctgkaaccccagcactttgggaggccgaggcgggtggatcacgaggtcaggagtttgagaccagcctgaccaacatggtgaaaccccatttctactaaaaatac

SEQ ID NO: 155408 - DNA, 201 bp, Homo sapiens
tgattttgatagatgttgtcagctattgtatttctctcattgtgagtgaaggggaataccttttttttgtttaagagccttttggctgggcacggtggctsacgcctggaaccccagcactttgggaggccgaggcgggtggatcacgaggtcaggagtttgagaccagcctgaccaacatggtgaaaccccatttctact

SEQ ID NO: 155409 - DNA, 201 bp, Homo sapiens
acggggtttcaccatgttggccaggttggtctcgatctcctgacctcgtgatccacccgcctcggcctcccagagtgctgggattacaggtgtgagctacygcccccggtctggattgtaattcttgatcacaaaagacaagccagctccagttaacatggtgagggcattattttaccagtaggatttaaattcattttt

SEQ ID NO: 155410 - DNA, 201 bp, Homo sapiens
ctgtgttacatgtgtgtctattattttatgggataatagttcagggccgtcagggggaaactcagtccaggtagctcacagagggacccactgtacataakcgagcatgacctgtgcaggctgcactcctttgcagagttgtctgatgtcctgtgggccatgctgatgcgcgtgggcctccgcgttgacaccacctatggc

SEQ ID NO: 155411 - DNA, 201 bp, Homo sapiens
gatgactgtgtacagtgcttgtaaggcaaagcagaagtaatgaatatagtatattaagtgatttgtttgaatacaagttttcattgactcaatgatttgcyttacggatttttgcttctgttattttaatacttaagtatttttaaggatgtttagtatgtaactaattattaaagattctcatgaatttttttttttttt

SEQ ID NO: 155412 - DNA, 201 bp, Homo sapiens
tctcgggtgggcagcaagcagcgttctgtcaccctgagttccctggctggtgtgctggggatacatgtgtccccggtgagaacactcacctgtgctgcttrttagcatcctcggtgaattcgttcctcaccctgtgaagtaggctggagctcttgataactcttctaaaacaattatcgttgtgtaactgaagccattcag

SEQ ID NO: 155413 - DNA, 201 bp, Homo sapiens
atcagaacagttcatgatcctgtactgtttcagaaagctcatcccagggtcacccatgccttagctgcctcttcttgtgcaaggaattgaggcttcggtgktgtgccttcacagtcctcccacatttaccctggcccttcccctctaaattttggaagctggtatgcagtccatgggttgtctcgggtgggcagcaagcag

SEQ ID NO: 155414 - DNA, 201 bp, Homo sapiens
atctctctaggcagagagattaaagaccgctattatgattaaccctcagtaatagattatctgtgttaaattttaacagtaattcagttttcttttacagygtaaggcatatgcttcctttccaggtggtggtgaacagaggcaacaagaatcaggccatcaagcctgattgatggatcagaacagttcatgatcctgtac

SEQ ID NO: 155415 - DNA, 201 bp, Homo sapiens
gtgatctctctaggcagagagattaaagaccgctattatgattaaccctcagtaatagattatctgtgttaaattttaacagtaattcagttttcttttayagcgtaaggcatatgcttcctttccaggtggtggtgaacagaggcaacaagaatcaggccatcaagcctgattgatggatcagaacagttcatgatcctg

SEQ ID NO: 155416 - DNA, 201 bp, Homo sapiens
atcagttttcttcatgaggattggctttgtgtccagagtagtgtccggccacgactggcaccattttcccaggtttcatgaacttgcccatttctagggcygccctgacacttgccccccaggctgccgagggcagcaattgcaagacccagccaggcttctgaatctagtttttaacttcagtggtgaaacagtgcaggt

SEQ ID NO: 155417 - DNA, 201 bp, Homo sapiens
tttcaaaagaatgcagggctgggcacgatggctcacgcctataattccagcactttgggaggccaaggtgggaggatcacttgagtccaggagtttgagascagtctgggcaacatactgagaccctgtctccacaaaaaataaaattagccaggcatggtgacatgtgcctgtagtcttagctactcaggaggctgaggt

SEQ ID NO: 155418 - DNA, 201 bp, Homo sapiens
cattaggtatatccaggacttcctgtagcttaaactgtttcaaaagaatgcagggctgggcacgatggctcacgcctataattccagcactttgggaggcyaaggtgggaggatcacttgagtccaggagtttgagagcagtctgggcaacatactgagaccctgtctccacaaaaaataaaattagccaggcatggtgac

SEQ ID NO: 155419 - DNA, 201 bp, Homo sapiens
aaggcagggcaaatgtgataacacattaggtatatccaggacttcctgtagcttaaactgtttcaaaagaatgcagggctgggcacgatggctcacgcctrtaattccagcactttgggaggccaaggtgggaggatcacttgagtccaggagtttgagagcagtctgggcaacatactgagaccctgtctccacaaaaaa

SEQ ID NO: 155420 - DNA, 201 bp, Homo sapiens
tcagaataaggtttttaaaggcagggcaaatgtgataacacattaggtatatccaggacttcctgtagcttaaactgtttcaaaagaatgcagggctgggyacgatggctcacgcctataattccagcactttgggaggccaaggtgggaggatcacttgagtccaggagtttgagagcagtctgggcaacatactgagac

SEQ ID NO: 155421 - DNA, 201 bp, Homo sapiens
ggacaagtgaccaagcctcagtttcttcatctgtaaaaggggagagtgattgctttcttataggtcttttaggactaaatgaaatgatcaggtaaaagacrtcagttcggcataagccatcagtaattttgagttgtggtacaacaataatctgtgacttaactcctgtcagcaaatgggaacataagcaaaagccaaaca

SEQ ID NO: 155422 - DNA, 201 bp, Homo sapiens
ggtgtggcgtgtggtgaggaggaggcgctcaggggcctgtctggatgcagagcctccctgtgtcgctgtctcactggactcacttggacaagtgaccaagmctcagtttcttcatctgtaaaaggggagagtgattgctttcttataggtcttttaggactaaatgaaatgatcaggtaaaagacgtcagttcggcataag

SEQ ID NO: 155423 - DNA, 201 bp, Homo sapiens
tgtgcatctcttctgtcctgggtaccctggggcaggggtgtggcgtgtggtgaggaggaggcgctcaggggcctgtctggatgcagagcctccctgtgtcrctgtctcactggactcacttggacaagtgaccaagcctcagtttcttcatctgtaaaaggggagagtgattgctttcttataggtcttttaggactaaat

SEQ ID NO: 155424 - DNA, 201 bp, Homo sapiens
tttggctgctctgcacatgactggaagcgctccgtggattggtttggggctgttactacaagtaggtgaattcgtaattacagaatcctcaaataaggagkattgactgtattgaatgagtgaatgaatgaacgctttgacagtgtttgagctgccgaagttctagaagtttatacacgcagaaataacacttatccttat

SEQ ID NO: 155425 - DNA, 201 bp, Homo sapiens
tgtccctaacacacgccacatctctgtcagggacatcacagctgtcttgtgctcaggacaccagactgcacctcagccctacactcggggctgtttatacmgtgaaatcaccaaaaaaagcacagaagtgtgaaaaacatgataccaaacagactctgaaaaggacacttggtgatagtctgagagcagagatgggaaggg

SEQ ID NO: 155426 - DNA, 201 bp, Homo sapiens
ttgagtcatttacattgagctcccagccagcagctctgtgactcgagcccgaacgaagtgtccctaacacacgccacatctctgtcagggacatcacagcygtcttgtgctcaggacaccagactgcacctcagccctacactcggggctgtttataccgtgaaatcaccaaaaaaagcacagaagtgtgaaaaacatgat

SEQ ID NO: 155427 - DNA, 201 bp, Homo sapiens
ctaggggaagtacgggagttgagtcatttacattgagctcccagccagcagctctgtgactcgagcccgaacgaagtgtccctaacacacgccacatctcygtcagggacatcacagctgtcttgtgctcaggacaccagactgcacctcagccctacactcggggctgtttataccgtgaaatcaccaaaaaaagcacag

SEQ ID NO: 155428 - DNA, 201 bp, Homo sapiens
atcccaactactcgggaggcggaggcatgagaattgcttgaacccaggaggtggaggttgcggtgggccgagattgtgccattgcattccggcctgggcamcaagagagagactctgtctcaaaaaaaaaaaaaaaaaagtcactgaaatctctgaattaccaactgtggaaaaactcactgctcctaggggaagtacggg

SEQ ID NO: 155429 - DNA, 201 bp, Homo sapiens
caggtgcagcaggctcctacatttgtaacaggtagatgttttccttccggttagtactcaagccaagacacttatcacacttcagtcttacaggtttgagyaaacgtactaatcactatgaaggttccagtttcaataagcgccactacctccagtcatagagtgtacctgggatccttttcaactgaatgtcagtgaaag

SEQ ID NO: 155430 - DNA, 201 bp, Homo sapiens
ctgcaggtgcagcaggctcctacatttgtaacaggtagatgttttccttccggttagtactcaagccaagacacttatcacacttcagtcttacaggtttsagcaaacgtactaatcactatgaaggttccagtttcaataagcgccactacctccagtcatagagtgtacctgggatccttttcaactgaatgtcagtga

SEQ ID NO: 155431 - DNA, 201 bp, Homo sapiens
caggcgaacattttatttcctggccaccactttcatctcctgactgtttcccttaatcttcctaaggtgtccttaatttcaaaagggatcagccctacccsagatctgatatccattgatatcagatatctaataccagatcagccccataaggcagttgcaaagtcatggagagactcctgagtgacaggcgagggtgca

SEQ ID NO: 155432 - DNA, 201 bp, Homo sapiens
acaccatcaggagttaggtctttttttttttctttttttttttttttttgagacagcgtctggctctgtcgcccaggctggagtgcagtggcgcgatctcrgctcactgcaagctccgcctcccgggttcacgccattctcctgcctcagcctctcaagtagctgggactacaggaggccgccaccgctcccggctaattt

SEQ ID NO: 155433 - DNA, 201 bp, Homo sapiens
ttttttttctttttttttttttttttgagacagcgtctggctctgtcgcccaggctggagtgcagtggcgcgatctcagctcactgcaagctccgcctccygggttcacgccattctcctgcctcagcctctcaagtagctgggactacaggaggccgccaccgctcccggctaattttttgtattttttagtagagacgg

SEQ ID NO: 155434 - DNA, 201 bp, Homo sapiens
ctcaatgatttgccttacggatttttgcttctgttattttaatacttaagtatttttaaggatgtttagtatgtaactaattattaaagattctcatgaatttttttttttttttgagacagagtcttgctctgtcgcccaggctagagtgcatgtagtggtgcgatctcggctcactgcagcctgtgcctcccgggttca

SEQ ID NO: 155435 - DNA, 201 bp, Homo sapiens
gaggatcatttgagcccagaagtttgaggctgcagtgagctatgattgcgccactgcactccagcctgggcgacagagtgagaccctgtaccctgtatctaaaaaaaaaaaaaaagaaaaaaaattataagaataaagaatagtccatgtagtagcaccttatggagctaagtatagaagagacaagtgcatctgttccaa

SEQ ID NO: 155436 - DNA, 201 bp, Homo sapiens
aacatttaatttgtcatctctcttaccaatgcattacttaaaataatttaaaagtagagactgtgttaataatattcccagaattgacttttttccttggrgatcagggcttcagattggttgaaaaaggaataaagtttttatatgttgtgacttcatgttgctttgagctaccagtcgggcttacctgtcatcactgag

SEQ ID NO: 155437 - DNA, 201 bp, Homo sapiens
gctggaattgggaatgagcttccaggaatcattgagggcaggagtggaatttggatcccagagggagtttgctaaatttatctcactcagcaggtgcttgytgagcatctgtatgcacagcccgaccaagggcagatgactgcatctgcacccgtgtctcccaaacggctgctttcattccgttttgccagaagatgtgcc

SEQ ID NO: 155438 - DNA, 201 bp, Homo sapiens
ctagtagctgggactataggtgcgtgccaccacacctggctaatttttgtacttttagtagagatggggttttaccatgttggccaggctggtcttgaackccttgttagggacaaaccgccccaaaaaagcttcttggtactgccaacacttcccccaaagctctccgtgctgcctacccctccccctgagcccctttaa

SEQ ID NO: 155439 - DNA, 201 bp, Homo sapiens
gataatattggtcgtagacaaatcaagatgttctagtgagattggaatgttgcttccctccctcctccccatggaagttttattttagcaacttgttaggmacctgagtagtaatgacaaggctttaaaaaaagattctgtggtcacctttgatatgttggatggtaattcatttttctttttcagacaggctctcgctct

SEQ ID NO: 155440 - DNA, 201 bp, Homo sapiens
ccaccaggcctggctaattttttattttttggagagatggtgtcttaccatgttgcccaggctggcctcaaactactggcctcaggtagtcctcccacctyagcctcccaaattgctgggattatcaacacgagctgctgtgcctggctataatttctttaactacgctactgtaatttcttgaactagttttctattgtt

SEQ ID NO: 155441 - DNA, 201 bp, Homo sapiens
ttcatttttctttttcagacaggctctcgctctgtcgcccaggcttggagtgcagtggcataatctcagctcactgcaacctctgcctcctgggttcaagygattctcctgcctcagcctcccaagtagccggaattacagtcacgcaccaccatgcccggccaatttttgtatttttagtagagacagagtttcgccatg

SEQ ID NO: 155442 - DNA, 201 bp, Homo sapiens
ggctctcgctctgtcgcccaggcttggagtgcagtggcataatctcagctcactgcaacctctgcctcctgggttcaagcgattctcctgcctcagcctcscaagtagccggaattacagtcacgcaccaccatgcccggccaatttttgtatttttagtagagacagagtttcgccatgttgcccaggctggtctaaaat

SEQ ID NO: 155443 - DNA, 201 bp, Homo sapiens
aggctggagtgcagtggtgcgatcatctcagctcactgcaatctctgcttcccaggttcaagcaattctcctgcctcagcctcccaagtagctgggattayaggcatgcgccaccacaccctgctaatttttttgtatttttagtagagacggggtttcaccatgttggccaggttggtctcgatctcctgacctcgtgat

SEQ ID NO: 155444 - DNA, 201 bp, Homo sapiens
agctactctggaggccggggtgggaggatcgcttgagcctgggaggttgaggctgcattgcactccagcctgagcaacagagccagaccttgtctcaaaaacaaacaaacaaacaaacaaacaaacaaacagtgattttacagaatgtctctctctctctctttttttttttttttggagatagagtctggctctttcgcc

SEQ ID NO: 155445 - DNA, 201 bp, Homo sapiens
gaggcatgagaattgcttgaacccaggaggtggaggttgcggtgggccgagattgtgccattgcattccggcctgggcaacaagagagagactctgtctcaaaaaaaaaaaaaaaaaagtcactgaaatctctgaattaccaactgtggaaaaactcactgctcctaggggaagtacgggagttgagtcatttacattgag

SEQ ID NO: 155446 - DNA, 201 bp, Homo sapiens
caaagtgcgtacgaacgtgcttgcacaatccagctactcagtaaatgtcagcatttgccatagttcttacccaccttacattgagggtctttctgctgtgrgcgccacggcatctcctgcccacggatgctggtccagacatggctcaccacgttgtaaagtgtctgtgaggacatctggggaaaccctcccagtcggtag

SEQ ID NO: 155447 - DNA, 201 bp, Homo sapiens
atagttcagggccgtcagggggaaactcagtccaggtagctcacagagggacccactgtacataagcgagcatgacctgtgcaggctgcactcctttgcaragttgtctgatgtcctgtgggccatgctgatgcgcgtgggcctccgcgttgacaccacctatggcgtcttgctactgctcccggttatcgcgctctttgc

SEQ ID NO: 155448 - DNA, 201 bp, Homo sapiens
tacatgcaggctccaggctcctttgcaaggtagattttttttctggtccatcccttcactgagggtgtagctctttgtgcatggagcagtcccagctggaraggtgagtcagttgtatctgctcaccttatctagacccagtgcctggctcctgcatcccatgctggccttaaactcaagttcttaagatacggggttcag

SEQ ID NO: 155449 - DNA, 201 bp, Homo sapiens
tcaacacaatggaaatttcttttggtataatgagctagaaagaaacaacatttacgtgattcagtgttacttctataagcctaaaacaattggtcattcargcatcaaatcctgtctagtagaaacttggtggctaaaccgagttggttagtttttttattaatcatattttaaagatctcctgctgctgtttattcttgc

SEQ ID NO: 155450 - DNA, 201 bp, Homo sapiens
ggtgtcaggcttcatactgcccttcttgtaaaaggcagatgagctccatagaagggatgaatggagaccattttaaagcctagggttgaatgaaacatagkgaatatttgtttaagaaacactgtattcctgtacttgttgagctgaattactcagctgtattgacttttttactcaacacaatggaaatttcttttggta

SEQ ID NO: 155451 - DNA, 201 bp, Homo sapiens
gtggctcatgcctgtaatctcagcattttcggaggccggggcaggtggatcacctgaggtcaggagatcgagaccagcctgaccaacaaggagaaaccctygtctctactaaaaatacaaaattagctgagtgtggtggtgcatgcctgtaatcccaactactcgggaggcggaggcatgagaattgcttgaacccaggag

SEQ ID NO: 155452 - DNA, 201 bp, Homo sapiens
ggtggctcatgcctgtaatctcagcattttcggaggccggggcaggtggatcacctgaggtcaggagatcgagaccagcctgaccaacaaggagaaacccytgtctctactaaaaatacaaaattagctgagtgtggtggtgcatgcctgtaatcccaactactcgggaggcggaggcatgagaattgcttgaacccagga

SEQ ID NO: 155453 - DNA, 201 bp, Homo sapiens
acagggtgattcttattatttacagtagttatgcttcataaagtcactgagggctgagcacggtggctcatgcctgtaatctcagcattttcggaggccgrggcaggtggatcacctgaggtcaggagatcgagaccagcctgaccaacaaggagaaacccttgtctctactaaaaatacaaaattagctgagtgtggtgg

SEQ ID NO: 155454 - DNA, 201 bp, Homo sapiens
ttaaatccctcagcagatctggtggccatgtctgctaaatagagagtcccgccgcctctcctcgctcttcctccctcctggtccaggtctcgtcccacacytgcctcgcctggctgggcccctgctcctgcctctgccttagcctggtctcttctcctggcatccagaatgatccacaggaaaccacagtcagatcatttc

SEQ ID NO: 155455 - DNA, 201 bp, Homo sapiens
gctactctggaggccggggtgggaggatcgcttgagcctgggaggttgaggctgcattgcactccagcctgagcaacagagccagaccttgtctcaaaaacaaacaaacaaacaaacaaacaaacaaacagtgattttacagaatgtctctctctctctctttttttttttttttggagatagagtctggctctttcgccc

SEQ ID NO: 155456 - DNA, 201 bp, Homo sapiens
tccctgggcccagggctcaatttttggacagcttctctcttctttctgcctttagagatctcacataattttatgattttaagtaccatgccccaaatgtrtatatccctagcttggacctgtccccagaatactagacttttatgtctgtctactccatatctccttttaagtatctggaagaccgtttctgcttttgcc

SEQ ID NO: 155457 - DNA, 201 bp, Homo sapiens
ctactctggaggccggggtgggaggatcgcttgagcctgggaggttgaggctgcattgcactccagcctgagcaacagagccagaccttgtctcaaaaacaaacaaacaaacaaacaaacaaacaaacagtgattttacagaatgtctctctctctctctttttttttttttttggagatagagtctggctctttcgccca

SEQ ID NO: 155458 - DNA, 201 bp, Homo sapiens
gagttaggtcttgaactcctgacctcaggtgatccacccacctcggcctctcaaagtgctgtgattacaggcaggagccaccgcgcccagcctgtgatttrtttttggttttctgaaataaaaatctaatccgtttgaaatctaatcagttaagcccttcattaaccactcacttgtaatattttctacttttttgtggct

SEQ ID NO: 155459 - DNA, 201 bp, Homo sapiens
tactctggaggccggggtgggaggatcgcttgagcctgggaggttgaggctgcattgcactccagcctgagcaacagagccagaccttgtctcaaaaacaaacaaacaaacaaacaaacaaacaaacagtgattttacagaatgtctctctctctctctttttttttttttttggagatagagtctggctctttcgcccac

SEQ ID NO: 155460 - DNA, 201 bp, Homo sapiens
gggtttcactgtgttagccaggatggtctcgatctcctgacctcatgatccacccgcctcggcctcccaaagtgctgggattacaggcgtgagccaccacrcccggccaggagttaggtcttgaactcctgacctcaggtgatccacccacctcggcctctcaaagtgctgtgattacaggcaggagccaccgcgcccagc

SEQ ID NO: 155461 - DNA, 201 bp, Homo sapiens
actccagcctgagcaacagagccagaccttgtctcaaaaacaaacaaacaaacaaacaaacaaacaaacagtgattttacagaatgtctctctctctctctttttttttttttttggagatagagtctggctctttcgcccacgctggagtacagtggcatgatactggctcactgtgcaacctctgcctcccaggttcaa

SEQ ID NO: 155462 - DNA, 201 bp, Homo sapiens
ggttttagatttggaacttggccacaaatcgcctcacttttctaaactctttcaaaatgaaaatgtccgtgattttaggaatcattcatatgacttttggrgtcattctgggaatatttaaccacttgtaagtacagatttttttttaagcaatatttataaaccaaacttggcatttcttcaattttgcttcttgttggt

SEQ ID NO: 155463 - DNA, 201 bp, Homo sapiens
ccttcagttcagatgggcacaatttaaatgcctttttccatattcgtcttaatttcttctttaagattttcttttttcttttcttttctttctttctttctttttttttttttttgagactggagtcttcgtctgttgcccaggctggagtgcagtggcactatctcagcttactgcaacctctgccttccgggttcaagc

SEQ ID NO: 155464 - DNA, 201 bp, Homo sapiens
gtgaacccgggagacagagcttgcagtgagccgagatcatgccactgcactccagcctgggcgacagagcgagactctgtctcaaaaaaaaaaaaaaaaamaccgaaaaacaactctcttattgttggccaacaatatagccaacaataagagagtttttaatgttttaacaacaattttaaaggccacagagcaaaccat

SEQ ID NO: 155465 - DNA, 201 bp, Homo sapiens
atgccttagttactaactagaaggggaagatcctgtttctgaatactgacttgggtttcattgcagtgttattaaggaaaagcgggatgcctatgtgagcygcctgaatgccatctatcaaaacaatctcaccaaggtgtgtatgctgggtttttaactttgagaaagagctgttcccttcttgagtactcagctaagtct

SEQ ID NO: 155466 - DNA, 201 bp, Homo sapiens
agcgatccacctgcctctgcctctcaaagtgcagggattacaggcatgagccactgtgcctggcctttcttttcatctagaggcagaattcctcagccctycttttgtcttatatgacactgacatttattttgtagaatacttctcattttggcgtggtttgatatttcctcgtggtttgattgaggttatgtatttctg

SEQ ID NO: 155467 - DNA, 201 bp, Homo sapiens
accatgttggccaggctggtcttgaactcctgaccttagaagtaatctgcccacctcggcctcccaaagtgctgagattacaggcgtgagccaccacatcyggcctgcactgacttcttaagtaggcccaatgtcaatgaaagaaaaatattgtattagcaaggaagttatatgtattgtggtgggacaagaaaataggat

SEQ ID NO: 155468 - DNA, 201 bp, Homo sapiens
caagactgatttccttctctccggcatcccacacctcagcccgcttcctaagcaccattgcaagctctgtcccatctctatccattaatgatcacttgatstactttcagtctgtacctagaacctcatcagcgattccagcgtgtcccagggccttatatcaggatgaaaacctacaccagtcacacacccaaacccttt

SEQ ID NO: 155469 - DNA, 201 bp, Homo sapiens
gattcgcccatctcagcctcccagagtgctgggactataggcatgtcccagcatgtcccagaaaaaggccgccacgtctggcctttttcttttttgttttmtttccttttttttttttttttttttgagacagggtcttgctttgtcacccaggctagtgtacagtggcatgatcatagctcactgcagtcttgaattcct

SEQ ID NO: 155470 - DNA, 201 bp, Homo sapiens
gatacaaccaagactgatttccttctctccggcatcccacacctcagcccgcttcctaagcaccattgcaagctctgtcccatctctatccattaatgatsacttgatctactttcagtctgtacctagaacctcatcagcgattccagcgtgtcccagggccttatatcaggatgaaaacctacaccagtcacacaccca

SEQ ID NO: 155471 - DNA, 201 bp, Homo sapiens
cctaggctcaagtgatccacccacctcagcttctggagtagatggaactatgtgtgtgccacaatgcccagctaatttttttatttttattttttttagasatgaggtttcaccatgttgcccaggctggtctcctcggctcaagcgattcgcccatctcagcctcccagagtgctgggactataggcatgtcccagcatg

SEQ ID NO: 155472 - DNA, 201 bp, Homo sapiens
gcctgcctcagcctcccagaatgttaggattacaggcatgagccaccacacatggcctagattgtcattcttgtatgactggtcttgatacaaccaagacygatttccttctctccggcatcccacacctcagcccgcttcctaagcaccattgcaagctctgtcccatctctatccattaatgatcacttgatctacttt

SEQ ID NO: 155473 - DNA, 201 bp, Homo sapiens
ctcctaggctcaagtgatccacccacctcagcttctggagtagatggaactatgtgtgtgccacaatgcccagctaatttttttatttttattttttttasagatgaggtttcaccatgttgcccaggctggtctcctcggctcaagcgattcgcccatctcagcctcccagagtgctgggactataggcatgtcccagca

SEQ ID NO: 155474 - DNA, 201 bp, Homo sapiens
gcgatgaatgtctgtagtcccagctactcaggaggctgaggctggaggatggcttgagtcctggaggttgaggctgcagtgagccgtgttcacaccactayactccagcctgggtgacagagaccctgtctcaaaaaaaagggaaaaagtgaaaatctgcagtctagggtttagtcattagtaatgtaccaatgtcaattt

SEQ ID NO: 155475 - DNA, 201 bp, Homo sapiens
ggaaatcaattttatatgatcaagtaatgttagattgttaccactcattctaaacaatttactaaattctttgcattaaagcaggggtgtccaatcttttsgcttccctgagccacactggaaggagtagaattgtcttggactacacataaaatacactaacacaaacaatagctgatgagctaataaaaaaataaattg

SEQ ID NO: 155476 - DNA, 201 bp, Homo sapiens
tttttttttttttgagacagagtctcactgtgttgcccaggctagagtgcggtggcacatcatggctcattgcagcctcaaccttctgggctcaagcgatsttcccaccccagcctcccaaatagccaggactacaggaacatgccaccacacccagtgaggtttcaccatgttgcccaggctggtctcaaactcctgagc

SEQ ID NO: 155477 - DNA, 201 bp, Homo sapiens
tagcaaggtgtagtggtatacgcctgtagttgcagctacttgggaggctgaggtaggagaatcacttgaatccaggaggtcaaggctgcagtgagcaaagrttgtgccactgcactctagcctgggcagctgactgtccctaacaaacttgtgacttaggcaagccacataatgcctttggggcctagttctgcagggaca

SEQ ID NO: 155478 - DNA, 201 bp, Homo sapiens
agcaaggtgtagtggtatacgcctgtagttgcagctacttgggaggctgaggtaggagaatcacttgaatccaggaggtcaaggctgcagtgagcaaagaktgtgccactgcactctagcctgggcagctgactgtccctaacaaacttgtgacttaggcaagccacataatgcctttggggcctagttctgcagggacag

SEQ ID NO: 155479 - DNA, 201 bp, Homo sapiens
agcactttgggaggcctaggtgggcggatcacctgaggtcaggagttcgaggccagcctggccgacatggcgaaaccccgtctctactaaaaatagaaaarttagccaggcatggtggtgggcgcctgtaatcccagctcctcgggaggatgaggcgggagaattgcttgaatccaggaggcggaggttgcagtgggctga

SEQ ID NO: 155480 - DNA, 201 bp, Homo sapiens
ttatatatgtatattttatttatatatttatattttatatatgtatattttatttatatgtatatttatatataatatacatatataaatatacgtattatataatatatgtatataaatatacatatatatacatttatatatataataaataaaaatatacatatatttaatacatatatttaataaaaacattaaata

SEQ ID NO: 155481 - DNA, 201 bp, Homo sapiens
gagtaccgccggtttgttcgggcggggggcgcctctttgtctcggtctttcgggggacagcctgtgctcgttcctatggcgatcctgtcccccggcgctgsgctttcctcttttccacccccgcaactccccattccgaagccaggaacccagcaggtggaggagagagaggcgtccgggggcttctctgcggcccgcaaa

SEQ ID NO: 155482 - DNA, 201 bp, Homo sapiens
tatatatgtatattttatttatatatttatattttatatatgtatattttatttatatgtatatttatatataatatacatatataaatatacgtattatataatatatgtatataaatatacatatatatacatttatatatataataaataaaaatatacatatatttaatacatatatttaataaaaacattaaatac

SEQ ID NO: 155483 - DNA, 201 bp, Homo sapiens
gcccgccgcccgctgctggcgccgtggcctcctatgactacctggtgatcgggggcggctcgggcgggctggccagcgcgcgcagggcggccgagctgggygccagggccgccgtggtggagagccacaagctgggtggcacttgcgtgagtaccgccggtttgttcgggcggggggcgcctctttgtctcggtctttcgg

SEQ ID NO: 155484 - DNA, 201 bp, Homo sapiens
atatatgtatattttatttatatatttatattttatatatgtatattttatttatatgtatatttatatataatatacatatataaatatacgtattatataatatatgtatataaatatacatatatatacatttatatatataataaataaaaatatacatatatttaatacatatatttaataaaaacattaaataca

SEQ ID NO: 155485 - DNA, 201 bp, Homo sapiens
tagaaatagatgctttatataccttatctctgacctgctcaaaatctccataatggaagcattcttcccttaactgagctaggagaaatttggaaactcasccacctctagccactaaatgggagagctgagagtcaaactcctatctgtctgacttgaggcctgtgctccctctgacaacctgatgcacaggtcagctag

SEQ ID NO: 155486 - DNA, 201 bp, Homo sapiens
gagctaggagaaatttggaaactcagccacctctagccactaaatgggagagctgagagtcaaactcctatctgtctgacttgaggcctgtgctccctctracaacctgatgcacaggtcagctagagcagcagtccccagcctttttggcaccaggaaccagttttgtggaagacaatttttccacggaccagcagtggg

SEQ ID NO: 155487 - DNA, 201 bp, Homo sapiens
accacacctggctaatttttgtatttttattagagacggaggtttcaccatgttggccaggctggtcttgaactcctgacctcaggtaattgcccgcctcrgcctcccaaagtgctgcaattacaggcttgcggcaccacgcccagcctgcatcacatttattgtgcactttatttctattattattatgttgtaatatat

SEQ ID NO: 155488 - DNA, 201 bp, Homo sapiens
attctcataaggagtgtgcaacctacatcccttgcatgcacagttcacaatagggttcacgctcctatgagaatctaatgccgccactgatctgaaaggargtgggtggagctcaggcagtaatgctagcgacggggagcagctataaatacatatgaagcttcgctcacttgcccgccactcacctcctgctgcagcctg

SEQ ID NO: 155489 - DNA, 201 bp, Homo sapiens
ggtctcgaactcctgacctcaggtgatccacccaccgtggcctctcaaagtgctgggattacaggcgtaagccactgcgcccagcctgaggcgtatatatwtgatagagctgcttgagcagtgtataccttttgacttatgttctaatactaagttcctgttgtaatgtggattccttttctgtttctgtaaaaggtcatt

SEQ ID NO: 155490 - DNA, 201 bp, Homo sapiens; identical to SEQ ID NO: 29033

SEQ ID NO: 155491 - DNA, 201 bp, Homo sapiens
ggcgcagcttctctggcccaacaaggccacaattttccaccatcctcttcctctggtttctggcccagtgctcttcaattttagggaatgtggagattctkctgctgccccttgagtcagtatcttggacaggctcagagcctctctctggctggcactgtaggccaagatactgatacagtccccaagagcagggactgt

SEQ ID NO: 155492 - DNA, 201 bp, Homo sapiens
tgcctgcaagctaagacgacgtagaagcaaaaaaggcagaaacttctaaaaaaacaaaccagagttatagacaccaggcaccagtgaaagcccaccttggygcttagaagaaacatattccaaaaaaagaatatgttttaaaattaaacatattttttaaaaactttttttaaaaacatatttttaaaattagaaaaagaa

SEQ ID NO: 155493 - DNA, 201 bp, Homo sapiens
cttcttagcttagcatacattgtttccagcctcagtttgtcagacgggttgttatttacaagacacgtgataatttattgttttgttcaagagagagaaawcttgtaaggatgtagcttgagtagctaagtgagcttttatatgcatatttttctcttttaagtagagacttatagaagattaaagctgtaaggaatctca

SEQ ID NO: 155494 - DNA, 201 bp, Homo sapiens
atttgttgataaacaggtggttatacaaggtctcataaccggtaagttgcagagctaggatttgaattttggtctgtctgtaccaaaggttgtactctttyttttttttttttttttttttttttgaggcagagtctctttctgttgcccaggctggagtcagtggtgccatctcagcttactgcaatctccgccccctgg

SEQ ID NO: 155495 - DNA, 201 bp, Homo sapiens
acaccaggcaccagtgaaagcccaccttggcgcttagaagaaacatattccaaaaaaagaatatgttttaaaattaaacatattttttaaaaacttttttwaaaaacatatttttaaaattagaaaaagaagccttaaataactttaaagtagcttcaaatatacatgaggaacaaactgatggtatgtgagagtagttta

SEQ ID NO: 155496 - DNA, 201 bp, Homo sapiens
tatcccagcactttgggaggtcgaggcaggcggatcacctgaggttgggagtttgagaccagcctgaccaacatggagaaactccatctctaccaaaaatacaaaattagctgggcgtggtggcgcatgcctgtaattccagctactcggggcaggagcatcacttgaactcaggaggtggaggttgtggtgagctgagat

SEQ ID NO: 155497 - DNA, 201 bp, Homo sapiens
acatgataatctgtgcatttgtgcatttcgcttttctacatctttggttacttctttaggccaaatgcctagtagttataaatcaaagtcattttatgagmtctaatatttatttaggttttctcaagtttctgtactaatggttaatcaatatcctaagttccatgccatgtactttaaatttttgtgcttttggtgagt

SEQ ID NO: 155498 - DNA, 201 bp, Homo sapiens
ttccaatatgttaaagcattccactttgtaatcatgcttacatggttccattattcttgtaagttgaccacatttgcatgcccctgcatgtatcatggctrgcgaaagcgtgccagcagcccctaagtgaaggcctgggtacagaggattccagtaagagcaaatccaaaagtaagagtctgagttctcaccgtctccagc

SEQ ID NO: 155499 - DNA, 201 bp, Homo sapiens
ctgagcctccacacatgtgtaacacattttatttgccaataggtcaaggaggttaaaaagactttgtcgggcttggaagtcagcatggttactgcagttcmcggtaggctaccagtcatgaccatgattccagatgttgactgcctgctctgggccattgggcgggtcccgaataccaaggacctgagtttaaacaaactg

SEQ ID NO: 155500 - DNA, 201 bp, Homo sapiens
gcgggcgcctgtattcccagctatttggaaggctgaggcaggagaatggcgtgaaccctggaggcggagcttgcagtgagctgagatcacaccactgcacyccagcctgggcaaaaatgcaagactctgtctcaaaaaaaaaaattttttttgtagagatgaggtcttgctatgttgcccacgctgatcttgaactcctgg

SEQ ID NO: 155501 - DNA, 201 bp, Homo sapiens
ataccactgggctaatactgcacagtaaactgattttgtaatgttttagtctcatatttacttattccttctgatcacatgcggtagacatttatgtatgktcatttatatatatttttttcttttttttcttttctttttttttttttttttttttttttttgagacagagtctcactcttgcccaggccggaatgcagt

SEQ ID NO: 155502 - DNA, 201 bp, Homo sapiens
gttttatcagtgttccttcatttaattgttcaaccgttaaagtttatgggaggccattgttttggaccagtctcctgtactaggtcccagcagacctgggkgtgtgtgtgtgtgtgtgtgtgtgtttgttgctctgtcacccaggctggagtgcagtggggtgatctcggctcactgcaacctccgtctcctgggttcaag

SEQ ID NO: 155503 - DNA, 201 bp, Homo sapiens
acctcgacctcccaaagtgctgggattacaggtgtgagccaccaagccccgccaggttaatttattaatttctggaaatcaattttatatgatcaagtaakgttagattgttaccactcattctaaacaatttactaaattctttgcattaaagcaggggtgtccaatcttttggcttccctgagccacactggaaggagt

SEQ ID NO: 155504 - DNA, 201 bp, Homo sapiens
tgcctgcctcagcctcccagaatgttaggattacaggcatgagccaccacacatggcctagattgtcattcttgtatgactggtcttgatacaaccaagamtgatttccttctctccggcatcccacacctcagcccgcttcctaagcaccattgcaagctctgtcccatctctatccattaatgatcacttgatctactt

SEQ ID NO: 155505 - DNA, 201 bp, Homo sapiens
gtgttgaaatagatattggttggatacctgacattatctgaataaaagacttaaaatgcttagcacagactgaagttttcatgtagacaatatgatcaccygttgcggaactctcttaggagcagacttgtgcttggtggcagtggaaggaagtggcatttggaagaagtaatttagattggcatttttttttttttttgg

SEQ ID NO: 155506 - DNA, 201 bp, Homo sapiens
ctaatttctaacagaggcagggtctcactgtgttgcccaagctgatctcaaactcctgggcttaagggatcctccctcttcggcttctcaaagttctgggrttacaggtgtgggcccactgtacccagcttgaaacttgccagctgtaaatgcctttcgtgttgcagctgagtctcatggtttcttggagattctggctgc

SEQ ID NO: 155507 - DNA, 201 bp, Homo sapiens
tatatgtatattttatttatatatttatattttatatatgtatattttatttatatgtatatttatatataatatacatatataaatatacgtattatataatatatgtatataaatatacatatatatacatttatatatataataaataaaaatatacatatatttaatacatatatttaataaaaacattaaatacat

SEQ ID NO: 155508 - DNA, 201 bp, Homo sapiens
atatgtatattttatttatatatttatattttatatatgtatattttatttatatgtatatttatatataatatacatatataaatatacgtattatatartatatgtatataaatatacatatatatacatttatatatataataaataaaaatatacatatatttaatacatatatttaataaaaacattaaatacata

SEQ ID NO: 155509 - DNA, 201 bp, Homo sapiens
tcagtggtgtgatcatagctcaccgcagtcttaacctcctaggctcaagtgatccacccacctcagcttctggagtagatggaactatgtgtgtgccacamtgcccagctaatttttttatttttattttttttagagatgaggtttcaccatgttgcccaggctggtctcctcggctcaagcgattcgcccatctcagcc

SEQ ID NO: 155510 - DNA, 201 bp, Homo sapiens
cccatctcagcctcccagagtgctgggactataggcatgtcccagcatgtcccagaaaaaggccgccacgtctggcctttttcttttttgttttctttccttttttttttttttttttttgagacagggtcttgctttgtcacccaggctagtgtacagtggcatgatcatagctcactgcagtcttgaattcctggggtc

SEQ ID NO: 155511 - DNA, 201 bp, Homo sapiens
ccatctcagcctcccagagtgctgggactataggcatgtcccagcatgtcccagaaaaaggccgccacgtctggcctttttcttttttgttttctttccttttttttttttttttttttgagacagggtcttgctttgtcacccaggctagtgtacagtggcatgatcatagctcactgcagtcttgaattcctggggtca

SEQ ID NO: 155512 - DNA, 201 bp, Homo sapiens
gtgccaccacacctggctaatttttaagttttctgtagagatggagtcttactatgttgcccaggctgctcttgaactcctggcctcaagtgatccttccwcctcggcctcccaaagtgctcggattataaacatgagcctccatgcccagccggcctgccacctctaacctagtttcctattggcctccctcttacagac

SEQ ID NO: 155513 - DNA, 201 bp, Homo sapiens
ccaccacacctggctaatttttaagttttctgtagagatggagtcttactatgttgcccaggctgctcttgaactcctggcctcaagtgatccttccaccwcggcctcccaaagtgctcggattataaacatgagcctccatgcccagccggcctgccacctctaacctagtttcctattggcctccctcttacagacttc

SEQ ID NO: 155514 - DNA, 201 bp, Homo sapiens
tctcgaactcctgacctcaggtgatccacccaccgtggcctctcaaagtgctgggattacaggcgtaagccactgcgcccagcctgaggcgtatatatttratagagctgcttgagcagtgtataccttttgacttatgttctaatactaagttcctgttgtaatgtggattccttttctgtttctgtaaaaggtcatttt

SEQ ID NO: 155515 - DNA, 201 bp, Homo sapiens
caaatctgcagtctgcttaagcaaagttaaaaggatgagtgtctttatattgtcaaaatggtacaatgtgttgaaatagatattggttggatacctgacattatctgaataaaagacttaaaatgcttagcacagactgaagttttcatgtagacaatatgatcacccgttgcggaactctcttaggagcagacttgtgct

SEQ ID NO: 155516 - DNA, 201 bp, Homo sapiens
gcatgatcacgggctcactgcagtttcaaccttcctgggctcaggtgatcctcccacctcagactcccaagtagctaggatcacaggtgcattttttgtaragacagggttttaccatgttgtcttgaacccctgtgcttaagcagactgcctgcctcagcctcccagaatgttaggattacaggcatgagccaccacaca

SEQ ID NO: 155517 - DNA, 201 bp, Homo sapiens
attttctacttaaagttgcagtggtatccaggattggatcttggaacagaaaaaaaaaaagattaatagaaaaactgggctaggcaaggtagcttacaccygtaatgccggcactttgggaggccaaggtaagagcattgcttgagcccaggagctaagactagcctgggctaacatggtgagactctgtctctacaaaag

SEQ ID NO: 155518 - DNA, 201 bp, Homo sapiens
cttctcttctttccttttcctttcttttctgtttttgtttttttctttttgtttttgagaaaggtcttgctctgtcacccaggctggagttcagtggtgtratcatagctcaccgcagtcttaacctcctaggctcaagtgatccacccacctcagcttctggagtagatggaactatgtgtgtgccacaatgcccagcta

SEQ ID NO: 155519 - DNA, 201 bp, Homo sapiens
ggctggagtgcagtggcatgatcatgatcatggcttactgcagccttgtctttccaggctcaaagggtccccccacctcagcctcctgagtagctgggacyacaggcatgcaccaccacacccagctacttttttttgtagagacgtggtctcgcttgttgcccaggctggtctcgaattcatgggcttaagcaatccaac

SEQ ID NO: 155520 - DNA, 201 bp, Homo sapiens
ggtgaaaccccagccctactaaaaaatacaaaaattgaccaggtgtggtggcgggcgcctgtattcccagctatttggaaggctgaggcaggagaatggcrtgaaccctggaggcggagcttgcagtgagctgagatcacaccactgcactccagcctgggcaaaaatgcaagactctgtctcaaaaaaaaaaattttttt

SEQ ID NO: 155521 - DNA, 201 bp, Homo sapiens
gcgaaagcgtgccagcagcccctaagtgaaggcctgggtacagaggattccagtaagagcaaatccaaaagtaagagtctgagttctcaccgtctccagcrtagaacttcagtgtcatgtacttttgtggtattcttcccattttacgaaagcacaagcattgcgtttccctcccttggccagagtattcctctcttgctc

SEQ ID NO: 155522 - DNA, 201 bp, Homo sapiens
agaagttctacagaaacttgaaaaacggagaattgtgttggcatcagcaaaccaagaatcaaaatgttcagtagagaaatgaaagttctgataagttgcastaggtgtctttgtttttattctaagaacaggctaatgtcatggttccttctttagtcccatatagaaatcatccgtggccatgcagccttcacgagtgat

SEQ ID NO: 155523 - DNA, 201 bp, Homo sapiens
ttcccagccactgactggaagatttgggtcaacccagggaacaggcttggtttaagggagttcaagtgttggtggcctttgggtaaaagtttatgtctatstttgtatgtgggattcagtagggattttctttaatgttaaaaattctagtttcctctgtatttgctttccttcttcccctgtcctccctgagcctccaca

SEQ ID NO: 155524 - DNA, 201 bp, Homo sapiens
ctccccagtagtcaggaccacaggcacatggccaccaccaagccctggctgattttttaaatttttagtagagacaaggtcttgctttgttgcccaggctrgtctcgaactgctggtctcgaactcctgagctcaagcagtcctcccaccttagcctctcaaagtgctgggattacaggcatgagccaccgtgcccagcct

SEQ ID NO: 155525 - DNA, 201 bp, Homo sapiens
ttgtcctctcaaagtgctgagattacaggcatgagccactgcgcccggccctattttatttttaacgaccaggtctctatctgtcgccaggctggagtacrgtggtgcaatgatagctcactgtagcctccaagtcctgggctcaagcagtcctcccacctcagtctccttagtaactaggactgtaggcatgcaccacca

SEQ ID NO: 155526 - DNA, 201 bp, Homo sapiens
  misc_feature (1)...(201): n = A,T,C or G
gcctgctctgggccattgggcgggtcccgaataccaaggacctgagtttaaacaaactggtaagctggcttggtctgcccgaaacatttgtgaatctactnggagtcttatggttttattttccccccagacacccaaaacttgggtggattccattggattcttttctctttttcccatgtattcagtttgtgatcaaat

SEQ ID NO: 155527 - DNA, 201 bp, Homo sapiens
cgtgtgccaccacacccatcgaatttttgtatttttttagtagaaacagggtttcaccatgttggccaggctggtctcgaactcctgacctcaggtgatcygcccaccttgtcctctcaaagtgctgagattacaggcatgagccactgcgcccggccctattttatttttaacgaccaggtctctatctgtcgccaggct

SEQ ID NO: 155528 - DNA, 201 bp, Homo sapiens
ggagctgctttgcagttccataggatggtgaaaatgtcccttgaagatacctcagaccaggcaggcttctgacttggaggagttctaagaaaaccatacartcttttttggtttgctatcaggtcgcagaaatgtgttagagaacagccttccttccctgtgatccaccctgcattgtttgattttagggttgagtgacat

SEQ ID NO: 155529 - DNA, 201 bp, Homo sapiens
gatggagtcttactatgttgcccaggctgctcttgaactcctggcctcaagtgatccttccacctcggcctcccaaagtgctcggattataaacatgagcytccatgcccagccggcctgccacctctaacctagtttcctattggcctccctcttacagacttcgtttttgctatgtgaatgtctctttcaagtcctatg

SEQ ID NO: 155530 - DNA, 201 bp, Homo sapiens
ctggtaatttcatcactaagtggtagatagtcatgagatgccctcatagggagacgtggggcctaaacataactattagctaaattaaacagactgttagsttaatttatttttttatttttattttttgagacagagtctcactcttttgtccaggctggagtgcagtggcaccatctcggctcactgcaacctctgcct

SEQ ID NO: 155531 - DNA, 201 bp, Homo sapiens
acttgccaacttttttttttctaatttctaacagaggcagggtctcactgtgttgcccaagctgatctcaaactcctgggcttaagggatcctccctcttyggcttctcaaagttctgggattacaggtgtgggcccactgtacccagcttgaaacttgccagctgtaaatgcctttcgtgttgcagctgagtctcatggt

SEQ ID NO: 155532 - DNA, 201 bp, Homo sapiens
ctactcgggaggctgaggcatgagaattgcttgagcctgggaggcagaggttgcagtgagctgagatcttgccactatactccagcctgcgcgatatagtragactcagtctcaaaaaaaaaacaaccaaacaaaaaaataatgtagttttctggctgggcacagtggctcatgactgtaatcccagcactttgggaggct

SEQ ID NO: 155533 - DNA, 201 bp, Homo sapiens
  misc_feature (1)...(201): n = A,T,C or G
cccagcctatttcatcttactgtatacttccggcaactaatggcaacccctttcctaagtataggttgccagttagaagttctacagaaacttgaaaaacngagaattgtgttggcatcagcaaaccaagaatcaaaatgttcagtagagaaatgaaagttctgataagttgcagtaggtgtctttgtttttattctaaga

SEQ ID NO: 155534 - DNA, 201 bp, Homo sapiens
tggcgccactgctctccagcctggcaacaagagcgagactctgtctaaaaaaaaaaaataataatataataataatgataataataataaagattctaggygcagtggctcatgcctgtaatcccagcactttagggttataaaatagaactaaagatgctgaaaactaatatagcttgttccataaatattgtattaaaa

SEQ ID NO: 155535 - DNA, 201 bp, Homo sapiens
aggttaatttattaatttctggaaatcaattttatatgatcaagtaatgttagattgttaccactcattctaaacaatttactaaattctttgcattaaarcaggggtgtccaatcttttggcttccctgagccacactggaaggagtagaattgtcttggactacacataaaatacactaacacaaacaatagctgatga

SEQ ID NO: 155536 - DNA, 201 bp, Homo sapiens
ggcgccactgctctccagcctggcaacaagagcgagactctgtctaaaaaaaaaaaataataatataataataatgataataataataaagattctaggcrcagtggctcatgcctgtaatcccagcactttagggttataaaatagaactaaagatgctgaaaactaatatagcttgttccataaatattgtattaaaaa

SEQ ID NO: 155537 - DNA, 201 bp, Homo sapiens
cagcttaaggaaaagttgtttctaaattgctgctccctttgccccagggcctggggaacttgcggtcctgggttcctgctgagtgtactgattctgtgatragaataactaggttcttgtggttttggcgagtagtacttaccaatgagagttgggtagtaagggttgatcatgtgacaaaagttcatgattgccaagtca

SEQ ID NO: 155538 - DNA, 201 bp, Homo sapiens
gctggtaatttcatcactaagtggtagatagtcatgagatgccctcatagggagacgtggggcctaaacataactattagctaaattaaacagactgttasgttaatttatttttttatttttattttttgagacagagtctcactcttttgtccaggctggagtgcagtggcaccatctcggctcactgcaacctctgcc

SEQ ID NO: 155539 - DNA, 201 bp, Homo sapiens
actagggtgcaaagcaggtgtgggggtcatttggttggtttcatatggtgctgtatccaagttacctgaatttggcctatatccctcccagttgctggttsatgatgataattttgagttggtcaaattggctggtaatttcatcactaagtggtagatagtcatgagatgccctcatagggagacgtggggcctaaacat

SEQ ID NO: 155540 - DNA, 201 bp, Homo sapiens
tttagggaaaactgatcaaggggtataataagggaaatctctgtactatctctgcaacttttctgtaaacgtgaaattattccaaaattagtttatttaasaatactaaccctctgctcgcgtctcagccgcagcgtcattgttggtgcaggttacattgctgtggagatggcagggatcctgtcagccctgggttctaag

SEQ ID NO: 155541 - DNA, 201 bp, Homo sapiens
ggcaacaagagcgagactctgtctaaaaaaaaaaaataataatataataataatgataataataataaagattctaggcgcagtggctcatgcctgtaatyccagcactttagggttataaaatagaactaaagatgctgaaaactaatatagcttgttccataaatattgtattaaaaagctaatatcttcattaagtag

SEQ ID NO: 155542 - DNA, 201 bp, Homo sapiens
ccgaggcaggcatatcacctgaggtcaggagtttgagactagcctgaccaacgtggtgaaaccctgtctctactaaaaacacaaaaatgagccaggcatgrtggtgcgtgcctgtaatcccagctactcgggaggctgaggcaggagaatcacttgaacctgggaggcggaggttgcagtgagccaagatcatgctactgc

SEQ ID NO: 155543 - DNA, 201 bp, Homo sapiens
gatattgaatcatgaaggctcctacttagttatttcttcatgccagttatcattcattcagttgataaacattatttgtcattcttctcaagactaagaaytgctatatagagaggaataatatgaagagctggccatcaccagaggctctttataagttcaattaagatcacaatatcagtcagacaccgtggctcaccc

SEQ ID NO: 155544 - DNA, 201 bp, Homo sapiens
attgaatcatgaaggctcctacttagttatttcttcatgccagttatcattcattcagttgataaacattatttgtcattcttctcaagactaagaactgmtatatagagaggaataatatgaagagctggccatcaccagaggctctttataagttcaattaagatcacaatatcagtcagacaccgtggctcacccctg

SEQ ID NO: 155545 - DNA, 201 bp, Homo sapiens
tatttcttcatgccagttatcattcattcagttgataaacattatttgtcattcttctcaagactaagaactgctatatagagaggaataatatgaagagytggccatcaccagaggctctttataagttcaattaagatcacaatatcagtcagacaccgtggctcacccctgtaatcccagcactttgggaggctgagg

SEQ ID NO: 155546 - DNA, 201 bp, Homo sapiens; identical to SEQ ID NO: 29024

SEQ ID NO: 155547 - DNA, 201 bp, Homo sapiens; identical to SEQ ID NO: 29048

SEQ ID NO: 155548 - DNA, 201 bp, Homo sapiens; identical to SEQ ID NO: 29049

SEQ ID NO: 155549 - DNA, 201 bp, Homo sapiens; identical to SEQ ID NO: 29051

SEQ ID NO: 155550 - DNA, 201 bp, Homo sapiens
cgggcagatcacctgaggtcaggagctcgagaccagcctggccaacatggtgaaaccctgtctctactaaaactatggaaattagctgggtgtggtggtgygggcctgtagtctcagctactcgggaagctgaggcaggagaatcacttgaattctcaaggcggagttgcagtgagacaagatcacaccaagaaagaaaga

SEQ ID NO: 155551 - DNA, 201 bp, Homo sapiens; identical to SEQ ID NO: 29050

SEQ ID NO: 155552 - DNA, 201 bp, Homo sapiens; identical to SEQ ID NO: 29053

SEQ ID NO: 155553 - DNA, 201 bp, Homo sapiens
ccaggtaagtgagaacttgtgaatgtgtcttttgggagtggggccagacaggttgagcatcccttatctgaaatgcttgggaccagaagtgttttcagttkcagattttggaatatttgcatatatataatgagatattttgcagatgcgacccaagtcgaaacacggaattcatttgttttacatacaccttatacacat

SEQ ID NO: 155554 - DNA, 201 bp, Homo sapiens
  misc_feature (1)...(201): n = A,T,C or G
taaactatctagatagtgtaatgaacaatggtgtgaaactgtcagaactagggcattaaggtagatggataaatggctagtggaacaatttagctatgttnaaacagacagtaagataaacactgattttaaaatatctccatagttgcaatagctgctggccgaaaacttgcccatcgactttttgaatataaggaagat

SEQ ID NO: 155555 - DNA, 201 bp, Homo sapiens
gtctgggcgacagagtgagactctgtctcaaaaagaaaaaaagaaacttgtttcttatccctcattaatgcccacctggagaaccggggaatctgccagtsttgtatgctgagggtcttagcaatgtgcaactctgggcaaccagagccctgagaactcatctgataatgctccagtctgggaggcaaacttcctttgtga

SEQ ID NO: 155556 - DNA, 201 bp, Homo sapiens
atatcacctgaggtcaggagtttgagactagcctgaccaacgtggtgaaaccctgtctctactaaaaacacaaaaatgagccaggcatggtggtgcgtgcytgtaatcccagctactcgggaggctgaggcaggagaatcacttgaacctgggaggcggaggttgcagtgagccaagatcatgctactgcactccagcctg

SEQ ID NO: 155557 - DNA, 201 bp, Homo sapiens
caaattaggattcagaaggttgtttttatgaatgacatctgatcaagaaaactgggcagaggtgtgtttgcctccagcaactgtatgtcatccttcactaycctgatgcttttcccccatagtgctgggatgtcacacctttcccaccaggaccatgtaggtgacattgacaacctgtgcatcacttaactctccttttcc

SEQ ID NO: 155558 - DNA, 201 bp, Homo sapiens
ctggccaacatggtgaaaccctctctctgctaaaaatacaaaattagccaggcgtggtggtgcgcgcctgtaatcccagctactcgggaggctgaggcagkagaatcacttgaacccgggaggtggaggttgcagcgagccgagatcatgccattgcactccagcctgggcaacaagagtgaaactccgtctcaaaaaaaa

SEQ ID NO: 155559 - DNA, 201 bp, Homo sapiens
cctctgcactccagtgtgggcaacagagtgagactctgtctcaaaaaaaaaaaaaaaaaaaaaaaaaggtggggggttgggtagtattctttgacattcgsaacctcaaaagatgggtcccaggcctaggcatcaaaacgggatatgttgtgtaatcaaatttggagcacagagtgtctctttaatagaaataagagatga

SEQ ID NO: 155560 - DNA, 201 bp, Homo sapiens
tttatttagcaagtgtttattaagtgcccaccacgtcctatgcacatcatgttctaggcactttgccaaaacatttctccttgtcttctgcgcagaaagaygatgccaactgagtgtgttctccactgagtggcacagaggcttttaacacatggggcagcagaatgacacagggaagggatgactgtcttcggagacatt

SEQ ID NO: 155561 - DNA, 201 bp, Homo sapiens
tctttatctgtttaagtcatcagtatagtccaagcccctagaacagtgttttgcacatagcaagtactcagtatatagttgctgaaataattgagttgatraatcgatagtgttttgccttggaaattatgactcgtctattttctgagtagttctcattctggtcttgaattagattttaggcagcaaagaaggacgaca

SEQ ID NO: 155562 - DNA, 201 bp, Homo sapiens
tcccagcactttgggaggccgaggtgggcggatcatgaggtcagtagatcgacaccatcctggctaacatggtgaaactccgtctctactaaaaatacatwaaaaaaaaaaaatttatccaggtgtggtagtacacacctgttgtcccagctactcgggaggctgaggcaggagaattgcttgaacccaggaggcagaggt

SEQ ID NO: 155563 - DNA, 201 bp, Homo sapiens
gcctttcctgaattccctcctcttacagcttctcttttcatgaccttgtatatctcattcctagaactcctcagtagatccctcaaatctttcatgctttyaatcagaggccaaagtcaaatgcagggtaatttgaagactgcatagcaaagtcctaaaactgtcttctttcttcaacttaatacagcatcaattaagaat

SEQ ID NO: 155564 - DNA, 201 bp, Homo sapiens
ctgggactacaaacgtgcaccaccatacctggttaactttttaatttaaatttttgtagagatggggtctcgttctgttgtccaggctggtctagaattcmtggcctcaagcaatcctcccaccttggcctctcaaagcagtaggaatacaagcatgggccaccgtgctgaatggatttagattcatagaggggcaaaaag

SEQ ID NO: 155565 - DNA, 201 bp, Homo sapiens
gctgggactacaaacgtgcaccaccatacctggttaactttttaatttaaatttttgtagagatggggtctcgttctgttgtccaggctggtctagaattsctggcctcaagcaatcctcccaccttggcctctcaaagcagtaggaatacaagcatgggccaccgtgctgaatggatttagattcatagaggggcaaaaa

SEQ ID NO: 155566 - DNA, 201 bp, Homo sapiens
tcttgaactcctggtctcaagcgatctgcccacctcaccctcccaaagtgctgggattacaggcatgagccaccatgcctggcctctatctttcatttttraaattatttttcttgacacaaggtcttgctgtgttgcccaggctgtagtgcagttccatgatcattgctcactgcagtctccaactcctgggctcaagca

SEQ ID NO: 155567 - DNA, 201 bp, Homo sapiens
tcccttatctgaaatgcttgggaccagaagtgttttcagtttcagattttggaatatttgcatatatataatgagatattttgcagatgcgacccaagtckaaacacggaattcatttgttttacatacaccttatacacatagttggaaggtaactttatacgatattttaaatgtgtgcatgaggcatacttttgtctg

SEQ ID NO: 155568 - DNA, 201 bp, Homo sapiens
ttttctttaatgttaaaaattctagtttcctctgtatttgctttccttcttcccctgtcctccctgagcctccacacatgtgtaacacattttatttgccmataggtcaaggaggttaaaaagactttgtcgggcttggaagtcagcatggttactgcagttcccggtaggctaccagtcatgaccatgattccagatgtt

SEQ ID NO: 155569 - DNA, 201 bp, Homo sapiens; identical to SEQ ID NO: 29052

SEQ ID NO: 155570 - DNA, 201 bp, Homo sapiens; identical to SEQ ID NO: 29030

SEQ ID NO: 155571 - DNA, 201 bp, Homo sapiens
tgtgcccggccttgtgtttgtttctttttagtctgtttttaatagctttccccttatctctttaaaaaaaaatgttttaagttagcaaggtatagtagatkttatttattattattattattattttatcttttgagacagagactctgtcactcaggctggagtgcagcagtgtgatcttggctcactacaacctctgcc

SEQ ID NO: 155572 - DNA, 201 bp, Homo sapiens
ggctgtagtgcagtggcacgatcatggctcactgcagcctcaatatcctgggttcaggtgatcctcctgcctcagcttcccaactggctgagactacaggytattatttgtggtgatggggtctcgctgtgttgtccaggctcctctcaaactcctgggctcaaaggatcctccagtcttgacccgtcaaaagtgctagga

SEQ ID NO: 155573 - DNA, 201 bp, Homo sapiens
aaatttttttgttttttgaggcagggtctcactctgtcgcccaggctgtagtgcagtggcacgatcatggctcactgcagcctcaatatcctgggttcagrtgatcctcctgcctcagcttcccaactggctgagactacaggctattatttgtggtgatggggtctcgctgtgttgtccaggctcctctcaaactcctgg

SEQ ID NO: 155574 - DNA, 201 bp, Homo sapiens; identical to SEQ ID NO: 29035

SEQ ID NO: 155575 - DNA, 201 bp, Homo sapiens
atgtcatagccttatctcctctactcctgcttttcacttttactttatcttatgtaaaatgtagatttactgaggctcataagaacctcacaagaatgtawccatctaggctgggcgtgatggctcacgccagcactttgggaggccgaggtgggcagatcacctgaggtcaggagttcgagaccagcctggccaacacgg

SEQ ID NO: 155576 - DNA, 201 bp, Homo sapiens
aaaactcttcttctccccggatgccccagagtaacaattatttttattttttaaatttttttgttttttgaggcagggtctcactctgtcgcccaggctgkagtgcagtggcacgatcatggctcactgcagcctcaatatcctgggttcaggtgatcctcctgcctcagcttcccaactggctgagactacaggctatta

SEQ ID NO: 155577 - DNA, 201 bp, Homo sapiens; identical to SEQ ID NO: 29038

SEQ ID NO: 155578 - DNA, 201 bp, Homo sapiens
atcagtagattcttgatgataattaggccactgtgatctcagtagcagcatatttataaaccaatttttaggacgagttacttcatacatagctaactgtrtacagttttatattcttattcattgggtttattttttggagggtgaattttccaaccttaatcctcaatccagggggaaaaatatttaaaggcctgcagt

SEQ ID NO: 155579 - DNA, 201 bp, Homo sapiens
gaagcttctgaattttgccacctgttatcaccagataacaggcggcccactgatcgggattctgaacactagattgatgccagcaggcccactgatcgggrttctgaacactagattggttggaaaaggaagctctcaggaatggatcatcggtttggaaagggaggctgagttacaggagtctccttgatgatgtattta

SEQ ID NO: 155580 - DNA, 201 bp, Homo sapiens
aaaagcaagaacaaacaaaagtggtctctggaacaaacctggacaaacaacccttcgaatagaggcaaatttctcttcctggagaagccgtgccactggcractccccagggggccagctcgggaaaagccagctgaaacgagaggacgttcaccgttcctcgcctcgatccaccggacttcagaaggctacacgcggcag

SEQ ID NO: 155581 - DNA, 201 bp, Homo sapiens
cctcccgccaggttcaagcaattctcctgcctcagcctcccaagcagctgggattagaggtgtgcaccaccacgcctgggtaatttttgtatttttactaraaacgggatttcaccatgttggccaggggtctcgaactcctgacctcaagtgatttgcccacctcggcctcccaaagtgctgagattataggcgtgagct

SEQ ID NO: 155582 - DNA, 201 bp, Homo sapiens
taaggaactgctgtaaatcctttgaagccattaacagttttgaagaaatttagcaaatttatttatttagcaagtgtttattaagtgcccaccacgtcctrtgcacatcatgttctaggcactttgccaaaacatttctccttgtcttctgcgcagaaagacgatgccaactgagtgtgttctccactgagtggcacagag

SEQ ID NO: 155583 - DNA, 201 bp, Homo sapiens
tactgggaacaaggtagcggggttcagggtgttacaaacttcagtggttatacggggattttcacaaagcaaactttggtacttagtgagtctagcactcrttagccaatgatgtcctttagtattcattaaagtcaccacagcatggggggcctttatgttccggttttgcccaagagtcagcttatctgcttcttgtac

SEQ ID NO: 155584 - DNA, 201 bp, Homo sapiens; identical to SEQ ID NO: 29025

SEQ ID NO: 155585 - DNA, 201 bp, Homo sapiens
cctaatgtgtctcctgggtttagaatttcatagaatggggcccacccatattcataagtgacaaataaaggagtggccataaagggtggggctagttaaarcaagcaaatgctattgttgaaatttggcttttaacttaccttgttgactgcttcctttttttgtactagtcttcatatactgttgctttgccatctgcct

SEQ ID NO: 155586 - DNA, 201 bp, Homo sapiens
caagccctggcccatcttgggtgtttatccatgtattctgcagtactttcccgagaagtcctcttagacagcagctcaaatgggctgattgttctttctcygtccaagaaaaatgctgatgaatgaacttctctccctcattacagaaggaaaataatgttcttatctttttgtaacaaagaaagtaactagaatttagta

SEQ ID NO: 155587 - DNA, 201 bp, Homo sapiens
ggccctcaaacatgggggccatcctttaaaaaccccgtctagttgtttagagaggtaggccaccggcctcggccagggccccacagtttgggttaaaactcccaactgccatcttttctctctctgacacatacaatgtaaaaggctttgtcagatcgggtagccccagggctggggctgacataagtctttcctttaact

SEQ ID NO: 155588 - DNA, 201 bp, Homo sapiens
attaggtctctgtcagctgatgaaacctatctcagccccagattacattgctttttggttactctcttgtcacagttccagttttctcccctgctactacyttgagtgtacagtatctttccttcacaccaccctatctctttgatcttttttttttagcttttttatttgaactaattttaaatttaaagaaaagctcta

SEQ ID NO: 155589 - DNA, 201 bp, Homo sapiens
tcatattggccaggctggtcttgaactcttgacctcaggtgatccacccaccttggcctcccaaagtgctgggattgcaggccaccgtgcccagccaagaratttcatttggccccaggctcagacatattgcaggtaacagagggagagaaatcaatgaaagcctcattctttccttcttagcttagcatacattgtttc

SEQ ID NO: 155590 - DNA, 201 bp, Homo sapiens
aaccagttatggtggtaaatttcgtgttgattggtacaagtttatttttttttaaatataccactgggctaatactgcacagtaaactgattttgtaatgktttagtctcatatttacttattccttctgatcacatgcggtagacatttatgtatgttcatttatatatatttttttcttttttttcttttctttttttt

SEQ ID NO: 155591 - DNA, 201 bp, Homo sapiens
catcatattggccaggctggtcttgaactcttgacctcaggtgatccacccaccttggcctcccaaagtgctgggattgcaggccaccgtgcccagccaaragatttcatttggccccaggctcagacatattgcaggtaacagagggagagaaatcaatgaaagcctcattctttccttcttagcttagcatacattgtt

SEQ ID NO: 155592 - DNA, 201 bp, Homo sapiens
taacttgtcatctttttggtattatataagcaaatctcctaatctcatcagtgatgcatacctgagtttaattccaaaaagtctttttgaagtcttttccstggtataggtaaggtgtttttctttctgtcttaggaagacttttcttctctgggacattttccctcaactatttcctttcctattagtcatactttttgt

SEQ ID NO: 155593 - DNA, 201 bp, Homo sapiens
gcttttcacctttcaagagatattttgccattgtacagatgtaagcactgataggtccagttttcaactaaatttgctaactttttttgggggggttggayagggtcttgctctgtcacctaggctggagtacagtggtgccatcatggctcactgcatccttgcagcatcaaactcctgggctcaagccatccttctacc

SEQ ID NO: 155594 - DNA, 201 bp, Homo sapiens
aactggtcattcagcttttcacctttcaagagatattttgccattgtacagatgtaagcactgataggtccagttttcaactaaatttgctaacttttttkgggggggttggacagggtcttgctctgtcacctaggctggagtacagtggtgccatcatggctcactgcatccttgcagcatcaaactcctgggctcaag

SEQ ID NO: 155595 - DNA, 201 bp, Homo sapiens
tgggaggctgaggcgggtggatcacctgaggtcaggagttcgagaccagcctgggcaacgtggtgaaatgccgtctctactaataatacaaaaattagccrggcatggtgacgcatgcctgtaatcccagctacttgggaggctgaggcaggagaatcgcttgaacccaggaggctgaggttgcagtgagccgagatcacg

SEQ ID NO: 155596 - DNA, 201 bp, Homo sapiens
tatgtttctcaggccggtctctaactcgtgggctcaagcagtcctcccacctcacctcccaaagttttgggattacagtgtgagccaccacacccagccgsaagttcactattgaacacagttgatgttcttggcaggcgcaattgcagattaaccaagttcttgttttactgccaacatgggcaatgtgaagtttctacc

SEQ ID NO: 155597 - DNA, 201 bp, Homo sapiens
atttgtggagacgaggccttactatgtttctcaggccggtctctaactcgtgggctcaagcagtcctcccacctcacctcccaaagttttgggattacagygtgagccaccacacccagccggaagttcactattgaacacagttgatgttcttggcaggcgcaattgcagattaaccaagttcttgttttactgccaaca

SEQ ID NO: 155598 - DNA, 201 bp, Homo sapiens
ccttatctgaaatgcttgggaccagaagtgttttcagtttcagattttggaatatttgcatatatataatgagatattttgcagatgcgacccaagtcgawacacggaattcatttgttttacatacaccttatacacatagttggaaggtaactttatacgatattttaaatgtgtgcatgaggcatacttttgtctgcg

SEQ ID NO: 155599 - DNA, 201 bp, Homo sapiens
ttgttcatctaggctgaaaacaattacccagcaacatgtaaatcataacctcatttggaagtgatactgtgtactttgatattatgatgtctataccctgrtaaagctgaacactggacatgctttttttttttttttgagacagggtctcattgtgtcacccaggctggagttcaggggcatgatcatagctcactgcaa

SEQ ID NO: 155600 - DNA, 201 bp, Homo sapiens
cctggaggcctgttcacaggagctggcaaaataggacagtggtatttcagggtcataggcttcctttcaaccagtgccccaggccccaaagtgtgttgtgmtggggcgcagcttctctggcccaacaaggccacaattttccaccatcctcttcctctggtttctggcccagtgctcttcaattttagggaatgtggagat

SEQ ID NO: 155601 - DNA, 201 bp, Homo sapiens
cccaggctggtctcgaactcctgagctcaagctatccacccacctctgcctcccaaagtgctaggattacaggtgtaagccacctgtgcccagcctatttsatcttactgtatacttccggcaactaatggcaacccctttcctaagtataggttgccagttagaagttctacagaaacttgaaaaacggagaattgtgtt

SEQ ID NO: 155602 - DNA, 201 bp, Homo sapiens
catggttccattattcttgtaagttgaccacatttgcatgcccctgcatgtatcatggctggcgaaagcgtgccagcagcccctaagtgaaggcctgggtmcagaggattccagtaagagcaaatccaaaagtaagagtctgagttctcaccgtctccagcgtagaacttcagtgtcatgtacttttgtggtattcttccc

SEQ ID NO: 155603 - DNA, 201 bp, Homo sapiens
actgcaacctccgcctcctgggttcaagcaactctcctgcctcggcctcccaaattgctgagattacaggtgccactacacccagctaacttttgtatttktagtagagccaggctggtcttgaactcctgaccttgtgatccgctcacctccgcctcccaaagtgctgggattacaggcgtgagccaccacgcctggcct

SEQ ID NO: 155604 - DNA, 201 bp, Homo sapiens
tcttgctctgttgtccaggctggagtgcagtggtgtgatcacagctcactaaggccttgaccaggacgtttagatgggagatggctcaagcgatatctttyttttttcccagctagattataaggactttgtggatggtgaacatagtttatacatcttttgaattttccatggattagcttcataagatccattatcaag

SEQ ID NO: 155605 - DNA, 201 bp, Homo sapiens
tggctcacgccagcactttgggaggccgaggtgggcagatcacctgaggtcaggagttcgagaccagcctggccaacacggtgaaactccatctctactamaaatacaaaaattagccgggtgtggtggcacatgctacttgggaggctgaggcatgagaatcacttgagcccaggaggcagaggttgcagtgagccaaga

SEQ ID NO: 155606 - DNA, 201 bp, Homo sapiens
cgccagcactttgggaggccgaggtgggcagatcacctgaggtcaggagttcgagaccagcctggccaacacggtgaaactccatctctactaaaaatacmaaaattagccgggtgtggtggcacatgctacttgggaggctgaggcatgagaatcacttgagcccaggaggcagaggttgcagtgagccaagatcatgcc

SEQ ID NO: 155607 - DNA, 201 bp, Homo sapiens
gggcaggggcgggtttgagcaaaccagtgactcagtgaaagtagttttgtggtaagccataggattgagatctcacccttggcgatgcccaatagaagttwgtctttctgtctttttctttttcttttcctttcagtttatagagatagggtctcactacattgcctaggctggtattgaactcctggactcaagcaatcc

SEQ ID NO: 155608 - DNA, 201 bp, Homo sapiens
ctagcggcgggcgcatgcttagtcaccgtgaggctgcgcttgcccggggcccgcgcccccctaccccggggaccgcccccgggccgcccgccccacttggmgcgccacttccgcgtgcatggccctgctgccccgagccctgagcgccggcgcgggaccgagctggcggcgggcggcgcgcgccttccgaggcttcctgct

SEQ ID NO: 155609 - DNA, 201 bp, Homo sapiens
ctttgatattatgatgtctataccctgataaagctgaacactggacatgctttttttttttttttgagacagggtctcattgtgtcacccaggctggagtkcaggggcatgatcatagctcactgcaaccttgaactcccaagctcaagtgaccctcccacctcagtctccccagtagtcaggaccacaggcacatggcca

SEQ ID NO: 155610 - DNA, 201 bp, Homo sapiens
ctctgggcatcctcctgggtcttgcctagcggcgggcgcatgcttagtcaccgtgaggctgcgcttgcccggggcccgcgcccccctaccccggggaccgmccccgggccgcccgccccacttggcgcgccacttccgcgtgcatggccctgctgccccgagccctgagcgccggcgcgggaccgagctggcggcgggcgg

SEQ ID NO: 155611 - DNA, 201 bp, Homo sapiens
tcagggtgtctatttctttgtaaaacatactttgaaaagtaaccacagagaatgcttttttttttttttgagacagagtctggctgtcacccaggctggartgtagtggtaccatcttggctcactgtaacctctgcctcccgtgttcaagcgattctcctgcccagcctcctgagtagctgggactacaggcgtgtgcca

SEQ ID NO: 155612 - DNA, 201 bp, Homo sapiens
ggaactgggaggcggccccgcctctgggcatcctcctgggtcttgcctagcggcgggcgcatgcttagtcaccgtgaggctgcgcttgcccggggcccgcrcccccctaccccggggaccgcccccgggccgcccgccccacttggcgcgccacttccgcgtgcatggccctgctgccccgagccctgagcgccggcgcgg

SEQ ID NO: 155613 - DNA, 201 bp, Homo sapiens
cacagagaatgcttttttttttttttgagacagagtctggctgtcacccaggctggagtgtagtggtaccatcttggctcactgtaacctctgcctcccgkgttcaagcgattctcctgcccagcctcctgagtagctgggactacaggcgtgtgccactacacccagctaattttttttttgtagagatgaggtttcacc

SEQ ID NO: 155614 - DNA, 201 bp, Homo sapiens
attttttttttgtagagatgaggtttcaccacgttggccaggctggtctcgaactcctgacctcaaccgatccacccacctcggccttccaaagtgctggrattatagaaatgagccaccgtgtctgtccaagaatccaagaactttttttatagagggaaactaaaggaatgatatggaaatactgataccctttggctt

SEQ ID NO: 155615 - DNA, 201 bp, Homo sapiens
gaatgaatgcctgcaagctaagacgacgtagaagcaaaaaaggcagaaacttctaaaaaaacaaaccagagttatagacaccaggcaccagtgaaagcccwccttggcgcttagaagaaacatattccaaaaaaagaatatgttttaaaattaaacatattttttaaaaactttttttaaaaacatatttttaaaattaga

SEQ ID NO: 155616 - DNA, 201 bp, Homo sapiens
aattgctgagattacaggtgccactacacccagctaacttttgtatttttagtagagccaggctggtcttgaactcctgaccttgtgatccgctcacctcmgcctcccaaagtgctgggattacaggcgtgagccaccacgcctggcctgtttttattttatttattgttttttagaaacagggttttgccatgttgccca

SEQ ID NO: 155617 - DNA, 201 bp, Homo sapiens
cagcatcaaactcctgggctcaagccatccttctaccttagtctcccaagtagtaggaactacaggcgtggtccaccacacctggctaatttttaaaaaamatttttgtagacacaaggtctcgctgtattacccaggctaattttgaactgggctcaagcgatccttccacctcagcttcccaaagtgctgggattacag

SEQ ID NO: 155618 - DNA, 201 bp, Homo sapiens
ttatttgtggtgatggggtctcgctgtgttgtccaggctcctctcaaactcctgggctcaaaggatcctccagtcttgacccgtcaaaagtgctaggattacaggtgtgagccacggcacccagtcacactttttaaaaatctggtgatttcctgagactggaaggttcaggttaatgttctgcttagctaagaattgaac

SEQ ID NO: 155619 - DNA, 201 bp, Homo sapiens; identical to SEQ ID NO: 29042

SEQ ID NO: 155620 - DNA, 201 bp, Homo sapiens
tctgcttagctaagaattgaacaaaaacagcctttgttaatatctcttgcaaatgtatccattgattttcttgctttagattctgctttacacagactgcttttttttttttctctttttctcaagcttgatgcctccctgaactaaccttcatctgaaatgaaaaaaaagactttgaaggtggagacatggatattgaat

SEQ ID NO: 155621 - DNA, 201 bp, Homo sapiens
ttggaatatttgcatatatataatgagatattttgcagatgcgacccaagtcgaaacacggaattcatttgttttacatacaccttatacacatagttggwaggtaactttatacgatattttaaatgtgtgcatgaggcatacttttgtctgcgtttttgactgcaacccttcacatgaggtcaggtgtggaattttctg

SEQ ID NO: 155622 - DNA, 201 bp, Homo sapiens
agcctttttggcaccaggaaccagttttgtggaagacaatttttccacggaccagcagtggggtatggtttcaggatgattcaggattcaagtgaatcacatttatttatttatttatttatttatttatttatttttatttttttgagacagaatttcactcttgttgcccaggctggagtgcaatggcatgatctcggc

SEQ ID NO: 155623 - DNA, 201 bp, Homo sapiens
gcctttttggcaccaggaaccagttttgtggaagacaatttttccacggaccagcagtggggtatggtttcaggatgattcaggattcaagtgaatcacatttatttatttatttatttatttatttatttatttttatttttttgagacagaatttcactcttgttgcccaggctggagtgcaatggcatgatctcggct

SEQ ID NO: 155624 - DNA, 201 bp, Homo sapiens
cctttttggcaccaggaaccagttttgtggaagacaatttttccacggaccagcagtggggtatggtttcaggatgattcaggattcaagtgaatcacatttatttatttatttatttatttatttatttatttttatttttttgagacagaatttcactcttgttgcccaggctggagtgcaatggcatgatctcggctc

SEQ ID NO: 155625 - DNA, 201 bp, Homo sapiens
ctttttggcaccaggaaccagttttgtggaagacaatttttccacggaccagcagtggggtatggtttcaggatgattcaggattcaagtgaatcacatttatttatttatttatttatttatttatttatttttatttttttgagacagaatttcactcttgttgcccaggctggagtgcaatggcatgatctcggctca

SEQ ID NO: 155626 - DNA, 201 bp, Homo sapiens
taatgctagcgacggggagcagctataaatacatatgaagcttcgctcacttgcccgccactcacctcctgctgcagcctggttcctaataggcacctggsggtcagggagccctgagctagagaaaggggaaagaaggctgagtgcggtggctcatgcttgtaattccaacttttgggaggctaacgtgagaggactgct

SEQ ID NO: 155627 - DNA, 201 bp, Homo sapiens
gtggtgctatctcggctcactgtagccttgacctcccaagctcaagtgattctcctgcctcagcctccccagtagctgggactacaggcttcactatcacmcctggctaatttttgtattttttctagagacagtgtttcaccttgttgcccaggctcatcttgaactcctggcctcaagcgatccacctgccttggcctc

SEQ ID NO: 155628 - DNA, 201 bp, Homo sapiens
accaccaaacccaactaattttttattttttatttttttacagagatggggtctcagggtctcactgtgttgcccaggctggtccctaactcctgggctcragcaatcatctttcttttcggcctcccaaagcgtggggattacaggcgtgagccaccacacccagcccataaattattctaatttttagtatgaagtact

SEQ ID NO: 155629 - DNA, 201 bp, Homo sapiens
gttaggaggattgcttgagcccaggagtttgagaccagcctgggcaacatagtgagaccctgtctctatatttttagaaaaatattttttatttttttttwaaaagtatatccaggcgtgatggctcacgcctgtaatcccagcactttgggatgccaaggcgagtggatcacttgagctcaggagtttaagaccagcctg

SEQ ID NO: 155630 - DNA, 201 bp, Homo sapiens
gtgtctctttaatagaaataagagatgagaagctgatgggtaggttgtggtttgaaaaatgtggagtttctggacacacagtgaactatgggggcaggggygggtttgagcaaaccagtgactcagtgaaagtagttttgtggtaagccataggattgagatctcacccttggcgatgcccaatagaagtttgtctttctg

SEQ ID NO: 155631 - DNA, 201 bp, Homo sapiens
acagtgaactatgggggcaggggcgggtttgagcaaaccagtgactcagtgaaagtagttttgtggtaagccataggattgagatctcacccttggcgatrcccaatagaagtttgtctttctgtctttttctttttcttttcctttcagtttatagagatagggtctcactacattgcctaggctggtattgaactcctg

SEQ ID NO: 155632 - DNA, 201 bp, Homo sapiens
gctggtattgaactcctggactcaagcaatcctcctgctttggtctccgaaagtgttaggattacaggcgtgagccactgtgcacggcagaagtttaagaytggttctcccatgagttctttcctaaataaaatccattaatttctaacgcttggggaagttttaaagttgtggtgaatgaactcacacggaaggttcaaa

SEQ ID NO: 155633 - DNA, 201 bp, Homo sapiens
tacatggttccattattcttgtaagttgaccacatttgcatgcccctgcatgtatcatggctggcgaaagcgtgccagcagcccctaagtgaaggcctggktacagaggattccagtaagagcaaatccaaaagtaagagtctgagttctcaccgtctccagcgtagaacttcagtgtcatgtacttttgtggtattcttc

SEQ ID NO: 155634 - DNA, 201 bp, Homo sapiens
ttaagattggttctcccatgagttctttcctaaataaaatccattaatttctaacgcttggggaagttttaaagttgtggtgaatgaactcacacggaagkttcaaattagaatgtgtgtctagcagtggtcatttacaggtagtgagattggttggtttttcattgttttatcagtgttccttcatttaattgttcaacc

SEQ ID NO: 155635 - DNA, 201 bp, Homo sapiens
aaatatttaaaggcctgcagtccttaagcacaggagattttaaggctgagtatagagtaacactggcagtactaaaacacaccaagttttttatttttatkttttatttttttgaagtcaggatctcactctcttgagcagactggagggcactgtcgtgatcacagctcactgcagccttaacctcccaggctcaagcaa

SEQ ID NO: 155636 - DNA, 201 bp, Homo sapiens
ctcgtgtagactggagagaaatgcaaagatcgcccaaagtcaaggtgaattagagccttctgggagctttgcctctgtggttcgcttctctgcctacacaygtgatgggagagtcagcttaaggaaaagttgtttctaaattgctgctccctttgccccagggcctggggaacttgcggtcctgggttcctgctgagtgta

SEQ ID NO: 155637 - DNA, 201 bp, Homo sapiens
aatccagggggaaaaatatttaaaggcctgcagtccttaagcacaggagattttaaggctgagtatagagtaacactggcagtactaaaacacaccaagtwttttatttttattttttatttttttgaagtcaggatctcactctcttgagcagactggagggcactgtcgtgatcacagctcactgcagccttaacctcc

SEQ ID NO: 155638 - DNA, 201 bp, Homo sapiens
gaaaagttgtttctaaattgctgctccctttgccccagggcctggggaacttgcggtcctgggttcctgctgagtgtactgattctgtgataagaataacyaggttcttgtggttttggcgagtagtacttaccaatgagagttgggtagtaagggttgatcatgtgacaaaagttcatgattgccaagtcacagtgaact

SEQ ID NO: 155639 - DNA, 201 bp, Homo sapiens
tgtttctaaattgctgctccctttgccccagggcctggggaacttgcggtcctgggttcctgctgagtgtactgattctgtgataagaataactaggttcytgtggttttggcgagtagtacttaccaatgagagttgggtagtaagggttgatcatgtgacaaaagttcatgattgccaagtcacagtgaactatgctgc

SEQ ID NO: 155640 - DNA, 201 bp, Homo sapiens
tgctgggattacagacgtgagctgccgtgcccagctaggtttgtttttaatttaaagggcagtatttttatctgctgttacctagttaccattcattcatsattccttttttccctcaggactgatttactgctgttttggatccttttttttttttttttttacaggtaatgtggaacacagctgtccactctgaattca

SEQ ID NO: 155641 - DNA, 201 bp, Homo sapiens
agacagggtctcattgtgtcacccaggctggagttcaggggcatgatcatagctcactgcaaccttgaactcccaagctcaagtgaccctcccacctcagyctccccagtagtcaggaccacaggcacatggccaccaccaagccctggctgattttttaaatttttagtagagacaaggtcttgctttgttgcccaggct

SEQ ID NO: 155642 - DNA, 201 bp, Homo sapiens
ggacaggagttggtgaagtcatatgtattgcagatggtggtggtgatgtaggaaaatagggaatttattaatactccactcccaatatggccataagtaargaggaaataattaggggagagataatgctgaagtttccctcccaagtttgtggtgtgtctttgctcaagttttcttcctctcgcattacccatccctatg

SEQ ID NO: 155643 - DNA, 201 bp, Homo sapiens
ttagaagtgattcctgctttcagaaggaggtggattcaaatacatcaaaagtcccttcctctgctaagtgtttatagttcaatgaataatttcaatatttktatgtgttcttgtcattttatttttttctgaaaaacttccaaaaatttgaaaataaaattacagccttttcttcttataaaatttgttactgtgagcttt

SEQ ID NO: 155644 - DNA, 201 bp, Homo sapiens; identical to SEQ ID NO: 29023

SEQ ID NO: 155645 - DNA, 201 bp, Homo sapiens
cctggcctcaagtgatccttccacctcggcctcccaaagtgctcggattataaacatgagcctccatgcccagccggcctgccacctctaacctagtttcstattggcctccctcttacagacttcgtttttgctatgtgaatgtctctttcaagtcctatgctgatcttttagcatctgtagtaggtaatccagattgct

SEQ ID NO: 155646 - DNA, 201 bp, Homo sapiens
ggttggcagctttccaagcagagactttaacaaaacttgtcaaaacggagactatgttggctgtgaaagtgtttggtttttggcataaaatgttgtgattrctttgcaagagaaagagcagtcttgtgtgatctatgttgcctttttctacataggtgccagcttaggaataaccagcgatggattttttcagctggaaga

SEQ ID NO: 155647 - DNA, 201 bp, Homo sapiens
ctataattccaaaggttcttaggtgcttgagatggacctggataccttcaagagcttctctggggaccaggtactgtttttgcctaaccggctgggccccrggcttaacttctataagtacgggggcttcgttgactgccaaccctggaggttgtcttccgcccacactcttggccaccgcttagccagagctggtcttat

SEQ ID NO: 155648 - DNA, 201 bp, Homo sapiens
tcctggcctcaagtgatccttccacctcggcctcccaaagtgctcggattataaacatgagcctccatgcccagccggcctgccacctctaacctagtttsctattggcctccctcttacagacttcgtttttgctatgtgaatgtctctttcaagtcctatgctgatcttttagcatctgtagtaggtaatccagattgc

SEQ ID NO: 155649 - DNA, 201 bp, Homo sapiens
ttttgtttgatttgtgttttttaaatttttttatttatttttaattactttttatttttattattattgtttttttgagacggagtttcgttcttgtcacscaggctagagtacagtggcgcgatcttggctcaccgcaacctctgcctcctgggttcaagtgattctcttgcctcagcctcccaagtagctgggatgaca

SEQ ID NO: 155650 - DNA, 201 bp, Homo sapiens
tttgtttgatttgtgttttttaaatttttttatttatttttaattactttttatttttattattattgtttttttgagacggagtttcgttcttgtcaccsaggctagagtacagtggcgcgatcttggctcaccgcaacctctgcctcctgggttcaagtgattctcttgcctcagcctcccaagtagctgggatgacag

SEQ ID NO: 155651 - DNA, 201 bp, Homo sapiens
aatactgcacagtaaactgattttgtaatgttttagtctcatatttacttattccttctgatcacatgcggtagacatttatgtatgttcatttatatatwtttttttcttttttttcttttctttttttttttttttttttttttttttgagacagagtctcactcttgcccaggccggaatgcagtggtgtgatttcag

SEQ ID NO: 155652 - DNA, 201 bp, Homo sapiens
gtttcaccatgttggccaggctggtctcgaactcctgacctcaggtgatctgcccaccttgtcctctcaaagtgctgagattacaggcatgagccactgcrcccggccctattttatttttaacgaccaggtctctatctgtcgccaggctggagtacggtggtgcaatgatagctcactgtagcctccaagtcctgggct

SEQ ID NO: 155653 - DNA, 201 bp, Homo sapiens
cttagtaactaggactgtaggcatgcaccaccacacctggctaatttttaaaatattttgtagagatttctcactgtgttgcctaggctggtctttaaacycctgccttagcctcccaaagtgttgggattatagagatgagccactgtgcctggcctcttactttttctattattgaaattgacctgtcagagcagaagc

SEQ ID NO: 155654 - DNA, 201 bp, Homo sapiens
acaggggtgaacaaccactcctggccctcttaggttatatttagatcagtaacttttttttttttttttgaaaagggtcttactctgtcacccaggctgargtgcagtggcatgatctcagctcactacagcctcgacctcccaggctcaagtgatcctcctgctttggccttccaacatgctgggattacaggcatcagc

SEQ ID NO: 155655 - DNA, 201 bp, Homo sapiens
agcagtcaggagtttactgttgctttcaacctgaaaagccatgccaggggatctgcctaaaccagttctctctttggagccaggccatgggagaaggtctytgcagaacctaactccagttggcttagtggtagctagtgatgcagtcgcccaggctggagtgcagtggcacgatcttggctcactgctacctccgcctcc

SEQ ID NO: 155656 - DNA, 201 bp, Homo sapiens
cgcctcctgggttcaagtgattctcctgcctcagcctcccaagtagctgggactacaggcatgccaccaccacacttggctagttttggtatttttagtaragatggggtttcatcatattggccaggctggtcttgaactcttgacctcaggtgatccacccaccttggcctcccaaagtgctgggattgcaggccaccg

SEQ ID NO: 155657 - DNA, 201 bp, Homo sapiens
ctcagcctcccgagtagctgggactacaaacgtgcaccaccatacctggttaactttttaatttaaatttttgtagagatggggtctcgttctgttgtccrggctggtctagaattcctggcctcaagcaatcctcccaccttggcctctcaaagcagtaggaatacaagcatgggccaccgtgctgaatggatttagatt

SEQ ID NO: 155658 - DNA, 201 bp, Homo sapiens
cctaagggcaagcgattctcctgcctcagcctcccgagtagctgggattacaggcacacaccactgcacctggctaactttttgtatttttagtagagacrgggttcaccatgttggccagattggtctcgaactcctgaccaggtgatccacccacctcagcctcccaaagtgctaggattatgggcatgagccaccgtg

SEQ ID NO: 155659 - DNA, 201 bp, Homo sapiens
tgtgctcgttcctatggcgatcctgtcccccggcgctgggctttcctcttttccacccccgcaactccccattccgaagccaggaacccagcaggtggagragagagaggcgtccgggggcttctctgcggcccgcaaagccgagccagcgtctgcttccgcacggatgcgatattgaccagggccggggcgggttagatt

SEQ ID NO: 155660 - DNA, 201 bp, Homo sapiens
catgatcatagctcactgcaaccttgaactcccaagctcaagtgaccctcccacctcagtctccccagtagtcaggaccacaggcacatggccaccaccawgccctggctgattttttaaatttttagtagagacaaggtcttgctttgttgcccaggctggtctcgaactgctggtctcgaactcctgagctcaagcagt

SEQ ID NO: 155661 - DNA, 201 bp, Homo sapiens
ttatgtcaaattgggagctctttaaggacagggatgggcttctgtgtttgtgtgtctcttatcaccttaaaatcccttgctcaataagcacttgtgcaatraatgaaactaaaaatggacagttatgaaaaggttgacttcattgttcagtgccttggagatgaacatggagatgaagagaaaggaaaaatctctgttaat

SEQ ID NO: 155662 - DNA, 201 bp, Homo sapiens
tttggcatttgtaagtggcttccagtcagtgagaattcattaccttctattcactaggtgttgcaacattaaatattactgcagttacttttgcaccagcytaataggatgtggaggtcctaggtccttttctttttgggggacgggagatggtgggtatcaggtaatagtggggactgacatccagaagagttgtctcac

SEQ ID NO: 155663 - DNA, 201 bp, Homo sapiens
gcggggggcgcctctttgtctcggtctttcgggggacagcctgtgctcgttcctatggcgatcctgtcccccggcgctgggctttcctcttttccaccccygcaactccccattccgaagccaggaacccagcaggtggaggagagagaggcgtccgggggcttctctgcggcccgcaaagccgagccagcgtctgcttcc

SEQ ID NO: 155664 - DNA, 201 bp, Homo sapiens
ctgcttagctaagaattgaacaaaaacagcctttgttaatatctcttgcaaatgtatccattgattttcttgctttagattctgctttacacagactgcttttttttttttctctttttctcaagcttgatgcctccctgaactaaccttcatctgaaatgaaaaaaaagactttgaaggtggagacatggatattgaata

SEQ ID NO: 155665 - DNA, 201 bp, Homo sapiens
ctcgctatgttgcccttgctgatttcaacctcttggactcaaccgatcttcccgcctcagcctcccaaagtgctgggattacaagcctgagccactgcacycattctaaaaataaatgttgtttccaagttattggtgtgcccgcccttttctatcacaagatttgggtgttgacgattaaaatgctgtatccaagaggaa

SEQ ID NO: 155666 - DNA, 201 bp, Homo sapiens
ctgtagtgcagtggcacgatcatggctcactgcagcctcaatatcctgggttcaggtgatcctcctgcctcagcttcccaactggctgagactacaggctrttatttgtggtgatggggtctcgctgtgttgtccaggctcctctcaaactcctgggctcaaaggatcctccagtcttgacccgtcaaaagtgctaggatt

SEQ ID NO: 155667 - DNA, 201 bp, Homo sapiens
acagcctttgttaatatctcttgcaaatgtatccattgattttcttgctttagattctgctttacacagactgcttttttttttttctctttttctcaagyttgatgcctccctgaactaaccttcatctgaaatgaaaaaaaagactttgaaggtggagacatggatattgaatagtgaatatgtgccagggacagggcc

SEQ ID NO: 155668 - DNA, 201 bp, Homo sapiens
aatcctgacccactatattgactttaggattcattaataagttgttacctgcagtttgaaaaatacttcttatgaggcaatttaaatatgcatttatagtytgaaattgcattatttagctgagaaaatatttgcaagttttctgactccttctcttttcttttcttccatagatatgtgcattactgaagtgtcaaacca

SEQ ID NO: 155669 - DNA, 201 bp, Homo sapiens; identical to SEQ ID NO: 29096

SEQ ID NO: 155670 - DNA, 201 bp, Homo sapiens
tgtcctcttttgagaagtgtctgttcatgtcttttgcccacttttcaatggggttatttgttttgtttttgcttattgatttaagttccttatggattctrgatagtagacctttgttagatgcctagtttgcaaatattttctcccattctgtaggttgtctatttactctgttgatagttgcttttgctgtacagagct

SEQ ID NO: 155671 - DNA, 201 bp, Homo sapiens
tagttaaattaggtcctacatgtcaagttttgtttttgttgcaattgcttttgaggacttagtcataaattattttccaaggttcatgtccagaatggtgyttcttagattttcttctaggattcttatagtttgaggtcatacatttaaatctttaatacatcttgagttaatttttgtacatggtgaaagataggggtc

SEQ ID NO: 155672 - DNA, 201 bp, Homo sapiens
atttaaatatgcatttatagtttgaaattgcattatttagctgagaaaatatttgcaagttttctgactccttctcttttcttttcttccatagatatgtrcattactgaagtgtcaaaccactgacctggaaacgtgtggagaacctgtggggtcagcttttaccaagtttgaagacttctccctcagtggcacatttgg

SEQ ID NO: 155673 - DNA, 201 bp, Homo sapiens
gattcggcaacacaccagtgcaacaaagactcagctgcctggccaaggacaactctatctatgtcgtggctaatattggggacaagaagccatgcaatgcyagtgactctcagtgtccccctgatggccgttaccaatacaacactgatgtggtgtttgattctcagggaaaactgttggcacgctaccataaggtgagca

SEQ ID NO: 155674 - DNA, 201 bp, Homo sapiens
atgcactctccaatgctagctgtcactattccttttttttttttgttaacagaagggactgagtctgaacttctttgtgttcttgtcctttgagagacttyagtaattattagtagatgtaatttaggcataactttcttaaagaaaatatgcataataaatatgatatctgtgaaatagattattttagttgtattaact

SEQ ID NO: 155675 - DNA, 201 bp, Homo sapiens
aattattttaagttgggaaagtaggtgactgatgaaatgtcaacattatgaactcttacacctacttattcaaatgacaacgtttcagttttgtgttacaraaaggagaaatccagtatttaatataatgataatattggaaaagaaagtcagttttctccctggtgatatttatccctgaagagaatagtagagaggcat

SEQ ID NO: 155676 - DNA, 201 bp, Homo sapiens
tagtcataaattattttccaaggttcatgtccagaatggtgcttcttagattttcttctaggattcttatagtttgaggtcatacatttaaatctttaatmcatcttgagttaatttttgtacatggtgaaagataggggtccagtttcaatcttctgcatatggctagccagatattccagcaccttttgttgaataagg

SEQ ID NO: 155677 - DNA, 201 bp, Homo sapiens
taggccgggtgtggtggctcacgcctgtaatcccggaactttaggaggtggaggtgggcaaatcacctgaggtcaggagttcgagaccagcctggccaacrtggtgaaaccccatctctactaaaaaatacaaacattagctgggtgtggttgtgcatgcctataatcccagctactcgggagactgaggcaggagaacta

SEQ ID NO: 155678 - DNA, 201 bp, Homo sapiens
aacagaaacacctgtttcaaaagaagaagctttgctcctgatgaacaagaacatagatgttttggagaaagcagttaagctggcagcgaagcaggtattasccttttatacttgtaaaggagacttgcagtttggtcaaagagtatttggaattcatgacaaacttttttgccccacttgtttcgagcagggtgcacatat

SEQ ID NO: 155679 - DNA, 201 bp, Homo sapiens
ctgtagccttgggtaatgtgatgcctcaggctttgttctttttgtttaggattggtttggcgattcaggctcttttttggttccatatgaattttagaaatttgtttataaatctgtgaaaaaatgacattggtagtttgttagaaatagtgttgaggctgggtgctgtgggtcatgcctataatcccagcactttgggag

SEQ ID NO: 155680 - DNA, 201 bp, Homo sapiens
tatgattgcaccactgcactccagcctgggtgacagtaagaccttgtcttaaaaaaatagtaggtataggccgggtgtggtggctcacgcctgtaatcccrgaactttaggaggtggaggtgggcaaatcacctgaggtcaggagttcgagaccagcctggccaacgtggtgaaaccccatctctactaaaaaatacaaac

SEQ ID NO: 155681 - DNA, 201 bp, Homo sapiens
atttatccctgaagagaatagtagagaggcatgcggtcatccttgtgcatttaaatatttagaatgctgacatgtcaaacagttccatgggcttttttcaygagtaactagtaggaaatattaaataactcaaattatttagtcaagaaaagaaaaattaaacaaagtacatgataaagttattaaaggtcttaatgaata

SEQ ID NO: 155682 - DNA, 201 bp, Homo sapiens
gctggttgctaaacattttttgtcttattttctgctgaaatctgcctcactttaacttcctttcgtctttttcctgcattctatgctatgttcacacatawgacccatctcctataaattaagcctttcaaatatttgaagccagctatcaccatgctacattctcttcttataccaaggataaatatctttaatatggat

SEQ ID NO: 155683 - DNA, 201 bp, Homo sapiens
tttagcaatagcaataacgtggaatcaacccaggtgctcatcaacggtgaagtggataaagaaaatgtgatacatatacaccatagaatactacatagccwtaacaaagaatgaaataatgtcctttgcaacaagatggatgcaactggaggtcattatcctcagcgaatgaacacaggaacagaaaatcaaatacctcgt

SEQ ID NO: 155684 - DNA, 201 bp, Homo sapiens
atcctttctcaatgctgtgttgtgtaatatatgtgcaagaaaatataaacagctgattgccaggagggatttaatgtaaagtttttccagtgaaacaaaaygtaagaatctgagtttgtttttcaaagatcactaaattttagttatgattatatcacattttccaaaatgtgtggcagtttttgccctccttgctctgag

SEQ ID NO: 155685 - DNA, 201 bp, Homo sapiens
atttagccaggtgtggtggctcacacctataatcccagctactcgagaggctgaagcaggaggatcactggggcccaggagtttgaggctgcagtgagctwtgattgcaccactgcactccagcctgggtgacagtaagaccttgtcttaaaaaaatagtaggtataggccgggtgtggtggctcacgcctgtaatcccgg

SEQ ID NO: 155686 - DNA, 201 bp, Homo sapiens
agtatttggaattcatgacaaacttttttgccccacttgtttcgagcagggtgcacatatcattgtgaccccagaagatggaatctatggttggatcttcrccagggagagcatttacccctatctagaggatataccagaccctggagtgaactggattccatgtagagacccctggaggtaatatcatatcattaattt

SEQ ID NO: 155687 - DNA, 201 bp, Homo sapiens
tggccatgagttcccaatgcttagctcccacttataagtgagaacatgcagtatttggttttctgttcctgtgttaacttgctgaggataatgtcctttgktgctgcaaaagacatgattttgttccttcttgtgggcacctaggttaattccatatctttgctgttgtgaaaagtgctgcgatgaacatacaagtgcacg

SEQ ID NO: 155688 - DNA, 201 bp, Homo sapiens
ttttcagcccttgccttcctctctctctctctctcccctctattagttcccagtgtctattgctgtcatctttatggccatgagttcccaatgcttagctyccacttataagtgagaacatgcagtatttggttttctgttcctgtgttaacttgctgaggataatgtcctttggtgctgcaaaagacatgattttgttcc

SEQ ID NO: 155689 - DNA, 201 bp, Homo sapiens
gtgatttggtaaaacaccaacagtaaactcactgaatttgactggtaattgtgttgataaatagtcaatctgtggcataggatgtagatgcttttttttcsctgtaatttcaacttttagtttagattgagggagtacatgtgcaggtttgttacatgggcaaattgcatgacgctgaggattggggtacaatgattgcac

SEQ ID NO: 155690 - DNA, 201 bp, Homo sapiens
gtttgttacatgggcaaattgcatgacgctgaggattggggtacaatgattgcaccacccagcatagtatacaacaggaaggttttcagcccttgccttcctctctctctctctctcccctctattagttcccagtgtctattgctgtcatctttatggccatgagttcccaatgcttagctcccacttataagtgagaac

SEQ ID NO: 155691 - DNA, 201 bp, Homo sapiens
tttgttacatgggcaaattgcatgacgctgaggattggggtacaatgattgcaccacccagcatagtatacaacaggaaggttttcagcccttgccttcctctctctctctctctcccctctattagttcccagtgtctattgctgtcatctttatggccatgagttcccaatgcttagctcccacttataagtgagaaca

SEQ ID NO: 155692 - DNA, 201 bp, Homo sapiens
gagtttaccttcaccaagcttaagagaaatacaggaaattacacagcttgccagaaagatctgtgttgtcacttaacttacaagatgtctgagaagcgaayagacgagatctatgccctaggtgcttttgatggactgcacacagtagaaggccaatattacttacaggtagaaatgctttaatatgttaaagtggcctta

SEQ ID NO: 155693 - DNA, 201 bp, Homo sapiens; identical to SEQ ID NO: 29095

SEQ ID NO: 155694 - DNA, 201 bp, Homo sapiens
aatagctattattatgtgcaatgcactctgatttttaaaatcctagtctattctatttgacttcagtataaaaagtgttaatcctgacccactatattgaytttaggattcattaataagttgttacctgcagtttgaaaaatacttcttatgaggcaatttaaatatgcatttatagtttgaaattgcattatttagctg

SEQ ID NO: 155695 - DNA, 201 bp, Homo sapiens; identical to SEQ ID NO: 29099

SEQ ID NO: 155696 - DNA, 201 bp, Homo sapiens
ggattacaggcgtaagccaccacacctggcctatgtgtaacacttttaaacctgcatgtcaacatacatgagaggaaagatttaacggggaaagacttaaytgatcacatctatttggcagttttcttattaattttcttcttctttgctttttattaacagtacaatctttttgcacctgaaattcagtttgatttcccc

SEQ ID NO: 155697 - DNA, 201 bp, Homo sapiens
ggaaagccgggtattgtccaaggtttctccccactgagagagcttgagatatggcctcttgggatgggaaagacctgaccgtcccccagcccgacacccgmgaagggtctgtgctgaggaagattagtaaaagaggaagacctcttgcagttgagataagaggaaggcctctgtctcctgcatgcccctgggaatggaatg

SEQ ID NO: 155698 - DNA, 201 bp, Homo sapiens
ttcattcattggttgtaaaaaaaataaagtttttttattaatgtcacagtaagaaaatgtatagatggtggtatagtggggatgatttttacaaatgtatrtgtaacagttttattttgttgttgttgttgattttggaaatggaatcttgctctgttgcccaggctggagtgcagtggcgcgatctcggctcactgcaac

SEQ ID NO: 155699 - DNA, 201 bp, Homo sapiens
ctcagtgtccccctgatggccgttaccaatacaacactgatgtggtgtttgattctcagggaaaactgttggcacgctaccataaggtgagcatcacttgwgccttagctcaacttgttacttcttctgtgtgcttgtggtatgtatgtgtgtttgtttgttgaatgttggggagagaactgttatagatgcatcttataa

SEQ ID NO: 155700 - DNA, 201 bp, Homo sapiens
gatgcttttttttcgctgtaatttcaacttttagtttagattgagggagtacatgtgcaggtttgttacatgggcaaattgcatgacgctgaggattgggktacaatgattgcaccacccagcatagtatacaacaggaaggttttcagcccttgccttcctctctctctctctctcccctctattagttcccagtgtcta

SEQ ID NO: 155701 - DNA, 201 bp, Homo sapiens
cagtaaactcactgaatttgactggtaattgtgttgataaatagtcaatctgtggcataggatgtagatgcttttttttcgctgtaatttcaacttttagyttagattgagggagtacatgtgcaggtttgttacatgggcaaattgcatgacgctgaggattggggtacaatgattgcaccacccagcatagtatacaac

SEQ ID NO: 155702 - DNA, 201 bp, Homo sapiens
  misc_feature (1)...(201): n = A,T,C or G
cagaaacacctgtttcaaaagaagaagctttgctcctgatgaacaagaacatagatgttttggagaaagcagttaagctggcagcgaagcaggtattaccnttttatacttgtaaaggagacttgcagtttggtcaaagagtatttggaattcatgacaaacttttttgccccacttgtttcgagcagggtgcacatatca

SEQ ID NO: 155703 - DNA, 201 bp, Homo sapiens
tctgtttcattatctgtaaaacagggataatagagtcccttaattctcttacagatcagacaagagtaatgaagtaatacacatggaatttgtacattgtratgcactctccaatgctagctgtcactattccttttttttttttgttaacagaagggactgagtctgaacttctttgtgttcttgtcctttgagagactt

SEQ ID NO: 155704 - DNA, 201 bp, Homo sapiens
ccagaacaggaaggaatcattatttgctgcagttgatgaggcttacacgaaaatgtactgtatttgactgggctaatgaaactgacttttccagggaaaakatatccataaatttgataattagctatcgataaattattttaagttgggaaagtaggtgactgatgaaatgtcaacattatgaactcttacacctactta

SEQ ID NO: 155705 - DNA, 201 bp, Homo sapiens; identical to SEQ ID NO: 29093

SEQ ID NO: 155706 - DNA, 201 bp, Homo sapiens
cccaaatacaagtaagttggttcatccatggacacctgcctccttcacaggaagagtaaaaagatgaatgagcctgtttccaaagagctttgctatcactrtcattcagaatgcaatcaatatggccaatggaaattgtataggacttgaaaaaggaagccctacttctgggaccacattttacgaccacctagctgagtg

SEQ ID NO: 155707 - DNA, 201 bp, Homo sapiens
tgataattagctatcgataaattattttaagttgggaaagtaggtgactgatgaaatgtcaacattatgaactcttacacctacttattcaaatgacaacstttcagttttgtgttacagaaaggagaaatccagtatttaatataatgataatattggaaaagaaagtcagttttctccctggtgatatttatccctgaa

SEQ ID NO: 155708 - DNA, 201 bp, Homo sapiens
cacgccttatacacctaggaagcaaagacattactaacaacattgggtaatcaaatatttaactcaagtttctattgatttcaacacacaaaaaaagctgktacatttcctggaactaggggctgggagaatgaaggggaattcccatatgtttccttttgattctattcagaaagtcaggtgaaccaagaaaagagttag

SEQ ID NO: 155709 - DNA, 201 bp, Homo sapiens
ttgttacatgggcaaattgcatgacgctgaggattggggtacaatgattgcaccacccagcatagtatacaacaggaaggttttcagcccttgccttcctctctctctctctctcccctctattagttcccagtgtctattgctgtcatctttatggccatgagttcccaatgcttagctcccacttataagtgagaacat

SEQ ID NO: 155710 - DNA, 201 bp, Homo sapiens
tgttacatgggcaaattgcatgacgctgaggattggggtacaatgattgcaccacccagcatagtatacaacaggaaggttttcagcccttgccttcctctctctctctctctcccctctattagttcccagtgtctattgctgtcatctttatggccatgagttcccaatgcttagctcccacttataagtgagaacatg

SEQ ID NO: 155711 - DNA, 201 bp, Homo sapiens
ggtgtggtggtgtgtgcctgtaatcccagctactcgggaggctaaggcatgagaattgcttgaacgatagagtgagactctgtctcaaaaaaaaaaaaaamaaaaaaagaagaaaagaaatagtgttgaatctgcagatactgcttatgtttcatagtgtatatcatctggcatatctcctgtttggtaaatgacttgaga

SEQ ID NO: 155712 - DNA, 201 bp, Homo sapiens; identical to SEQ ID NO: 29100

SEQ ID NO: 155713 - DNA, 201 bp, Homo sapiens
gttaattgcagcagttttagcaatagcaataacgtggaatcaacccaggtgctcatcaacggtgaagtggataaagaaaatgtgatacatatacaccataraatactacatagccataacaaagaatgaaataatgtcctttgcaacaagatggatgcaactggaggtcattatcctcagcgaatgaacacaggaacagaa

SEQ ID NO: 155714 - DNA, 201 bp, Homo sapiens
ccctgcgcccccgcgccacatgccagcactgtcatcgcagacttggctgcccaaccccgtcgtctacctgatgaaggccttcgacctcctagtggaccgaycggcgaccctcgtgagagtttatagagtggcagcacgcaaagaacaggtattactactaccaccggcagtactgccgcgtgctgggcatcactgagcgca

SEQ ID NO: 155715 - DNA, 201 bp, Homo sapiens
atacatttacctcaatgacgttcccagactaaataaaacattaagtttatttgctttgggctggagtcatatcaactcagtgtggcaactatggttatctygactgatcagaagccctaattggccgttggatgtctttgataaataaaactcaaagaaataaattattattcaataaattgtagtttgttaggtagttaa

SEQ ID NO: 155716 - DNA, 201 bp, Homo sapiens
aaacaagatacgttaaaataaataagcactttggagcccacatcaagtaaacaactctttttaattaagaaagaaatttaaagcatgaaagaaaagaaaasgggcttaaaggcaatttctcttagtgtgaggtattttcaggaaagaattggggcaaccaaggattattattttcttaagcttttgattgaaatctcagac

SEQ ID NO: 155717 - DNA, 201 bp, Homo sapiens
caccgcctatcccaaaacctgtaagaactaatgataatccaccaccctttgctggctttcttttaggactcagccccctgcgcccaggtgaaataaacagscttgttgctcacacaaagcctgcttggtggtctcacgtgtcttcacatggacacgtgaaacactgtgcatatatgaagccgaaatgcagtggaggaggga

SEQ ID NO: 155718 - DNA, 201 bp, Homo sapiens
actctttttaattaagaaagaaatttaaagcatgaaagaaaagaaaaggggcttaaaggcaatttctcttagtgtgaggtattttcaggaaagaattgggscaaccaaggattattattttcttaagcttttgattgaaatctcagactttcatcccttcttcagttagaaaatcaagagaccaggcactcaacctccaac

SEQ ID NO: 155719 - DNA, 201 bp, Homo sapiens
ttcatgtgaatagtcctggaggtgatgagtagataagtaagtaagtagcgtctccatctgacagataagcaaactgcggcgcaggaagcgagggaaagacrtcatttacgcctgacaactggctgatggacagaactcttactttcccgtctttgtaatgcagggcaataaatatctagtctagaaacaactttaagatga

SEQ ID NO: 155720 - DNA, 201 bp, Homo sapiens; identical to SEQ ID NO: 29108

SEQ ID NO: 155721 - DNA, 201 bp, Homo sapiens
tttcacctagtaggtgatttttaaaaaatagtgtatagaaatgaatagtttcaaactgagtaaatatagtataccatgtcataaaacaaccaaatcaaaarcaactgccatgctaacaataagtcaaagaaatagtaattctggcttgtacagatacgtgcagtgttttcaaagctcttaacagttaatcgctaatacgta

SEQ ID NO: 155722 - DNA, 201 bp, Homo sapiens
aatcctccgtctacacagaattatttatctcatggcctgcaaactccatgcagctttggtccctgacacctccctgtctatccctaagaggagcagagacrtgaagtggcacttccagaaacatctggaaactcccaggagggctgacctagcccacgaggtctccccacagagagctgtggggagggctgccctcttaat

SEQ ID NO: 155723 - DNA, 201 bp, Homo sapiens
tcgttaaaatttctgtatatctgtgagtttatagttttcatcaaactgggaaacattttgaccattattttttcaaatcttttttttttgctttctacttycgccttctgtttacagatatgttaggtcatttgtcattatcccatgggtcactgggactcttttatttccagcatttttttcctttgtgcttccggctag

SEQ ID NO: 155724 - DNA, 201 bp, Homo sapiens
ctaactagttagtttggttagagtcattgttcaggacctgagtataaattaggtgaatgcttattgcagcaccattcaagtttccttgagaagtcacttargcctgtggcagagaaagtaggatctaaggcttgatgactgtaagtttgatctgctatttaaccctcatggatactagccagagcttgggctatcgataac

SEQ ID NO: 155725 - DNA, 201 bp, Homo sapiens
ctagatcttggataaatatgtgtatgaacatgaatatgtgtttgtgtgtatatgtgtgtgcataattaaattttattttccagtgatttgttgatagtgtrttgattatatattgatcttgtatcctgggactttgtgctaaatttgtacttctagcaatttttgtagattttttaaggaatttctacatagacaataatg

SEQ ID NO: 155726 - DNA, 201 bp, Homo sapiens
aaggatgagttcatgtcctttacagggacctggatgaagctggaaaccatcattctcagcaaactaacacaaacagaaaaccaaacaccatatgttctcaytcataagtgggagttgaacaatgaggatgcatggacacagggaggggaacatcacacaccggggcctgtcgggctaggggagggataacattaggagaaa

SEQ ID NO: 155727 - DNA, 201 bp, Homo sapiens
gtcccagctactcaggctgagttgggaggattgcttgaactcagaatttcaaggatgcagtgagccataatcatactactacagttcaaccttggcaagasagtgagaccctgtcttaaaatctgtgtacatatgcatatttttttaaaagtcagtcattgtagtcggggagacagctattaaacaagcacaatgtgagag

SEQ ID NO: 155728 - DNA, 201 bp, Homo sapiens
cagtgtctttctgtcattatgcatctagatcttggataaatatgtgtatgaacatgaatatgtgtttgtgtgtatatgtgtgtgcataattaaattttatkttccagtgatttgttgatagtgtattgattatatattgatcttgtatcctgggactttgtgctaaatttgtacttctagcaatttttgtagattttttaa

SEQ ID NO: 155729 - DNA, 201 bp, Homo sapiens
gatgcctggtacctattaaggaactcactcatgatttcttgctgtggcctagagtggtggccactccttcaaactgagtttgccagaatggaattctggtrtagggagaaatttctttgcagaaaaatgttacgtagtttcctttgtttttcagtagttgtgcaaagaccaactactgccagtagtctgcaaaggacaaca

SEQ ID NO: 155730 - DNA, 201 bp, Homo sapiens
attctagcactttgggagatcaagaccagaagatcgtgtgagcccaggagttcaaaaccagcctgggcaagatggcaagccccagtctttgcaaaaaaaaataaaaaataaattagccaggcttggtagtgtgcacctgtagccccagttattcaaggggctgaatggcgggattgcttgggccaaggagttgaaggatgc

SEQ ID NO: 155731 - DNA, 201 bp, Homo sapiens
gaggcttggtgtgcacattctgagaccagtcctggctctgccactcagtgggtgcctgtttgcaagtcatttcttgacctctgtgagtcttgtcttgtctttttttccaattataaaatagaataataattcctgcctcccagttttgtcatgaagattaaataaaataatgtttgtgaaaacaagtagacagaataggtg

SEQ ID NO: 155732 - DNA, 201 bp, Homo sapiens
ctcattgttgaattatgaaaattgttagtatattctggataaaagtcctttgtgctttgcaaataatttctcccagtgtctcttaaagtttttaattttgwtgtccagtttattaacattttcttttatagatcaggcttttggtatggtatctaagaaatctttgcctaacataagatcacaaagactttctcatatgct

SEQ ID NO: 155733 - DNA, 201 bp, Homo sapiens
atggtatctaagaaatctttgcctaacataagatcacaaagactttctcatatgctttttttctagaaattttatagttttgtgttttacatttaggcctrtgatctacttcaacttttgtgtatgttgagaggtaaggatccaagtgctagatagatggataatgacaatagttcctgcaccatttcttgaaaagactac

SEQ ID NO: 155734 - DNA, 201 bp, Homo sapiens
tgaggcttggtgtgcacattctgagaccagtcctggctctgccactcagtgggtgcctgtttgcaagtcatttcttgacctctgtgagtcttgtcttgtctttttttccaattataaaatagaataataattcctgcctcccagttttgtcatgaagattaaataaaataatgtttgtgaaaacaagtagacagaataggt

SEQ ID NO: 155735 - DNA, 201 bp, Homo sapiens
agataaatgtcatgttgcatgatacaagcaccatctctactgcttgagtcatgaatcaggtcagctctctcctagttagcttcacccctcattttaggttrggggaagtggcttgctacagttttagctataaacagctaataggcctttttctaaggttgtgtgagtccattcgtgaatcattcagtattttatttaaaa

SEQ ID NO: 155736 - DNA, 201 bp, Homo sapiens
atgtcatgttgcatgatacaagcaccatctctactgcttgagtcatgaatcaggtcagctctctcctagttagcttcacccctcattttaggttaggggargtggcttgctacagttttagctataaacagctaataggcctttttctaaggttgtgtgagtccattcgtgaatcattcagtattttatttaaaaatacca

SEQ ID NO: 155737 - DNA, 201 bp, Homo sapiens
ctgaggcttggtgtgcacattctgagaccagtcctggctctgccactcagtgggtgcctgtttgcaagtcatttcttgacctctgtgagtcttgtcttgtctttttttccaattataaaatagaataataattcctgcctcccagttttgtcatgaagattaaataaaataatgtttgtgaaaacaagtagacagaatagg

SEQ ID NO: 155738 - DNA, 201 bp, Homo sapiens
cctgaggcttggtgtgcacattctgagaccagtcctggctctgccactcagtgggtgcctgtttgcaagtcatttcttgacctctgtgagtcttgtcttgtctttttttccaattataaaatagaataataattcctgcctcccagttttgtcatgaagattaaataaaataatgtttgtgaaaacaagtagacagaatag

SEQ ID NO: 155739 - DNA, 201 bp, Homo sapiens
aaataaagttttattgtaacacaactgcactcattcagttatatactgtctgcggcagctttctgactataatggcagagccacagaaaccatatagcccmcattttagaaaaaacttgcatgcccttccttcatttggaaaaagagagactctgagttaaaataagcctttgatcaaatcctggtcagaaaggtacttat

SEQ ID NO: 155740 - DNA, 201 bp, Homo sapiens
gggtacttcagaaagacaaacacccaatccccatatttttggcatttctattcccaacacagttggaaccaggaagcataacaatgaaaattaagaaaggwgaagagggaagaagcagagagtaaatctgtttgggatttatgaaaagatattacaagacacaggcatctttaactagtttactgggatctctagtagaga

SEQ ID NO: 155741 - DNA, 201 bp, Homo sapiens
gcctgaggcttggtgtgcacattctgagaccagtcctggctctgccactcagtgggtgcctgtttgcaagtcatttcttgacctctgtgagtcttgtcttgtctttttttccaattataaaatagaataataattcctgcctcccagttttgtcatgaagattaaataaaataatgtttgtgaaaacaagtagacagaata

SEQ ID NO: 155742 - DNA, 201 bp, Homo sapiens
atccattcagccactgatgaacatttggattgttttcagtttgggactaataaaagcttctatgaacattcatgtacaaatatttgtatggacatgtatgtccttttctcttaggtaaatacctaggaatggaatggctggattgtgtggtagggcaggaaactgccaaactgttttccaaatcggttataccatcttaca

SEQ ID NO: 155743 - DNA, 201 bp, Homo sapiens
tatccattcagccactgatgaacatttggattgttttcagtttgggactaataaaagcttctatgaacattcatgtacaaatatttgtatggacatgtatgtccttttctcttaggtaaatacctaggaatggaatggctggattgtgtggtagggcaggaaactgccaaactgttttccaaatcggttataccatcttac

SEQ ID NO: 155744 - DNA, 201 bp, Homo sapiens
ttatccattcagccactgatgaacatttggattgttttcagtttgggactaataaaagcttctatgaacattcatgtacaaatatttgtatggacatgtatgtccttttctcttaggtaaatacctaggaatggaatggctggattgtgtggtagggcaggaaactgccaaactgttttccaaatcggttataccatctta

SEQ ID NO: 155745 - DNA, 201 bp, Homo sapiens
tccagaaatcaaagtagattttaaattacaattttttcctctggaggaaaggaatttaaaaataaaacttctaaaagaaataccatgccagtcagattatrtgctcagacttcacacgaactcacagtgctatgttttcttctttcaggatcaattgttacaatgccttaaatgcccagagcccctttgggggattcaaga

SEQ ID NO: 155746 - DNA, 201 bp, Homo sapiens
ttgcttcttatgtaatatcaatacttaggaaacatttattgggcatctactattttactgttccttatgtagatgttggttatacaaaagtaaagatgacrtagtggcatagtatttgttcttaaggagcaagcaatacagtggagggtttaggtaaagtattacaggacagtatgataggtaggtatatgtcagaggacc

SEQ ID NO: 155747 - DNA, 201 bp, Homo sapiens
atgtccctataatatcaaaacattgactttaaagtgaaaaatgcaatcaatcatctaggtgttttttctatacaatgccatttgggtgtttttttcacttyttagccagatgttttggcgtgaagcaaagcgaatgaataatggaagtcaacagaaccactcttgttctaactatataaccatttcaggaagaagtttttt

SEQ ID NO: 155748 - DNA, 201 bp, Homo sapiens
ctaaaaccatgctttttgctagtaaaatattacacttactgaacaaagcccatgtccctataatatcaaaacattgactttaaagtgaaaaatgcaatcartcatctaggtgttttttctatacaatgccatttgggtgtttttttcactttttagccagatgttttggcgtgaagcaaagcgaatgaataatggaagtca

SEQ ID NO: 155749 - DNA, 201 bp, Homo sapiens
cagctttgtgctgtggcaatacagtagttattaagccagcagagcaaacaccactcagtgcactctacatgggagccctcatcaaggaggtaagagaaacrgacttcgggagtgcttctgactccccttacagctggagcctactagagcatatctcatttaacatgatgcatcagctttcatcagccacgtttcctcctg

SEQ ID NO: 155750 - DNA, 201 bp, Homo sapiens
gtaaagctacagtaattaagatagtatggtactggcaaaaaaaaaatacagaaaaataagtgaaatagagaagagaaccaagaaatacattcacacaaatrtagtcaactgatccctgataaaggagcaaaagcacatagtggagaaaggattgtcttttcaacaaatcatgctggaaaaactagatattcacatgtaaaa

SEQ ID NO: 155751 - DNA, 201 bp, Homo sapiens
gaaaaataagtgaaatagagaagagaaccaagaaatacattcacacaaatgtagtcaactgatccctgataaaggagcaaaagcacatagtggagaaaggrttgtcttttcaacaaatcatgctggaaaaactagatattcacatgtaaaaaaaaaaaaaaaaagagtcctaacactgaacttacaacttccacaaaaatt

SEQ ID NO: 155752 - DNA, 201 bp, Homo sapiens
cagtaactgcattataaaatgagcaacaataacaacatactttaatcaactagaactaagaggcaagaaaggagaaaatagaaggtaaaataaagcatgtsaaatagaaagcatcaagtcctgatataacagaatatataacactaaatataatcccaatacatacaaatgcattttttatttgcacatatttatgggggt

SEQ ID NO: 155753 - DNA, 201 bp, Homo sapiens
gaagcataacaatgaaaattaagaaaggagaagagggaagaagcagagagtaaatctgtttgggatttatgaaaagatattacaagacacaggcatctttractagtttactgggatctctagtagagatttttccatttttaaaaaggtgttatatcgctgagaaaaatctaccttgatatgtgtaataaaatagctctg

SEQ ID NO: 155754 - DNA, 201 bp, Homo sapiens
tgctgaggactgggatgccaggtaggccagtctttaggccctagtggttgcagtggtgggttgagtgtgcctgtctttgtgcctcagtgtggaataccctrgcacctgtgttggagcaggctgattcttggccttgaggtggctttccccccggaggtagtggcagcagtggaccaggtggttggatgtgttctcaggtct

SEQ ID NO: 155755 - DNA, 201 bp, Homo sapiens
tttatccattcagccactgatgaacatttggattgttttcagtttgggactaataaaagcttctatgaacattcatgtacaaatatttgtatggacatgtatgtccttttctcttaggtaaatacctaggaatggaatggctggattgtgtggtagggcaggaaactgccaaactgttttccaaatcggttataccatctt

SEQ ID NO: 155756 - DNA, 201 bp, Homo sapiens
caatcgcattactgggtatatacccaaaggattataagtcattcttccataaagacacatgcacttgtatgtttattgcagcactattcacaatagcaagracttggaaccaacccagatgcccatcgatgatagactggataaagaaaatgtggcacatatacaccatggaataccatgcagccataaaaaaggatgagt

SEQ ID NO: 155757 - DNA, 201 bp, Homo sapiens
tacatgaacaatttgttttatcctcatgatatctttcaagtggcaccagttggcttttttctggagccggagtccaaagctaaaggccacaatgcagtgaytgaaatctccagttacatttttcttgccagttgtctttagagaaatctttcagtgattaagattccagatttaactcccttttccttagtccttccatca

SEQ ID NO: 155758 - DNA, 201 bp, Homo sapiens
aaaatcctagacaaaaacctaggcaataccattcaggacataggcatgggcaaggacttcatgactagaacaccaaaggcaatggccaaaattgacaaacrggatctaattaaactaaaccgcttgtgcacagcaaaagaaactatcatcagagtgaacaggcaacctacagagtgggacaaagtttttgcaatctactca

SEQ ID NO: 155759 - DNA, 201 bp, Homo sapiens
tgaaatctccagttacatttttcttgccagttgtctttagagaaatctttcagtgattaagattccagatttaactcccttttccttagtccttccatcaygaaactaaagctgtcttccagttcactccagcatggacattaaactgtaccccactaacttacatcttgtaacccaagctgatgacaagagctgggttgg

SEQ ID NO: 155760 - DNA, 201 bp, Homo sapiens
  misc_feature (1)...(201): n = A,T,C or G
ctccttactgcttagatccagaaatcaaagtagattttaaattacaattttttcctctggaggaaaggaatttaaaaataaaacttctaaaagaaataccntgccagtcagattatgtgctcagacttcacacgaactcacagtgctatgttttcttctttcaggatcaattgttacaatgccttaaatgcccagagcccc

SEQ ID NO: 155761 - DNA, 201 bp, Homo sapiens
ggaaggacctcttcaaggagaactataaaccactcctcaaggaaatgagaggacacaataaatggaaaaacattccatactcatggtatcacaaaaatggscatactgcccaaagtaatttataaattcaatgctatcccgatcaagctaccattgactttcttcatagaattagaaaaaacgactttaaatttcatatgg

SEQ ID NO: 155762 - DNA, 201 bp, Homo sapiens
gcagtggctcacgcctgtaatctcagcttttagggaggccgaggcgggcggatcatgaggtcaggagatcgagaccatcctggctaatatggtgaaacccygtctctactaaaaatacaaaaaaaaaattagccgggcgaggtggcgggtacctgtaatcccagctactcgggaggctgaggtaggagaatggcgtgaacc

SEQ ID NO: 155763 - DNA, 201 bp, Homo sapiens
accagctatactgctccatctcccccggccacatgcccctccaagtactgcacagggaccccccacccaggggccctgctccatgagataatgtgaaataygactgtggaccaaacacaataaaacctctgtctgtaaggaaaaaaaaaatcttatccaccacaatccagtcggctttatccctgctatgcaaggctggtt

SEQ ID NO: 155764 - DNA, 201 bp, Homo sapiens
taaaagtgtaataggaattcctttaaaaacaaaccacaataagattgggtatgtagcactatctaaaaaggctgtgtgctaatttttgcctctttttactrtcaatacaacttgctaagttactcatttaattataaaagtcaattttccctcatatgaacattgaatagtaaattagccagtgtctccatcattttgaaa

SEQ ID NO: 155765 - DNA, 201 bp, Homo sapiens
tttggggtaaataaaactaataacattgaaagaatcagaggaatcgcagaaaagactgtaaaccaatggaggagctcagggatagggaagatcactgtgarctggaaaaatctgggaaacctttagatatgatctgctacagggatttgtgtcagcctttcaagaagaggaatgcttggatagagaagggggaatatattt

SEQ ID NO: 155766 - DNA, 201 bp, Homo sapiens
tgtagcttttgtaaatattttacaaatatttttggctaccagtcagtgtttgtgtgtgtctgtgtgtgtgtgtgtgtgtgtgtgtgtgtgtgtgtgtgtttgctcttctatttcacttcttggaagactgccttcgtgcttgcttggataaaatgatgatgaatcctttttcttttttggtaaaatagtgtactagattta

SEQ ID NO: 155767 - DNA, 201 bp, Homo sapiens
cagttacctcatctccaagatgggaataattatactacctacctcagggttcttgtgaggattaagtgtaaggattaagtatgcaaacatccaacagaatrtctggcaagccttcagaaaatgttagctgcaatcatcattattcatcaagcagattagtgttatatagatgattcctctttttcttaacctgtaactttg

SEQ ID NO: 155768 - DNA, 201 bp, Homo sapiens
aataataataataatataataatgaaatccttgtctgttacttttaacttctctgtcgtctctgaatttgactggagtttttcctgtttatgggtccttttttttttttttttttttttggcttttctgttaattttgaaaggatactggacattgtgaccattatattgctgaacttagagattttgttgtttttcttta

SEQ ID NO: 155769 - DNA, 201 bp, Homo sapiens
gctaggctggtcttgaactcctgacctcatgatccaccagcctcagcctcccaaaatgctgggattacaggtgtgagccactgcgcccggcacataagtcacaatatcaggtagtggaagttaaattgaataaatggaatctcctctttcaggccagacaagaagccacatagtgagtccataaaaccataagtgcttatt

SEQ ID NO: 155770 - DNA, 201 bp, Homo sapiens
ggctaggctggtcttgaactcctgacctcatgatccaccagcctcagcctcccaaaatgctgggattacaggtgtgagccactgcgcccggcacataagtcacaatatcaggtagtggaagttaaattgaataaatggaatctcctctttcaggccagacaagaagccacatagtgagtccataaaaccataagtgcttat

SEQ ID NO: 155771 - DNA, 201 bp, Homo sapiens
ttggctccaccaggcctaataaattgttttcataaggaaataaatacagcatgctgcagcttaggttcccttatgcaaggggtttcaaacaagatgtatcstaagcaataaataattacagaatggggggggtgggaggagaaacactgtaaaggtgggaaaaaaacagtttcttagccaaattggggggaaaaggctgaa

SEQ ID NO: 155772 - DNA, 201 bp, Homo sapiens
caggacccagagaggagcagctctgctccagcagggttttccattgcatcacacacccaaacggtaggatccaacagtcacacttgaaagcaaccataatygtgaggtttctgatgctgtagacttccttacatttctcacaacctagttagagagtcacatgggggtgaagtgtggctcgcgacctgccccaacaagtgc

SEQ ID NO: 155773 - DNA, 201 bp, Homo sapiens
tgaggctgttgggaaaagcatcactgaagagtgactttcagaagaagagaagaaaaagaggagaacatgcgtgattttataatgaaatagattagataagrggaaaaaaggcatttaaacaaggcaaaaagaacaggagaatagagaagagatgtggaggagaaggagcactgtagtaaacacgcagaaggacaggaacac

SEQ ID NO: 155774 - DNA, 201 bp, Homo sapiens
catttaaacaaggcaaaaagaacaggagaatagagaagagatgtggaggagaaggagcactgtagtaaacacgcagaaggacaggaacacttagacatgcracccactcccaccctccgtcttgggggaggaaagcacactactgtcccaaagaactaatactgaaccagtgctgccttgtggagagaggcatggccaagg

SEQ ID NO: 155775 - DNA, 201 bp, Homo sapiens
tccaggccctatggtgattggaccttctcagtgcagttaaaaaataattaggaaatgctgttctttgatgagacccactgcatcttgtctagattgcatgyttgtttgtttgtttgtctctacttacccccaaaacatgttttctctttcttaaatgaccctgagtgacagaaaatgcttcaaataaaagaagctgctctg

SEQ ID NO: 155776 - DNA, 201 bp, Homo sapiens
tggctaggctggtcttgaactcctgacctcatgatccaccagcctcagcctcccaaaatgctgggattacaggtgtgagccactgcgcccggcacataagtcacaatatcaggtagtggaagttaaattgaataaatggaatctcctctttcaggccagacaagaagccacatagtgagtccataaaaccataagtgctta

SEQ ID NO: 155777 - DNA, 201 bp, Homo sapiens
taataaagagactccgagactgagtggagttaatgagggaagcatgcaacgagtggggcaatttcagttggtttctctcattgctttaagcgaaatgaacyatacggacaggagaacagcctgcttgccccagtctctccttggccgccctctgttgtccctgtcaactcaggtgcccacggtgctcagaggaggtgctgg

SEQ ID NO: 155778 - DNA, 201 bp, Homo sapiens
tcttccatcccttcttccatctttccagctgtcaaatccaatccagtctctaacctaaatgcagatcatttatttaaaagtaccaaacataacccagagtwtgtggaatatgggcaacatatatatagccttctgtatttaacgatcttctgcttcttaaccgtaccagttttctatttataactcttatctatccatgat

SEQ ID NO: 155779 - DNA, 201 bp, Homo sapiens
  misc_feature (1)...(201): n = A,T,C or G
caattttttcctctggaggaaaggaatttaaaaataaaacttctaaaagaaataccatgccagtcagattatgtgctcagacttcacacgaactcacagtnctatgttttcttctttcaggatcaattgttacaatgccttaaatgcccagagcccctttgggggattcaagatgtctggaaatgggagagaaatgtaagt

SEQ ID NO: 155780 - DNA, 201 bp, Homo sapiens
ttggctaggctggtcttgaactcctgacctcatgatccaccagcctcagcctcccaaaatgctgggattacaggtgtgagccactgcgcccggcacataagtcacaatatcaggtagtggaagttaaattgaataaatggaatctcctctttcaggccagacaagaagccacatagtgagtccataaaaccataagtgctt

SEQ ID NO: 155781 - DNA, 201 bp, Homo sapiens
ggccaaatacaaaatatagacatgtttacctgtctaaacattacactatgttcaaaacaagaactgcacattaaaatattgatttctgtgaaaattgagargatctggcaacctggggctcatatttatgcatggcaatgattaaatgtagtggctttccttcttagcccctccattacattgctttaccacctggcagac

SEQ ID NO: 155782 - DNA, 201 bp, Homo sapiens
ggcatttcacagtagctttatttttacttacttaccaaagtgaaatgaagtcagaggctgataacctgatggaatatttttgcagctgtaaaaagaaatcygtaaatggtgaccgtactactaccaagattgagcttgttttctctcagtgtgttctcagagttgcgcttttgaggagtggttcccaccctttagaaccgc

SEQ ID NO: 155783 - DNA, 201 bp, Homo sapiens
aatatgctatgtccagtgttaggcttctaccagctttcatgcacggttgagtaggatgttttttcaagtttatttctgtttgtttttttttttttttttttgcagccaccaaagttctccctttgcattttttttcctaatctaaactttctgggagtgaccatgcttttttctttcagatggagactattttacctttac

SEQ ID NO: 155784 - DNA, 201 bp, Homo sapiens
tagttctccttgaagaggtccttcacttcctttattagctgtatttcttaggtactttattctgtttgtatcaattatgaatgggagtttattcatgattkagctctctgcttgtctattgttggtgtataggaatggttgtgatttttgcacattgattctgtatcctgagacttagttgaagttgcttatcagcttaag

SEQ ID NO: 155785 - DNA, 201 bp, Homo sapiens
aggggccattttaaacagcaaaattgtgaacaaaaggcacaaaaatatgaaaaatgtggtactaaacagaccacaaaaaaggacacttttttttttttttttaacaatatgagagctgaagcaagaaggcagagtgtcaccttgctcaaccccagctgagaatttgtgcatcaggtgactcaaaattttccctgctttggg

SEQ ID NO: 155786 - DNA, 201 bp, Homo sapiens
tgacactgacttttaaacttttttttttgctttccattttgaaataatttcagatttacaaaaataaagttcaaaaatagtgcaaaaatttctgtgtacayttcatgcagattccccaaatgatcttacaattataaaagttataaaaatcaggaaattaacattgacaaaatattatcatctaacctaaaaatcttattc

SEQ ID NO: 155787 - DNA, 201 bp, Homo sapiens
cctgttggagggggtgggcggagggagagcatcaggataaaaaagctaatgcatggggggcttaaacctaggtgatgtgatgataggtgcagcaaaccacygtggcacatgtttacatgcataacaaacctgcatgtcctgcacatgtatcccagaacttaaataacatttaaaaaataataataaaaaagaaagtgattc

SEQ ID NO: 155788 - DNA, 201 bp, Homo sapiens
catcagtgatatctgtgatttccttggtaagttatagtgtggttattagcagaggctgtggtgaagttgtgctgaggactgggatgccaggtaggccagtytttaggccctagtggttgcagtggtgggttgagtgtgcctgtctttgtgcctcagtgtggaataccctggcacctgtgttggagcaggctgattcttggc

SEQ ID NO: 155789 - DNA, 201 bp, Homo sapiens
ttttcactttttttcatctcttaactttcagtctacatttgtctttactggtaaagtgagtttcttctaggcagtataaaattggatcattttttaaaaayccattcagccattatatctcttttctggttgttttatatattctttgcctctttttttttcttattgtttacactgtagtttggattcctgtagtggtac

SEQ ID NO: 155790 - DNA, 201 bp, Homo sapiens
tctcttttcatttgtttcaagaagtttttaaatttctatttttatttgttgacacagtggtcattcaggagcatgttgtttaatttccatgtatttgtatmgtttccagagttgttcttggcattgatttctagttttattcctttgttgtctgaggagatacttgatatgattttttaaaaattgctgagatttattttg

SEQ ID NO: 155791 - DNA, 201 bp, Homo sapiens
tacgttgtgtctttgttctcattggtttcaaagaacatctttatttctgccttcatttcgttatttacccagtagtcattcaggagcaggttgttcagttyccatgtagttatgcggttttgagtgagtttcttaccctgagttctaatttgattgcactgtggtctgagagacagtttgttgtgatttctgttcttttac

SEQ ID NO: 155792 - DNA, 201 bp, Homo sapiens
tgatttttctctcttttttattagtcttgctagcagtatatctgttttgttgatcttttcaaaaaaccagctcctggattcatcgatttttttttttttttaggggatttttatgtctctatctccttcagttctgctctcatcttagttatttcttgccttctgctagcttttgaatttgtttgctgttgcttctctagt

SEQ ID NO: 155793 - DNA, 201 bp, Homo sapiens
tgaaatgaaccgggtaccttagttggaaatgcagaaatcacctgtcttctgtgttcaccttgctgggagctgcagaccagagctcttactatttggccatmttggaagcataccgataggagtgggatgttgattttatcaaatgctttttctgcatctattgagatgattatatggttttggtccttcattctgtagatt

SEQ ID NO: 155794 - DNA, 201 bp, Homo sapiens
ttgatttttctctcttttttattagtcttgctagcagtatatctgttttgttgatcttttcaaaaaaccagctcctggattcatcgatttttttttttttttaggggatttttatgtctctatctccttcagttctgctctcatcttagttatttcttgccttctgctagcttttgaatttgtttgctgttgcttctctag

SEQ ID NO: 155795 - DNA, 201 bp, Homo sapiens
tttgatttttctctcttttttattagtcttgctagcagtatatctgttttgttgatcttttcaaaaaaccagctcctggattcatcgatttttttttttttttaggggatttttatgtctctatctccttcagttctgctctcatcttagttatttcttgccttctgctagcttttgaatttgtttgctgttgcttctcta

SEQ ID NO: 155796 - DNA, 201 bp, Homo sapiens
aaattaccttgggcagtatggccatttttacaatattgattcttcctatccatgagcatggaatgttcttccgtctgtttgtctcctcttttattttgttragcagtggtttgtagttctccttgaagaggtccttcacatcccttgtaaattggattcctaggtattttattttttttctagcaattatgaatggaagtt

SEQ ID NO: 155797 - DNA, 201 bp, Homo sapiens
tttggttactgtagccttgaagtcaggtagcatgatgcctctagctttgttctttttgcttaggatcgtagtggctttgcgggctcttttttggttccatrtgaactttagttttttccagttctttgaagaaagtcattggtagcttgatggggatggcattgaatctataaattaccttgggcagtatggccattttta

SEQ ID NO: 155798 - DNA, 201 bp, Homo sapiens
tgttttggttactgtagccttgaagtcaggtagcatgatgcctctagctttgttctttttgcttaggatcgtagtggctttgcgggctcttttttggttcyatatgaactttagttttttccagttctttgaagaaagtcattggtagcttgatggggatggcattgaatctataaattaccttgggcagtatggccattt

SEQ ID NO: 155799 - DNA, 201 bp, Homo sapiens
aatcaggagatcatgtctgtacatgcagaaagagtatttgacaaaattcagcacccattcatcatataaagaaggaagactctcaaaaattatgaatagasgagaatctcctcaacctgatgaaaaacatctacataaaacctatagctaacataatatttaatggtgagaaactagatgctttcccactatgactgggat

SEQ ID NO: 155800 - DNA, 201 bp, Homo sapiens
attataaaatgagcaacaataacaacatactttaatcaactagaactaagaggcaagaaaggagaaaatagaaggtaaaataaagcatgtcaaatagaaagcatcaagtcctgatataacagaatatataacactaaatataatcccaatacatacaaatgcattttttatttgcacatatttatgggggtaaatgagatg

SEQ ID NO: 155801 - DNA, 201 bp, Homo sapiens
ttatacacaactctttgcccacaaatttgataatttaggtgaaatgggccaattcattgaaagatgcattctaccaaaactcaaagagaaatatgtatgamtaggcctgtatctgttcaagaaattgaatcaataattaataacctttcaaaaaagaaagcactaagtccagatggtttcactggtgacttctaccaaaca

SEQ ID NO: 155802 - DNA, 201 bp, Homo sapiens
cattataaaatgagcaacaataacaacatactttaatcaactagaactaagaggcaagaaaggagaaaatagaaggtaaaataaagcatgtcaaatagaaagcatcaagtcctgatataacagaatatataacactaaatataatcccaatacatacaaatgcattttttatttgcacatatttatgggggtaaatgagat

SEQ ID NO: 155803 - DNA, 201 bp, Homo sapiens
gcattataaaatgagcaacaataacaacatactttaatcaactagaactaagaggcaagaaaggagaaaatagaaggtaaaataaagcatgtcaaatagaaagcatcaagtcctgatataacagaatatataacactaaatataatcccaatacatacaaatgcattttttatttgcacatatttatgggggtaaatgaga

SEQ ID NO: 155804 - DNA, 201 bp, Homo sapiens
tcttgtatcctgggactttgtgctaaatttgtacttctagcaatttttgtagattttttaaggaatttctacatagacaataatgtcatctaaaaatatastattacttcttttattttaaaactttggcctcctatttatttcatattataatagcaaatgttattacactattaaatagaagtagtaagagctatcctt

SEQ ID NO: 155805 - DNA, 201 bp, Homo sapiens
cttctttctcttagccctgtcagtatttattttccttggcttttaaaagtctcttcttcctgtttcctctacagtatttttcactccattttttaactgtscttcctaaatgtgtggttaatttataacataccttaaaaattctttctcttttctcataattctttttttctcttttctgaggtcttctttctatgactc

SEQ ID NO: 155806 - DNA, 201 bp, Homo sapiens
gggtcgtcggggccagcctgtcatcccggcgcagcagagggaccccctgcctgtcttcgggactggggcgtttgaagccccgccgtggtctgaggacgccytggggacttaacccaacccgaagcgcagcgttgaggggcagccgtcaacggctcctgccccggactctgaggctggtttctgtccgattctcccggtccc

SEQ ID NO: 155807 - DNA, 201 bp, Homo sapiens
gaaaactgagtttaacagatgttagcaaacttggacagagacacattaatctcaagggagatagattacgatgtgtgttactaaaaaaaacacaaagtgtrtctttttgagttcaactgatatcaaagtcctttttatacattgtctaggtggatcaaagactgctggttgccagggacctcttatctttatttctgcttt

SEQ ID NO: 155808 - DNA, 201 bp, Homo sapiens
tgcattataaaatgagcaacaataacaacatactttaatcaactagaactaagaggcaagaaaggagaaaatagaaggtaaaataaagcatgtcaaatagaaagcatcaagtcctgatataacagaatatataacactaaatataatcccaatacatacaaatgcattttttatttgcacatatttatgggggtaaatgag

SEQ ID NO: 155809 - DNA, 201 bp, Homo sapiens
cacactgaatgcatatatttaaaaataagaaatagtctaagcttttttaggaaactagaaaaagaagagtaatgtaaacagaaacaaaaaaataacaaaaattatagcacagatcgattaaattgaaaatgaaaacaataaagacaataaaactgtagactggttctttgaaaaaaattaataaaattgctaaacatgtag

SEQ ID NO: 155810 - DNA, 201 bp, Homo sapiens
tcacactgaatgcatatatttaaaaataagaaatagtctaagcttttttaggaaactagaaaaagaagagtaatgtaaacagaaacaaaaaaataacaaaaattatagcacagatcgattaaattgaaaatgaaaacaataaagacaataaaactgtagactggttctttgaaaaaaattaataaaattgctaaacatgta

SEQ ID NO: 155811 - DNA, 201 bp, Homo sapiens
ctggttttactgccaatttaaatgtgctcagtttacagtaatgagcttgtataggcattaccttgtttatagaaagtggaacaggaagaaatgaacattamccattaccagtagcaattcccattgccttctaccacaatattgatggcaagtttaatttcttccaatttgggactgtgtcacaactgacattggtgtgta

SEQ ID NO: 155812 - DNA, 201 bp, Homo sapiens
tatataatccatagataggaacatttgctgtcaaatacttttgctgatttagagctaggccacagaatggtcactattaataaagaaggagaaaaaaaaaactaatctgagactttgcagggattccaggttcttgctatgtgtcatcgcttgtccagtctgtggcggttttatgaagtggccataatgaaagtcagatta

SEQ ID NO: 155813 - DNA, 201 bp, Homo sapiens
tctagttctagatccttgaggagtcgacacactgtctcccacagtggttgaactaatttacactccaaccaacagtgtaaaagtgctcctgtttctccacmtcctctccagcatctattgtttcctgactttttaatgattgccgttctaactggtgtgagatagtatctctctgtggctttgatttgcatttctctaatg

SEQ ID NO: 155814 - DNA, 201 bp, Homo sapiens
caaatagggatcttgaccaaatttgagcttttcatttgtctcctttcctctttttttcttttctgggaagttgcctatctaaaaaaataaataaataaaaagagaaaattaagtttaagatgtacaaaaatttctcaaaatgttagatgtgattttaaaatgaactctataaattatgcacaattaggcttattagtttat

SEQ ID NO: 155815 - DNA, 201 bp, Homo sapiens
gcaaatagggatcttgaccaaatttgagcttttcatttgtctcctttcctctttttttcttttctgggaagttgcctatctaaaaaaataaataaataaaaagagaaaattaagtttaagatgtacaaaaatttctcaaaatgttagatgtgattttaaaatgaactctataaattatgcacaattaggcttattagttta

SEQ ID NO: 155816 - DNA, 201 bp, Homo sapiens
ggcaaatagggatcttgaccaaatttgagcttttcatttgtctcctttcctctttttttcttttctgggaagttgcctatctaaaaaaataaataaataaaaagagaaaattaagtttaagatgtacaaaaatttctcaaaatgttagatgtgattttaaaatgaactctataaattatgcacaattaggcttattagttt

SEQ ID NO: 155817 - DNA, 201 bp, Homo sapiens
aatggcaaatagggatcttgaccaaatttgagcttttcatttgtctcctttcctctttttttcttttctgggaagttgcctatctaaaaaaataaataaataaaaagagaaaattaagtttaagatgtacaaaaatttctcaaaatgttagatgtgattttaaaatgaactctataaattatgcacaattaggcttattag

SEQ ID NO: 155818 - DNA, 201 bp, Homo sapiens
catcatagttgtgttctcacctattgacctacaatgtggtatccagaacattttctggtgtccccatcaaatgcagtccttttttatgctaagtctgagcrctctctgtaatccctcatatttgctaagaagatccaaaaccattcataccctacaatggagtatctgaatttgggtggagactgtttttatatcaggctg

SEQ ID NO: 155819 - DNA, 201 bp, Homo sapiens
gtatctgaattacttactgaatgtgtgttatccatgtactttgggttagaggaaattccgctccctagattatctgtctgcaggttgttttatgattcatsgtatagttggacctgagtaaacgtgttctattagcacagctcttgagaaagaatgtacttatcaaacaattctgcctcttcagctgtggattcagagagc

SEQ ID NO: 155820 - DNA, 201 bp, Homo sapiens
tgaaagttcacagtacatagtgggcccctcataacgttcgttgtatctgaattacttactgaatgtgtgttatccatgtactttgggttagaggaaattcygctccctagattatctgtctgcaggttgttttatgattcatggtatagttggacctgagtaaacgtgttctattagcacagctcttgagaaagaatgtac

SEQ ID NO: 155821 - DNA, 201 bp, Homo sapiens
aaacttgatcctaggtatgtatgtataggagaaaaacatagtatgtattactataccagtagtttgttactgtctgcggtttcaggcatccactgggagtyttggaacatatcccccatggataaaggaggactcctatacaaaggtgatagtattaggagatgagaactttgggaattgattaggtcatgagggcagagc

SEQ ID NO: 155822 - DNA, 201 bp, Homo sapiens
accccattcatggttttgctttccacagtcaggtgagtacagtatggtaagatattttgagagacatcacgtttacataacttactacgatatggtgttgsagttcacttcattactagttgttaatctcttactgttcctatttacaaactaaacttgatcctaggtatgtatgtataggagaaaaacatagtatgtatt

SEQ ID NO: 155823 - DNA, 201 bp, Homo sapiens
cagtagtccctccaccccattcatggttttgctttccacagtcaggtgagtacagtatggtaagatattttgagagacatcacgtttacataacttactaygatatggtgttggagttcacttcattactagttgttaatctcttactgttcctatttacaaactaaacttgatcctaggtatgtatgtataggagaaaaa

SEQ ID NO: 155824 - DNA, 201 bp, Homo sapiens
aaaagttcatgtcatgtttagaaattggtagttttaatataggatttgagagggggttgggacttctacagtctgaatgtttgtgtctcgccaaaaatcawatgttcaaatcctaatacagtagtccctccaccccattcatggttttgctttccacagtcaggtgagtacagtatggtaagatattttgagagacatcac

SEQ ID NO: 155825 - DNA, 201 bp, Homo sapiens
aagaggtcgtatatgaactcagttttgaaagatgactaagattttactgtcctgtcaattaaagaaggcaggaaacagtatgttcaaatatcctgactcayaaaagttcatgtcatgtttagaaattggtagttttaatataggatttgagagggggttgggacttctacagtctgaatgtttgtgtctcgccaaaaatca

SEQ ID NO: 155826 - DNA, 201 bp, Homo sapiens
aaaactatttgtcttaacttcaattcagacaagaaaaatgtaggaagcctacaatataaatgagatggtattcactgtagattgagagacagcttttctgrgacatgagatgaaagtgattctaggatttcaagaaacttgactcctggaatccaaaacatacattgttttgcttttagctggaagaaacaatgtacgttt

SEQ ID NO: 155827 - DNA, 201 bp, Homo sapiens
ggttagccttccttcagtcaccaggtctggtaccctcatagacaaagaaattgagggctagagaagctgagtgacttgccacatacttagcatgaaaccargactaaaacacaagcaacttcacctcttccttttcctcctcctcctgtgctgtagaagaaaataagacttttataagggtatccccttataaataagccc

SEQ ID NO: 155828 - DNA, 201 bp, Homo sapiens
tactgaataatttcacaacaggaaacaaaaaccgttttttggcagggagggagggtttccagctgttcttggtgatgacttggcataggtttaaaaatgtytgttgtaggactcttttccacctgaatctcaccgtttcaaatgatgtctttgtagtatattcattgtgtgttaaaatattagacataattggaaaagaag

SEQ ID NO: 155829 - DNA, 201 bp, Homo sapiens
atagatgtagtgcttagtgtttggattggaacattaaacattgtccctttgttcctgtctgtctctcatacacacccttggtacaatacaaaacatgaccrtagcttttaacagtactagctaatagttctggcagggatttcaaggggatgctcaaagtaaactcttacagtatagacaagaagttttcttttttcaaag

SEQ ID NO: 155830 - DNA, 201 bp, Homo sapiens
ctataggtatatgtatccataaataatacatgctattgttttgcgtggtaacatcttttatataaatgttttatatatatgtaccatatatatatatatatccttctgtaatttgattagcttgttaaacatatgttcagtattcatccatgttgttggatgtacttataattagttcattgtaattgttgcagagtattc

SEQ ID NO: 155831 - DNA, 201 bp, Homo sapiens
actataggtatatgtatccataaataatacatgctattgttttgcgtggtaacatcttttatataaatgttttatatatatgtaccatatatatatatatatccttctgtaatttgattagcttgttaaacatatgttcagtattcatccatgttgttggatgtacttataattagttcattgtaattgttgcagagtatt

SEQ ID NO: 155832 - DNA, 201 bp, Homo sapiens
gttatattttaatatattttattttacattattttcatccatctattcattggactttgaatttcaagtccagtgactcttaggttttttttttttttttkaatatcatttctagtgattccttaaagattaaacagtcagaaagtggtataggttgtgtgactctttcccacaagaagaatggaattacctcccagtaaa

SEQ ID NO: 155833 - DNA, 201 bp, Homo sapiens
gagatttttttttttaatctggggcaagattcttgcctgtgccaggaataatttcttaaaagataggtgtggatctagatccttccaaacctttacttaasattgtctgttttggtcataaattgtcagtcaaactacatgttaatagaggacttcaggttttttttttaaatactttttcataactatgcagctttttgg

SEQ ID NO: 155834 - DNA, 201 bp, Homo sapiens
gactttaaagaaattgatagttttcatcaccatacactttttctaacggtctgtggcacgttgttttttcatcgttttgttccgttttttttttttttttkttttttttttttttgagggaaggagtttaaatctttatattttgtgttgcttctctcgcaaccatggagaaaatatgaactagtctacccctcttaagaa

SEQ ID NO: 155835 - DNA, 201 bp, Homo sapiens
ccttgactttaaagaaattgatagttttcatcaccatacactttttctaacggtctgtggcacgttgttttttcatcgttttgttccgttttttttttttktttgttttttttttttttgagggaaggagtttaaatctttatattttgtgttgcttctctcgcaaccatggagaaaatatgaactagtctacccctctta

SEQ ID NO: 155836 - DNA, 201 bp, Homo sapiens
ctaagaagactgcattctgattgccttgagcgatgtgtttatgaatttaaaattttctgagttgtctattttattagtctgacttttataattttgtatarctgatattataggaatacacacattacaaagtcaaggctcagcactttactgaccgcccctgactgcaggggatatctcttaacagattcccaggtcttt

SEQ ID NO: 155837 - DNA, 201 bp, Homo sapiens
aaaaaaaaaaaaaaaaaaattaggatcagtgggccttggtgatactgcaaaggttaaaaagtttgattcagtcacatggtgaataaaaggatagggacatkggtaagaccactttttccctaaacctgataatacccaagaagtggatccttaatgaaactaactttttaattttctccttttgttacctggactttatac

SEQ ID NO: 155838 - DNA, 201 bp, Homo sapiens
gtaccttagttggaaatgcagaaatcacctgtcttctgtgttcaccttgctgggagctgcagaccagagctcttactatttggccatcttggaagcatacygataggagtgggatgttgattttatcaaatgctttttctgcatctattgagatgattatatggttttggtccttcattctgtagattttcagtgtatcat

SEQ ID NO: 155839 - DNA, 201 bp, Homo sapiens
gtttgggagatctacgggagacctgctttggaaggtccagctgtctcctttacatcacccccatttctgtccattgaacgtggaagaaaagggaggccccrgcttctcacacttgctcatggttagcatgtctgcacacttactgtgtgccaggctgggttctaagtgtcatatatggtacaccacttaatcctcaaaata

SEQ ID NO: 155840 - DNA, 201 bp, Homo sapiens
ttttattcctttgttgtctgaggagatacttgatatgattttttaaaaattgctgagatttattttgtggtccaacatatggtctgttctggagaatattscatgtgctgatgaaaaggatgtatagtctgcagtagttggatagaatgttaggtctatttggtgtaaagtctagtttaaatccagtgctttttggttgat

SEQ ID NO: 155841 - DNA, 201 bp, Homo sapiens
atgggagcatggagagaagagaattctctgcatcattacctaaaaatgtcatgattttcaagatgataagatcaaggacaaaactaaagttctgtcatttmatataattttcaaatgtatctgtatctaggagaagtgtcatcagttgaagatatttacatttgaatgaaaagctactttattcaaagataaaagtatttt

SEQ ID NO: 155842 - DNA, 201 bp, Homo sapiens
agctctgtgaatctgtctcttcctaaccaaaggagcctctactatgtttagaccgagaaaaagattctcattcattagagcattttaaaatagtgctttartaggacttggctgttaaagtatgatcttggtgtactgaataatttcacaacaggaaacaaaaaccgttttttggcagggagggagggtttccagctgttc

SEQ ID NO: 155843 - DNA, 201 bp, Homo sapiens
ctcggatctggtcagccatcaagtcctcttttcaaatagacatcagcaaaaattaagtttagaaaaagcactgaggtgggaatcaggatatggggggttcrttctttattctgccacaaatccggggtatgtggccttggtcaagccattggacttcttttgacaagtttatttatctaacacttggatttgcagagatta

SEQ ID NO: 155844 - DNA, 201 bp, Homo sapiens
atggcacatgtatacctaggtaacaaacgcacacattctatacatgtatcccagaacttaaataaaaaagaagcatcatgatagagatgcagcaaagatcrctcggatctggtcagccatcaagtcctcttttcaaatagacatcagcaaaaattaagtttagaaaaagcactgaggtgggaatcaggatatggggggttc

SEQ ID NO: 155845 - DNA, 201 bp, Homo sapiens
gggcatgtcggtgggtgggggcaggagagggagagcattaggacaaatacctaatgtgcacagggtttaaaacctagatgacaggttgataggtgcagcawaccaccatggcacatgtatacctaggtaacaaacgcacacattctatacatgtatcccagaacttaaataaaaaagaagcatcatgatagagatgcagca

SEQ ID NO: 155846 - DNA, 201 bp, Homo sapiens
gttgttaagaatccaaggggcaccttcatcatttgagcttttggtagaaggggagaaaagctaaatgtccatttctttcttctttgttacacttcttaaaycggggtatcagataatcttctgagaggagctaaagttaaagaagggctgatcaggccggctgaataattctactgaggatagagtttctttcttgtactt

SEQ ID NO: 155847 - DNA, 201 bp, Homo sapiens
gcattaaaatggagatctttcaactctacctcccccattctaggttgttctatgaggaagatgaaggaatacatacaagattaatcacctcaatctttaaygaatttcttgatttttctttactttgttttacatacatagatatgacccttgtaacattcaaccatcaagcatgaataaattaagcaactctacacctgt

SEQ ID NO: 155848 - DNA, 201 bp, Homo sapiens
gaatccgatgctgttgacagccaatcttaattccttatcccagccccactactttttctagaaacatgatttactatatcctttgagcacctactgcattwtaagtgctgttaagatgtgggggaaaccaaatgaagccagcagacctttcttcaagaacttagggaagagagaaactcccattttaaccagctatacttc

SEQ ID NO: 155849 - DNA, 201 bp, Homo sapiens
ctatagtgccagaaagcagatcagtggttgtttggaatgtgagggtcagggtgggtaagagggagggattacaaagggaaacaaggaaatttgtggggtgsggtggggaatggatatattcattatcttgactgtggggatgggtgtacatatgctaaaactcatcagatacatacagcttattattataccttaacagag

SEQ ID NO: 155850 - DNA, 201 bp, Homo sapiens
ttaatgtaaaattaactggcattaaaagcaaaaaccaaggaattctttaaaactggtacactggaataatgaagagcacagtagaaagactttttttttttaaccctagcaatactattgaataaatagggcaactaagcccattgtaaaaacagcttaatctcctaaatgaattgctccaaccttctaattcaaaatcat

SEQ ID NO: 155851 - DNA, 201 bp, Homo sapiens
accttcatttgcaagggctttagcaggataccagtggcactggtattttagtaaatacgtccatagtcttggtgaccacagtgtctttatctagaatcatrttctggatgaaaactatttgtcttaacttcaattcagacaagaaaaatgtaggaagcctacaatataaatgagatggtattcactgtagattgagagaca

SEQ ID NO: 155852 - DNA, 201 bp, Homo sapiens
atactggccttcataatctgaatttcacagataaaggtttaaactgctgttaccacttaaaggaactgcttagatgccttggtcctgtttgtttctggtgsaaatctggacagattaatttggcctgttatttctgggtacttcagaaagacaaacacccaatccccatatttttggcatttctattcccaacacagttgg

SEQ ID NO: 155853 - DNA, 201 bp, Homo sapiens
tgtcccctctgccaccctgaggacttcttgtatcataaatttgtcattcattttgccttagagatcctttcctcaatactgcatttgggtgtctgagagayatatccagaaatatgctatgtccagtgttaggcttctaccagctttcatgcacggttgagtaggatgttttttcaagtttatttctgtttgttttttttt

SEQ ID NO: 155854 - DNA, 201 bp, Homo sapiens
aaacttgcatgcccttccttcatttggaaaaagagagactctgagttaaaataagcctttgatcaaatcctggtcagaaaggtacttatcagctacatggmcagttacatttatttgacacatagtgcctgatatgatgccaggtcctagggatgcaacagcacaaaaaaaaaaaaaaaaaaaaaaagatatgtgtggcat

SEQ ID NO: 155855 - DNA, 201 bp, Homo sapiens
cggcagctttctgactataatggcagagccacagaaaccatatagcccacattttagaaaaaacttgcatgcccttccttcatttggaaaaagagagactytgagttaaaataagcctttgatcaaatcctggtcagaaaggtacttatcagctacatggacagttacatttatttgacacatagtgcctgatatgatgcc

SEQ ID NO: 155856 - DNA, 201 bp, Homo sapiens
ccagacaaattcaaattaaatgataacatctcttaaggatttctcaccagtatcagataaaaatacattgaatccaagctatttgaatggacaatactcasttgcacatacacaccatcaactgcagggggcgccaatgccttttccctcaggcccttcagaaaaggcggtgtagctggaattttaatttcttcctgtctg

SEQ ID NO: 155857 - DNA, 201 bp, Homo sapiens
tgaggtgttcgagcccttccttgcatagatgtttgctttgcagcataaatgaaagatgatattcacatttaaacatagtggtttgagacattaacttctarttcaactgaagatgctagttgctacttttggttttactttttttgtgatgagaaaaatttccttagttgaaataggctttagtgactagaactaggtctt

SEQ ID NO: 155858 - DNA, 201 bp, Homo sapiens
gattgtgctacataaaattcagcattttgtttaccgtcacaagcaaatgtttagtctcctgtggagaaatcactcatttattggttcaaagccttcttcarccttaggatatgcattgaggtgttcgagcccttccttgcatagatgtttgctttgcagcataaatgaaagatgatattcacatttaaacatagtggtttg

SEQ ID NO: 155859 - DNA, 201 bp, Homo sapiens
tgtaaaaatgattgtgctacataaaattcagcattttgtttaccgtcacaagcaaatgtttagtctcctgtggagaaatcactcatttattggttcaaagscttcttcaaccttaggatatgcattgaggtgttcgagcccttccttgcatagatgtttgctttgcagcataaatgaaagatgatattcacatttaaacat

SEQ ID NO: 155860 - DNA, 201 bp, Homo sapiens
aattccttattggtaagggactatgcccaacagtgtacctggcacatagtaggagaactatgaatatgtgttgaatgaaggacattggtgaaaaccagggytgtttaggagtgtcctgtcctgaggccactccagatggaagtggttctcccatagcctaacacatcccgttctttcttgaactataactcgactttcttc

SEQ ID NO: 155861 - DNA, 201 bp, Homo sapiens
cagatttttttcaaatgcatgtgtggagtgtctctaataaagtaccattatgaatttttattttaattcccttaggtggaagaagaaattgtgggccaaayagcagtgaccatattcttttttaattatactttaagttctagggtacacgtgcagaacatgcatttttgttacataggtatacacgtaccatacttagcc

SEQ ID NO: 155862 - DNA, 201 bp, Homo sapiens
caacaatgtactcatggttaccaaagagtagtccacagaaatccctgttaatgattctcgttatataaatgagtggctagcagtgtcataaagatccagcrgaaatcaaaatgtttcatatttgctaaggacttaccatattagaaattagagcagtgactcccaagagacttcctcctttgagtcttggtgaaaattgat

SEQ ID NO: 155863 - DNA, 201 bp, Homo sapiens
gagtattgtccttattagagttcttaaaagcattctactaggaaggtgaaattgctgagataagaaaatatatgacatttcctgccatggtgcccagaatmtaagacgctttgaaatattgacaaaaggaaattgtacttaacagatttttttcaaatgcatgtgtggagtgtctctaataaagtaccattatgaattttt

SEQ ID NO: 155864 - DNA, 201 bp, Homo sapiens
tgtgcttcctttaaagaaggtatacacacatccactttggaaaactcttctgcttcattgccacgcatttaccccttcctctgaaatagaaacctttcagwgtaccttgcagagcagtgaacaaggcactggacagggcattagaagacccgtgttctgaccccagctctgtcacttatgtatgttcatttaacagtttct

SEQ ID NO: 155865 - DNA, 201 bp, Homo sapiens
gactcaatactcctccttccctactcgtaacaataaggacaaacataataaccactacaaagacaatacaatttggactattaacctaaagccttgctgartgtttcataggaaaccccaagcccagttcctcaactacaaatcccatatttcattcagatcctaagtctaattccactcagtattgtccgcagctatcat

SEQ ID NO: 155866 - DNA, 201 bp, Homo sapiens
gtagcttttgtaaatattttacaaatatttttggctaccagtcagtgtttgtgtgtgtctgtgtgtgtgtgtgtgtgtgtgtgtgtgtgtgtgtgtgtttkctcttctatttcacttcttggaagactgccttcgtgcttgcttggataaaatgatgatgaatcctttttcttttttggtaaaatagtgtactagatttag

SEQ ID NO: 155867 - DNA, 201 bp, Homo sapiens
ttacattctcagttttcaagacaggggggtacataaaagccatttctcttgagttttcttctctcaaagtacatttcccacaccgctgttcagaccctctmcaggccaggtagccttaccatgtttgaaccagcctgcattagcctgtctctatggcagtgtcagaagtgggtagtgatcagacatttggggagaccagtt

SEQ ID NO: 155868 - DNA, 201 bp, Homo sapiens
ttagtgaagagaatttaaattattcctaagcaccaggtctgaaaataacattacttcttattttgttaacattttaacttaagttctaaacccaaagctgktgtatatatttacctttgtgtttgaatttcatcagtgatttggttcatacatgtgtatctctaattttaaagaaaatattgtggaagtgtgaaattctcc

SEQ ID NO: 155869 - DNA, 201 bp, Homo sapiens
ttttgtagcttttgtaaatattttacaaatatttttggctaccagtcagtgtttgtgtgtgtctgtgtgtgtgtgtgtgtgtgtgtgtgtgtgtgtgtgtgtttgctcttctatttcacttcttggaagactgccttcgtgcttgcttggataaaatgatgatgaatcctttttcttttttggtaaaatagtgtactagat

SEQ ID NO: 155870 - DNA, 201 bp, Homo sapiens
atacttgctattcctggcctccttccttgtttgtgttgtaggcccatttccttctggcataattttccttatctgtaacgatctttaacgtttcttgtagygtaggtctactagtgatgacttctctcagcttttgtttgtctaaaaaatggcttcattttgtcttcacctttttttttttttttttttgaggggtcagcc

SEQ ID NO: 155871 - DNA, 201 bp, Homo sapiens
tctgtgagtggcaacgtggaatcaggcagcagggctttcttcccccttgccttggtccctcgcaggaatgagccaccaggctgtggaggagaaggggtcamggccatatcccaatatgtgtatggtgagggtccctgctggcacgtccaggctgccagcagagctgtgccggggagaagagacctgggcttggagggaacc

SEQ ID NO: 155872 - DNA, 201 bp, Homo sapiens
aacactggtggatgtgaaagcaaaggcacacagggaccatttgaccccacagatatctgagcatttttgtgataccatctgtgtaagaactatcccagaakgtggggttctagacactttgttgaatagcggcagaagcaagttaagaagctggaaatctaaactagtctctggtaaggataagaatggagacacaagctt

SEQ ID NO: 155873 - DNA, 201 bp, Homo sapiens
agctctgttaccaggagttgaattctcaagtcatggaattctcatgattaaaataagcaaagcacagtgtattaataacctgcccttggttattatgtccrttctgcttatggaaaattaatgctttgttatagttgtttattttttagaactgtgactcaccatccttccaggcatattattttatatgatcttttaatc

SEQ ID NO: 155874 - DNA, 201 bp, Homo sapiens
aaaagatggaaaattggctttaattttttctaggcagagaagagtactcattatgtatcatctgaggtatagatgagagggagaattaacactgtctccayttcgagttggctctgcctagatgaaagggagagaggcgcttagtcctgggctcacctattccagggaatgtttctctgtagtgttccctttataacaagt

SEQ ID NO: 155875 - DNA, 201 bp, Homo sapiens
ttggaggggctattgtaaataaaatgaacctaagtgctgttcaatggatgactggataaaatatatatatatatatgtatatatacacacacacacacacrcacacacacacacacatcatgggatactacacagccataaaaattatgaaatcatttcttttgcagcaacatggatggggttggaggccattatactgaa

SEQ ID NO: 155876 - DNA, 201 bp, Homo sapiens
gtatcatgtaattggaagggattttcttttacctcctttctgtggcatcaactttgatctcttattccttcacccatttcttcatacattcatttattcarcagattttttttagcatctgctatgtttcagctcctgtattaggcattggggttacaaaggcaaataactaagatgtttataggacagtaagaaaaacaa

SEQ ID NO: 155877 - DNA, 201 bp, Homo sapiens
aaattgaagcccccatttctttctttctcttcctttgccagaggcatttatcttcactataggtatatgtatccataaataatacatgctattgttttgcrtggtaacatcttttatataaatgttttatatatatgtaccatatatatatatatatccttctgtaatttgattagcttgttaaacatatgttcagtattc

SEQ ID NO: 155878 - DNA, 201 bp, Homo sapiens
agctctgttacctccagaagtagttacctgctctgtttcccttcctcatcactgtctgacctttggagagccaaagtagtatttctttatcactacaactstggaaagagaaaagcttttgtttaggtcaaactggaaacacctgtttcttatctagaagaatttagcatatcatgaatctgaaaactctttccaatcttg

SEQ ID NO: 155879 - DNA, 201 bp, Homo sapiens
aagggtcaagataaattgatgaattatttactctgtgctgctgatagatttggagaaaacatggataggtagcaaataatttaaaaagaatttctaaaagrccttttttttgaataactctacattattcaagaataatatacttcatcctgttagtgaagagaatttaaattattcctaagcaccaggtctgaaaataac

SEQ ID NO: 155880 - DNA, 201 bp, Homo sapiens
aggtttatttacaacaagtctctgttggatcacatgatgaaaacacttccaggctttgaaaattccagttggaataataattgggtgatttcaccacctasacttctgctgggctctaaacaacacttccctggggctaaacgtggggattaattgacctctgtagaatgtggttaaaaattagtatgtctgcgtgtgaac

SEQ ID NO: 155881 - DNA, 201 bp, Homo sapiens
tcagaaatgcattcctattgcagatttttcaaggcattctttttgtagtcttcagaaagtttatttttgctttttgcatttctgtctttacctcctagaaytggtcattgcttatgcatggggacaataataaagacaaatgatgtagcattggaaagtcaaacaatattgatgtttaaataatttttaaaaattgtattc

SEQ ID NO: 155882 - DNA, 201 bp, Homo sapiens
aataataaaattagatatcttgacatttgtgccaaaatatagcatgaatatgcttcaatatgcccgattagctgagcctaaactccaggttgcaaatagaygtttctggtattttaagtagttaggataaaaatacaagatattgatacataaatgtgggaagtatgcagcatacaaggacattctcagaaggtagatacc

SEQ ID NO: 155883 - DNA, 201 bp, Homo sapiens
ccaagataacatatggaattttgagagcattttccaggagcagtcaccttccagaaagtaaaagcaccaggccgtggctattttgaaagccctcctagcakttctttaatttctttattgactgtgacaggtaatttcaaagccattcatttccccccaaacagcaaatctaattcacgtagaggtgattgctgtaatgtc

SEQ ID NO: 155884 - DNA, 201 bp, Homo sapiens
cttgagttatcttagtgacagtatcaggggtcagcaaactgtggactgtctgcctggttttataaataaagttttattgtaacacaactgcactcattcarttatatactgtctgcggcagctttctgactataatggcagagccacagaaaccatatagcccacattttagaaaaaacttgcatgcccttccttcatttg

SEQ ID NO: 155885 - DNA, 201 bp, Homo sapiens
gatttaaccatgacaaaatcagtaaatatcccaagtcccatcacccagagttatcagttctgagtctttcttagttggacaataaaatacaaatactgatwggagtttttgtctcttgagttatcttagtgacagtatcaggggtcagcaaactgtggactgtctgcctggttttataaataaagttttattgtaacacaa

SEQ ID NO: 155886 - DNA, 201 bp, Homo sapiens
gggactcctcgttctttatttctataaaatgatgaatgatagtttttgtatttcagagtagaggattctctgaggagactgttttgtgaggtctgacttcytcatagccaggcttaagaaaggcaaatcatgcatagttagttctctgttgcatcaatgaagcacaatgatttaaccatgacaaaatcagtaaatatccca

SEQ ID NO: 155887 - DNA, 201 bp, Homo sapiens
atctccatttaacacagggaagctggacaatttcatcacaggacttgaattagataattctcctggggtcctgccctgatcccttccactacatgggcctrtgttaccatgtggaattatcatttgctgagggactcctcgttctttatttctataaaatgatgaatgatagtttttgtatttcagagtagaggattctct

SEQ ID NO: 155888 - DNA, 201 bp, Homo sapiens
tcccagcactttgggaggctgaggcgggtggatcacctgaagccaggagtttgacaccaacctggccaatcatggtgaaaccccatctctactaaaaataygaaattagctgtgtggtggtacacgcctgtaatcccagcttcttggaaggctgaggcaggagaatcacttgaacccaggaggcagaggttgcaataagct

SEQ ID NO: 155889 - DNA, 201 bp, Homo sapiens
ttctgttttctggggtctatttcaattaaattcaaaaggcatttgagtggccatgttcctaacaggggtgcttttcactgtgttagactggaaacatctgycttctgggagattagggtcttattaaaaagtttgtgtgccaaaaattggttgttagtacagcagtagttcagttgatcaatgtaataataatgatgatga

SEQ ID NO: 155890 - DNA, 201 bp, Homo sapiens
cataatgacctgctaaaatagaagaggcaaaaaggcaatcaacttaaaactcagagctaatgtgcatcgtgagtctagatttgtctttttatttattcatytaaacttctgttttctggggtctatttcaattaaattcaaaaggcatttgagtggccatgttcctaacaggggtgcttttcactgtgttagactggaaac

SEQ ID NO: 155891 - DNA, 201 bp, Homo sapiens
agatcagagtcagtcttgtaacaaattccactggtggtatagggaccagggtgaaataaacaagtatctccttggaaggatggggaataccaaaagcaacyaaagttcaccagaaaaggggtacactccttactgcttagatccagaaatcaaagtagattttaaattacaattttttcctctggaggaaaggaatttaaa

SEQ ID NO: 155892 - DNA, 201 bp, Homo sapiens
taccatttttggaacatgtctatttgtatttccctaatacagcaagctggatcccaagttttaaaagtgatcccttatgaaggaatgtgctttttaaaactagatggtgttagtcaaggaggagtgaaaactaacatgaagtattgaggggaccaatttggtaccaagagaatgcgctctcctttgcttgtatcctaagaa

SEQ ID NO: 155893 - DNA, 201 bp, Homo sapiens
ctccaacttcctcctcctcctagaagtatttcacatttttaataaagggaatgggggagatgaccagaattaaaagttactgcctttgcctgctagaggtycagtggaaatgctccagaattaaagttcattccctaaggatgttgaaagggctaaactcatggttgtgtatggacttttaggcagttacattccattttt

SEQ ID NO: 155894 - DNA, 201 bp, Homo sapiens
atatgttactgttttttgtcttgctaaacatacatctttagtgaaggatatgactttctgtatgatttttcagtgtgatattgggacccacatagagtcaytacttaaaataaatgaccagactatgagaatttcaagtaatgtgcacttagaaaactttgtacttgtgatcttgtatttttctgtatttttgctccaact

SEQ ID NO: 155895 - DNA, 201 bp, Homo sapiens
aatggctacaaaagtattacgcgttagggcgtgttaaatatcacatttgaaagaaacacaatatttgcatcagaaaatgatactgtaagacaatatgttaytgttttttgtcttgctaaacatacatctttagtgaaggatatgactttctgtatgatttttcagtgtgatattgggacccacatagagtcattacttaaa

SEQ ID NO: 155896 - DNA, 201 bp, Homo sapiens
ttataaccttttaggcattgtttgcataacaatagtgccaatgtgtggcacttgtctgggtttaggaacgagcagggaaagcatgcagcttagaagttttrttttatgagggtctctaacctcttcaggctctttttaaaggtcttaaaatggaagatctacacaggagaaaagacctaaccctcagatttgggaaggttt

SEQ ID NO: 155897 - DNA, 201 bp, Homo sapiens
ttccacaaattcgacatagaaaaaaaatgatcgattacaaacgtaggggtattgtaatgttacaacattttgagggaggtggtgagagagagatgggattsaaaaccacgtttcttggagttcattttgtagttctctggtttgattttctagtcctttcggtacatttctacactcaacttctcccaattaacgcaaacg

SEQ ID NO: 155898 - DNA, 201 bp, Homo sapiens
cctccgccttccgggcccctcggctgttggtcccaatcaggtcctccacagcccggagggtgctgaggggctttcccgtaaggaattgtcaagacaccagygctctggccggtttgacaaatttcacggaaacctgactgataagtacagtaactccaacgtcagcgtttcatgtgaattttgtaggcagcggcagtttcc

SEQ ID NO: 155899 - DNA, 201 bp, Homo sapiens
agggtggatcagttaaggtcaagagttcgagaccagtctggccaacatggtgaaactccatctccactaaaaatacaaaaattagctaggcatggtggtgrgtgcctgtaatcctagccattcaggaggcagaagcaggagaatcgcttgaacccaggaggcagaggttgcagtgagccgtgatcatgccattgcactcca

SEQ ID NO: 155900 - DNA, 201 bp, Homo sapiens
cccagcccttctccccttctgggcctgaccagctatactgctccatctcccccggccacatgcccctccaagtactgcacagggaccccccacccaggggmcctgctccatgagataatgtgaaatacgactgtggaccaaacacaataaaacctctgtctgtaaggaaaaaaaaaatcttatccaccacaatccagtcgg

SEQ ID NO: 155901 - DNA, 201 bp, Homo sapiens
gttagaacctaggcttgtaaccacttcattagagaattcaaaatagatcctaggaggaagagatatccttataggaaagggatggactgaaagagataggragtggtgaatagacataaggaaaggaaatgcacatttattgagtggatactagatgccacttagcactgtgccaggtgttctacctgtgttctccagaag

SEQ ID NO: 155902 - DNA, 201 bp, Homo sapiens
atttaagtaatcaaggcagagtaaacttgcattgaaatgtggaaagcaggtaaaggaatgacagagcaaccatgttgagtcatattatctttttgcagatmtttggccctgttcaggaaattttgagatttaagacgatggatgaagttatcgaaagagccaataactcagactttggactcgtagcagctgtctttacta

SEQ ID NO: 155903 - DNA, 201 bp, Homo sapiens
ctttgagctgcatttagttcccttcattgatttctaaagactagttctcaacttaacaaatactttcctccccttaactgcagctaacaagaaacctaaaytgttatggtttcataacttaaagtcaaacttcacataaagctgatgccttaaaattacagctttgcattctattatttaggtgaggaaatatgaggcaag

SEQ ID NO: 155904 - DNA, 201 bp, Homo sapiens
ttcaaataaagtggccaggcatatcccatttgagatgaatgagatcattaggaaacacttatatctgaaataagcactgagatcattctgcatacaacctragggccctaattttttaaatatttcaaacaatgtgcctctttcaaatcattagatgtagagacatttaaggaactgattcaattagcccagaagagggga

SEQ ID NO: 155905 - DNA, 201 bp, Homo sapiens
gtgaactcccattcacaatgactataaagagaataaaatactcaggaataaaacttagaagagattggaaggacctcttcaaggagaactataaaccactsctcaaggaaatgagaggacacaataaatggaaaaacattccatactcatggtatcacaaaaatggccatactgcccaaagtaatttataaattcaatgct

SEQ ID NO: 155906 - DNA, 201 bp, Homo sapiens
tggtttggacttcctgtataattatttcagttgcctattactcctgtaaggaaaacaaggttattaagtttttctgaagctctttttcttttagcccctargacattctcatttctatgtctagtttgggggcagacgctttggattattgatggagttctttttagaaatggacttttaccttctttaaatagccctgga

SEQ ID NO: 155907 - DNA, 201 bp, Homo sapiens
caaaaattatgaaggtggcttttataactggtcttacggtaaccctgatttagaagttcagtgggattcatagtagggtcttagtagctgtgaatgacttytggggtgctgttagccctagctgaaggtgcccacagaaggcttagctcttgtgtttgtcagacaccccagatcagactaggggtgtcacctttcaccatc

SEQ ID NO: 155908 - DNA, 201 bp, Homo sapiens
gcaaatgatacttggaaatggcaaaaattatgaaggtggcttttataactggtcttacggtaaccctgatttagaagttcagtgggattcatagtagggtyttagtagctgtgaatgacttctggggtgctgttagccctagctgaaggtgcccacagaaggcttagctcttgtgtttgtcagacaccccagatcagacta

SEQ ID NO: 155909 - DNA, 201 bp, Homo sapiens
ctagagtggtggccactccttcaaactgagtttgccagaatggaattctggtgtagggagaaatttctttgcagaaaaatgttacgtagtttcctttgttwttcagtagttgtgcaaagaccaactactgccagtagtctgcaaaggacaacaaagagatatatggcataatttctgtaatgaagtaatatttttgtttaa

SEQ ID NO: 155910 - DNA, 201 bp, Homo sapiens
tcatgtcctttacagggacctggatgaagctggaaaccatcattctcagcaaactaacacaaacagaaaaccaaacaccatatgttctcattcataagtgrgagttgaacaatgaggatgcatggacacagggaggggaacatcacacaccggggcctgtcgggctaggggagggataacattaggagaaatagctaatgt

SEQ ID NO: 155911 - DNA, 201 bp, Homo sapiens
taagtattttttccttttgatttttggaaaacctgtaagaaacaaaagtcatgaaatatcagtctttacaaataattaaaactgctgcacagagaaacctraaaactgaacttggggccgggtgcagtggctcacgcctgtaatcccagcactttgggaggcaggcagatcacctgaggtcaggggttcatgaccagcctg

SEQ ID NO: 155912 - DNA, 201 bp, Homo sapiens
aatattatttttgctgatgctgactgtaagtcaactacaggtcccatacatgaaccaccacacaccctttggtgctctcttttatatctccacttttgatrggacactagcaaaagatatttgaagctaagggcaatcaaaaagatctcctctaaggagaaaatggtttaataatggggaaagagcacttttcagttgacg

SEQ ID NO: 155913 - DNA, 201 bp, Homo sapiens
ctggaaattatgtgtattggaaagaacacattgttgagtcagccacaacaagaacctgcttctttggactcaagctccctgcctctcaattttctcatgtktaatagagagaaaaccctgcttcacggggttattgtaagtactaaataaactactagagactgtcagactctggagggctggaactctcttaaccatctt

SEQ ID NO: 155914 - DNA, 201 bp, Homo sapiens
tcacttaggcctgtggcagagaaagtaggatctaaggcttgatgactgtaagtttgatctgctatttaaccctcatggatactagccagagcttgggctaycgataactcttgccttagcatcagtgtatgattgtatgtatgtgagacactctatccttatttgtatctttagttagttgacaggttcatgaaaggtaag

SEQ ID NO: 155915 - DNA, 201 bp, Homo sapiens
atataagtacaggggcatgccacttaatacatcattcatctaaggaagaggtatgtatttgtcagctggtaagtggtcagcattgtgctagattaggtgcyggggtaggtatgaaggggcattattgggtggagggaagtcatggaaaattccaacgaggttaagacttgctccttgccctcctgaaacacataagatcta

SEQ ID NO: 155916 - DNA, 201 bp, Homo sapiens
agaaatattgtgttaacgtatttggatagtggttactggaagcacaggaatatgcacatatatactcattgtggtttttactaggaactagaccaaactgrcagtactagaaatctttttatttgagaattcatagttgaccaggtatgcaactccatatgcatttgtattctctctcttccttttttcttctgctctaga

SEQ ID NO: 155917 - DNA, 201 bp, Homo sapiens
gaggaaattcctaaattggcgttgagtctagaagggtctcttaaaacacttcaaattgtatacttttattatacaacaagtgttattaccatagtagttcygtaacacttggccgttgactggctgcttatcacctgtgtcacagatcccattctgttatctactcccttagatctttataaacaacgagtggcagaactc

SEQ ID NO: 155918 - DNA, 201 bp, Homo sapiens
cccccatggataaaggaggactcctatacaaaggtgatagtattaggagatgagaactttgggaattgattaggtcatgagggcagagccctcatgagtgrgattagtgtccttgtaaaagaggcctgagagagctagcttgtccattctaccatgtgaggaaatggcaagaatgcaccatctatgaaccaaaaagtgggc

SEQ ID NO: 155919 - DNA, 201 bp, Homo sapiens
gtcaccatgctgcttgcagaaaacgagtatcaaatgattcttatgagaatgaaatagaacaagtttttacctccccagagttaacctctcttgagtaaaargaatccttcagaaccagaggggatggtacggacctctcatacacttctgctccgtttgccctgtcattctgtgagccagtagaaaggagagacagcagga

SEQ ID NO: 155920 - DNA, 201 bp, Homo sapiens
tactacgatatggtgttggagttcacttcattactagttgttaatctcttactgttcctatttacaaactaaacttgatcctaggtatgtatgtataggaraaaaacatagtatgtattactataccagtagtttgttactgtctgcggtttcaggcatccactgggagttttggaacatatcccccatggataaaggagg

SEQ ID NO: 155921 - DNA, 201 bp, Homo sapiens
ccagttatattttcatataataaaactcaaatgcctttctttttcttctctgtgtctcactgatcaggtctcttttcctaccacacctaaatgagattccygttttaaacactctcaagctatgagaaaagtgagttttagtaagaggtagcctgtggaagaaaggggagctcctgactggaaaactgaagctaatcctgc

SEQ ID NO: 155922 - DNA, 201 bp, Homo sapiens
aaccagcgtagtcacttttaattggctttcaaaaagccaaactttatgatctttactgttttaacacaggaatacaaccatctgcaccattcacatgtcaractaccttccttggagaccgtgagatatctattcctttgtggtttgggaagggacatttcttattggcagaaagcctttgttgcagggagtattgtcctt

SEQ ID NO: 155923 - DNA, 201 bp, Homo sapiens
aaagcagtcagtgaagagatttttatctgtgcttgaatactagtgatagctaataccaattgagtgctttcacagcaaccccaagagaaaggcactgttayaaacatcttcagtttacaaaagtggaaagaggtctggcgaagtaaaattagttttcctaattcacagagtaaataagttttagagctaaaactttgacgt

SEQ ID NO: 155924 - DNA, 201 bp, Homo sapiens
acccgttgaatctatttgaaaaattgcattttagaaagagcactttgactacaaatggataatcagttagagacagcaagtacttgttttatttctccccwtaaaggatagatttcactttgactacagatggataatcagttagagagagcaaatacctgcttaatttctccccgtaaagggtagccttcaactagaata

SEQ ID NO: 155925 - DNA, 201 bp, Homo sapiens
tagcatatagaaaaggttaaaaactacccaggtcatatataactttccatttcaccctcttccagtttaacctgttaaagaataggatacaaatacacaawgatagtgattcagatcctaagattttgccttgaatcagcttgatctggtttactgtcattaacaaatgcatagggtgaaatctgaagtattcttgttcca

SEQ ID NO: 155926 - DNA, 201 bp, Homo sapiens
ctagctgaaggtgcccacagaaggcttagctcttgtgtttgtcagacaccccagatcagactaggggtgtcacctttcaccatccacgtgaaaatgcaaastgagattacaaggtctagggccctttattttattttagttctggattacctgtgcaggtttgttacacaggtaaacgtgtgccatggtggtttgctgcac

SEQ ID NO: 155927 - DNA, 201 bp, Homo sapiens
tatcttatgtatagtaaacatacatagtaaatatttgttgctacatgaaggaggaaagactgaatttggtaaataaaaacttaatctcagagctagaaggygaggtatcagtagaaccctcccctgctttaaaatgccaccataagcatagggtttactattttttacttcatagctatataattatggaccagccacttg

SEQ ID NO: 155928 - DNA, 201 bp, Homo sapiens
atctaataccacacagaaacatgtacaaaaatgttcacagcagtattattcctaattgccaaaaagtggaaacaactcaaatgtccattaaatgataagckgattaacaaaaagtggtctatccatacaatggaatactgttcacccataaaaaggagtgaggtatttatacatgctgcagcctgaatgagccttgaaaac

SEQ ID NO: 155929 - DNA, 201 bp, Homo sapiens
catgctcagtgactgctaaacatgtagcctcagtgttctagtgagagtagttaatagtcagggggtaccaaagtgtgtaaaagctggagaaaatactaggytttcctcaacagtgatttcccatgaatcatctttttacacttcagattatattattcttaaccacattgagggcaagtaatgtccatctacaaaactatg

SEQ ID NO: 155930 - DNA, 201 bp, Homo sapiens
agcagaacatttctttatcattagttaaagaaatattgtgttaacgtatttggatagtggttactggaagcacaggaatatgcacatatatactcattgtrgtttttactaggaactagaccaaactgacagtactagaaatctttttatttgagaattcatagttgaccaggtatgcaactccatatgcatttgtattct

SEQ ID NO: 155931 - DNA, 201 bp, Homo sapiens
cttggctaggaaagggaaatcccctgaccccttgtgcttcctgggtgaggtgatgtcccaccctgcgttggctcaccctctgtgggctgcacccactgtcraaccagtcccagtgaaatgaaccgggtaccttagttggaaatgcagaaatcacctgtcttctgtgttcaccttgctgggagctgcagaccagagctctta

SEQ ID NO: 155932 - DNA, 201 bp, Homo sapiens
agagtgtactgttcctccacgtacaatctgtcatggcttcccttggctaggaaagggaaatcccctgaccccttgtgcttcctgggtgaggtgatgtcccrccctgcgttggctcaccctctgtgggctgcacccactgtcgaaccagtcccagtgaaatgaaccgggtaccttagttggaaatgcagaaatcacctgtct

SEQ ID NO: 155933 - DNA, 201 bp, Homo sapiens
ttttaaaattatactttaagttttagggtacatgtgcacaacgtgcaggtttgttacatatgtatacatgtgccatgttggtgtgctgcacccattaactmctcatttaacattaggtatatctcctaatgctatccctacccccttcccccaccccacaccaggccccggtgtgtgatgttccccttcctgtgtccatgt

SEQ ID NO: 155934 - DNA, 201 bp, Homo sapiens
tccacatccttgctggcatttgttatttttgtcttttttaaaattatactttaagttttagggtacatgtgcacaacgtgcaggtttgttacatatgtatrcatgtgccatgttggtgtgctgcacccattaactactcatttaacattaggtatatctcctaatgctatccctacccccttcccccaccccacaccaggc

SEQ ID NO: 155935 - DNA, 201 bp, Homo sapiens
agtcccatctacgttgctgcaaatgacatgattcatttcttttctatggctaaataatattccgttgggtacgcacgtgtgtgtgtgtgtgtgtgtgtgtkttgaggggcactttggttgattctgtatctttgctattgtgaatagtgctacaataaatatgctagtgcaggtatccctttgatatattgatttcttttg

SEQ ID NO: 155936 - DNA, 201 bp, Homo sapiens
ccctgataaaggagcaaaagcacatagtggagaaaggattgtcttttcaacaaatcatgctggaaaaactagatattcacatgtaaaaaaaaaaaaaaaaagagtcctaacactgaacttacaacttccacaaaaattaactcacaatttaatattgagttaattgagaaatcatttttttggtataaaataatttatgac

SEQ ID NO: 155937 - DNA, 201 bp, Homo sapiens
cttaaaattacagctttgcattctattatttaggtgaggaaatatgaggcaagaatttatttttctcctctgcaactccaggatattggctccaccaggcytaataaattgttttcataaggaaataaatacagcatgctgcagcttaggttcccttatgcaaggggtttcaaacaagatgtatcctaagcaataaataat

SEQ ID NO: 155938 - DNA, 201 bp, Homo sapiens
tacaggagcactcccagcttgccctgctgtcccagcagtaatagcctgagtttccttaatgcctcagtcctggaactgctgggccccaggacagcacgacstttgtcaaaggctaggtttggaaatgatgccttgctgtagctgcttaggtctcagaaaggatgtggggcccagtgttaagttctctcctaggagcagttc

SEQ ID NO: 155939 - DNA, 201 bp, Homo sapiens
aaaaaattttctcccattctgtaggttgcctgttcactctgatgatagtttcttttgctgtgcagaagctctttagtctaattaaatcccatttgtctatkttggcttttgttgccattgctttggtgttttagtcatgaagtcttttcccatgcctatgtcctgaatggtattgcctaggttttcttctagggttttgac

SEQ ID NO: 155940 - DNA, 201 bp, Homo sapiens
gttgaatgaaggacattggtgaaaaccagggctgtttaggagtgtcctgtcctgaggccactccagatggaagtggttctcccatagcctaacacatcccrttctttcttgaactataactcgactttcttccaaagatgaaggggaaaggtatcattcatctgagatttgccttgtggtgtttaccgagttagtgggtgc

SEQ ID NO: 155941 - DNA, 201 bp, Homo sapiens
tccttgccctcctgaaacacataagatctactctttggaaggaaatattctaagtgttaacagttgtctctgagtggtgagattatggctgattttcagtktctttttaatatttttctctactttctatatttctcgaacggccgtgaattactttcataatctatacaaacaacactaatcctaacccctttttattat

SEQ ID NO: 155942 - DNA, 201 bp, Homo sapiens
cctgaggcctttgcgtggaagtggaagagacacaaaatggcaagggcgggggaagggcagtctggcaggttggccacagctcacccatcaaacttcagggmcaggtgttagcattttccaacaccttggtaagtcatgttttcagcaaatcaagaaactctagttctgcatctttgagagacatcactttttccccctaag

SEQ ID NO: 155943 - DNA, 201 bp, Homo sapiens
tattctaagtgttaacagttgtctctgagtggtgagattatggctgattttcagtgtctttttaatatttttctctactttctatatttctcgaacggccrtgaattactttcataatctatacaaacaacactaatcctaacccctttttattattaagattcaggttacatgacagaatcaacaatacaaaaaacttaa

SEQ ID NO: 155944 - DNA, 201 bp, Homo sapiens
cattctgcacaggtgtgacgtttctgtttgaaaagctctccaggtaaggaaatcccaccatctcattcagtgattcttttttttttttccctccacttgtygccaggcagagctgctttcccagtctcaccaccagagagatcagaaaaccaaaagcagattgcttgaatttcagcaccagcttggaatttgcagagttca

SEQ ID NO: 155945 - DNA, 201 bp, Homo sapiens
tttcaggtgtttaaatatcttttcaaactatttacaaagctctgaggaagattgtgaaacagaaggcaatgcacatagatctctatttggcctaacggtaycttggttttcttttacttcctcaggagggaagatcctgattagataaagctaaatattgattgacatccctgataatgtttgaagctttaatgtaacttg

SEQ ID NO: 155946 - DNA, 201 bp, Homo sapiens
ttttttttttttccctccacttgttgccaggcagagctgctttcccagtctcaccaccagagagatcagaaaaccaaaagcagattgcttgaatttcagcmccagcttggaatttgcagagttcagctttagctttatattagttgtcaagaaaatcagaatccttatgcctgttcctcttgaggagtaggaacttcatct

SEQ ID NO: 155947 - DNA, 201 bp, Homo sapiens
aagtgcatttagagtcatactaggatgaggtaccctccctgccatcaggcctgttggcagaattctcaggaggctgaagtttgggtcataagagctctctscatggtgtctcaaacagatgagggaaggatggaggtagaggttaacttggcagctgtcctctcttttccagttttagatacatttgggcttgcctagagg

SEQ ID NO: 155948 - DNA, 201 bp, Homo sapiens
aaaactactcatgagatgacagtttctctgaccctcagaggaaggctgggctgcgcatacgtgaggaatttttacatgaacatcccaggacttgctgttcscaggtgataaactgcacctccccaggactcccgctgcactcacatgcagctccctggacttctggtatctgacccggcccatttctgtgtttcaggggag

SEQ ID NO: 155949 - DNA, 201 bp, Homo sapiens
ccaaattatcatttcatgttatccatttcttcaaagcaaaacatgaaatggttttagctagagtcagaccagaatgaaaatgccaggagctggtacactasagatgtagtaagaacctgggatattcctgacccaatctggttttcttttacccataaataacatgaatgaaaaaagattgggacaatagagactggaagt

SEQ ID NO: 155950 - DNA, 201 bp, Homo sapiens
tagtattaaggcttcctggagagggtggtgggatgtctaagtgataacctgaaggacaagttaagtgaacatggagtcagggacattacaggcagtgggartagctggcacaaagtatgagggaggagagtaccatgagttagtggatctaaaagtataagcagatatgaaagacagtagagccccaagtctgggtcagcc

SEQ ID NO: 155951 - DNA, 201 bp, Homo sapiens
caaggcgttcagagacctgggcctggtcccaccgctgcccacagcactcagcctctgagcacagcctggggtcatctgtgtgccctctggccaaggctgayggtagttctctgagtaattgagagtcattgcctgtctgtgcagtattgtgaaaacaagtcaccttttaactttaaaactactttaaaaaactttaaagtt

SEQ ID NO: 155952 - DNA, 201 bp, Homo sapiens
tcatcatgtgcagttcaccgcttctgagcttgctgcagttttggggtgtgtgtgtattagattccttctcagttattctggaataaggcaaggagtgggtkgtttttcatagctagataagatcttttccaaagtttttcttagaaccaaccaaaaaacaatccgagtaggcccaagaatttgataatgctggatgccttg

SEQ ID NO: 155953 - DNA, 201 bp, Homo sapiens
cctaaagaaaagtattgttttctccattttgagtatttttaacctgtattcaaatcctcttctctcacgtctacaacctctttgtgatgaaggaaggatcmacgcttggttttcatttacttagggagaaatggaagttaatttgtattgccttagatttttctctgtagcaagtgttgattttactgattttatgtaagc

SEQ ID NO: 155954 - DNA, 201 bp, Homo sapiens
cctttcagtggaacttccccctgctgatgtttgcctggaaaatagctccagctttgtgctgtggcaatacagtagttattaagccagcagagcaaacaccmctcagtgcactctacatgggagccctcatcaaggaggtaagagaaacggacttcgggagtgcttctgactccccttacagctggagcctactagagcata

SEQ ID NO: 155955 - DNA, 201 bp, Homo sapiens
cgttagaacctaggcttgtaaccacttcattagagaattcaaaatagatcctaggaggaagagatatccttataggaaagggatggactgaaagagatagkgagtggtgaatagacataaggaaaggaaatgcacatttattgagtggatactagatgccacttagcactgtgccaggtgttctacctgtgttctccagaa

SEQ ID NO: 155956 - DNA, 201 bp, Homo sapiens
tcttcttttgagaagtgtctgttcatgtccttttgcccactttttaatggggttatttttttcttctaaatttgtttaaattccttgtagattctggataktagacctttgtcagatgcatagattgcaaaaaatttctcccattctgtaggctgttcactctgatagttccttttgctgtgcagaagctcttttgtttaa

SEQ ID NO: 155957 - DNA, 201 bp, Homo sapiens
gtctttgctattgtgaatagtgctgcaatgaacatacacatgcatgtatctttataacagaatgatttatattcctttgggtatatactcagtaatgggaytgctgggtaaaatggtatttctggttctcggtctttgaggaattgccacactgtcttccacaatggttgaactaatttacattcccaccaacagtgggaa

SEQ ID NO: 155958 - DNA, 201 bp, Homo sapiens
ggtcctaagaaatgaacctcccttccaccctccctctctcccttcttccttccctccctccacaaatgtttattctgctagtcactggcacaggtgctggrgatacaaagcaagccacacatggctactacccttgtaaatcacacagtctaaggtcactcataaccaagagtcagcaggttcccttgccatctcactcta

SEQ ID NO: 155959 - DNA, 201 bp, Homo sapiens
tgactccaccagtttgatgtgggaagtgttagcttcctttccttcttccatcccttcttccatctttccagctgtcaaatccaatccagtctctaacctaratgcagatcatttatttaaaagtaccaaacataacccagagtatgtggaatatgggcaacatatatatagccttctgtatttaacgatcttctgcttctt

SEQ ID NO: 155960 - DNA, 201 bp, Homo sapiens
ctttcagttaggatgacagcacacgtgggtcagttcggtatgagtagtcctaaagctgggatgattccacttgccagtaggaccttacagaggcttagagmagtaactgagaaaccccatgtctctaggaaggatgccacctaggccattctgcacaggtgtgacgtttctgtttgaaaagctctccaggtaaggaaatcc

SEQ ID NO: 155961 - DNA, 201 bp, Homo sapiens
atgttagtggtagatgatgcatttaactgtcaaaatgctactcacagcaaaggggaaccaattcccaggagaaggtctggagaagaggagggagaagagcytgaggcttggtgtgcacattctgagaccagtcctggctctgccactcagtgggtgcctgtttgcaagtcatttcttgacctctgtgagtcttgtcttgtc

SEQ ID NO: 155962 - DNA, 201 bp, Homo sapiens
tggatgttattgcacaattatgcaatactagtttgattcacaagagtcttgatgttgtttcctttacaacactatccattatttcctgccatggtacccartggagccattgtctctgaccataaatcctaagctttgacccttttacgatggcagtgcctaattatgatgataaataataatcattactatgacctatgg

SEQ ID NO: 155963 - DNA, 201 bp, Homo sapiens
gatctctagcagcaagggcttttcttaatataattatagaaatggctcaatgcacacatactcagtaaaatttaattcacagctcagccaaattcatagcmtaatgaagtatttaattgtaagatttttatattttccataagttgtaaactactatttggtcattaaaagcacccaggtatcaaaactcatcagaaaagt

SEQ ID NO: 155964 - DNA, 201 bp, Homo sapiens
atattctggataaaagtcctttgtgctttgcaaataatttctcccagtgtctcttaaagtttttaattttgatgtccagtttattaacattttcttttatrgatcaggcttttggtatggtatctaagaaatctttgcctaacataagatcacaaagactttctcatatgctttttttctagaaattttatagttttgtgt

SEQ ID NO: 155965 - DNA, 201 bp, Homo sapiens
ataaataaaaatgaaggcagacaactgtgaagcaaccatagggcatcataatacacgtggactcccctttacactcctgatcttgctactcagagtgtggyctgtggatcagaagcatgagcctcagctgagagcatgtagaaatgcagactctctggtcccatcctagacctgttgattcagaatctgtatattcacgag

SEQ ID NO: 155966 - DNA, 201 bp, Homo sapiens
accaatactgactgacaggttaccttaaagcctctaggtgtgccaagtttgatttatcttagggactagaacctagtcttctaaatgtgattttgccttgmtgtttcgtcctgatgtgaaggtaaccacacagagagattgggctgcatcagtaatgatatgcatacctttcgtgcatcagtgagcttcttccctgttaac

SEQ ID NO: 155967 - DNA, 201 bp, Homo sapiens
ctgatttccctgattagtggtttttagttctccttgaagaggtccttcacttcctttattagctgtatttcttaggtactttattctgtttgtatcaattrtgaatgggagtttattcatgatttagctctctgcttgtctattgttggtgtataggaatggttgtgatttttgcacattgattctgtatcctgagactta

SEQ ID NO: 155968 - DNA, 201 bp, Homo sapiens
caagcacaaaaatagcgtttattttttaatttgctacttagactaactgtagggactagaagattctgtctctttccctgtgttagcctgtagctaaatgyttttcaaatatgtgaacggtttatccaagagagttttaattcctcataactcagtttctcttgagacacaattatggagtcaaactcaattcctcatgag

SEQ ID NO: 155969 - DNA, 201 bp, Homo sapiens
aatgtctaagcatcataaaatgtgtagggggaaatggtttatgaattgccatgcagtgcttgtgtagttgccttgtgagtttttttttctgaaccattccrggttcctacatgtgctgctaaaataaacacgtgtactcttctgttcatcttccaatttttttcctcagccccatttgcactctttcttgacattactctc

SEQ ID NO: 155970 - DNA, 201 bp, Homo sapiens
gcctaaactgaaagtgacttctatgtcccttagtaggagggtttacagtagtaacattgtttattgagcccatggaataacctgcagccactaaaaagacstcctagctttacaggaaaaaaaaaaaaaagagggaaaaacaaaatataaaagactgaataatatcccgtttgtataaaaaaaaagaggataaaaggatcc

SEQ ID NO: 155971 - DNA, 201 bp, Homo sapiens
cctgtccccaccttcatttccacctataatagttatgctttcatgaatattagctgagtgttttcacttgccttaggggactgcttttgagagagaaaacragtatcagtgaagtggcctaagggccggcagtggagggaaaaataaagactttgcccagtatttaaaatgaaaagctatctgctaaaaatgagccattct

SEQ ID NO: 155972 - DNA, 201 bp, Homo sapiens
ggggactgcttttgagagagaaaacaagtatcagtgaagtggcctaagggccggcagtggagggaaaaataaagactttgcccagtatttaaaatgaaaarctatctgctaaaaatgagccattctttggtaattttaattaaccatttaaaataattcagataaaagcaatgacattttcctaaagatgaatttggtttg

SEQ ID NO: 155973 - DNA, 201 bp, Homo sapiens
agtttttctgaagctctttttcttttagcccctaggacattctcatttctatgtctagtttgggggcagacgctttggattattgatggagttctttttakaaatggacttttaccttctttaaatagccctggacatgcctatgtctcatcactacccaggaagtacattttgacacctggattgagttatgaaatatat

SEQ ID NO: 155974 - DNA, 201 bp, Homo sapiens
aattgagagtcattgcctgtctgtgcagtattgtgaaaacaagtcaccttttaactttaaaactactttaaaaaactttaaagttttaaaaaaacttctttaaaaactactcatgagatgacagtttctctgaccctcagaggaaggctgggctgcgcatacgtgaggaatttttacatgaacatcccaggacttgctgtt

SEQ ID NO: 155975 - DNA, 201 bp, Homo sapiens
ttttctttaaagaatgtcaaactttttttttcctaaaaggtagttaagttacttgaggttcagcttgtctcttttggaacttacctttaagctttgttaaractagtttattcttattaataagctgaaatccttctgaggtttctgttgaatgtccccagtgttcaacaagatctttcttatctgtctggtcagaattca

SEQ ID NO: 155976 - DNA, 201 bp, Homo sapiens
cttttgttacgatcatgtagtggaatagtcgtagagctaagctatcttcatgacagactcaggaacataatctaacttcttagaaactaccagcagacttytgggaagaaaagcatcagtacacttcatactaacatacagtttcagcgtttgtataggcatttatagagtttatcatcatagttataaaatgttgggtga

SEQ ID NO: 155977 - DNA, 201 bp, Homo sapiens
ttcaagaaattgaatcaataattaataacctttcaaaaaagaaagcactaagtccagatggtttcactggtgacttctaccaaacaaacataccaattatytacagtctcttccagaaagttgaagcagagggagcactaactcattttatgaggccatcgttaccctaatatcaaaaccagataaagagattacgagaat

SEQ ID NO: 155978 - DNA, 201 bp, Homo sapiens
tgccattctgctgaaatttacattcttcggctgtattttattttatttttatttattttattttttgagacggagtctagctctgtcgcccaggctggagygcagtggcacgatttcagctcactgcaacctctgcctcccaggtacaagcgattctcctgcctcagcctcctgagtagctgggattacgtgcacgtgcca

SEQ ID NO: 155979 - DNA, 201 bp, Homo sapiens
gtattccttgatgtatatataccacattctctttatccagtctatcattgatggggatttgggttgattccacgtctttgctattgtgaatagtgctgcamtgaacatacacatgcatgtatctttataacagaatgatttatattcctttgggtatatactcagtaatgggactgctgggtaaaatggtatttctggttc

SEQ ID NO: 155980 - DNA, 201 bp, Homo sapiens
tgtatggacatgtatgtccttttctcttaggtaaatacctaggaatggaatggctggattgtgtggtagggcaggaaactgccaaactgttttccaaatcsgttataccatcttacattcctaccagcaatgtttaagactttgaactcctttacatccccaccaacatttgatgtggttagtcttttacattttagccat

SEQ ID NO: 155981 - DNA, 201 bp, Homo sapiens
ttttttttcttaacctgttcagtgctgccaatcaaccgagggtctgtgagtggcaacgtggaatcaggcagcagggctttcttcccccttgccttggtccytcgcaggaatgagccaccaggctgtggaggagaaggggtcacggccatatcccaatatgtgtatggtgagggtccctgctggcacgtccaggctgccagc

SEQ ID NO: 155982 - DNA, 201 bp, Homo sapiens
gctcttccatctttcaccatgggatgacaccacaggaagtcgttcaccacatgtgggtctctcaaccttggacttcccagcctctcgaactgtaagaaatraatttcctttctctattaggtatccagtctgggacattatagctaaactgaatggactaagaaaagctagtatatctagagtgtttagcactggatctaa

SEQ ID NO: 155983 - DNA, 201 bp, Homo sapiens
atagtgttgagagatgggcactagtgaggggtgttcaggtgggtactaatctgttaacccacattaatagattaatgccattataaaagggcttgagattkcacattgaatctcgtgctgtcttgtcgtctcttgctcttccatctttcaccatgggatgacaccacaggaagtcgttcaccacatgtgggtctctcaacc

SEQ ID NO: 155984 - DNA, 201 bp, Homo sapiens
caatttttttcctcagccccatttgcactctttcttgacattactctctgattctgtggtctgtgactatccacctgaacccatcaccttaaccaacttasagagttcagttgcagaagattttcttgtaaatgaaactctagcttattgatcagtggtgttgctcctcatgaaaaaccttttcagagatttacaaattga

SEQ ID NO: 155985 - DNA, 201 bp, Homo sapiens
tttttttttttttttgagatggagtttcactcttttgcccaggctggattgaagtggcacaatcttgtctcacagcaacctccgccccccaggttcaagcrattctcctgcctcagcctcccaagtagctgggattataggcacctaccaccatgcccggctaattttcgtatttttagtagagacgggggttttgccatg

SEQ ID NO: 155986 - DNA, 201 bp, Homo sapiens
tagtacctacatctccggcatttatttttaacagctgcatagaatactcttgcatcagtatatcatcatttaatcctgtattaatgtacacttgagggtgktttttccactaatttttcctattaaacagactgctgaaataaaaacctttggagacccaagaaaaattttacttgtaaatctgtaactgtatacacatat

SEQ ID NO: 155987 - DNA, 201 bp, Homo sapiens
taattgagagtcattgcctgtctgtgcagtattgtgaaaacaagtcaccttttaactttaaaactactttaaaaaactttaaagttttaaaaaaacttctttaaaaactactcatgagatgacagtttctctgaccctcagaggaaggctgggctgcgcatacgtgaggaatttttacatgaacatcccaggacttgctgt

SEQ ID NO: 155988 - DNA, 201 bp, Homo sapiens
agtaattgagagtcattgcctgtctgtgcagtattgtgaaaacaagtcaccttttaactttaaaactactttaaaaaactttaaagttttaaaaaaacttctttaaaaactactcatgagatgacagtttctctgaccctcagaggaaggctgggctgcgcatacgtgaggaatttttacatgaacatcccaggacttgct

SEQ ID NO: 155989 - DNA, 201 bp, Homo sapiens
acagggtagaacttgggaagagggaataggaagctcgcccttcctccttccctcctcccctctctactttccttccttccttggtcatcaggtaccttctktgtgcctgctgttgtaggctataccctatgtttggtggaaggcaaaaagaaaaatcagtaggatacaactcagtagggaagacagagatattcaagcccc

SEQ ID NO: 155990 - DNA, 201 bp, Homo sapiens
atactgaggttcaggaactgctggagagatgactgggcaccaagaggatgacagtgactcagctggcatcccttagctggttcatggcagagctgagtggscactcctgtctctgaccccagcttcagtgctctttatctcctccatgcctcctcagtcgtgctgctctaagactgcttactggctttccttcatgtcctg

SEQ ID NO: 155991 - DNA, 201 bp, Homo sapiens
agaggagcagctctgctccagcagggttttccattgcatcacacacccaaacggtaggatccaacagtcacacttgaaagcaaccataatcgtgaggtttytgatgctgtagacttccttacatttctcacaacctagttagagagtcacatgggggtgaagtgtggctcgcgacctgccccaacaagtgcgtgcagaagc

SEQ ID NO: 155992 - DNA, 201 bp, Homo sapiens
cgtatctagggacccactctcagagattctgagttagttgatctgcgataggacccaggaactgcgtttttaacaagcttccagagtgactccagtatacmtcactgcccaggacccacagagaagcacctccgttccagcagggttttacattgcatcacacacccaaacactgggatccaccagtcacccttgaaagca

SEQ ID NO: 155993 - DNA, 201 bp, Homo sapiens
tcctctttatggattcagattactggtgtagatgccaaaaaatccccagtgagctctgatcattaatataacggaagctgttttgacaagcagaacatttytttatcattagttaaagaaatattgtgttaacgtatttggatagtggttactggaagcacaggaatatgcacatatatactcattgtggtttttactagg

SEQ ID NO: 155994 - DNA, 201 bp, Homo sapiens
taaccaggagagagaatccactgaagcatctttacatctgtgcaagagagggacaaggagcaaatcagcccacagtccagagcattccgttctggagcagygtttgcaggatcacggaggatgccacttgctcttctgtacctaaagaagacacccctagtatacacagtggaatcaagtgatgctggagaggttggggaa

SEQ ID NO: 155995 - DNA, 201 bp, Homo sapiens
cccatagcctaacacatcccgttctttcttgaactataactcgactttcttccaaagatgaaggggaaaggtatcattcatctgagatttgccttgtggtgtttaccgagttagtgggtgcagcgcacaaatttgttttctaaggaaaggctggtaaagcattgatgcaaggaaaattattcttaggtattcttctctgat

SEQ ID NO: 155996 - DNA, 201 bp, Homo sapiens
gttcaggacctgagtataaattaggtgaatgcttattgcagcaccattcaagtttccttgagaagtcacttaggcctgtggcagagaaagtaggatctaargcttgatgactgtaagtttgatctgctatttaaccctcatggatactagccagagcttgggctatcgataactcttgccttagcatcagtgtatgattgt

SEQ ID NO: 155997 - DNA, 201 bp, Homo sapiens
tcccatagcctaacacatcccgttctttcttgaactataactcgactttcttccaaagatgaaggggaaaggtatcattcatctgagatttgccttgtggtgtttaccgagttagtgggtgcagcgcacaaatttgttttctaaggaaaggctggtaaagcattgatgcaaggaaaattattcttaggtattcttctctga

SEQ ID NO: 155998 - DNA, 201 bp, Homo sapiens
agtagctgggactacaggcacccgctaccatgcctggttaatttttttgtatttatttttagcagagacggggttccaccatgttagccaggatggtctgkatctcgtgacctcgtgatccgcccgcctcggcctcccaaagtgctgggattacaggcatgagccactgtacccggcctgtcttcactttttaataactaa

SEQ ID NO: 155999 - DNA, 201 bp, Homo sapiens
ctcccatagcctaacacatcccgttctttcttgaactataactcgactttcttccaaagatgaaggggaaaggtatcattcatctgagatttgccttgtggtgtttaccgagttagtgggtgcagcgcacaaatttgttttctaaggaaaggctggtaaagcattgatgcaaggaaaattattcttaggtattcttctctg

SEQ ID NO: 156000 - DNA, 201 bp, Homo sapiens
ggtgtgtgaagttcaagaagcagacaaggtatgtcttttgtagataaaagatttcctatgaaataactgccttcaaacagcagagcagcaaacatatgctytcagtacaccactacatgctcatgcttcacttttttcatgacagtggatggttcttcctttatttggagtgtttttcttcagttgtgcctcttcctctct

SEQ ID NO: 156001 - DNA, 201 bp, Homo sapiens
catttgtatttgtcttttgtaactccataatttaacatcagcttcattttgtctctgcatacttggcttttttttttttcacagtgaagtctggaatataraaagtccgttagtctttaaccatgagatctttattgtgctaaatgcattttcctacaaaacaacctaattttatgttgggaattataaagaaataatgta

SEQ ID NO: 156002 - DNA, 201 bp, Homo sapiens
agagtgggagagtgttccctgtctataatccagccacaggagaacaggtgtgtgaagttcaagaagcagacaaggtatgtcttttgtagataaaagatttyctatgaaataactgccttcaaacagcagagcagcaaacatatgctctcagtacaccactacatgctcatgcttcacttttttcatgacagtggatggttc

SEQ ID NO: 156003 - DNA, 201 bp, Homo sapiens
  misc_feature (1)...(201): n = A,T,C or G
acagtgtcttctgcaatgcaagctgggactgtttggtaagatcagagtcagtcttgtaacaaattccactggtggtatagggaccagggtgaaataaacangtatctccttggaaggatggggaataccaaaagcaaccaaagttcaccagaaaaggggtacactccttactgcttagatccagaaatcaaagtagatttt

SEQ ID NO: 156004 - DNA, 201 bp, Homo sapiens
agcaaagggaaataaatctaacttggatttacacatataacttgttgaactaactagttagtttggttagagtcattgttcaggacctgagtataaattargtgaatgcttattgcagcaccattcaagtttccttgagaagtcacttaggcctgtggcagagaaagtaggatctaaggcttgatgactgtaagtttgatc

SEQ ID NO: 156005 - DNA, 201 bp, Homo sapiens; identical to SEQ ID NO: 29113

SEQ ID NO: 156006 - DNA, 201 bp, Homo sapiens; identical to SEQ ID NO: 29114

SEQ ID NO: 156007 - DNA, 201 bp, Homo sapiens; identical to SEQ ID NO: 29115

SEQ ID NO: 156008 - DNA, 201 bp, Homo sapiens
ggagcccctttcccttgggccaccttgacaatgaatgtggaccggctcttccctgagcctgcagctttacttccaggacagtgggctctgtgatgcccagwtctctgggcccagttatgaccctgttttctttcaaaggagacccacatgtcattgggcatatacatgtgtttgccattccacacgggttctgtagccttt

SEQ ID NO: 156009 - DNA, 201 bp, Homo sapiens
ctgctgattcccacaaagccattccccagggtcttctctgtgtacacagtcaagttgagaaaagatggtgctgctggtttaaatcccagcactgtcactcwctatgtgatgtcgtaaaaataactccctaagtttctgtttcctcatctacaaaatggtgatcataatacctaccacacaaggttgttgtgggacttaaat

SEQ ID NO: 156010 - DNA, 201 bp, Homo sapiens
atccctgccccactcagtcacaggaagtgcagcctcagcacagactcagctgtggatttcagagcacagcagctggggtcctcagtcaataacactctctrcagttggaggtctgcagggcccgttctcatggccaccagtgggcccaatgaggttccttcctattctgagatccagcgatctgactaatacgtgcccaag

SEQ ID NO: 156011 - DNA, 201 bp, Homo sapiens
ggaagccggggaagactggagagcagtgacgccgtgaagcgagtctgaccctaggggtggggagaggaagaaaggtcaggcggcagcatcccagaccaccrtgtggtctgcaaggcccttggagggtcctccagccaaagctggctgtcacaggagtcccgcgtctcccagaacgggccagcctcagtatccctgccccac

SEQ ID NO: 156012 - DNA, 201 bp, Homo sapiens
gcgggcctagggaaatgcacagaaggacctgagaggcactcggcgtttcactggaaaaacacttcaaaatttaaggcaattctagtcttgtgatttttggktttttttagacggagtctcactctgttgcccaggctggagtgcaatggcgcgatctcggctcactgcaacctctgcctcccaggttcaagcaattctctt

SEQ ID NO: 156013 - DNA, 201 bp, Homo sapiens
gtgccttgtatactggaggagctctgggtagcccccgtgtgagcaaatggatgtgaatgggccttggaaagccaagggctcctgtgccacacaccccccccggggggcagaggcgccagcccaggtgagacagaaggagacatttgcctcttgctaagcactggagtcactgcttcctatggctcatcttgtttcttcctc

SEQ ID NO: 156014 - DNA, 201 bp, Homo sapiens
caaacctgcctagggcagcacgtcctctgagagccacgccaagacacctgtgagggaaaaacggggaggaagccggggaagactggagagcagtgacgccrtgaagcgagtctgaccctaggggtggggagaggaagaaaggtcaggcggcagcatcccagaccaccgtgtggtctgcaaggcccttggagggtcctccag

SEQ ID NO: 156015 - DNA, 201 bp, Homo sapiens
ttttttatgtggccaggtatggtggctcacatctgtaatcccagcactttgggaggcagaggcagaaggcttgcttgaggccaggagctcaagaccaggcygggccacatagggaggacttgtctttaaaaaaaacaaaaataaaaaacatataaacattttttgtggggcccatcaaaaccctgcgtggccctggttcag

SEQ ID NO: 156016 - DNA, 201 bp, Homo sapiens
gtggcttgcaaaatgaaacatgtcatgcttggtaataagagttgatctggtgaaaccccgtctctactaaaatacaaaaaattagttgggcatggcagcaygcacctgtcatcccagctactcaggaggctgaggcaggagaatcacttgaacccaggaggtggaggttgcagtgagcccagaccgtgccattgcactcca

SEQ ID NO: 156017 - DNA, 201 bp, Homo sapiens
tgagccccctgtgcttgtgatgagcccgggaacagaaggaggatgacaggtgggagacaggacaagagggctcgtcaactgccacttggagaatcctctgyctaggggatcttcaaactatgtgagggaacttacttcccatcaacagctgattggcaaattaaaatcaacgttatttacttaacattgaagaaaatcgaa

SEQ ID NO: 156018 - DNA, 201 bp, Homo sapiens
tcatggccactgggggtggaacaagatccatgacctccatgtatggccacctgctggggctgcagaagctgaacctcctggactgtgccagctacatcacyggtctatcaggggccacctggtaaggagacatgagccactgtctgtggagcccagggcaagccacgaacaggctggcctggggtctcaggtgaagctcct

SEQ ID NO: 156019 - DNA, 201 bp, Homo sapiens
agaaaggcaacccccgcctcaggccgggcagagtgccctgtaactgggcagcttgttcctcactcctccctcttcttcacctggcagggctgagccccctrtgcttgtgatgagcccgggaacagaaggaggatgacaggtgggagacaggacaagagggctcgtcaactgccacttggagaatcctctgtctaggggatc

SEQ ID NO: 156020 - DNA, 201 bp, Homo sapiens
gggctgatctgaaaggctccccactctggggattagagtgacctcagcaaccatctagtgttcaagtcctaagtcttttgttaaaaaaaaaaaaaaaaaagaagaggggaagaggaggggagggagggaggggagggcaggggagcggaggaagggaaacttcttttcccccaactttttacccctcagttgagggagctc

SEQ ID NO: 156021 - DNA, 201 bp, Homo sapiens
gggtacaggccctcagactccggcttcatgataacctcatagctgctgctgattcccacaaagccattccccagggtcttctctgtgtacacagtcaagtygagaaaagatggtgctgctggtttaaatcccagcactgtcactcactatgtgatgtcgtaaaaataactccctaagtttctgtttcctcatctacaaaat

SEQ ID NO: 156022 - DNA, 201 bp, Homo sapiens
gacttgtaatagcgctttagccaatggaaggttcttacagcccccactcaaaggaaaacagacagaatgagtcttgacaaagagccccttcctccctcctwtttttttttttttttttttttttttttcttgagacagggtcttgctctgtcacccaggctggagtgcagtggcaccatcacagctcactgcagcctccac

SEQ ID NO: 156023 - DNA, 201 bp, Homo sapiens
tttattttattttattttattttattttattttgaaatggagtctcactgtcgcccaggctggagtgcagtggtgtgatctcagctcactgcaacctctgyctcctgggttaagcgattctcctgcctcagcctccccagtagctgggattacagatgcacacctctacacctggctaatttttgtattttcagtagagac

SEQ ID NO: 156024 - DNA, 201 bp, Homo sapiens
ctgtttccgaaagaaaacccacgtgaagtttccactcaacccgcaggtgggtgcagggtacaggccctcagactccggcttcatgataacctcatagctgytgctgattcccacaaagccattccccagggtcttctctgtgtacacagtcaagttgagaaaagatggtgctgctggtttaaatcccagcactgtcactca

SEQ ID NO: 156025 - DNA, 201 bp, Homo sapiens
tcggtgctcactgacgaccctgctccaagagcatctctcagcctcttactgcccatctctctggctgcctcatgggattacttatttctaaatgtgattcstcttatctgtgttgtcaacaccgtgaccagtgcattccaactcttggagagtcacccacagagactgaaactgggaagaattagtgaaaaaggactaggt

SEQ ID NO: 156026 - DNA, 201 bp, Homo sapiens
gcacgattcgccccactttacagatgggaaagtggagacccaaggtcacagaagtggtcgctggcagaagtaggctttgagcctaggtccaatggaccctraagctgtgtctactccagggaggtagaggctgcaggcccaatacagggtcctctctccctccagccctgagacactggacgtgcggctgggcttcagcct

SEQ ID NO: 156027 - DNA, 201 bp, Homo sapiens
gatctggccgaggagacagaggactcaaagcgtccctaacacagtgccaacagttatcttttgttgagtaccagctcgcattgtgccagctaaggctttgrgggctttgcatttgttatctctttaagtgctgaagacagtgctgagagttcagcacgattcgccccactttacagatgggaaagtggagacccaaggtca

SEQ ID NO: 156028 - DNA, 201 bp, Homo sapiens
gtgggcaaagggaagacacttctggtgaaggcaggggcctgtgccaagacccggaaacaggactgcttctgggagctctgggacctgacccagaagtttcrcgggtagtttgaggtgagcttggaaagatcaggcagggtcttggatgccaggccaggagcctggacttgtttggggcagggatgtgattaaaaaaaaaaa

SEQ ID NO: 156029 - DNA, 201 bp, Homo sapiens
cctcctgccagctttaccatcgagaggactctctgacactggaaactgctggctttcaccatttcctatgtatctggtgtgtaccctgggcctcaccctcrccaactgccaggagagtgacaggggcagtcatggcccctctgcctccctcctcccaggtagactagagcagggagccagtctgggctactattttcaccc

SEQ ID NO: 156030 - DNA, 201 bp, Homo sapiens
agtgcgcagcctccctcctgagcatgggctgcagcctctcctaagatgggccccgcagtcagtggcctcactcgctgtgaactgggaagaggcatgctctrgacagcccccagagagcatcagaggaagccaagcagcagtcatgatgggaagtcagacacccagaactcacgggcagccagctggctctcacaccatggt

SEQ ID NO: 156031 - DNA, 201 bp, Homo sapiens
caggatcctggagacatgactgtgctgaggactcagagagctggaggtctggaaggagggaacaaagagggaaggtaggaaggaaaggaaggaaggaaagsaaggaaaggaaggaaaggaagaaagaaagaaagaaaggcaacccccgcctcaggccgggcagagtgccctgtaactgggcagcttgttcctcactcctcc

SEQ ID NO: 156032 - DNA, 201 bp, Homo sapiens
tccacctcacttctctccttctcctctgcttaccggatctggatggaagaggccctggctggagaaatggtcaggtggatccgtgtgtgtgtgtgcgcgcrcacgcgtatacgtgcatggtgtatacgtgtatgtgtgtgcatgtatgtgcacgaatgtgtgttctatactcaagttgtatttcagactttggggtttctg

SEQ ID NO: 156033 - DNA, 201 bp, Homo sapiens
agaagcctagcccagcctcccaccctaagcgcctcggttcttcatgagctgggcccaccgaatgcaggacccactcgagttcttcccttcagagtcttagstgcgcccgtcaaagggcttcttcagaaacagacccacattcacagccccaacacgcccttatttaaattagttgtctgtgccttccccttctgtctatcc

SEQ ID NO: 156034 - DNA, 201 bp, Homo sapiens
ccacctcacttctctccttctcctctgcttaccggatctggatggaagaggccctggctggagaaatggtcaggtggatccgtgtgtgtgtgtgcgcgcgsacgcgtatacgtgcatggtgtatacgtgtatgtgtgtgcatgtatgtgcacgaatgtgtgttctatactcaagttgtatttcagactttggggtttctgt

SEQ ID NO: 156035 - DNA, 201 bp, Homo sapiens
gagaagcctagcccagcctcccaccctaagcgcctcggttcttcatgagctgggcccaccgaatgcaggacccactcgagttcttcccttcagagtcttasctgcgcccgtcaaagggcttcttcagaaacagacccacattcacagccccaacacgcccttatttaaattagttgtctgtgccttccccttctgtctatc

SEQ ID NO: 156036 - DNA, 201 bp, Homo sapiens
ctccctcccctaccagggcatggaagagctggaggtggagttcctgctggaggagaggtgagtaggcccaggccccggggcccaccaaggtcctggccatyaagtagcttctgggaacgagcatttcagaggcaggtcggcctttttgctgcctcaccctcttccagtctcactcctggcactaaccctgactcttcactg

SEQ ID NO: 156037 - DNA, 201 bp, Homo sapiens
gtgtaaccccaggtgccgctgatagccatcatggccactgggggtggaacaagatccatgacctccatgtatggccacctgctggggctgcagaagctgarcctcctggactgtgccagctacatcactggtctatcaggggccacctggtaaggagacatgagccactgtctgtggagcccagggcaagccacgaacagg

SEQ ID NO: 156038 - DNA, 201 bp, Homo sapiens
gggtgttgcgatcctggacatcagggtgggctcagctgacatctgtgccctttaggttgcacaagccgagattaacaacttttgttgttgcctggccccaraggagagcttcccacctctgtccaggcccacggttccctgctccactccaaaggtgtccggggagttctgaattcaaatcagaacttgccagaaagtcat

SEQ ID NO: 156039 - DNA, 201 bp, Homo sapiens
gaccctcatcttcaatcttccctcattccttcaattaaattacttgagtacctcctgcatgccaggaactgcgctggcaaatggggattcagaaaggaatsggacatggcttccaaccccaggccctcgccacttctgatggatcccacccaccctgcccctgtgataacccaccacttaacctgtcctccctatgaagca

SEQ ID NO: 156040 - DNA, 201 bp, Homo sapiens
gtgctgaggactcagagagctggaggtctggaaggagggaacaaagagggaaggtaggaaggaaaggaaggaaggaaaggaaggaaaggaaggaaaggaaraaagaaagaaagaaaggcaacccccgcctcaggccgggcagagtgccctgtaactgggcagcttgttcctcactcctccctcttcttcacctggcagggc

SEQ ID NO: 156041 - DNA, 201 bp, Homo sapiens
ccaatgaggttccttcctattctgagatccagcgatctgactaatacgtgcccaagaagaggaccagcctgtgttgggtggctgctgctgtgagagctgckacccagcacagggtggtccttttcctggacacatggcacagcacagggatctccaaggggtgttgcgatcctggacatcagggtgggctcagctgacatc

SEQ ID NO: 156042 - DNA, 201 bp, Homo sapiens
gtcctcagtcaataacactctctgcagttggaggtctgcagggcccgttctcatggccaccagtgggcccaatgaggttccttcctattctgagatccagygatctgactaatacgtgcccaagaagaggaccagcctgtgttgggtggctgctgctgtgagagctgcgacccagcacagggtggtccttttcctggacac

SEQ ID NO: 156043 - DNA, 201 bp, Homo sapiens
tgtgtccgtgagtgcaggttggtgggccttggggagagatgtggaaacaagtcattccaacctaacatgacagagtctataacaagtcatcctgctgcccrcaggtgtagagcgaagccctgaggagctggagcagggccaggtggacatttatggtcccaaaactccctatgccaccaaggagctgacatacacagaggc

SEQ ID NO: 156044 - DNA, 201 bp, Homo sapiens
gtcccagtgctgctccctctatccacgcttgtctgtgctgtgccatgccaggacctcagattgcctaggtcagtgaggtggtcagcacccgaagcccaggrcccctctaactatgccccttcctctaggcagaccacagctcacagagggtcctagcactttatagctggcagagacctaagagatccatgaataccatac

SEQ ID NO: 156045 - DNA, 201 bp, Homo sapiens
aggggggcccggctgtgtggacggctccctggcctgagactgacccccgtcctgctgcttcatgtgcagagtggttcgagttctccccctacgaggtgggyctgcagaagtatggggccttcatcccctccgagctcttcggctccgagttcttcatggggcggctggtgaagaggatcccggagtctcgaatctgctaca

SEQ ID NO: 156046 - DNA, 201 bp, Homo sapiens
agatgaccaagccctctgtcactccactaggaacaaggattagaacttatctgtgcctaggaaatccccatagtccatgaaattctcagaaccaggtcacygttgcctaaccattcattgctgggggtggacaggggaagcagctctctgcaaaagaactgaaaaactaatgcttggaatgtgggtgtctgatcaatcttg

SEQ ID NO: 156047 - DNA, 201 bp, Homo sapiens
tgctgaaaacaacatcgttttcagaaatcttgattgtcagaaatcaagtggccatgatttctattgacagtttgattagctatttgcccttggaaaagctytttgcccttactgagtctctgttttcctcatctgtacattgggagaataacaaggatcctgtgcatcactgggttgctctgaggatccagctagacagca

SEQ ID NO: 156048 - DNA, 201 bp, Homo sapiens
gtgtcctttgggggaactgcggcctccctgtcccaggctttccaaggcctgagccagtggctgcaggcaggaggggggcccggctgtgtggacggctcccyggcctgagactgacccccgtcctgctgcttcatgtgcagagtggttcgagttctccccctacgaggtgggcctgcagaagtatggggccttcatcccctc

SEQ ID NO: 156049 - DNA, 201 bp, Homo sapiens
ctatagattgagaatctctggggaatttgaactggtgccccaggtgattctaaactcctcctggatacctccaaataggttttttgctggaccaagttgcrggtgggtagtgagaggctcccagggtctcaccctcttgtcctctctcccagtgaaggacctcctggtgatggtgaacgaatcctttgagaacacccagcg

SEQ ID NO: 156050 - DNA, 201 bp, Homo sapiens
gatctgaaaggctccccactctggggattagagtgacctcagcaaccatctagtgttcaagtcctaagtcttttgttaaaaaaaaaaaaaaaaaagaagargggaagaggaggggagggagggaggggagggcaggggagcggaggaagggaaacttcttttcccccaactttttacccctcagttgagggagctcaacat

SEQ ID NO: 156051 - DNA, 201 bp, Homo sapiens
ctcacttctctccttctcctctgcttaccggatctggatggaagaggccctggctggagaaatggtcaggtggatccgtgtgtgtgtgtgcgcgcgcacgygtatacgtgcatggtgtatacgtgtatgtgtgtgcatgtatgtgcacgaatgtgtgttctatactcaagttgtatttcagactttggggtttctgtcact

SEQ ID NO: 156052 - DNA, 201 bp, Homo sapiens
ctcactttgaaagcccagagctgaacattccctcaggtcagattcccgacctgcagctgaggacctgacccctagtaaactgtgaccgtgggtcctagacmtcctgggacagcttcgtggtcaagtatcctatctctgagtgagatggcatgccttgattgggttcagaaaatgtggtcaacacattctgcattccccagc

SEQ ID NO: 156053 - DNA, 201 bp, Homo sapiens
aagggatgctgtggactctgccaggctaattgaaaccttggaggcttatgttctcaactttataacacaagggcatttaacattcaccctctcagctgggycagactgttaaatgcataagttagataaagcacagaatggagaatggatcattttcactaccaaaactgtttatgtctgctctagctggcaggttgcagc

SEQ ID NO: 156054 - DNA, 201 bp, Homo sapiens
gaggagctccggcagcgcagccaggaaggctacagggtcacctttacagacttctggggcctgctgatagagacctgcctgggggacgaggtaggtgctcrgcttctcctgggccccaccctgccctggctgatgcctggctctctttcttcctcaggggagtcaggacttccattgcacacaggggattaggttagacct

SEQ ID NO: 156055 - DNA, 201 bp, Homo sapiens
aaattaaaatcaacgttatttacttaacattgaagaaaatcgaagctctcccctccaattcttgatttgacagaatttttagagggcggggaaaactcctrggctgaattagaaagtggcttgcaaaatgaaacatgtcatgcttggtaataagagttgatctggtgaaaccccgtctctactaaaatacaaaaaattagt

SEQ ID NO: 156056 - DNA, 201 bp, Homo sapiens
ccactgttatgcctggcacacagtgggcatttgagaactggtagcacttgtgattatgagtaataatgttcacctcccctgctcctcactgtctgccaggyctctgcctcacccctactctccaggttcccctcctggcaggttagggttctcaatggcctgcccaccttccctcctgcccgggtccaggactcatcagac

SEQ ID NO: 156057 - DNA, 201 bp, Homo sapiens
cagcccaggtgagacagaaggagacatttgcctcttgctaagcactggagtcactgcttcctatggctcatcttgtttcttcctcacaaaaaactatgagrgaggcattgtcattatttttcagctggagaaacagagtaatttgccagggacactcagttaatgagcagtggagtagaatttgaacctagtcccgggccc

SEQ ID NO: 156058 - DNA, 201 bp, Homo sapiens
ccataattcaggcaactagcagtgttcacagaacacaatggagaggtagtaagtcttggttcccttccctccttttcttccctcagagtcccattgctggratggccccaggaacagaggacagatgagggtaaaggtgggcgaatctgcagatcagagacagtcagagctggagcccccaggatgctgtcaattcaatca

SEQ ID NO: 156059 - DNA, 201 bp, Homo sapiens
atctacaaaatggtgatcataatacctaccacacaaggttgttgtgggacttaaatgagaaaccataattcaggcaactagcagtgttcacagaacacaayggagaggtagtaagtcttggttcccttccctccttttcttccctcagagtcccattgctgggatggccccaggaacagaggacagatgagggtaaaggtg

SEQ ID NO: 156060 - DNA, 201 bp, Homo sapiens
ccccctgagcacctgcctggctgacctgtagccagacatccacacactacccgatgctcccagcaacttgaggagaggccctggaggcccattttgcaacragaggttaatgattgcctaagagggaagtagggtctggtcccaggtgtggagagtgtggcaagagaggagacaagccaggtatggagaaccaggaagtga

SEQ ID NO: 156061 - DNA, 201 bp, Homo sapiens
tagtgtcatcccccattctttcagtcattctacattttctgacattcagccatgtgcccagtactgtgcttggtgctagggcaatcctccaatgggcaagyctgcaccacgccctgaggagcttgcaggtgtgcaggtgcgtgtgtgagggtgtgcgtgtgtacaggttttcatgcaggtgtgtgtgtccgtgagtgcagg

SEQ ID NO: 156062 - DNA, 201 bp, Homo sapiens
tggtctccagcagtctccctgcagcctgctcagcaccacactgggaacagcagactcagacggaagcttctgtaactcccacccactcccgtctagcttcrgccagcagtgtgcctgcttccaggggccaacccagacctgggacccgagggtccagggagaccacagggtaaggggcagggtcaccagagaagcctagcc

SEQ ID NO: 156063 - DNA, 201 bp, Homo sapiens
caagggtgcccccatgtgtcctttgggggaactgcggcctccctgtcccaggctttccaaggcctgagccagtggctgcaggcaggaggggggcccggctrtgtggacggctccctggcctgagactgacccccgtcctgctgcttcatgtgcagagtggttcgagttctccccctacgaggtgggcctgcagaagtatgg

SEQ ID NO: 156064 - DNA, 201 bp, Homo sapiens
ctctgtgatgcccagatctctgggcccagttatgaccctgttttctttcaaaggagacccacatgtcattgggcatatacatgtgtttgccattccacacrggttctgtagcctttgcacactggggtgaccagggttggtcacccaggagtcagctgcttggcctggggtcagagcctgggcctctaagaccttgattct

SEQ ID NO: 156065 - DNA, 201 bp, Homo sapiens; identical to SEQ ID NO: 29122

SEQ ID NO: 156066 - DNA, 201 bp, Homo sapiens
tcacgcctgtaatcccaacactttgggaggctgaggcaggcggatcacgatgttaggagttcgagaccagcctggtcaatttattgaaaccccgtctgtastaaaaatacaaaaattagccggacgtggtggtgggcgcctgtagtctcagctacttgggaggctgaggcaggagaatcgcttgaaccggggaggcggaga

SEQ ID NO: 156067 - DNA, 201 bp, Homo sapiens
atcaagccagccaaaatactcccttaagcccaggcttaatacagagcaaggccctctgttcaactctgtgaatgctgagagaggtgaggaagcagcagaakaaaagtttaaagctagcagagttcagctcatgaggtttaagggaagaagctgtctccataatataaaagtgcaaggtgaaacagcaagtgatgatgtaga

SEQ ID NO: 156068 - DNA, 201 bp, Homo sapiens
tgatttgaccgctagagtctgaatatattgattgagtcagattagctagtgataatttttatgagccctctatgagttatggaaatagatgtagtagagcytaaacttaccaatcaaaactaaaataagggaagaatactcagtctaaatttgagaaagaattaaatcacaattttttgaagtttatttcaaatattaaca

SEQ ID NO: 156069 - DNA, 201 bp, Homo sapiens
acccacagacgttttgctcctgatatttcgtcctatgtcttgtctgatgacatcaagctacattccctccagctgctacccatttaccagaccggtaagcrtgacagtgcaggagtgcgacagtgcagcaaggtgaaaatgctctgtctgggctgggagtgaagacccatgtgggtaataggtttggtggtttggttcttc

SEQ ID NO: 156070 - DNA, 201 bp, Homo sapiens
cattcttctataaagagcaacttcccctttgcaactctttggttacccactgatacagtttgcatagcaaagtcaatatatgattatttccccctttattyactggtttcatggtgttttatttctttcatttttgcatgcaggttctcttacatctgatggaaaaaatttgtctcaggaaaaagaattgctgagtctctt

SEQ ID NO: 156071 - DNA, 201 bp, Homo sapiens
agttgttacttagtgtcaaattgggaatggggcttagaggagggaagctgaagaggccatattgctagatcagcctcaggtggggctgtggtgttcccagwgatggcattatttatgtgcttctttaaaaaataaccaaggtagattcttcttgtctcttgtctctagtactattgtgatacaaaggcttctgaggggcta

SEQ ID NO: 156072 - DNA, 201 bp, Homo sapiens
gcagctcgtgaggaggacccgtacatggacaccaccctgaaggtaagaactggcttatgaagatagtgaaaccttaagatcacaagggagcacatgaatastcgtagatttgctctcagacctaagctaggcaagaacaaaagagcttaaggttgtctaatgtattgaattagaacttttggatgtaaaatagtgaggatt

SEQ ID NO: 156073 - DNA, 201 bp, Homo sapiens
ttaaaatgtaaggccgagtcagtggccactggagattatttttctgaagatccccctttaattaaagctgtatgcttgtgattgggaagggaaagggggawctttattctctgtcctacccgtctccctgattgctttaggttttcagaagatggaagtgtcagatgtctgattactttgccccacttgcatacactttac

SEQ ID NO: 156074 - DNA, 201 bp, Homo sapiens
ttagagggtcagctaaagatccagtgagcttcccatagcacttggaataaaaactccaaatccattccatggcgtatatgaccttaactctaagcccatcktgtcccactctcaccctgcttactattcttcatccatagtggcctttccctcttccttagagacgccacaggcacgcttatctaagacctattatttgct

SEQ ID NO: 156075 - DNA, 201 bp, Homo sapiens
tgatacaaaaggaaaaatactatatggttcaacttacatgaggtacctagagtagtcaaattcatagagatagtataatggtggtctcaccctggggagarggaggaatagggaattattatttaatcagtgcagagttttttagtagatgaaaaagttagttatagagatggatggtagtgatggttgcatagcaatgag

SEQ ID NO: 156076 - DNA, 201 bp, Homo sapiens
gagaagtaaagtgcttggtttctaaaaaaaaaaaaaaaaaaaaaaaaaaaaagcctcttgaccacagaataaatgtaggcattattatgttgagattcggkgttttctgactttgaatttctgttctcagaaatacactgatcatttacattatattgatctatgttattttacttctgaagtataagctatttgaattgg

SEQ ID NO: 156077 - DNA, 201 bp, Homo sapiens
atcttggacatctttcaatgccagcacatttcagtttattctttctctagtatacatttctgcttaggattccaacagtagccaatagactggattcctayaggtggaggtaagtcagggaaccctgccttttttttttttttttttttttgagacagaatctcactctgtcacccaggctggagtgcagtggcacgatct

SEQ ID NO: 156078 - DNA, 201 bp, Homo sapiens
cactgtgaaaccattagacattagaatagcagttgttttatgtaaattcagattcttaataagaatctccactcctgtttttcaaatcaaatcggagtttytcttttgttgcccaggctggagtgcaatggcgcggtctcagctcactgcaacctctgcctcccgggtttaagcaattctcctgcctcaacctcccaagtc

SEQ ID NO: 156079 - DNA, 201 bp, Homo sapiens
gattgaacatagataaataagctattggaatagttcaggcaaggatattaaggggcggtattcaggcatggtagtgttaatgaaaggagaagggaggatgsatgggagaggcttcagtgggaaagttaaaagacttgtctgatgggataatggggatgtaggaggcatgaaaaatcccaccaaggttttgcctgcttttat

SEQ ID NO: 156080 - DNA, 201 bp, Homo sapiens
ggtattcaggcatggtagtgttaatgaaaggagaagggaggatgcatgggagaggcttcagtgggaaagttaaaagacttgtctgatgggataatggggakgtaggaggcatgaaaaatcccaccaaggttttgcctgcttttatgaaacaatggaggctggtgaaatgtggggcaaaagagatgtttggtttagacattt

SEQ ID NO: 156081 - DNA, 201 bp, Homo sapiens
gtaatatcatctgattctttagctgataaaaattatacagaagatctttcaaaattacaggtaagtaaaaatacctccttttcttatgaaattgcatattmcaatatagtgtaagattaaatttgctgagaccccaggtgtcctgttaatctagaatgtagaattttgagggacaaaatccatagttaggcatactcagga

SEQ ID NO: 156082 - DNA, 201 bp, Homo sapiens
gttacaagatagatgatgaattgtcagaacgtactcaaaagccaaaacataccgcctggcccaaagcagtaaaagacgaaaggcagggacccagcggtccycgcacccaccggccactgagcatagagcagtggcaagctcgcgcggcggagtgggaggcgcagagaccgaaagcactgcagcgccagagcgcgggctgac

SEQ ID NO: 156083 - DNA, 201 bp, Homo sapiens
cttatgaagatagtgaaaccttaagatcacaagggagcacatgaatactcgtagatttgctctcagacctaagctaggcaagaacaaaagagcttaaggtygtctaatgtattgaattagaacttttggatgtaaaatagtgaggattttgtgattcatggcttagttgacagtttttaagattgctttgcaaacatttca

SEQ ID NO: 156084 - DNA, 201 bp, Homo sapiens
aaaattccaaatttgactaggcatggtggcttacacctggaatcccagcactttgggaggctgaggtaggataatcacttgaggtcaggagtttgaaatcrgtctgggcaacatagtgagaccccgtctttaaaaaagtgacaaatttgaggtttttcatttccttccctttaggcttgactcccagcattctcatctcac

SEQ ID NO: 156085 - DNA, 201 bp, Homo sapiens
tgtttactttctcggggtgatcagagtatgttttgatgttgtcatctaagtaccaagattcattctcatcaaaaactagaaacagaagggcaaattccagyttccttctgggattgaatactttcaagtaaggtcttcgacaaacaatcagggggccaattaatccactgtagaggtcctggaaacaagaaaaatcttcag

SEQ ID NO: 156086 - DNA, 201 bp, Homo sapiens
tttgactaaagcagaacctgaagccattccagagagaagacagtcacccaagaggcttctgtaagcatccccttgccccaggcattcctgccagtttctgraatgagttgtaactggtatattttgtgtttatcttttttcaaatcataacttggaatgatcaaatggcttttttatggtggtctttttccagagaaagaa

SEQ ID NO: 156087 - DNA, 201 bp, Homo sapiens
agaactagcctttatagtcaaagaaaaaattgtgattaaattattaatagcttaaccatgcattgtgaatgcactagcatgtttagtatttctaaaatggrcaatctaaatacaatgtaccttttgttcctaaatttctttcttatctgaagatgaagttggtatgtggcttcattctggaacctcggctgttgattcaac

SEQ ID NO: 156088 - DNA, 201 bp, Homo sapiens
gaaaattacagaatattaaatgcagttagcctatgtagtattgtgaactaatattccatagaaatagagtgtacagttaatcactgaggaaaatagtaaawgaaaatgattttatagttattttatatccaatatttaccatttacaactaccatttattaataatgtcattttaaaattcttgtcctttgttttgctttt

SEQ ID NO: 156089 - DNA, 201 bp, Homo sapiens
acctggaagattggagatctctctctaatccctaccccgcagctggttcggtgtgagtttatagaaaccttggggtctgagtttatgttaaaaaaaaaaamaaaaaacaaaaagttgaataaatagatcagtgatatccagaccctgggatttcgtggctcaattaaaaactgtggggttaccatacatagtatctgactg

SEQ ID NO: 156090 - DNA, 201 bp, Homo sapiens
tatctgactgcttattttgtcaagtaaagacatatacaggcataccttgttttttttgcatttcactttgttgtactttgccgatactgcgtgtttttttytccccaattgaaagtttgtggcaactctgtgtggagcaaatctaccagttccatttttcacactgcatgtgctcactacatgtctcttgagtcacatttt

SEQ ID NO: 156091 - DNA, 201 bp, Homo sapiens; identical to SEQ ID NO: 29129

SEQ ID NO: 156092 - DNA, 201 bp, Homo sapiens; identical to SEQ ID NO: 29130

SEQ ID NO: 156093 - DNA, 201 bp, Homo sapiens
atatacacacacacacacaaattagccaagtgtggtggctcacacctgtagttccacctacttgagaggctgaggtggaaggatcacttgagtccgggagrtggaggttgcagtgagccaagacaacttgggcaacggagcaagacacttaaatttaaaaaaggtaaaatgaggcactgcacacataaagcttaaaaaatt

SEQ ID NO: 156094 - DNA, 201 bp, Homo sapiens
gttgcagtgagccaagacaacttgggcaacggagcaagacacttaaatttaaaaaaggtaaaatgaggcactgcacacataaagcttaaaaaatttagttyccttctcttgtaaagggttatagcctccacagactcctgtagagttgtatttcccttctatcagttggggaaacagcattactgggcaaagaacataaac

SEQ ID NO: 156095 - DNA, 201 bp, Homo sapiens
gcccctagagattgcgattcactaggggtgttatggggaccagttgtatatttttaaaaacacaccacagggattctgaggcattcctcttattgagaagmagtttaacttggcaatatttgacaaatacttgactgtcacccctgcccattgccctgtttgcctgtgaaaccctccctgctgtgggtatgttggttcttg

SEQ ID NO: 156096 - DNA, 201 bp, Homo sapiens
aaattgaatacgatgcattaaaatgatttatttatactattatcagctatgcctgtaattctgtattttataagcctttgataaccttctatacttaatckaagagttaatggttatggtagatcaataatctcatttttagtgagaagtaaagtgcttggtttctaaaaaaaaaaaaaaaaaaaaaaaaaaaaagcctct

SEQ ID NO: 156097 - DNA, 201 bp, Homo sapiens
caattgtattttactaaatggaaatactggtggcagttttacagagctgttaacaaaacagtccagaaatcaatatacttaagagcacaaaattgaatacratgcattaaaatgatttatttatactattatcagctatgcctgtaattctgtattttataagcctttgataaccttctatacttaatcgaagagttaatg

SEQ ID NO: 156098 - DNA, 201 bp, Homo sapiens
aggggtgatggtgtaatttaaagtacctaatagattgaagtaggatcaatgtacctttggaaaaaaaataattccatgtattttcagagtcttataaaagrcagaatgaaggaacaaggaagagacaaaggggagggataaggagaggtgggcatctggtggaggtatgctgcccttgaggccagtggaggtaggaggggg

SEQ ID NO: 156099 - DNA, 201 bp, Homo sapiens
gaacatagtctttgaccttaatttgaactctagcaaagatagctaagaaatggagcaaataaataaataaataaataaatctaggattatgtatccctgtsccactcttcttatttagaaatgttagcacattgtcccagggcaccacagctactgcagcattgtcctggggggagggacccagagggagcatccttactg

SEQ ID NO: 156100 - DNA, 201 bp, Homo sapiens
taaaaatacctccttttcttatgaaattgcatattacaatatagtgtaagattaaatttgctgagaccccaggtgtcctgttaatctagaatgtagaattytgagggacaaaatccatagttaggcatactcaggagacttggagggaatgcctgcctctgcctgaaactgatgatggttggaacacctgtgctgagcggc

SEQ ID NO: 156101 - DNA, 201 bp, Homo sapiens
cgcctggccgaaaccctgcctttttatctctaaaatctaaaggctatttgtttttgcggtcatagctattctcatctgtccttccggtcccactgcaggtrcttttttgcttccctctctctcagtttacttcccaaggttgctaactctactccagatttgtaagtggtagtgctactgtcctagttattgtcaggactc

SEQ ID NO: 156102 - DNA, 201 bp, Homo sapiens
agaaaatattttcttcacttgtattaaaacattttcaaacagagcaagagtaattgccatggatagctcttaccttgtattggaagctatggccgtgaaartgtacagtgtgtaagtctatttcattgcccattcccatcagataccagttgacttcatctcccacgtgcattgtgaggccttgtaggtttccaaacattc

SEQ ID NO: 156103 - DNA, 201 bp, Homo sapiens
agggagggagaaggaaggaataaaaatatcaatttctgtcccgtcacataatggaacagaaatatacatcattgtgtagcaatttctaagttaattaactrtttttaatgtcaatattcgagggttgacctagataacaaccacagatgacaaccaggcatctattgtgcacttactgtggagtccctaggtcctttttgt

SEQ ID NO: 156104 - DNA, 201 bp, Homo sapiens
ctgttcatctacccctctttggtgatgttaatttttggtcatcaggtcaaggtgttgcctgatttgtccctgccaataatttaatgccaattattatattmgctgtgccctgtcttttcagtcttgcttaattgaaagtcttcgtttaggtgatttgaccgctagagtctgaatatattgattgagtcagattagctagtg

SEQ ID NO: 156105 - DNA, 201 bp, Homo sapiens
tacagtttgcatagcaaagtcaatatatgattatttccccctttatttactggtttcatggtgttttatttctttcatttttgcatgcaggttctcttacrtctgatggaaaaaatttgtctcaggaaaaagaattgctgagtctcttttgctttttctccttacctcatgtgggctatctctacatggttgtcaaatctg

SEQ ID NO: 156106 - DNA, 201 bp, Homo sapiens
ggcagtactcacgccacaatttttgcacgtcattacaaggtactgttagagggtcacttgctggcctgtgagtcacttatttgtaaatttttgaggtactkcctaaatctgtgagaattgtgtgaactagcatagagtactataaatgcatgagttacatgtcattgtaagtctgtcttttgatgacccatacctgccttt

SEQ ID NO: 156107 - DNA, 201 bp, Homo sapiens
cagttctgggcttgcagaagaacaacaaaattggaattgaagaagcagattccttttttaaggtttgtcactttgaaaatgtgatttttctggatggcctyattaaattggtggtggggagggacagaataagagaagtgagtttttcatttgtttgtttattgaaaaaacagacatacataatcagtttataagataaaa

SEQ ID NO: 156108 - DNA, 201 bp, Homo sapiens
gataagcaagcttttgttgttatattttgtttatgagaaattcttttatgttttagataaatgcctgtagtcattatggcttaatttatccatgggttcaygtcgtaatatcatctgattctttagctgataaaaattatacagaagatctttcaaaattacaggtaagtaaaaatacctccttttcttatgaaattgcat

SEQ ID NO: 156109 - DNA, 201 bp, Homo sapiens
ttagtggtagagaatgcaatctaatttctctaaggaaaatttaatcaagaaagaaatctcttcagggagtgaagcatatagtgtatttcatatcaaacatrggttatttttaacatagatttttactttttcaaattgttagtggctgtgctttgttgcatcaacaggaatcagaggttgactttggtaactgatcacttt

SEQ ID NO: 156110 - DNA, 201 bp, Homo sapiens
tagagagatgcccggaggcagtcattccatatgctaatcatgaactgaaagaagagaaccgggtatgctttttcagattatgtttttaggcttgatcagtrataatcagatttgataacctcatttcctttcctgcaaaatggggacaatttatgctaatccaacatcataaggctgtgtgggtccattgagcatatatgt

SEQ ID NO: 156111 - DNA, 201 bp, Homo sapiens
aaataaagttgtattttgataacattcatctcttgttatttattaggtttctgctttcccattgtttagaatagaatgcttaattccagactagttatgcytctatttgatgttttcctacttagtggtagagaatgcaatctaatttctctaaggaaaatttaatcaagaaagaaatctcttcagggagtgaagcatata

SEQ ID NO: 156112 - DNA, 201 bp, Homo sapiens
gcaaattccagtttccttctgggattgaatactttcaagtaaggtcttcgacaaacaatcagggggccaattaatccactgtagaggtcctggaaacaagraaaatcttcagtaacccttgtgaattaggtcaggatttcagagaactgagactttgcacccagggcctcaggaattttggagagaccaattgaagtaaca

SEQ ID NO: 156113 - DNA, 201 bp, Homo sapiens
acactccaccccaactcacccataatcattcctccaaatgttgcatttttctctgtcttcaaaatatatttgtgtgcatacgtgtgtgtgtgtgtgtgtgkatggctaatgagactaagtgccatgtgtgatttacctttattagactgtaatacctcaagagctggcatagtgttttattcattttttcaagctacacat

SEQ ID NO: 156114 - DNA, 201 bp, Homo sapiens
tttcctttcctgcaaaatggggacaatttatgctaatccaacatcataaggctgtgtgggtccattgagcatatatgtttaatatgttacgtgttttgagkactattaaatgctgttaaaatatatggagatggtatattatcatcattaaacatcttttgtttggagatgaagtagttgattacctgaagatttgggaac

SEQ ID NO: 156115 - DNA, 201 bp, Homo sapiens
ctacctgtcatcattaaaaggtaaaatgattttttttttgcttgattataaacttaagtttcagttttaaatttggtgaagccttcttaagtattttcatrtgattctcaagtgaaaccgagggcctttcagaaccatctggggagcttattttcagcattcacgtaccctccccttgacatttgatattgatttatctcc

SEQ ID NO: 156116 - DNA, 201 bp, Homo sapiens
gcagcaggtggtgccctgcaagctggagccggaccggttctgtggcggggggcgtgacgcgcttttcgtggcggcgggctgcaaggtggaggcgttcgcgrtggccggccaggagctgtgccagccgcggtgcgccttctccacgctgggccgggtgttgcgcctggcctacagcgaggctggtgagtaatctagagagcc

SEQ ID NO: 156117 - DNA, 201 bp, Homo sapiens
atttgctattaaaggaggaaaatctttgctattaaaggagcaaaatctttgctgttgaaggagaaacatagtctgcctaaacttttataatttttttttttagagagacagtctcactctattgcccagattggagtgcagtggcagtcatggctcactgtaacctccaactcctgggctcaagcaagcctcccacctcgg

SEQ ID NO: 156118 - DNA, 201 bp, Homo sapiens
gccaagacaacttgggcaacggagcaagacacttaaatttaaaaaaggtaaaatgaggcactgcacacataaagcttaaaaaatttagttcccttctcttktaaagggttatagcctccacagactcctgtagagttgtatttcccttctatcagttggggaaacagcattactgggcaaagaacataaacttttgagcta

SEQ ID NO: 156119 - DNA, 201 bp, Homo sapiens
agggagcctggtcagcccagtgaatgtctgcagaaaggggcagcacctgtttgcttgcctcataagtacatgggaagtcaatgtaatggcagcatttcaayttcaattcatcggaaaagggccaatttgcttaatagtgttaatataatagagtctacatttggaagaagtgacattagatcctctgacttatctccttct

SEQ ID NO: 156120 - DNA, 201 bp, Homo sapiens
ttgtcctttgttttgcttttagttcgagaaaagataccagtgttaaaatcaaaatacctcctgtagctgaggctgggtggaatttgtatattgtgaatacratctcaccagtgcagctgtacaaagagatggtactcttttcaaacttctgattcttgtttgtagatatttagagtgaaattaatgatcagaaattgattc

SEQ ID NO: 156121 - DNA, 201 bp, Homo sapiens
ttcattatgttttatgacatgagcatttttgaaaaatataattttcccctctactttttttttgagagtattccttatttagggtttgcttttttttttttaatggttagattcagattatgcattttcagccagaatattgcataggtgatttttgtgttaagggtatcacatctggaggcacatgctgttcatctaccc

SEQ ID NO: 156122 - DNA, 201 bp, Homo sapiens
agaagatcgattggccaatctgaacatagtctttgaccttaatttgaactctagcaaagatagctaagaaatggagcaaataaataaataaataaataaawctaggattatgtatccctgtcccactcttcttatttagaaatgttagcacattgtcccagggcaccacagctactgcagcattgtcctggggggagggac

SEQ ID NO: 156123 - DNA, 201 bp, Homo sapiens
ttatctaagacctattatttgctcttcttgtgcgtagggtactcctctcagccttgtgtgactggtgcatttaagtcattcagttcgcagctgaagtgtarcttcatgacggaggacttctctgacctctcaatttaaaatatcccttctccactcacactggagtttacttgtttactctccatcccaatccccatcact

SEQ ID NO: 156124 - DNA, 201 bp, Homo sapiens
gaaggttctaacaatctctgtaatacactttataactgacctggaaacttttaggagaaaatggattataaaatagtttcagtaaaaatcaaaggtgtttyagattagttaaaggccatgcttttctgtgtaattaatgagaaagactgagcctataatgctaattgaaactacaggactttttactgtctttcttctttg

SEQ ID NO: 156125 - DNA, 201 bp, Homo sapiens
attttataagcctttgataaccttctatacttaatcgaagagttaatggttatggtagatcaataatctcatttttagtgagaagtaaagtgcttggtttytaaaaaaaaaaaaaaaaaaaaaaaaaaaaagcctcttgaccacagaataaatgtaggcattattatgttgagattcggtgttttctgactttgaatttct

SEQ ID NO: 156126 - DNA, 201 bp, Homo sapiens
tactgacccagatccatggttcctaactagggatgcacatcagagtcacatatggagttttgtagaaatgtacacgtccagattcagcccctagagattgsgattcactaggggtgttatggggaccagttgtatatttttaaaaacacaccacagggattctgaggcattcctcttattgagaagcagtttaacttggca

SEQ ID NO: 156127 - DNA, 201 bp, Homo sapiens
gctggagtgcagtggcacgatcttggctcactgcaagctccgcctcccgggttcatgccattctcctgcctcagcctcccgagtagctaagactacaggcrcccaccaccacgcccagctaattttttttttttttttgtatttttagtagagacggggtttcactgtgttagccagggtggtctcgatctcctgacctca

SEQ ID NO: 156128 - DNA, 201 bp, Homo sapiens
tgtaaagggaaaatgaataactttacaatggagacacctggcagacaccatcttaaccaaagcttgaagttaacataaccagtaatagaactgatcaataycttgtgcctcctgatatggtgtactaagaaaaacacaacatcatgccatgatagtcttgccaaaagtgcataacctaaatctaatcataaggaaacatta

SEQ ID NO: 156129 - DNA, 201 bp, Homo sapiens
acaaaattggaattgaagaagcagattccttttttaaggtttgtcactttgaaaatgtgatttttctggatggcctcattaaattggtggtggggagggamagaataagagaagtgagtttttcatttgtttgtttattgaaaaaacagacatacataatcagtttataagataaaagtactaattaaaagactatatctg

SEQ ID NO: 156130 - DNA, 201 bp, Homo sapiens
gccttttttttttttttttttttttgagacagaatctcactctgtcacccaggctggagtgcagtggcacgatcttggctcactgcaagctccgcctcccrggttcatgccattctcctgcctcagcctcccgagtagctaagactacaggcgcccaccaccacgcccagctaattttttttttttttttgtatttttagt

SEQ ID NO: 156131 - DNA, 201 bp, Homo sapiens
actggtctggaactccagacctcaggcaattcgcccacctcagcctcccaaagtgctgggattacaggcatgagccaccatgcccggccattttttttttkttgttgttgtttttacaatgcatgtactactatgccttatttattacagaaattgatcatgctctgtccactgttcagcaacttgctattttacatagca

SEQ ID NO: 156132 - DNA, 201 bp, Homo sapiens
tgtgttgtccagcataatccaggatggatttcatcatgaggtggttgaggaagaacaacagttaagaaatggattttactcttggttttgatagacacccrtctgtaccttgggcaggtactgggggcatcatttgtctgtaaaatgaagatactgacccagatccatggttcctaactagggatgcacatcagagtcaca

SEQ ID NO: 156133 - DNA, 201 bp, Homo sapiens
ttggatttgagtttgcatagtctgtgttgtccagcataatccaggatggatttcatcatgaggtggttgaggaagaacaacagttaagaaatggattttamtcttggttttgatagacacccatctgtaccttgggcaggtactgggggcatcatttgtctgtaaaatgaagatactgacccagatccatggttcctaact

SEQ ID NO: 156134 - DNA, 201 bp, Homo sapiens
gctggccataacctggtacatattttcattgctttttcttccttataatcagcaaagatcacttcaggttatctcaggcctcccatgtattagtatcagtytttgtctttttaaaattaaaacataatactataattttatcttacttggaatgtttgtgtcttggctttttgcacatatgttttgctgattttgttgctt

SEQ ID NO: 156135 - DNA, 201 bp, Homo sapiens
cttttagttcgagaaaagataccagtgttaaaatcaaaatacctcctgtagctgaggctgggtggaatttgtatattgtgaatacgatctcaccagtgcarctgtacaaagagatggtactcttttcaaacttctgattcttgtttgtagatatttagagtgaaattaatgatcagaaattgattctaattatcatacatt

SEQ ID NO: 156136 - DNA, 201 bp, Homo sapiens
tttttcaagctacacattcctcaccagcaatatgcctctcctataggaagcattctgtaactgttcattgattagaaagggagacagctgaagaactttargttcgtttcacagaagggtgttttcttaacagttgtacactgaaaagagccctgtactgggatctggagaattggaactgagttccaggtttgccactta

SEQ ID NO: 156137 - DNA, 201 bp, Homo sapiens
ttaaattttttctttttaaaaatcatcttcccccattctgagatcactttcttaaggtagaagctgaggtaattaatttgaagtcattcatcttttctaaygtaggtgttatgtttttttgttttcattttcattcagttcaaaatattttctaattttccatttggttaattctttgacctatggcttctttagaagtat

SEQ ID NO: 156138 - DNA, 201 bp, Homo sapiens
ataccgcctggcccaaagcagtaaaagacgaaaggcagggacccagcggtccccgcacccaccggccactgagcatagagcagtggcaagctcgcgcggcsgagtgggaggcgcagagaccgaaagcactgcagcgccagagcgcgggctgaccaggctggcgtgaccgctttcccgacgcctgccacgccccgcggcggc

SEQ ID NO: 156139 - DNA, 201 bp, Homo sapiens
gttcaccaccatccacataagaccaacaatcgaataagacggacagaagaaggtaaataatgaatttgacttgctttcttgttttaggaatatagaaaacyttcacctttggcagtctgaaggtctgtggtatatatggtgcccggccatgttatttatagatttagttattcctatttcatgggatttggttttatgatc

SEQ ID NO: 156140 - DNA, 201 bp, Homo sapiens
tctgtagcatgtgaatatatttatcagtagaagtaatggaacaaccactgctagatgaggggcttctagtcctagtcctcatagttactagttgaatgacyttgggttaataataccatctctgagtttcaacatcctcatttgtaaaatggggatgataatacctaccctgttgtactttatcagttgtggagattaaat

SEQ ID NO: 156141 - DNA, 201 bp, Homo sapiens
ttttcaatattgcgaatactcttgcggtgaacatcattggacgtaaatctttaaccacaatgttgattattctcttaggatagagtcctaaagaatgcccrttggttttaatttgcagtccacacaaagcaaataaaatcatgttatttaaaaatgattgctttctattaaagagatctttaaactagaggtagtttcaag

SEQ ID NO: 156142 - DNA, 201 bp, Homo sapiens
gtaatgttccattatctgagtgtgccatatgtatttactcatcctttgttgttaaacatgtagattacttctaaattttcaatattgcgaatactcttgcrgtgaacatcattggacgtaaatctttaaccacaatgttgattattctcttaggatagagtcctaaagaatgcccattggttttaatttgcagtccacaca

SEQ ID NO: 156143 - DNA, 201 bp, Homo sapiens
ccatttttcacactgcatgtgctcactacatgtctcttgagtcacattttgatagttcttggcaatatttcaaactttatcataattattgtatctattayggtgatcagcaatctttgatgttactattgtagtagttttggggtgccatgaactgtgcccatgtgagatggtgaacttaattgatatgtgttgtgtatg

SEQ ID NO: 156144 - DNA, 201 bp, Homo sapiens
tgtgaatatatttatcagtagaagtaatggaacaaccactgctagatgaggggcttctagtcctagtcctcatagttactagttgaatgaccttgggttamtaataccatctctgagtttcaacatcctcatttgtaaaatggggatgataatacctaccctgttgtactttatcagttgtggagattaaatgagcaagtg

SEQ ID NO: 156145 - DNA, 201 bp, Homo sapiens
tgaaatttcacagcttgagtcagatgattttgtcatctgccagaagcccctggaacttcttggtgaaaaaagtgaacagtctggattatctgttacactgragtctacgggattagctgatgaaaaaagaaaatattcccactttcagcacctgctctataggtattatagtgctttttttttttttaccagcattttatg

SEQ ID NO: 156146 - DNA, 201 bp, Homo sapiens
tttctttattacccagtctcaggtatttgcttgtagcagtaatgtgaaaatggactaatacagtgtgtaaagcaaagaagaggggagacctgagaactccycactcctgaaagagaaagacctggtggccagggttgagtgctgtatggggacctttggtggtagacacttgtttatggggtgtctaggggtggtggggca

SEQ ID NO: 156147 - DNA, 201 bp, Homo sapiens
tcctgatatttcgtcctatgtcttgtctgatgacatcaagctacattccctccagctgctacccatttaccagaccggtaagcatgacagtgcaggagtgygacagtgcagcaaggtgaaaatgctctgtctgggctgggagtgaagacccatgtgggtaataggtttggtggtttggttcttccactggagtctccttgt

SEQ ID NO: 156148 - DNA, 201 bp, Homo sapiens
tggtgcatttaagtcattcagttcgcagctgaagtgtagcttcatgacggaggacttctctgacctctcaatttaaaatatcccttctccactcacactgsagtttacttgtttactctccatcccaatccccatcactagaatgaaggctctgtgaaagcagttacgttgttttgaacactgttgtatccctagaatctg

SEQ ID NO: 156149 - DNA, 201 bp, Homo sapiens
tatttataagttatgtacatatttggagtgtagagccctgaaagcattatattatgggtttgaatggacttgtaatgcgtgggttttgactgcctccagayaggacatttttgagcttttcttattatcagcactaaaggagactgacatcattaacttcactgtgaaaccattagacattagaatagcagttgttttatg

SEQ ID NO: 156150 - DNA, 201 bp, Homo sapiens
tgcacatcagagtcacatatggagttttgtagaaatgtacacgtccagattcagcccctagagattgcgattcactaggggtgttatggggaccagttgtrtatttttaaaaacacaccacagggattctgaggcattcctcttattgagaagcagtttaacttggcaatatttgacaaatacttgactgtcacccctgcc

SEQ ID NO: 156151 - DNA, 201 bp, Homo sapiens
aatatttgacaaatacttgactgtcacccctgcccattgccctgtttgcctgtgaaaccctccctgctgtgggtatgttggttcttggcctcactttgctyagcagcctgtgtcttcctcctcagtaacaacctgcagtgtttcactgtgcggtgcagtgcggcggcagctcgtgaggaggacccgtacatggacaccacc

SEQ ID NO: 156152 - DNA, 201 bp, Homo sapiens
agataaaacttaggagtttgtttcagttactaatggcagtagaaaagcattttggaatttctatcttctggaaagcatgatatattctgttatagaatgtkttagatatccaggtttaaaaattccaaatttgactaggcatggtggcttacacctggaatcccagcactttgggaggctgaggtaggataatcacttgag

SEQ ID NO: 156153 - DNA, 201 bp, Homo sapiens
gaattctcatgagatctgatggtttttaagtgtctggcatttcccctacccacacttattttctgtcctgccgccctgtgaagaggtgccttccaccatgrttataagttttctgaggtccccccagccatgcagaactgcgagtcaattaaacctgttttctttattacccagtctcaggtatttgcttgtagcagtaat

SEQ ID NO: 156154 - DNA, 201 bp, Homo sapiens
ctggagtgcagtggcgtgaactcggctcaccacaacctccacctcccaggtttaagcaattcccagcctcagcctcccaagtagctggggttacaggcatrcgctaccacttgtggcgaattttgtatttttagtagagatggggtttctccatggttggtcaggctggtctcaaactcccgacctcaggtgatccacccg

SEQ ID NO: 156155 - DNA, 201 bp, Homo sapiens
aatcggagtttctcttttgttgcccaggctggagtgcaatggcgcggtctcagctcactgcaacctctgcctcccgggtttaagcaattctcctgcctcarcctcccaagtcgctgggattataggcacctgccgccatgcccgactaatttttttgtatttttagtagagatggggtttcaccatgttggccaagctggt

SEQ ID NO: 156156 - DNA, 201 bp, Homo sapiens
ccggaggcagtcattccatatgctaatcatgaactgaaagaagagaaccgggtatgctttttcagattatgtttttaggcttgatcagtgataatcagatytgataacctcatttcctttcctgcaaaatggggacaatttatgctaatccaacatcataaggctgtgtgggtccattgagcatatatgtttaatatgtta

SEQ ID NO: 156157 - DNA, 201 bp, Homo sapiens
tattatttataatcatgtatgtattaaactggctcatagatggtgggaaaaaagccctacagctaagcccttgtcagaatggtgaataaccattttgtttrcttttagggtttaatatgtccaaatgttaactttactaacaaaatatataaatgtttttaagaactcaggaacttttgagagtctctcttcagcaacatt

SEQ ID NO: 156158 - DNA, 201 bp, Homo sapiens
ggagtgaagacccatgtgggtaataggtttggtggtttggttcttccactggagtctccttgtggccctttaacaaagtttttttttttgttttttttttkttttttttttgagactgagtctcgctttattgccagtctggagtgcagtggtgcgatctcggctcactgcaacttctacttcctgggttcaagtgattct

SEQ ID NO: 156159 - DNA, 201 bp, Homo sapiens
gggagattggtttcagaaccttctacagttaccaacatccacagaagctaaagttgcttatataaagtggcatagtatttgcatataacgtatctactttytccaatatacttcaaatcatctctatattacttataatacctaatataatgtcaactgctatgcacatagttgttaatactgcattgtttagggaataat

SEQ ID NO: 156160 - DNA, 201 bp, Homo sapiens
gggagtgaagacccatgtgggtaataggtttggtggtttggttcttccactggagtctccttgtggccctttaacaaagtttttttttttgtttttttttktttttttttttgagactgagtctcgctttattgccagtctggagtgcagtggtgcgatctcggctcactgcaacttctacttcctgggttcaagtgattc

SEQ ID NO: 156161 - DNA, 201 bp, Homo sapiens
gaacttttggatgtaaaatagtgaggattttgtgattcatggcttagttgacagtttttaagattgctttgcaaacatttcactccgaattgatttagtgsatagtttttaaagtttggtaaagaatataaaaagtgtgaactgagagcagttcacaactactgtatgctacaattttattttttatttttttgattttaa

SEQ ID NO: 156162 - DNA, 201 bp, Homo sapiens
agctgagcctgggctacatagtgaaaccctgtttctacatatgtgtgtgtgtatatatatacacacacacattataatatatgtatatacatatatatatacacacacacacacaaattagccaagtgtggtggctcacacctgtagttccacctacttgagaggctgaggtggaaggatcacttgagtccgggaggtgga

SEQ ID NO: 156163 - DNA, 201 bp, Homo sapiens
ggataagaactagcctttatagtcaaagaaaaaattgtgattaaattattaatagcttaaccatgcattgtgaatgcactagcatgtttagtatttctaaratggacaatctaaatacaatgtaccttttgttcctaaatttctttcttatctgaagatgaagttggtatgtggcttcattctggaacctcggctgttgat

SEQ ID NO: 156164 - DNA, 201 bp, Homo sapiens
gtttttaaaaatctctatgcctgggccaaaccctcagagatacagtagtagtttccctggagtgaggacagcattggggtgagtcagatatttaatcaggrttgagaaccgctgatctagagcagtactggctgcaggaggccatgagtagcattgtaacctcattaacgaggccttgaacaataaagatgtttttataat

SEQ ID NO: 156165 - DNA, 201 bp, Homo sapiens
aacgtggaaaccagacacatgccccaccttcccttgggtagcatgtctcttcccaaagaatcttagatgagtcaggtgcagtgactacagcaaggaagaaracactatctctaggaaggaatggggttccaggttttgagcaaatctcacttctttctccaaaacagacattctttttatgcaggtgaaattacactaaag

SEQ ID NO: 156166 - DNA, 201 bp, Homo sapiens
gccccgcggcggcctctttaagtagcggagccgcgggcggggccggctggcgttcacgtgacccggcgtcattggctcgctcgcggaagtagtcctacatycgcggtcagcgcggggtctccgggcgccctgcagggcgggcaggctgtgccatcccgccggacgtcgggatggtgcagctgtacaacctgcacccgttcg

SEQ ID NO: 156167 - DNA, 201 bp, Homo sapiens
ctggccgctgattgcttgaagtcgcattgagctatgcggttgtcgcggcaagcataggtatgagcttgcttctgtcggggcggagacgctgacatctcttmgtcttggttttctgcagaaaggcctctggctggattccactcatctcggatacttaagcaaacaacaacaaaaaactctttagtgcatcagatttcaaag

SEQ ID NO: 156168 - DNA, 201 bp, Homo sapiens
ggttttctgcagaaaggcctctggctggattccactcatctcggatacttaagcaaacaacaacaaaaaactctttagtgcatcagatttcaaagacttascaaaaaaacaagtaggaataaggagactagtactgtatcccggaacctccaagtactcccagctttaacaattattccaactcttggcagttctttcaca

SEQ ID NO: 156169 - DNA, 201 bp, Homo sapiens; identical to SEQ ID NO: 29141

SEQ ID NO: 156170 - DNA, 201 bp, Homo sapiens
ttagtcaatacagacatgacaatcctatattggctcaatgcaagctagtgcctgtttttcttacgtcctccaatgaacccatttgtttctcatgttttgtktttttttttcagtctggttatgaaggtcgagtcccactgaagagcgctcgtctgttttatgacatcagcgaaaaggctcgaaggattgtagaatcttatt

SEQ ID NO: 156171 - DNA, 201 bp, Homo sapiens
gtcaatacagacatgacaatcctatattggctcaatgcaagctagtgcctgtttttcttacgtcctccaatgaacccatttgtttctcatgttttgttttkttttttcagtctggttatgaaggtcgagtcccactgaagagcgctcgtctgttttatgacatcagcgaaaaggctcgaaggattgtagaatcttatttta

SEQ ID NO: 156172 - DNA, 201 bp, Homo sapiens
cgagactataggtatagctagaacctgcttcaaaacaaagcttttacctaacagttttcaagcagtgaaaactggaaaggtgctctgttttgcttgacgtygtgttcatatctccaaggcagaaattctcaaataatcttctgaagtagctgccataaccaataagtggcattatcatctcacttttatcttaaaaattgt

SEQ ID NO: 156173 - DNA, 201 bp, Homo sapiens
ggatagaagaaatgacctcagtcatcccatccatgctgacaactgtttgttggatccagaggccaacgaatgctggaaggagcctcctgcttacacatttmgagactataggtatagctagaacctgcttcaaaacaaagcttttacctaacagttttcaagcagtgaaaactggaaaggtgctctgttttgcttgacgtc

SEQ ID NO: 156174 - DNA, 201 bp, Homo sapiens
acacacatataaatatgcccactgcagcttcctttcccatgcagacatggcctcatatatatatatatatatatatatatatatatatatatatatatatktgcatatatatatgcatagagagatatatgattgtgactgtatgtaataaactcatacctgaaaattgatacacacacacacacacacacacaaatatgt

SEQ ID NO: 156175 - DNA, 201 bp, Homo sapiens
attagtcaatacagacatgacaatcctatattggctcaatgcaagctagtgcctgtttttcttacgtcctccaatgaacccatttgtttctcatgttttgtttttttttttcagtctggttatgaaggtcgagtcccactgaagagcgctcgtctgttttatgacatcagcgaaaaggctcgaaggattgtagaatcttat

SEQ ID NO: 156176 - DNA, 201 bp, Homo sapiens
ttcatagttatcattgatgacgtatcttcttgtatttgcttccagggaatcatgcttgttggtgatggatacagaggaaaaacttcaccccatacacccartgaaaagtttgaaggtgcaactgtcctgaaagcactcaaagtaaagtcttaacttcttttgggtttgagttccttagtgtcagcctaaggcttctgtaaa

SEQ ID NO: 156177 - DNA, 201 bp, Homo sapiens
gcaggatagaagaaatgacctcagtcatcccatccatgctgacaactgtttgttggatccagaggccaacgaatgctggaaggagcctcctgcttacacayttcgagactataggtatagctagaacctgcttcaaaacaaagcttttacctaacagttttcaagcagtgaaaactggaaaggtgctctgttttgcttgac

SEQ ID NO: 156178 - DNA, 201 bp, Homo sapiens
ttcgggggacagaggtaacagggaagacaatgtgctctgttcctgtaggtggtcctctactctatgagaacatcacattcgtctacaactcggagcagctraacgggactcagcgggttctcctggataacgtcctgtcggaagaacagtgccgggagctccacagcgtggccagtgtgaggatccggagaaggaggggag

SEQ ID NO: 156179 - DNA, 201 bp, Homo sapiens
atatgaatgatgactttgaaggaggagaattcatattcacagagatggatgctaagactgtgactgtaagtaaacctattcttgaatacttatttagtatkttttagctcagtattgccatttttctaagtacttacagatggttagatttcaaatacttctgagctcaagatttcaagaggttaagagagtttcagtaaa

SEQ ID NO: 156180 - DNA, 201 bp, Homo sapiens
cattcgtctacaactcggagcagctgaacgggactcagcgggttctcctggataacgtcctgtcggaagaacagtgccgggagctccacagcgtggccagwgtgaggatccggagaaggaggggagctcactgcgctggcctgccaagaagctggaactgctttggtcctggtctcatctggagccagacaacaagccctg

SEQ ID NO: 156181 - DNA, 201 bp, Homo sapiens
aaaagaagagggtaaaggcagttcttaatcagatatgttctagtaagtgaagatgtttgtagaaatagctgtgtcaatgatatttgatagtcactaatctstcttgagcttattaacaaattgtaaggctgggcgtggtggctcactcctataaccccagaactttgggaggccaaggtgggcagatcacttgaggtcggg

SEQ ID NO: 156182 - DNA, 201 bp, Homo sapiens
ctacaactcggagcagctgaacgggactcagcgggttctcctggataacgtcctgtcggaagaacagtgccgggagctccacagcgtggccagtgtgaggwtccggagaaggaggggagctcactgcgctggcctgccaagaagctggaactgctttggtcctggtctcatctggagccagacaacaagccctgaaatatt

SEQ ID NO: 156183 - DNA, 201 bp, Homo sapiens
tttttttttttcagtctggttatgaaggtcgagtcccactgaagagcgctcgtctgttttatgacatcagcgaaaaggctcgaaggattgtagaatcttaytttatgctgaactcaactctgtatttttcctatacacacatggtctgccgaacagccctgtctggtgagattgcagtctgaaatggttcccttttaccca

SEQ ID NO: 156184 - DNA, 201 bp, Homo sapiens
aaaggacatgaactcatcattttttatggctgcatagtattccatggtgtgtatgtgccacattttcttaatccagtctatcactgttggacatttggctygtccaagtctttgctattgtgaatagtgccacagtaaacatatgtgtgcatgtgtctttatagcagcatgatttataatcctttgggtatatacccagta

SEQ ID NO: 156185 - DNA, 201 bp, Homo sapiens
ccaaaccggccgcagccatgttttcgcataactggcaaaacgcgtttccgccaacgatagcgtcacttccggcgtctcaagccggcggtgaggagaatagmaaacttgccctcacttaagatggccacatcctgcctttgtcctcattggtaaattggctctctcagcttccgtgacccgcctcccttcttcctcctgccc

SEQ ID NO: 156186 - DNA, 201 bp, Homo sapiens
aacatgcaggttagttatgtatacatgtgccgtgttggtgtgctgcacccattaactcattatttaacattaggtatatctcctaatgctatccctccccmctccacccaccccacaacaggccccagtgtgtgatgttccccttcctgtgtccatgtgttctcattgttcaattcccacctatgactgagaacatgcagt

SEQ ID NO: 156187 - DNA, 201 bp, Homo sapiens
gccaggctatttgcctattttatttatttgtttatttatttttgacaggatcttgctctgtcacccaggctgaagtgcagtggcgcaatcatagctcactrtagcctcaacctcctagactcaggtgatcctctcgcctcagcctcctgagtagctgggatgacgggtgcacaccaccacacccggctaattttttaagtt

SEQ ID NO: 156188 - DNA, 201 bp, Homo sapiens
tttcaacccgggcaactttgactccagagcctgaactgttggtcattataccatactgccactgctaccaaaatccaaaattaattttgttacttgttttwacaagtgttattgtgagccttgaatggagtatatcccatcatgttttattatctgaatgaattatattttaaatacaaatcttaaaccattaaatcttaa

SEQ ID NO: 156189 - DNA, 201 bp, Homo sapiens
aactgcagttacttttgcaccaaactaatactaagctgaaaatagattgtccctctaaaagagtatgctcttgaatggacacatttctgcaggtgtagtcrggggataagcgacagggaagatcatcctgttttgaccctgtgcttctagtgtatcagattaagactgaattggcctttggcttttttgtgagcaactaaa

SEQ ID NO: 156190 - DNA, 201 bp, Homo sapiens
ttaagcagatggccctactacatcaacaatcctgaaggctcaaaacatttaaaaagagttaaaggcaagttggttgtggtggtgcgtgatgtaatcccagytactccgcaagctgaaggtgggaggatctctcgatcccaggagtttgagaccagcttgagtaacatagcaaaaaaccttgtctctggaaaaaaaaaaaaa

SEQ ID NO: 156191 - DNA, 201 bp, Homo sapiens
tgtctttgacacacaaaaagttcccacattcccacattatcttattcaattcttataaaaatcgcaatcatcaaaggcttaataacttttctgaggctacrtgcatttttaaaaattagtcattgaagccttgggcctatgaaattaataaatacttaatggagaaatttcaggctttagagagcagtgaaagatgcttat

SEQ ID NO: 156192 - DNA, 201 bp, Homo sapiens
gcaagagaacaatgggcagcacagcagagaaggggctatctgcagagtcagggactggagggaagttttatagggtcatactgaaggggctatgagcagaraagatgtgcagataaggtcactctactggggctatgtgttgaacgaggtatttgggaacaggatgttgtgcctgtgggttgcctgtgattagccgtgtct

SEQ ID NO: 156193 - DNA, 201 bp, Homo sapiens
tatcctatttctttcccttgttacccttacagatttgtaattacttgtgtagtgtgtatttctcccagcaagatctatatccctcttagaccgtatatagktctagcataggatctgcacatagtatgcaattaaatatgtattgaattaatgagtactttgtactgtcatccaacccgttttcttcatctagtccacaaa

SEQ ID NO: 156194 - DNA, 201 bp, Homo sapiens
agaccctgctttcaattcttatgggtatatctgcagaagtgtaattgctgggtcatgtgtgtcatgggtgttactggctgggactggcattgtgggtggtraaagaatttaccaagacagtcatagatacagaggacagatttattagagaaaatacgaagatagagttgcaagagaacaatgggcagcacagcagagaag

SEQ ID NO: 156195 - DNA, 201 bp, Homo sapiens
tccgtgacccgcctcccttcttcctcctgcccgtagtagccatggcggccatgagtttgttgcggcgggtttcggttactgcggtggcagctctgtctggscggccccttggcactcgcctcggatttgggggcttcctcactcgtggctttccgaaggctgctggtgggtgctggcctagggagaacgggcgtgaagcgg

SEQ ID NO: 156196 - DNA, 201 bp, Homo sapiens; identical to SEQ ID NO: 29146

SEQ ID NO: 156197 - DNA, 201 bp, Homo sapiens
ttttttgctattgaattgtttgagttccttatatattctggttatgaatcccttgttagatggtgtgttaggccattcttgtgttgctataaagaaaatcytgagtctgggtaatttataaagaaaaaaggtgtaaatggctcatagttctgcagactgtacaggaagcatggcaccagcattgcttggcttctggggagg

SEQ ID NO: 156198 - DNA, 201 bp, Homo sapiens
tcggatttgggggcttcctcactcgtggctttccgaaggctgctggtgggtgctggcctagggagaacgggcgtgaagcgggtgcggggcgagaaaagggrggacgcttccagggtgaccttggtgggatccggagggagccgggacaagttgtgggcttggggcttgacaggagagacggagcacgagctatatgagggg

SEQ ID NO: 156199 - DNA, 201 bp, Homo sapiens
cttggtctcctgggttcaagctgtcctcccacccaagcctccctagtagccaagattacaggtgcatgacaccatgcccagttaatttttgtattttttgyaaagacatagtttcaccgtgttgcctaggctgctctcaaacacctgggttcaagcgatccaccctctgggcctcccaaaatgctgagattacaggcgtga

SEQ ID NO: 156200 - DNA, 201 bp, Homo sapiens
gagtcctgaggaccttcctctggagccttagtaaatttacttaatttaaatggatccaggtgctggggtgattacccttatcttatctcctgctaaatcayggaggtttgggaagttccttcagacctccagtcaacttgtttgtggaggcctggggagtttcttcagacccacaaaaacttgtttaatcctaaatgggtt

SEQ ID NO: 156201 - DNA, 201 bp, Homo sapiens; identical to SEQ ID NO: 29143

SEQ ID NO: 156202 - DNA, 201 bp, Homo sapiens
catggcggccatgagtttgttgcggcgggtttcggttactgcggtggcagctctgtctggccggccccttggcactcgcctcggatttgggggcttcctcmctcgtggctttccgaaggctgctggtgggtgctggcctagggagaacgggcgtgaagcgggtgcggggcgagaaaagggaggacgcttccagggtgacct

SEQ ID NO: 156203 - DNA, 201 bp, Homo sapiens
gctatatgaggggttttcctgaagtagccagatagatcgtgtttacattattagcatttctaaaacgttgttattcaccatcccaattaatgctaatttgmggatgaagctgagtctagaaaggtatagagctgagatctgtatctctagggcacaagcttattgttgcgttccacctgcccaaaggctaggttctagtcc

SEQ ID NO: 156204 - DNA, 201 bp, Homo sapiens
tggtgataggcagacacaagatgtgaaactccaaaaaagcttattcatttgttaattcctaacacctggcacagcatatggccatagtagtagacattctrtaaatgactctcctagcatctaaaaggtgagaagataggaaaagcactgtaacaattcagatgaaagtgatctgtgcaggcacactgaaggagagaattc

SEQ ID NO: 156205 - DNA, 201 bp, Homo sapiens
gttttttctgtaagcacatattttctgcaagtcagctttccctgtattttgttaaaactcctacctgtggaacaaagagtcagtgtagaaaaaatgcaagrcattttcaagtcagtaagaaaataattgagtatcaaaattaaagttaatattctaatataaatactctgcagaagacccagtttaaaaagagtcaaattt

SEQ ID NO: 156206 - DNA, 201 bp, Homo sapiens
taagttttttctgtaagcacatattttctgcaagtcagctttccctgtattttgttaaaactcctacctgtggaacaaagagtcagtgtagaaaaaatgcragacattttcaagtcagtaagaaaataattgagtatcaaaattaaagttaatattctaatataaatactctgcagaagacccagtttaaaaagagtcaaa

SEQ ID NO: 156207 - DNA, 201 bp, Homo sapiens
ttctgttttatttgacttccttgagaggagccttccattttcatctttatctgtatcagaaaaagttgtggacatattcaaaaaaactattttaaacaatmttttggacatagccaagaagtagattatgagagtttaggagtcatacccaccatttacatcccagaaaccaagccagtatcctggagagtttcagtatac

SEQ ID NO: 156208 - DNA, 201 bp, Homo sapiens
gtgtgtttttgttttttagattccagtgaaccagtagtagaagatgaaagattgcaccatgatacaggtattagatgagcattttcattagatttaaaatrttaccttagatttttcaatcacatgctgtgtttacatggtgatttttcttttaaaggcatcaaagaagtaatttcgacatctaatgcatgagattttgtt

SEQ ID NO: 156209 - DNA, 201 bp, Homo sapiens
agaatcgctaaaaatctctgttcccagcctccttaaatgtaaagaattattatctactttcttttcagagttttgatatcactaatgctgatttcatatgsctttgtgtttctcagttgtttccgttaaagtacgtctaatagtaggggtgagtgcaaaactttggagactataaaagtgtagatgtcatcaggccattgc

SEQ ID NO: 156210 - DNA, 201 bp, Homo sapiens
tatttttcaaaccactgttgagactttggtctttgtaggtaaggtgctggaaagaatatttgaaaattgaaggggcagtatgatgtactataaagtcattstgggtacaaatcccatttctactctttcctatctttttgacttaggcatcaaattgtggaacgttattcagcttaaattttattaaatgataatgaaaac

SEQ ID NO: 156211 - DNA, 201 bp, Homo sapiens
gagataatggctgtgtgcctgcagtaggcagaaatgtcatctgtgtagctgtaataattatgataatccctccatggttatgctggcagaatcatcatctrtgtcaatttagttcaatgccagaggtatttattgagctcctgctcaatgtctagcttgggaacagtactgtggaaactgcagagaagcaggatctgggct

SEQ ID NO: 156212 - DNA, 201 bp, Homo sapiens
gaactcctatttatccctaaatacctttcagagcttggccccacccacactcatcctagagtgagccaggtgcccctcttatataacccctgcatgcttcrtgcctatctatagctacatttaccatcttgcattgtctacttctaaatttgtctacttctaaatctgtctccctcacttgagtgagagccccctgagaaa

SEQ ID NO: 156213 - DNA, 201 bp, Homo sapiens
tttttttatctcttgataaggagaaaaggctaacgtgtcttacatttcttttaaagcatgtccaaaagttaactttttatgaatattttgggtaattacawacacagctagtcatgggacatttatccagtctggggacttcttctagtgtgaggatgatttggctgagaagaggagaagtaatgaggtgctacgtggagc

SEQ ID NO: 156214 - DNA, 201 bp, Homo sapiens
tctccctctttcttcccattttatgatagcttgtataatttgcctaaggaatcatagctaatagattaataggtctggaataaaaaactcttcctgtgatrccaaattcttttcttccttaactatagcaaaatgattcatggaggttgaaattatctgtggaaattttgtataaatgaataatagctgtttctggtactc

SEQ ID NO: 156215 - DNA, 201 bp, Homo sapiens
tttcccacatattccatagcccatggtcacaaaatgtgtgaactacaaaataatccaatacaaaaatggcttgttaaatgtcaaattcaaacagtcattcrtgttcatccatttattgagtacatagtgagtacttatgatgtccaggctctgttttaggcactgggcccaaaacagtcaataaaacagttgcagctctca

SEQ ID NO: 156216 - DNA, 201 bp, Homo sapiens
gagtcagaaactttcaaggaatgtataaaactctgggacttttctcaatttccagtgtctgttttctcgatgcctctttttcttaacagctagtcacaaasagttactaacctaatcttgcttatgttacactgaaccctaagagttgttttgttcacatgttaaaaacagctcttcctgcatttcttcaaaactgtgttt

SEQ ID NO: 156217 - DNA, 201 bp, Homo sapiens
aggtggcaggctggctgggcccatcctcaggcccctggaaggcatgcacaggtgccagtggtggcagatggggtgggtcaatccctaggcccctggaacaygtgtgtaagcattggtggtggcgggccaggtgaaccaatctccaggttcccagacaacatgcacagggagtagcaggagtggtaccaggtaggacacact

SEQ ID NO: 156218 - DNA, 201 bp, Homo sapiens
ctgtagcaagcttagaataaataggctttgcatttctcacttcattgacttttatttccacaataagaaatgtcacctgttggttgggtgcggtggctcaygcctgtaatcacagcactttgggaggctgaggtgggcagatcatgaggtcaggagatcgagaccatcctggctaacatggtgaaaccccatctctactaa

SEQ ID NO: 156219 - DNA, 201 bp, Homo sapiens
acatgtttgaatatcattatgacttgattttgcatttcaatcataactagaaattgtgtctttctggtttcgaatattacatgtattccttatttgagacrtaatttcctaattattccataatttatagtttcacaagactgtaatcaggatatggaagagatgatgtctgagcaggaaaatccaggtttgtaaatgtta

SEQ ID NO: 156220 - DNA, 201 bp, Homo sapiens
ttacataggtatacacgtgccatggtggtttgctgcacccatcaacccatcacctatgttaggtatttctcctaatgctatccctcccctagccccccacmcgacaggccgcggtgtgtgatgttgccctccctgtgtccatgtgttctcattgttcaactcccacttatgagtgagaacatgtggtatttggttttctgt

SEQ ID NO: 156221 - DNA, 201 bp, Homo sapiens
acaaaagtcctgagacaagagagaagggcccaagaagctggagcacctgaacaagcctagagtgtgtaagatacagttagagaaagtcaaagactagaccrcagtgggagtctggacttttcttcatgctgtggacaccgtacccagcccatgcacatctgtgtaccaaacagagccctttctcatttacacattgactgg

SEQ ID NO: 156222 - DNA, 201 bp, Homo sapiens
agagtgtgtttgttaccaaaaagatcatgcctattcaaataagtagtgttttttatcactagtattaagtcatttcattaagagaagcatattaactagasagagaaatggtttatgcaaatgctaatttaattatggcaaaaatgttttataccttagaagttttccttatatgtaatattaattgtgagtaccaaagtc

SEQ ID NO: 156223 - DNA, 201 bp, Homo sapiens
atttcaatgatttatcaaagaacacttattaatattttacataaacattaagagccaaagcacagaaagaggttgcccagcttctaattctagttttgacwtttgcactcttgcgtccttgggaaaaatacttaacttttgtgcctcagttttctcttctgtaacgtaggaataataagagtaccaacttctgaaggctgt

SEQ ID NO: 156224 - DNA, 201 bp, Homo sapiens
gataaataaaataggactaaagtccatgtgatgattaaaaatgataagaaatggtcagttagactaatattcatagggaccagtgcagcagaacaaaaacrtgcagcacaaattcagcacagaaaaggcagggccgggactccagagaggcaatgcgggcactcgccatggacgcagaatcagcattactgcccggacgca

SEQ ID NO: 156225 - DNA, 201 bp, Homo sapiens
ggagtttgtgtccatgcttttgttgtggataataggagatttctagaagaaagtgtgagcctaggtgggcagatagggggaaggaaaggtatagaaaaggwagcccagatttgttagtgaggaaatgactagggttctggttggaatatgattggctggtaatggggcataggccgtcggatgagttggtgatgctttatg

SEQ ID NO: 156226 - DNA, 201 bp, Homo sapiens
ggtgaggggaaggaagtattcagtgctgactcatgagaaggctgatggattttcacctggaaggtttttggagggaggtagaaccctcgactcagtgggcrtatgtcctggctcccctggttgcgagtggcattaggctgatactaatggtctcagaacacacgttggaagtttggtctttgcttagacttggagttgcta

SEQ ID NO: 156227 - DNA, 201 bp, Homo sapiens
ctatcttttgttagttttttttatctcttgataaggagaaaaggctaacgtgtcttacatttcttttaaagcatgtccaaaagttaactttttatgaatawtttgggtaattacaaacacagctagtcatgggacatttatccagtctggggacttcttctagtgtgaggatgatttggctgagaagaggagaagtaatga

SEQ ID NO: 156228 - DNA, 201 bp, Homo sapiens
tcggctggcaagatagttacatggacagattattaatgtcacttaggggaggctcctatagattagagtcaaggcccaatggaccctcctatcagttttcygaggattagaatgaagaggagttgtatcacttttgtagataaataaaataggactaaagtccatgtgatgattaaaaatgataagaaatggtcagttaga

SEQ ID NO: 156229 - DNA, 201 bp, Homo sapiens
agaaactctggggttaaggtcggcatcatgtcttaacaagccctgtttgactctgacgtgctcagagtttgagaaccattgctgtaatgatagctgatccrgggtgaggggaaggaagtattcagtgctgactcatgagaaggctgatggattttcacctggaaggtttttggagggaggtagaaccctcgactcagtggg

SEQ ID NO: 156230 - DNA, 201 bp, Homo sapiens
ctaattattccataatttatagtttcacaagactgtaatcaggatatggaagagatgatgtctgagcaggaaaatccaggtttgtaaatgttaaaattatygatatgtgttttctgattgaggcagtggccaaggccgttttattccagggttaacaattgtgattcaacacagagatccctgtatggtatttataatcac

SEQ ID NO: 156231 - DNA, 201 bp, Homo sapiens
gtattattaaaatagtgtgttgattttctatcttttgttagttttttttatctcttgataaggagaaaaggctaacgtgtcttacatttcttttaaagcaygtccaaaagttaactttttatgaatattttgggtaattacaaacacagctagtcatgggacatttatccagtctggggacttcttctagtgtgaggatga

SEQ ID NO: 156232 - DNA, 201 bp, Homo sapiens
agggaaatctgtggcacagggtagttaagtaatttgcccacagtcacccagctggtatggaagagcctgaatctacagccatgcatccggaccccatactygtcccaatccctgagctgcactgcaaagccaagtcctgcccattcactttctttagagtattatacacaggagatactctgctggaagccaggtcaagtt

SEQ ID NO: 156233 - DNA, 201 bp, Homo sapiens
ctccttaggacacttttttgatgttcatgtgttttgtgtgattgaattttttactcctcactattttccctttctaatttctctacagaatcagtttctcwtgtatatgcataagcaagaaatacaattatcactattgcatgctgctgaatttagtaacatttttttctgctccccctccatatgacttctctctggctt

SEQ ID NO: 156234 - DNA, 201 bp, Homo sapiens
caatgttacaaatagatattattcccattttatgggagggaaatctgtggcacagggtagttaagtaatttgcccacagtcacccagctggtatggaagakcctgaatctacagccatgcatccggaccccatactcgtcccaatccctgagctgcactgcaaagccaagtcctgcccattcactttctttagagtattat

SEQ ID NO: 156235 - DNA, 201 bp, Homo sapiens
acattactgtaccctactgtagattttataaacactgtacacttgggctacagtaaatttattaaaatttttctttaataattaaccttggtttactgtawtttttttaaatttgtaaacctaatttttaaaaactttttgatgattttgtaataaaaattagtttaaaacacaaacatatcatatagccatacaaaaatg

SEQ ID NO: 156236 - DNA, 201 bp, Homo sapiens
gttcaaagatgcataaggcattgtctctgcccttaaagcatgttgtcagtttttgtgttacaatgaaagttacgggattttgtttctgtttttttttttttagcagtatatgaacctctagaaaatgaagggatagaaatcacaggtaagttttttctgtaagcacatattttctgcaagtcagctttccctgtattttgt

SEQ ID NO: 156237 - DNA, 201 bp, Homo sapiens
ctaagatgtctagtaaatcaataaatttgttaattacttgagataatggctgtgtgcctgcagtaggcagaaatgtcatctgtgtagctgtaataattatrataatccctccatggttatgctggcagaatcatcatctgtgtcaatttagttcaatgccagaggtatttattgagctcctgctcaatgtctagcttggga

SEQ ID NO: 156238 - DNA, 201 bp, Homo sapiens
agaggacagaaataaggttctgacattataaataagctgcccaagaatgtatggctaagaagtaatagaaccaataatatatcctttttattccattatcytcaaagatgattatgtagaaagagagaagtcagttgggtataactttatgtgtaaagcaagaacgatgaagaaatacatcgtaattgagttggtggatat

SEQ ID NO: 156239 - DNA, 201 bp, Homo sapiens
cagcagtggtcttcaaacatgcttgatggcggcccttccagactaaaatgttcaagcaaatgcctgagatatgtttatgtacttatatgttatgtgtacakgtatgtacccacataatattatgtatatatatatgcactaatatacatgtgcattacaaaaggtacataccccaaaacaatttttaagatgatgtcaaat

SEQ ID NO: 156240 - DNA, 201 bp, Homo sapiens
tcagctccctaagggtataaagcctcttcagctgtttttctctgttcccatccatagttgctgtactttcgctctagaaaatggtaggacaggtcgaggaratagcacattctagtgggttgtgaagtggattagaaatgaacggctttcctggtctggcctgtgtcactctaagttgtcctctctctttagtccaggggg

SEQ ID NO: 156241 - DNA, 201 bp, Homo sapiens
tctgattaactttcaaatcccttccctttgtaaccaaagcacccgtcatctcttgcctgagcagggacaggtttatcctgtcctagcttgctcccccccccaaccctcaccaacactaaaacacaaccctgatcatctccctcggctttaaatcttctgtggttctcatttcctgcagcagtggtcttcaaacatgcttga

SEQ ID NO: 156242 - DNA, 201 bp, Homo sapiens
cttgacctcccatgctcaagcagtcctctcacctcagcctctcaagtagctggaaccacaggcatatgctaccatgccctgccaatttttaaattttttayagtggcaaggtctccttatgttgcccaagctggtctcaaactcctggcctcaagcaattctcctgcctcagctttccaaagtgttgggattgcaggcatg

SEQ ID NO: 156243 - DNA, 201 bp, Homo sapiens
ttctgattaactttcaaatcccttccctttgtaaccaaagcacccgtcatctcttgcctgagcagggacaggtttatcctgtcctagcttgctcccccccccaaccctcaccaacactaaaacacaaccctgatcatctccctcggctttaaatcttctgtggttctcatttcctgcagcagtggtcttcaaacatgcttg

SEQ ID NO: 156244 - DNA, 201 bp, Homo sapiens
ctctgccatcacagcgtaaaagcagcctttgatagttcctaagtgggtcagtgtagctgtgtttttatacaacttatttgtaaaatcctacccaacatggytggtaagtgcagcggcttgaacacagctcactccagccttgacctcccatgctcaagcagtcctctcacctcagcctctcaagtagctggaaccacaggc

SEQ ID NO: 156245 - DNA, 201 bp, Homo sapiens
aatagccagagagtaaatatttcaggttttctggatcgtacagactctgttcagctactcaactctgccatcacagcgtaaaagcagcctttgatagttcmtaagtgggtcagtgtagctgtgtttttatacaacttatttgtaaaatcctacccaacatggctggtaagtgcagcggcttgaacacagctcactccagcc

SEQ ID NO: 156246 - DNA, 201 bp, Homo sapiens
tgtttatacattttatatcataatctcatctgaatatgcataataggatgcagaaagtctaaaatataaggatattattcaattgaatgagtttttttttwaaagcatgaatagactgaaaatatgtgtgggggtcgccttttttccggtcctctcacttttaagttaataagctattatctaatggagtctctttcatta

SEQ ID NO: 156247 - DNA, 201 bp, Homo sapiens
gaaccttgcaggttcaaagatgcataaggcattgtctctgcccttaaagcatgttgtcagtttttgtgttacaatgaaagttacgggattttgtttctgtktttttttttttagcagtatatgaacctctagaaaatgaagggatagaaatcacaggtaagttttttctgtaagcacatattttctgcaagtcagctttcc

SEQ ID NO: 156248 - DNA, 201 bp, Homo sapiens
agagtaactaaggaaggcttcttgcagtctgggctggggttgtggggtagggggattcagtagcagtacaaatgacaatgttgttattactgtaataatgrtgataatgacacctaaatacttagggccaggcatttttctaagtgttttaatcttcataacaatgttacaaatagatattattcccattttatgggaggg

SEQ ID NO: 156249 - DNA, 201 bp, Homo sapiens
cccacggcaccccaactttaacttaacagaaggaaaatccaatctaaataaataagtgatttaaatataatggggtaagtgctgtcatggtaataaaataygggaagctcttcaggtcttactcagaaggggggtcagaagaggctggtgtagaccttcaccaggccagtgctggtggtgagtgttttaagcagaaggcat

SEQ ID NO: 156250 - DNA, 201 bp, Homo sapiens
caggatgttctggaatcctgattctcctgatgctttggtgtgatccaagggtggcctaaaggaaaataaaattacgtttcttaaaaacaaacaatgccctrtagtttaaactgttttttgccagtggatgctaggggtgtaggagcctgtatgcctttatttctagcttctttgcagctcggaaagccactcatgggccta

SEQ ID NO: 156251 - DNA, 201 bp, Homo sapiens
tgacctccagttccatccatgttgtttcaaatggcaggatcttattcttttttatggctgagtagtactccattatatatgtaccacattttcttcattcrtctgttgacagacccttaagttgattccaaagcttagctattgtaaatagtgcaataaacatgagagtgcgtaaatttcttcaatatactaatttctttt

SEQ ID NO: 156252 - DNA, 201 bp, Homo sapiens
catcatataccatcctctggactgacccaggttcccagtaccaaaggcaagtaagactagctgttagctaacttcacgataaccaggcttacaattctctycccataacagatcatcagtcaacatggagggaaggagctaagctatgagtcactgccaaggcaggtgctcggctggcaagatagttacatggacagatta

SEQ ID NO: 156253 - DNA, 201 bp, Homo sapiens
aatttccgaagcctccagttttatatactttatttccagaatgatcttttatttttaaaggttaattcatgatatttctgttataagtcatcattgtaaartataaaattaatgattttttagtttttagtacttagattctatgttaatctatttacatttggtctttatttgaggcttggttgtttcttttggttcaga

SEQ ID NO: 156254 - DNA, 201 bp, Homo sapiens
agctcaagaattgaaacacctcaactaaaacatttaaagatcctttaaaagcacttgtagactagaacttgatttattttttcccatctctcttcttttcmccttctcttttctttctttttgtaaatgtttcaactaacttttattgaagttgaagtcacactttatccaactgcgtaatatttaagcttcaactaaaaa

SEQ ID NO: 156255 - DNA, 201 bp, Homo sapiens
aagaatatttttagcagtataataaaaattattctgaactaattagatcaggatgttgttcaatctttaaagataatgctgtgtcagttttatttcatagmatttattagctgaacatttcctgactctcttaactgaattgctcgctatttttaggtaagatattcatttgacactgctttgcaggattaaaagagcaaa

SEQ ID NO: 156256 - DNA, 201 bp, Homo sapiens
gtttttttggtgaaatatgaacagatgagacttactatgtgattcacagggttttgtgatttatattttaagatcaggaacttttaatggtttaacctcctatctcttctgaataatttctggggatgaaaacaattttcaccatcttatttttatataaataatgatgaaacaaatggacaataaaatattttacttctt

SEQ ID NO: 156257 - DNA, 201 bp, Homo sapiens
gagtttgttacaacacagttgtgttcctttggattacttatcttcttttgtagctgaagtagactggagcaaagtgatattaatccaaactcttaagtctrtatcccttcttggtgctttctattagcctggagacattgcccagctctagggctgccctcctccattatttctcggcagagtacttatctagttgaggag

SEQ ID NO: 156258 - DNA, 201 bp, Homo sapiens
tatatccaagtgaaagtatcaagtggggggttgaatatgccaacctgagctagttgggtgagttttaagatgaatataaacatttgggagccattgtcgtrgagatggtattaaatccatggaaactgatgtgatcattttggaagcaagtggagagacgataaagaggcatgcccaggactgagctctaagaatctaata

SEQ ID NO: 156259 - DNA, 201 bp, Homo sapiens
tagcaatgccaattccagggtcccactccagacctacaaaatcagaaactctggggttaaggtcggcatcatgtcttaacaagccctgtttgactctgacrtgctcagagtttgagaaccattgctgtaatgatagctgatccggggtgaggggaaggaagtattcagtgctgactcatgagaaggctgatggattttcac

SEQ ID NO: 156260 - DNA, 201 bp, Homo sapiens
tgtttttttggtgaaatatgaacagatgagacttactatgtgattcacagggttttgtgatttatattttaagatcaggaacttttaatggtttaacctcctatctcttctgaataatttctggggatgaaaacaattttcaccatcttatttttatataaataatgatgaaacaaatggacaataaaatattttacttct

SEQ ID NO: 156261 - DNA, 201 bp, Homo sapiens
ggttgtatcaatatatacttggattcccagaccagaaacatggaactcgtttttgagtcctctctccctctgtctctatagctaatcccaagacctgttartagactccctaaacatttcttaaatccatttttttctccatagctcttgtatagccccttgtctggctcagccctttctcatcttcctagataatagcag

SEQ ID NO: 156262 - DNA, 201 bp, Homo sapiens
cactatgaaagtcctgatggcatcttcttccaatagacagtgattttgtctacatagaaaatttgctgtttagtgtagatcacttcatcagtgatcttagctgtttagtgtagatcacttcatcaatgatcttagctagatcttctggaaacttgctacagcttctacattagcacttgctacttcatcttacacttttat

SEQ ID NO: 156263 - DNA, 201 bp, Homo sapiens
cctttaaaactgatatttaacttttgcttagatttttaaaagttgaagcttaaagcttcaattaaagcaaattttttcttaaaatagataccttgattttrgttcaaagcacttttcagggaaactcagaatatacaaatttcttataaatagtgagtcaaatacttgaggaaactagttttactatattcttctgcttag

SEQ ID NO: 156264 - DNA, 201 bp, Homo sapiens
tctcactatgaaagtcctgatggcatcttcttccaatagacagtgattttgtctacatagaaaatttgctgtttagtgtagatcacttcatcagtgatcttagctgtttagtgtagatcacttcatcaatgatcttagctagatcttctggaaacttgctacagcttctacattagcacttgctacttcatcttacacttt

SEQ ID NO: 156265 - DNA, 201 bp, Homo sapiens
agcaaacaattgatgagggtgtggagggctaccctgagtagcagcaggttaccacccctgaggggtgatctggtgagaagggcatagctatgggcagagaygggttgaaagatgggtctttatgtcatgactcacctgggaaaacaaaacaaatttttttttttttggtggtggagaactgaagggatggtttctgaaaaa

SEQ ID NO: 156266 - DNA, 201 bp, Homo sapiens
tctctcactatgaaagtcctgatggcatcttcttccaatagacagtgattttgtctacatagaaaatttgctgtttagtgtagatcacttcatcagtgatcttagctgtttagtgtagatcacttcatcaatgatcttagctagatcttctggaaacttgctacagcttctacattagcacttgctacttcatcttacact

SEQ ID NO: 156267 - DNA, 201 bp, Homo sapiens
caatgatagtgataaaaacaggctactgtaacagcaaacaattgatgagggtgtggagggctaccctgagtagcagcaggttaccacccctgaggggtgakctggtgagaagggcatagctatgggcagagacgggttgaaagatgggtctttatgtcatgactcacctgggaaaacaaaacaaatttttttttttttggt

SEQ ID NO: 156268 - DNA, 201 bp, Homo sapiens
agtacattcagtctcaagaaaccactttctttgctcatctgtaagaagcaactactcatctattaaagtttgatcatgagattgcagcaaatcagtcacayctttaggatccacttctaattctagttatcttgctatttccacatctgtagttacttcctccactgaagtcttgaacccctcaaagtcattaatgagggt

SEQ ID NO: 156269 - DNA, 201 bp, Homo sapiens
atagttgtcttattttgtcaatttgtgctgattcttaggtttgtttgtttgtttgttctttactttgggatatgggagggatgggtcattttcttactgtrccctcaaattatggagcgatactttattttgattctgcatacatctatatattaactacagcacacattttaacaacataaacatgtttaaatattctga

SEQ ID NO: 156270 - DNA, 201 bp, Homo sapiens
agacattggctgcaataataaaggaacaagtgggctttaagtaaacaaacaacaataaaaacactggttaggaactaaaatgggacaagaatgtacgtccrcatgtttattgaaagtgtaccaatgagcataaaggcttttggaactggcattaggtgaggctccaaagccaaggtttgccaataaaaatagagtaactcc

SEQ ID NO: 156271 - DNA, 201 bp, Homo sapiens
attttaattagatttgtgaaaaattgattcaaataaattcctcttgtccatggtacagaccagctttagcagacagcaactgtatgatttttataaattartttggtcagtaattctctgaaattgctaaatcattttgctattaagtaagagagagtgtgtttgttaccaaaaagatcatgcctattcaaataagtagtg

SEQ ID NO: 156272 - DNA, 201 bp, Homo sapiens
ttttgtctttctaacagggaaaaattgaggaagcagtgaatgcatttaaagaactagtacgcaaataccctcagagtccacgagcaagatatgggaaggcrcaggtattctgagacccttctccttaggacacttttttgatgttcatgtgttttgtgtgattgaattttttactcctcactattttccctttctaatttc

SEQ ID NO: 156273 - DNA, 201 bp, Homo sapiens
tggtgacttttagtataagtaattgaaatatgcccaaatcttgatcttttctaatgaacttcatgtgtaatgaattcaggatttaggaaaattgaattgtrtgctcagatatatttttctttgattatacttattgaattcatttaaatattgtcctatattttgagatactgaatggtgacttgcatagtacttactatg

SEQ ID NO: 156274 - DNA, 201 bp, Homo sapiens
acatatctaccatgtttgccaacacagaacaaaaaaatgtaagctgatagagaaggcatgcagagttgcttagtcaaatatattcattttaatgtgtatgyaccaatgtcatatttgagtgttaggggtccatgttgatgtttgagcttttctacttagctatgttttgcaattattttagaaccccagaatatcgaagat

SEQ ID NO: 156275 - DNA, 201 bp, Homo sapiens; identical to SEQ ID NO: 29175

SEQ ID NO: 156276 - DNA, 201 bp, Homo sapiens
tgtgctgaaccgttgagaaatacacaacattttgctaagttgtagctgatcattctttgttgtgagggtatagaagcctaatgtttttattaaaatttcarttgaattgtttaaaaaatctatgaaaagtatcatcattacttaaatctggcaacgcatattttaaacactgatcagcaatatgtaacagattataacttt

SEQ ID NO: 156277 - DNA, 201 bp, Homo sapiens
ggaagccagacttctgtatctagtaacaatccagggagctacacaatcaattctgtaacaatcagaatagccccaaatagccaggatttgattaataactraaggcttccctgaattttgtccacagttccaacgtaagcccaaccagagagagccaaatatgcaccctcctctaatcacataggatgtcctgcttctagt

SEQ ID NO: 156278 - DNA, 201 bp, Homo sapiens
attcactgaacatagattatatttattagagaacttagtatcaatgtagttatagcttcttgttcattgtgtgatgttgcagttaagtctaataatctgawaagcaccacagtgtttttggaatgtcatcatttatgttcacttttgtaattcaatttatttgaatttatggatctcagtgtcagatgtggttctccaaag

SEQ ID NO: 156279 - DNA, 201 bp, Homo sapiens
cttttttctgccatctaatccctctcccctctacaacagccacgattttgaaagaagaatccactattacttttttaccttatttttcattcattttttttaacccattacactccagcttctgcatcttccaatcccctccagaggagagaaggagtatttgcaaaattatggaaagttgaaatggcatggagtcctcac

SEQ ID NO: 156280 - DNA, 201 bp, Homo sapiens
gcagcaattcagatagcagttctcggtattcccataacttccaaatccacgttctagctagatttagtctccttctccaagtccccattctcatgtctacygccagctcagtgtcccacacgatggcacagagacaatttacttgtctttctctaaaccgtttttcctcctaggttccttctctcattcaatgatattccc

SEQ ID NO: 156281 - DNA, 201 bp, Homo sapiens
ttgtttttttggtgaaatatgaacagatgagacttactatgtgattcacagggttttgtgatttatattttaagatcaggaacttttaatggtttaacctcctatctcttctgaataatttctggggatgaaaacaattttcaccatcttatttttatataaataatgatgaaacaaatggacaataaaatattttacttc

SEQ ID NO: 156282 - DNA, 201 bp, Homo sapiens
ctttgcacaatactaaatattttggaaaattactttagcagcaggtagctcctactttatgagtacatgtatttccaaaaacttatatccatgcctattgwttagaacaggaaatgcactttcccataaaaatatgggatggtttggttttcaaaagaattgtatataatgcataattttctgtgaaaaatacaagcacac

SEQ ID NO: 156283 - DNA, 201 bp, Homo sapiens
tctgtagctacttttggatgtggatatacacactggacaataatctcttaaagtttaaatgactattaaagtgactattaaagctcttgtttgtcttgccygcactaatgggcaaatatgttttattctgttaatgcagaagatagtctgttaaagcttctgtttccaaatattcaaggacttcagttaagctgtcactta

SEQ ID NO: 156284 - DNA, 201 bp, Homo sapiens
ccataaaaatatgggatggtttggttttcaaaagaattgtatataatgcataattttctgtgaaaaatacaagcacacaatccttttgaacatctatatgwtttatttttgctgcattacacattgaaaataagcacttatagactaccttcagaactttatgcctttagtaatcatttatgtcatgatttctttgggaca

SEQ ID NO: 156285 - DNA, 201 bp, Homo sapiens
aataaagttccaaatatgaaaatagagttttagttgtgattaaaggtaataaaccttcctaatgttgacctgtgttggtgttttttttttttttttttttwttattattgcccattgggaattagtgtttgtgcattgaaacttattatgaaatttcttttcttgtcttaactttaatgaaattttcaatgtagtcctgtc

SEQ ID NO: 156286 - DNA, 201 bp, Homo sapiens
tatatgttaaaactttttatataagagtctttagaaaaataatggatatggcatgatattatacactaagcttataaaataatgacccaaacaaattcttyttagttaacattgttttgtgtatatttattagatatgaaaacatggtaggatgccacatctgtaactagtgaaactgcttttagtagattaattccacct

SEQ ID NO: 156287 - DNA, 201 bp, Homo sapiens
tacaacaaatttcagttaagatgctgaaataaacagaagcatgaggaatttgatattcttaaagttaggagtcacagattgggagtaggaagaaacacttytaagaagttcacaaattgcagaaaccttactttctgatctcatctttaattaggacatagatgcagtttgaacttaaaagttggttgttaaaagtcttca

SEQ ID NO: 156288 - DNA, 201 bp, Homo sapiens
taatatatgttaaaactttttatataagagtctttagaaaaataatggatatggcatgatattatacactaagcttataaaataatgacccaaacaaattyttcttagttaacattgttttgtgtatatttattagatatgaaaacatggtaggatgccacatctgtaactagtgaaactgcttttagtagattaattcca

SEQ ID NO: 156289 - DNA, 201 bp, Homo sapiens
aagttgcatgtaatgatgggatttgagatattttcctcatttctactgatcattataatgtttttaaaaatataaagaacatgtttggaatgcaatttgargactaaatctagaggaatttaaattcaaactcataagaagtataaaattagataccatgcgaaaagaatgttatatgttttcatagggcagagtatcata

SEQ ID NO: 156290 - DNA, 201 bp, Homo sapiens
ggttccatatgaaatttaaagtaggttttttctaatgctgtgaagaaagtcaattgtagcttgatggggatagcatttaatctataaattactttgggcastatggccattttcacgatattgattcttcctatccatgagcatggaatgtttttccatttgtttgtgtcctctctgatttccttgagcagtggtttgtag

SEQ ID NO: 156291 - DNA, 201 bp, Homo sapiens
ctatggctgtgtttcaggtaatgatacctatttgaagttgatttaatctgcaacaataggatctatgcccagcaagtatttttatttaatacataaattaygtttttatatagccagcttttatatagatcacattagaaacaaagttgatggccatttgtcatttggtaagcatactttatgaatttaccatattattta

SEQ ID NO: 156292 - DNA, 201 bp, Homo sapiens
ttatgtgtaaagcaagaacgatgaagaaatacatcgtaattgagttggtggatatggaggactttctatgttctagatggttttagggcctggaattcaawtatgagtaacatagggtccctcctttcaaggagtttacagtgtcatgatagatagtgaatcacaattgaagaaaattaggagtgtttataaatatgaatc

SEQ ID NO: 156293 - DNA, 201 bp, Homo sapiens
taagctaaagccgttaaagcctgcttccaagaaaacaaaactggcagcacagtttgttccatttcattttttttcagcatgcttgattttttaggggttggagttagctaggaccaactgggaaaagaatcccgtaagtgggagaaaggctgtggtgttgttagggagtgcacttcagcctaagtggtgattagcagcatt

SEQ ID NO: 156294 - DNA, 201 bp, Homo sapiens
tagaaccaataatatatcctttttattccattatcctcaaagatgattatgtagaaagagagaagtcagttgggtataactttatgtgtaaagcaagaacratgaagaaatacatcgtaattgagttggtggatatggaggactttctatgttctagatggttttagggcctggaattcaaatatgagtaacatagggtcc

SEQ ID NO: 156295 - DNA, 201 bp, Homo sapiens
ggtggtggatgacagcaatgaggcacagtggagggttggataattagatgtcatagaccacagaggagcagggagcagggttttgttgttgatgtcatcgytttctttttttcttttttttttttccttctggtgggtaaggaaatgatggtctggaaattggtaaaagcaagaactacttcccttccttgagaccctgag

SEQ ID NO: 156296 - DNA, 201 bp, Homo sapiens
cttttgcttctctcaggccagtgagagactgtcttattttgaacaccatgctaataattatcacccacccatgtggacaattgaatagcccagaggaatgstttttttttttctatgagaccgtcttctctattgagtgctctgtagggagaaataattacgtttgcagagccgactcattaggcctggcttgaggaacta

SEQ ID NO: 156297 - DNA, 201 bp, Homo sapiens
gccgggaaggggcgtggccgtcgggcggcgagccgcgcgctctcgccccgggagggagtcacaggttcgtacacgcgaggccgggcgcgcgcagccggcasgcgggtgaagtcttcccaggtgctgcaggcggtgctgaggcacagggtctgctgcaggagcagcggcccgaacccgctccagcggcccgccgccgccagc

SEQ ID NO: 156298 - DNA, 201 bp, Homo sapiens
tgtttgctaagtaagcaatggattgatgcttacataaacagattcagcctgcttttaagacacggtaccaccctgcaagagttaggactaagataagcgcrtgaaggattataacaaaacccctagtggggaaggaccacaaaacagagatacgcagggtgcagtggacttaaagacgcacacagtggagcagggaactga

SEQ ID NO: 156299 - DNA, 201 bp, Homo sapiens
ccaccactccccttctccagaacattctgcttacccttcaagcttccactcttgtcacttggggcttctgagaagtgctctgcatccatccactctgcagkcactgccagttgtgcaccagcaggactggccctctcacctgctgggtgtgccttgccttcgggaggagggctcctgtttgctgggtgctgaggttgtgca

SEQ ID NO: 156300 - DNA, 201 bp, Homo sapiens
agtatttcattttttggatataccacagattgttttcattcaccagttgatggacatcgggttttctctacgttggggctgttgtgaacaaccctgtggtraatatttgcatgcaagtctttgtgtacgtcttcatgatttatgttttcatttttcttgggtccgtaattaggagcaggattgctaggagggcatcccagt

SEQ ID NO: 156301 - DNA, 201 bp, Homo sapiens
ggagggagcgtggcaagtagaggagggtaggctggtttgtttgtttgctgtaagatggcagaaactttggcattatttaacgcattattaaattcccaccagggggcacacgagagatgctgagagtgaatagacattcagaaggcacaagacaggtgtgtgtgttggcggagaggggaccttagaaagaacagcccgtct

SEQ ID NO: 156302 - DNA, 201 bp, Homo sapiens
cagtgaaactcttcaaaagagttatctccacctccttccatctcatgttctcttgaacctgcagtactgtggtgctccctcctttttgctgctcctccctygttatcctgatctctaatgacctttaaacattggagttctttaggattcagttcttggaccgcttcttttctctgtctacactctcgactgcttctagct

SEQ ID NO: 156303 - DNA, 201 bp, Homo sapiens
cactgctttggcacccctgcacctggtatatcttttgctgagatgtgtttcccaccccgcccaatcacatctttcagactgagcataacctccctgcccccatcatggtgcattcacaactggattcaggtcctgtatctgccattgattagccatgtggctttagcacagtttttcaagttcttcatctttcaaagtagg

SEQ ID NO: 156304 - DNA, 201 bp, Homo sapiens
tgtgacaagaagtcccagaggaaattgaaatataagcaatctagataaggcaaagaattagttcctttctgagacgaacctcaaaaaaaacaagagtcatyatgaggtgctccaccaggccctttttcagtccagtaaagccagaatcttccctctagtctttagaaagaaactggaagttaatccgagatgaaggccttg

SEQ ID NO: 156305 - DNA, 201 bp, Homo sapiens
atacagtgcataggagctaggagtacaagagggaagaaaacacagagtcctcttttcattggggctggcattccagtggccaaacagataataaataacgraattaaggattatgagaagtacaatgatagtgataaaaacaggctactgtaacagcaaacaattgatgagggtgtggagggctaccctgagtagcagcag

SEQ ID NO: 156306 - DNA, 201 bp, Homo sapiens
ctctgaccctctttgggaacttacagcacaacgtttgatatttcagaataattgcaaactatacctctaggttggtactccatttggggttctaaaatgtytaattcagtaggtcatgatttgtctcaatatgctacacagatagatgtcttaaatatgcatatgccctttgggaggctgaggcaggaggatcacttgagg

SEQ ID NO: 156307 - DNA, 201 bp, Homo sapiens
cctgtggttgagcccgacatatggaagcacattttgtagccattttattgaggcatctttatctgcctggatgctaacaggaaatagcttcatttttctcyattcgttgtgcacagttgggatagattaatctgtttgctcttggtagcagaggatcttgaccatctttgggacagaacttaacatctcagtcactctttt

SEQ ID NO: 156308 - DNA, 201 bp, Homo sapiens
cacgtcttctttattgataaatttttatttatttccaataagccttttgcattcctacttcatcttctcatgtttactcaatcttctcattcctgcagtgrggatgacatatagctctcacctcatctaaatgggataagtttaagctttactgtgatttgtttccaacaattatgttatttattctaggaagaagaaatg

SEQ ID NO: 156309 - DNA, 201 bp, Homo sapiens
atatgaacctctagaaaatgaagggatagaaatcacaggtaagttttttctgtaagcacatattttctgcaagtcagctttccctgtattttgttaaaacdcctacctgtggaacaaagagtcagtgtagaaaaaatgcaagacattttcaagtcagtaagaaaataattgagtatcaaaattaaagttaatattctaata

SEQ ID NO: 156310 - DNA, 201 bp, Homo sapiens
taattacatgatttaacggtgaactttttaaaagggctccataattagaaacagatttgttttgctgtcagctctgacactttgggcaagtccttttaccyatctgagcctgtttttttgttgttttttgtttttttatctctaaattcaaaataattacctcagctcctcttctcccgtgacgttttggtaaggcttaaa

SEQ ID NO: 156311 - DNA, 201 bp, Homo sapiens
tggctggaacacgagtacagtatatctgttttttgtttgtttatttttgagacggagtctcagagtctcgccctgtcaccagactggagtgcagtggtgcratctcggctcactataagctctgcctcccggattcaagcgattctcctgcctcagcctaccgagtagctgggactacaggcacgtgccaccacgcccagc

SEQ ID NO: 156312 - DNA, 201 bp, Homo sapiens
attatacaaataggtcataatcagaaacccagtgaaataacaatattttcaccagatttcaacagatttgagtacctagcagtaagctctttatttaaatrtgtcaaagtaataccttatttttaatgttttcaattttaaaattaataaaaatgctctgttgaaggaacagtttggagcacattctttctgttccttcag

SEQ ID NO: 156313 - DNA, 201 bp, Homo sapiens
tatatgaacctctagaaaatgaagggatagaaatcacaggtaagttttttctgtaagcacatattttctgcaagtcagctttccctgtattttgttaaaastcctacctgtggaacaaagagtcagtgtagaaaaaatgcaagacattttcaagtcagtaagaaaataattgagtatcaaaattaaagttaatattctaat

SEQ ID NO: 156314 - DNA, 201 bp, Homo sapiens
tacagtgagagatagagtgcagttttcctgaaggcaggggacagtgctcagtaaaatgcatcatatgtgttttcccctttggttgaatttctgtatgcccktgaaattatgttagcattaaactgaaatagtccattcttgcatcgctataaagaaatacctgagactggtattagtccattcttgcattgctataaagaa

SEQ ID NO: 156315 - DNA, 201 bp, Homo sapiens
gtgacagtccaggctgcccagtgcttgtcagtgtcccagggtgtttccttttagttcactgcattacatacttttccctgttttttcctactttcctctasctgagccctcttgtcaccagttaatataaagaatggtaacagcatttccaccaaagcctatgctttcaaatgcattttagagatggcataaactatacct

SEQ ID NO: 156316 - DNA, 201 bp, Homo sapiens
atattcttctattgtaattttcaaattacagaattgaatattatgagtcatggaacatcacccaagtattgacgtcttaaagtggaaaccctctagatttrgtagctgcaacatttggccaaaatacttttagaataattacccagattttggcccttgagtgacttttaactaccatgaatagggcatttcccttttttt

SEQ ID NO: 156317 - DNA, 201 bp, Homo sapiens
actacaggtaaggctacaggcaatagagatttcacaaaattaatccagaaagtcagtaaacaaacaaatagtgacaacgataacaaaaatgaacaacaacraattttatgagagggaccgaactgatttccagaattgccacattgtattatctaaaaactgtccagtttcaacaaaaattatatgacacacaaagaaata

SEQ ID NO: 156318 - DNA, 201 bp, Homo sapiens
cttccaaatccacgttctagctagatttagtctccttctccaagtccccattctcatgtctaccgccagctcagtgtcccacacgatggcacagagacaayttacttgtctttctctaaaccgtttttcctcctaggttccttctctcattcaatgatattcccgtcttcccaggatcaagatttgagtgagcttgagctc

SEQ ID NO: 156319 - DNA, 201 bp, Homo sapiens
attccattccatcttccttaggatgattccatgtgctcttctttgcccttattttggttgtgttttataaccaagtttctgatttggacaattgggtgtcrttctctgcaataaagtcaatatgaaaaagaatagatgtgtgaggaatagcaaattctattttttatttactgagtttgaggtatgtgtcaataggtgctt

SEQ ID NO: 156320 - DNA, 201 bp, Homo sapiens
agaggctagagaataaggaagaacactgggagagtgggcaacataaaagtcaaggaaagggatcatctaggaaggaggagggcatcaactgtgtcaaatgytgcaaaagggccaggtaaaataggaagaaacagaacaaatagatttgcagaaagccgtagccattattataatagctctcaggtactgagcacttactgt

SEQ ID NO: 156321 - DNA, 201 bp, Homo sapiens; identical to SEQ ID NO: 29188

SEQ ID NO: 156322 - DNA, 201 bp, Homo sapiens
ggtgtatatgtgccacattttctttatccagtctatcattgatgggcatttgggttggttccaagtctttgctattgtgaatggtgccacaataaacagaygtgtgcatgtgtctttatagtagaatgatttataatcctttgggtatatacccagtaatgggattgctgggtcaaatggtatttcttgttctagatcctt

SEQ ID NO: 156323 - DNA, 201 bp, Homo sapiens
gacccagaaaagtttagtgccagcttggcttaggtcacagagcttggaggtgacagagctgggactcagacccctgccatcgatgcttaaccacacagccytccctcctctggcagacttgcttctgcccacgtggtgggtgaggaagccaaagtgctgacaggaaaggtgacaaagaggtgccccccaggggaggggagg

SEQ ID NO: 156324 - DNA, 201 bp, Homo sapiens
gggaagtggaggtgggaggactgcttgaagccaggaggagttcaagaccagcgtgggcaacaaagcaagactctgtctttacaagacattttttttttttstaattagctgcatatggcggtgcatgcctgtggtcccagctactcaggaggctgaggtgggaggattgcattcaaggctaggagttcaaggctacagtga

SEQ ID NO: 156325 - DNA, 201 bp, Homo sapiens
acctatgttaggtatttctcctaatgctatccctcccctagccccccacccgacaggccgcggtgtgtgatgttgccctccctgtgtccatgtgttctcaytgttcaactcccacttatgagtgagaacatgtggtatttggttttctgttcctgtgttagtttgctgagaatgatggtttccagcttcatccacgtccct

SEQ ID NO: 156326 - DNA, 201 bp, Homo sapiens
aatgtttaacttatattgaccatctttaatggcatctttgtgaggaactctgttgaaaggtgaaattacgtctgtgatttctgttccagtttagaggctgragtgtcacatggaagttattacagtgtactgatgtaatctgatcaacaagatcagtactcttcttaggttgtggtttcaaaaaaaagtctttaggcaaaa

SEQ ID NO: 156327 - DNA, 201 bp, Homo sapiens
tgcagtgatggataaagccaaaggtctcttcctgcctgaggatgaaaacctgagggaaaaaggggactggagccagttcacgctgtggcagcaaggtgagyttctgacttctagatggttctctgcagcccaaacctgatgggaagtgggtactgacaagagtcttctggtgatgcttcccagagctgggattcccaggct

SEQ ID NO: 156328 - DNA, 201 bp, Homo sapiens
atacacgtgccatggtggtttgctgcacccatcaacccatcacctatgttaggtatttctcctaatgctatccctcccctagccccccacccgacaggccrcggtgtgtgatgttgccctccctgtgtccatgtgttctcattgttcaactcccacttatgagtgagaacatgtggtatttggttttctgttcctgtgtta

SEQ ID NO: 156329 - DNA, 201 bp, Homo sapiens
acataggtatacacgtgccatggtggtttgctgcacccatcaacccatcacctatgttaggtatttctcctaatgctatccctcccctagccccccacccracaggccgcggtgtgtgatgttgccctccctgtgtccatgtgttctcattgttcaactcccacttatgagtgagaacatgtggtatttggttttctgttc

SEQ ID NO: 156330 - DNA, 201 bp, Homo sapiens
ttttgccagtggatgctaggggtgtaggagcctgtatgcctttatttctagcttctttgcagctcggaaagccactcatgggcctatatgagcaagtgcargcttccccttcctcaagccttccttccccacggcaccccaactttaacttaacagaaggaaaatccaatctaaataaataagtgatttaaatataatggg

SEQ ID NO: 156331 - DNA, 201 bp, Homo sapiens
gcacattctaatttatgatagtggtatatttcttcatttgttaggtttttagtttctttctgcctttttttttgtagattttgctatggagctctttttaygcatttttctgttaaacatttttctaaatattttgtattttttgatgctattagaaatcgtattttttaaatttcattttcccattatttgctgctagga

SEQ ID NO: 156332 - DNA, 201 bp, Homo sapiens
atagagaaggcatgcagagttgcttagtcaaatatattcattttaatgtgtatgcaccaatgtcatatttgagtgttaggggtccatgttgatgtttgagmttttctacttagctatgttttgcaattattttagaaccccagaatatcgaagatgaagcaaaagaacaaattcagtcccttctccatgaaatggtacacg

SEQ ID NO: 156333 - DNA, 201 bp, Homo sapiens
tgatctgcaccttcctcccaccctccaccctcaagtaggccccagtgtctgttgttcccttctttgtgtccgtaggtagtcaatgttttgctcccacttayaaatattaataagaacatggttctctgttcctgtgtcagtttgcttaggatagtggcctccagctccattcgtgttgtatagcacagttttttaacccca

SEQ ID NO: 156334 - DNA, 201 bp, Homo sapiens
acatatacaggtttgttatatgggtaaattgcatgtcacaggggtttggtgtacagataattttgtcacacaggtaataagcttaatacctgctgagtagyttttttgatctgcaccttcctcccaccctccaccctcaagtaggccccagtgtctgttgttcccttctttgtgtccgtaggtagtcaatgttttgctccc

SEQ ID NO: 156335 - DNA, 201 bp, Homo sapiens
attaggatagagaatattttcatcaccctgtaaagttctctcaagcccctttcttgcgtccacctctgccaccagaggcagccattgtactacattttttkatcatagattagtgttttctattctagaacttcttttgcaagtacttttttttgtaaagtctcctttcactcagcataatattttttagttcgtttatgt

SEQ ID NO: 156336 - DNA, 201 bp, Homo sapiens
ggaaggaatagaatccggagatcctggcactgatgatgggagattttatttccacctgggggatgccatgcagagggttgggaacaaagaggtaatgggtrtatgaatttctgattctctctaacagaggatggagttgggagaataattatttctaggaaagttagaattcaaaaaatattttgagtgtgaactttcgaa

SEQ ID NO: 156337 - DNA, 201 bp, Homo sapiens
aatgtcttcataaatctacccctccacaaaagcactgagaaaaattgttaaaatcaacttctttagaactctgtacattagcaaagacatacaacaattaraggaatatttattgaaggaaaaagtgctgaacctgaataagaatagcagggtttgtggggtggtaattttaactgctcccaaccattcttccccagttcc

SEQ ID NO: 156338 - DNA, 201 bp, Homo sapiens
gatttaatagagtagatctagtggtttctcagtcttttttacatgagggtctcgtttattttaaaagacttcccaaacctccctgtgggcatctatggagmctgttttgtgtccacatgggttcataaatcaagcatctctgtagttaccccaaagcctatgactataggtaggaaagtcgtgaaatattttaataagtta

SEQ ID NO: 156339 - DNA, 201 bp, Homo sapiens
cctcagactctaattgctatttgtacatggtttatataagaaaatatattctgatgttcaaacaattgattttacatgtgcaagaagcagggatgaagagsaagagtgacaaaatattgataatgttagaatctggctgatggatatgtggaggtttgtcatactgttctttcttcctttaggtatatgttgaaatttttc

SEQ ID NO: 156340 - DNA, 201 bp, Homo sapiens
gactttggtagggactggtcagaagtttacttttgctttggtaagccccctcttcttagacagtcataaaatgagactcacagttaattaactcatagttycaatcatgttgttttctactcaaaatgtaaaaacttcatgtatcttacaggttagatggcttcagggttttgacctcagactctaattgctatttgtaca

SEQ ID NO: 156341 - DNA, 201 bp, Homo sapiens
aatgatgaatgcattgttaaatttagctttatgacctccttttgttttggcattgcaaatgttgaccagtaacctcattcccaaagtttaatatggagatrtatttttctggtttttaggttttcatacgatgtgccataagaaaagctatgtaaatcaattaatggaatctggtatttaattattttacccatactaaca

SEQ ID NO: 156342 - DNA, 201 bp, Homo sapiens
aagaaaatgtacatgttcattatacaaataggtcataatcagaaacccagtgaaataacaatattttcaccagatttcaacagatttgagtacctagcagyaagctctttatttaaatgtgtcaaagtaataccttatttttaatgttttcaattttaaaattaataaaaatgctctgttgaaggaacagtttggagcaca

SEQ ID NO: 156343 - DNA, 201 bp, Homo sapiens
ggccattccacagtgaattaatgatgaatgcattgttaaatttagctttatgacctccttttgttttggcattgcaaatgttgaccagtaacctcattccmaaagtttaatatggagatatatttttctggtttttaggttttcatacgatgtgccataagaaaagctatgtaaatcaattaatggaatctggtatttaat

SEQ ID NO: 156344 - DNA, 201 bp, Homo sapiens
agggggaaaagaaaatgtacatgttcattatacaaataggtcataatcagaaacccagtgaaataacaatattttcaccagatttcaacagatttgagtayctagcagtaagctctttatttaaatgtgtcaaagtaataccttatttttaatgttttcaattttaaaattaataaaaatgctctgttgaaggaacagttt

SEQ ID NO: 156345 - DNA, 201 bp, Homo sapiens
aaatctaaaatgggctatcactgtatttattgcccactcagaataatttttcccttctgtctacttaatttaatggagggtttgcactctgacgccttggkgtgaccttcttaaatgtggacatggaaagtacatgtgaaaagaagctgcttttattttagcattctgattcagtaaatgcaaatatctttgaagaaatta

SEQ ID NO: 156346 - DNA, 201 bp, Homo sapiens
gtatatgaatttctgattctctctaacagaggatggagttgggagaataattatttctaggaaagttagaattcaaaaaatattttgagtgtgaactttcraaagcagtgatataaactatttagttacttaaactatctttggaacaacccaacaactccagcttaaccctttaaagaatttttgggatttggcttttat

SEQ ID NO: 156347 - DNA, 201 bp, Homo sapiens
gagaaattttcaggggattctaacttgatctttgattttatagcaattttttattgtaaagtagtttaggttttttttaaaaagcactctagctgaattcrttgggtcccctgtgtcacatattattaaaggtgatttttaaaaatttctgatatatcactttcacaattttgtttctcctaaaatttatatgacaggaga

SEQ ID NO: 156348 - DNA, 201 bp, Homo sapiens
gtagaataaatgttagtgttccctacaagatcttcagtggggattatggtacaagtatcttgcttttttttttttttaatcttcctcttcgggcccctccrttattgaccattgaaactttttggatttgaactctataaagcaagcaactctcaggtaattttctatattggttgtttataattttctcattttttaaaa

SEQ ID NO: 156349 - DNA, 201 bp, Homo sapiens
ttatgtgtgtgtgtgtgtgtgtgtgtgtgtatgtacatgtgcataaaaaccatacatagcaacgattggaagaaagtagagacaacattgatataaaatayatttaacttcttaaatgtggcccaggggctcttactgcccctgtgtcccagggcctcctactgtctattttaatattcctaattgctgattagacaggaa

SEQ ID NO: 156350 - DNA, 201 bp, Homo sapiens
tctgtttgcacgcgatagcatttacaatccttaggcaagttgcagccagctcttctcaccagaagtgtgtctctcaggcctcactggacagtgggctccargcagaacataccccagctggggccacttatgacagcccattccacagatgtggcctgggcttttctgggatccagtcatctgacatactttctgtctctg

SEQ ID NO: 156351 - DNA, 201 bp, Homo sapiens
gaaatagaattaaatatatgtgagtaaatcaagacccctaaccatcattaattttattatttggttatttctggccaaggcccttctgattctttgaaagygtgctaagcccatttttcttcatttacataccttcttatttttgtggccaaattaactaaaatataggtatcttttgttgtagttcagattattgaaaac

SEQ ID NO: 156352 - DNA, 201 bp, Homo sapiens
aaccacatattacatcatttatcaggtgtcttgtctttttttttttttttttttttttttttgcgagattgggcatccttgccattttcttttttttttgkcattttattatttatttatgtttttattattatactttaagttctatggtacatgtgcaccatgtgcaggtttgttacatatgtatacagtatacatgtg

SEQ ID NO: 156353 - DNA, 201 bp, Homo sapiens
caatgatgctgtccatgtccagggagcggctgttgtccatggacagcaccacagatgtgtccgagatctgggactgcagctcccggatctccttttcgtayagctgcctgaggaagttgatctcgtcagtcagcccttccaggcgagactccagctctaccttgttcatgtaagcttcatccacatccttcttgatgagga

SEQ ID NO: 156354 - DNA, 201 bp, Homo sapiens
ccacctgcatagccgctggtggtcttcgtatgaatactcatgttctgcatcccagacttcagccggctctctttgccctccagcagcttcctgtaggtggygatctcgatgtccagggccagcttgacgttcatcagctcctggtactcacgcagctgccgtgccatgtcctgcttggcccgctgcagggcagcctccagc

SEQ ID NO: 156355 - DNA, 201 bp, Homo sapiens
ctgaggccggggcttgtgaggcccccataggccgagctcagaccacctgcatagccgctggtggtcttcgtatgaatactcatgttctgcatcccagactycagccggctctctttgccctccagcagcttcctgtaggtggcgatctcgatgtccagggccagcttgacgttcatcagctcctggtactcacgcagctgc

SEQ ID NO: 156356 - DNA, 201 bp, Homo sapiens
ctggtgcggctgagggagctggagcctgcgccagagccaaagctggagcccaggccgtagctgaggccggggcttgtgaggcccccataggccgagctcaraccacctgcatagccgctggtggtcttcgtatgaatactcatgttctgcatcccagacttcagccggctctctttgccctccagcagcttcctgtaggtg

SEQ ID NO: 156357 - DNA, 201 bp, Homo sapiens
gtattttactctccattctcagtttccagctaagaatgttgattcttttttcgttaagaaaatagaaatatccagacaatttccacctgatgctgctactwtgctaacagccatcctctacctgtgcccgtatgttctgccttccctcctgttagcacagatggactattctggtccctgttcctctctcacctgctgaag

SEQ ID NO: 156358 - DNA, 201 bp, Homo sapiens
gggtctgttcacatgttatcagtgagtccttttgccaaagtattatgaatagtccccacccccacttttccctaatgtgctccctgttctgtgtcttcccygtactatctgtccccatccaatatactctaaatagttcatgtttcttattttttaagtttctctctcccccggaaggtaggtgtgttgttttcatttact

SEQ ID NO: 156359 - DNA, 201 bp, Homo sapiens
ttatgtatcacttctcttgtgtcctattagagggagatgatctatgcttaaagctgttgggttatttttgataattatataacaccaacatgctgtgtctrtagttcccatttattgattcaactaatatttctgagtatctacagcatgccgggactgggcaaggcatgggggatacaagagattgaggtggctgcaatc

SEQ ID NO: 156360 - DNA, 201 bp, Homo sapiens
gctaagaatgttgattcttttttcgttaagaaaatagaaatatccagacaatttccacctgatgctgctactatgctaacagccatcctctacctgtgccygtatgttctgccttccctcctgttagcacagatggactattctggtccctgttcctctctcacctgctgaaggacatccctctaatttttgtgtctcctt

SEQ ID NO: 156361 - DNA, 201 bp, Homo sapiens
attggctggtaatggggcataggccgtcggatgagttggtgatgctttatggcagatggtttggcagtggaatatacagctgctttagcgtactgacactsccatcactctcctagattgtgggcaactaagccctttagataattcatggcttttttcgttgatgctagtcctctttttgcacatgttcttttatacaga

SEQ ID NO: 156362 - DNA, 201 bp, Homo sapiens
aatgatattcccgtcttcccaggatcaagatttgagtgagcttgagctcctccctctcctccttactccagtctagtcagggccagctatggagatctggytttctcatgtttttggcatccccctcaccctccctcttgctcagtcagtgctaactcctgtctttgtcaactgcgtcctcaatgatagctgtgagaacct

SEQ ID NO: 156363 - DNA, 201 bp, Homo sapiens
aacttctgattaactttcaaatcccttccctttgtaaccaaagcacccgtcatctcttgcctgagcagggacaggtttatcctgtcctagcttgctccccsccccaaccctcaccaacactaaaacacaaccctgatcatctccctcggctttaaatcttctgtggttctcatttcctgcagcagtggtcttcaaacatgc

SEQ ID NO: 156364 - DNA, 201 bp, Homo sapiens
tcatatgagaggttccctgcttaccctgcagagattagttcaactatttcccaatgatacttccttaaaaaatgaccttggcgtgggatacctcttgatargagataatgacaatgcaaagaaagtttatgaagaggtaagcatcaatcttgtattaactacgtcaaattaagttctaaggctatttgcaaattacattta

SEQ ID NO: 156365 - DNA, 201 bp, Homo sapiens
ccttaaaaaatgaccttggcgtgggatacctcttgataggagataatgacaatgcaaagaaagtttatgaagaggtaagcatcaatcttgtattaactacrtcaaattaagttctaaggctatttgcaaattacatttattatacccagtctctctttattttaaattaagttaaaaagcatgtaagtattattatagtta

SEQ ID NO: 156366 - DNA, 201 bp, Homo sapiens
caaagaaagtttatgaagaggtaagcatcaatcttgtattaactacgtcaaattaagttctaaggctatttgcaaattacatttattatacccagtctctstttattttaaattaagttaaaaagcatgtaagtattattatagttaacatattctaaactatgttttaacattgcttttcttcctagatcagaagatttt

SEQ ID NO: 156367 - DNA, 201 bp, Homo sapiens
cctcttattggtgagaactaatactgggaaatgtgtctcacgtttctagacctaccccataactatttgaagcattttaacaggcaagagataggtttagraaatgcagtaacttaaattaacttctcctgactttcatagtcaggcattttagaacaaactctgcccatatttgaggatctacagccttttaagcatttt

SEQ ID NO: 156368 - DNA, 201 bp, Homo sapiens
gagtagcttttttgatctgcaccttcctcccaccctccaccctcaagtaggccccagtgtctgttgttcccttctttgtgtccgtaggtagtcaatgtttwgctcccacttataaatattaataagaacatggttctctgttcctgtgtcagtttgcttaggatagtggcctccagctccattcgtgttgtatagcacagt

SEQ ID NO: 156369 - DNA, 201 bp, Homo sapiens
agatttgctttgtcatgtctattagtcaatcttattctttcatgcctttcgaagtaagttgcaggtattagtatatttcactttcataaacatttacatgdgcctgtagctaactagagcttagcatttgtttttttttccctctgaggtaaaattttcacgtagtgaattgcacaaattttagtgtctgatctgaggagt

SEQ ID NO: 156370 - DNA, 201 bp, Homo sapiens
gttctgtaatgactccaccatgtagatgctacagcggttaacattttgatagatttgctttgtcatgtctattagtcaatcttattctttcatgcctttcraagtaagttgcaggtattagtatatttcactttcataaacatttacatgtgcctgtagctaactagagcttagcatttgtttttttttccctctgaggta

SEQ ID NO: 156371 - DNA, 201 bp, Homo sapiens
tatgtagttctacaccatatgaatatgccttgcttttcatttagccatcctatcgcaggccactttttttctttcaaataatgctgccctgtacatgtatrtgcctatctctccccatgcatacatgtctgagtgtttttctagggcataatctggaattggaattgtgggtcatagaaagtacacacattagactttact

SEQ ID NO: 156372 - DNA, 201 bp, Homo sapiens; identical to SEQ ID NO: 29178

SEQ ID NO: 156373 - DNA, 201 bp, Homo sapiens
tttgttgaaagaatatctagcatttaactacttttccattctttgaatcaagtcaatttgtataagatgcttgtcactgagtttttgtaagttgtttcatrgatttgctttttggcagagagctagttctctaacctttataataaaaatatttctgtgtattgctctttaaaattgtatgtatttgaaatagtacatatt

SEQ ID NO: 156374 - DNA, 201 bp, Homo sapiens
taaaatttaatgactgccacactggattttagacttgcatggaacttgaagcccctttgttttggcgaatttctcccatttttttttttttttttttttttgacattggcagagctagctgaggttttattttggaccaaaaaaaagcaattgaattgttttgtagctggaggcatgggcaaggggggtccccaggtagta

SEQ ID NO: 156375 - DNA, 201 bp, Homo sapiens
aattggatattggagtgatccatccacaaatcaagaaatactgggaatagacaaggacaaatattcccgtaaaacctctggatagagcacagccctgccaycatcttgatttcatcccagagaaactaattctggaaatctgttctgcaaaactgcgagagaacaaagttctcttattttaagccatcaagtttgtggtag

SEQ ID NO: 156376 - DNA, 201 bp, Homo sapiens; identical to SEQ ID NO: 29190

SEQ ID NO: 156377 - DNA, 201 bp, Homo sapiens
gttatttgggaaaaggatctttgcagatgtgattaaggacattgagatagagagattatcctggattatccagttgggccttaaatgcaatcatgtttccwcataagagagggacagagggaaatttgatgccgacaaaataaaaagtagcacatacagaggagaaagaaagcagtatgaagacagaattggatattggag

SEQ ID NO: 156378 - DNA, 201 bp, Homo sapiens
ctgacctcaagtgatccacccgtctcagcctccgaaagtgctgggattacaggcgtgagccataagtgagattaaaataataataataataataataataacactgtcaagtatcatagaagtgcaagtttttaattttatagctccttgatgcaaaaagaaaaactaggtcagtccattactcaggatagtaattggtag

SEQ ID NO: 156379 - DNA, 201 bp, Homo sapiens
cctgacctcaagtgatccacccgtctcagcctccgaaagtgctgggattacaggcgtgagccataagtgagattaaaataataataataataataataataacactgtcaagtatcatagaagtgcaagtttttaattttatagctccttgatgcaaaaagaaaaactaggtcagtccattactcaggatagtaattggta

SEQ ID NO: 156380 - DNA, 201 bp, Homo sapiens
caccgcatccagctgaaaggcacttcttacctggtggcggcaagagaaaataaggaagatgcaaaagcgggaacccctgatgaaaccatcagatctcatgrtacttattcactatgatgaggacagtatgggggaagctgcccccatgattcaaattatctctcatcgggtccttcccacagcatgtgggaattatgggag

SEQ ID NO: 156381 - DNA, 201 bp, Homo sapiens
tcctgacctcaagtgatccacccgtctcagcctccgaaagtgctgggattacaggcgtgagccataagtgagattaaaataataataataataataataataacactgtcaagtatcatagaagtgcaagtttttaattttatagctccttgatgcaaaaagaaaaactaggtcagtccattactcaggatagtaattggt

SEQ ID NO: 156382 - DNA, 201 bp, Homo sapiens
gaaaaagaagtttaattgcacttacagttccacatggctggggaggactcagaatcatggtgggaggcaaaaggcacttctttttttttttttttttttttgagatggagtcttgctctgtcactcagtctggagcacagtggcatgatctcagctcactgcaacctctgcctcccaggttcaagcaatttcctgcctcag

SEQ ID NO: 156383 - DNA, 201 bp, Homo sapiens
agttcaagaccagcctgggtgacatagtgagactctgtttctacagaaaaaaaaaaagaaaaaaagaagaaagaaagaaaaagaaagaaagaaagaaagaaggaaagaaagaaagaagaaaaagaaagaaagagaagaaatggcacaaaaagcttatttggggatcatggggcagtctattttggctgaagtatggaacat

SEQ ID NO: 156384 - DNA, 201 bp, Homo sapiens
agaaaaagaagtttaattgcacttacagttccacatggctggggaggactcagaatcatggtgggaggcaaaaggcacttctttttttttttttttttttttgagatggagtcttgctctgtcactcagtctggagcacagtggcatgatctcagctcactgcaacctctgcctcccaggttcaagcaatttcctgcctca

SEQ ID NO: 156385 - DNA, 201 bp, Homo sapiens
gagttcaagaccagcctgggtgacatagtgagactctgtttctacagaaaaaaaaaaagaaaaaaagaagaaagaaagaaaaagaaagaaagaaagaaagaaggaaagaaagaaagaagaaaaagaaagaaagagaagaaatggcacaaaaagcttatttggggatcatggggcagtctattttggctgaagtatggaaca

SEQ ID NO: 156386 - DNA, 201 bp, Homo sapiens; identical to SEQ ID NO: 29179

SEQ ID NO: 156387 - DNA, 201 bp, Homo sapiens
aagaaaaagaagtttaattgcacttacagttccacatggctggggaggactcagaatcatggtgggaggcaaaaggcacttctttttttttttttttttttttgagatggagtcttgctctgtcactcagtctggagcacagtggcatgatctcagctcactgcaacctctgcctcccaggttcaagcaatttcctgcctc

SEQ ID NO: 156388 - DNA, 201 bp, Homo sapiens
tctttgattctgggctggcgcagtagtgtagtctcagtatgatttccttggctgtgttcagcatcagtggtgtctgtgatttcctcagtggtttagctgtraattttagtggaggctgtggtgaggctctgctggggactgggatgccaggtgggctggtccttgggcatgcccgtctgtgggcccctaggcagtgtacat

SEQ ID NO: 156389 - DNA, 201 bp, Homo sapiens
tattaaaaagcaaacattctgtagctacttttggatgtggatatacacactggacaataatctcttaaagtttaaatgactattaaagtgactattaaagytcttgtttgtcttgcccgcactaatgggcaaatatgttttattctgttaatgcagaagatagtctgttaaagcttctgtttccaaatattcaaggacttc

SEQ ID NO: 156390 - DNA, 201 bp, Homo sapiens
aggctatttgcaaattacatttattatacccagtctctctttattttaaattaagttaaaaagcatgtaagtattattatagttaacatattctaaactaygttttaacattgcttttcttcctagatcagaagatttttaaatcttagttaacacttagtacattaaagccttcaacttataattgtgattcttttaaaa

SEQ ID NO: 156391 - DNA, 201 bp, Homo sapiens
catgtaagtattattatagttaacatattctaaactatgttttaacattgcttttcttcctagatcagaagatttttaaatcttagttaacacttagtacwttaaagccttcaacttataattgtgattcttttaaaacttcatatttatctttccatacatagtctttctaaaattgttcttcatgacaggaagaagaat

SEQ ID NO: 156392 - DNA, 201 bp, Homo sapiens
tatctttccatacatagtctttctaaaattgttcttcatgacaggaagaagaatttaagttcctgtgaatgttacacacacacacacacacacacacacasagacacactttcctttttttttttttttttttggcagaagtatggtctagagagaggctatatagaacaggggcctttcaagcatgtgacataaattact

SEQ ID NO: 156393 - DNA, 201 bp, Homo sapiens
gttaactactatttatattgtgtttttatcttcttatcagtggtgtttgggtccatcacaaattcgtatgacaggcatgggtggacccatattttgattcrcattctctgctgcagtaaatcggtattagcacagaggtgtgggctagggcagtagctccttagctgggtattctaaaggatagtaaaggttccaaaaata

SEQ ID NO: 156394 - DNA, 201 bp, Homo sapiens
aggagttcaagaccagcctgggtgacatagtgagactctgtttctacagaaaaaaaaaaagaaaaaaagaagaaagaaagaaaaagaaagaaagaaagaaagaaggaaagaaagaaagaagaaaaagaaagaaagagaagaaatggcacaaaaagcttatttggggatcatggggcagtctattttggctgaagtatggaa

SEQ ID NO: 156395 - DNA, 201 bp, Homo sapiens
aagcctcaatatccccatctgtatattaggaagagtaaaagtatgtctttgtatggttttgagtattaaagtaatccatatgaatgcactcagaactgtayttataaagtgttgtgtggtaaatgcactcagtatatttgagcttttattatcctcctgtctgattgctgcagaaatggagacttctgtccttacgttcca

SEQ ID NO: 156396 - DNA, 201 bp, Homo sapiens
cttggggcttctgagaagtgctctgcatccatccactctgcaggcactgccagttgtgcaccagcaggactggccctctcacctgctgggtgtgccttgccttcgggaggagggctcctgtttgctgggtgctgaggttgtgcacagagccaaaaactgtttgctaagtaagcaatggattgatgcttacataaacagatt

SEQ ID NO: 156397 - DNA, 201 bp, Homo sapiens
agtaaatgatgtgtggtggtttctaggtcagctcccagaagctttttaactaataatctttattaatagggctctagaaccagtgactatttatagtaatrtttctgcaggaaaaaatgcatcctgagcttttatttcagattttagtgttatgtatcttcataaaaacatattcagaacattgaagtctcatgacttggg

SEQ ID NO: 156398 - DNA, 201 bp, Homo sapiens
tgtatcagaagcaaaatggcagcccagggcaggggcagatgctatgtccctttgcatggcttccctggccatctagagtccttcactggtgcagatgggarccacagttttccactctctgtcttgcatgttttcaaaaacccagttcttgctatgccactgcccttttgtagtcagtgtgtataccctctctcgaaaaac

SEQ ID NO: 156399 - DNA, 201 bp, Homo sapiens
ttgcagtgtgaccttatccacaggtcatcactgaagcctgcccatctaggacaaaaaggacagtttttaaccagataggatgttttcctgaaggtttgttrttgaatagtaacattttttcctcttctttcatttgagcaacttggtgagttaaacacatccataccatgtcttgacccctgctctgtgacccaatggtgt

SEQ ID NO: 156400 - DNA, 201 bp, Homo sapiens
aagatgcacattattttccttgaataagtatagcatttcagatgggctagtgggagaaattcatacacacacacacacacacacacacacacacacacacmgagttaaattaaggtccgtatttaatcagccatacaaaattgtatcagaagcaaaatggcagcccagggcaggggcagatgctatgtccctttgcatggc

SEQ ID NO: 156401 - DNA, 201 bp, Homo sapiens
tgttcatgtcacctcagggggaccatgctttgtggtctgtaaaataagctcgttagagccgggtgtggtggctcacacctgtaatcccagtactttgggargccgaggcaggcggatcacttgaggtcaggagttcaagaccagcctgaccaacatggtgaaacccagtctctactaaaaatacaaaaattagccgggcat

SEQ ID NO: 156402 - DNA, 201 bp, Homo sapiens
cactgattaattctagatgttaaaacaactatacattaatacatttctgagataaaactcatgatgcattattccttatatatcttgttggatttgatttrctaacattttgataagaagttttttacatctgtgttcatgagggataccagttagtagttttcttttcatgtagtatctttttctgattttggtttcata

SEQ ID NO: 156403 - DNA, 201 bp, Homo sapiens
acattccccggcttgtggcccccttccatcttcagagccagcagtggccagtcaagtctttctcatactgtatcactctgacacttactcatctgcctccycccacatttaaggatgctgtgattaccttgggcccatccaggtaatcttggataatctccctattttaatgtgagctgataagaaatctcagtgccactt

SEQ ID NO: 156404 - DNA, 201 bp, Homo sapiens
cctctctcactatgaaagtcctgatggcatcttcttccaatagacagtgattttgtctacatagaaaatttgctgtttagtgtagatcacttcatcagtgatcttagctgtttagtgtagatcacttcatcaatgatcttagctagatcttctggaaacttgctacagcttctacattagcacttgctacttcatcttaca

SEQ ID NO: 156405 - DNA, 201 bp, Homo sapiens
tcttctgaaattatgtagtatttttctagtagaaattggaacaggataattttaatttttaagatcagctctaaggcagacagttgttctttgtccaaaaycacacatttaggaacgtcatgaactgaatgttgtttcttgattccaattccagcactactgtactatattaccttgaaagtaaaaatacacacaattcta

SEQ ID NO: 156406 - DNA, 201 bp, Homo sapiens
ggaataggaagtggctcatactgaacttcatatttttttagcttaacccaggtacaggcacacatatggagctccagcgtgtgtgtgtgtgtgtgtgtgtkcgtgtgtgtgtgttttcagtgaattgatatattcatctatctttaaaatgaggagcatttaagactccaattttctccttgaaaagtggagttagcctgg

SEQ ID NO: 156407 - DNA, 201 bp, Homo sapiens
tcctctctcactatgaaagtcctgatggcatcttcttccaatagacagtgattttgtctacatagaaaatttgctgtttagtgtagatcacttcatcagtgatcttagctgtttagtgtagatcacttcatcaatgatcttagctagatcttctggaaacttgctacagcttctacattagcacttgctacttcatcttac

SEQ ID NO: 156408 - DNA, 201 bp, Homo sapiens
attttaggatgcttttttagggagttgaatatatttgactttttgaaatgctaaacaaaataacagtgttccttatgataaagcactaaagcctaaaaacrttttctgttcatcaggaggaaaggttttggtagtattgtcttctcagcatatctgttttaagccctttttttcttagtatagattgcctgtgctgattaa

SEQ ID NO: 156409 - DNA, 201 bp, Homo sapiens
aggaataggaagtggctcatactgaacttcatatttttttagcttaacccaggtacaggcacacatatggagctccagcgtgtgtgtgtgtgtgtgtgtgygcgtgtgtgtgtgttttcagtgaattgatatattcatctatctttaaaatgaggagcatttaagactccaattttctccttgaaaagtggagttagcctg

SEQ ID NO: 156410 - DNA, 201 bp, Homo sapiens
cattgacttctcctctctcactatgaaagtcctgatggcatcttcttccaatagacagtgattttgtctacatagaaaatttgctgtttagtgtagatcacttcatcagtgatcttagctgtttagtgtagatcacttcatcaatgatcttagctagatcttctggaaacttgctacagcttctacattagcacttgctac

SEQ ID NO: 156411 - DNA, 201 bp, Homo sapiens
gcaaaacaggtatacgaaaaggtgctcaacatccttgatcatcagaaatgcaaatcaaaactaccttgagatatctcacctgagttaaaatgacttttatyaaaagacagcagtaatgaatgctggtgagcatgtggagaaagaggaaccctcatgcactgttagtgggagtgtaaattagtacaaccactaggaggttcc

SEQ ID NO: 156412 - DNA, 201 bp, Homo sapiens
tccctctcctgggaaacactaatctactttctgtgtctgtgcttttgtttattctgggcatttcatgtaatggaaccatacattatatgatcttttgtatmtgcctttttgcacttagcataatgtttttaaagttcagtacttcattttatggctgcataatattccatcatatgggcacaccacattttggttatctgt

SEQ ID NO: 156413 - DNA, 201 bp, Homo sapiens
ctggtaaaaatggtaacacaccagagtgacaagacaataataactgctgtctcagctcttcaggaataggaagtggctcatactgaacttcatatttttttagcttaacccaggtacaggcacacatatggagctccagcgtgtgtgtgtgtgtgtgtgtgtgcgtgtgtgtgtgttttcagtgaattgatatattcatct

SEQ ID NO: 156414 - DNA, 201 bp, Homo sapiens
gcattgacttctcctctctcactatgaaagtcctgatggcatcttcttccaatagacagtgattttgtctacatagaaaatttgctgtttagtgtagatcacttcatcagtgatcttagctgtttagtgtagatcacttcatcaatgatcttagctagatcttctggaaacttgctacagcttctacattagcacttgcta

SEQ ID NO: 156415 - DNA, 201 bp, Homo sapiens
cacattttcttcattcgtctgttgacagacccttaagttgattccaaagcttagctattgtaaatagtgcaataaacatgagagtgcgtaaatttcttcartatactaatttcttttcttttggatatatacctagcagtgggattgctaagagaaaacaatggggaaattgtccaggactttggtctaggcaatgatttc

SEQ ID NO: 156416 - DNA, 201 bp, Homo sapiens
atccattcattgtttttgaaaactacatctgagcccttatttgtatgtgtccaggtatattgctgtgtgtgtatatccatgtgtgtatttggataaatattcatgaatagtgttctgatttttctggtctttcctgttgaatgatgtgttactgactgtaaccctactgtgtaggcataactgaaaaatctagcaggtgtt

SEQ ID NO: 156417 - DNA, 201 bp, Homo sapiens
caaaactttgaaagcaggcattgacttctcctctctcactatgaaagtcctgatggcatcttcttccaatagacagtgattttgtctacatagaaaatttgctgtttagtgtagatcacttcatcagtgatcttagctgtttagtgtagatcacttcatcaatgatcttagctagatcttctggaaacttgctacagcttc

SEQ ID NO: 156418 - DNA, 201 bp, Homo sapiens
tcatctccttccccccgccacccttcctgggagtgtactttccaaagctgcatctccctaatctgcagattgcttttgaaaaataaagttctcctttggcytccccacatctcattggtcttccgttaacaatattaacacaaattaatgcatacatatcataaaattataaaatcaaccaaaatctctttcttgccctag

SEQ ID NO: 156419 - DNA, 201 bp, Homo sapiens
tttgattattccctggacagcctgctccaccttttttccccaaatttttaatttttgtgagtatataatagatgtataaatttgactatatgagatatttygatacagatatagaaaatgtacaataaattattgttggctatagtaactctgttttgctatcaaatactagatcttattcattgtatataactatatttt

SEQ ID NO: 156420 - DNA, 201 bp, Homo sapiens
ggttgggtgaattagttagagtcaacaaaaggctttgcgatgttaacatcctgtaacaaatattcagtttcagtttagcttgttttatctacagatgctamactgataaaaatcaatctgcagacttttcagtgcaagtgcctatcagttttattcaagagcttataaagaattatgtgccattttagtagtgatattttt

SEQ ID NO: 156421 - DNA, 201 bp, Homo sapiens
tctttccatacatagtctttctaaaattgttcttcatgacaggaagaagaatttaagttcctgtgaatgttacacacacacacacacacacacacacacasacacactttcctttttttttttttttttttggcagaagtatggtctagagagaggctatatagaacaggggcctttcaagcatgtgacataaattacttt

SEQ ID NO: 156422 - DNA, 201 bp, Homo sapiens
tcccaccgtctcctttcttatctggctttttctagtttccaactcctttcatgaagcatgtcccctttcacctgtaactgcataaacccactgtatgtcastgttttaggccctgggaatgtctgttttgcattcttttatgagatggttagtcaggtgcagctacaagaggtctcacaggacaggattaggaaaaagcaa

SEQ ID NO: 156423 - DNA, 201 bp, Homo sapiens
ttaataccattgcaactacattatgaaatcctactaggtacttagtaaaccactaataaagccagatttgagctggttctcaggctctggtgaatagtctstcatgacttacattctcaatacaaaagtgtacataatctgtttttatttctattttttttaaattcccacctactcaggtcatatgagaggttccctgct

SEQ ID NO: 156424 - DNA, 201 bp, Homo sapiens
tgcttatcccctattcataaagttaataaaccaaaaagatttcagcagaactttttttttttaacgaggaattgttaactaagtttttcttgagaaggaayttaacataaaatggtaaacattgctgaatgtaaaaaatgagaatgtctttagatgtttataatcaataccatattcagtatctacttatggcagttatta

SEQ ID NO: 156425 - DNA, 201 bp, Homo sapiens
cacccatcaacccatcacctatgttaggtatttctcctaatgctatccctcccctagccccccacccgacaggccgcggtgtgtgatgttgccctccctgygtccatgtgttctcattgttcaactcccacttatgagtgagaacatgtggtatttggttttctgttcctgtgttagtttgctgagaatgatggtttccag

SEQ ID NO: 156426 - DNA, 201 bp, Homo sapiens
gaaaacaatcttgggataagcctgaggaaagaaagaagggcatgctggggcagggaagcaaggatcaaggaggctgtgaccttgcagattttattctacaygtgctgagaagccatgggagggtttgtttgtttttttgggttttgtttatttgtttgtttgtttttatactttaagttctgggatacatgtgcagaacat

SEQ ID NO: 156427 - DNA, 201 bp, Homo sapiens
tgaggaggttatattactagcaggagctatccaggcaagagaaagcagcaagtcaaaggctttgaggcaggaaaacaatcttgggataagcctgaggaaakaaagaagggcatgctggggcagggaagcaaggatcaaggaggctgtgaccttgcagattttattctacacgtgctgagaagccatgggagggtttgtttg

SEQ ID NO: 156428 - DNA, 201 bp, Homo sapiens
attataggccaatcactttggatattagatttttaagattgattttggaatttctcatccattagcaggttttcacctttctccttaaactcatagttttmcttgaaatcatacagcatatttgtagcaatctgacagcataaatatacacaacacaaatggaacgacttatgaaggaattacttgtgaaagctcattgga

SEQ ID NO: 156429 - DNA, 201 bp, Homo sapiens
tttttgtagattttgctatggagctctttttacgcatttttctgttaaacatttttctaaatattttgtattttttgatgctattagaaatcgtatttttwaaatttcattttcccattatttgctgctaggatgtagacatagaactgttacatgcaccttatatcatgtagctttgctaaattcatttcttctagtagt

SEQ ID NO: 156430 - DNA, 201 bp, Homo sapiens
tcaaaactttgaaagcaggcattgacttctcctctctcactatgaaagtcctgatggcatcttcttccaatagacagtgattttgtctacatagaaaatttgctgtttagtgtagatcacttcatcagtgatcttagctgtttagtgtagatcacttcatcaatgatcttagctagatcttctggaaacttgctacagctt

SEQ ID NO: 156431 - DNA, 201 bp, Homo sapiens
tgatgcgaggactaaatccttagagtgacaccacctaaggatcatgtggttgtccttttgtcctatggctagcacctagctggcatcgtatcaggtatggstggaaagcaaaagggaagccagtcagcacttgctacatcctggaaaatcatttgtagactgatagatgcatgagtgagctgatgggaggagaagaccaga

SEQ ID NO: 156432 - DNA, 201 bp, Homo sapiens
aaaagagaaggcagctctctgaggctttttttataaggacaataatcttacttgcctaaatcacctcccaaaggccccacttcctaacaccatcacattartgattagatttcaacatatgaatttgggggacacaaacgttcagaccacagcagtcagtgattcagctttagtctgcctttatctcttaccactgccctt

SEQ ID NO: 156433 - DNA, 201 bp, Homo sapiens
ctcaaaactttgaaagcaggcattgacttctcctctctcactatgaaagtcctgatggcatcttcttccaatagacagtgattttgtctacatagaaaatttgctgtttagtgtagatcacttcatcagtgatcttagctgtttagtgtagatcacttcatcaatgatcttagctagatcttctggaaacttgctacagct

SEQ ID NO: 156434 - DNA, 201 bp, Homo sapiens
caagttgcatgtaatgatgggatttgagatattttcctcatttctactgatcattataatgtttttaaaaatataaagaacatgtttggaatgcaatttgwggactaaatctagaggaatttaaattcaaactcataagaagtataaaattagataccatgcgaaaagaatgttatatgttttcatagggcagagtatcat

SEQ ID NO: 156435 - DNA, 201 bp, Homo sapiens
ttcttaaaccaacagatcaacccctacagccagaaaaggattagtttcctctaaatcaaataaatggtttatctggaggaaggtggacgctcaaagtcagrcttttgttaagaagaaagaagcatgattgattgtgtgaaggcagtctactatgggctgacatggacccaaacattgttctttgctttcttttctcttttt

SEQ ID NO: 156436 - DNA, 201 bp, Homo sapiens
cttgagctccaaaggcagaggttgccatgagctgaaatcacaccactgccctcaagcctgggtgacagagcaagactttggctcaaaaaaaaaaaaaaaaactttgttcatttcttaatcattttttcccattggattgcatgctttatattattatatcttcaagtccagtgattctttcttctgccatttcaaatctgt

SEQ ID NO: 156437 - DNA, 201 bp, Homo sapiens
tctttcctttcagtcttattgagccaatttaagtcagatttccactctagatgaattactggcagggggatatgagattattcttaaaccaacagatcaamccctacagccagaaaaggattagtttcctctaaatcaaataaatggtttatctggaggaaggtggacgctcaaagtcagacttttgttaagaagaaagaa

SEQ ID NO: 156438 - DNA, 201 bp, Homo sapiens
ttttattcaaatcgattcatatgatactgttatctggtaaggaaaagggaaagggaaacattatgtaaacattacatatccagaatatgtagtaaaaaaawggaatggccttcactcatcagactttagtttcataataacagaaactgaaatttttttaaggcaaaataggccctcatttgcagacatctgttacttgag

SEQ ID NO: 156439 - DNA, 201 bp, Homo sapiens
agtcagccgcctccgcacttcttgtttagttagatgataaatttccttcctacccaaccattataagctggcagtttggtaactgcagccccaggaacatygaaaccgacacatctcatgtcataacctaattttgaatatttatttcattgctacttcattgccacttgtacctcataataaatccatttttgaaaacct

SEQ ID NO: 156440 - DNA, 201 bp, Homo sapiens
ggcttttctgggatccagtcatctgacatactttctgtctctgtctctctctctctctctctctctttctcttatgtgtgtgtgtgtgtgtgtgtgtgtgtatgtacatgtgcataaaaaccatacatagcaacgattggaagaaagtagagacaacattgatataaaatatatttaacttcttaaatgtggcccaggggc

SEQ ID NO: 156441 - DNA, 201 bp, Homo sapiens
ctaccaagacctacatgtccttaaaaaaaaaaaaaagtcctgcattattcttgcagcactgcgcaggaggtatgtgctgtaaaccctataaaatcaatcaactctttgcaaaagtcaagactggcacttctctttgaagaaaggtacacagtggttcagtggaaaaaaagtatgctttggaattatgtaaactgctggcct

SEQ ID NO: 156442 - DNA, 201 bp, Homo sapiens
gggcttttctgggatccagtcatctgacatactttctgtctctgtctctctctctctctctctctctttctcttatgtgtgtgtgtgtgtgtgtgtgtgtgtatgtacatgtgcataaaaaccatacatagcaacgattggaagaaagtagagacaacattgatataaaatatatttaacttcttaaatgtggcccagggg

SEQ ID NO: 156443 - DNA, 201 bp, Homo sapiens
acagtggagggttggataattagatgtcatagaccacagaggagcagggagcagggttttgttgttgatgtcatcgctttctttttttcttttttttttttccttctggtgggtaaggaaatgatggtctggaaattggtaaaagcaagaactacttcccttccttgagaccctgagaattagggaccgctggtatagtat

SEQ ID NO: 156444 - DNA, 201 bp, Homo sapiens
tctaccaagacctacatgtccttaaaaaaaaaaaaaagtcctgcattattcttgcagcactgcgcaggaggtatgtgctgtaaaccctataaaatcaatcaactctttgcaaaagtcaagactggcacttctctttgaagaaaggtacacagtggttcagtggaaaaaaagtatgctttggaattatgtaaactgctggcc

SEQ ID NO: 156445 - DNA, 201 bp, Homo sapiens
ttctaccaagacctacatgtccttaaaaaaaaaaaaaagtcctgcattattcttgcagcactgcgcaggaggtatgtgctgtaaaccctataaaatcaatcaactctttgcaaaagtcaagactggcacttctctttgaagaaaggtacacagtggttcagtggaaaaaaagtatgctttggaattatgtaaactgctggc

SEQ ID NO: 156446 - DNA, 201 bp, Homo sapiens
attctaccaagacctacatgtccttaaaaaaaaaaaaaagtcctgcattattcttgcagcactgcgcaggaggtatgtgctgtaaaccctataaaatcaatcaactctttgcaaaagtcaagactggcacttctctttgaagaaaggtacacagtggttcagtggaaaaaaagtatgctttggaattatgtaaactgctgg

SEQ ID NO: 156447 - DNA, 201 bp, Homo sapiens
cattcaaatgggatattgagtagacacatggttgtggagctcaaaggagagaaaaaggtaagtcatgtagatgatagctgaagtgaactagagaggtggcwtaggaacaagtattacagaattttcacacttaaaaatcaactagatgagagtgagctagcaaaggagactgaaaactacgaagtttaaagaggtgttagg

SEQ ID NO: 156448 - DNA, 201 bp, Homo sapiens
agagtctcgccctgtcaccagactggagtgcagtggtgcgatctcggctcactataagctctgcctcccggattcaagcgattctcctgcctcagcctacygagtagctgggactacaggcacgtgccaccacgcccagctaatttttgtatttttagtagagacagggtttcaccatgttggccaggatggtctcgatct

SEQ ID NO: 156449 - DNA, 201 bp, Homo sapiens
gtctggagaacccaggagaaccctggagaagttgcacaccagcctgggcaacagagtgaaactgtgtctcaaaaaattaataaataaataaataaaatatrtatatacacatatgtattaaatatagacaatgcattatatgttccttttacaagttaattatatatttactgtactcagaatagtactcttaactaccca

SEQ ID NO: 156450 - DNA, 201 bp, Homo sapiens
tctgttctacatcttgtctgtggtttcatccaccttgttaagtgtagtcatttgctcttattcataactatttcctacagtttttaatcactgttaatggrcacaatgagtttttttccctcaattgttgactatgaagaaagctgctatgaatatttttgtaatgtctttttggggaaatagaagcattcatttatgttg

SEQ ID NO: 156451 - DNA, 201 bp, Homo sapiens
aatgctacagcatctgcagtgtgtgttgtgtgggccccccgagggcctggtgtcccctgcgtgtacacttgatccttctgtgtaaccccattgtagtcctrctgtggctgtgacttccctttttctactcagtctcaaggatggagagaagagatgggagatgcatctttccctacatgcacatgcaccgactcaaacctt

SEQ ID NO: 156452 - DNA, 201 bp, Homo sapiens
agggatttttggaatttataaacaaatatttgtaccttaccaagtagattgaaatatgagattcactattctacagaagtgtggttatttagcttttggcraagttgtgaaatttttactgatctgtatgtaggaaaagtcagacttcatgctgttagggtgaaggccgctgttagggcatcacctgtttattcagttgat

SEQ ID NO: 156453 - DNA, 201 bp, Homo sapiens
gtcctcggccctgggaaggtgactgcctcttccacagcaatccatcagcatttgaatgtagtcctctcagaatgtccttgagaataaagcaagttcactcraggaggctctgaggcaaatggagacagaagattttagtgaaaatgacatggtggtgaagttggtcacaacacaacagggttcccagatgcagagtggaag

SEQ ID NO: 156454 - DNA, 201 bp, Homo sapiens
aatcaatttctgcaagagctctgtaagccttacaaagcagaaagtcatccatttcttttttctttgttctcatttagtgcctcatttgatttcactttgtstatctatttattgctccatgttaagtcaggtatgcatacatcatagaagtctgcctctcatttccatcttctttgccttatgtatcacttctcttgtgtc

SEQ ID NO: 156455 - DNA, 201 bp, Homo sapiens
agtgcattggtactagcgtcatggaaatacacaagaggtttccattcttggtcagtctgagtttggggtttgatctggtgtgtttttagattaaagtgtgwggctaaatgtgatgctggaggtcaaggctcttatgagccctgttcttttgtctgcttcagcttttgagtagctattattatcattttatcagtgagcatt

SEQ ID NO: 156456 - DNA, 201 bp, Homo sapiens
actaattgtgcctgccaaaatttattaaatactaaatttcaattttctttctttaatgataaaaaaggataaaataatcaaagaatatatttagttatatrtgggatgccttaggttttgatagttgtcctgccatgtacattaataataattatctgcagaaacaaatatttgattaagagaatggaattgttggtatta

SEQ ID NO: 156457 - DNA, 201 bp, Homo sapiens
tatacttcatttattcattatttttcattttactgaggcccatgaaacaagaaacttaccttgcagtacctgcagtacccctctctcatttgtcttatggygagggatttttggaatttataaacaaatatttgtaccttaccaagtagattgaaatatgagattcactattctacagaagtgtggttatttagcttttgg

SEQ ID NO: 156458 - DNA, 201 bp, Homo sapiens
gccacctctgaggctggggatggggtgcaatggaaatggccatgagggaatttaagcagaaatattgatgttctagatcttgatagggatctgggttacaygttgtatacacttgttaaatctcagggaatgtatacttaaaatttatgcatttcattttgtgtaaatttcactttaaataactataaagaaatgtgtaac

SEQ ID NO: 156459 - DNA, 201 bp, Homo sapiens
aaattagccgggtgtggtggcgggcacctgtagtaccagctactcaggaggttgaggcaggagaatggcgtgaacccgggaggcggagcttgcagtgagcsgagattgcaccactgcactccaggctgggcgacagagcgagactctgtcaaaaaaaaaaagaagtagctatttggtaaaactcattggaacctttttgtc

SEQ ID NO: 156460 - DNA, 201 bp, Homo sapiens
tcttcttgtctccctttcctcaaccaaataaataaaactacacattgcccttcccccggcttttgttttggagagtcttcattttggactgttgcttgccrtagtaatttctgtgtttggtggtatgtgggaacattttctgatttggaggtcatgtacttttgatggaataacatgggaaaaaatgaatcgcatcgttct

SEQ ID NO: 156461 - DNA, 201 bp, Homo sapiens
gggcccatccaggtaatcttggataatctccctattttaatgtgagctgataagaaatctcagtgccacttacagccttaattccctcttgcatgaaagayaacatattcacaggttatgggatgagggtatggacatcttttgggagctaactattatttttcctgtcacaggggaaaaaataagtacagttggcctttg

SEQ ID NO: 156462 - DNA, 201 bp, Homo sapiens
ttataaagaaataaaatttatcaacatatgcatggaagcacttacagaccatacatagcaccattcatagtcaagagaaatgtaaacaaacatgaagatgyagtgttaaatcataactccattaaattaactgtagtacagattatactactgtaataatttcatagctgcttcctgttgctattcggcaagctcaagtgt

SEQ ID NO: 156463 - DNA, 201 bp, Homo sapiens
caaaaacttagggaagggaaattctttcagactaaaagcaaacacatttactttgccagccaactgaagtgaaagcaaggctgatggcccctcaggaaagycacagagcctctgtcttgcagggattcaaaggatgctgcagacagagccaaaatatcccattattttaacagccttgacagtgtcaagcaggaatatctc

SEQ ID NO: 156464 - DNA, 201 bp, Homo sapiens
gaatcctatggggacagtgggaagaacaattagcaggctgtcacagcagcccacccaaaagataaacagagctggaattgggatgctggaaagaaatggaractagagagcagatgcaagaggtgactcttgaatgtgtgatacaggaatggggcatccaagatgctgctgcaattgcagtctttggacagtggagggtgg

SEQ ID NO: 156465 - DNA, 201 bp, Homo sapiens
agtagatctatgctttgactgacttacagtgatatgttgttagggaatgtatcttaaaagaggacactttaagtatttgtacctttaagcacaaataacarttttcatgtttttacatgcatgcagccaaagcaaaggacttccgttataacttatcagaggtgcttcaaggtaggctattggagttgcatttcaagtcta

SEQ ID NO: 156466 - DNA, 201 bp, Homo sapiens
cttaccatgtgccacatacactgctccgagaactgtggccatagccatgaataaaggggagaattgtatttagaagaacagtttcagaacacttttatttrtgatacctttatagtcttagaataactatagaaaggttttaattatttcagattagaatgtactttcattttatatcacactttttttccattattttgg

SEQ ID NO: 156467 - DNA, 201 bp, Homo sapiens
acagagaagaaatcctagagaatatctaatatctccaatataatcctgttattttattgcttaaaaattaaggcctgaagatattgtaacctgataacttsgagttttatgttttgattagtcaggattttgccatttttacacattacaagaacattgtaaaccaaaaagggaattctacagctgctttgtttggcagat

SEQ ID NO: 156468 - DNA, 201 bp, Homo sapiens
gtgctaactgaccccaacagcctttctgaataagctgaggctgaacctctaagtccttctcaacgcagtgttctaggtggctgctagcaactgatcagaaytgtcatgcaagatggaacctgttgttgccccagaagcagagccttgaaatttataaaagatacaacccaggatatcagttccatgaatagccctcacaaa

SEQ ID NO: 156469 - DNA, 201 bp, Homo sapiens
ggctgcagtgggcaggcaggtcctcaggcacctaggcagcatgtgtggtattggccatggcagtagcagtagcaggccaaccctcaggctctcaagtgtcrtgtgcaggtacctaggtccccaggtagggtgtacaagtggttgcttgcagtagaggtggcaggctggctgggcccatcctcaggcccctggaaggcatgc

SEQ ID NO: 156470 - DNA, 201 bp, Homo sapiens
aacattataagctatgttgaggaacagatcattttcaggcaattcttcaaacattttgtgtcttgcagctgagtttttaaattagaattgagcaatagtgyttggagctatacaaaaacttagggaagggaaattctttcagactaaaagcaaacacatttactttgccagccaactgaagtgaaagcaaggctgatggcc

SEQ ID NO: 156471 - DNA, 201 bp, Homo sapiens
tcatatataaaagatagtctattcttaagtaaaaaatgttaaattatattgagtgatgcaatcactttaacatttttccctagggctttgtgccctattttagtaacaaaagatcagctgtttccaaccatgcccctaaatcagctttaaagaaataaaagaatcttctaaaatatcaggagggaataaaggaataggttg

SEQ ID NO: 156472 - DNA, 201 bp, Homo sapiens
attaatgattctttgttatttttggagtcacattctccttcacttccccaaaaatctttttttaaactgaaataaaattcaatattatatatatttgaatrtgtacaattcagtttttttttactatattcatcattttatatacccatcagcattatctagttccagattatttttgttacccccttcccctaaataccc

SEQ ID NO: 156473 - DNA, 201 bp, Homo sapiens
aaccaacaggatggtgtatgtgtatagatatagaaatagatagagatttattttaaggaattggcttacgtgattgtagaggctggccagtccaaaatcckcagagcagagttaatgttgcagcttgagtctggaggcagaattacttttccttggaaggagataagactttttcttaaggccttcatctgattggatcag

SEQ ID NO: 156474 - DNA, 201 bp, Homo sapiens
attgaagtctttaatttttgtataaggtataaggaaagggtccagtttcagttttctgcatatggctagccagttttcccaataccatttattaaataggkaatcctttccccattgcttgtttttgtcaggtttgttaaagatcagatggttgtagatgtgtgatgttatttctgaggcctctgttctgttccattggtc

SEQ ID NO: 156475 - DNA, 201 bp, Homo sapiens
ctgtgtaatatcctttataatcaactagtaaatgtgtttctctgagttctgtgaacccctttagcgcattaatcaaactggaggagggggtgttgggaacyccgatttatagccagttggtctgaagtataggtgacaacctactacttgtgactggcctcagaagtagagacagtcttgtgagactgagccctcaacctg

SEQ ID NO: 156476 - DNA, 201 bp, Homo sapiens
ttttgatggggttgtttgtttttttcttgtaaatttgtttaagttcattgtagattctggatattagctctttgtcagacaggtagattgcaaaaattttmtcccattctgtaggttgcctgttcactttgatgatagtttcttttgctgtgcagaagctctttagtttaattcgatcctatttgtcaattttggcttttg

SEQ ID NO: 156477 - DNA, 201 bp, Homo sapiens
ctgtccttctgtctttttaaaaatgaagtaaatatgtgttcattactagttttctgtttgccttaatatagctttttttaaaatcttagataaaactatckttacactcaggatggaatctaggaaactctgacaaaaccacttgctgaatattaaataacaatattgattgattattcattttaatttattttatttatg

SEQ ID NO: 156478 - DNA, 201 bp, Homo sapiens
tttttgtactgatttcatatctggaaatagctatgaccaggtattaacaattttataatacaccttccactttggacagggtaaaataatcaatatttttygctctgtgcttttgctttctcctgtttttcctatgttttgcaatttcaattttagagacaaataagttcaagttggttagagaaagctgactctcagggg

SEQ ID NO: 156479 - DNA, 201 bp, Homo sapiens
tggtgagaaaacatttcattgcttgtataacacacggaacacagtttgagagcctgctaaagtggggtcagtgaaggatgaccctgtaatttttcattcasacagatagttttgagagtgaaataatctcaggacagcagacataaactgggagtgtctcaggcaaactagacttatgacactgaaatggtggatgctgga

SEQ ID NO: 156480 - DNA, 201 bp, Homo sapiens
ttgagggatgtaaaaatgattatttaaatggtaaaagggagggcagccctaaatttgaatttgaaatgtgatgtcttttactaggccttcatctctacccyctcctccctgaacttgaactacaattaggacctgtgtataatccctttgcagcctgtcttacagttagaggtaacttaggtatagaacacaactgtatgt

SEQ ID NO: 156481 - DNA, 201 bp, Homo sapiens
aatgattatttaaatggtaaaagggagggcagccctaaatttgaatttgaaatgtgatgtcttttactaggccttcatctctaccccctcctccctgaacytgaactacaattaggacctgtgtataatccctttgcagcctgtcttacagttagaggtaacttaggtatagaacacaactgtatgtgttggtgtcaggtg

SEQ ID NO: 156482 - DNA, 201 bp, Homo sapiens
gagacataggaaaaataataaaaaagaagagtaatacatcgaaatgaaaattttccagaccacattagtgtgcatacatgagctgcacagagctgcttaarattagaatactgcccttcacatcaccttgaccttcctgccgcaggctgtccatgcacagtgactactcttggtaggagattcttaatgaggtcaggagga

SEQ ID NO: 156483 - DNA, 201 bp, Homo sapiens
attttcaatttttttaactttttaaacttttttgtaaaaaactaagacacagacagacatattagcttaggcctgcaggatcatcaatatcactgtcttcyaccgccacatcttgtcccattgaaaggtcttcatgtgtaataacaggcatagagttgtcatctcctatgataacaatgacttctggatacctcctgaagg

SEQ ID NO: 156484 - DNA, 201 bp, Homo sapiens
tggatgcaggtctgggattcaggagagctggggcaggatgtgggattcatgaggtcagaactgggaaggccatttatagatgcctagagtgaaaaatatarctaaggtgtaactggtgaggcacatgctgagatggctttatgaagccatgtgctgccgtagaaagaatcaaacctgtgctttctaaagtctcttttgcca

SEQ ID NO: 156485 - DNA, 201 bp, Homo sapiens
cagaataaagagagttacacaaattttttgatttcccagggtatctaaaagttgtatttatactatgtcatagtgtcttaagtgtgaaataacattatggyttaaaagacaatgtccaagccttaatttaaaaatatgttattgctaaaaaatgctaacgataatctgagccttcagtgagttgtaatccttttgctgatg

SEQ ID NO: 156486 - DNA, 201 bp, Homo sapiens
tttgttagttttttttatctcttgataaggagaaaaggctaacgtgtcttacatttcttttaaagcatgtccaaaagttaactttttatgaatattttggrtaattacaaacacagctagtcatgggacatttatccagtctggggacttcttctagtgtgaggatgatttggctgagaagaggagaagtaatgaggtgct

SEQ ID NO: 156487 - DNA, 201 bp, Homo sapiens
gggtccccaggtagtaaactccccaggtgggctgagggctagggctgagcctcaggtgggtctcctgttcccagtgctaccctgaatagtggcctccttcycaggctctggggcagcgcaggaggggtaggctgggaggggctgccacagctgttcacttgggcaggatgtcagaggactcggacaccagcttcccatcac

SEQ ID NO: 156488 - DNA, 201 bp, Homo sapiens
ataatgttagtgtgtaataggacgtacatctccatcagccccagcgtgtattagtcctgcatttatgacattctttcttgtctttagtaacaaactttacyttgtattattaaaatagtgtgttgattttctatcttttgttagttttttttatctcttgataaggagaaaaggctaacgtgtcttacatttcttttaaag

SEQ ID NO: 156489 - DNA, 201 bp, Homo sapiens
ttttctgccacctcctttggcaacctccactttctctatactaaatgtcatatataaaaatgggagtgcctattgcacaggtgacttttggtgtaaaaaamatatgagcagctttagagaaggattttaatgtaattatatgaatgataaaggagggctcagttatggggtattctgcagtgttgctcctttggagaagtt

SEQ ID NO: 156490 - DNA, 201 bp, Homo sapiens
gaaatgatatactgaaatatatttgcttatttgttggaatcacttattattacagcattgtaagtgatttttgaaaaggtggggagggagtaaagaaaatktaatcaaatacctgaaagttcacaccactggctctaaaccatgctaggaatgaagtcaacaattcctcgagggacaacatggaaaacagaatcagaagat

SEQ ID NO: 156491 - DNA, 201 bp, Homo sapiens
acaatgaaagttacgggattttgtttctgtttttttttttttagcagtatatgaacctctagaaaatgaagggatagaaatcacaggtaagttttttctgkaagcacatattttctgcaagtcagctttccctgtattttgttaaaactcctacctgtggaacaaagagtcagtgtagaaaaaatgcaagacattttcaag

SEQ ID NO: 156492 - DNA, 201 bp, Homo sapiens
taggctcaaggactatgttacatgaaagtatgtgttcgctttttatccccccagaaaagtatagatcagattatattccaatcctctattttaaaaaatartaatatttattatttaaaatgctttcctacctctggaaaaagggtttgaaatgatatactgaaatatatttgcttatttgttggaatcacttattattac

SEQ ID NO: 156493 - DNA, 201 bp, Homo sapiens
gttacaatgaaagttacgggattttgtttctgtttttttttttttagcagtatatgaacctctagaaaatgaagggatagaaatcacaggtaagttttttstgtaagcacatattttctgcaagtcagctttccctgtattttgttaaaactcctacctgtggaacaaagagtcagtgtagaaaaaatgcaagacattttc

SEQ ID NO: 156494 - DNA, 201 bp, Homo sapiens
tgttaaaactcctacctgtggaacaaagagtcagtgtagaaaaaatgcaagacattttcaagtcagtaagaaaataattgagtatcaaaattaaagttaakattctaatataaatactctgcagaagacccagtttaaaaagagtcaaatttagcaatctgagtggacacgagttaatttaggaatctgaatgaaggcgag

SEQ ID NO: 156495 - DNA, 201 bp, Homo sapiens
cagaaaaactccgtaaaagggtaggttgatattttttgtgcaatggttttgttgttaaataaactcaggcattactcttgatttgttaaaaaaaaaaaaaatagtaagtgtaaaagaaacaacagttgaatagagtggatttttccccaggcacatgaacattccacatgaaatgaatcagatggaagagaattgctacca

SEQ ID NO: 156496 - DNA, 201 bp, Homo sapiens
tatgcccaaatcttgatcttttctaatgaacttcatgtgtaatgaattcaggatttaggaaaattgaattgtatgctcagatatatttttctttgattatrcttattgaattcatttaaatattgtcctatattttgagatactgaatggtgacttgcatagtacttactatgttttgtctttaattttcagaaacaaata

SEQ ID NO: 156497 - DNA, 201 bp, Homo sapiens
ttaaagcacatgatgtcaattgttcaagtagttttctggttttaagagacaataacaatattgaacaagctttaatgatggcttctccccatccacatgtytttgtaccttagagacacttggagttgatgtacatcacccactccaactctcttatcttatagacaaggagtacttagcctggtgcctagtcagtgcttg

SEQ ID NO: 156498 - DNA, 201 bp, Homo sapiens
gttttttttttttaaaaaaaactggtttaaataagtggtaaaattattggacatattttttgcaatagaaatgacattttgagtttctataacaaacctaygctaacaaaagtcttcaggtgacctttccaatctccaatttgtatttgaatctgcattttacctttttttctctgtctctggatgtaatccctttctgct

SEQ ID NO: 156499 - DNA, 201 bp, Homo sapiens
ttgttaaaactcctacctgtggaacaaagagtcagtgtagaaaaaatgcaagacattttcaagtcagtaagaaaataattgagtatcaaaattaaagttartattctaatataaatactctgcagaagacccagtttaaaaagagtcaaatttagcaatctgagtggacacgagttaatttaggaatctgaatgaaggcga

SEQ ID NO: 156500 - DNA, 201 bp, Homo sapiens
ttttgttaaaactcctacctgtggaacaaagagtcagtgtagaaaaaatgcaagacattttcaagtcagtaagaaaataattgagtatcaaaattaaagtkaatattctaatataaatactctgcagaagacccagtttaaaaagagtcaaatttagcaatctgagtggacacgagttaatttaggaatctgaatgaaggc

SEQ ID NO: 156501 - DNA, 201 bp, Homo sapiens
ctgtattttgttaaaactcctacctgtggaacaaagagtcagtgtagaaaaaatgcaagacattttcaagtcagtaagaaaataattgagtatcaaaattwaagttaatattctaatataaatactctgcagaagacccagtttaaaaagagtcaaatttagcaatctgagtggacacgagttaatttaggaatctgaatg

SEQ ID NO: 156502 - DNA, 201 bp, Homo sapiens
ttttctgtaagcacatattttctgcaagtcagctttccctgtattttgttaaaactcctacctgtggaacaaagagtcagtgtagaaaaaatgcaagacaktttcaagtcagtaagaaaataattgagtatcaaaattaaagttaatattctaatataaatactctgcagaagacccagtttaaaaagagtcaaatttagc

SEQ ID NO: 156503 - DNA, 201 bp, Homo sapiens
ttttttctgtaagcacatattttctgcaagtcagctttccctgtattttgttaaaactcctacctgtggaacaaagagtcagtgtagaaaaaatgcaagasattttcaagtcagtaagaaaataattgagtatcaaaattaaagttaatattctaatataaatactctgcagaagacccagtttaaaaagagtcaaattta

SEQ ID NO: 156504 - DNA, 201 bp, Homo sapiens
atatcaatggtaattctgtgaccaaattatagttattaaatatgcactgccaccattttatcattatcattatttataattataataatttgagaagttgwcagattatggaatactgttttatcttaggacgagatattcttatatcttttgacaacccagagagagactttcttctcttagtggtaagaaattctaaca

SEQ ID NO: 156505 - DNA, 201 bp, Homo sapiens
actccgtaaaagggtaggttgatattttttgtgcaatggttttgttgttaaataaactcaggcattactcttgatttgttaaaaaaaaaaaaaatagtaartgtaaaagaaacaacagttgaatagagtggatttttccccaggcacatgaacattccacatgaaatgaatcagatggaagagaattgctaccacatggcc

SEQ ID NO: 156506 - DNA, 201 bp, Homo sapiens
ttcacaaggggctttcatgtctcagttgtatgttgccagtgtcactttgttcattgtcatagttgagggagaagacttgcaacaagaagatggacccacargagaaccacaacaagaggatgatgagtttcttatggcgactgatgtagatgatagatttgagaccctggaacctgaagtatctcatgaaggtagaacact

SEQ ID NO: 156507 - DNA, 201 bp, Homo sapiens
tccatgaactgcagaatggatgttgtgttagcaggcatgagaacaccattcacctccttatacatctccatcagagttcttggtgactaggtgcttatcartgagcagtaatattttgaagggaatcttttttaaggactcaacagtgggcttaaaatattcaacaaaccatgctagatgtcctatcatccagactttgtt

SEQ ID NO: 156508 - DNA, 201 bp, Homo sapiens
gtcatacaggcccgggtcagattctcagggcaaccttgtattgttgtaggaccttccttgggtctcttgacttctctggggctaatccatattcgtagacygcgagagcataaagtgaattataccgtgcttggtatataagaggcactcaacaggtgatagctttgataatggcaatgatgagtagattaataaaaataa

SEQ ID NO: 156509 - DNA, 201 bp, Homo sapiens
ggggtttcaccatgttggccaggatggtctcgaactcctgacctcaggtgatccgcccgccttggcctcccacatattaagtaatacctacttttgacagycatgagtagcatctttttttaaatgtggtcacttcttttttctcattgccagagtcgtgtcccaaatgcgaacatcctcgtgcttacttcatgcagcttc

SEQ ID NO: 156510 - DNA, 201 bp, Homo sapiens
ccgggagttggagcctgcggagttcgagaccatgctgctgttctgccccggctgcgggaacgggctgatcgtggaggagggacaacgctgccaccgcttckcctgcaacacgtgcccctacgtgcacaacatcacccgcaaggtgggacccgaaggccggcgctgggccgcgggcgactctcgcaggccttccgcgtcctc

SEQ ID NO: 156511 - DNA, 201 bp, Homo sapiens
ttagtacatgtccctaaatatttaactgttacttgtaaacttgtgtaatttattatttattttaatcaaaattctgaatatttcatttaaatgaaagttgsaatattgccttctcagtgttttaaatagcttaagaggtagaaagcaaaccccaaatcacagtgatcccagaatagactacatacttacatttgaacaggc

SEQ ID NO: 156512 - DNA, 201 bp, Homo sapiens
gcttcgcctgcaacacgtgcccctacgtgcacaacatcacccgcaaggtgggacccgaaggccggcgctgggccgcgggcgactctcgcaggccttccgcktcctccgactgctgctccatcgccgccagccccggcgtctgcctctgtccgctctttctcgcgcccctttctggtctgcagcagatctgtgggctctact

SEQ ID NO: 156513 - DNA, 201 bp, Homo sapiens
ggagtttggagtttgaaactacgggaagagtgaactctttgtttttttttttttttgagatggagtcttgctccgtagcccaggctggagtgcagtggtgygatctcggctcactgcaagctccgcctcccaggttcacaccattctcctgcctcagcctcctgagtagctgggactacaggcgcccgccaacacgccggg

SEQ ID NO: 156514 - DNA, 201 bp, Homo sapiens; identical to SEQ ID NO: 29207

SEQ ID NO: 156515 - DNA, 201 bp, Homo sapiens
tgtttttttttttttttgagatggagtcttgctccgtagcccaggctggagtgcagtggtgcgatctcggctcactgcaagctccgcctcccaggttcacrccattctcctgcctcagcctcctgagtagctgggactacaggcgcccgccaacacgccgggctaattttttgtatttttagtagagacagggtttcaccg

SEQ ID NO: 156516 - DNA, 201 bp, Homo sapiens
ggtcaggagttccagaccagcctggcccgcatggtgaaaccctgtctctattaaagataaaataattagccgggtgtggtggcgctcgcctgtagacccarctgctcaggaggctgaggtacgagaattgcttgaacccaggaggcagaggttgcagtgagccgagatcacactactgcactctagcctcggtgacaagag

SEQ ID NO: 156517 - DNA, 201 bp, Homo sapiens
gactccctcccctgcgtgcgtctccgatttcaagtcctaatgcccttcctgttgccctttgccgcatcaacaccgcctcctggacgatctctcatcgtgcwcatggtgctagcagggcctttgcacttgctgttgctcagttcactcttcccctagatcgccaccttactcattggtcttgtctttaccgtattttaaatt

SEQ ID NO: 156518 - DNA, 201 bp, Homo sapiens
gaagacgtaaatgtaagttatattgagaggtgagagagataactgatggttagtactgtggttttccccctataaaagaacatataggctgggtgtggtgrctcacgcctgcaatctcagcactttgggaggccgaggcgggcggatcacctgaggtcaggagttcgagaccagcctggctaacacggtgaaaccccgttt

SEQ ID NO: 156519 - DNA, 201 bp, Homo sapiens
gggctgatcgtggaggagggacaacgctgccaccgcttcgcctgcaacacgtgcccctacgtgcacaacatcacccgcaaggtgggacccgaaggccggcrctgggccgcgggcgactctcgcaggccttccgcgtcctccgactgctgctccatcgccgccagccccggcgtctgcctctgtccgctctttctcgcgccc

SEQ ID NO: 156520 - DNA, 201 bp, Homo sapiens
gtggctcacgcctgcaatctcagcactttgggaggccgaggcgggcggatcacctgaggtcaggagttcgagaccagcctggctaacacggtgaaaccccrtttctgctaaaaatacaaaaaattagccaggcgtggtggcagcacctgtaatcccagctactcgggaggctgagacaggagaatcgcttgaacccgggaa

SEQ ID NO: 156521 - DNA, 201 bp, Homo sapiens; identical to SEQ ID NO: 29208

SEQ ID NO: 156522 - DNA, 201 bp, Homo sapiens
tcttagttctttatctacatgctggtactcagtacttaccatgttagcacattatattggtgctttcgttaggactgggtgtcttctccttagattgtacrttgtcaagtactgatgtattttctgctgtgactctcgagttcttgcctaatgtaaaccagtagggcagacctcatttttctggactttttgagactggtt

SEQ ID NO: 156523 - DNA, 201 bp, Homo sapiens
tgagtgaggaagcatactgagtaaaatgtgaccacatctgtatactctttcaattaaaataatgtcatttatgtgcttacttggatatagcatggaaataytgaattacttagttgtatggagcagactcatcacttggccaaaaaggaggctgggcgcagtggctcacgcctgtaatcccagcactttaggaggctgaag

SEQ ID NO: 156524 - DNA, 201 bp, Homo sapiens
cacatttgaaatcatctctggatcttataaaaattcccaatccaaaggtcttaccccaggccaattatatcagaatctgtaggggtagggccctggcatcmgtactgtttaaagctccccttgattccaatctgcaggcaaagttgagatccagctgttctcctgcctccaggcccacccatctctgggctgacccagtga

SEQ ID NO: 156525 - DNA, 201 bp, Homo sapiens
gtttcaggtaaaatatgcaatatacgttgtcttgagaaggttgatgcttttgaagaacgacataaaagttggggaattgactgtctttttgaaaagttatrtctacttacagaaaagtaaatgagacatagataaaataaaatcacactgacatgtttttgaggaattgaaaattatgctaaagcctgaaaatgtaatgga

SEQ ID NO: 156526 - DNA, 201 bp, Homo sapiens
ggctcacagattggtttgatcaagtgtgatgtttacataacgtgctgggaaggctggtcgccccaccctaatcttattatgcaaatgaactcttcccttcrctggcaccatgttgtctgcttcttactctacaggtggctgacagagaagggaagatagagccaccattttgaacatgattggcacaaactgccggcatct

SEQ ID NO: 156527 - DNA, 201 bp, Homo sapiens
aaattgcgatttgttttttctttatttagagcagttataccctctatttttttttttgagacagagtctcactctgtcgcccaggctgcagtgcagtggcrccatctctgctcactgcaagctccacctcccaggttcacgccattctcctgcctcagcctcccgagtagctgagactacaggcgcccgccaccacaccca

SEQ ID NO: 156528 - DNA, 201 bp, Homo sapiens
  misc_feature (1)...(201): n = A,T,C or G
aattgcacatttctggaataacttaaaatacctgacttttcagtaccaccctgcctgataattggttgacctgcagatttatctttagcagagtaaaaatntcactctgctcgaggaaacattgttagaattttatagcaagctctgaagtgagtaacagccaactgatcttcaaggttgtcctctgtgatattcctctga

SEQ ID NO: 156529 - DNA, 201 bp, Homo sapiens
agtattttggtttttttgttttgttttgtttttgagacacagtctcactctgtggcccaggctggagtgcagtggtttcatctcggctcactgcaacgtcygccttccgggttcaagtgattctcctgcctcagcctcccaagtagctgggattacagtgtatgccatcacacccagctaatttctgtatttttagtagag

SEQ ID NO: 156530 - DNA, 201 bp, Homo sapiens
gtggtctgtgatctcttatcaggcacaaaaggaggggcagcatcagggggttggttgatatcagtggtagaatcttttgaaagggctggtttcccttaagyccttatagaacaaagcctaattgtggttagcaagagaggaggtatagagttgtatctgacgctctatctactcttggcccagaactcagttttcaaggtt

SEQ ID NO: 156531 - DNA, 201 bp, Homo sapiens
aaacaggttctgaggcaacattaggaaaatggtatgaaatagccaattaaatgtgattgttgaatatttggggtctaaagccatttgtaataaagacattmcaaaaaatatcagaactggccaggtgcggtggctcacacctttaattaggtgagcggatcacttgaggtcaggagttcgagaccagcctggccaacatgg

SEQ ID NO: 156532 - DNA, 201 bp, Homo sapiens
  misc_feature (1)...(201): n = A,T,C or G
gatttatctttagcagagtaaaaatgtcactctgctcgaggaaacattgttagaattttatagcaagctctgaagtgagtaacagccaactgatcttcaangttgtcctctgtgatattcctctgagttggcccaaaagaacctcgcacaggttttaaaagaaaaaaataaggtgccaataaagtgcagtaaaattattta

SEQ ID NO: 156533 - DNA, 201 bp, Homo sapiens
tagagaacgtaccatgaaattaatgttgaaaaatccatggctccagaggctccatcacccccaaaatagtacatatttagagaattaataaagaattttcwaaacatccccaagaaaaaaaaattatttttaattactaatcaggaaagccctgggtgtaagtcagatttaccactgactgggtgtgtgtctgagcaagtt

SEQ ID NO: 156534 - DNA, 201 bp, Homo sapiens
ggtggtatgtgcttgtagtcccagctacttgggaggctgaggcaggagggtgagcccagaagttcaaagctgcagtgagctatgatcgtaccactgcactycaacctgaatgacagagcaagaccttgtctgtaaaatatttaaaaaaaaaaaaaacaaaaaaatcaaaatatttcatgtggtttaacatttaattctgta

SEQ ID NO: 156535 - DNA, 201 bp, Homo sapiens; identical to SEQ ID NO: 29214

SEQ ID NO: 156536 - DNA, 201 bp, Homo sapiens
tttatcttagaaaaggaactaatctctgtaaatatgctctgtatatatgctatatgctctatgttaaaggtatttgaacttttctagagagatggtatatwtttttttatttgtttatttttgagataggatcttgatctgtcacccaggctggagtacagaagtgcaatcacagctcactgcagcctcgacctccctggg

SEQ ID NO: 156537 - DNA, 201 bp, Homo sapiens
tagctctgctaatctgatttaaattccattaatgaacagaagccctaacaaagaacctttgggaagaaaatacagcaggccctgtctggaggtggagtctraggatactgctcttagaagggggcggaagctcagcttccttatactctatatcctgcagcagagcgggaggggtgtataaaatgtgggtgagtgcaggag

SEQ ID NO: 156538 - DNA, 201 bp, Homo sapiens
tgaagccagtggaggcctggacttgcaactggtgtctaagtgaggagggaaatcttagggactgagcccccaacatatagaatctgacactatctccaggtaggtaatgtcagaattaaatcagaagatacccaactggtgtccaatatttggtgtgctgggggaagaacccccacatttggtcacagaaatcttgtgtgt

SEQ ID NO: 156539 - DNA, 201 bp, Homo sapiens
agtgaccctcgcatgtcagcctcccaggtagctggaactacaggtgtgtgccaccacacccatctaattttttctgtagagttggagttttgccatgttgyccaggctggtctcatactcctgggctcaagcgatctgcctgcttcagcctcccaaagtgctggaattacaggtgtaagctgccacacctggccaaaagtc

SEQ ID NO: 156540 - DNA, 201 bp, Homo sapiens
gctatgcagatacaatgttttccctcctgggaaagaagtttcagtatctcctgtgtgttctttcttatgatccaactaaacatccaggtaaagttgttggktttttttttttttcttttaccagttgcctagtttcttgatataaattctatgacatggataagaattattttctcctaatttatctcataggaagcatac

SEQ ID NO: 156541 - DNA, 201 bp, Homo sapiens
gaggagctggggtttgagcctgggcatctcatagagtctgcacttgcctccccaacttctggcagacctctggacatagatcacagtctagccaggctccrtagaaactggagtgccaagagcccaggctccttcctcagtgtggggaagggtgtccatctttgtccttggcctgtctctcatggcctctctaccaccctg

SEQ ID NO: 156542 - DNA, 201 bp, Homo sapiens
tatgttatattgccccctcttggagtgtgcccccagtccacaccctagagtgtcaccctttcaaaagtcacctctttttttgttttattctcttgatttttgttgttgttgtttattttttaggattattttgctccaagtgtttgtttttgagacagggtcttactctcacacaggctggagggcagtggcacaatcaca

SEQ ID NO: 156543 - DNA, 201 bp, Homo sapiens
caggttcgtcgtcttgtgccaggaaaatttaggacagagacacacatgaggagttcaggagtggaggtttaataggcaaaaaaaaaagagaaagagaaaakaaaacagctctctctttagtgagagagaggggacttccgagaggaaaaaacctgccaggtgtagaagcgccggattttatagtgcagcctgaggagtcag

SEQ ID NO: 156544 - DNA, 201 bp, Homo sapiens
caaacaaccaaaaaaaaaaacaggttaggctccacatcagtgaaataagatttttatttttaaaaattgtttcatcagtaaggcttactgccaaacctaawctttttaaattagaccatgccgcatcttaattttcatgctcctgtttccctctttttctcactgctcctcctttatctcttttccagaactcccatcctc

SEQ ID NO: 156545 - DNA, 201 bp, Homo sapiens
ctatgttgcccaagctagtctcaaactccaggcgtcaagccatcctcccactttggtcgcccaaagcactgggtgattgatagcaaaaaaaaaaaaaaaaagagagaagaagttaaaaaaatgagaattaaggtaaatctttcagaaaatagtacaaaaacatgaagatatagaaaaatagaaaaaaatgagaaatttacc

SEQ ID NO: 156546 - DNA, 201 bp, Homo sapiens
acaaacaaccaaaaaaaaaaacaggttaggctccacatcagtgaaataagatttttatttttaaaaattgtttcatcagtaaggcttactgccaaacctawtctttttaaattagaccatgccgcatcttaattttcatgctcctgtttccctctttttctcactgctcctcctttatctcttttccagaactcccatcct

SEQ ID NO: 156547 - DNA, 201 bp, Homo sapiens
actatgttgcccaagctagtctcaaactccaggcgtcaagccatcctcccactttggtcgcccaaagcactgggtgattgatagcaaaaaaaaaaaaaaaaagagagaagaagttaaaaaaatgagaattaaggtaaatctttcagaaaatagtacaaaaacatgaagatatagaaaaatagaaaaaaatgagaaatttac

SEQ ID NO: 156548 - DNA, 201 bp, Homo sapiens
gctgtattgtgccactgcactacagcctgggtgacagagcgagaccctgcctcaaataaataaataaataaataaataaataaataaataaataaataaatctaggtttccaaatgaaatccactcacatcaccctacattataagccccacccacattctttgccttcattcattttatacctattcttttttttgtttt

SEQ ID NO: 156549 - DNA, 201 bp, Homo sapiens
ggtatacaatagagaaatgttctatcaaaaagtgactttgagatagaaataataaaagtacacattatttgactaacttttaggatgcacatttaattctwcacatttttgtgtctcccgagtcacagtgcatctgtggcatgatgtagtttaattggcagagtcttttcttcccacagtgtgtaaataatggtgtggctt

SEQ ID NO: 156550 - DNA, 201 bp, Homo sapiens
ggctgtattgtgccactgcactacagcctgggtgacagagcgagaccctgcctcaaataaataaataaataaataaataaataaataaataaataaataaatctaggtttccaaatgaaatccactcacatcaccctacattataagccccacccacattctttgccttcattcattttatacctattcttttttttgttt

SEQ ID NO: 156551 - DNA, 201 bp, Homo sapiens
tttgaaaacataatttaagtgtaaatgtatgattttatgcaggtttgcagaccggggacacagtgtagttggtgtggaaatcagtgaacttgggatacaakaattttttacagagcagaatctttcttactcagaagaaccaatcaccgaaattcctggaaccaaagtatttaaggtttgttttgatttgggtaaataatt

SEQ ID NO: 156552 - DNA, 201 bp, Homo sapiens
aggctgtattgtgccactgcactacagcctgggtgacagagcgagaccctgcctcaaataaataaataaataaataaataaataaataaataaataaataaatctaggtttccaaatgaaatccactcacatcaccctacattataagccccacccacattctttgccttcattcattttatacctattcttttttttgtt

SEQ ID NO: 156553 - DNA, 201 bp, Homo sapiens
gaggctgtattgtgccactgcactacagcctgggtgacagagcgagaccctgcctcaaataaataaataaataaataaataaataaataaataaataaataaatctaggtttccaaatgaaatccactcacatcaccctacattataagccccacccacattctttgccttcattcattttatacctattcttttttttgt

SEQ ID NO: 156554 - DNA, 201 bp, Homo sapiens
acttccgagaggaaaaaacctgccaggtgtagaagcgccggattttatagtgcagcctgaggagtcagtgtctgatttacatagggctcacagattggttygatcaagtgtgatgtttacataacgtgctgggaaggctggtcgccccaccctaatcttattatgcaaatgaactcttcccttcgctggcaccatgttgtc

SEQ ID NO: 156555 - DNA, 201 bp, Homo sapiens
ctttagtgagagagaggggacttccgagaggaaaaaacctgccaggtgtagaagcgccggattttatagtgcagcctgaggagtcagtgtctgatttacayagggctcacagattggtttgatcaagtgtgatgtttacataacgtgctgggaaggctggtcgccccaccctaatcttattatgcaaatgaactcttccct

SEQ ID NO: 156556 - DNA, 201 bp, Homo sapiens
aggaccaaaggagcgatgagttcacatttctggctcagatgactggctggatggtcaagaataaatgagaagggcagaaagaatgaatctttttctagagwtgatgagtttaagggacctgtggagtggtgaaggttttatgtctgaagcatggagtgaggtttgggctcaaaatgataggtttgggagtggtctttatgc

SEQ ID NO: 156557 - DNA, 201 bp, Homo sapiens
aagatttgatttttctcccataaaatgttttttctctttctggtaggacaaatattggcaaatttgacatgatttgggatagaggagcattagttgccatyaatccaggtgatcgcaaatggtaagtaatttttctttttttgtttagctgtcttaattttttagtatactatactttttctgggttctagaaaatcagct

SEQ ID NO: 156558 - DNA, 201 bp, Homo sapiens
  misc_feature (1)...(201): n = A,T,C or G
agaagaaccaatcaccgaaattcctggaaccaaagtatttaaggtttgttttgatttgggtaaataattgtatccatatccccacaaaagtttttctcagngtgagtattatgaggataccattcatgtgtccgatggttcctatttagcacgcagattcactgtagatactatatagtataagaagcaagggcttaaaaa

SEQ ID NO: 156559 - DNA, 201 bp, Homo sapiens
gtcattcttcatagtattttaacatgttactctttcttgtttcaggtaaaatatgcaatatacgttgtcttgagaaggttgatgcttttgaagaacgacakaaaagttggggaattgactgtctttttgaaaagttatatctacttacagaaaagtaaatgagacatagataaaataaaatcacactgacatgtttttgag

SEQ ID NO: 156560 - DNA, 201 bp, Homo sapiens
cactgggttatttctgtcatgtggatggccttagaagagccacatctccacagagggaattacaagaaactacaggagttacacttctcaggtttacttcygaggcttgagtacacgtttagagaacgtaccatgaaattaatgttgaaaaatccatggctccagaggctccatcacccccaaaatagtacatatttagag

SEQ ID NO: 156561 - DNA, 201 bp, Homo sapiens
tggtcaggctggtctcgaactcccgacctcaggtgatctgcccacctcggcctcccaaagtgctgggattacagatgtaagtcaccgtgcccagccttatsttagtattttatatatgtgctggtacttagtatcttagttctttatctacatgctggtactcagtacttaccatgttagcacattatattggtgctttcg

SEQ ID NO: 156562 - DNA, 201 bp, Homo sapiens
tggtttactcctgcaaaatgggaatatttctgtaatactaacacaatcatcaccacctccactaatattaccaggtaatacttactggtcacttgcctatkccaggtattgttcaaaatactttatgtgggctgggtatggtggatcatacatgtaatcccagcactgtgggaggccaaagcaggaggattacttgagccc

SEQ ID NO: 156563 - DNA, 201 bp, Homo sapiens
gcactgaccaagtttttaaatgctgtgccctcactttccccaccagcctggggatttttagtgcgtgatttagcatagtgcagtgattttaggaaggcacwtgttacattatagcagaactatgtttttatttcacttgacataaaatcataactgtgcctagatatttgtaccactggtactgttttctcttgagtccaa

SEQ ID NO: 156564 - DNA, 201 bp, Homo sapiens
gtctccctctgtcgcccatgctagcgtgcagtggcacaatcatagctcactgtaacctggaactcctgggctcaagtgatcttcccgccccagcctcctcrgtaactgggactacaggctcgctgcaccacgcttggctaatttttcaaatttttttttatagaaacggactctcggttttttccccagcctggtgtatta

SEQ ID NO: 156565 - DNA, 201 bp, Homo sapiens
agccctgggtgtaagtcagatttaccactgactgggtgtgtgtctgagcaagttacctgtttcttcatatgtaagctggagattataataattaatagtawctgcttattaaggttgttgggaatattaagtgagataatgaatgaaaagtgttcacctaccatacaattgtcctaaaacctttttttttttcctcttcag

SEQ ID NO: 156566 - DNA, 201 bp, Homo sapiens
caattttatgaaatttaaaaacaaaactatagcagaagcttttgaaaaggtgagaatggagactagaacaacttgaggactttgtttgtgggcagaaattwttgtgaaatttcccttccttaattcttgtaatgtgcactttttttgtattatagaaataaactttatttctctagaaatgatgtatacaagtggagtcca

SEQ ID NO: 156567 - DNA, 201 bp, Homo sapiens; identical to SEQ ID NO: 29209

SEQ ID NO: 156568 - DNA, 201 bp, Homo sapiens
gtgtagccgcaggccagaagccagaaactgacacttccagggaggggcaaagggaacaggaatttatgctgaggaaggtggccaaatatacatattcagtwagctgtaggatgactcatgaatatttatgaaaggaggaaagtacccatgagtaattgagcttcatgggtaccatgcacaaaaaatggcggtgttaccaca

SEQ ID NO: 156569 - DNA, 201 bp, Homo sapiens; identical to SEQ ID NO: 29210

SEQ ID NO: 156570 - DNA, 201 bp, Homo sapiens
ggcagaatttagagttgaattaggagtaagtacaataatgcctacgtgatgaagcctacataaaaacccaagaggatggggtttggagagcctcctaatasctcaacaggtgaaggtcctgtagctaacacatctcttcaagtatattcttcgcagtatcctttataataaatgtgcaaagataactaagtatttctctga

SEQ ID NO: 156571 - DNA, 201 bp, Homo sapiens
caggtgtgagccaccgcacccagccaattttgagtatttttaaaagaatccctgatgtcattcttcatagtattttaacatgttactctttcttgtttcargtaaaatatgcaatatacgttgtcttgagaaggttgatgcttttgaagaacgacataaaagttggggaattgactgtctttttgaaaagttatatctact

SEQ ID NO: 156572 - DNA, 201 bp, Homo sapiens
tgagccgagattgtgccacggcactccagcctgggcaacggagtgagatttcatctaaaaaaacaaacaaacaaccaaaaaaaaaaacaggttaggctccmcatcagtgaaataagatttttatttttaaaaattgtttcatcagtaaggcttactgccaaacctaatctttttaaattagaccatgccgcatcttaattt

SEQ ID NO: 156573 - DNA, 201 bp, Homo sapiens
cctctaaattaaagaaaatatatgcttactctaatataaccctctatttagtcatttgaaaacataatttaagtgtaaatgtatgattttatgcaggtttscagaccggggacacagtgtagttggtgtggaaatcagtgaacttgggatacaagaattttttacagagcagaatctttcttactcagaagaaccaatcac

SEQ ID NO: 156574 - DNA, 201 bp, Homo sapiens
cagcagttccccgcccaggctgcacatttgaaatcatctctggatcttataaaaattcccaatccaaaggtcttaccccaggccaattatatcagaatctrtaggggtagggccctggcatcagtactgtttaaagctccccttgattccaatctgcaggcaaagttgagatccagctgttctcctgcctccaggcccacc

SEQ ID NO: 156575 - DNA, 201 bp, Homo sapiens
aaagccctgggtgtaagtcagatttaccactgactgggtgtgtgtctgagcaagttacctgtttcttcatatgtaagctggagattataataattaatagkaactgcttattaaggttgttgggaatattaagtgagataatgaatgaaaagtgttcacctaccatacaattgtcctaaaacctttttttttttcctcttc

SEQ ID NO: 156576 - DNA, 201 bp, Homo sapiens
agaagttgcgagaaattataaagtgagttaggatgttgtgcaatgtagtagtagtcttcatagcagcaataaatcatgggaccagtgctgagtaaagtggwtgttagagacattccttgttctgggcagccacgcccatctccccaggagatgacatcatcatcatcatcatcatcataccagaaacactgggttatttct

SEQ ID NO: 156577 - DNA, 201 bp, Homo sapiens
cagaccggggacacagtgtagttggtgtggaaatcagtgaacttgggatacaagaattttttacagagcagaatctttcttactcagaagaaccaatcacygaaattcctggaaccaaagtatttaaggtttgttttgatttgggtaaataattgtatccatatccccacaaaagtttttctcagcgtgagtattatgagg

SEQ ID NO: 156578 - DNA, 201 bp, Homo sapiens; identical to SEQ ID NO: 29236

SEQ ID NO: 156579 - DNA, 201 bp, Homo sapiens; identical to SEQ ID NO: 29215

SEQ ID NO: 156580 - DNA, 201 bp, Homo sapiens
gtactgggattagaggcatgagccgccatgcccagtggtgtatttatttttactcttgggagttaaaagtgataataacaattcagagttcaggaaatttkcccttagcattcctctgttttgattaaaaagaagagaaaaatgtttagtgtacactgtttttaaaataatttcaaggttttgtttgtttgttttgagatg

SEQ ID NO: 156581 - DNA, 201 bp, Homo sapiens
agtatctagagtatgtctataaaatttaaaagataaagaccattttattgaaagttgttttatcttagaaaaggaactaatctctgtaaatatgctctgtrtatatgctatatgctctatgttaaaggtatttgaacttttctagagagatggtatatttttttttatttgtttatttttgagataggatcttgatctgtc

SEQ ID NO: 156582 - DNA, 201 bp, Homo sapiens
aatacatagacttttaatttgtaagagtcacctttttgattttcaactgagctttttaacatgcttgttttgtaaatatttacatatgttagtattttggyttttttgttttgttttgtttttgagacacagtctcactctgtggcccaggctggagtgcagtggtttcatctcggctcactgcaacgtctgccttccggg

SEQ ID NO: 156583 - DNA, 201 bp, Homo sapiens
ttgctctagcaaattaagcaaacccaaagtggagggtgtgggaaccccaacttgaagccagtggaggcctggacttgcaactggtgtctaagtgaggaggkaaatcttagggactgagcccccaacatatagaatctgacactatctccaggtaggtaatgtcagaattaaatcagaagatacccaactggtgtccaatat

SEQ ID NO: 156584 - DNA, 201 bp, Homo sapiens
gtaatttgtgagctgaaaatatgcttgaaaatctgtgattcctgaacagtgggtattaatagaaatttatttcactattggtgttaactttcgacaacagraggataatcgaggcagatatttagaaatgaaatatatcataaaatattaagttatttatatttaaatatgacaaataatcctttatgcattgaaaatttg

SEQ ID NO: 156585 - DNA, 201 bp, Homo sapiens; identical to SEQ ID NO: 29258

SEQ ID NO: 156586 - DNA, 201 bp, Homo sapiens; identical to SEQ ID NO: 29259

SEQ ID NO: 156587 - DNA, 201 bp, Homo sapiens; identical to SEQ ID NO: 29260

SEQ ID NO: 156588 - DNA, 201 bp, Homo sapiens; identical to SEQ ID NO: 29261

SEQ ID NO: 156589 - DNA, 201 bp, Homo sapiens; identical to SEQ ID NO: 29262

SEQ ID NO: 156590 - DNA, 201 bp, Homo sapiens; identical to SEQ ID NO: 29263

SEQ ID NO: 156591 - DNA, 201 bp, Homo sapiens
ctgcgaccccaggaggacccacaccctgccctttcacttccggcctggacctgaggctcctgctacgtgcagcggattgtgccgggcgtcggcaactgctyggctcgccagactgttcacgggcccagtagagcagtaaataaccggccacccctgcggccgtgccggccgtgatggaactagacagctcacccgactcga

SEQ ID NO: 156592 - DNA, 201 bp, Homo sapiens; identical to SEQ ID NO: 29265

SEQ ID NO: 156593 - DNA, 201 bp, Homo sapiens
gacccacaccctgccctttcacttccggcctggacctgaggctcctgctacgtgcagcggattgtgccgggcgtcggcaactgctcggctcgccagactgytcacgggcccagtagagcagtaaataaccggccacccctgcggccgtgccggccgtgatggaactagacagctcacccgactcgagaagaacggggtggg

SEQ ID NO: 156594 - DNA, 201 bp, Homo sapiens
gtgttaacagttgcctacagtgttcagtatagtaacacactgtacaggtgggtagcctaggagcaataggctctaccatatggcctaagatgtgtagtagscacacatctaggtttattaagtacactctgtgatcttcacatagcaaccaagtcacctaacaatgcacttctcagaatgtatctccattgttaagtgatt

SEQ ID NO: 156595 - DNA, 201 bp, Homo sapiens
taactgctttgtttttccactggttgaagacctgcaggaagtggtgggcattttcatctcccttgcaacaaccaactgacttgacagtagcagtggggagrgggcaaagagatccttcaagaccctcaaccaaggaggcccaacttgggagctggctctagaaggaatagaaatcttgacctaacctaccacagcatcccc

SEQ ID NO: 156596 - DNA, 201 bp, Homo sapiens
tcttccaagcacagctgatctcacaaattcagctacttagaagttaagcactgatcacctggcatgttgacttacactgactacaatttatctggccagcyttaagcaataaccggttgatgttcaaacgatgaagattgttagctatgggataaactagtatgaagcactctataaataattacttcccttttccctgta

SEQ ID NO: 156597 - DNA, 201 bp, Homo sapiens
gtgtcattgtacagtggagtgatgctttggaaaccgaaatgagaagtgaattgaataacttaagccagaagacctgtcaaggccctgggcgagtgtccccsgatatagtgaacaaggcccagtgaccctgaggcgggtagcactcaggctgcatagtgtgtgcatgagtgagtgacttcatctgccacaagaggtgacact

SEQ ID NO: 156598 - DNA, 201 bp, Homo sapiens
ctgcttcctctgtgtcattgtacagtggagtgatgctttggaaaccgaaatgagaagtgaattgaataacttaagccagaagacctgtcaaggccctgggmgagtgtccccggatatagtgaacaaggcccagtgaccctgaggcgggtagcactcaggctgcatagtgtgtgcatgagtgagtgacttcatctgccacaa

SEQ ID NO: 156599 - DNA, 201 bp, Homo sapiens
gattccagccaggctcatctgcccccaaagcgcatgcctacaggacaagacttcactgcttcctctgtgtcattgtacagtggagtgatgctttggaaacygaaatgagaagtgaattgaataacttaagccagaagacctgtcaaggccctgggcgagtgtccccggatatagtgaacaaggcccagtgaccctgaggcg

SEQ ID NO: 156600 - DNA, 201 bp, Homo sapiens
actgaggtctatgagctgagtcgattgcctaaggcggcactgcaaatgacagagctaggattccagccaggctcatctgcccccaaagcgcatgcctacasgacaagacttcactgcttcctctgtgtcattgtacagtggagtgatgctttggaaaccgaaatgagaagtgaattgaataacttaagccagaagacctgt

SEQ ID NO: 156601 - DNA, 201 bp, Homo sapiens
acactgacactgtcacagatggtaaggaggatgaccctgtcttctcctgaagtttcctttaagtggtctccccactgctgtgagtttggataaagtttctrcacctcaagatacctaaagttaactgctttgtttttccactggttgaagacctgcaggaagtggtgggcattttcatctcccttgcaacaaccaactgac

SEQ ID NO: 156602 - DNA, 201 bp, Homo sapiens
caagctaagcagagagaaggcaatctaaatctaaagcatcatgtttgtgaggtttggggttgtggctgccacaacaaagatttactccttcaattcttgtyttaatattgtgtcgttaaaagtcaaatatgagcaaaaacataagtctgaataaattattttaataatactggaattgccataaaaaactgatttaacagg

SEQ ID NO: 156603 - DNA, 201 bp, Homo sapiens
tttctgtctcttttaccttctttctccaggcccccaatcaagggtgaaggtgttggacagaatacagatgtgtcctctttctaatagatattctgttttaygaaatggaacaaaaataagagatgagtttaaaacaaagtgctcttttaaaattgaagtcaacagccagatgtcctgtgaacaatgttcagggaaaatttg

SEQ ID NO: 156604 - DNA, 201 bp, Homo sapiens
cctccttgtctttggtgtgattagttactcctttgatgcagaagatgtcttccttaaaagctcatttctgtctcttttaccttctttctccaggcccccartcaagggtgaaggtgttggacagaatacagatgtgtcctctttctaatagatattctgttttatgaaatggaacaaaaataagagatgagtttaaaacaa

SEQ ID NO: 156605 - DNA, 201 bp, Homo sapiens
ccttataaacccaccatttccactttttattctggatagaaaggaaagtaccagataatttttttttttgagacagagtcttgctctgtcgccaggctggwgtgcagtggcatgatcttggctcactgcaaactccacctcccgggttcaagcggtactcctgcctcagcctcccaagtagctgggactacaggtgcacgc

SEQ ID NO: 156606 - DNA, 201 bp, Homo sapiens
tctgaattcaggggaaggaaattactccccatccttataaacccaccatttccactttttattctggatagaaaggaaagtaccagataatttttttttttgagacagagtcttgctctgtcgccaggctggagtgcagtggcatgatcttggctcactgcaaactccacctcccgggttcaagcggtactcctgcctcag

SEQ ID NO: 156607 - DNA, 201 bp, Homo sapiens
tattctgttatctggactagaattttcaatcaatgtgtttgaaaataatgttgctatcacctatttggttgagttttggttttttctttttcttttttttyccaaaaataaagacagcccatttttgtcatttccattaccacagatgtaagaaagtgataagccatggccatgagctgccctgagctttggtcgttgggg

SEQ ID NO: 156608 - DNA, 201 bp, Homo sapiens
ctctgaattcaggggaaggaaattactccccatccttataaacccaccatttccactttttattctggatagaaaggaaagtaccagataatttttttttttgagacagagtcttgctctgtcgccaggctggagtgcagtggcatgatcttggctcactgcaaactccacctcccgggttcaagcggtactcctgcctca

SEQ ID NO: 156609 - DNA, 201 bp, Homo sapiens
tgaagaaatataaagcaggaaagggaaaaaaggaaaccccacagtgggaggtagatgggtgcaagttgagttttacttttttttttcttttttttttttttaaagatggagtttcgctcatcacccgggctggagtgcaatggcgcaatcttggctcactgcaacccccgccttccctggttcaagtgattctcctgtctc

SEQ ID NO: 156610 - DNA, 201 bp, Homo sapiens
gagaaatccggcgcacgcatccagtttccaccaccgaatttccagcttcttaaatctgcaggtccagaaaaagaagatgggagtgctgcccacgtcgcgcrctggggctacggccggccccacccctggcgctgccgcggcagtcccgcccttggacttgggcggcgcctggataaacacctgaacctgactgagctccga

SEQ ID NO: 156611 - DNA, 201 bp, Homo sapiens
tgcagtggcttgatcatagcccacagcagcctcaaactcccaggctcaagccatcctcccacctcagcctcccaaatagctgggactatagttgtgcaccrttatgcacagctaatttatttttatttttttagagatggggtcttgctatgttgcccaggctggtctcaaattcctggcttcaagcaatcctcccacctc

SEQ ID NO: 156612 - DNA, 201 bp, Homo sapiens
tttgagatggagtttcactcttgttgcccagactggagtgcaatggcaccatctcggctcaccacaacctctgtctcctgggttcgagcgattctcttgcytcagccccccgagtagctgggattacaggcctgtgccaccatgcctggctaattgttttgtatttttagtagagacggggtttctccatgttggtcaggc

SEQ ID NO: 156613 - DNA, 201 bp, Homo sapiens
aagacactgtactaactaccatgtatgtattataaccttataaagtaaaacccattattatccctatttcacaagtaaggagactaaggcttagggcaggkatgtagctgccctaagaaacacagttagtaaacagcaagactatagctgccacttgcatctattgacacctgagtacctgcttctaacattacactgcac

SEQ ID NO: 156614 - DNA, 201 bp, Homo sapiens
attcagcaaatattcagagagtgctttgtgtgtcatgaatcacccaccatccaaggatctgcgcttagggttacaacaaagaacaagacaaacagtggtcyctgcccatgtggaaatcacttcctgtggggtgagggggcagaaaagaaacaaacaaaaaagtaaggtaaaagaaaagaccataagtgctctgaagaaata

SEQ ID NO: 156615 - DNA, 201 bp, Homo sapiens
tcttggcaacagagtgagaccctgtctcttaaaaaataaaaaacgtacatggtggtgcacacctgtaatcccagctacccaggaggctgaggcaggagaawcgcttgaaacagggaggcagagtttgcagtgagctgagatcgcgcgattgccctccaacttgggcaataagagcaaaaactccgtctcaaaaaaaaaaaa

SEQ ID NO: 156616 - DNA, 201 bp, Homo sapiens
atcacttagtgttttatttcttcttttgaatgtcttcatgccccaatgggattgcaattttttgagacaaggcaccatgtaagaactagcacaggggctcmcaatgcatttacttgtaagtaaagtccagcagtgtgacctgagacaggatctctgcagcccttcttgtgctgggctctacttggtcattgtcaactgacc

SEQ ID NO: 156617 - DNA, 201 bp, Homo sapiens
gctttcaggaaaccaaagctctgacatgaagatggtagggattttcttaccatcatagaggcacgtgcccgtccctcacaaggaattttttttttttttttgagatggagtttcactcttgttgcccagactggagtgcaatggcaccatctcggctcaccacaacctctgtctcctgggttcgagcgattctcttgcctc

SEQ ID NO: 156618 - DNA, 201 bp, Homo sapiens
tggaattccaacccaaactttaatctctagacctcattgcctgtgtgggtacccagcaggcaccctaaacttcaactggggaagggaggtaactcaggctracaagctcttagaaatctagtaagcatctgccaagacagggttaaaagatggacatattttaggtcttgcatcaagccaacattgagacagtggaacact

SEQ ID NO: 156619 - DNA, 201 bp, Homo sapiens
ctcccactagggtccctcccataaaacacatggggattgtgggaattactcgagatgagatttgggtggggacacagagccaaaccatattagtggttttgtttgtttgtttgtttgtttgttttcctaaatgagcaactcttgtattcaggtgcagtatatcttaaacttaagctacaaacatgtcatctcagttgttca

SEQ ID NO: 156620 - DNA, 201 bp, Homo sapiens
ggtatgtttacattatactgaatattgtgaacttatactccaaaagcaatttgcgtttcagattgaaatgtacaaggatagcagcacagatagtgctgtctttttttttttctttcttaaacctgaaaaacactttaaatacttttagaaggactgagtaaaatcttttctctctgccaagaaaattacaacccaaatacc

SEQ ID NO: 156621 - DNA, 201 bp, Homo sapiens
ctaaaggtagttttgttctttttgttcaaaatcaaacattttgttttacatccaagtaggatatttccttttctaccaaacttaagcatctcttttaaaawtatatttatctttatcagaaaacttagcagtctaattgttatttcagacccttgcactgctgaaccagtttaaatctaaactcactcaagcaattgctga

SEQ ID NO: 156622 - DNA, 201 bp, Homo sapiens
atatgaataaagttaaaacaatgaagagacttgagtaagtactgtttctaatggatatcctagaactgaggtccttctatgtgcttccattaacagcaacrtaataccaggtctcaactgccattgtgctgccttacattatacttccatgtaatagttgcattgctataggaatataggttactaaactatcattctcat

SEQ ID NO: 156623 - DNA, 201 bp, Homo sapiens
ttctgtgttcatatcaggtactctgtacttagtgattgatttaaaaatcaaggacatttttatatatgctttttctatttatgtgaattgttacattttgmcacattaacctttaatatatgaataaagttaaaacaatgaagagacttgagtaagtactgtttctaatggatatcctagaactgaggtccttctatgtgc

SEQ ID NO: 156624 - DNA, 201 bp, Homo sapiens
atagtttttaatgattatattttcaaattctgcacataaactccaggcagatggtacagttgcagcttttgagtattagtattttttcacacaaaactcagataatccctaaattatattaatagctacattaaacaatgccagaaagaacaaaaggaatactgaagttctcagaaaactaacaagatgcccaaatactga

SEQ ID NO: 156625 - DNA, 201 bp, Homo sapiens
ttactgttgtgagtaaggatatagttttaattttgatttattatacaatactgaaaaatgtctttgaaagccaagtgccttaaaatatactatacgttataactggtattttaatctcagataactaaagaatgtaaaatttctttaatatgatcataaccattatgtagaatcttatgcccttatgcccaatctagaggg

SEQ ID NO: 156626 - DNA, 201 bp, Homo sapiens
gttccagcacgcccttcctgatggcttgcttgctctacaggtttcagatctgcctaggcagctcccacaattgtataagctaattctttgtaataaatctatctatctatctatctatctatctatctatctatctatctatccatccatcaattatctatttatctgtcttctactggttctgtttctctggttgaacct

SEQ ID NO: 156627 - DNA, 201 bp, Homo sapiens
ttccagcacgcccttcctgatggcttgcttgctctacaggtttcagatctgcctaggcagctcccacaattgtataagctaattctttgtaataaatctatctatctatctatctatctatctatctatctatctatctatccatccatcaattatctatttatctgtcttctactggttctgtttctctggttgaacctg

SEQ ID NO: 156628 - DNA, 201 bp, Homo sapiens
tccagcacgcccttcctgatggcttgcttgctctacaggtttcagatctgcctaggcagctcccacaattgtataagctaattctttgtaataaatctatctatctatctatctatctatctatctatctatctatctatccatccatcaattatctatttatctgtcttctactggttctgtttctctggttgaacctgg

SEQ ID NO: 156629 - DNA, 201 bp, Homo sapiens
ccagcacgcccttcctgatggcttgcttgctctacaggtttcagatctgcctaggcagctcccacaattgtataagctaattctttgtaataaatctatctatctatctatctatctatctatctatctatctatctatccatccatcaattatctatttatctgtcttctactggttctgtttctctggttgaacctgga

SEQ ID NO: 156630 - DNA, 201 bp, Homo sapiens
gtgtagttttattcagcatttcttaaagtttttggcctcaggaccctttacaatcttaaaaattattgaggactccaaaaagcttttatttatttgagatdgatagatagatagatagatagatagatagatagatagacagacacatagatagatatggatatagatatagatatttactttattagaaattaaaacaga

SEQ ID NO: 156631 - DNA, 201 bp, Homo sapiens
gtgtgattttgtaatattgtgcattagtcatgtggaaagcattgatccatcaagttatgcagatcttccaaatgttgatacatcttgttctgtaatatccaaaaaatcacatttgttaatgtcatcccttattttcaaaaacatctttcagtgtttcggtaattccaaggtagtggttttgagttttctaaaattccaact

SEQ ID NO: 156632 - DNA, 201 bp, Homo sapiens
cgtggtaatatttctgttccaaagagttgtatttatctgagttacaggactggtttacataaatgagaaactaagattttccatacaccaggaaaagtttyaaaaggatggctttcgtgcttgccacttcatacccaccaaatgttacaaacaaatactcatgtctgcagtaagacatttgtgggtgtgcgtaattgcggt

SEQ ID NO: 156633 - DNA, 201 bp, Homo sapiens; identical to SEQ ID NO: 29269

SEQ ID NO: 156634 - DNA, 201 bp, Homo sapiens
  misc_feature (1)...(201): n = A,T,C or G
gggtcatttatcacatatttgatagggggtatattttatagtaattcgtattgttattatgaaaaaattagaactcttaaaatcctttaagtgtatttctntagcacaagtatacatacacagaaacaaaatgaatgaattacattattcactttatttttcttagatgtagtataccaatgattctgtttttgctaaaca

SEQ ID NO: 156635 - DNA, 201 bp, Homo sapiens
agagattgtcttactttcagaagctaatacctaaacgctgtaggaaattgaacgcacaagaaaattagattttgcaactattgtacaatacattttctaawtaagggtgtctactaaaggaatggaagtgtaaaaagtcagcaactccacatgtgaaatagcatattcaggtattaagatcagttatgaaatttgatacaa

SEQ ID NO: 156636 - DNA, 201 bp, Homo sapiens
gtcaggaattgtttaggggcagctatcaccctcagaagccccattattcgaaagaaactattgttgactggctggctttcagaagcatattcactggagcsagtctgcagccgacaggccaactttcaaaagcatgtggctatcactggttaattggctttcagaggtgtatttactgaagtgagttgtcactgattattt

SEQ ID NO: 156637 - DNA, 201 bp, Homo sapiens
gaaaggaatcaggaaccatttctaagatggagataacactcagctaactgagagacagaagtgtatagtgtatatagaggcagcgaggaagaaggagagtkcaggcgtttgttcaggaaacttcaaagaactgggatgtctggagcatagatgtgatgggagaaggagatgtaacaggctggagagggaagcaaaagccag

SEQ ID NO: 156638 - DNA, 201 bp, Homo sapiens
gtagaaggagggagagaaacatgcaaacaaatatagccacaaaatgttctaataaaaagagtagggaaacataatttctcactccttaggtatggattacrcatggtgacttcctttcaaagtgtacatcatggaaagcaagaaataaaagagtaacttcaagcagaaaagataactgttaggtattgggcttaatacatg

SEQ ID NO: 156639 - DNA, 201 bp, Homo sapiens
ggaaaatatcaaaaatttaaaacaaaacagccatttatattttaaacagtagccaaagcaaaccgagagtcataggagaaaaactggttttgatatttagkgttagtaatgtcatcattctttatatagcttgttttaattaactcatttgaaatgaatctaaagctttgtgatttttgtgttgcttgtgatttcttaaca

SEQ ID NO: 156640 - DNA, 201 bp, Homo sapiens
taagtcttgaagtcaagtgtaagtcctcccacatttttcaaagttgttttgtctgttctacgtcatatgcatgtccatgtgaattttaggatcaactaatmaatttctacgaaaaaaaagcctgctagaattttgattgggattgcattgaatatataaatcaatttgaagaaaattgacatcttactactattgggtagt

SEQ ID NO: 156641 - DNA, 201 bp, Homo sapiens
taatacccagcccatattcaaattttcccaggtgtttgcaaaatgttttttatagcttgtctgtatatgtccagatccagtcaaggtttacatgttgaatwttttttagtctcttgagttttgctttagaccattcaagctactttaacaaaataccatcaactgggtggcttataaacaagaaaagagaaatttctttct

SEQ ID NO: 156642 - DNA, 201 bp, Homo sapiens
gtactttggtccaactctttatctgcagagtttgaaatattaatgaatttcatcaaaatatataattagttgataaactgtgagtgctcttggtatgttaycatcatacaaataactatacattatagtataatcccgtttcagttatctattgctgtgtaaaaatgacctcaaactcagtaactaaaacaagcagctcat

SEQ ID NO: 156643 - DNA, 201 bp, Homo sapiens
tcctattaggattctattattatgagtgcttattatgtctcaggggctgtactgaatcctgtatgttcatttttttcattcttagaccatttccagagaasatgaaagtttaaaatgtgattgctcttttgaaatagtagtatcaacattttattgttgacaaagttaaaatataacaatagtaacaagtgtttatttggc

SEQ ID NO: 156644 - DNA, 201 bp, Homo sapiens
ggcacagtgtctccaagcaaagcaggctgcaaatcttacatagtgttttggggtcaggaattgtttaggggcagctatcaccctcagaagccccattattygaaagaaactattgttgactggctggctttcagaagcatattcactggagcgagtctgcagccgacaggccaactttcaaaagcatgtggctatcactgg

SEQ ID NO: 156645 - DNA, 201 bp, Homo sapiens
cagtttttggttttatgttattccttagacttctaagatacatatgattaacttatctaagagctacctttgtaaaaacattccataggatatgtttattrttttcaaaaatgatggaatatattcctaatatagtgcactatgagggagcatctaagttctttttggatctttcaattcagtcattagttgtgactttag

SEQ ID NO: 156646 - DNA, 201 bp, Homo sapiens
aatggatattacagaaaaccatctgtatttctgggcagagaaaaggataattttttaaatagaagaatatgtatatgaagaggtattaataagacagtaartttgttttctcatatcaatccaggagtattgatgaaagtgttttaaagggcgtatgattccagctacactggtgttggcttagacatcaacacagccagc

SEQ ID NO: 156647 - DNA, 201 bp, Homo sapiens
ctttgtttggtttttgtattaggataatgctgacttcatagagcaagttagaaagtgttccctttgcttctgtcttctagaagagattgcaaagaactggkataatttctttcttaaatgttcagtaaaattcatcagtgaacccatctagacctgatgctttttgttttatcagagccccccccggactgggcccccagg

SEQ ID NO: 156648 - DNA, 201 bp, Homo sapiens
atgctcagcatcattagcgatcagggaaatgcgaatcaaaaccataatgagatattatttcacacccagtaggatgactataatttttttttaaggtaacrgaggaaccaacaagtatgggcaaggacgtggagaaattggaaagctcatacattactgatggtattgtaaaatggtacaactgctttggaaaaaaagttt

SEQ ID NO: 156649 - DNA, 201 bp, Homo sapiens
acataataactttgttttaaataaagagtttctattttgtgagacagagtctctctctgttgcccaggctggagtgcaggcacagtcttggctcactacarcctccacctcctgagttcaagcaattctcctgcctcagcctcctgagtagctgggattacaggcgcccgccaccaccacacccagctaatttttttttgt

SEQ ID NO: 156650 - DNA, 201 bp, Homo sapiens
tctaattttggtcatatcctgtttcctcacttgtaaaataggtttattgatactttcctcatagataatcaaaacaccctagcatagtgcttgacatatartaagttcttagtagatattcttttttaattccatccttcattactatctgtttagcatgtatttcatagaaatttcaggtaatgatgaatagtcattata

SEQ ID NO: 156651 - DNA, 201 bp, Homo sapiens
tagtcatgtcacaatttttcctttatttgttatctgttactggagaattattgtgttcctttgaggatgttgtgtttcttgctttttcatgtttcttgtgyccttacttttatatgtgcacagctggtctaccaattgcttctttcatttttatggattggccttcagagggaaagactttttcatatatatatatatata

SEQ ID NO: 156652 - DNA, 201 bp, Homo sapiens
gaaaaatctttttccatcccttcattttcagtctatacgtgtctttacaggtgaagtgagttcgttataggcagcatattgctgggtcatttttaaatctmttcagtctggctttgccttttaagcagcgaatttaatgtgtttacatttgagattattattgataggttaggatttattcctgtcatttgttcattgttt

SEQ ID NO: 156653 - DNA, 201 bp, Homo sapiens
atgttgaaccataactgcatccctgggatgaatcccacttgatcatggtgtgtattatctttttgatgcgttgttggatatgctttgctagtattttgttrtgaatttttgtatctatgttcatcactgatagtggcctgtagttttctttttcttgttatgtccttgtctggttttggttaccgggtagtgatggtctca

SEQ ID NO: 156654 - DNA, 201 bp, Homo sapiens
tcacaccctcaaagatcctgtttgtagtttttggtaacctggagggcatatcgagtaggcacctattcaacataatgtctaatttgttgacactgaaaaargagttcaagattatactcaatatatttgtataaataaggtagccttattaaactacaagaggccaggaaaaagcaacctaaaaatggaaagccatttagt

SEQ ID NO: 156655 - DNA, 201 bp, Homo sapiens
cccatcactgtcctagcttagggtcataagccatcatggctttagtaatctgcttctctccttgattctaggaatttttttttaataacacttgggaaagwtagacatgctaattcctctgtaagaagactatttagtataccctggaattaagggttttgaagttcttttttgaaagatttatcgtcaaaaaaaaatcta

SEQ ID NO: 156656 - DNA, 201 bp, Homo sapiens
ttgatttttatgtgttattctcataaatacccatcactgtcctagcttagggtcataagccatcatggctttagtaatctgcttctctccttgattctagsaatttttttttaataacacttgggaaagatagacatgctaattcctctgtaagaagactatttagtataccctggaattaagggttttgaagttcttttt

SEQ ID NO: 156657 - DNA, 201 bp, Homo sapiens
tttctaatccagatttaccatgtgctatatttttttaaaattcaggttttagttgaggttgatgtattattatttgtgactttatgggaaagctgaaaaaytttagttcaataataggattccaacagtttcagaacagttacatcatttagtaaatctggcaagtattctactaaaatagggaaaaatcaagagtttact

SEQ ID NO: 156658 - DNA, 201 bp, Homo sapiens
tgacccagggaagccaaaagattggatacccctggtataggctattgttcctaggctataatcctgtatagcatattactgtactgaacattgcaggcgaytgtaatacacaggtaagtatttgtgtatttaaacatatctaaacatagaaaaggtacagtaaaaatacggtctaaaagagatggagaccatcctggctaa

SEQ ID NO: 156659 - DNA, 201 bp, Homo sapiens
aagtcattttttattatgtgatttccatatatttttgctgtacaatttaaaacattataatctctaaagatataaatgctttctttgtgtttctatatgtrtgtgtacacacgtatatgctgcctatataaaattaataaataattttgttgcttcgttttgtcatttgggcccagtaaatttgtcaccataaatactggc

SEQ ID NO: 156660 - DNA, 201 bp, Homo sapiens
cagacatttgtcacttgttttttcccagatgtccttctaatgcagagaaagcaagatctagttgctacgtacaaggagtgtcattagtgaaatttctattratagtgctagttttattagctacaaaagaagttgctgttaaaaaagaaagagggagagagaggcaagcagatggataaagactcaaaaaatgccatgttt

SEQ ID NO: 156661 - DNA, 201 bp, Homo sapiens
gtagtgtgtgtagaaacgagacactggcttctcgtaaaacctgttttctcatactcccagtttagcacaatcattgaacttctccaaacctcagttttttyatctgtaaaatgagcaggttgctgatacctaagaacttcacagtactcaaattttatgttgtgattctagacatattccttttatgcagaatttaaaaat

SEQ ID NO: 156662 - DNA, 201 bp, Homo sapiens
tataaggcttgtgttctcattcctctacaaaactgactgtgttctctaataactatatgatgggctgggagattaattttgcagtattttgtgatgtccakctcttcccctgcattttcactacttctacacgtgttcttatccaaggtgccatccatcttcggtaggcctctgcatacatattgtgactagtggagacaa

SEQ ID NO: 156663 - DNA, 201 bp, Homo sapiens
aattatgagttttattggtactttggaaataggatttaatatagagaaatatttcttattcaaacaatctatgttaataaaatgaaaaatatgatatctaytccctgcttcttcaaatgatacttaatcagctgaaggcagtcataactataaagtaccttacagacataaaatatagtgccttgtattcactgccaaata

SEQ ID NO: 156664 - DNA, 201 bp, Homo sapiens
gttgagacatgaaaaattcccactatttcagctctggggtttagactatgtgggagcaatgatagccagggactacatttccattgctgatgagaattctytatctctcgttctttaaaaaaaaaaaaaatcatttaaaaagtcattaaaataaatcctgagctcatgttgtagtctgttacctctttctcagctggccac

SEQ ID NO: 156665 - DNA, 201 bp, Homo sapiens
tcctttttaaaagaatgtttatattgaaattgaccaagaattcttaagggggcaacttgctttaggagtatgtcttcttaattatcttacatcacacaacrtgagatatagaggatgatggatgtaaagaccgtacaaatgcagttgagacatgaaaaattcccactatttcagctctggggtttagactatgtgggagca

SEQ ID NO: 156666 - DNA, 201 bp, Homo sapiens
tttccatcattaggccaacaaatactgtttattctttaatcaaattcagaattataggtaagccccatgataagcagtgctacatttgaacatccaaattyatagaaaatataaactaagttttgataattcacaaaataattttctatgtttctctcaattatgagttttattggtactttggaaataggatttaatata

SEQ ID NO: 156667 - DNA, 201 bp, Homo sapiens
tttttttccccataatgtcattttgttataattttgtttataatattcctttttaaaagaatgtttatattgaaattgaccaagaattcttaagggggcarcttgctttaggagtatgtcttcttaattatcttacatcacacaacgtgagatatagaggatgatggatgtaaagaccgtacaaatgcagttgagacatga

SEQ ID NO: 156668 - DNA, 201 bp, Homo sapiens
ttgtgatatttattttttctggatttgtttcttttcatgctataaacacacgtgtttttttccccataatgtcattttgttataattttgtttataatatkcctttttaaaagaatgtttatattgaaattgaccaagaattcttaagggggcaacttgctttaggagtatgtcttcttaattatcttacatcacacaacg

SEQ ID NO: 156669 - DNA, 201 bp, Homo sapiens
atatttatattaaaaattttgttttgatccagtatctccgtaaattattaaactgaaactagaatgttaaatttgttagtgaattaggaagataatgggtsatttatcacatatttgatagggggtatattttatagtaattcgtattgttattatgaaaaaattagaactcttaaaatcctttaagtgtatttctatagc

SEQ ID NO: 156670 - DNA, 201 bp, Homo sapiens
aactattctagatttttgggttacaaaataattgtgttagttttaccttgaaactaaaatttgttttgcttattttttttatagtgaaaaaggtgatgcascagatttagttgatgtaagtatttattttggtattaatatagtttgaacaattcatagaaagtacaaaatttttacaaaaacttaattttgttcttaaaa

SEQ ID NO: 156671 - DNA, 201 bp, Homo sapiens
taggtgatgactaaagaggcttcattataccattctctctatatttgtgttgaaatttttccataataaaaatttttgtttgttttaaaaatactttttgwccaactaacctttctggattggaagttgttcattggtttgttcagtgagtcttgatgtgagaattaattacattgcacatatcttctttttttttacatt

SEQ ID NO: 156672 - DNA, 201 bp, Homo sapiens
ttttatggaatttaactttagaaaatcttaaaattttagaatgaaatgtcatttccatgagatacagtctgtcccttttatttcattgaaagaaaataatktagtagtacatggaattttaatttgaagttttatcagatcaactaattctacatgcaggcatacagacacaaagaagcattaagttgcccttcatcagca

SEQ ID NO: 156673 - DNA, 201 bp, Homo sapiens
ttgatggaattcattagcaaaatgatatgtctgagaggaaatcccatttaccctgaggcagttttgagtatttatttagacagggaaattgcttttgggarattctaagtattctattacttgagatttttaagttaattttatggaatttaactttagaaaatcttaaaattttagaatgaaatgtcatttccatgagat

SEQ ID NO: 156674 - DNA, 201 bp, Homo sapiens
tttgtttaacttgaacaagaagttcctgccacatttacccctaatttttcataggaatataaatagtagagtggttatgaatatgggatttggagtcagayctgaatttgaatcccaacttggaaacttactagctgtgggatcttgggcaaattacataacctttctaactctgtgccctaaagtgtaaactggggataa

SEQ ID NO: 156675 - DNA, 201 bp, Homo sapiens
gccaatttctaccttgtattaatttctatttatttgtttgctggtagttgaactttttcagtgtgctaactggccatttatatttcatggttgtggtcacrgttgttaattgtctactcttatgtgtatatcttttttatttacaaaagctctgaaattttttttttttttttttgagacagagtctcactctgtcaccca

SEQ ID NO: 156676 - DNA, 201 bp, Homo sapiens
tgagacataatttacatataagacagcacacagttgttatctgttcactttgatgaatttttgacaattttatacaccaatataaacaccatcaaaacaakgtgtaaaacatttacatcaccccagaacattccccccattcccctttctagctagtcccctccccacaaccactttctgatttctatcagctcaggaatg

SEQ ID NO: 156677 - DNA, 201 bp, Homo sapiens
ggaagatccttctttaacttttaaacttttaatttaagtataatatacaaacaatgtgtctattaactatatttcatagtgcacataagtatacagctagmtgaatttttacaaactaaatatatccatatacccatcacccagatcaagaaacaaaaaattgccattacccataaattcacctcttgccccattctagtt

SEQ ID NO: 156678 - DNA, 201 bp, Homo sapiens
attaggctcacggaggaggctttgaaaaatactaattcgtaggcccctcacccacagattcagaattgtctggtctgaggtaaagtctgggaagatccttytttaacttttaaacttttaatttaagtataatatacaaacaatgtgtctattaactatatttcatagtgcacataagtatacagctagctgaatttttac

SEQ ID NO: 156679 - DNA, 201 bp, Homo sapiens
ttataggagtggttttcactcctaaccgcacattaggctcacggaggaggctttgaaaaatactaattcgtaggcccctcacccacagattcagaattgtytggtctgaggtaaagtctgggaagatccttctttaacttttaaacttttaatttaagtataatatacaaacaatgtgtctattaactatatttcatagtg

SEQ ID NO: 156680 - DNA, 201 bp, Homo sapiens
cttgtttttttatgaaatgagagtaaatttcttcaacccgtatttctttctcttccccgcttcgagagtaaaaactaacaaaaccattccattttatttcytgtccctacctccttcctatttatttctaaatacatatcatctagcttctcacctaccactccactgaaactacttccactaaggccatctagttgataa

SEQ ID NO: 156681 - DNA, 201 bp, Homo sapiens
ttttttaattaaattaagggcttttcatattttcattttcaaataaaagcaaacccaaacataaataatttgaaataaattactgttcctttgaaaacttmtaattacaacattttgaattcttttaagagaaaatgacttagaattgtatgggtcccattccctatcctttagggcattgattcaatgaacttgctgaca

SEQ ID NO: 156682 - DNA, 201 bp, Homo sapiens
ctttgggaagccgaggggggcggatcacttgaggtcgggagtttgagaccagcctggccaacatggtgaaacctcatctctactaaaattacaaaaattarccaggcatggtggcacacgcctgtattcccagctactcaggaggctgaggcaggagaattgcctgaacctgggaggtggaggttgcagtgagcggagatc

SEQ ID NO: 156683 - DNA, 201 bp, Homo sapiens
gacctcaggtgatctgtttgcctcggcctcccaaagtgctggaattacaggcgtgagccactgctcccggccacctttttttttttttaattaaattaagkgcttttcatattttcattttcaaataaaagcaaacccaaacataaataatttgaaataaattactgttcctttgaaaacttctaattacaacattttgaa

SEQ ID NO: 156684 - DNA, 201 bp, Homo sapiens
actgcctaactcgatgattggctcaaccacaacctgctttgttgctatttgctttttgtttgtttttacaacaacaaaaataatagcttttgtttattcastacttcatactacatatgttttcctcttgtgcttacctaatgtaagtacagaactaatttcagtgatgtaaaatttctttccttccacctaacggatttt

SEQ ID NO: 156685 - DNA, 201 bp, Homo sapiens
cagtgttttcagagtcagatgcttaaaggacgaaaacctttttttttttttgagacagtctgtctctgttgcagaggctggagtgcagcggcgtgatctcrgcacactgcaacctccacctcccaagttcaagtgattctcctgccttagcctctggagtagctgggattacaggcacctgccaccatgccccagctaatt

SEQ ID NO: 156686 - DNA, 201 bp, Homo sapiens
aaattagctgggtgtggcggtgggtgcctgtagtcccagctactcgggaggctgaggcaggagaattgcttgaacccgggaagcagaggttgcagtgagcygagatcgtgccgttgcactccagcctgcgcaacggggtgagactctgtctcaaaaaaaaaaaaaggcacttttttggcattgtggtgtaatttttcataa

SEQ ID NO: 156687 - DNA, 201 bp, Homo sapiens
gagactctctactagaaatacaaaccagcagaacaaactccagacatgtttttcaaatttaagggttttctgagaagttggtttccatgtggtgtaagcaycagtaaacaacaaacccatcttagtgttctgtatgcttatgtttcattatgtcgatgatagtagagtatagaatttctactgtaagttcccatgcaagaa

SEQ ID NO: 156688 - DNA, 201 bp, Homo sapiens
gtgtccttacttttatatgtgcacagctggtctaccaattgcttctttcatttttatggattggccttcagagggaaagactttttcatatatatatatayatatatacatacacacacacacacacacacacacactgttggttgggtagggtgcttcagctttgcttctgggtgggtgcagtagtatagacttcttagc

SEQ ID NO: 156689 - DNA, 201 bp, Homo sapiens
cttcaccatgttggacaggctggtctcgaactcctgacctcgttcgtgatcctcctgcctcagcctcccaaagtgctgggattacaggcatgagccaccgygcccagccgatgcttttttttgtttgttttttagacagtcttgccctgtcacccaggatggagtgcagtggcacaatcctggttcattgcaaccttcacc

SEQ ID NO: 156690 - DNA, 201 bp, Homo sapiens
aagtgaaaatgaaagaactatagctgcacacaacaatgtagataaatcttacaaacataaagttgagcaaaagcagctagacaccaaagaatataaatgawgtgatttcattttatataatatgcacaagaaaacaaacaaaattaagtagtagtgtgttttgggtttgggttttgtgtttgtttatttagtattactagg

SEQ ID NO: 156691 - DNA, 201 bp, Homo sapiens
atagatgctcatgatagatctctcatgcataactggttcaggacccaggtggaatgggcttgcatgggaaggaggcacttcaatgtctgtacctgcactgkatgagagaggcagggccaaaagttcctaaacgtgaaaagcttcagtaattcaagaggatcacttatatgcagcttcatttgtgaaacgctttgtaaagct

SEQ ID NO: 156692 - DNA, 201 bp, Homo sapiens
tacagtctgtcacagcttcccttaactaagaaaaggaaatccccctaccctttgtgcttcccaggtgagacaatggcccaccctgcttcagcttgccctcygtgggctgcacccattgtccaaccagtcccagtgagatgaaccacatacctcagttggaaatgcagaaatcacccgtcttctgcatcgatcatgctggga

SEQ ID NO: 156693 - DNA, 201 bp, Homo sapiens
aaaaagcaagcaaaatacttcctgggagacttggaaacttcaacccatgcagtgaggaaagagcctggatttagaatttgaaaaatgcatcataacaatartatcatcatcaacatcatactgtgttgttattatcaggaaggccacatttaggtatacttgattatagacctaaggtaaggataaatatagggagcttgt

SEQ ID NO: 156694 - DNA, 201 bp, Homo sapiens
gttgaaatacatttttggaatgttattcccagcaaactattctagatttttgggttacaaaataattgtgttagttttaccttgaaactaaaatttgtttkgcttattttttttatagtgaaaaaggtgatgcaccagatttagttgatgtaagtatttattttggtattaatatagtttgaacaattcatagaaagtaca

SEQ ID NO: 156695 - DNA, 201 bp, Homo sapiens
acccatggagaagtcccttgtactttattccatgctttgccaagttgccatgtgaggcatttatagaagaataattatgtttattctcacccatttggttrtggttgaatagaagagtgttgcaacatttactatattattgctgaagattttgccagtctgtggtatgtatcttgtgaaaatgcttggcagactattaag

SEQ ID NO: 156696 - DNA, 201 bp, Homo sapiens
taggccataaatgtagcaggatgaagcaggtaggaagtaatttatttttggaggggacttgagaaagtacttggaaacgagaaagcacagggcctgatgasggcagggcactgtaaaaggcctaactatctccacaggaaaatactgggaatagaagtgttgggctggaatgtagagatcttgaagcagactatttcggct

SEQ ID NO: 156697 - DNA, 201 bp, Homo sapiens
ccttcatgttctaaatggaactagaagatggagcagatgaaggcagatgagttattcatctgggccttaagaatgaatacatctatgttgagatgtttatyaatgaaactactgtttccatttacccatattagcttttccagttatagaaaattacctgtcaagttttacttctttcctgtaattagacaatttcttttc

SEQ ID NO: 156698 - DNA, 201 bp, Homo sapiens
acctcaaacagttggctggattggatcagtctttctgagctcaattttattattgtaatttgtgatgcaaaggtgatttacttttttaagttcttaattgkcattggtagatggacagaaaaaattaccaaatcaatcttttccacctggaatttatgtgaacaccttcagccatatcttggcattttatcttatggatgg

SEQ ID NO: 156699 - DNA, 201 bp, Homo sapiens
acctcagcctcctgagtagctgtgactacacgcctgcaccactacacccagctcaatacactgttttttttttttaaatgaatgaatttgcagctacttaragctgatagctccttgactctggtcctgagacaacagagggtataagtataagctcttttaatctatacagtgaaagctgtggatagataacattggttc

SEQ ID NO: 156700 - DNA, 201 bp, Homo sapiens
caatcaacctgtgtgctagtccagaggtttgcgtgagggagaatgagcaaatttaaacaggaacaacaaactacagctgataggtagaaagctggagcccscaaaagaaaagcacatatgcccctcaacaattctcaataatcatttatatattgcagttgtgtcttgtgatcattactaagaatacagaaacatctgtaa

SEQ ID NO: 156701 - DNA, 201 bp, Homo sapiens
tttttcaaatacctaatttgtgtttatatgtattgttcaacatataaaacattttaaagaaagaaaaaatcactggtagtcagattatcatcattgttttygtctaccctctcatacattaatatatagatgcttttcccaagaacagaatcatgccatacctcctttttctccctttctcttttcagtatactgtcaaca

SEQ ID NO: 156702 - DNA, 201 bp, Homo sapiens
ttccctgtaatcccaagcagctggggcttggctcctggggggaagatagttattttctttccttcagagtttatgtttggagtgtaaactttttcatgtamacaaaacaaacctgtgaattttaaggcctccgcctaaatccccatgggcgctgctccgtacacgccgcaccctaccctaccctcccttgcgctcccttcg

SEQ ID NO: 156703 - DNA, 201 bp, Homo sapiens
attggtaaggcttgacatgttactcaagcagcacaaactaagcattctaaattaaattgtcaaaacattagttatacagttctcttgatctaataacctcwaagtaatatttgaaaaaaaggcaaatgttaatttacttcagttatgttatctatgacctagaaggaatgtagacatattcaataaatttgctagtggtac

SEQ ID NO: 156704 - DNA, 201 bp, Homo sapiens
tatacatactgaatggctaaaatctccagcataaatgaaaatgaaataaatggctactaataaaatagtatgcctctatcatattcttcagcccaaagcakttttgctgacagcatttattagatatctaagatctacttcagggagggacaaaagagccaaacagtgttttcagagtcagatgcttaaaggacgaaaacc

SEQ ID NO: 156705 - DNA, 201 bp, Homo sapiens
attgcaaaactcaatggtatatgtaaaatagtgccatattcagaaaactgtaggactgtaataatggtgcataaggcaatttcatccctagtacatgagtyaaaaaacaaaaatattaatagcagctatagctaaaataaattatcaaggtatacacattaaaaatgatgtaaattctgccattaaaaacataatgttgag

SEQ ID NO: 156706 - DNA, 201 bp, Homo sapiens
aggtaatcaagttaaatgtaatagtaatgttttattatttgcgtacagataatgcaattgatcacaataagtaaaacgttgagctgaggtttttttagtakaaataaaagttaaagtaagaaactcttactgagcatttacaaagcaccaatctcctttaaacctataagctagaaagtgttgttgtgcccaaattatact

SEQ ID NO: 156707 - DNA, 201 bp, Homo sapiens
acaatgtcattttcttttaagaagttattaaatgaaattaataataattatcatagtgaatttttcaaatacctaatttgtgtttatatgtattgttcaayatataaaacattttaaagaaagaaaaaatcactggtagtcagattatcatcattgtttttgtctaccctctcatacattaatatatagatgcttttccca

SEQ ID NO: 156708 - DNA, 201 bp, Homo sapiens
tctcaacatagtatccaggatggtcccttaaaaatatggcagatcttgtcactcttttttttaaacccaccaatggatttcttaaaagttaaagcctctaygtttgtctagtagactctataaaatctgtactctctccccttctgtttacctctctgatctcatctccttatacttctctctcattcatgctgttctagg

SEQ ID NO: 156709 - DNA, 201 bp, Homo sapiens
gaatgtagacatattcaataaatttgctagtggtactagaaggttctgttttataagctgttaagaaaaggagaaaagtgtagccctgtttaaaaaaaaaraagttctttagctgaatccagattacaaaatgcggaggctggcagacttagctactataaatttagcattcatagagaaagaggaggagagtggacaaga

SEQ ID NO: 156710 - DNA, 201 bp, Homo sapiens
aggcacacttttggacattttggatacatcaggtaagaatataaatacctctgccccatgaaccttacattctacctatattgcaaagttcctagcacatygtagatttcttctcatggtcataagatgtctgcaccaattctaagcatcacatcttcatagaaaagcatccaaaacaggaaggaaaaattagaagcaaaa

SEQ ID NO: 156711 - DNA, 201 bp, Homo sapiens
ctgcctcagcctcccaaagtgctgggattacaggcgtgagccactgcaccctgccactttctacacttttttaaagaagtgtaccatcatggaggtacatwccatggaggtacaattactcgaaaataatcattcttttgctccactgagagttctgaaaccaaaacctactctgtaattccacacattgaattattacct

SEQ ID NO: 156712 - DNA, 201 bp, Homo sapiens
tagttggccattcgttctttcaggaaaagccataactgaataattcccctgcagatgccaatcaaaatgcctccatgcagatcctatcttcttcacactawaacaaatgtgtcccattatttttgtgatttttttctgcccagtgtcttctctagcctttataataaagcaggagaaagtctaatcttaaatatagaagaa

SEQ ID NO: 156713 - DNA, 201 bp, Homo sapiens
atatgttgctttgctatcagatttctccacattttgcccacatcattcccatcttttcccaaccagaagttatctcctccagcaactgtttaagccaaaarcagtcaaattactcaaaatgctaattagatttgtaatttttaatcaattgagtaaagtgaggaggcatgattgttagcattttgttaggtgatagaaaaa

SEQ ID NO: 156714 - DNA, 201 bp, Homo sapiens
atgtgctatatttcagacactgctaggacctttatcctacctcatctcattttaccttcaaaagagcctcatagggctcataacttagggactagctgtcrcagatttgtttctcacagatccttcagataattagcactatttccatgtgataaatgaggaactctgtagttcaaaaaaattaggttatctgcccaagat

SEQ ID NO: 156715 - DNA, 201 bp, Homo sapiens
atggaataggtagcatttaagctaggccataaatgtagcaggatgaagcaggtaggaagtaatttatttttggaggggacttgagaaagtacttggaaacragaaagcacagggcctgatgagggcagggcactgtaaaaggcctaactatctccacaggaaaatactgggaatagaagtgttgggctggaatgtagagat

SEQ ID NO: 156716 - DNA, 201 bp, Homo sapiens
aaactttctatcaggtagaccaggtccaaaatggaataaatctgtgatatcagaaagctgaaacatggacagttttatttgtgggtatataataaattaaytttattgcttcttttgacttgaatcatgaacctctgtttctgcctgagggagcattgcaaaacttctcgaccctatttcaacagatgaccaagaatttaa

SEQ ID NO: 156717 - DNA, 201 bp, Homo sapiens
ttacagtgagctatgatcatgccactgcactctaggctgggcaacagagaccctgtctctaaaaaacaataaataatacttaaaacaaaataaaaaccaayggaaaccaattaaaggttttaaatgaacaaatttgctctgccccaaattgtatttatatttcataagtttttttattttggcatttccgaagaattacct

SEQ ID NO: 156718 - DNA, 201 bp, Homo sapiens
ttcctaacttctgtctggcatatactaggtgctcaggaaatgtttattgaatgagtaaataagtgaagtacttgtattcattgagggctttaaatgtgtgrggtgcacagaatttagatatatgaggacaaagtcttgactcttaaaatatttgttgagaagaaacattcattcagtattcatctactggattttgaattg

SEQ ID NO: 156719 - DNA, 201 bp, Homo sapiens
ctccggactttagacacttcagctttaattttatgcctgtgcatataatgccacatgtgtgcctgtataataaaattgtaaatactttatcttctgttgtrtggtgaagaggctcattgtactcaggtatacaaaaatgattccagaagaaaaagataatgatatctgctaaaatgaatggggagaggggagaatgctggc

SEQ ID NO: 156720 - DNA, 201 bp, Homo sapiens
taatgagtaatatttatattaaaaattttgttttgatccagtatctccgtaaattattaaactgaaactagaatgttaaatttgttagtgaattaggaagwtaatgggtcatttatcacatatttgatagggggtatattttatagtaattcgtattgttattatgaaaaaattagaactcttaaaatcctttaagtgtat

SEQ ID NO: 156721 - DNA, 201 bp, Homo sapiens
tgcagagcatgaagggcaaaagcaaaagtagtcatgacttgcttaaggatgatccacatctcagttctgttccagttgtagaaaggttagtccattgttgktatgatcctaagttcttaattttctggctcagataattttcttgcttcttctgtgagtaaacagtcagtcctcataagtcaaaaatttttaagccagcca

SEQ ID NO: 156722 - DNA, 201 bp, Homo sapiens
atggagcagatgaaggcagatgagttattcatctgggccttaagaatgaatacatctatgttgagatgtttattaatgaaactactgtttccatttacccrtattagcttttccagttatagaaaattacctgtcaagttttacttctttcctgtaattagacaatttcttttccatgtgctttttatattggcatcctag

SEQ ID NO: 156723 - DNA, 201 bp, Homo sapiens
attgatttactgagttttgaaaagacttccgtgaggtcacttctttacaaatatttcccaatttcatttttctaactctagcttcaagctaacattttcarctctctttttaaagtttccttaaaaccagtagcgacccaaattaactgtattttcttcttcataataataattcccagacctgaatccctactactatta

SEQ ID NO: 156724 - DNA, 201 bp, Homo sapiens
aaagcaaggacgtggtaatatttctgttccaaagagttgtatttatctgagttacaggactggtttacataaatgagaaactaagattttccatacaccargaaaagtttcaaaaggatggctttcgtgcttgccacttcatacccaccaaatgttacaaacaaatactcatgtctgcagtaagacatttgtgggtgtgcg

SEQ ID NO: 156725 - DNA, 201 bp, Homo sapiens
catgaaccaccacgccaagcctagactatcttttagttaagttctcagagtctttgatatgcagtttagcattggattgacacatgcactgactttatggrttcccttttccctttacagtctcctcaataccttctattgtcgtgggcctccccttttcttcctccagccagaacgttggatctttagttacactgttct

SEQ ID NO: 156726 - DNA, 201 bp, Homo sapiens
ttggtattaatatagtttgaacaattcatagaaagtacaaaatttttacaaaaacttaattttgttcttaaaaagtaacgtatattacttttatagttatrtatgtcaaattttggaaaaatatgaaaaacagaaattatttaggtgttagaatatttccttactctaggggtgtgcgtgtgtgtgtgtgtatatctctct

SEQ ID NO: 156727 - DNA, 201 bp, Homo sapiens
aggtttagtctcaaacaaattccactaatgacataactcccaggagagattagcagtatccagaaatcagtccactttttatcctccacccaattaaaatrtaatattatgtaaatgttttgacatatctatatctagtaggaagaattataacagaagagaaaaaccttattttctaggcaaacaagtgaaatgaattgg

SEQ ID NO: 156728 - DNA, 201 bp, Homo sapiens
gtaacttattacccttttctctggcattatcatgtaagagtttataaacataattgctcaatgatttggaattatgtattaatactatcaaggagcaaggwgaacaaaaccagaattctagtcaaaggttttggaggtggctggctactcagaaacatttatttattcagcacacatttattgagggcattcttcttggca

SEQ ID NO: 156729 - DNA, 201 bp, Homo sapiens
gccagagataggaatgcagggcttttggggatagtactctccaatgtcccttcaatacatgttagatatttacctgaccaaaaagaggtttctgaattctrctattgtttgtttaactcaagttggagtctttaggtcaattcactacattaaaacaaatggaggctgggagctgtggctcacgcctgtaatcccagcact

SEQ ID NO: 156730 - DNA, 201 bp, Homo sapiens
gtaacttgggattgttatccttttgttacctaagaggaaacttcaggttcaaataccacaggaggtagtgggtagtaacctgccagagataggaatgcagrgcttttggggatagtactctccaatgtcccttcaatacatgttagatatttacctgaccaaaaagaggtttctgaattctgctattgtttgtttaactca

SEQ ID NO: 156731 - DNA, 201 bp, Homo sapiens
atgacctatctccaggatctcttaacagccttcagtaaagttgtgctcttgtgggtgctgtttggttggagactcaggatggcagagattcaaattatttktgcatggtgtaggccagaggaagctagagcacaagaggcaaaggaggcctgatgatcatgagacatgctgacaattagcagaaattctttggagagattt

SEQ ID NO: 156732 - DNA, 201 bp, Homo sapiens
atttctattctctctagggttcctaaggacagaatcaggattggtgagtcaaagtgactaggcggcagatttgggctcaacaatatggaaaaactttctawcaggtagaccaggtccaaaatggaataaatctgtgatatcagaaagctgaaacatggacagttttatttgtgggtatataataaattaactttattgctt

SEQ ID NO: 156733 - DNA, 201 bp, Homo sapiens
ctcaaactggcttatgccaaattgtctcatgtagtaggctatctcatttctttcaggttctgttaagatccttttttaaaaaacaaacatttagatggtamtgaataattctcagcatgagcaaatttttttctttaaaaaaagatttcttaatagttggcaatgaattgctattagagagaataatgtatttcttgggaa

SEQ ID NO: 156734 - DNA, 201 bp, Homo sapiens
aaaagagataggaagctagctcaacaatttgggagtcagcactatgtgccatgcagtacttgacacttgataaaacaaatctcttaagcagcccttcatgytgaaaagttagagggcagactgaaatcatttatttttggtgctgccatatatatgtttatatagatagacatatatattaatatatatggatataaacaa

SEQ ID NO: 156735 - DNA, 201 bp, Homo sapiens
tcttaaatgttcagtaaaattcatcagtgaacccatctagacctgatgctttttgttttatcagagccccccccggactgggcccccaggagtttcttacygtcatgctaatccacactcagcttcctgcagttcattaaaattaccacttaagcattcctaccagtttatggctccagtagcatttgttccaggtaagct

SEQ ID NO: 156736 - DNA, 201 bp, Homo sapiens
tttcttaaatgttcagtaaaattcatcagtgaacccatctagacctgatgctttttgttttatcagagccccccccggactgggcccccaggagtttcttwctgtcatgctaatccacactcagcttcctgcagttcattaaaattaccacttaagcattcctaccagtttatggctccagtagcatttgttccaggtaag

SEQ ID NO: 156737 - DNA, 201 bp, Homo sapiens
gttccctttgcttctgtcttctagaagagattgcaaagaactgggataatttctttcttaaatgttcagtaaaattcatcagtgaacccatctagacctgrtgctttttgttttatcagagccccccccggactgggcccccaggagtttcttactgtcatgctaatccacactcagcttcctgcagttcattaaaattac

SEQ ID NO: 156738 - DNA, 201 bp, Homo sapiens
caacccttttctggtccttaactgttttgaagtggtctgtgacatggcatttggttttatgttcttgtttacttttctaaattttttctcacacaaagtaktatttaaatatattcttttacttttgttgttgttgttgttgttacagagttttgctcttgttgcccaggctggagtccactgacaagatcttggctcact

SEQ ID NO: 156739 - DNA, 201 bp, Homo sapiens
atgacccaatctataggtcctgggaagcttttttccaggtcccagtttgtgatccttgttctcaagtagaagcaacatggtactttctgaaataaatgtayccgttgtcactggcctaggcctggtacaacagagtactaattgtttcctcatcaacccttttctggtccttaactgttttgaagtggtctgtgacatggc

SEQ ID NO: 156740 - DNA, 201 bp, Homo sapiens
atacatgataccagtgcttggtccctggttgtccataaatgttctgtgttttgctgtaaccctagcccctgaagatgaggcaaagaaatgtagtacttgayagaaagtttttaagcataagaggtaattccctgaagatgaaatttccacatattatgatcacttattctaaattgtgtctggcttcttcacttagtgtaa

SEQ ID NO: 156741 - DNA, 201 bp, Homo sapiens
caaaaacagcttgggactttttccagcataaggctcatcaaagatattaaagcttctaagttctgtaaggttaagagtgtggacaaaaatttggtctgtgragaatttgaagcacatgtaataagtctgttcaacgaatgtttattgcctttactatctaatggtacattaggtgctgaaagcgtacagagacattcagag

SEQ ID NO: 156742 - DNA, 201 bp, Homo sapiens
tgatattgacaaactgaagctttcctgcaccactggacttaaggaagagtgtactcgtaggcggacagctttagtggccggccggccgctctcatcccccrtaaggagcagagtcctttgtactgaccaagatgagcaacatctacatccaggagcctcccacgaatgggaaggtgagagcctcatctagggaacttgggg

SEQ ID NO: 156743 - DNA, 201 bp, Homo sapiens
tggaatgttattcccagcaaactattctagatttttgggttacaaaataattgtgttagttttaccttgaaactaaaatttgttttgcttattttttttayagtgaaaaaggtgatgcaccagatttagttgatgtaagtatttattttggtattaatatagtttgaacaattcatagaaagtacaaaatttttacaaaaa

SEQ ID NO: 156744 - DNA, 201 bp, Homo sapiens
aatactactgtttgcagaagtcccaggcatgtgaccttaaaacaaaacaaaacaaaacaaaaaggcaaatcattttcctacttttagtatgtggttaggartgagttggctcattcacatcaagcctaatttgatgtgagttagtatgaacctttgacaaaatccatggtttagaatttagactggaaggagacaataaat

SEQ ID NO: 156745 - DNA, 201 bp, Homo sapiens
acttgatgatcacagtttttcaaggcttgggacaaggaaagccagttactcagccaactctgctttgtccttgccatcttcccactcactctttcagttaytttctcaaggaatacattttccactaaaaaattcctttcctttttttttaaaacaaaagttaatctttcatttaaatgatatttatcaaatgtgagatag

SEQ ID NO: 156746 - DNA, 201 bp, Homo sapiens
gactttgcaattttgtcaaacacagttggctatattaatatgggtcttttcttggactctctattctgttgcatcaatctgtgtctttatcctttcaccawtaccacattttcttgattacaacagatttatggtaaattttgaaatgattcttccaactctcttcttgtttttttcaaaattgctttggctattctagtt

SEQ ID NO: 156747 - DNA, 201 bp, Homo sapiens
cacccatttggttatggttgaatagaagagtgttgcaacatttactatattattgctgaagattttgccagtctgtggtatgtatcttgtgaaaatgcttkgcagactattaagaaagaatccagtaaccttaagtttctcagaaatatttctcaatgttggcttgcttgtttttctcttattcacactgttattattctg

SEQ ID NO: 156748 - DNA, 201 bp, Homo sapiens
atctttatatgttgaattaaattttaaacttataattaatttcatttgttttcttttaggtttttaatgtaactactagaaatttaaaattctacttatgscttacattatatttgtgttggatattgctggtccagaacaaatcacaatgatactaaactattatataaattgtaactaatagtaatatatggtatctgt

SEQ ID NO: 156749 - DNA, 201 bp, Homo sapiens
tttcaaaaatttactgaataaataaatatttctgtgtaaagtaaaagtccaaatcacattttataaaggattatagactaagtcagtgttcctatttcccyttacatggatgtccataaagcaaatgtaatcctggctatggatgtcttatgcatgcaaaccctgtagattgctgaatgtttggcaaagataattatatat

SEQ ID NO: 156750 - DNA, 201 bp, Homo sapiens
ttgtgaataaaaagctatcatttcaggcacataatagactgaagaaagttttctaacaatagatgatttccacaaaaattattcactgtgcattaacatartgtctttagagagttgttctaatatcagaattagaaattttagttttcaaaaatttactgaataaataaatatttctgtgtaaagtaaaagtccaaatca

SEQ ID NO: 156751 - DNA, 201 bp, Homo sapiens
aagaaaaatgtattaggcatttttaaagtagctaggatgagtcatttatactaccattgttttcctattaagtagtacttaatcctctgtcccacttaatyttcctatgccaaatgtttacagcacctaaatagaattatggaagtttaaagttgaaagaaccatattaactgtctcccagtgtcttagtccgtttggact

SEQ ID NO: 156752 - DNA, 201 bp, Homo sapiens
tagtgcagaagcaacaactaccagctgtctgtatccaaaacagtgaaatcttaataatacagatgtaaaaaagagattattgacttttagacccagtcagrcctcattataagataccatgaaagaacatagcttcatctcattgcttatactagcaaagctttcaataccttttatatgtaatacatactgtaatttgtg

SEQ ID NO: 156753 - DNA, 201 bp, Homo sapiens
tataaaaatttgaaaaaataccaacaattgcatggttgcctcaagtaaatattttactgattattatataactaaaagatgttcattgtggccaggcatgstggcttatgcctgtaatctcagcactttgggaggccaaggcaggtggatcacttgaggtcaagagtttgagaccagcctggccaacatggcgaaacccca

SEQ ID NO: 156754 - DNA, 201 bp, Homo sapiens
atacaagataaaataataaacagtataatggtctgtctgccttcttcctctttctcttcttctttctctcccctccgtcactttcttccatagtacatacrgtatttagtattataaaaatttgaaaaaataccaacaattgcatggttgcctcaagtaaatattttactgattattatataactaaaagatgttcattgt

SEQ ID NO: 156755 - DNA, 201 bp, Homo sapiens
acctgatgagagaaagaattgccaaaaaattaaaaaaggacacaagtgcgaatgttaaatcagctggagaaggagaagtggagaagaaatcagtcagccgyaggtgagtcagttactgtgctagatatcagagtttttgtctttttatatttcactttaattcagattgaatcctctcttcagctaatttttaaaatacta

SEQ ID NO: 156756 - DNA, 201 bp, Homo sapiens
aaaaaaaaaaaaaaaaaaaagagagagggagagaaagaaaagaaatatgattcaattgtaaacagtgcgtatggtgtttgaaaattattcccagatttcaytaacaaggcatttaaagaagtgttattagtagatctaaactgaaatgcatgatagaaatttttcactcagaattactaggattcctcctttgttcagata

SEQ ID NO: 156757 - DNA, 201 bp, Homo sapiens
agtgcatggcatgtgcatgtgtgttatgcataaattacatggttcccagactattttgtaggtcacggttgccgcttttctaagaagtgaaagtcagccaktgtgctgtactacactgtcagggtctgttatctgaggtaaaatgattgcttctaagacatttttatgtgtccacatgagtggccacacattgagggatca

SEQ ID NO: 156758 - DNA, 201 bp, Homo sapiens
atgtctcaaaatctctttcaaatgttttgggttcagccaccacacaaaaaatgttttgccaagtcctcttccctttatttttgaatccatatgcatttttraaggaaatatgacccgtgtgtttctgattcatttacacttaactcatcaagatggtgttttgtaagagcagtttgatgcccaataagtttttttaacctt

SEQ ID NO: 156759 - DNA, 201 bp, Homo sapiens
caaataagttgcttgaaggcagaagctgtctccttccatagtttggtgccaaaggcgaaggctcagtgaatgttgattgacccatagttaaatgcacattrtatagaactttttgttttatatgactggacaggtttagtttagttttgttttgggtttttgggtttttttttttttttggcggtgggggggattccttga

SEQ ID NO: 156760 - DNA, 201 bp, Homo sapiens
atttatctttatcagaaaacttagcagtctaattgttatttcagacccttgcactgctgaaccagtttaaatctaaactcactcaagcaattgctgaaacrcctgaaaatgacattcctgaaacagaagtagaagatgatgaaggatggtaagggctttgatttctgtatattaaccatgaacaaatagtctcagagcaga

SEQ ID NO: 156761 - DNA, 201 bp, Homo sapiens
tattcagtaaattaaagtagattctagatcatccatatatatcatttctacttattgctttccagtaagctttctcaggtgggacaaaagaaggtagaaayggtacataagtctcaactcgccagccctggtgagcagcagctactgaacccttagtaatgatggtatcactaaaattgtgacattttatttccctcctaa

SEQ ID NO: 156762 - DNA, 201 bp, Homo sapiens
catttgtatgagtaatgctgcagtgcacatcttgtgcgtaagccattttctctgtttcaccttatttttctatcgtcccaggataggaattactcagtcarggggaatgatcatcttaaagttaccagtatgtatcaacagctttctaaagacattccaatttactcattttccaacagttaatatgttcattctaccttc

SEQ ID NO: 156763 - DNA, 201 bp, Homo sapiens
aggaataatttgccacgaactgatggtcaagtttttggtataacttaaatatcattttgatatttgttcattgtgtggaacctcagtctcttttaacaatktatttttttctcctgaacatctaagtcattataggctctagcaaaattgattagacttttctgatgacttttgttttatatcttcatgttttatattttt

SEQ ID NO: 156764 - DNA, 201 bp, Homo sapiens
ggtaattccaaggtagtggttttgagttttctaaaattccaacttttgcttgaaagctcaaattttattattgtctactaatagtttgtcttttttttttwaatgagaagttcactttgtttccagattagaataacaaagtttgtcagtttttctttcaaatatcgagtataccataaagaaaaccagttttagctcaca

SEQ ID NO: 156765 - DNA, 201 bp, Homo sapiens
ttttatctctaatttatttgggcaccgtttctagttaagaatttttttaattaaagattttaattcaaagatgaaactttatctgataatccaatgactgwaaagcttacctcataatggaaagttaaaggaattaggtttatttagcccaaagtagtgacttcataggtaatttaagagtaatctgctgggcacggtggc

SEQ ID NO: 156766 - DNA, 201 bp, Homo sapiens
ttttcacactgctataaagatatacctgagacagggtaattcataaaggaaacaggtttaattgactcacaatttcacatggctagggaggcctcaggaarcttcaatcgtggaggaaggcgaagcagtcaccttcttcacaaggcagcaggggagagagcgagtgggaaggaggaactgtcaaacacttataaaaccatc

SEQ ID NO: 156767 - DNA, 201 bp, Homo sapiens
ttgtagcactcagggatatatacttattatttttcagaaacccccattttgctaccagttttgataaatataaaaaagcttaattatttctgtcatgcttkactcagtaaatttaatggtaatgctcagaagggatttttggtcattaaaagttagtataatataggaaacattggtgctgtgaggcaaaagctttaacat

SEQ ID NO: 156768 - DNA, 201 bp, Homo sapiens
tcagggatatatacttattatttttcagaaacccccattttgctaccagttttgataaatataaaaaagcttaattatttctgtcatgctttactcagtamatttaatggtaatgctcagaagggatttttggtcattaaaagttagtataatataggaaacattggtgctgtgaggcaaaagctttaacatcatactgaa

SEQ ID NO: 156769 - DNA, 201 bp, Homo sapiens
tttttggtcctcatagtaccgtatccagtgcctggttcataatgggctttcaaaaaatatttgttgatgttatgtgcatcaagatctgtcccatggaaaayaatggttggctatgtaccatactgttaccactggttagctggagatgcaggtgggaggataacaggtacaaatgggcatggaaagaaggtataattaact

SEQ ID NO: 156770 - DNA, 201 bp, Homo sapiens
tttttcagaaacccccattttgctaccagttttgataaatataaaaaagcttaattatttctgtcatgctttactcagtaaatttaatggtaatgctcagragggatttttggtcattaaaagttagtataatataggaaacattggtgctgtgaggcaaaagctttaacatcatactgaaaatacagatcgttagaatac

SEQ ID NO: 156771 - DNA, 201 bp, Homo sapiens
gcactagtcttgcattgtttatgattcaaatttatgcctcatcaaaatgatttactatgtgtcatgattctgtggttatgtttgtgaatggacaaaaccaygaatgttagatctagaaattgccagggttccttttcattgatgttttctaaagatgtcaagtttccttgcatacccatactttcctcacagttcccccac

SEQ ID NO: 156772 - DNA, 201 bp, Homo sapiens
agtcttgcattgtttatgattcaaatttatgcctcatcaaaatgatttactatgtgtcatgattctgtggttatgtttgtgaatggacaaaaccatgaatrttagatctagaaattgccagggttccttttcattgatgttttctaaagatgtcaagtttccttgcatacccatactttcctcacagttcccccacccctg

SEQ ID NO: 156773 - DNA, 201 bp, Homo sapiens
tcaaacattttgttttacatccaagtaggatatttccttttctaccaaacttaagcatctcttttaaaattatatttatctttatcagaaaacttagcagyctaattgttatttcagacccttgcactgctgaaccagtttaaatctaaactcactcaagcaattgctgaaacgcctgaaaatgacattcctgaaacagaa

SEQ ID NO: 156774 - DNA, 201 bp, Homo sapiens
ttttactatgtgacatttttaatttaagaaaaatgtattaggcatttttaaagtagctaggatgagtcatttatactaccattgttttcctattaagtagyacttaatcctctgtcccacttaatcttcctatgccaaatgtttacagcacctaaatagaattatggaagtttaaagttgaaagaaccatattaactgtct

SEQ ID NO: 156775 - DNA, 201 bp, Homo sapiens
agtgagccaagatcgcgccattgcactccagcctgggcctcacagcgagactctgtctcaaaaaaataaaaataaaaaataaaaataaaatttttaaatarcatatttattgctttttactaaatttatctagtttcttattgatagacatttaacaggttttcatttttccatttgtatgagtaatgctgcagtgcacat

SEQ ID NO: 156776 - DNA, 201 bp, Homo sapiens
ctatttaaattatattatatcatattctctttttctgttttcaagatactacatacttattgaggacacagtagtcgacctatatccatggttttgctttscatagttttgattgcccacagtccagaaatattaaatggaaaattccagaaatatataattcataagttttaaattgcatgctgttctgagtagtgtgat

SEQ ID NO: 156777 - DNA, 201 bp, Homo sapiens
gagccaaacaagaattcacagtcatgttccccctacacacacacacttttaaaaaatatatacttaacacaatatttgtattcatctttcacttaacaatmgaatgcaatgtttcatgtatataatttttaataacaatagcatatttaggccaggcatggtggctcacacctgtaatcccaacactttgggaggccaagg

SEQ ID NO: 156778 - DNA, 201 bp, Homo sapiens
ggcaattttgttgtctcaccctaagaaaagaaaaagtaaatggaaatgaaaaagcaaatcagcatattcttctctggaacaattttttcccacttttaagyaaattgtagtaacctaggttaaaattgccttttgaattttcaatgtgtttttcttttaaacaagcgcattgaaagaaaatagaaagttaacatagcaggt

SEQ ID NO: 156779 - DNA, 201 bp, Homo sapiens
atttttaatgagtaaggtttaaaaacaagggatactttatctgttaacattgtttgaatagcttaattctataacctctactctaaaaacagataaaacakctaaatgctaacatactctgcagccctcagaatgcctatgatgacattctataggaacttataaattttccccaaaactcatctcattcagtagctatga

SEQ ID NO: 156780 - DNA, 201 bp, Homo sapiens
caataagaatgaataaacaatggactatttttaatgagtaaggtttaaaaacaagggatactttatctgttaacattgtttgaatagcttaattctataayctctactctaaaaacagataaaacagctaaatgctaacatactctgcagccctcagaatgcctatgatgacattctataggaacttataaattttcccca

SEQ ID NO: 156781 - DNA, 201 bp, Homo sapiens
actgcttattctaaaaatattctactattctttagaggaagaagcccctccagatggtgctgttgccgaatacagaagagaaaagcaaaagtatgaagctytgaggaagcaacagtcaaagaagggaacttcccgggaagatcaggtaacttcaaaaacccaaatccatacagaacttattgtctttttattgtttttaag

SEQ ID NO: 156782 - DNA, 201 bp, Homo sapiens
aataaataaataaattgtctgtaaaagatgcattaatcaagaacaggtcagtgatttcttaactgccaacatagatctaagaagaaaaggagttaatgtcwgtgaagataataacaacagcaggttcaagtaaaagctaaaagttgtgtttgttattaatttgatggcaccaatatcatgttctttgaatgagtaaatatt

SEQ ID NO: 156783 - DNA, 201 bp, Homo sapiens
cataaattagcatcagtcacattctaatttaggaagtagttacagagctggtggggcttacaggttttcttttgaaattaaatggtgaaaaagcaagcccragtgccaacctcctcttcagcaacaggagcataaacattgctatgaatccacagagctattttactgcttattctaaaaatattctactattctttagag

SEQ ID NO: 156784 - DNA, 201 bp, Homo sapiens
ttgatacaaattatgtatcattaataatatagttctaagcatggtggcatgcgcttgtaatctcagctccttgggaggctgaggcaaggtgttcacttgakcccaggagttcgagaccatctggggcaacatagcaagatctcatctcaaaaataataataataataataatgaagtataaaaatgtgaatgtgacttatt

SEQ ID NO: 156785 - DNA, 201 bp, Homo sapiens
attatgctgaaaatcataataactgttttgttttgcttttcacaatgaagtgaccaaagcatgttgaaagataaatggatgaagcattttgattatgcttktatttctattaaaggttaaatattattgccaagtaactagccatgctaagtattatgatattaaagctgaagtagtttgtaagctgatagccctttcttt

SEQ ID NO: 156786 - DNA, 201 bp, Homo sapiens
tttctctggcattatcatgtaagagtttataaacataattgctcaatgatttggaattatgtattaatactatcaaggagcaaggtgaacaaaaccagaaytctagtcaaaggttttggaggtggctggctactcagaaacatttatttattcagcacacatttattgagggcattcttcttggcaagcattgctggctag

SEQ ID NO: 156787 - DNA, 201 bp, Homo sapiens
ttttgtaatattgtgcattagtcatgtggaaagcattgatccatcaagttatgcagatcttccaaatgttgatacatcttgttctgtaatatccaaaaaakcacatttgttaatgtcatcccttattttcaaaaacatctttcagtgtttcggtaattccaaggtagtggttttgagttttctaaaattccaacttttgct

SEQ ID NO: 156788 - DNA, 201 bp, Homo sapiens
aggcagctggattcctatatctgcctctttattcactctgttgtatgtactatgttgtcttggtcaagctgtagaaggcaaatctggctttacatagatayataatgtgagaaaggaggactatttaatagcacatatatttgtggttattctttttttaatacttaaccaaaactcaacaagtagtaatttcttataagt

SEQ ID NO: 156789 - DNA, 201 bp, Homo sapiens
ataattttcagtgggacaaaagggacatcatactggacttaataatacctgggtgatgaagtaatatatacaagaaacccctctgacatgtatttacctakgtaagaaaccttcgtgtgtacccccgaacctaaaataaagttaaaaaagggtgactgatatggtttggctatgtccccacccaaatctcctcttgaattg

SEQ ID NO: 156790 - DNA, 201 bp, Homo sapiens
aaactggttcctggtgccaaaaaaggttgggggccactgctttacactgctaaaaattcctgagaactccaaagagcttttgtttatatggaatatatctrttaataatatgttataaacaacatactttaatttaaaaaaattatgcctgcaaaacaaaaaatttagtgatatgagtggcattgttttacatttttttgt

SEQ ID NO: 156791 - DNA, 201 bp, Homo sapiens
caaggtttggcttaaagaagttttaaagctttcctttggagttagcatagtgcagaagcaacaactaccagctgtctgtatccaaaacagtgaaatcttartaatacagatgtaaaaaagagattattgacttttagacccagtcagacctcattataagataccatgaaagaacatagcttcatctcattgcttatacta

SEQ ID NO: 156792 - DNA, 201 bp, Homo sapiens
ggcaattttttatccaagatgtatctcaaatctgttttttccttttaatttattgttgctactacccttgttcagccttcattatctctagactggactgrtgtggtagtctatagaccagtttcccatctcccctctcttcttttccttccactaccagagcagccttcctgaagcttaaaatgttatttttactgtctc

SEQ ID NO: 156793 - DNA, 201 bp, Homo sapiens
aaattagaatttccaagcgaggggcctgggaagctgtacttttaatgaattccagaggaattcataccaaggaaatgtaggaaacactgctttagcagatmtgaatgatttgctgctctatatgtatgccttattgtttccattttttgtgcctttcttgatgttctttttcccacctgaaatgtcccatcacacctctgg

SEQ ID NO: 156794 - DNA, 201 bp, Homo sapiens
tgaaatgtcccatcacacctctggatatccaagtcatatttgttttcaacacctgaaatgccatcttttctaaatgtcttttccagcttttaaaaatcttytttttcttacccaacctttgcctttcttgtaatactgtacatttgccttttaaacacatcttttttgctttattacagaagaagcatatgactgtgtttg

SEQ ID NO: 156795 - DNA, 201 bp, Homo sapiens
cccacttactgttgtgagtaaggatatagttttaattttgatttattatacaatactgaaaaatgtctttgaaagccaagtgccttaaaatatactatacrttataactggtattttaatctcagataactaaagaatgtaaaatttctttaatatgatcataaccattatgtagaatcttatgcccttatgcccaatcta

SEQ ID NO: 156796 - DNA, 201 bp, Homo sapiens
aataatttgcagtttcagtggttgcatgaaattaaatatttctaaagggcttaaaaataattgtttcattcttcatttgtttatcaagtttcttttttcastgactgcacagtattaatctttattccagaacctttctgcccgatcacaagttaataattggtaaagtctgaattgaggctttactttatgtgaaaggag

SEQ ID NO: 156797 - DNA, 201 bp, Homo sapiens
agacatcctcaaataatttcggtaagcaaaatttgtcaaaactgatgaagaaaatgagtgagcctgaaaacattcttaaatatcttttcaagtctgatttmccaaataccatatacctatcctaagctcagtagtatcataaaataaatttcagcaaatggtgaaaagtttactgtctggtgatgaaagtttgttggattt

SEQ ID NO: 156798 - DNA, 201 bp, Homo sapiens
ttaaaaatgtattcttttagcaattttgaagtacattaactgtggtaagcatgcattacaaagcttattctttttttttgtttttgagacgcagtctcgcyctgttgcccaggctggagtgtagtggcacaacctcagctcactgcaacctctgcctcatgggttcaagcgtttctcctgcctcagactcctaagtagctg

SEQ ID NO: 156799 - DNA, 201 bp, Homo sapiens
ttgatgcaatcctacttgtctatttttacttttgttgactgtgttttgggagtcctatccaagaaatcattgctgagtccagtgtcatcaggctattccckcctcttttttttttctagtagctttacagtttcaggccttatccgtaagtcttttatccatttggagttgagttttgcttatagtttgagataaaggtcc

SEQ ID NO: 156800 - DNA, 201 bp, Homo sapiens
agagctttaactttatttagactttttagatatgattttttttttaggaaccttgggaaatggagaaattattacctcagggaaattgttattttactttrcaaataaaaatatctagaggtatttttagagacaaacaacatttatcatgtgttaatgggagcttagtgtttgtgtatttttcaaagtgaaatgaattag

SEQ ID NO: 156801 - DNA, 201 bp, Homo sapiens
tttttttctagtagctttacagtttcaggccttatccgtaagtcttttatccatttggagttgagttttgcttatagtttgagataaaggtccaatttcaytcttctgcaggtgaatatccagttttcccaacatttattgaagagacttttctttatatattgtgtgttcttgacacctttgttgaaaatcaattgactg

SEQ ID NO: 156802 - DNA, 201 bp, Homo sapiens
gaatgaaaaagaaacttgctgcatatttaagattctgggttttttctatatcttgaatcaaccaactttcataataattgataagtttgttattgatatcktatttactgccagtatattcttttaatagagcagaatagagaatatgttgctttgctatcagatttctccacattttgcccacatcattcccatcttttc

SEQ ID NO: 156803 - DNA, 201 bp, Homo sapiens
ataatgatttaccttcctgtataataaactgtaaatacaactcattttgctttatttgtgtgttatttcaagtgtacagataaacatattaatagattaawttttttaaaactagagtaaatcaatttgaaggattcaaggctggattaatattgaatttctgcatttttggaaaagagtaatatgagtaggaaggtttgt

SEQ ID NO: 156804 - DNA, 201 bp, Homo sapiens
ttgcttgggatactttgttgttgttgttgttgttgttgttgttgttgttgttgttgttacagagtctctctctgtctcccaggttggagtgcagtggtgcsatctcagctcactgcaacctccacctcccgggttcaagcaattctcttgcctcagcctcctgagtagctggaattacaggcacgcaccgccacacctggc

SEQ ID NO: 156805 - DNA, 201 bp, Homo sapiens
taaacaagatatctttcaataatataatttcttaaatagtaaagatttttaaaggtctgtagcaaatatgaagatgtacataccctcacaattacatgaaraatttaatcttttggtaaagtaagagatgatcatctttaagagtccataaagtactttcttcttttttagacaatctatctcaaactttcttccaagtca

SEQ ID NO: 156806 - DNA, 201 bp, Homo sapiens
ggactgagcagaaggagttggcagaaaagagggttgattgttgttggcctttgtgtgtttttatcctttttcattaaaaaaaaaaaaaaaaaaaaaaaaawataaatatatatatatatatatatatatatatatatatatacttattaaggacattttagaaaacagaggcaggtaaaaatggaaaaaaaactttttttc

SEQ ID NO: 156807 - DNA, 201 bp, Homo sapiens
ttagaattttttccatctccctggtacactgagcaaaagcacaaagaattgacaaagttgcagaaggtataccatcttactttcttctcttttacctggtrtgtatccccaggacatctaggatacccacatataaatgcaactcgcaaaatccccctccaaaaacatatgttaataatctttcaaatacctgccattttg

SEQ ID NO: 156808 - DNA, 201 bp, Homo sapiens
actgagcagaaggagttggcagaaaagagggttgattgttgttggcctttgtgtgtttttatcctttttcattaaaaaaaaaaaaaaaaaaaaaaaaaaawaaatatatatatatatatatatatatatatatatatatacttattaaggacattttagaaaacagaggcaggtaaaaatggaaaaaaaactttttttcta

SEQ ID NO: 156809 - DNA, 201 bp, Homo sapiens
tgagcagaaggagttggcagaaaagagggttgattgttgttggcctttgtgtgtttttatcctttttcattaaaaaaaaaaaaaaaaaaaaaaaaaaatawatatatatatatatatatatatatatatatatatatacttattaaggacattttagaaaacagaggcaggtaaaaatggaaaaaaaactttttttctatc

SEQ ID NO: 156810 - DNA, 201 bp, Homo sapiens
ttaaaggaaccattagcaggtcttcagggcgttcatatctgctttcaattgcagtcttctaaggagaaagtcagagctgtacactatgaacctccagaatktttttggtatttgttttatctaacatctaacaaaaataccttccatgttcaaggcactatgcagaatcagatagcatatatagggcccttatgtaatgcc

SEQ ID NO: 156811 - DNA, 201 bp, Homo sapiens
agtggaaatataaagcaaaaatagaaaggattcaaagcataccactatagaaaaccatcaaatcacaaaggaagacagcaagggaggaagacaaaaaaaawtatttaccaaacatccagaaaaaaactaagaaaatggcaataggccgggcacagtggctcatgcttgtaatcccagcactttgggaggccgaggcaggcg

SEQ ID NO: 156812 - DNA, 201 bp, Homo sapiens
aactttctaatattgtggaaaagatgagactcacattaaacaactcgaaaacaaccttagaagataataaatcaataatttctcacattttcccacaaacmttttagaactcagtaatctatttcataatccgactaacttcctcttcaaagttatgatctacaggatcctagcaactcatacatagttaattttattttt

SEQ ID NO: 156813 - DNA, 201 bp, Homo sapiens
aaggaaagcacagccatggtagtttcacagctgaattatagtaaacatttaaagaactgatatcaatccttctcaaactcttccagaaaaccaaagaggagggaatactttcaaaccctttttatgagtccagcattgctgtgataccaaagccagacagtgatgttaccagaaaagcaaattacaagtcaatattcgtga

SEQ ID NO: 156814 - DNA, 201 bp, Homo sapiens
aaagcaagttgggatctagattattttgtctttttaatgctaggttcggatgtttgcagaagacaatggtcacttgactttaaggagacaaagtgagaggkttccttttgttagccaaactagctttatttctaaattgtgtcagtgaactataataattttcagtgggacaaaagggacatcatactggacttaataata

SEQ ID NO: 156815 - DNA, 201 bp, Homo sapiens
aaattttctcccattctgtaggttgcgtattcactctgatagtagtttcttttgctgtgcagaagctctttagtttaattagatctcatttgtctattttrgcttttgttgccattgcttttggtgttttagtcatgaagtcattacccacgcctatgtcctgaatggtattgcctaggttttcttctagggtttttatgg

SEQ ID NO: 156816 - DNA, 201 bp, Homo sapiens
gtcgtatgaccaaattttggctaaagaggtgaaacagaaatgtgtcagacattcaggccgtcttttttaaaggaaggaagaaagaagctagccctctttcrtacctgcctcttcctgtcagcctggcacacagatttgatgacttgagctaaggacggtagaatagagaggagcatgcgtccttgaagacttcgtggaacc

SEQ ID NO: 156817 - DNA, 201 bp, Homo sapiens
ttcaaatgttttgggttcagccaccacacaaaaaatgttttgccaagtcctcttccctttatttttgaatccatatgcatttttgaaggaaatatgacccrtgtgtttctgattcatttacacttaactcatcaagatggtgttttgtaagagcagtttgatgcccaataagtttttttaacctttttataagccatttaa

SEQ ID NO: 156818 - DNA, 201 bp, Homo sapiens
gcagttgagttcttcagaagtaaattgactggatttctgtgtccaaaatctgaatatttgggagagagaatcttattggcgtggcccaggtcaggtgtccrctcaattatgccattgatagaggaaatggaaagccacgaagtatgcagatgtggcaaggatgggtagctcctccaacatctatccttccttccctcttac

SEQ ID NO: 156819 - DNA, 201 bp, Homo sapiens
tggactccatgctactatggccagcgcaaataatcttttatcttattaaaaataatttaggcatatcaggaagtaaatataatatacccttcctcaaaaamaaacaaaaccctagaagaaaacactcatatacttatcacttggattaaacaatgattgatagtttgctgtatttgcattaaaatacttcaacacagaaat

SEQ ID NO: 156820 - DNA, 201 bp, Homo sapiens
tgctagtcagtaaaaaatgcacaagaaatatatgacactatcccagttctaagtaactttctaatattgtggaaaagatgagactcacattaaacaactcraaaacaaccttagaagataataaatcaataatttctcacattttcccacaaacattttagaactcagtaatctatttcataatccgactaacttcctctt

SEQ ID NO: 156821 - DNA, 201 bp, Homo sapiens
ttgtggattaatcctaatccttggttcacaatgcatttcgtcactaagaaatacatttttagaaaaattttaagtgacaaataataattgtgtatacttayggggtacaatgtgaggttttaatatatgtatatattgtggtatgattaaatcaagctaattaacatatccatcacctcatatccttgttttatggtgaga

SEQ ID NO: 156822 - DNA, 201 bp, Homo sapiens
acaccaccacatctgactttttttcttttctttttgtagtgatagagtctcactacattacccctgctggtcttgaggtcttgaactcttgggctcaaaasatcctcccactttggcctcccagagtgctgggacatgaaccaatgcaccaggccaaacatgtattttcaaaagttgggtcttctgtcttctatgtaagca

SEQ ID NO: 156823 - DNA, 201 bp, Homo sapiens
cagtggtaatattacaattttaaagggtgcattttgtgggggatgcagcaaagattgtaagaagtgttgaagaaaaaggctacctctcaatgactggagaraaaaaggcttaatttattacttaagtaaagaggagctgtgcttttaggcacagtgtctccaagcaaagcaggctgcaaatcttacatagtgttttggggt

SEQ ID NO: 156824 - DNA, 201 bp, Homo sapiens
attaagggtcactgtagcattgaagtgatgagatcaaatttctcatcactttaaatattgtttaaaatattgttctggctctagtttgggcagggacttcyaggcaagcaaatcacagagccccaaggccaaaaagatgtgatacacttgatttgggcaggcatctgtaccaaaagagtccaagcctatcagttagacaag

SEQ ID NO: 156825 - DNA, 201 bp, Homo sapiens
atgcattatttttctctacgattttttcatcttttgttcttgcaagtttgatttgcatgagtaggtatagattcctttgggtttactatgtgtgatgttgkctatgcttcttgaatctgtaggtttgtgtctttcaccaaatttgggaggtttttagacattatttcttaaattattttatcctcaacacattccttcttc

SEQ ID NO: 156826 - DNA, 201 bp, Homo sapiens
tcaacagtgatggtttctgtagaaatgtgtgctgttctgagaagtaactattttataagaaggaggatacaaaaggttttggctggggagcgtatttaacrttctggaaaataaatcttttgactctagctgtattaattttggtaactgtagagatgattaattttagacattgataaattatttttatttttttttcag

SEQ ID NO: 156827 - DNA, 201 bp, Homo sapiens
ttgaacctgcaatggtatgacacctctacagagcctagagaggggttggccagagccaagtcatgtgtgtccagctaaagaaagactgacatgaaatgttkctagcaaagatgtgacattatttcacatatattataatataactctttgtaagcataggggatggattagaaggagactgaagcagaaagacgaattaga

SEQ ID NO: 156828 - DNA, 201 bp, Homo sapiens
gaaggtgaggttatctaatcctgatggtactggagaatagcccagaaatcaaagaccaggataacattgcagttattcaacagccttattgtttggctttrtactcattctcaggtaggatttcttagtattttagtgaagttttaaaaattatgttttgttccttttattgttttagcctgtgctgtatagtatgaaaat

SEQ ID NO: 156829 - DNA, 201 bp, Homo sapiens
acccagcagtttggtaactaatacatggcagtggtaaaaaggtataggatttgggataaggaaagaagcactaaaggttcaatcacatatgtaattatctrgacttcagattccactaaaccttggctttaatatctttgataaacattttcagagtggagtgcctacttgggtttatagcctttgaatttccatgattca

SEQ ID NO: 156830 - DNA, 201 bp, Homo sapiens
aaatgtggctgataaggaataaaatcagtatctctcaaccttgtttgtacatttgaatcatcccattcctgaacaagctgttcataaattttggtattcarccataagaaatttttaaaaacactccatgtaagtctaatatccagccaaggttgatgaaaactggggtagtttgcagcttgttttggaaagtcctatttt

SEQ ID NO: 156831 - DNA, 201 bp, Homo sapiens
  misc_feature (1)...(201): n = A,T,C or G
aacaaactccagacatgtttttcaaatttaagggttttctgagaagttggtttccatgtggtgtaagcaccagtaaacaacaaacccatcttagtgttctntatgcttatgtttcattatgtcgatgatagtagagtatagaatttctactgtaagttcccatgcaagaaatcactgaaccatctctctccctatttagga

SEQ ID NO: 156832 - DNA, 201 bp, Homo sapiens
ccccgtctctgctaaaaatacaaaaaattagccaggcgtggtggcaaatctctgtagtcccagctacttgggaggccgaggcaggagaatcgcttgaaccygggaggtgaaggttgcagtgagccgagatcgcgccactgcattccagcctgggcaacagagtgagactccatctcaaaaaaaaaaattgaacttttctct

SEQ ID NO: 156833 - DNA, 201 bp, Homo sapiens
ctaagtattatgatattaaagctgaagtagtttgtaagctgatagccctttctttcctctgggtttaggtttgttattaatcaaaatgttggacttgcttwgtgcagtggtgtatgaaacaaacagttgaaaaagacagctcctttaactcacggctctctgctttttttcaaatttgtaaggaaatctgtttcttcttgt

SEQ ID NO: 156834 - DNA, 201 bp, Homo sapiens
cttctttcccagagctaggaaggctcctcaaaggaagaaggggaatacaacttcaagagataaatccagaacccatttgttgtcaatctttgttgtgtttggggggggggctgttgttgttgttgttgttgtttatattagctttagatactgacatatcacataccagatttatttccttttgaactacaatagtattgt

SEQ ID NO: 156835 - DNA, 201 bp, Homo sapiens
catagattttatatatacactatatataatattgtaacacactataaagtcaatgttatttgagaatctgagcctatgtgaaattttttattaatcaaacstaaatttttgtctttgccttcaagtgaacaagctctacaattttcatatgtaaatgatcagtgtgtaattaattccaaaaaaattcactactttttttgg

SEQ ID NO: 156836 - DNA, 201 bp, Homo sapiens
ttctttcccagagctaggaaggctcctcaaaggaagaaggggaatacaacttcaagagataaatccagaacccatttgttgtcaatctttgttgtgtttggggggggggctgttgttgttgttgttgttgtttatattagctttagatactgacatatcacataccagatttatttccttttgaactacaatagtattgtg

SEQ ID NO: 156837 - DNA, 201 bp, Homo sapiens
tatatatgatatatataatatataccatagagatcagttatatatagtgtatatactgtatatatactatatatactatataccatatgtataatatatarctatatattatatataaccatagattttatatatacactatatataatattgtaacacactataaagtcaatgttatttgagaatctgagcctatgtgaa

SEQ ID NO: 156838 - DNA, 201 bp, Homo sapiens
aataaacagcctgctaaaatacaatatgataagcttgatggtaaggataatatagggagcttgtgcatcagtattgagagtccagtaaagtctttatggaraacatggcatggaagctatgatctgaaggatgactatgagttatgagcagaagggaagtggaagagagaggagtgttttaggtcatgaggaatagatgtt

SEQ ID NO: 156839 - DNA, 201 bp, Homo sapiens
attgcttctttcatttttatggattggccttcagagggaaagactttttcatatatatatatatatatatacatacacacacacacacacacacacacacygttggttgggtagggtgcttcagctttgcttctgggtgggtgcagtagtatagacttcttagcctgtaatcagctagtcagcttcagtgttgtctgttga

SEQ ID NO: 156840 - DNA, 201 bp, Homo sapiens
agagagccatttaaggagtgtgtggattacaagtcaggtattaaaatgggtggatagtgggttaaatgaagacactaagaacagttgagaaatcggttgcaaaaaaaaaaaatggaaaagccaaaggtgtgaaaaaattgagggaaaatattgtcactttactcacaaatgcttggcatttatactttaccccagatcctt

SEQ ID NO: 156841 - DNA, 201 bp, Homo sapiens
tgtaatagaaaccatactatatttagcatttctggcaagcttccatttttcttctgtttggacattaatagcaataatttttggatattctggactaaacygtttcttgggccacttgaaataaaaataccacttttaaagtgcctattcagttcattgagaaccagttaatccgtatccaaggaatcaccttcaaaacaa

SEQ ID NO: 156842 - DNA, 201 bp, Homo sapiens
attacatgaagaatttaatcttttggtaaagtaagagatgatcatctttaagagtccataaagtactttcttcttttttagacaatctatctcaaactttyttccaagtcataattagcgaatcttgttgagctttactttgtgaaccctacattataggcatatttaatttttatgagcaataaaaaataaattctaacc

SEQ ID NO: 156843 - DNA, 201 bp, Homo sapiens
atctctcaatgtagactaggtggtttgttttaattgcctttaccagttatggttaaaattttggaatagtattaattgtaatagaaaccatactatatttrgcatttctggcaagcttccatttttcttctgtttggacattaatagcaataatttttggatattctggactaaactgtttcttgggccacttgaaataaa

SEQ ID NO: 156844 - DNA, 201 bp, Homo sapiens
ttactcattagaaactctgatcttgcgtgtgctctatttatatttgttacttctgtgcaataatcacagtcctgaagggatcatctgggccaatccctccttttttttttttttttcctagatggaatctcgccctgttgctgaggcttgagtgcagtggcacgatctccactcactgcaacttcctcctcccaggttcaa

SEQ ID NO: 156845 - DNA, 201 bp, Homo sapiens
tactcattagaaactctgatcttgcgtgtgctctatttatatttgttacttctgtgcaataatcacagtcctgaagggatcatctgggccaatccctccttttttttttttttttcctagatggaatctcgccctgttgctgaggcttgagtgcagtggcacgatctccactcactgcaacttcctcctcccaggttcaaa

SEQ ID NO: 156846 - DNA, 201 bp, Homo sapiens
agatttttatttgaatttcattacgtttattgatcagtctgaggagaattgacatctttactatgttgagttttccaatccataaacatgattatgtctcyccatttatttaggtctcctttgatttgtttcatcagcattttatagttgttagcagtaccctacacatgtgtttttggatttaaaaccatttccttgttt

SEQ ID NO: 156847 - DNA, 201 bp, Homo sapiens
gactttttccagcataaggctcatcaaagatattaaagcttctaagttctgtaaggttaagagtgtggacaaaaatttggtctgtgaagaatttgaagcamatgtaataagtctgttcaacgaatgtttattgcctttactatctaatggtacattaggtgctgaaagcgtacagagacattcagagtaaatgggacaaaa

SEQ ID NO: 156848 - DNA, 201 bp, Homo sapiens
cattcaacaggaatataactaggaaaatcataaagaaaatcttaaaataaaaagccagcatcactgaaatacttaatgggaaataggaaaaagaaagaaartggtgaaattctaaaatttgaaaacacaagtaataaagacctctttcatgtcctttttccgtcacaggtaacatatatctgggttttatggatcttgctt

SEQ ID NO: 156849 - DNA, 201 bp, Homo sapiens
agttcttccaggtgattatgatgtatccacaggacaaacaaggaacttatgagtgctgatgaggtcatcagtgaaatgactggtcatagcatccagtttgratagatagccaattagggctagaatggggctgatggaccatgaactacagttaaggaattggctttcattattatgggaatatgtgcaagcttagtagaa

SEQ ID NO: 156850 - DNA, 201 bp, Homo sapiens
cacctctctttcttggtttagacacactgcttggatgcgtcttcattctgtctgtaaatagctaattcctacttatcacttatctttcacatcacagttcrcatgcttcctctgtgaggccatctcttatttgtcctgcagtactcttttcttcactgaatttcaaaatgcttcaatcatttatttgtcatggaagttgct

SEQ ID NO: 156851 - DNA, 201 bp, Homo sapiens
  misc_feature (1)...(201): n = A,T,C or G
accagcagaacaaactccagacatgtttttcaaatttaagggttttctgagaagttggtttccatgtggtgtaagcaccagtaaacaacaaacccatcttngtgttctgtatgcttatgtttcattatgtcgatgatagtagagtatagaatttctactgtaagttcccatgcaagaaatcactgaaccatctctctccct

SEQ ID NO: 156852 - DNA, 201 bp, Homo sapiens
gctatagtgtgctatgattacttgaatagccactgcattccagcctgggcaacatagcaaaaccccatctcaacaaaaaagcagagccgccaccctcaagmgcacctgcagcctagtaagggagacagcagttacactgtagtatgaggaagactaaaccagagagatattcaagattctctgcaagaccagaagagggtc

SEQ ID NO: 156853 - DNA, 201 bp, Homo sapiens
tggttttgctttttaaatacaagtctcctttcaaccctacccctaaaaaacttaaatcagattcattaaagtttgtaatccacagtcccatagaatgacawtcttagtaataactaggagctattttgttaggtttcttagaattctaacttaacagagaaattagaagctgtcaacacagtacactaacacagtacagag

SEQ ID NO: 156854 - DNA, 201 bp, Homo sapiens
acatttgatagttataaaatatagaaataaaagcatccaagtaatattttaaaacatactctagaaatcctaggaaaatatcaaaaatttaaaacaaaacwgccatttatattttaaacagtagccaaagcaaaccgagagtcataggagaaaaactggttttgatatttagtgttagtaatgtcatcattctttatatag

SEQ ID NO: 156855 - DNA, 201 bp, Homo sapiens
atcccttcattttcagtctatacgtgtctttacaggtgaagtgagttcgttataggcagcatattgctgggtcatttttaaatctattcagtctggctttrccttttaagcagcgaatttaatgtgtttacatttgagattattattgataggttaggatttattcctgtcatttgttcattgttttatagttgttttgta

SEQ ID NO: 156856 - DNA, 201 bp, Homo sapiens
ttttctgtttattcctagttcaatctccagaggttgtatgtgtctaagaatttattcatattttctgtaggtttccaatttgctagcatatagttcacagyagcctctaaagatcctttctatttctgctgtattaattataatgtctccttctttctcattttatttattttgggcatttttctgtttttctttgttagt

SEQ ID NO: 156857 - DNA, 201 bp, Homo sapiens
tcagattttattcagacactaaatgttaagtaagtgtgtgtaatatatttcaagaaatgataggcttgaaaatataaagaacacgtgatttaaaaacaaakaagatatagaaatgaaaaatataatagttaacattaaaaacttgatatattttatagcaatttgccacagctaaaatgaacattagtgacttgaaagata

SEQ ID NO: 156858 - DNA, 201 bp, Homo sapiens
tctactggctgtaggttaaatgttattggctgagcagttgctgaaaccccagggcaggtgtaagaatgcatattacagatttgttctggaaaggctcttamatctttccacctgtgtcctgctgagtgttaagcacaatgttagataggcaagaaagctgagaaactgtgcattcccctgttgctaaagatattttgaaac

SEQ ID NO: 156859 - DNA, 201 bp, Homo sapiens
gctgcttaccaggcctttttgatagggaatctcatcttccctatggaagacagttgttctgttagtctactggctgtaggttaaatgttattggctgagcrgttgctgaaaccccagggcaggtgtaagaatgcatattacagatttgttctggaaaggctcttaaatctttccacctgtgtcctgctgagtgttaagcac

SEQ ID NO: 156860 - DNA, 201 bp, Homo sapiens
acttgcacatagtagatagccagaaaattgatttgactttgttgtatcagacatttgtcacttgttttttcccagatgtccttctaatgcagagaaagcaagatctagttgctacgtacaaggagtgtcattagtgaaatttctattgatagtgctagttttattagctacaaaagaagttgctgttaaaaaagaaagagg

SEQ ID NO: 156861 - DNA, 201 bp, Homo sapiens
aatttttgagttttgatattttttcagtggacaataatgcctcattaatgaactgtaggctttttccttgaggctagtactaagaaaaagtaggggagggracacagataaaggaacattcattgtaaatagaatttaaatataaagcaaaaggatatcatcactttggagaacatagaattataagctcagtgtaatgta

SEQ ID NO: 156862 - DNA, 201 bp, Homo sapiens
ttattaattcagtagcttattaatgaaaagattaagaaaccctggtgagcaaagtggcccgattatatatgcattctttttactaggtgtaagttgcctgkggccaaaaaaccacgtaataatgactatcattttttgagcacttattatttgtcatttacttttctaagcagtctatgtattacagctcattttgtcctc

SEQ ID NO: 156863 - DNA, 201 bp, Homo sapiens
gcgtgacccagggaagccaaaagattggatacccctggtataggctattgttcctaggctataatcctgtatagcatattactgtactgaacattgcaggygattgtaatacacaggtaagtatttgtgtatttaaacatatctaaacatagaaaaggtacagtaaaaatacggtctaaaagagatggagaccatcctggc

SEQ ID NO: 156864 - DNA, 201 bp, Homo sapiens
caggaggctaaggcaggggaattgcttgaaccaaggaagtggaggttgcagtgaactgagatcacaccactgcactcgggtctgggagacagtgagactcygtctcaaaaaaaaaaaaaaaaaaaaaaaaaaaaaaagtccaggcgcagtggctcatgcctgtaatcccagcactttgggaggctgaggcgggcggatcat

SEQ ID NO: 156865 - DNA, 201 bp, Homo sapiens
acagtgtaaaagtattcctatttctccacatcctttccaatatctgttttttcctgaccttttaacgattgccattctaactgctgtgagatggtatctcwtggcagttttgatttgcatttctctgatgaccagtgatgatgaacattttttcacgtgtctgttggctgcacaaatgtcttcttttgagaagtgtctgtt

SEQ ID NO: 156866 - DNA, 201 bp, Homo sapiens
aattttctcccattctgtaggttgcgtattcactctgatagtagtttcttttgctgtgcagaagctctttagtttaattagatctcatttgtctattttgrcttttgttgccattgcttttggtgttttagtcatgaagtcattacccacgcctatgtcctgaatggtattgcctaggttttcttctagggtttttatggt

SEQ ID NO: 156867 - DNA, 201 bp, Homo sapiens
agcttttctgctctggtttttcccatctttgtggttttatctacctttgatctttgatgttggtgacctacagatgggattttggtgtggatgtccttttyattgacgttgatgctattcctttctgtttgttagttttccttctaagagtcaggtccctcagctgcaggtctgttggagtttgctggaggtccactccag

SEQ ID NO: 156868 - DNA, 201 bp, Homo sapiens
tttagcatagtgctaatgagtggtagttattatttttatataccgaaagaaactaaccaaagttattttgatgtactctttccctctctgtctttcttagacacacacacacacacacacacacacacacacgaaaattcacaaaataaagaaatgtgtagttagcaacatgggcttgaagtcatctaatatgagttaaag

SEQ ID NO: 156869 - DNA, 201 bp, Homo sapiens
ttagcatagtgctaatgagtggtagttattatttttatataccgaaagaaactaaccaaagttattttgatgtactctttccctctctgtctttcttagacacacacacacacacacacacacacacacacgaaaattcacaaaataaagaaatgtgtagttagcaacatgggcttgaagtcatctaatatgagttaaagc

SEQ ID NO: 156870 - DNA, 201 bp, Homo sapiens
tagcatagtgctaatgagtggtagttattatttttatataccgaaagaaactaaccaaagttattttgatgtactctttccctctctgtctttcttagacacacacacacacacacacacacacacacacgaaaattcacaaaataaagaaatgtgtagttagcaacatgggcttgaagtcatctaatatgagttaaagca

SEQ ID NO: 156871 - DNA, 201 bp, Homo sapiens
tcctttcaaattctagtgaacgcatatatttgctaatgaatcatacttattccacttataaaaaatgactctaaagaatgtttccatctgttctataatgsctttcttaaattcctatgttgaaatacatttttggaatgttattcccagcaaactattctagatttttgggttacaaaataattgtgttagttttacctt

SEQ ID NO: 156872 - DNA, 201 bp, Homo sapiens
cagttgtaccctcagtacaaatgtcaaaacagtgaaagagcaaatcacatttaatattattaaaatactatttacctcatagacgctcttgaaatgatttsagagtttcccagggtccacaaaccatacttatgaactgcttatatagtggcttaagagcatagagcacagactctaggaccaaacaaatctggctctgcc

SEQ ID NO: 156873 - DNA, 201 bp, Homo sapiens
caaaataccatagtccggctggcttataaataactgaattttttttttctcacagttctggaggctgggaagtccaagattcaggcactggcagatttaawgtctagtgagtgctcacttccttgttcataggcagctgtcttttgctgcatcctcaaatggcagagggggcttgagacctctcttgggcctcttttataa

SEQ ID NO: 156874 - DNA, 201 bp, Homo sapiens
cctagaaactggagaaaatgaaaaaagcatctgggaaaaaataaaaactagactgacagttatgcaagatacttgacatttccattttaaatcctcaatckcatgttcaaaagctgcacagttaaaaaataattgcaggattttaaaaaactacttcaatcaagtaataacgaatgatcttataaaaattgtaaatatgtt

SEQ ID NO: 156875 - DNA, 201 bp, Homo sapiens
ttcagggctatagtgtgctatgattacttgaatagccactgcattccagcctgggcaacatagcaaaaccccatctcaacaaaaaagcagagccgccaccytcaagagcacctgcagcctagtaagggagacagcagttacactgtagtatgaggaagactaaaccagagagatattcaagattctctgcaagaccagaag

SEQ ID NO: 156876 - DNA, 201 bp, Homo sapiens
ccctatgggttaaaacttctggatatggatttttttcagttttattattgcactttggctaatgttaaaagtcaattttagccatcagtcagacagtttgyatctgctagagattgaagttctgagaaccaaggtttggcttaaagaagttttaaagctttcctttggagttagcatagtgcagaagcaacaactaccagc

SEQ ID NO: 156877 - DNA, 201 bp, Homo sapiens
gtttagtgtgttttgaaaaaaagaataaaattttctaagatttgaaagagatcttacaaagattaggggtcatctacattagacttctaatcttttcattraaaatacatatgatctttcatatggaaggagtaagattgtaagtttaaaggctatatacaagtgtgtttagatttctccttttctttctaaattacaata

SEQ ID NO: 156878 - DNA, 201 bp, Homo sapiens
atcccttaacaatggggatacagtctgcgaaatgtgttgctaggtgattttatcgttgtgtaaacaccatgtgagtgttcttacacaaagcttactcaaarctagatagtatagtttactatacacctaggctatatggtgtggcccaagcttgtccaatctgtggccagtgggccacatgtggcccaggacagctctgaa

SEQ ID NO: 156879 - DNA, 201 bp, Homo sapiens
ttttaaatgtgaatattagagaagatcagtgcttgacttcatcacccttatattaaaataatatttctcgtgacataagaaaaaataatagatataactaraagttttcctaaggcacattcctagaaactggagaaaatgaaaaaagcatctgggaaaaaataaaaactagactgacagttatgcaagatacttgacatt

SEQ ID NO: 156880 - DNA, 201 bp, Homo sapiens
agcatagtgctaatgagtggtagttattatttttatataccgaaagaaactaaccaaagttattttgatgtactctttccctctctgtctttcttagacacacacacacacacacacacacacacacacgaaaattcacaaaataaagaaatgtgtagttagcaacatgggcttgaagtcatctaatatgagttaaagcaa

SEQ ID NO: 156881 - DNA, 201 bp, Homo sapiens
gatagttagctgttcttattgcattgatccctttaccattatataatgcccttctttgtcttttttgatctttgttagtttaaagtctgttttatcagagrctgggattgcaatctctgctttttttttttttttttttgctttccatttgctttgtaaatattcctccatccctttattttgagcctatgtgtgtctttg

SEQ ID NO: 156882 - DNA, 201 bp, Homo sapiens
gcattgatccctttaccattatataatgcccttctttgtcttttttgatctttgttagtttaaagtctgttttatcagagactgggattgcaatctctgctttttttttttttttttttgctttccatttgctttgtaaatattcctccatccctttattttgagcctatgtgtgtctttgcacatgagatgggtctcctg

SEQ ID NO: 156883 - DNA, 201 bp, Homo sapiens
tttcatcagtatgattatactcctaggtgaaaaaaaagatggagacaagggaaaaaatgaagttaacgaataaaacaaatgttatttcagatcacggccckgtgtgtgttactaaggaaagatataaggatttataacatatatttgttttccatttatttttatgaaggaattaaagaaattatcagaaaatactaaaag

SEQ ID NO: 156884 - DNA, 201 bp, Homo sapiens
ctaagtcagaaaagaaagtgatgaagggggtgaggtccctctagctcagagaatagcatatgctaaagcatggaaataaggagagatcataccttatttakgaaatacaaacggaaatttaaagtttcaaggagtctgtcttgtgaagagcaaggaagaagagtattgaaggtaaggggaactgcatatacaaaatggtcc

SEQ ID NO: 156885 - DNA, 201 bp, Homo sapiens
ctttgctatcttacgcttcttcctttcattctctaaatttgggtattccctaagattgcctctagttctctattgtcatcactctctagttgttacttcartccaaatgactaccacattaagaacttcagtcatttcttctcttcctagtactaatttacatatctaattgcctagtggacttttcaactggagccttcc

SEQ ID NO: 156886 - DNA, 201 bp, Homo sapiens
ctgggattacaggaatgagccaccgtgcacagccccctattatatttaagtgaattattgcctaaagcacttagcaggctgcctggcatatagaaagcacwatatatatatatatagtgcttctacctataacatatatatatatgcatatagaaagcactaaatatatagccacaagccacaaaccacaagccacaagca

SEQ ID NO: 156887 - DNA, 201 bp, Homo sapiens
aagcactatatatatatatatagtgcttctacctataacatatatatatatgcatatagaaagcactaaatatatagccacaagccacaaaccacaagccmcaagcactatatatatagtgctttctatatgcatatatatatatatatgtatgtatgttagttataggtagaagataggagtagcaaagcattttccatc

SEQ ID NO: 156888 - DNA, 201 bp, Homo sapiens
tataacatatatatatatgcatatagaaagcactaaatatatagccacaagccacaaaccacaagccacaagcactatatatatagtgctttctatatgcatatatatatatatatgtatgtatgttagttataggtagaagataggagtagcaaagcattttccatcattaggccaacaaatactgtttattctttaatc

SEQ ID NO: 156889 - DNA, 201 bp, Homo sapiens
ataacatatatatatatgcatatagaaagcactaaatatatagccacaagccacaaaccacaagccacaagcactatatatatagtgctttctatatgcatatatatatatatatgtatgtatgttagttataggtagaagataggagtagcaaagcattttccatcattaggccaacaaatactgtttattctttaatca

SEQ ID NO: 156890 - DNA, 201 bp, Homo sapiens
atgttatcccaaataaatttgaatactttcaacagagcagtttatctcaacaaataatactgtgatcctctttggtcttctttgctatcttacgcttcttyctttcattctctaaatttgggtattccctaagattgcctctagttctctattgtcatcactctctagttgttacttcagtccaaatgactaccacattaa

SEQ ID NO: 156891 - DNA, 201 bp, Homo sapiens
gggtttcagaggcagagaatgtgcagattcatgtagagcaaatctttaagccactataataggtgagagtttttacaaaagtcaagaaacacagatgatgwcccctgctgtggctttgtgtctattgtatccaaaaagcttttataccatattatgtgttttatgtgtctagatggctagagaggaaagaaaactcagttt

SEQ ID NO: 156892 - DNA, 201 bp, Homo sapiens
tctgaaggatgactttgagttatgaggagaagggaagtggaagagagaggagtgctttaggaggaatagatgtgactcaaacagaatgactcattttatgycttattcttgaatagatgctcatgatagatctctcatgcataactggttcaggacccaggtggaatgggcttgcatgggaaggaggcacttcaatgtctg

SEQ ID NO: 156893 - DNA, 201 bp, Homo sapiens
tctttttctaaacattaacagaattttttatagtgctggaaaatcaaaatggaagtatagttatagtcatttaaatacctacatgattttttaaaatgtasagggtctggtgcctagtgacatcagcaaaataacagaagaggaagtctcaagctccacttccatgccctgcctcccactgctgcccctccgccaccccgc

SEQ ID NO: 156894 - DNA, 201 bp, Homo sapiens
atcaatagttgtattgaaataacacaaaaagtctaatacttcgcctaaaaaactacgtttgtcaaactgggccaaaaaagaaattcaatgcaacttatgtkagaaacatcttcaaaatattggacaatcaagccgcgcacggtggctcatacctgtaatcctagcactttgggaggctgaggtgggtggattgcctcagct

SEQ ID NO: 156895 - DNA, 201 bp, Homo sapiens
ctcccaaagtgctaggattacaggtatgagccacggcgcctggcctatgaagaatattattttttgtttaaaatatttttaccagtttgtcattgccttamaatttgtttatggtgactttgttttgttaacatggagttttaaatatttgcattgctaaatttgctgatcttttccttcacgatttctacctggtgtcat

SEQ ID NO: 156896 - DNA, 201 bp, Homo sapiens
cctggcctcgagcgatccgcccacgtcagcctcccaaagtgctaggattacaggtatgagccacggcgcctggcctatgaagaatattattttttgtttaraatatttttaccagtttgtcattgccttacaatttgtttatggtgactttgttttgttaacatggagttttaaatatttgcattgctaaatttgctgatc

SEQ ID NO: 156897 - DNA, 201 bp, Homo sapiens
acttattcactatcacgagaatagcatggtaaagaccagcccccatgattcaattacctcccactgggtccctcccataacacatgggaattctgggagayacaattcaagttgagatttgggtagggacacagccagaccatatcatatagattaaatagatagatatggagataagcatgtggagagatatatttatgc

SEQ ID NO: 156898 - DNA, 201 bp, Homo sapiens
gagtttagggcctttttttgaaggattttatttcatcgggatatacccagttggttacctgatgcatttttgtgtcagattggaattgttttcctagggatttttttttttttctcaaacatgaagaagaaacaaccaaactggttaagcgcttgtactttagagccagactacataggtttatatccccaggcttataat

SEQ ID NO: 156899 - DNA, 201 bp, Homo sapiens
gggtgaaaggcagttcttacatggtggtggcaagagagaatgaggaagaagaaaaagtggaaacccctgataaacccatcagatcttgtgagacttattcrctatcacgagaatagcatggtaaagaccagcccccatgattcaattacctcccactgggtccctcccataacacatgggaattctgggagatacaattca

SEQ ID NO: 156900 - DNA, 201 bp, Homo sapiens
atataagaaaactattacaactcattaataagacaaaaaaaattaatagacaaaagatttgaaaagaagatacataaatggccaacaagcacataaaaaaygtaatatcacttgtcatcagaaaagtaacactagaaaccacaaaatactatttcacgctctctaaaatattcagttaaatgacaataccgatatatttgg

SEQ ID NO: 156901 - DNA, 201 bp, Homo sapiens
tgcttgctctttatcccaggacaatgcaaatctaactactgtaggataagaagaagagaggtattcaaagatgtaattcagtagaaaaatatgaaagtaatttttttttttttttttttgagacagagtctcgctctgtcgcccaggctggagtgcagtggcgcgatctcggctcactgcaagctccgcctcccgggttca

SEQ ID NO: 156902 - DNA, 201 bp, Homo sapiens
gcttgctctttatcccaggacaatgcaaatctaactactgtaggataagaagaagagaggtattcaaagatgtaattcagtagaaaaatatgaaagtaatttttttttttttttttttgagacagagtctcgctctgtcgcccaggctggagtgcagtggcgcgatctcggctcactgcaagctccgcctcccgggttcac

SEQ ID NO: 156903 - DNA, 201 bp, Homo sapiens
cgctgtagtgagccatgattgtaccattgcactccagcctgggtgacagagtgagactctatctcttaaaaaaaaaaatgatagggtttacttttaagctrtagtgtattagtccattttcacactgctgataaaaacatacccaaaactggggaaaaaaaggaggtttaatttgacttatagttccacctggctgaggag

SEQ ID NO: 156904 - DNA, 201 bp, Homo sapiens
taaatgagcatacattttttattttattttattttatttatttatttatttagagacagtctcactctgttacccatgctggagtgcagtggcacaatcayaggtcactacagcctaaaactcctaggctcaagggatcctcctgcctcaggcttcatagtagctgggactacagatgcacaccaccacatctgacttttt

SEQ ID NO: 156905 - DNA, 201 bp, Homo sapiens
gttggtacttttcaggatgtacttgaagaagtcaagtggagatttctctacctaccagcattccggtcctatttaatgctttaacccaactcatgcagcckatttctggggtcttaggtttttaaacagacatttttgagtttgatatattctttgcttaactaaggtcattcattctccatttcttctacaatcattaat

SEQ ID NO: 156906 - DNA, 201 bp, Homo sapiens
ctaagtgcttcacatgcacttgactctatggggtaggtattatttattatctttatttacacatgaaagaactgaggcacagtgaagttaaataatttatytgctttttggtcctcatagtaccgtatccagtgcctggttcataatgggctttcaaaaaatatttgttgatgttatgtgcatcaagatctgtcccatgga

SEQ ID NO: 156907 - DNA, 201 bp, Homo sapiens
  misc_feature (1)...(201): n = A,T,C or G
acttgaattgatccctgttgaggtcagtatgctggccaactgccttcaaaagccacatttcccactgagataagaataggaatatagacagaatagcccgngtgacacagagggagaagtctgctgcacaaaggagctgggcatgagttgagcgaacagcctttcctggggtatcccataattacatagttggcttagagc

SEQ ID NO: 156908 - DNA, 201 bp, Homo sapiens
tatttgaatctatgctcttgaaagatattggtttgtggttttctcttcttctaatccctttgtttggtttttgtattaggataatgctgacttcatagagyaagttagaaagtgttccctttgcttctgtcttctagaagagattgcaaagaactgggataatttctttcttaaatgttcagtaaaattcatcagtgaacc

SEQ ID NO: 156909 - DNA, 201 bp, Homo sapiens
ttcaaaagccacatttcccactgagataagaataggaatatagacagaatagcccgagtgacacagagggagaagtctgctgcacaaaggagctgggcatkagttgagcgaacagcctttcctggggtatcccataattacatagttggcttagagcagaacccagggctattcccacctgtagcagattcttcaagggct

SEQ ID NO: 156910 - DNA, 201 bp, Homo sapiens
agcactgtcacacctattatctcaatttttgctgggtttaaacagtttatctataccttgccatccaacttaatggcacaatttaacattattatactttraagcattattttgaattgaaagaaggttaacataacagtggtgtgagtttaagagaattttaataagggcttaaaaatcacttttgtcccctttcttaag

SEQ ID NO: 156911 - DNA, 201 bp, Homo sapiens
agactattttttttttttttttttgagacggggttttactcttgttgcccaggctgtagtgcaatggtgcaatcttggctcactgcaacccccacctcccrggttcaagagactctcttgcctcaggctcctgagtagctggaattataggcatgcgccaccgcatgtggctaattttgtattttttagtagagacggggt

SEQ ID NO: 156912 - DNA, 201 bp, Homo sapiens
atcaggttgtcttttgttattttaatcatattattttaattggattgtttgttgtcttatttccttgaaagaggaatatattctagattatatattctagmtacaagtcctttatcagataaatgttttgaaaacagttttcaaagttcatgtgccattcatgtgcctattgaaagtatacagttcaatggtttttagttt

SEQ ID NO: 156913 - DNA, 201 bp, Homo sapiens
tggctcatgcctgtaatcccagctgctcagcaggctgaggtgggaggattgcttgagcctaggagctctaggctgcagtgagctatgatcctgtatgggcracagagcaagaccctgtctctaaaaaaataaaaataaattttaataaatttccaaatcattagtacttttggttatttataccagcgagtctctgaagtt

SEQ ID NO: 156914 - DNA, 201 bp, Homo sapiens
aatttttgctgggtttaaacagtttatctataccttgccatccaacttaatggcacaatttaacattattatactttgaagcattattttgaattgaaagraggttaacataacagtggtgtgagtttaagagaattttaataagggcttaaaaatcacttttgtcccctttcttaagtagtattttcatgtattgcttaa

SEQ ID NO: 156915 - DNA, 201 bp, Homo sapiens
ttctagttgcatcaaatccttgtcaattaatggtattatcggtgtttaatttcagccattctaaggaatgtataatggtatttcaatgtggttttaatatrcatttccctaatgatcaatgatgttgaacatcttttcatgtgcttaaatcaggttgtcttttgttattttaatcatattattttaattggattgtttgtt

SEQ ID NO: 156916 - DNA, 201 bp, Homo sapiens
tttaataaatttccaaatcattagtacttttggttatttataccagcgagtctctgaagttaactttatggttaaaaaataaaacaacacaggaaagctcyaaatgtactgaaaaactacaacgtggtaaaagggataattatatttaaaggaaagtcactgctcagtttgagttataatgggtatagctgccagccagat

SEQ ID NO: 156917 - DNA, 201 bp, Homo sapiens
tgggcaacatagcaacacaccatctctacaaaacagatttaaaattagctaggtgtggtggtgtgcatctataatcctagctactcaggaagctgaggtcrgaggatcacttgagcccaggagtttgaggttacagtgagctatgatcatgccactgcactctaggctgggcaacagagaccctgtctctaaaaaacaata

SEQ ID NO: 156918 - DNA, 201 bp, Homo sapiens
ggataaatacctaacagtgtgatttctgggtcatatggtagttcataagaaactgccaacctgtcttccaaagtggctatatcactttgcactccctctgrcaatgtagaagagttctagttgcatcaaatccttgtcaattaatggtattatcggtgtttaatttcagccattctaaggaatgtataatggtatttcaat

SEQ ID NO: 156919 - DNA, 201 bp, Homo sapiens
acaacccaattcaaaccattgaaattatcatctctaggatgtgcctctcttcatctcacagaagatttataagcaaagagtgaaattaactaggactagarcatttctgcttcctttcattctcttttgtcccaacgtgttggactgaagcagacagtaaaagaaaggaagagaaatagaaatccaagatctatatactgg

SEQ ID NO: 156920 - DNA, 201 bp, Homo sapiens
ggcttcttcacttagtgtaatgttgctttcaaatgataggggtctgtcttcctgttgtacacacttagtttttaaatatcttgaaaatcaaaatggctttwtatttgcatatatgtttataagaaacatgatattatcaaggtattaattgggaattttaagagaaagagccaaggaggcctacaaagtagtgatgaccaa

SEQ ID NO: 156921 - DNA, 201 bp, Homo sapiens
atcatatgtatatatcacattttatttatccattcatccattgatagacatttgaattgtttacacctgttggctcttgtgaatagtgctgctatgaacatttgtgtgtatttgagtacttgttttcaactcttttggatgtatatacaaatatatatattttggatatatatataaacaatcgattcttttggatatata

SEQ ID NO: 156922 - DNA, 201 bp, Homo sapiens
gtatatatcacattttatttatccattcatccattgatagacatttgaattgtttacacctgttggctcttgtgaatagtgctgctatgaacatttgtgtrtatttgagtacttgttttcaactcttttggatgtatatacaaatatatatattttggatatatatataaacaatcgattcttttggatatatatagaaac

SEQ ID NO: 156923 - DNA, 201 bp, Homo sapiens
gtcaagaaatctggtgaaatctttagggaagctcagtgaaatctttagggaactgtgctttttccatctttctgctttgtaaccctcagcatgtgattgawtcatgactgcctaactcgatgattggctcaaccacaacctgctttgttgctatttgctttttgtttgtttttacaacaacaaaaataatagcttttgttt

SEQ ID NO: 156924 - DNA, 201 bp, Homo sapiens
gtatctgattgtggttttgatttgcatttctctaatgactaataatattgagcatcttttgttatgcatgttggtcattattgctacttcttaatgtaaaktctcttattcaggcaaattctaattcctgcttcccactcaatttgtcgcttatactttgcctcactgagatgccatgcttctgccattcccaagttaact

SEQ ID NO: 156925 - DNA, 201 bp, Homo sapiens
caagttaacttccttttcttctatgaagtatcctaatgattttaggttccagataatatatagtataggaggtcatatacagtctctcctgtatatttatragttctaaattatatactccaattgtatatttttgaattacatataaatattaataatttatttcaatcatttagcaaactgagctaattggactcaagt

SEQ ID NO: 156926 - DNA, 201 bp, Homo sapiens
cataatacttgtcctccttgatgataaccttgaaaagtttagattagccctattttcctttaataccctgtctggatcgatcatctaagaaattatcttaygattttctgtatctgtattttctaatgacacttgcattgtacttttacagcactgtcacacctattatctcaattattgctgggtttaaacagtttatag

SEQ ID NO: 156927 - DNA, 201 bp, Homo sapiens
ctctaatttctgttttgaagaccagtccagagtttgagagaatcctagaaataaaaacaagaagtcaacagtgatggtttctgtagaaatgtgtgctgttytgagaagtaactattttataagaaggaggatacaaaaggttttggctggggagcgtatttaacattctggaaaataaatcttttgactctagctgtatta

SEQ ID NO: 156928 - DNA, 201 bp, Homo sapiens
ttttctaatgacacttgcattgtacttttacagcactgtcacacctattatctcaattattgctgggtttaaacagtttatagcttgccatctagcttaayggcacaatttaacattattatactttgaagcactattttgaattgaaagaaggttaacatatctataacactggtctaagtttaagagaattttaatgag

SEQ ID NO: 156929 - DNA, 201 bp, Homo sapiens
actgaattattatttttattattatttttgttgttattattatttccaagtcagtttggattgcttaatcgaaaatgattgtgttccacaagaggaaaaarcgtttcacattagtatataaacatcaggctgggtgcagtagctcatgcctgtaattccagcactttgggaagccgaggggggcggatcacttgaggtcgg

SEQ ID NO: 156930 - DNA, 201 bp, Homo sapiens
aaataaataaataaataaattgtctgtaaaagatgcattaatcaagaacaggtcagtgatttcttaactgccaacatagatctaagaagaaaaggagttartgtcagtgaagataataacaacagcaggttcaagtaaaagctaaaagttgtgtttgttattaatttgatggcaccaatatcatgttctttgaatgagtaa

SEQ ID NO: 156931 - DNA, 201 bp, Homo sapiens
cattgagttcagatctcttgagaattatttattaaggaaaaatatcttcctttgtgaaaagcatttatgatataacgtgactacatttataaatgagttcwgtatcaggctggatggaaattctgttaactaagagactaatatatttgttaagtagccctgtcatggtgagaaaaccaccttagaaaggcttgttcctgc

SEQ ID NO: 156932 - DNA, 201 bp, Homo sapiens
gtggtgatgaaagggaaaaaaacaaattcagtacaattggaaagctggtgttgttttaaaactcttgaaaaacactgaatgaaaggaatcacactaaaacyatatgttgcaatgttgttggttaatacttattaataacagtgggttaggaaatatgcattggcacattcttttgagccactccagcacagcctgtctgat

SEQ ID NO: 156933 - DNA, 201 bp, Homo sapiens
agtgattttaaacctgtggttcagtttttggttttatgttattccttagacttctaagatacatatgattaacttatctaagagctacctttgtaaaaacwttccataggatatgtttattattttcaaaaatgatggaatatattcctaatatagtgcactatgagggagcatctaagttctttttggatctttcaattc

SEQ ID NO: 156934 - DNA, 201 bp, Homo sapiens
aattggaatatcaaccaatatttggaaggttatatcttctaaggcaaggaaaaaatgtaaaatggtattgctgaattttaggaaaaccttaattattttaraagtgagatagatgattttataatcaacttaaataaggacatgtgagaagaacaattacaatagtgcagtgtatagtaaatatatgtatatcaactcata

SEQ ID NO: 156935 - DNA, 201 bp, Homo sapiens
ctgtcagttttgaaaccaggactctccttccaagttctaccaaaatcatattaggtaaccacaaaaagataacttgtttcttagttcaaattttttttttkaccagaaaatctcttgaacaaaatggctgattgttaatagattgcatattcatgatgttcctcaagctagataacaaagagacaactaacagactaaagc

SEQ ID NO: 156936 - DNA, 201 bp, Homo sapiens
ctggaaaatccttataaccacttttagaatgtgtatagcttcataatctagcaaaaaaaaaaatagtttcccttttccctccatcaatgtaagaaattccsttatatgaaagaaatgtatttgtatggagagggaaagagaaagaaaaacaagcttgacttgtgcaagagtctgtgatatcctttgaaagcttatcactta

SEQ ID NO: 156937 - DNA, 201 bp, Homo sapiens
caaaccagtagagaaaaagatggaattaggaaaaaaaaaaatcaacccaaaggggataagaaaggaaagaaaaataaacatggactggcaggatatttttwaaaaaaaagaaaaaagatggcatgagagataggagaaataaaatgcagctgtatcaatagttgtattgaaataacacaaaaagtctaatacttcgcctaa

SEQ ID NO: 156938 - DNA, 201 bp, Homo sapiens
ttaatagacaacccttaaaataatatttgttgcccaactatctaccctgacctaatatcaaatttgtgtaattcaattgtttctcaactcttgttagtccrcctatagttggtagtcagtggaattttttcttagctctgttgagtatatctttaaaaaaaatcaaattggtattaaatgattaacaaccacaatcaaatt

SEQ ID NO: 156939 - DNA, 201 bp, Homo sapiens
aatcctagctactcaggaagctgaggtcggaggatcacttgagcccaggagtttgaggttacagtgagctatgatcatgccactgcactctaggctgggcracagagaccctgtctctaaaaaacaataaataatacttaaaacaaaataaaaaccaacggaaaccaattaaaggttttaaatgaacaaatttgctctgcc

SEQ ID NO: 156940 - DNA, 201 bp, Homo sapiens
tatcgctctgttgcccaggctgcagtgcagtggcgctatctcggttcactgcaagctccgcctcctgggttcacgccattcttctgcctcagcctcccacktagctgggactacaggcgcccgccaccacgcctggctaatttttttttttttttaatagagacagggtttcaccatattagccaggatggtctcgatctc

SEQ ID NO: 156941 - DNA, 201 bp, Homo sapiens
ttcaccatattagccaggatggtctcgatctcctgacctcatgatccacctgcctcagcctcccaaagtgctgggattacaggcgtgagccactgcaccckgccactttctacacttttttaaagaagtgtaccatcatggaggtacattccatggaggtacaattactcgaaaataatcattcttttgctccactgagag

SEQ ID NO: 156942 - DNA, 201 bp, Homo sapiens
ataaagaatggcaaggtcttttaacccacatggggaaggctgtccgaggacaatatatgtactttctcccacctcaaaggctaatcatacactagacagakgtcaatcttcaagcagtttaactggtccatttgagaaagataagtgttggattttcatatcataaagttagtagtagtagaaataccttgtttcagctgt

SEQ ID NO: 156943 - DNA, 201 bp, Homo sapiens
aattacttatatattatatattatttatgtgaactatatatatttacacttataaattatatattaatatataaacatatatatcacttgtatacacacgygcacacgcgcgcacacacacacacacacacaccggaatcataattgctggattacatgctaattctgtgtttaactttttacactattttatattcccac

SEQ ID NO: 156944 - DNA, 201 bp, Homo sapiens
ttaaatatgttttctatgcttttgcccatctcttcttcttctgaaattcccagaattctagtatttgggcacctcatggtgtcccatatgttgtataggctttttttttttttttttttggtgggggggtggtctgatttggtattcaaaagccatgttttcaaattcagaaattctttcttctgctaaatctagtctatt

SEQ ID NO: 156945 - DNA, 201 bp, Homo sapiens
tgaggcaggagaattgcctgaacctgggaggtggaggttgcagtgagcggagatcgcaccaatgcactccagcctgggcgacagagcgagactccgtctcaaataaataaataaataaataaataaataaataaataaataaataaataaattgtctgtaaaagatgcattaatcaagaacaggtcagtgatttcttaact

SEQ ID NO: 156946 - DNA, 201 bp, Homo sapiens
ccttacttttatatgtgcacagctggtctaccaattgcttctttcatttttatggattggccttcagagggaaagactttttcatatatatatatatatayatacatacacacacacacacacacacacacactgttggttgggtagggtgcttcagctttgcttctgggtgggtgcagtagtatagacttcttagcctgt

SEQ ID NO: 156947 - DNA, 201 bp, Homo sapiens
gaggcaggagaattgcctgaacctgggaggtggaggttgcagtgagcggagatcgcaccaatgcactccagcctgggcgacagagcgagactccgtctcaaataaataaataaataaataaataaataaataaataaataaataaataaattgtctgtaaaagatgcattaatcaagaacaggtcagtgatttcttaactg

SEQ ID NO: 156948 - DNA, 201 bp, Homo sapiens
atatgtgcacagctggtctaccaattgcttctttcatttttatggattggccttcagagggaaagactttttcatatatatatatatatatatacatacayacacacacacacacacacacactgttggttgggtagggtgcttcagctttgcttctgggtgggtgcagtagtatagacttcttagcctgtaatcagctag

SEQ ID NO: 156949 - DNA, 201 bp, Homo sapiens
aggcaggagaattgcctgaacctgggaggtggaggttgcagtgagcggagatcgcaccaatgcactccagcctgggcgacagagcgagactccgtctcaaataaataaataaataaataaataaataaataaataaataaataaataaattgtctgtaaaagatgcattaatcaagaacaggtcagtgatttcttaactgc

SEQ ID NO: 156950 - DNA, 201 bp, Homo sapiens
gtgaggtctcttttccaggcttgcagacagccatcttcttgctgtatcctcacatggtctttcttctgtgctcatgtgctcctcatgtctcatcattttctttttttttttttttttgagatggagtctcgctctgtcccccaggctggagtgcagtggcacaatctcccctcactgcaagcttcgcctcccggattcacg

SEQ ID NO: 156951 - DNA, 201 bp, Homo sapiens
ggcaggagaattgcctgaacctgggaggtggaggttgcagtgagcggagatcgcaccaatgcactccagcctgggcgacagagcgagactccgtctcaaataaataaataaataaataaataaataaataaataaataaataaataaattgtctgtaaaagatgcattaatcaagaacaggtcagtgatttcttaactgcc

SEQ ID NO: 156952 - DNA, 201 bp, Homo sapiens
atcattttctttttttttttttttttgagatggagtctcgctctgtcccccaggctggagtgcagtggcacaatctcccctcactgcaagcttcgcctccyggattcacgccattctcctgcctcagcctcccatgtagctgggactacaggcgccagccaccatgcccggataatttttttgtatttttagtagggacgg

SEQ ID NO: 156953 - DNA, 201 bp, Homo sapiens
cacctcccactagggtccctcccataaaacacatggggattgtgggaattactcgagatgagatttgggtggggacacagagccaaaccatattagtggttttgtttgtttgtttgtttgtttgttttcctaaatgagcaactcttgtattcaggtgcagtatatcttaaacttaagctacaaacatgtcatctcagttgt

SEQ ID NO: 156954 - DNA, 201 bp, Homo sapiens
aacaccaaaaacaataacaaaaaaaccactttcctgtcaaacacaacctctctgaaaatagtaaacttccatattttaacatactatatatataatatatmctatatacaatatataatagattacatattatatatgatatatataatatataccatagagatcagttatatatagtgtatatactgtatatatactata

SEQ ID NO: 156955 - DNA, 201 bp, Homo sapiens
acctcccactagggtccctcccataaaacacatggggattgtgggaattactcgagatgagatttgggtggggacacagagccaaaccatattagtggttttgtttgtttgtttgtttgtttgttttcctaaatgagcaactcttgtattcaggtgcagtatatcttaaacttaagctacaaacatgtcatctcagttgtt

SEQ ID NO: 156956 - DNA, 201 bp, Homo sapiens
caggcgtggtggcaaatctctgtagtcccagctacttgggaggccgaggcaggagaatcgcttgaacccgggaggtgaaggttgcagtgagccgagatcgygccactgcattccagcctgggcaacagagtgagactccatctcaaaaaaaaaaattgaacttttctctttctaaattcattcaactgttctgaagtctgc

SEQ ID NO: 156957 - DNA, 201 bp, Homo sapiens
cctcccactagggtccctcccataaaacacatggggattgtgggaattactcgagatgagatttgggtggggacacagagccaaaccatattagtggttttgtttgtttgtttgtttgtttgttttcctaaatgagcaactcttgtattcaggtgcagtatatcttaaacttaagctacaaacatgtcatctcagttgttc

SEQ ID NO: 156958 - DNA, 201 bp, Homo sapiens; identical to SEQ ID NO: 29284

SEQ ID NO: 156959 - DNA, 201 bp, Homo sapiens
agaggaaggaaggaaagaagagagggaaaaaagaaagcatctattaacatatattcatttgatctgaataaacatttctccaaaaaacatatttaaatagycaattagctgcagagaatagggaatgcttatacactgttggtgggaatgtaaattagttttgccactatagaaagcagtctgaagattctcaaagaatgt

SEQ ID NO: 156960 - DNA, 201 bp, Homo sapiens; identical to SEQ ID NO: 29274

SEQ ID NO: 156961 - DNA, 201 bp, Homo sapiens; identical to SEQ ID NO: 29275

SEQ ID NO: 156962 - DNA, 201 bp, Homo sapiens; identical to SEQ ID NO: 29276

SEQ ID NO: 156963 - DNA, 201 bp, Homo sapiens; identical to SEQ ID NO: 29288

SEQ ID NO: 156964 - DNA, 201 bp, Homo sapiens
cttaaattgtgtttttaaaaatgactaaattattctagaaaatatgatattaagaaacgagaaaaggctttgcagacgccgccgccgaggaaaaccgtgtrctattagccatggtcaaccccaccatgttcttcgacattgccgtcgacggtgagcccttgggccgcgtctcctttgaggtaaggggcctggaaaccaaga

SEQ ID NO: 156965 - DNA, 201 bp, Homo sapiens
gacagaaagtagactggtggttgccaggagctggggtgaaaggagaagtgggaagtgactgctaatgggtatggggtttcttttccgggtaataaaaataktctaaaattgatcatggtgatagtagtacagctctgtgaatatactaaaagccattgaattatacactttaaattggtgaactgtacggtatgtgaatta

SEQ ID NO: 156966 - DNA, 201 bp, Homo sapiens
cgggcatagcggtgtatgcctgtaatcccagctactcgggaggctgaggcaggagaatcgcttgaacctgggaggcggaggttgcagtaagctgagatggygccactgcacacttgcctgggtgacagagcaagactccatctcaaaaagaaaaaaaagaaatagccatatcacttgttaattaatgctgtgcttttctca

SEQ ID NO: 156967 - DNA, 201 bp, Homo sapiens
ttgcttgaactcaggaggcggaggttgcagtaagccaagaccatgccactgtaccccagcctgggccacagaccgagactctgtctcaaaaacaaacaaayaaacaaacaaacaaacaaacaagtaaataagggacaggcacgatggctcacgcctgtaatccaagcactttgggaggccgaggcgggcggatcgcctgag

SEQ ID NO: 156968 - DNA, 201 bp, Homo sapiens
ccgagttgggcagatcacgaagtcaggagtttaagaccctcctggctaacatggtgaaaccctgtatctactaaaaatacaaaaattagctgggtgtggtrgtgcatgcctgtaatcccagctactcaggaggctgaggcaggagaattgcttgaactcaggaggcggaggttgcagtaagccaagaccatgccactgtac

SEQ ID NO: 156969 - DNA, 201 bp, Homo sapiens; identical to SEQ ID NO: 29290

SEQ ID NO: 156970 - DNA, 201 bp, Homo sapiens; identical to SEQ ID NO: 29291

SEQ ID NO: 156971 - DNA, 201 bp, Homo sapiens
gctcattgttgctgttgtttttggtttttaaatttcatgctgcttcttgataaattcataagagatagaatagacttccggtagaattttctcaaatcagrccagcattttttctaacaaaagacagctttttctataactataggaagagcacttctgtaagatgaacctgatgctcctgtgttccgagtgcagttagca

SEQ ID NO: 156972 - DNA, 201 bp, Homo sapiens; identical to SEQ ID NO: 29292

SEQ ID NO: 156973 - DNA, 201 bp, Homo sapiens
tatctcaaagatggccactatggctccttccgcctctgctaccgagagcctgtcccaagggttcccatcgtggtgaaggtaagggggccactccagccccragtctagtcccttaccttgaggtgccttgtgcctcccctactgggaacagtggctgtgctggaccccagaggcaggtcctggcctgctgcttagaacaca

SEQ ID NO: 156974 - DNA, 201 bp, Homo sapiens
ctccccaggaggcagccggaagctggtgtattatctcaaagatggccactatggctccttccgcctctgctaccgagagcctgtcccaagggttcccatcrtggtgaaggtaagggggccactccagccccgagtctagtcccttaccttgaggtgccttgtgcctcccctactgggaacagtggctgtgctggaccccag

SEQ ID NO: 156975 - DNA, 201 bp, Homo sapiens
gcagcagttgtctcctaatgtgatgggttggtgtccgggccacactgctttgtaaatatcttgactgtttctcccggccagtgaacgtcttggtgtgtgcrcacatttggtcatgtatgtgacgtgtgtttgcatgcatgtgcgagtgtgtacgtgtgtgaagtgtttctgggtgtgtgtcttcgtgtgtgtatttgcctc

SEQ ID NO: 156976 - DNA, 201 bp, Homo sapiens
ctgtgggccgctgcaccagtccccctggggacaatgtagaacctcagaatcatcccactagaggacatggggctggtcctttattcaccaactcctgtccytctttggttgaaggctgtggtctgggggtgttaatttcctcacattccagctagtttccgagggtgctggagaaagcccacagaatgagaagcaaaggga

SEQ ID NO: 156977 - DNA, 201 bp, Homo sapiens
ctggattacttttattgatttgcatatgttgaaccagccttgcatccgagggatgaagcccacttgatcattaaaaatatggaacgcttcacgaatttgcrtgtcatccctgtgcaggggccatgataatcttctctgtatcgttccaattttagtgtatgtgctgccgaagcgagcacacaatctgtttttttaaacaac

SEQ ID NO: 156978 - DNA, 201 bp, Homo sapiens
ccctcccacgatctggcaacaaagcttcaatacctgaccctgtagggccaacaggatcttcctccagctctgcagcagttgtctcctaatgtgatgggttsgtgtccgggccacactgctttgtaaatatcttgactgtttctcccggccagtgaacgtcttggtgtgtgcacacatttggtcatgtatgtgacgtgtgtt

SEQ ID NO: 156979 - DNA, 201 bp, Homo sapiens
tttgaggaggtgagctggtacgggcgctgggggtgttcagggaggtccgcatgtgtgcccaggcatgggtgtgtgtggggagtctgtgttcatgcatgtayctctgtgtgtttaggtctctctggtgtatctctgtgctctgtgtgcacaggtgggtatgtgtgtatgtgcatgtcttggctttgatatcccccaaaagca

SEQ ID NO: 156980 - DNA, 201 bp, Homo sapiens
tccctgccgacactcttgctgctcagtccctcccacgatctggcaacaaagcttcaatacctgaccctgtagggccaacaggatcttcctccagctctgcrgcagttgtctcctaatgtgatgggttggtgtccgggccacactgctttgtaaatatcttgactgtttctcccggccagtgaacgtcttggtgtgtgcaca

SEQ ID NO: 156981 - DNA, 201 bp, Homo sapiens
tactcagggtgagtgccccttcgtaggtgcctcgttggcctgagtgtgcagctgtctgaaagcacacacttatgccagtgtaatcagttatgtttccgctstttgtttctgcatttggccccagtggcttcatgccttatgtgtgactgtgcctctctgtctctgttgcggttatccacagtctgtgtggctttgtggttt

SEQ ID NO: 156982 - DNA, 201 bp, Homo sapiens
cctcctcaggcaaaggggcgatcaccagaacacaaaggcgtgggttgttttccaaaatattgaagttcttctccctggtggcttaagagccattccttctycctggtggttaaagagctattcccccgagtccaccaggggcctccctgccgacactcttgctgctcagtccctcccacgatctggcaacaaagcttcaat

SEQ ID NO: 156983 - DNA, 201 bp, Homo sapiens
cttctatgtggagtctgtctgcatggccgctgtcaacatcattgccaagagggctgtgctggagcccggtgggtgggccaggatggcactgggtggggatrccactgtccaggtgtccccaggccctggaggagaggaagggcagagggttgggctctgtcccaggagctgggggtcagagtagtgactgagcactcccca

SEQ ID NO: 156984 - DNA, 201 bp, Homo sapiens
ccgagagcctgtcccaagggttcccatcgtggtgaaggtaagggggccactccagccccgagtctagtcccttaccttgaggtgccttgtgcctcccctaytgggaacagtggctgtgctggaccccagaggcaggtcctggcctgctgcttagaacacatgtggacacgtacatgatgtgtgctcacagatcagagcgtg

SEQ ID NO: 156985 - DNA, 201 bp, Homo sapiens
tcaacttctgtttcctctttggtaaacagggataattctaatgcctacctgcagggtgcctcggggatgaaaggactgatgcaggtaaggcgttggcacargcgctggcacatcaacacgtgctggatgagttaacctcttcctgctgtccctccaccccattccagttggcgagagtgatcagtgctgccctggcccagg

SEQ ID NO: 156986 - DNA, 201 bp, Homo sapiens
ctatgtggagtctgtctgcatggccgctgtcaacatcattgccaagagggctgtgctggagcccggtgggtgggccaggatggcactgggtggggatgccmctgtccaggtgtccccaggccctggaggagaggaagggcagagggttgggctctgtcccaggagctgggggtcagagtagtgactgagcactccccagga

SEQ ID NO: 156987 - DNA, 201 bp, Homo sapiens
tgtctgtgtgtctgtatgtgtatatgttttcctgtagaatgtagaattcttgttagcatcaccaatacagttacagttacagttgggagtttacattcccygggtccacaagacactcgccttcttacggtgcatcagattaaattgctgcacctttggacttctcagggagcctggtggccagcaaccccacacaagtga

SEQ ID NO: 156988 - DNA, 201 bp, Homo sapiens
ctagaggacatggggctggtcctttattcaccaactcctgtccttctttggttgaaggctgtggtctgggggtgttaatttcctcacattccagctagttkccgagggtgctggagaaagcccacagaatgagaagcaaagggaggcaggcgctggaggctggaaatcattttgcacgggcagatgagctcaggtaggctg

SEQ ID NO: 156989 - DNA, 201 bp, Homo sapiens
atgtgcggctgcccgagctggatgtaggcgattggctggtcttcccctccatgggtgcctacatgtcctccatgagctccagcttcaatggcttcctgccygccaccatctgctacaccatgggcccccagctcaggtgcctaggggttggggttgaagaggaagcaggaaacctcacactcatttgagcttggggtggga

SEQ ID NO: 156990 - DNA, 201 bp, Homo sapiens
cgggtctttcagtgccttccagataagggggtgggataggccagcctgctgtcttttctgaccccctttcctatgtcacacaggagttctgctcagagccrcccctcttcccctgcaccctctatgtcccatgtgcgatgcctttgacaggctcttcttggaggatgtgcggctgcccgagctggatgtaggcgattggct

SEQ ID NO: 156991 - DNA, 201 bp, Homo sapiens
gaggaagggcagagggttgggctctgtcccaggagctgggggtcagagtagtgactgagcactccccaggaggcagccggaagctggtgtattatctcaamgatggccactatggctccttccgcctctgctaccgagagcctgtcccaagggttcccatcgtggtgaaggtaagggggccactccagccccgagtctagt

SEQ ID NO: 156992 - DNA, 201 bp, Homo sapiens
agattggggtaacagaggccactcagagaagctagaggagctcaacagcccatccagtcaggtgcatctcatgagggcatcccagaacatcaaatttcccrcctgcaaaatggtcttggttatgcccaaacactcaggatataagaagcacggattatgggtacgatacttaggggtgtgagcaggctttgggaaatgtga

SEQ ID NO: 156993 - DNA, 201 bp, Homo sapiens
tccctcttttcctaatgaataccctttatttcttcctcctgcccgattgccctggccagaacttccaacactatgttgaataagagtggtgagagagggcrtccctgtcttgtgccagttttcaaagggagtgcttccagtttttgcccattcagtatgatattggctgtgggtttgtcataaatagctcttattattttg

SEQ ID NO: 156994 - DNA, 201 bp, Homo sapiens
tgggaaggacagttaggaacaggtaactaaaggtgagttaggtcagagcaggtgaccaggggtgattcaggtcaaagcaggtgactgggatgagtcaggaygcagagcaggtaaccaggggaacagatgtgaactgctgattaaaactggggggaaatgttgtttactgaaactacggggaagttaaactttaaaatggag

SEQ ID NO: 156995 - DNA, 201 bp, Homo sapiens
aaacagggacaatttgactccctcttttcctaatgaataccctttatttcttcctcctgcccgattgccctggccagaacttccaacactatgttgaatargagtggtgagagagggcgtccctgtcttgtgccagttttcaaagggagtgcttccagtttttgcccattcagtatgatattggctgtgggtttgtcataa

SEQ ID NO: 156996 - DNA, 201 bp, Homo sapiens
ttgaaggctgtggtctgggggtgttaatttcctcacattccagctagtttccgagggtgctggagaaagcccacagaatgagaagcaaagggaggcaggcrctggaggctggaaatcattttgcacgggcagatgagctcaggtaggctgaggggaggtggcacagggtgtccactgcagctgcagcaaggtgtctggggg

SEQ ID NO: 156997 - DNA, 201 bp, Homo sapiens
taggtgcctcgttggcctgagtgtgcagctgtctgaaagcacacacttatgccagtgtaatcagttatgtttccgctctttgtttctgcatttggccccartggcttcatgccttatgtgtgactgtgcctctctgtctctgttgcggttatccacagtctgtgtggctttgtggtttggaacatgtgtttcagtacatat

SEQ ID NO: 156998 - DNA, 201 bp, Homo sapiens
cgtaggtgcctcgttggcctgagtgtgcagctgtctgaaagcacacacttatgccagtgtaatcagttatgtttccgctctttgtttctgcatttggccccagtggcttcatgccttatgtgtgactgtgcctctctgtctctgttgcggttatccacagtctgtgtggctttgtggtttggaacatgtgtttcagtacat

SEQ ID NO: 156999 - DNA, 201 bp, Homo sapiens
ttctttgttgggtatttgatgggtatttagcatgccatgccttgatccacctgttctttttagatgtctgcacccccagcccccactgctctttcaggtcrtcttatctacttgctttcatcagggaagtctgaccgtcccgctacagtagaagacctgaagaaacttcggtatctggaatgtgttattaaggagaccctt

SEQ ID NO: 157000 - DNA, 201 bp, Homo sapiens
caggatgtacgtctttagtgtctgccgctgcaaaataaacacgagataactaacgtgcgtgaattgaatggttgcttctcacccatattttatagaaacarctatggggaagaatattggtgctcaaagtaatgatgattccgagtatgtccgtgcagtttataggtaaatggagtcctttcagttattttaacaattatt

SEQ ID NO: 157001 - DNA, 201 bp, Homo sapiens
  misc_feature (1)...(201): n = A,T,C or G
cctttttccttctgttcctttatttgcccgtagtgttagtgaagattgtgaagtgggtaagtatgctatacctaaagtagaagggagagggaaactttctnatgtctaccttgctccggtctcataatgtattgactacttcttgacagcaggttacagagttctaaaaggcactgaagccgtcatcattccctatgcatt

SEQ ID NO: 157002 - DNA, 201 bp, Homo sapiens
gccttaaaaaaaaaataggtggtttcttttttccctcactgtgctttgtagttttaaaatattacggtcaaaaggtatattagtatattcgcctgcatggkcttccatagcaaaataccacagactgggtggcttaaacagcagaaatttattttctcacagttctggaggctggaagttcaagaacaaggtgttggcagg

SEQ ID NO: 157003 - DNA, 201 bp, Homo sapiens
ccaccctacttgggaacccaagagccagtatattgccgtttgcttaaaaggactgtctttcatttatgaccaaaagcgagttagtgtgtgtcaggtcagcygaaggatgaaggaagggcccccattctctggatatgatcttaggtcttcaccctattttctttgtgctgttcaataattctctgtattggatcatcagca

SEQ ID NO: 157004 - DNA, 201 bp, Homo sapiens
agttatgacaagaataatcattatagtacttttcagattttataacctggagcagattattttaagttgattagtaggttctgttacagtttttcttttgwtcgtgcacttatagtcttcatttaattcctcatagaatcccagtcacctttatatatcatattattggaagagattcatcttcataatctccagtttttt

SEQ ID NO: 157005 - DNA, 201 bp, Homo sapiens; identical to SEQ ID NO: 29298

SEQ ID NO: 157006 - DNA, 201 bp, Homo sapiens; identical to SEQ ID NO: 29300

SEQ ID NO: 157007 - DNA, 201 bp, Homo sapiens
acgggtgaatctgaagcttttttggtgaatccatagtaaatgaaagacccactaagacataatctagggtagtgagtctcaagcttgaaggagctcaggayttatctggatcagctggagtacaaattctctgatcctccccagctatagatgtgcaaggtgggatcagggagggaaactcaagactcttcatctttaaca

SEQ ID NO: 157008 - DNA, 201 bp, Homo sapiens
aaaaatatagattttcccctatcccctacccctggaaagtaatatactgaagtctcatcatactgttttggggattccagtaattaaaatctctagtgaayaaagacctgtttcaaaacaacctgtgagctgactggactatttaaagtaattctccttgtagtcactttcagagtgaagacaatgacgaatactgtcttt

SEQ ID NO: 157009 - DNA, 201 bp, Homo sapiens
aggtgttgcgtttcattttgcggctaatgtccaaacgctggcctcagccatttcaccttgaagattgcagttggcttccaactggcctctaaactctaatstagcattttccagtccattgtgacaaagtctgccttccccagctactcccagctgttggacctgctgccttagaaccacagattgagacctccctgtccc

SEQ ID NO: 157010 - DNA, 201 bp, Homo sapiens
cctctaacagtaacatattacagaattagtatattcatcaaaatgagaaaacaaacctttgtccaatactggtcacaactttctcatcttgattgaatttmaaatttgatgtttttccccagaattttttcagcagatcattgagtacacagaggaataccgccacatgccgctgctgaagctctgggtcgggccagtgcc

SEQ ID NO: 157011 - DNA, 201 bp, Homo sapiens
ccctttataatgcagaaaatgtggaggtgggtacatgtgaatatgatcagtattgtactgtgtatctgacagtgtgagaatctcaccagaatcaatataaygtgtccttatatttcagccatttcagcacaaaaaacattccactaagtattttagactatataggtgcaatttaatgctttccaggtatagcccgaatcc

SEQ ID NO: 157012 - DNA, 201 bp, Homo sapiens
ttatgcaatcatacaaaaacacatgtacacacctacatacacacatgcgcatatacacatacatagatgcacatatatacacacatgcacacataaatgcacacagctatgtacactcgtgtacataagcacaaaggcacacacaaatacatgtacatatccacgtacacacattcatatatgtgcacaaccccatacaca

SEQ ID NO: 157013 - DNA, 201 bp, Homo sapiens
tccttatatttcagccatttcagcacaaaaaacattccactaagtattttagactatataggtgcaatttaatgctttccaggtatagcccgaatcctggragattaacattctccagatataagtgcacaactgctatcaggtccctttatatttattctttttttgaaaggatatcgttttttagaaacacaaataaat

SEQ ID NO: 157014 - DNA, 201 bp, Homo sapiens
tttatgcaatcatacaaaaacacatgtacacacctacatacacacatgcgcatatacacatacatagatgcacatatatacacacatgcacacataaatgcacacagctatgtacactcgtgtacataagcacaaaggcacacacaaatacatgtacatatccacgtacacacattcatatatgtgcacaaccccatacac

SEQ ID NO: 157015 - DNA, 201 bp, Homo sapiens
gactatataggtgcaatttaatgctttccaggtatagcccgaatcctgggagattaacattctccagatataagtgcacaactgctatcaggtccctttakatttattctttttttgaaaggatatcgttttttagaaacacaaataaattattccgcaaggcaagcacttgttatccaccagacgctattttaagacttc

SEQ ID NO: 157016 - DNA, 201 bp, Homo sapiens
gtacatttatgcaatcatacaaaaacacatgtacacacctacatacacacatgcgcatatacacatacatagatgcacatatatacacacatgcacacataaatgcacacagctatgtacactcgtgtacataagcacaaaggcacacacaaatacatgtacatatccacgtacacacattcatatatgtgcacaacccca

SEQ ID NO: 157017 - DNA, 201 bp, Homo sapiens
tcctgggagattaacattctccagatataagtgcacaactgctatcaggtccctttatatttattctttttttgaaaggatatcgttttttagaaacacarataaattattccgcaaggcaagcacttgttatccaccagacgctattttaagacttcaaaaatatatgactaataaaatatgtttccctcaagttgctca

SEQ ID NO: 157018 - DNA, 201 bp, Homo sapiens
tgtacatttatgcaatcatacaaaaacacatgtacacacctacatacacacatgcgcatatacacatacatagatgcacatatatacacacatgcacacataaatgcacacagctatgtacactcgtgtacataagcacaaaggcacacacaaatacatgtacatatccacgtacacacattcatatatgtgcacaacccc

SEQ ID NO: 157019 - DNA, 201 bp, Homo sapiens
gctgtctcacttgctttcagaccacagcaacctgaaggcctcaaagttaccatcacctgaaaatacacctatgatttccatctccccacatgtgcccaccytccagattcgcctcctcccacctcactgtccccctccccacattaaataactccacttggttcctggtttatggcgggaaccagagaatcatctgggaca

SEQ ID NO: 157020 - DNA, 201 bp, Homo sapiens
atgcatacacatacatgcacacaccaccccccacagaggcacacattcatgtacatttatgcaatcatacaaaaacacatgtacacacctacatacacacatgcgcatatacacatacatagatgcacatatatacacacatgcacacataaatgcacacagctatgtacactcgtgtacataagcacaaaggcacacaca

SEQ ID NO: 157021 - DNA, 201 bp, Homo sapiens
ttcataatgggtaataaaataaatagcactttcgagctgatgtcgtcagtgactcttggattttctaacaaaaggttcctttactgttgtcatagagagaytgtgaatttctctgactctgaagaatcaactagaagaagtagaatcaccagaacattttgctcagctgaaagcacaaagtaaactcagttactgggaatc

SEQ ID NO: 157022 - DNA, 201 bp, Homo sapiens
catgcatacacatacatgcacacaccaccccccacagaggcacacattcatgtacatttatgcaatcatacaaaaacacatgtacacacctacatacacacatgcgcatatacacatacatagatgcacatatatacacacatgcacacataaatgcacacagctatgtacactcgtgtacataagcacaaaggcacacac

SEQ ID NO: 157023 - DNA, 201 bp, Homo sapiens
ccactttccattttaccattctggaagatttcttagatatcatgaatgaacaagcaaatatattggttaagaaacttgaaaaacacattaaccaagaagcwtttaactgctttttttacatcactctttgtgccttagatatcatctgtggtgagtctcatcgatctgtttctaaatttatggcataaagagaaaatggcc

SEQ ID NO: 157024 - DNA, 201 bp, Homo sapiens
acatgcatgcatacacatacatgcacacaccaccccccacagaggcacacattcatgtacatttatgcaatcatacaaaaacacatgtacacacctacatacacacatgcgcatatacacatacatagatgcacatatatacacacatgcacacataaatgcacacagctatgtacactcgtgtacataagcacaaaggca

SEQ ID NO: 157025 - DNA, 201 bp, Homo sapiens
cacatgcatgcatacacatacatgcacacaccaccccccacagaggcacacattcatgtacatttatgcaatcatacaaaaacacatgtacacacctacatacacacatgcgcatatacacatacatagatgcacatatatacacacatgcacacataaatgcacacagctatgtacactcgtgtacataagcacaaaggc

SEQ ID NO: 157026 - DNA, 201 bp, Homo sapiens
attatgtagtcaacaaatattaattaagtactcgctaagtgctaaccaccatactaaatgttggaaatgtagtaatgagtaggacatgtgtatatggtccrtacctgaaaggaagttattctagtaggagaggtgatctatcaacacataattacaacatgtgatatgagctatgaacacttatgaacaaacagggtgctg

SEQ ID NO: 157027 - DNA, 201 bp, Homo sapiens
aacatacacacattcacatatacacacatacacaaacacatgcacacacctacatacactcatgcacatacatgcacacacaaacatgtatatccacatgygcacacacgtgcatacactcacacacaaatatacacacacacccagatactcatgcacatacacacacatgcacacatatacccacatgcacacatgcat

SEQ ID NO: 157028 - DNA, 201 bp, Homo sapiens
agaacctgtagatgaagctgtttcaggagaattttgttgacttgctatatttatgctttaatcgttttggatgttacttttctctttctctctctctctctgtagatatattttttgtaaccacatattttatttctagtactggaaacaaatggcgctccaggagaaagatgttaacacccactttccattttaccattc

SEQ ID NO: 157029 - DNA, 201 bp, Homo sapiens
tgcaaaataaacacgagataactaacgtgcgtgaattgaatggttgcttctcacccatattttatagaaacagctatggggaagaatattggtgctcaaartaatgatgattccgagtatgtccgtgcagtttataggtaaatggagtcctttcagttattttaacaattattattgatttaggctttaaaaattattgct

SEQ ID NO: 157030 - DNA, 201 bp, Homo sapiens
ctctttatcctagtagataagtttttggcacgttctttctccttcccatcattatctctcctctttacccgtcactttctttctgttgtggtttgcatttrttgatctctgcctttcctgatactactcaatttatgtttcacagaaataacggctgtacttaaatgaaactcagattcctatataaaaatgttgggataa

SEQ ID NO: 157031 - DNA, 201 bp, Homo sapiens
gctgttgatcttgttctctttatcctagtagataagtttttggcacgttctttctccttcccatcattatctctcctctttacccgtcactttctttctgytgtggtttgcatttgttgatctctgcctttcctgatactactcaatttatgtttcacagaaataacggctgtacttaaatgaaactcagattcctatata

SEQ ID NO: 157032 - DNA, 201 bp, Homo sapiens
tgagcggttcttccccgagaatgcacaagggcgccatccatatgcctacgtgcccttctctgctggccccaggaactgtataggtttgtatccatctgaawtggtttgacctttcaggcccacttgatggtgggtttctcacagtgatttctttgagatgtgatgtgacattgcccatatgcaacagccttaaaaaaaaaa

SEQ ID NO: 157033 - DNA, 201 bp, Homo sapiens
tacaaattctctgatcctccccagctatagatgtgcaaggtgggatcagggagggaaactcaagactcttcatctttaacaggtgttccaagccattctgrttctccttccacctactgcgaaaatgtaaagtggctcgcttcctatgacaggacctcttgtttctcacatttggggtaaatctataactaaagcgatggt

SEQ ID NO: 157034 - DNA, 201 bp, Homo sapiens
gggtatttagcatgccatgccttgatccacctgttctttttagatgtctgcacccccagcccccactgctctttcaggtcatcttatctacttgctttcawcagggaagtctgaccgtcccgctacagtagaagacctgaagaaacttcggtatctggaatgtgttattaaggagacccttcgcctttttccttctgttcc

SEQ ID NO: 157035 - DNA, 201 bp, Homo sapiens
aatgattgcattcactctaccacttaaactttttctcattagcgcaatcaaatctctagggtactatctagtagactatgattctattcttgtgttggaargactgcaaaaatagcacttgaaaattaggaatttgcgtgacattaaatttgtttttaaaagtttcaccagataatccccaaaatattaatgaggctttac

SEQ ID NO: 157036 - DNA, 201 bp, Homo sapiens
gagaacctgtagatgaagctgtttcaggagaattttgttgacttgctatatttatgctttaatcgttttggatgttacttttctctttctctctctctctctgtagatatattttttgtaaccacatattttatttctagtactggaaacaaatggcgctccaggagaaagatgttaacacccactttccattttaccatt

SEQ ID NO: 157037 - DNA, 201 bp, Homo sapiens
tacaagccagtttccaccatttactagctctgtgatactgggcagtcgttagaaagaatgcccgttctgggacatcaaaacctaataattattattctctratagctaacatgcattatgtgtgtttatttgctgtggcaaatactatgttgaaaaaaactttagacttacagaaaagttgcagtattacaggcagttcac

SEQ ID NO: 157038 - DNA, 201 bp, Homo sapiens
taaatttgtttttaaaagtttcaccagataatccccaaaatattaatgaggctttactgtattttcacaagagcctatgttgtcgaaatgttgaaataggyttagaaaaataaatgaaagaaactagcatattttataagaaaatgtgttaactagggtgcatccaagtccaaacagaagcatgtgattatcattcaaatc

SEQ ID NO: 157039 - DNA, 201 bp, Homo sapiens
ctcaagttgctcagggtctcatatcaatgataaacttagtccaaatttaaaagacaatgcaaatttgatatttatgggataaatattacaaacccatgctrttgaaattagtcctccaaaaagctgtagtctttttacttgttgaaaggtctggggaaatcatcttgtagtatggtgagaaaaggatttgggtcaggaaac

SEQ ID NO: 157040 - DNA, 201 bp, Homo sapiens
  misc_feature (1)...(201): n = A,T,C or G
cttagaaaaataaatgaaagaaactagcatattttataagaaaatgtgttaactagggtgcatccaagtccaaacagaagcatgtgattatcattcaaatnatacaggtcatcgcggaacgggccaatgaaatgaacgccaatgaagactgtagaggtgatggcaggggctctgccccctccaaaaataaacgcagggcct

SEQ ID NO: 157041 - DNA, 201 bp, Homo sapiens
gaaagaaactagcatattttataagaaaatgtgttaactagggtgcatccaagtccaaacagaagcatgtgattatcattcaaatcatacaggtcatcgckgaacgggccaatgaaatgaacgccaatgaagactgtagaggtgatggcaggggctctgccccctccaaaaataaacgcagggcctttcttgacttgcttt

SEQ ID NO: 157042 - DNA, 201 bp, Homo sapiens
atatcgttttttagaaacacaaataaattattccgcaaggcaagcacttgttatccaccagacgctattttaagacttcaaaaatatatgactaataaaayatgtttccctcaagttgctcagggtctcatatcaatgataaacttagtccaaatttaaaagacaatgcaaatttgatatttatgggataaatattacaaa

SEQ ID NO: 157043 - DNA, 201 bp, Homo sapiens
atattttataagaaaatgtgttaactagggtgcatccaagtccaaacagaagcatgtgattatcattcaaatcatacaggtcatcgcggaacgggccaatraaatgaacgccaatgaagactgtagaggtgatggcaggggctctgccccctccaaaaataaacgcagggcctttcttgacttgcttttaagtgtgactga

SEQ ID NO: 157044 - DNA, 201 bp, Homo sapiens
attaaaaatactttgacagaaaaaaatcaagcgaactctttgccaaccaaatatcatcatgactgatgtaacaagtaatccaacacagatatgaaaatcamtggtaaaaatcatctcagttaattctaaaagcagagctaaccaccccttttgtcctaaggctttatggtattaaaaaataaactgtacaaaaatatagat

SEQ ID NO: 157045 - DNA, 201 bp, Homo sapiens
actagggtgcatccaagtccaaacagaagcatgtgattatcattcaaatcatacaggtcatcgcggaacgggccaatgaaatgaacgccaatgaagactgyagaggtgatggcaggggctctgccccctccaaaaataaacgcagggcctttcttgacttgcttttaagtgtgactgatgacgaagggaacaggctaagtc

SEQ ID NO: 157046 - DNA, 201 bp, Homo sapiens
taatgagtaggacatgtgtatatggtccgtacctgaaaggaagttattctagtaggagaggtgatctatcaacacataattacaacatgtgatatgagctrtgaacacttatgaacaaacagggtgctgtgtaaaagaataaaggaacaaagatctgtgtataggagttttctggaaaatgtttggattcggcagtcattt

SEQ ID NO: 157047 - DNA, 201 bp, Homo sapiens
agaggtgatctatcaacacataattacaacatgtgatatgagctatgaacacttatgaacaaacagggtgctgtgtaaaagaataaaggaacaaagatctrtgtataggagttttctggaaaatgtttggattcggcagtcattttcaaaggcagagggcattgatagcagtatcttaacatggaaaacattaaaactaac

SEQ ID NO: 157048 - DNA, 201 bp, Homo sapiens
aagatttgcccaaaatggcatattttaaaattggcccagaccagaacccagtttcctctgggattatttgttagtaatcgttttacaggctgagcattaastaactccaaagcttgaaggactttttctcattttcacttgttttctctaataaaaataatgctgtaatttcaacttcacaagatgaggcctcatggaaga

SEQ ID NO: 157049 - DNA, 201 bp, Homo sapiens
agaagatttgcccaaaatggcatattttaaaattggcccagaccagaacccagtttcctctgggattatttgttagtaatcgttttacaggctgagcattaactaactccaaagcttgaaggactttttctcattttcacttgttttctctaataaaaataatgctgtaatttcaacttcacaagatgaggcctcatggaa

SEQ ID NO: 157050 - DNA, 201 bp, Homo sapiens
tggaaaatgtttggattcggcagtcattttcaaaggcagagggcattgatagcagtatcttaacatggaaaacattaaaactaactagatattagtattcyatttccaattcaaaaataaccagaagatagtgatgttgttttgaatataggatgtcaatctttgtgttaataatgtgttttgaaaaagcaagacttaatt

SEQ ID NO: 157051 - DNA, 201 bp, Homo sapiens
gaagatttgcccaaaatggcatattttaaaattggcccagaccagaacccagtttcctctgggattatttgttagtaatcgttttacaggctgagcattaactaactccaaagcttgaaggactttttctcattttcacttgttttctctaataaaaataatgctgtaatttcaacttcacaagatgaggcctcatggaag

SEQ ID NO: 157052 - DNA, 201 bp, Homo sapiens
gagaagatttgcccaaaatggcatattttaaaattggcccagaccagaacccagtttcctctgggattatttgttagtaatcgttttacaggctgagcattaactaactccaaagcttgaaggactttttctcattttcacttgttttctctaataaaaataatgctgtaatttcaacttcacaagatgaggcctcatgga

SEQ ID NO: 157053 - DNA, 201 bp, Homo sapiens
ctctttgtgccttagatatcatctgtggtgagtctcatcgatctgtttctaaatttatggcataaagagaaaatggcccaaacaggaaatcacactccacygggaaggcaaatggggggacgggaaagggtgacgggctcttcagcgcggttctacgaccgcactggccttctgaggagcagcagccacgcccagggctgt

SEQ ID NO: 157054 - DNA, 201 bp, Homo sapiens
gatattcgagaagaagttgacaccttcatgtttgaggtattgtatattgttaggttcagatatcattaaacaaatttcagttattgttagaatctttagcrttattttttaaaacaatcaaattttaaagtagtttaactaaagaagattcattatattttaattagaaattacaaaatttaagaaactgattaagtacca

SEQ ID NO: 157055 - DNA, 201 bp, Homo sapiens
ctggcccaaagttctagaattttttaaaggtattcatggtgactcaggaatacacacatacacacacacacacacacacacacacacacacacacatacacacacacatataatttgaaagaggtgagtatgtactctgacttcagctctcaggttttaaaaattatattagtgggaccagttatgacaagaataatcatt

SEQ ID NO: 157056 - DNA, 201 bp, Homo sapiens
cctggcccaaagttctagaattttttaaaggtattcatggtgactcaggaatacacacatacacacacacacacacacacacacacacacacacacatacacacacacatataatttgaaagaggtgagtatgtactctgacttcagctctcaggttttaaaaattatattagtgggaccagttatgacaagaataatcat

SEQ ID NO: 157057 - DNA, 201 bp, Homo sapiens
gcctggcccaaagttctagaattttttaaaggtattcatggtgactcaggaatacacacatacacacacacacacacacacacacacacacacacacatacacacacacatataatttgaaagaggtgagtatgtactctgacttcagctctcaggttttaaaaattatattagtgggaccagttatgacaagaataatca

SEQ ID NO: 157058 - DNA, 201 bp, Homo sapiens
tgcctggcccaaagttctagaattttttaaaggtattcatggtgactcaggaatacacacatacacacacacacacacacacacacacacacacacacatacacacacacatataatttgaaagaggtgagtatgtactctgacttcagctctcaggttttaaaaattatattagtgggaccagttatgacaagaataatc

SEQ ID NO: 157059 - DNA, 201 bp, Homo sapiens
agccaccatgcctggcccaaagttctagaattttttaaaggtattcatggtgactcaggaatacacacatacacacacacacacacacacacacacacacacacacatacacacacacatataatttgaaagaggtgagtatgtactctgacttcagctctcaggttttaaaaattatattagtgggaccagttatgacaa

SEQ ID NO: 157060 - DNA, 201 bp, Homo sapiens
gagccaccatgcctggcccaaagttctagaattttttaaaggtattcatggtgactcaggaatacacacatacacacacacacacacacacacacacacacacacacatacacacacacatataatttgaaagaggtgagtatgtactctgacttcagctctcaggttttaaaaattatattagtgggaccagttatgaca

SEQ ID NO: 157061 - DNA, 201 bp, Homo sapiens
ctgcctcggcctcccaaagtgctggcattacaggcatgagccaccatgcctggcccaaagttctagaattttttaaaggtattcatggtgactcaggaatwcacacatacacacacacacacacacacacacacacacacacacatacacacacacatataatttgaaagaggtgagtatgtactctgacttcagctctca

SEQ ID NO: 157062 - DNA, 201 bp, Homo sapiens; identical to SEQ ID NO: 29309

SEQ ID NO: 157063 - DNA, 201 bp, Homo sapiens
gtggtaaaatagacataacataaaatttccctttataaccattttaactgtacagtttggtggtattaagtgcattcacgatgttgtgcaaccatccccaycgttcatttccagaacttttggtaagtccatgatgttgatgttttgttaacatacccggtgtaggactatggagcctatgtctcagaaaataaaacttga

SEQ ID NO: 157064 - DNA, 201 bp, Homo sapiens
cacctgttctttttagatgtctgcacccccagcccccactgctctttcaggtcatcttatctacttgctttcatcagggaagtctgaccgtcccgctacartagaagacctgaagaaacttcggtatctggaatgtgttattaaggagacccttcgcctttttccttctgttcctttatttgcccgtagtgttagtgaaga

SEQ ID NO: 157065 - DNA, 201 bp, Homo sapiens
tgtaggggcacgatacaactgcagctgcaataaactggtccttatacctgttgggttctaacccagaagtccagaaaaaagtggatcatgaattggatgaygtgtttggtatgtttggccccttcactggttatattgtggtactaagtctgctgcagagatgtcactgtgttgtaaacacagtgtaatgagcaggaaggc

SEQ ID NO: 157066 - DNA, 201 bp, Homo sapiens
gaaaatatacatcaaattataatttcagtgtattaaaaaactgcctgtttaaatatgtcctttctttgctgtaaattttggttaaaatctattggagttaygtccttgtggtgaagtacaccctacccccaagagagcaaatgatgaataaatcagatgatgttccatgaatgcaatgttggctgagctggccacagtgga

SEQ ID NO: 157067 - DNA, 201 bp, Homo sapiens
gtcctttctttgctgtaaattttggttaaaatctattggagttacgtccttgtggtgaagtacaccctacccccaagagagcaaatgatgaataaatcagwtgatgttccatgaatgcaatgttggctgagctggccacagtggagtgtgatcacctggttataggagaatagccagcaggttatatttcataattatatt

SEQ ID NO: 157068 - DNA, 201 bp, Homo sapiens
tcctttctttgctgtaaattttggttaaaatctattggagttacgtccttgtggtgaagtacaccctacccccaagagagcaaatgatgaataaatcagawgatgttccatgaatgcaatgttggctgagctggccacagtggagtgtgatcacctggttataggagaatagccagcaggttatatttcataattatattt

SEQ ID NO: 157069 - DNA, 201 bp, Homo sapiens
gtttttagaagccatgtagtaatatcgtccacatggggcagagtgaaaggcacctgagtttttaatggctctgcctgccacccacgtgtgagctgctctgyggcagcctctggcggcagtgccagtgtcctgcactctggtgtgaggctccacgacacggtagaagaaggttgtgtgatgggtctttcgatccgagttcca

SEQ ID NO: 157070 - DNA, 201 bp, Homo sapiens
tttccaccatttactagctctgtgatactgggcagtcgttagaaagaatgcccgttctgggacatcaaaacctaataattattattctctaatagctaacrtgcattatgtgtgtttatttgctgtggcaaatactatgttgaaaaaaactttagacttacagaaaagttgcagtattacaggcagttcacacatgctctc

SEQ ID NO: 157071 - DNA, 201 bp, Homo sapiens
taagtgtgtgggctctaagatcaaatcccagctaacatgctgggaccatgacctcaagcacctcacctagccgttctgggcctgaatattcttattttaakagcacaagcctcatggaatagttatgatgattagatttgtaaaggtgctctgagaatcgtgattggcccataagtatgcggcacataccgggtgttatta

SEQ ID NO: 157072 - DNA, 201 bp, Homo sapiens
cacacacatccatctcctaccaggaacctctcaatctcacgtaaacaatcagaaccagactaatgatttttcttccaactctaacattccttgacattctmattgttttcttctttgcattgaaagggaggcagcataccaggtgtgagtgtgatactgtggcctcctccacaggtcggtgcaggctgtgagtgacactgt

SEQ ID NO: 157073 - DNA, 201 bp, Homo sapiens
tatttgggagaaaggaggagctggtgaaactatttagaaaggtacaggaaagctgtttcgcagattgcctctcaccacaaaggagagaaaatgtggattamaaaggtggattaagcttcgaggagatacatttctattacacagcaagcagcccggaggaaaagtcctgccagtaggatgtccagggtcccagacttgccc

SEQ ID NO: 157074 - DNA, 201 bp, Homo sapiens
gcagggaaagaaaactaaaggaataaagctggagagagaaggcattctagaaagagaggaagcagatgagcaacggcacagaagtggaaaggtttctggcrtggagggcaatagtggagagtgagagaccgcgagaactcatctctcattcactgggagatgaggatggaaaagcagttttgtgtgcagattgtgctggga

SEQ ID NO: 157075 - DNA, 201 bp, Homo sapiens
gaatgcacatcaccaccctgcattataaacccttttggttttagtatctctagcattttgtcatttatgtaaatgcagacatcggtaaaatgaggccagartgaaacgggtgaatctgaagcttttttggtgaatccatagtaaatgaaagacccactaagacataatctagggtagtgagtctcaagcttgaaggagctc

SEQ ID NO: 157076 - DNA, 201 bp, Homo sapiens
ttctttgatgggtatttgatgggtatttagcatccagtaccttgatccacatgttcttctttgaagggtatttgatgggtatttagcatcccctgccttgrtccacgtgtttttctttgaagggtatttgatgggtatttagcgtccagtaccttgatccacatgttcttctttgatgggcatttgatgggtatttagcat

SEQ ID NO: 157077 - DNA, 201 bp, Homo sapiens
gggtatttgatgggtatttagcatccagtaccttgatccacatgttcttctttgaagggtatttgatgggtatttagcatcccctgccttgatccacgtgkttttctttgaagggtatttgatgggtatttagcgtccagtaccttgatccacatgttcttctttgatgggcatttgatgggtatttagcatcccctgcct

SEQ ID NO: 157078 - DNA, 201 bp, Homo sapiens
gatccacatgttcttctttgaagggtatttgatgggtatttagcatcccctgccttgatccacgtgtttttctttgaagggtatttgatgggtatttagcrtccagtaccttgatccacatgttcttctttgatgggcatttgatgggtatttagcatcccctgccttgatccacgtgttcttctttgttgggtatttgat

SEQ ID NO: 157079 - DNA, 201 bp, Homo sapiens
tgtttctcacatttggggtaaatctataactaaagcgatggtatctacattaatttgaaggtcaaaagtttgctgtgatggaagaaaagaccattctttcrtgcatcctgaggcacttttggatagaatccaaccagaaaagagaagagcttggtctagaaggacagttgattcttcgtccaagtaatggcatctggatca

SEQ ID NO: 157080 - DNA, 201 bp, Homo sapiens
aatgagtgagatgatatttcgaagaataaagatgccctggctttggcttgatctctggtaccttatgtttaaagaaggatgggaacacaaaaagagccttmagatcctacatacttttaccaacagtgtaagtccctgacttttacaattgtggtaaaatagacataacataaaatttccctttataaccattttaactgt

SEQ ID NO: 157081 - DNA, 201 bp, Homo sapiens
tacagtagaagacctgaagaaacttcggtatctggaatgtgttattaaggagacccttcgcctttttccttctgttcctttatttgcccgtagtgttagtsaagattgtgaagtgggtaagtatgctatacctaaagtagaagggagagggaaactttctaatgtctaccttgctccggtctcataatgtattgactactt

SEQ ID NO: 157082 - DNA, 201 bp, Homo sapiens
tgggtatttgatgggtatttagcatgccatgccttgatccacctgttctttttagatgtctgcacccccagcccccactgctctttcaggtcatcttatcwacttgctttcatcagggaagtctgaccgtcccgctacagtagaagacctgaagaaacttcggtatctggaatgtgttattaaggagacccttcgcctttt

SEQ ID NO: 157083 - DNA, 201 bp, Homo sapiens
cacatgcacacataaatgcacacagctatgtacactcgtgtacataagcacaaaggcacacacaaatacatgtacatatccacgtacacacattcatatatgtgcacaaccccatacacatatgtacacacatgtgcacacacacatccatctcctaccaggaacctctcaatctcacgtaaacaatcagaaccagactaa

SEQ ID NO: 157084 - DNA, 201 bp, Homo sapiens
acacatgcacacataaatgcacacagctatgtacactcgtgtacataagcacaaaggcacacacaaatacatgtacatatccacgtacacacattcatatatgtgcacaaccccatacacatatgtacacacatgtgcacacacacatccatctcctaccaggaacctctcaatctcacgtaaacaatcagaaccagacta

SEQ ID NO: 157085 - DNA, 201 bp, Homo sapiens
acattaaccaagaagcatttaactgctttttttacatcactctttgtgccttagatatcatctgtggtgagtctcatcgatctgtttctaaatttatggcrtaaagagaaaatggcccaaacaggaaatcacactccaccgggaaggcaaatggggggacgggaaagggtgacgggctcttcagcgcggttctacgaccgc

SEQ ID NO: 157086 - DNA, 201 bp, Homo sapiens
cacacatgcacacataaatgcacacagctatgtacactcgtgtacataagcacaaaggcacacacaaatacatgtacatatccacgtacacacattcatatatgtgcacaaccccatacacatatgtacacacatgtgcacacacacatccatctcctaccaggaacctctcaatctcacgtaaacaatcagaaccagact

SEQ ID NO: 157087 - DNA, 201 bp, Homo sapiens
acacacatgcacacataaatgcacacagctatgtacactcgtgtacataagcacaaaggcacacacaaatacatgtacatatccacgtacacacattcatatatgtgcacaaccccatacacatatgtacacacatgtgcacacacacatccatctcctaccaggaacctctcaatctcacgtaaacaatcagaaccagac

SEQ ID NO: 157088 - DNA, 201 bp, Homo sapiens
tatacacacatgcacacataaatgcacacagctatgtacactcgtgtacataagcacaaaggcacacacaaatacatgtacatatccacgtacacacattcatatatgtgcacaaccccatacacatatgtacacacatgtgcacacacacatccatctcctaccaggaacctctcaatctcacgtaaacaatcagaacca

SEQ ID NO: 157089 - DNA, 201 bp, Homo sapiens
atgcaatcatacaaaaacacatgtacacacctacatacacacatgcgcatatacacatacatagatgcacatatatacacacatgcacacataaatgcacacagctatgtacactcgtgtacataagcacaaaggcacacacaaatacatgtacatatccacgtacacacattcatatatgtgcacaaccccatacacata

SEQ ID NO: 157090 - DNA, 201 bp, Homo sapiens
tatgcaatcatacaaaaacacatgtacacacctacatacacacatgcgcatatacacatacatagatgcacatatatacacacatgcacacataaatgcacacagctatgtacactcgtgtacataagcacaaaggcacacacaaatacatgtacatatccacgtacacacattcatatatgtgcacaaccccatacacat

SEQ ID NO: 157091 - DNA, 201 bp, Homo sapiens
  misc_feature (1)...(201): n = A,T,C or G
agaagaattctgaaatatacaaggacaaagcaggatgtacgtctttagtgtctgccgctgcaaaataaacacgagataactaacgtgcgtgaattgaatgnttgcttctcacccatattttatagaaacagctatggggaagaatattggtgctcaaagtaatgatgattccgagtatgtccgtgcagtttataggtaaat

SEQ ID NO: 157092 - DNA, 201 bp, Homo sapiens
tatttagcgtccagtaccttgatccacatgttcttctttgatgggcatttgatgggtatttagcatcccctgccttgatccacgtgttcttctttgttggrtatttgatgggtatttagcatgccatgccttgatccacctgttctttttagatgtctgcacccccagcccccactgctctttcaggtcatcttatctact

SEQ ID NO: 157093 - DNA, 201 bp, Homo sapiens
ttctaaaaggcactgaagccgtcatcattccctatgcattgcacagagatccgagatacttccccaaccccgaggagttccagcctgagcggttcttcccsgagaatgcacaagggcgccatccatatgcctacgtgcccttctctgctggccccaggaactgtataggtttgtatccatctgaattggtttgacctttca

SEQ ID NO: 157094 - DNA, 201 bp, Homo sapiens
ttctcattgtctcgtgtatgtgtttctcattcttgtgctttccttttgttgttattcttcttcccatattttctgcaccaagtaggtattgttttagtcawcgaaacagtcaattttactctaaaattgcttgcaattattcacctgttaaaaggcagggcaaggacttgatgaagtacagagaagtgcattgagctgagt

SEQ ID NO: 157095 - DNA, 201 bp, Homo sapiens
aacataaaatttccctttataaccattttaactgtacagtttggtggtattaagtgcattcacgatgttgtgcaaccatccccaccgttcatttccagaayttttggtaagtccatgatgttgatgttttgttaacatacccggtgtaggactatggagcctatgtctcagaaaataaaacttgaataataatagaaaaca

SEQ ID NO: 157096 - DNA, 201 bp, Homo sapiens
gatgaatattttatagatatgtgtatatctttgtcattctgccaaaagcatttgagaacctgtagatgaagctgtttcaggagaattttgttgacttgctrtatttatgctttaatcgttttggatgttacttttctctttctctctctctctctgtagatatattttttgtaaccacatattttatttctagtactggaa

SEQ ID NO: 157097 - DNA, 201 bp, Homo sapiens
tgcttgaacccgggaggtggaggttgcagtgagccaagatcgcgccactgcactccagccttggtaacagagcaagactctgtctttaaaaaaaaaaaaaraaaaaaaaagctttaatgttctcattgcccagggatccagcagggggaaaaaaaggaagaaccctaactgaggaagggagttaacagtcccagtttctca

SEQ ID NO: 157098 - DNA, 201 bp, Homo sapiens
aggtgtccctggtggtgaatgtggccagcgagtgcggcttcacagaccagcactaccgagccctgcagcagctgcagcgagacctgggcccccaccacttyaacgtgctcgccttcccctgcaaccagtttggccaacaggagcctgacagcaacaaggagattgagagctttgcccgccgcacctacagtgtctcattcc

SEQ ID NO: 157099 - DNA, 201 bp, Homo sapiens
actttggaatctcccagggggcttttgaaaaatgctgatgcctgagcctcaccctcagagattctggttggagtggtctggggtgtggactgggcatcagkattagctgccaccagggaaagatggacactgagagtgaagtcccaggagagggtacgcagggtagcacgctttgctctccttcctttttctctagagact

SEQ ID NO: 157100 - DNA, 201 bp, Homo sapiens
ctgcttgattgtcccccagagtgtcgtgagtttcaaatcagatgaaggcgtggatgcacttagtaaactgtagagtgctttgcacctgtgtttggtggatsccagcaggaacttcatttagaactctgggcaaagaaccaagaacagggcccgctccaattcaggcctcctgttctctctagggcagctcaccagagagcc

SEQ ID NO: 157101 - DNA, 201 bp, Homo sapiens
atttttgccttttctgattccgtgcttctggtggcctttgtatcccttgccaccaccccaccctgcaacccattcacctggaggagtaaatgagaagcaasagtgcagcaaacaaaaggtcccttactgcggcaggtttgtgttttgctctgtggctcagtcctaatgtttatttttttctctgtgttcttttattagttc

SEQ ID NO: 157102 - DNA, 201 bp, Homo sapiens
cattcacctggaggagtaaatgagaagcaagagtgcagcaaacaaaaggtcccttactgcggcaggtttgtgttttgctctgtggctcagtcctaatgttkatttttttctctgtgttcttttattagttccttcccagttctcacagttatagatcaaacccggccttgcttttagaagcacctggggagctcttaaaaa

SEQ ID NO: 157103 - DNA, 201 bp, Homo sapiens
caattaaaacgttctgtgggaataaagtggccatatggaatttacaataagaagtactatatattttattatttgtgaattgtgtgctatgcatcatttayatcagtaaaccttataataaacttattatacacacacacacacacacacacacacacacacgcacctttttctcctggaaagccaatttgtaaatgttta

SEQ ID NO: 157104 - DNA, 201 bp, Homo sapiens
gtaggtggatcacctgaggtcaagagtttgagaccagcctggccaacatggtgaaaacccatctctactaaaaatacaaaaattaggctgggcgcggtggstcacgcttgtaatcccagcactttgggaggccaaggcgggcggatcacgaggtcaggagatcgagaccaacctcgctaatacggtgaaaccccgtctcta

SEQ ID NO: 157105 - DNA, 201 bp, Homo sapiens
ctcacacctcccttagctggctgaggccatggctccctgggcagcagaagccactggctggttgggtgacctggggccccttccccttcctgatcatctcrggtggactgatgctttgttccagcactaatctttgaggagagtggaggcaggtagaagctgaggggtattcctgcctaagaatatctccatacctgctgc

SEQ ID NO: 157106 - DNA, 201 bp, Homo sapiens; identical to SEQ ID NO: 29315

SEQ ID NO: 157107 - DNA, 201 bp, Homo sapiens
ggctggttgggtgacctggggccccttccccttcctgatcatctcaggtggactgatgctttgttccagcactaatctttgaggagagtggaggcaggtasaagctgaggggtattcctgcctaagaatatctccatacctgctgcctctcacttgtccctcagaagtcactcttttggacttttctgggatcctgttttc

SEQ ID NO: 157108 - DNA, 201 bp, Homo sapiens; identical to SEQ ID NO: 29316

SEQ ID NO: 157109 - DNA, 201 bp, Homo sapiens
gtgtacttgggtgtgtctgtctgtgttttggtttctaaggaccaagctttttggtttcagggatggaactagaagccagattttcccccttccaaaagagygggcagacatgcaagttgtgagttaaaaataagcaagctttggccggacgcagtggctcacgcctgtaatcccagcacttcaggaggctgaggcgggtgg

SEQ ID NO: 157110 - DNA, 201 bp, Homo sapiens
ccaacgtaggtggatcacctgaggtcaagagtttgagaccagcctggccaacatggtgaaaacccatctctactaaaaatacaaaaattaggctgggcgcsgtgggtcacgcttgtaatcccagcactttgggaggccaaggcgggcggatcacgaggtcaggagatcgagaccaacctcgctaatacggtgaaaccccgt

SEQ ID NO: 157111 - DNA, 201 bp, Homo sapiens
atcccagcacttcaggaggctgaggcgggtggatcacaaggtgaggagttcgaggctagcctggccaacatggtgaaactccgtctgtacttaaaaaatayaaaaattagctgggcatggtggcgtgtgcctgtaatcccagctactcaggaggctgaggcaggagaattgcttgaacccgggaggtggaggttgcagtga

SEQ ID NO: 157112 - DNA, 201 bp, Homo sapiens; identical to SEQ ID NO: 29318

SEQ ID NO: 157113 - DNA, 201 bp, Homo sapiens
cagggtggggtgattcacgtcttgaggtctcggccggtgtgagagcccagcctgttcccctttctgcgcccatccccggctcggccgccaccccgcccgcscgccccattcccttcccctgagctggccgggccggagcctcattttgttttctacttttttctctcctatgtgcatccccccaggagctggctaaatatg

SEQ ID NO: 157114 - DNA, 201 bp, Homo sapiens
tcctttacacaataaagtagatgatcatgataaatgaggtaaggtcctattatcacacacttcaaacacggtagatcagaaacccactatgatactcgctkcctgtctgtttgctaaggaatataaaatggctagaaagtttaatttgaaacctttgcctccatttggaatagtagacaccagttaagagggtgtcagatg

SEQ ID NO: 157115 - DNA, 201 bp, Homo sapiens
cttcttgcagatctgctagaagatggttttggagagcaccccttttaccactgcctggttgcagaagtgccgaaagagcactggactccggaaggtaaccyctcgccctttccagaagccagagagaccaagtgttatgtaagaagtagtgtcggctgtgtagaaccactgactacacaggccgaagttactgagaacttg

SEQ ID NO: 157116 - DNA, 201 bp, Homo sapiens
cggaagagttagatataatgtcatttgttgtaattcagtttcataaaatggttcttgtttgaccctaacgtaacagtttttgtaattgtgttaaatcacayttttttctttaatttgtcccaatcttcaggttacagtctctagcttcgccatgtacatggcccttccgtgtacatggatgggcggggaggtaactaaaag

SEQ ID NO: 157117 - DNA, 201 bp, Homo sapiens
gccactgccgccgactgcagtgacatactgcggctgatcaaggtagcggagagccagagctcctcccggggcgtggggtggaggtggctccgtttcccagrgtggggtgattcacgtcttgaggtctcggccggtgtgagagcccagcctgttcccctttctgcgcccatccccggctcggccgccaccccgcccgcccgc

SEQ ID NO: 157118 - DNA, 201 bp, Homo sapiens
tccttctccacatctcatgtgatgctcttattacaggacacagcattgttggttttgccatgtactattttacctatgacccgtggattggcaagttattstatcttgaggacttcttcgtgatgagtgattatagaggtacgattgagttcggagcagagggtctgaagagagttcagagttataaatgcttacaatgac

SEQ ID NO: 157119 - DNA, 201 bp, Homo sapiens; identical to SEQ ID NO: 29325

SEQ ID NO: 157120 - DNA, 201 bp, Homo sapiens
tttgccatgtactattttacctatgacccgtggattggcaagttattgtatcttgaggacttcttcgtgatgagtgattatagaggtacgattgagttcgkagcagagggtctgaagagagttcagagttataaatgcttacaatgactttttaaattgtactctttctttttaggctttggcataggatcagaaattctg

SEQ ID NO: 157121 - DNA, 201 bp, Homo sapiens
cctttacacaataaagtagatgatcatgataaatgaggtaaggtcctattatcacacacttcaaacacggtagatcagaaacccactatgatactcgcttsctgtctgtttgctaaggaatataaaatggctagaaagtttaatttgaaacctttgcctccatttggaatagtagacaccagttaagagggtgtcagatgc

SEQ ID NO: 157122 - DNA, 201 bp, Homo sapiens
ctttggcctgatgttctgacctttaaggaagcaagagtttgtaaacttccaaatatttactattctgaactgccgtgtaaacctgacgtattcccaagtcracataccagtataccaataggatgtgaataatgtgtgtgttgagtttaaaaccatagcagttttgctctggcaagtaatgaaagcgttctcgcttcctga

SEQ ID NO: 157123 - DNA, 201 bp, Homo sapiens
attggatgagaggtcccacctcacggcccgaggcggggcttctttgcgcttaaaagccgagccgggccaatgttcaaatgcgcagctcttagtcgcgggcygactggtgtttatccgtcactcgccgaggttccttgggtcatggtgccagcctgactgagaagaggacgctcccgggagacgaatgaggaaccacctcct

SEQ ID NO: 157124 - DNA, 201 bp, Homo sapiens
ttttaggctttggcataggatcagaaattctgaagaatctaagccaggtatgtcttagtttttggtttccaaatttgtaagtttactggattattttaatratggaataaaaattgggtcttgagagcaggctgaaatgtcactgagtgtgtgttttactctctcataataggttgcaatgaggtgtcgctgcagcagcat

SEQ ID NO: 157125 - DNA, 201 bp, Homo sapiens
ggattggcaagttattgtatcttgaggacttcttcgtgatgagtgattatagaggtacgattgagttcggagcagagggtctgaagagagttcagagttayaaatgcttacaatgactttttaaattgtactctttctttttaggctttggcataggatcagaaattctgaagaatctaagccaggtatgtcttagttttt

SEQ ID NO: 157126 - DNA, 201 bp, Homo sapiens
cccctcacattcaacaagtgattctctgcttttgctagcaatatcctgtatgtagaaaagaaagcagaagtagattctctgttacccttcctgccctaggrggattccacggatcctgagtcaccctgggagattatgaaactcaaaggtctttctcaaagatctttaaaaaccactgattctcaactgccaaattacagc

SEQ ID NO: 157127 - DNA, 201 bp, Homo sapiens
agaagctgaaacaccacagcattagcccactactagctcaactcaattacaaagagacctctttaaaaactgaactataaagcaaatctataaagtttgamgtcaccaggcaagtaagaaaacatgttacggggaaattatctgaaaagaaacaacaaacaatgataaacatggaaaaccagagtccaagatcatcaaccg

SEQ ID NO: 157128 - DNA, 201 bp, Homo sapiens
attcacgtcttgaggtctcggccggtgtgagagcccagcctgttcccctttctgcgcccatccccggctcggccgccaccccgcccgcccgccccattccsttcccctgagctggccgggccggagcctcattttgttttctacttttttctctcctatgtgcatccccccaggagctggctaaatatgaatacatggaag

SEQ ID NO: 157129 - DNA, 201 bp, Homo sapiens
agcactggactccggaaggtaacccctcgccctttccagaagccagagagaccaagtgttatgtaagaagtagtgtcggctgtgtagaaccactgactacrcaggccgaagttactgagaacttggacagaaaaaatagccagcaagtgttcaaactactgaggaaaaaaaaaaattagatatgctgcacttaagaatact

SEQ ID NO: 157130 - DNA, 201 bp, Homo sapiens
atcaaggtagcggagagccagagctcctcccggggcgtggggtggaggtggctccgtttcccagggtggggtgattcacgtcttgaggtctcggccggtgygagagcccagcctgttcccctttctgcgcccatccccggctcggccgccaccccgcccgcccgccccattcccttcccctgagctggccgggccggagcc

SEQ ID NO: 157131 - DNA, 201 bp, Homo sapiens
cctcattggatgagaggtcccacctcacggcccgaggcggggcttctttgcgcttaaaagccgagccgggccaatgttcaaatgcgcagctcttagtcgcrggccgactggtgtttatccgtcactcgccgaggttccttgggtcatggtgccagcctgactgagaagaggacgctcccgggagacgaatgaggaaccacc

SEQ ID NO: 157132 - DNA, 201 bp, Homo sapiens; identical to SEQ ID NO: 29320

SEQ ID NO: 157133 - DNA, 201 bp, Homo sapiens
gttaaaagagctgtttaagtaagtatcagagtgctgtggagactcggaagtgtttaagctgcttaagtaagtataagtgctgtggagacccggaagagttrgatataatgtcatttgttgtaattcagtttcataaaatggttcttgtttgaccctaacgtaacagtttttgtaattgtgttaaatcacatttttttcttt

SEQ ID NO: 157134 - DNA, 201 bp, Homo sapiens; identical to SEQ ID NO: 29321

SEQ ID NO: 157135 - DNA, 201 bp, Homo sapiens
tcattcaatgaataaactcatcattacacaagtaaaatgtggaggtgggattatgaaacactgaaaatcaagaaagaacatcttgtcccccaaaacctcaygccacacaagactttttttttttttttttttttgaggaagagtcttgctctgtcacccaggctggagtgcggtggcacgatcttggctcactgcaagctc

SEQ ID NO: 157136 - DNA, 201 bp, Homo sapiens
gtcggctgtgtagaaccactgactacacaggccgaagttactgagaacttggacagaaaaaatagccagcaagtgttcaaactactgaggaaaaaaaaaawttagatatgctgcacttaagaatactagggcaggttaaaagagctgtttaagtaagtatcagagtgctgtggagactcggaagtgtttaagctgcttaag

SEQ ID NO: 157137 - DNA, 201 bp, Homo sapiens
gttataaatgcttacaatgactttttaaattgtactctttctttttaggctttggcataggatcagaaattctgaagaatctaagccaggtatgtcttagwttttggtttccaaatttgtaagtttactggattattttaatgatggaataaaaattgggtcttgagagcaggctgaaatgtcactgagtgtgtgttttac

SEQ ID NO: 157138 - DNA, 201 bp, Homo sapiens
actttttttttttttttttttttgaggaagagtcttgctctgtcacccaggctggagtgcggtggcacgatcttggctcactgcaagctccgcctcccggkttcacgccattcccctgcctcagcctcccgagtagctgggactacaggcacccgccaccacgcctggctaatttttttttttttttttttttttttagag

SEQ ID NO: 157139 - DNA, 201 bp, Homo sapiens
gcccgcccgccccattcccttcccctgagctggccgggccggagcctcattttgttttctacttttttctctcctatgtgcatccccccaggagctggctraatatgaatacatggaagaacaagtaatcttaactgaaaaaggtaattcaacagtggcgggacgggggacaagcgttcggtgcctgtcaccttcgccaag

SEQ ID NO: 157140 - DNA, 201 bp, Homo sapiens
agtggcctggactgcactcacataaaaatcatgagacagccatggctacttgtttctgtaatacatgcatgtgtgttttttaaaacctatgataggcctcygattctgcagctgcaacttttatggaatgttttccttctccacatctcatgtgatgctcttattacaggacacagcattgttggttttgccatgtactat

SEQ ID NO: 157141 - DNA, 201 bp, Homo sapiens
ttttaaagactgagtaccattctattttgcatttatacatggaaaatgagtgttgacttccaaaaacaatgatgagaacagattcttcttggactcaatgmgacactacagataagacagggtttaaccttgacattcccaccaccccacctaatatcctcgctttccctaaaggggtctcttgagacatcaatttgtcat

SEQ ID NO: 157142 - DNA, 201 bp, Homo sapiens
cctcaggtgggcagagggagggagtttttttggtcaattcttccattatcgcttagtgggaatcggtgcaaatctcagaggcagggcttaatacacagccmggccagcaggggatggtttgcaggcttttgggacctgggctgctgggagaattggtgacagcatgtgaaggcagatgatgccacttagcatgtgttcagc

SEQ ID NO: 157143 - DNA, 201 bp, Homo sapiens
tgcagggagtccatcttgatgtttgggtctgggaaggtgctcccaggaggcagttcccagctttggctctgttttttctctggccaggacaagtggcagcrcctggcctcagagggcagcgccagactggacatgtttgaacacatcagcctcatgaccttggacagtctgcagaaatgtgtcttcagctttgaaagcaat

SEQ ID NO: 157144 - DNA, 201 bp, Homo sapiens
cataagagcagaagctgacaccttcatgtttgagggtgagggtctcagtgtgggactacggtggggacaggggcctctccatcccaggaacgtagtgggtrgaccctggatcacttaattctgcccatcctcctcctccctacattctcctgagggcctcagagtttgggtgctctcctccctctggtgctgaagcagccc

SEQ ID NO: 157145 - DNA, 201 bp, Homo sapiens
tggaagtagacaggggatagatttcaggacattgaaaatcaggaaaagtggcatgaactttatcaggaggttcccaggaatcttttgaagagggttgggcygatgacagatgtggtcacagctgagctctgtggaggtctgcctgtcatgtagacgctacatggagcagacattgaatgcaagtctgttatggtgggggct

SEQ ID NO: 157146 - DNA, 201 bp, Homo sapiens
atctttttagggctagtgtagagggcatactggagaggaccagttgtagaaggaagtcccagggaaggacattctgaggtctgagccaggccaggagctgrggatggagaggagacattgagctggacaggccttttgaaggtagcgcccttacatccaagcctttgctcagcacagggtcctgtaaggtggagaaacatt

SEQ ID NO: 157147 - DNA, 201 bp, Homo sapiens
gggggtcatgggcacagtcagatcccctcacttttgcccccagaaactgcatcgggcaggcgttcgccatggctgagatgaaggtggtcctggcgctcacsctgctgcacttccgcatcctgccgacccacactgaaccccgcaggaaacccgagctgatattgcgcgcagagggtggactttggctgcgggtggagcccc

SEQ ID NO: 157148 - DNA, 201 bp, Homo sapiens
gtcagctgctgtcgcacccaaggatatgattttctatggcttcctgaagccctggctgggtgagtaattgaggtgaatggggttggggatatcctttaggkataagggagggtgctgcccttgaccactgtccttggttgccctgccaggggatgggctcctgctgagtggtggtgacaagtggagccgccaccgtcggat

SEQ ID NO: 157149 - DNA, 201 bp, Homo sapiens
actggagaggaccagttgtagaaggaagtcccagggaaggacattctgaggtctgagccaggccaggagctgaggatggagaggagacattgagctggacrggccttttgaaggtagcgcccttacatccaagcctttgctcagcacagggtcctgtaaggtggagaaacatttttatgcttttaaaaccaagatttcaag

SEQ ID NO: 157150 - DNA, 201 bp, Homo sapiens
gtagaaggaagtcccagggaaggacattctgaggtctgagccaggccaggagctgaggatggagaggagacattgagctggacaggccttttgaaggtagygcccttacatccaagcctttgctcagcacagggtcctgtaaggtggagaaacatttttatgcttttaaaaccaagatttcaagcaaaattacacattgtt

SEQ ID NO: 157151 - DNA, 201 bp, Homo sapiens
gatgtagtgtgagattgtctttttattctacttcaaatgtcttggccatgtttggtgcttgtccaaggtgtaggacccagggaatctttgagaactgtctragatattatttgagtcttagtatagttaggtcttagggtagatttgaattatgccgaagaataggcttggttatacccgggccatgtttaggacattagt

SEQ ID NO: 157152 - DNA, 201 bp, Homo sapiens; identical to SEQ ID NO: 29337

SEQ ID NO: 157153 - DNA, 201 bp, Homo sapiens
acgcaggactttgtgctcccagacggccgcgtcatccccaaaggtgctcacagcctcagggggaggagcctcctgggtagcaagaggggtccctcaggcargggggccttgtcctgactgccctcttctctcccacaggcattgtctgcctcatcaatattatcgggatccattacaacccaactgtgtggccagaccctg

SEQ ID NO: 157154 - DNA, 201 bp, Homo sapiens
ggtagtgcctccctcaccccaccctttttggagtccattccaaggttcctagaggaggtgacagggttttgaccaggaaaatccaacatcacctctcctcmatggagacacatctgccaaaatgtctctccaaggccgggggtcttggagacaactgggagaccccacccaactgggtgaccccacccagcaagccttctt

SEQ ID NO: 157155 - DNA, 201 bp, Homo sapiens; identical to SEQ ID NO: 29363

SEQ ID NO: 157156 - DNA, 201 bp, Homo sapiens; identical to SEQ ID NO: 146644

SEQ ID NO: 157157 - DNA, 201 bp, Homo sapiens
taagcaaacaattcagctcccttactgggtcttaaacgtttataaatgttttccagtgaagtgttctgtttttctaagtataaaatcaccgtctgccaccrccacatttcaaattgcattcctctcttttttattcccttgtctaattgcatttgctactatcgctaatacaatgatgaataagagcaaaacagtggatct

SEQ ID NO: 157158 - DNA, 201 bp, Homo sapiens
tttagagccacttaagtgtacaatgtattaaaattttaaactgccacagaaaaagaagaaagattaagcaaacaattcagctcccttactgggtcttaaaygtttataaatgttttccagtgaagtgttctgtttttctaagtataaaatcaccgtctgccaccgccacatttcaaattgcattcctctcttttttattcc

SEQ ID NO: 157159 - DNA, 201 bp, Homo sapiens; identical to SEQ ID NO: 29367

SEQ ID NO: 157160 - DNA, 201 bp, Homo sapiens
atcctatctattcatccttcttgtctatctatctatctatctatccatccatcgatctatctatatcatctatttccatatatatactatgtattttattkatataaataggagtcaatgaaatatatacatatttatatattttaatatatattaaatttattaacatatttatttaatttaataattaggagtcaatga

SEQ ID NO: 157161 - DNA, 201 bp, Homo sapiens
catccatccatccatccatccatccatccatccatccatccgtccatccatcctttatcctatctattcatccttcttgtctatctatctatctatctatccatccatcgatctatctatatcatctatttccatatatatactatgtattttattgatataaataggagtcaatgaaatatatacatatttatatatttt

SEQ ID NO: 157162 - DNA, 201 bp, Homo sapiens; identical to SEQ ID NO: 29354

SEQ ID NO: 157163 - DNA, 201 bp, Homo sapiens
aggagtgagtcctttcctaggacctgagaacttgggcctggaacccaagggagtaggttggaaaaggatggctgaccgggataaccagaagtgcctttctraaggcactttctgtgtgtcatagctgggctttgaaggatggggagggggaaagagacagtagacatgaggttgtggaagtagacaggggatagatttcag

SEQ ID NO: 157164 - DNA, 201 bp, Homo sapiens
tattcctaattattaaattataatgttattaatatgtttatttaatttaataattaggagtcaatgaaatgtatatatttccatatacatagaaatatgtwtttcatatatatatatactatgtattttgccctttgctatttacatgtatgcattttgtggcttatttttgccactcgacagtgtgtcttacagctgttt

SEQ ID NO: 157165 - DNA, 201 bp, Homo sapiens
cgggggtcttggagacaactgggagaccccacccaactgggtgaccccacccagcaagccttcttggtctcacctgcaggtctacgaccccttccgtttcraccaagagaacatcaaggagaggtcacctctggcttttattcccttctcggcagggcccaggtaaggatggcctgtgtctgaggcagagatggcatgatg

SEQ ID NO: 157166 - DNA, 201 bp, Homo sapiens
tcttcagctttgaaagcaattgtcaggagtgagtcctttcctaggacctgagaacttgggcctggaacccaagggagtaggttggaaaaggatggctgacygggataaccagaagtgcctttctgaaggcactttctgtgtgtcatagctgggctttgaaggatggggagggggaaagagacagtagacatgaggttgtgg

SEQ ID NO: 157167 - DNA, 201 bp, Homo sapiens
agtagacagagtgtcctaggtccctgtaaaggcattctgtagagtgttgagctatgctcaggtgttgcagaacatgttggaccatgtaggagatatgtcaytgtgtgctggggcatgctgtgttattgctctactctgtcgctgcagcctggtctggtctctccttcctccaccatcctcccttcttcctctacccttggc

SEQ ID NO: 157168 - DNA, 201 bp, Homo sapiens
tcatccatccatccatccatccatccatccatccatccatccgtccatccatcctttatcctatctattcatccttcttgtctatctatctatctatctatccatccatcgatctatctatatcatctatttccatatatatactatgtattttattgatataaataggagtcaatgaaatatatacatatttatatattt

SEQ ID NO: 157169 - DNA, 201 bp, Homo sapiens
aggcttctctgggatgtgaattcaagtaatagagtggagatttatgcctctgtcaaatgaaagaacttggacttgatccaaagggcactgggagccatggwacatgcttgaaaaagacaggtcagagataggtttgagagatgactctgtggaattcagctggcaggggactgctaagtttgaaatagtgaggagcctgag

SEQ ID NO: 157170 - DNA, 201 bp, Homo sapiens; identical to SEQ ID NO: 29341

SEQ ID NO: 157171 - DNA, 201 bp, Homo sapiens
ttcatccatccatccatccatccatccatccatccatccatccgtccatccatcctttatcctatctattcatccttcttgtctatctatctatctatctatccatccatcgatctatctatatcatctatttccatatatatactatgtattttattgatataaataggagtcaatgaaatatatacatatttatatatt

SEQ ID NO: 157172 - DNA, 201 bp, Homo sapiens
gatatcctttagggataagggagggtgctgcccttgaccactgtccttggttgccctgccaggggatgggctcctgctgagtggtggtgacaagtggagcygccaccgtcggatgttgacgcctgccttccatttcaacatcttgaagccttatatgaagattttcaacaagagtgtgaacatcatgcacgtgagtccctt

SEQ ID NO: 157173 - DNA, 201 bp, Homo sapiens
gttcatccatccatccatccatccatccatccatccatccatccgtccatccatcctttatcctatctattcatccttcttgtctatctatctatctatctatccatccatcgatctatctatatcatctatttccatatatatactatgtattttattgatataaataggagtcaatgaaatatatacatatttatatat

SEQ ID NO: 157174 - DNA, 201 bp, Homo sapiens
tatctatctatctatctatctatctatctatctatctatctatacatctgtccatccgttcatccatccatccatccatccatccatccatccatccatchgtccatccatcctttatcctatctattcatccttcttgtctatctatctatctatctatccatccatcgatctatctatatcatctatttccatatatat

SEQ ID NO: 157175 - DNA, 201 bp, Homo sapiens
ttgagacatcaatttgtcatctaactgtctgcttatctatctgtctgtctatctatctatctatctatctatctatctatctatctatctatctatctatctatctatacatctgtccatccgttcatccatccatccatccatccatccatccatccatccatccgtccatccatcctttatcctatctattcatccttc

SEQ ID NO: 157176 - DNA, 201 bp, Homo sapiens; identical to SEQ ID NO: 29355

SEQ ID NO: 157177 - DNA, 201 bp, Homo sapiens
cttgagacatcaatttgtcatctaactgtctgcttatctatctgtctgtctatctatctatctatctatctatctatctatctatctatctatctatctatctatctatacatctgtccatccgttcatccatccatccatccatccatccatccatccatccatccgtccatccatcctttatcctatctattcatcctt

SEQ ID NO: 157178 - DNA, 201 bp, Homo sapiens
tcttgagacatcaatttgtcatctaactgtctgcttatctatctgtctgtctatctatctatctatctatctatctatctatctatctatctatctatctatctatctatacatctgtccatccgttcatccatccatccatccatccatccatccatccatccatccgtccatccatcctttatcctatctattcatcct

SEQ ID NO: 157179 - DNA, 201 bp, Homo sapiens
attttgattatatatatttatggggtacactgtgatgttatgatgtacacaatgcagaatgattaaatccacctgatggtcatatccattacctcatatasttattattttagcagtgagaacatttgaaattttctcttttagccgttttggaaaacataatctattattattaactgtagtcaccatgcatataataga

SEQ ID NO: 157180 - DNA, 201 bp, Homo sapiens
ctcttgagacatcaatttgtcatctaactgtctgcttatctatctgtctgtctatctatctatctatctatctatctatctatctatctatctatctatctatctatctatacatctgtccatccgttcatccatccatccatccatccatccatccatccatccatccgtccatccatcctttatcctatctattcatcc

SEQ ID NO: 157181 - DNA, 201 bp, Homo sapiens
ccttgacattcccaccaccccacctaatatcctcgctttccctaaaggggtctcttgagacatcaatttgtcatctaactgtctgcttatctatctgtctrtctatctatctatctatctatctatctatctatctatctatctatctatctatctatctatacatctgtccatccgttcatccatccatccatccatcca

SEQ ID NO: 157182 - DNA, 201 bp, Homo sapiens
aagagctgggattacaggcatgcaacaccatgccaggctaatttttttttttagtagggacggggtttctccatgttggtcaggctggttgcgaactcccracctcaggtgacccacctgcctcggccttccaaagtgttgggattataggcgtgagccattacgcccagccaatacttaatttctaacctccaagtgaaa

SEQ ID NO: 157183 - DNA, 201 bp, Homo sapiens
gcaacctctgcctcccgggttcaagtgattctcctgcctcagcctcctgaagagctgggattacaggcatgcaacaccatgccaggctaatttttttttttagtagggacggggtttctccatgttggtcaggctggttgcgaactcccaacctcaggtgacccacctgcctcggccttccaaagtgttgggattataggc

SEQ ID NO: 157184 - DNA, 201 bp, Homo sapiens
tgcaagcacacatgggagtcctgtggacacttatcccctctttctgcccctcaagcctatgtgggtgcgtttggggtcccaggccaggttctaagcatgayggggccgggatgggggtcatgggcacagtcagatcccctcacttttgcccccagaaactgcatcgggcaggcgttcgccatggctgagatgaaggtggtc

SEQ ID NO: 157185 - DNA, 201 bp, Homo sapiens
ccctctttctgcccctcaagcctatgtgggtgcgtttggggtcccaggccaggttctaagcatgacggggccgggatgggggtcatgggcacagtcagatyccctcacttttgcccccagaaactgcatcgggcaggcgttcgccatggctgagatgaaggtggtcctggcgctcaccctgctgcacttccgcatcctgcc

SEQ ID NO: 157186 - DNA, 201 bp, Homo sapiens
ctctactctgtcgctgcagcctggtctggtctctccttcctccaccatcctcccttcttcctctacccttggccttcttcctgctatgctgggtgggatgmgtggaagtgcacacccctggctgggagcattcctccatacccaaagtccttctcttacccctctccatggccactgatggtcctcaatcatgtcagctgc

SEQ ID NO: 157187 - DNA, 201 bp, Homo sapiens
ctggtctctccttcctccaccatcctcccttcttcctctacccttggccttcttcctgctatgctgggtgggatgagtggaagtgcacacccctggctggsagcattcctccatacccaaagtccttctcttacccctctccatggccactgatggtcctcaatcatgtcagctgctgtcgcacccaaggatatgattttc

SEQ ID NO: 157188 - DNA, 201 bp, Homo sapiens
cttcctctacccttggccttcttcctgctatgctgggtgggatgagtggaagtgcacacccctggctgggagcattcctccatacccaaagtccttctctyacccctctccatggccactgatggtcctcaatcatgtcagctgctgtcgcacccaaggatatgattttctatggcttcctgaagccctggctgggtgagt

SEQ ID NO: 157189 - DNA, 201 bp, Homo sapiens; identical to SEQ ID NO: 29362

SEQ ID NO: 157190 - DNA, 201 bp, Homo sapiens
agccgctggtggggaccagccaggacgtgaaagggatgtaggaaccagcctcagggacatgtcctgaggccacactgctgtccacagacctccttccatgmggacttttccatgtggccatccccaggttgaaaccatttccaagacgagaaaacacatcctcttgagcagacagcttgccttctccctctgctttggtat

SEQ ID NO: 157191 - DNA, 201 bp, Homo sapiens
cacggacttcctgtattatctcactcctgatgggcagcgcttccgcagggcctgccacctggtgcacgacttcacagatgccgtcatccaggagcggcgcygcaccctccccactcagggtattgatgatttcctcaagaacaaggcaaagtccaagactttagacttcattgatgtgcttctgctgagcaaggtaggctt

SEQ ID NO: 157192 - DNA, 201 bp, Homo sapiens
cagctttgaaagcaattgtcaggagtgagtcctttcctaggacctgagaacttgggcctggaacccaagggagtaggttggaaaaggatggctgaccgggrtaaccagaagtgcctttctgaaggcactttctgtgtgtcatagctgggctttgaaggatggggagggggaaagagacagtagacatgaggttgtggaagt

SEQ ID NO: 157193 - DNA, 201 bp, Homo sapiens
gacagtctgcagaaatgtgtcttcagctttgaaagcaattgtcaggagtgagtcctttcctaggacctgagaacttgggcctggaacccaagggagtaggytggaaaaggatggctgaccgggataaccagaagtgcctttctgaaggcactttctgtgtgtcatagctgggctttgaaggatggggagggggaaagagac

SEQ ID NO: 157194 - DNA, 201 bp, Homo sapiens; identical to SEQ ID NO: 29366

SEQ ID NO: 157195 - DNA, 201 bp, Homo sapiens
ggagaaggtcataaaaagagaatggagagagaaggaaagcaagagagaaagaaagagagagggaagacagaaacagagagacgaatagagagggagaaackgagtcatgatgagatgatgaacctggagatggcagcagagcctgggtgtggaatacatggaaaaaaaagtcaagaacttcaattttaactcaagggcaat

SEQ ID NO: 157196 - DNA, 201 bp, Homo sapiens
taatttctccaaaccacttaaatcccacggggtgccatagagaggtttgaatagttgcctgcttatgcagtacggtgcatggaaggaaaggagcactaggsttagggaatctgctttcttttttttttttctggagtctcactctgtcactcaggctggagtgcagtggcatgatctctgctcactgcaagctccacctcc

SEQ ID NO: 157197 - DNA, 201 bp, Homo sapiens
ctcttaatagaagttgctggaaatcacagtgcaaagggagaagtgaagaattgggagttgggattttgtggtgtgcttaggatgtttttcttaattgcaarctgataagctagctttgttaatacttcatggattctgcaaggagatacgagagtcctgggtcagagacaaacagcaatttattactcacggcatagcaag

SEQ ID NO: 157198 - DNA, 201 bp, Homo sapiens
attgccttatctctcaatgttgttctctgcaaacacaattctgagaaacggcccaaacaactacagggtgtgtgtgtgtgtgtgtgtgtgtgtgtgtgtgkacatatatgtatatatatatgtgtgtgtatatatatatacacacacacatttgctttaagttctgggatacatgtgcagaacgtgcaggtttgttacgta

SEQ ID NO: 157199 - DNA, 201 bp, Homo sapiens
gaatctcttctggaaatacaccgatggacacatccagaaataatgttttaccagcatgttttatctgggcatctcttggctcggtcacgtggaattcatgrttaattcaggatgcctagaattaaccatcacaagggctgacggcctctgccttgttttcaggtcactcccacggaagagggcatgaagacattgacccag

SEQ ID NO: 157200 - DNA, 201 bp, Homo sapiens
cgtgagagagagagtttattacggaaattggaaaatgtgatgatggaggacaagaagtcccatgatatagcatctgcaagccagaaaccagggacactggwgttgtaaattcagtctgagtcccaaaaggcctgagaacctggagttctcatgtccaaggacaggagcagatggatgagcacatccaccctttcctctgcc

SEQ ID NO: 157201 - DNA, 201 bp, Homo sapiens
tcatgtttgagggtgagggtctcagtgtgggactacggtggggacaggggcctctccatcccaggaacgtagtgggtggaccctggatcacttaattctgsccatcctcctcctccctacattctcctgagggcctcagagtttgggtgctctcctccctctggtgctgaagcagcccagaaacccagttttgcttggctg

SEQ ID NO: 157202 - DNA, 201 bp, Homo sapiens
tagcagagagtgctgggagtagacagagtgtcctaggtccctgtaaaggcattctgtagagtgttgagctatgctcaggtgttgcagaacatgttggaccwtgtaggagatatgtcactgtgtgctggggcatgctgtgttattgctctactctgtcgctgcagcctggtctggtctctccttcctccaccatcctccctt

SEQ ID NO: 157203 - DNA, 201 bp, Homo sapiens
atatacatagaaatatatatttccatatatactatatatattcctaattattaaattataatgttattaatatgtttatttaatttaataattaggagtcratgaaatgtatatatttccatatacatagaaatatgtttttcatatatatatatactatgtattttgccctttgctatttacatgtatgcattttgtggc

SEQ ID NO: 157204 - DNA, 201 bp, Homo sapiens
ggggaggtgcattactcagggttctctttagaaactgaattgacaggatatcttcccgcttatatctcatgcatgtatgagacagagagagagagagagarcgtgagagagagagtttattacggaaattggaaaatgtgatgatggaggacaagaagtcccatgatatagcatctgcaagccagaaaccagggacactgg

SEQ ID NO: 157205 - DNA, 201 bp, Homo sapiens
tccgcagaccttggcctccgacttagacctgctctcccatttgggggacatggccttggtctgctcacttgtaaatggcaaaattgatgggcgtgtccatyggtgcagtggagggtgaataggacacactagcacagagcctggcctgcaggaggtgcttactgtagacagttaagagtcactcctctacgcctgggggct

SEQ ID NO: 157206 - DNA, 201 bp, Homo sapiens
aaatatatatttccatatatactatatatattcctaattattaaattataatgttattaatatgtttatttaatttaataattaggagtcaatgaaatgtrtatatttccatatacatagaaatatgtttttcatatatatatatactatgtattttgccctttgctatttacatgtatgcattttgtggcttatttttgc

SEQ ID NO: 157207 - DNA, 201 bp, Homo sapiens
agccaatacttaatttctaacctccaagtgaaattgccattgaaatatgctgtaacccaggttgccagttaatgctttactccaaaagtcctcattattcraaacaagaaaatatccataggtcattgactcttcccagcagggccaaataggaggtgaagaagccagcgggaagcctgtgggtggtgggctctgatggtg

SEQ ID NO: 157208 - DNA, 201 bp, Homo sapiens
agaaaatatccataggtcattgactcttcccagcagggccaaataggaggtgaagaagccagcgggaagcctgtgggtggtgggctctgatggtggtgacmaagagacatctaggagtgcatgatgggcttgggtttctggaaggaggatggatcttcagaaattatcttaggtttgactcaagagccttcagagctggtg

SEQ ID NO: 157209 - DNA, 201 bp, Homo sapiens
cggatcctgtgcccatgctgtgtcaccctgagctggctcctctgcacccagctggccctacgccaggttttggttggttgcccaggcttggaagacacacycagtccatggggattggctcgaccagcccagcccagcctcgcctcccacagccttccggaaatcaggggccagaggcaaagacctcctagcagaggggga

SEQ ID NO: 157210 - DNA, 201 bp, Homo sapiens
ggcttgtgtgcagggggagggagaaggtcataaaaagagaatggagagagaaggaaagcaagagagaaagaaagagagagggaagacagaaacagagagaygaatagagagggagaaacggagtcatgatgagatgatgaacctggagatggcagcagagcctgggtgtggaatacatggaaaaaaaagtcaagaacttca

SEQ ID NO: 157211 - DNA, 201 bp, Homo sapiens
tgatgagatgatgaacctggagatggcagcagagcctgggtgtggaatacatggaaaaaaaagtcaagaacttcaattttaactcaagggcaatgggaagrgacaggtagcaggagaatctttttagggctagtgtagagggcatactggagaggaccagttgtagaaggaagtcccagggaaggacattctgaggtctga

SEQ ID NO: 157212 - DNA, 201 bp, Homo sapiens
catccatattgtcaccaacgacaggattcttttcattttaaagactgagtaccattctattttgcatttatacatggaaaatgagtgttgacttccaaaarcaatgatgagaacagattcttcttggactcaatgagacactacagataagacagggtttaaccttgacattcccaccaccccacctaatatcctcgcttt

SEQ ID NO: 157213 - DNA, 201 bp, Homo sapiens
ccgtcggatgctgacgcctgccttccatttcaacatcctgaagccctatatgaagattttcaatgagagtgtgaacatcatgcacgtgagttatttgaagscaaggtcccacttgcagccttggggtgaaaggacaacagagagatctagtctggagttttggctctgctgggtgccattgggccattgctctttctcact

SEQ ID NO: 157214 - DNA, 201 bp, Homo sapiens
tatcttcatctttctttcatgtattcatcaatttccatctcagcgtctcctctctctattgccatctaccccctgttctggtgttctgggctgccctggarccctaagagacctcaacccaaggcccagtcctggaggaacccccaactttaaggagatggacctggatagagatatccccaacttcatgggatcaggaaa

SEQ ID NO: 157215 - DNA, 201 bp, Homo sapiens; identical to SEQ ID NO: 29399

SEQ ID NO: 157216 - DNA, 201 bp, Homo sapiens
attttcaatgagagtgtgaacatcatgcacgtgagttatttgaagccaaggtcccacttgcagccttggggtgaaaggacaacagagagatctagtctggmgttttggctctgctgggtgccattgggccattgctctttctcactgagccttggtttcctcatctgtaaaatggggataataatccctacttaaaagatg

SEQ ID NO: 157217 - DNA, 201 bp, Homo sapiens
agggtcatgacaacaatttcatagtagctgttgctgataagaaaccacctgaaaactcattggtttaaaccaataagtgtttatgtttgctaataagtctwtgggacagttggcaggttcttctgtatatggaagggaccactcatggtacatgagcagctgggggtcaggtaggcagccttgcaggtgttgactgaattc

SEQ ID NO: 157218 - DNA, 201 bp, Homo sapiens
gaggcatctcacagagatgggatgcagggagagaagagagcttggagaatcaatctcatgctgatccccaccctgtatctgtggggtcatctgttcctggwtactctgtttactgataggaggtagatcctggctgctggtgggaggtgatcctggggcttcaggtatattaaattgttgcctccctttctgcccttatcc

SEQ ID NO: 157219 - DNA, 201 bp, Homo sapiens
ctcatgttaggaattgtcatgtattttgtggccatgtcaggacatgtgaacacatgtcagggtcatgtctcatgtccaggtccatgtcagaagatgccatrtcagaagatgtcagagagtgctgggacagacagggtgtcctaggtccttgtgaagcattctgtagaatgctgagctgtgctcaggggttgcggaacatgt

SEQ ID NO: 157220 - DNA, 201 bp, Homo sapiens
tccgctatccccaagctcctgtgtgggccctgcagtactctggcctctcctttccttccctctcagctatcttcatctttctttcatgtattcatcaattyccatctcagcgtctcctctctctattgccatctaccccctgttctggtgttctgggctgccctggaaccctaagagacctcaacccaaggcccagtcctg

SEQ ID NO: 157221 - DNA, 201 bp, Homo sapiens
ggaggccacttggctgctggttttggttgggcctttctggactttacctctcagcccctttttacccatccctgagccctccctgctctacctccggcacygcccgtccctgcctctccactgtccctggaggtccctgggccgttctctgggcctcaggatctcaccgtccatcccgtctgccctgcaggatgtcccagc

SEQ ID NO: 157222 - DNA, 201 bp, Homo sapiens; identical to SEQ ID NO: 29377

SEQ ID NO: 157223 - DNA, 201 bp, Homo sapiens; identical to SEQ ID NO: 29378

SEQ ID NO: 157224 - DNA, 201 bp, Homo sapiens
ctcaggtaccatctggaacagctggtggggcagtgcatttgaggcctgcacttccgctatccccaagctcctgtgtgggccctgcagtactctggcctctsctttccttccctctcagctatcttcatctttctttcatgtattcatcaatttccatctcagcgtctcctctctctattgccatctaccccctgttctggt

SEQ ID NO: 157225 - DNA, 201 bp, Homo sapiens
ctttatccattcagttgatgggcacttaggttgattccatattttggctgttttgaatagtgctgcaataaatacggaagtatagatatctcttcaacagwtttattttctttctttgggatagaaatttcttctctttcttttcagtagtggaatttctgggttatatgttagttctacttttagtttcttgaggaacct

SEQ ID NO: 157226 - DNA, 201 bp, Homo sapiens; identical to SEQ ID NO: 29371

SEQ ID NO: 157227 - DNA, 201 bp, Homo sapiens
cgtctccagggggataagattctctagatttatcactctagaatgtgggcaaatctttgaagcaatacttaatctctaatttccaagggaaattgccattkaattctcctgtaactcaggttgccagtaactttttctcagaaacttttcattaaaatattcatgggtcattgagtcttcccagtaggaacccaagaggag

SEQ ID NO: 157228 - DNA, 201 bp, Homo sapiens
tgactttatgtgtgtgtgtctgtgtctatatctgtgttatgtctatgtttatgtgtatttgtgtgtctgtgtcagtttctaagtctatgactttgtctatrtgtgtttgtgtctgtgtctatgtctttgtctatgtgtaggtctattgtgacagatgcattaaacctctagatcagagcagcccatgtcttgctcacagca

SEQ ID NO: 157229 - DNA, 201 bp, Homo sapiens
cttctacagcttcctggagccctggctgggtgagtatctgcaggtgaacagggttgggaaaaacgttggggggccaggggagggagaggtccttgcccatkgcccttggctgccctgctaggggatgggctcctgctgagtgctggtgacaagtggagccgccaccgtcggatgctgacgcctgccttccatttcaacatc

SEQ ID NO: 157230 - DNA, 201 bp, Homo sapiens
caaaggacaagttcttctacagcttcctggagccctggctgggtgagtatctgcaggtgaacagggttgggaaaaacgttggggggccaggggagggagasgtccttgcccatggcccttggctgccctgctaggggatgggctcctgctgagtgctggtgacaagtggagccgccaccgtcggatgctgacgcctgcctt

SEQ ID NO: 157231 - DNA, 201 bp, Homo sapiens
tggggatatgggctgctggtgggtggggccctggcaggcagtcatccacatctttctccccacgtgcatcaagcctgtgctctttgctccaggtagacatygcactggccaagctttgcccacagctggggttgctgtgctgcctccagctgaacacgtgaccgatgtgcagacaggaggggctgtggtggagatgccatt

SEQ ID NO: 157232 - DNA, 201 bp, Homo sapiens; identical to SEQ ID NO: 146634

SEQ ID NO: 157233 - DNA, 201 bp, Homo sapiens
acatggggaaagaccttttctgtctgtgtaactgaaggactggagagtcctgcatggaggatgtgaggaggcagggggtgctcagcactgacaggaggatkagatgctgcttgaaattctcagggagagggcttcgacctcttccctgcagatccttctctctcacagcctaggagagcatgaattgggtcctgtgtgttt

SEQ ID NO: 157234 - DNA, 201 bp, Homo sapiens
gcttttcctatcaaggtggccttttcctcatgatgtcaacgatgagtcccagaagctcagttcttatgggaaaggccacctttcccctagagttcccagawatggcccatgatttacttctcctggcctggatcacaggaccaatttttcacccaatccctgtgtctctgattgcccagtcttggtaggcctgggtcttcc

SEQ ID NO: 157235 - DNA, 201 bp, Homo sapiens
acagtgattcaggctgggcctttctggactttaatcagtctctctctctctttcccattctaagtgcttactagggaactggaggccacttggctgctggwtttggttgggcctttctggactttacctctcagcccctttttacccatccctgagccctccctgctctacctccggcactgcccgtccctgcctctccac

SEQ ID NO: 157236 - DNA, 201 bp, Homo sapiens
tccaggtccatgtcagaagatgccatatcagaagatgtcagagagtgctgggacagacagggtgtcctaggtccttgtgaagcattctgtagaatgctgarctgtgctcaggggttgcggaacatgttggatcgtgtaggaggcatgtcaaggcatgctggaaccctgacatagctcctacacgccatgttaggcagtgtc

SEQ ID NO: 157237 - DNA, 201 bp, Homo sapiens
tgggatcaggaaagggccagagggagatggatcacagcccagggaagaacaaggtctctgctggggcaggctggaaggcttcctagaggaggagttactgsagctgtgtctggaacaatgagtaggaatgtttgaaaggagagtgcagggtgaggcaattggacatcgttagtattcaaggccccttgccaggcctagcat

SEQ ID NO: 157238 - DNA, 201 bp, Homo sapiens
ggcacgtaggtagatagataatagaatagatggatgcatggacacatggatgcacagatagcatggatggatggatggatggatggatggatggatggatrgatagatagacaaataataggacatatggatgcatggacacacggatgcacagataggatggatggatggatggatgatggatggatgggtagatagagt

SEQ ID NO: 157239 - DNA, 201 bp, Homo sapiens
ccttccaggaacagggtgggtagacccccacaaccttcccatcccccttcccccatcctccctgaggccctcaatgcatgggtgctgtctaccttcgggtrctgaagcagcccagagacccaagcctgccttgctgccccccaggccatgacaccacggccagtggtctctcctgggtcctgtaccatcttgcaaagcacc

SEQ ID NO: 157240 - DNA, 201 bp, Homo sapiens
ccaggatggggctcctgggtgcagtcagagttcccacctccctcccctaggaactgcatcgggcagacgttcgcgatggcggagatgaaggtggtcctggsgctcacgctgctgcgcttccgcgtcctgcctgaccacaccgagccccgcaggaagccggagctggtcctgcgcgcagagggcggactttggctgcgggtg

SEQ ID NO: 157241 - DNA, 201 bp, Homo sapiens
ctagccagggtgttgatgacttcctccaagccaaggccaaatccaagactttggacttcattgatgtactcctgctgagcaaggtgggcctctctgggatytgaattcaagaagtagaagggagcttcatgtgaaatgtcagatgaaagaatttgaacttgattaagagggcactagggagccatggaaggtgattgagga

SEQ ID NO: 157242 - DNA, 201 bp, Homo sapiens
actctccctagccagggtgttgatgacttcctccaagccaaggccaaatccaagactttggacttcattgatgtactcctgctgagcaaggtgggcctctytgggatctgaattcaagaagtagaagggagcttcatgtgaaatgtcagatgaaagaatttgaacttgattaagagggcactagggagccatggaaggtga

SEQ ID NO: 157243 - DNA, 201 bp, Homo sapiens
cctccagctgaacacgtgaccgatgtgcagacaggaggggctgtggtggagatgccattgcctccatcgcccctggacttccacctgtctaacctctgttsctgtttgctcatgtctggggcgtgtctctacaatggctgttatatggccaggtctgccttgtatatttacacctgggtcctggttacacctgaaatatgt

SEQ ID NO: 157244 - DNA, 201 bp, Homo sapiens; identical to SEQ ID NO: 29401

SEQ ID NO: 157245 - DNA, 201 bp, Homo sapiens
agacacctagaattaactatcacagaaggtaatgacccctgccttgcttgcaggtcaaccccacagaggagggcatgagagttctgactcagctggtggcyacctacccccagggctttaaggtctggatgggacccatctcccccctcctcagtttgtgccaccccgacatcatccggtctgtcatcaacgcctcaggta

SEQ ID NO: 157246 - DNA, 201 bp, Homo sapiens; identical to SEQ ID NO: 29403

SEQ ID NO: 157247 - DNA, 201 bp, Homo sapiens
cctctcctttccttccctctcagctatcttcatctttctttcatgtattcatcaatttccatctcagcgtctcctctctctattgccatctaccccctgtkctggtgttctgggctgccctggaaccctaagagacctcaacccaaggcccagtcctggaggaacccccaactttaaggagatggacctggatagagatat

SEQ ID NO: 157248 - DNA, 201 bp, Homo sapiens
gaaagataatctattgactttaaagtccagggagggtggccttcaggcatggctggatccaggtctcacacaaggtcactggaaatctgtctttctctctwggctttagctttctccatgtcgcttttcctatcaaggtggccttttcctcatgatgtcaacgatgagtcccagaagctcagttcttatgggaaaggccac

SEQ ID NO: 157249 - DNA, 201 bp, Homo sapiens
aactgctctaggtggggttgggtgtcccaggccaggttaccggcttgatggggccaggatggggctcctgggtgcagtcagagttcccacctccctccccwaggaactgcatcgggcagacgttcgcgatggcggagatgaaggtggtcctggcgctcacgctgctgcgcttccgcgtcctgcctgaccacaccgagcccc

SEQ ID NO: 157250 - DNA, 201 bp, Homo sapiens
ggggcccctcagtgaaggaggccttctcctgactgctcccttctctcccacaggcattatctgcctcatcagtgttttcggaacccatcacaacccagctrtgtggccggaccctgaggtgcggggcccctctctctgtttttgtccattccaaggctcctagaggagggggcagggttttgatcaggagtatccaacatc

SEQ ID NO: 157251 - DNA, 201 bp, Homo sapiens
catgttaggaattgtcatgtattttgtggccatgtcaggacatgtgaacacatgtcagggtcatgtctcatgtccaggtccatgtcagaagatgccatatsagaagatgtcagagagtgctgggacagacagggtgtcctaggtccttgtgaagcattctgtagaatgctgagctgtgctcaggggttgcggaacatgttg

SEQ ID NO: 157252 - DNA, 201 bp, Homo sapiens
taggaattgtcatgtattttgtggccatgtcaggacatgtgaacacatgtcagggtcatgtctcatgtccaggtccatgtcagaagatgccatatcagaakatgtcagagagtgctgggacagacagggtgtcctaggtccttgtgaagcattctgtagaatgctgagctgtgctcaggggttgcggaacatgttggatcg

SEQ ID NO: 157253 - DNA, 201 bp, Homo sapiens
ggtcttccagagctactgttttgggggcacaaagaagtttgttggttaaggattcaggccatgggtgcagacagacctagtcttaggcctcaggcttgccrtggtctgggactgtgggcaagtgactttattgttcagagcctcaggctcttcatctggaaaatgggatgaatgagagcccagggaacatggtgtgtggat

SEQ ID NO: 157254 - DNA, 201 bp, Homo sapiens
tgctccccaggtggggaggggaggaaaagctgtttttgttgattctgccactattgcctagtgggaataggagcagaggaccacaggcaggacttagtacmcatcctgactgtctggggaaaggttataggcccttaggacagaaagacctgggcttctgagagagttggtgatgatatgtgaggacagataacgccactt

SEQ ID NO: 157255 - DNA, 201 bp, Homo sapiens
accatcttgcaaagcacccagaataccaggagcgctgccggcaggaggtgcaagaacttctgaaggaccgtgagcctaaagagattgaatggtgagtgcargtgcttgtggcctcttcctgagaccttctcattggctctgctccccaggtggggaggggaggaaaagctgtttttgttgattctgccactattgcctagt

SEQ ID NO: 157256 - DNA, 201 bp, Homo sapiens
aaccttcccatcccccttcccccatcctccctgaggccctcaatgcatgggtgctgtctaccttcgggtgctgaagcagcccagagacccaagcctgcctkgctgccccccaggccatgacaccacggccagtggtctctcctgggtcctgtaccatcttgcaaagcacccagaataccaggagcgctgccggcaggaggt

SEQ ID NO: 157257 - DNA, 201 bp, Homo sapiens
taggtctcaggatggatggacttcctgaggggtacgaggcttagggagtgggggtgaaggggtgggctgggatctggggtggcagagaagcagaggaggcrtcttactcattcctctgcttattcatttctgtgaggtgcctacgcaagcccttctcacttccttgtcctcccactccaggcctgcattgaatccttttcc

SEQ ID NO: 157258 - DNA, 201 bp, Homo sapiens
atggagaggggcactgcccaaggcccacgcagctcctgggtgctggcctggaggatgggtggtttccgagtaactgaaaccaagcccctggcaacctcacagtgattcaggctgggcctttctggactttaatcagtctctctctctctttcccattctaagtgcttactagggaactggaggccacttggctgctggttt

SEQ ID NO: 157259 - DNA, 201 bp, Homo sapiens
gacccctttcgctttgacccagagaacatcaaggagaggtcacctctggcttttattcccttctcggcagggcccaggtaagggcggcctgtgtctgaggygggaacgggttgatgggtgcaggggtctgggcatgacagtggggaaaagggggacattgtagatggtccaagttccagctctctttccctcacctcctct

SEQ ID NO: 157260 - DNA, 201 bp, Homo sapiens
gatggagaggggcactgcccaaggcccacgcagctcctgggtgctggcctggaggatgggtggtttccgagtaactgaaaccaagcccctggcaacctcacagtgattcaggctgggcctttctggactttaatcagtctctctctctctttcccattctaagtgcttactagggaactggaggccacttggctgctggtt

SEQ ID NO: 157261 - DNA, 201 bp, Homo sapiens
cctttcgctttgacccagagaacatcaaggagaggtcacctctggcttttattcccttctcggcagggcccaggtaagggcggcctgtgtctgaggtgggracgggttgatgggtgcaggggtctgggcatgacagtggggaaaagggggacattgtagatggtccaagttccagctctctttccctcacctcctctggag

SEQ ID NO: 157262 - DNA, 201 bp, Homo sapiens
tttggacttcattgatgtactcctgctgagcaaggtgggcctctctgggatctgaattcaagaagtagaagggagcttcatgtgaaatgtcagatgaaagratttgaacttgattaagagggcactagggagccatggaaggtgattgaggaagggagggacaggtcagagataggttttagagatgactgtggagtgcac

SEQ ID NO: 157263 - DNA, 201 bp, Homo sapiens
ggcctgcacttccgctatccccaagctcctgtgtgggccctgcagtactctggcctctcctttccttccctctcagctatcttcatctttctttcatgtaytcatcaatttccatctcagcgtctcctctctctattgccatctaccccctgttctggtgttctgggctgccctggaaccctaagagacctcaacccaagg

SEQ ID NO: 157264 - DNA, 201 bp, Homo sapiens
cccagtaggaacccaagaggaggcaaggaagccagagaggaaggccatgaggtgagggctctggccatggtgaccaagaggggtctaggagtgcaagatgkacttggatttctggaaaaaggatgaatcttcagagactgtctcagattagactcaagagcccttagagctagtgtgactttttatgggggtgggggttgg

SEQ ID NO: 157265 - DNA, 201 bp, Homo sapiens
aaacgttggggggccaggggagggagaggtccttgcccatggcccttggctgccctgctaggggatgggctcctgctgagtgctggtgacaagtggagccrccaccgtcggatgctgacgcctgccttccatttcaacatcctgaagccctatatgaagattttcaatgagagtgtgaacatcatgcacgtgagttatttg

SEQ ID NO: 157266 - DNA, 201 bp, Homo sapiens
ttatattcttcttcttatctccctcttatcaatgagacctgttgccaaacccagataaaagttggccactcacttcacctttcagaagctttccttggcckttctcctccccgtgaccttgccctctgacttagaccgctctcctctttggggaatgtggtcttagtctgctcatttgcaaatggcaggattgatggatgt

SEQ ID NO: 157267 - DNA, 201 bp, Homo sapiens
tattcttcttcttatctccctcttatcaatgagacctgttgccaaacccagataaaagttggccactcacttcacctttcagaagctttccttggcctttmtcctccccgtgaccttgccctctgacttagaccgctctcctctttggggaatgtggtcttagtctgctcatttgcaaatggcaggattgatggatgtgtc

SEQ ID NO: 157268 - DNA, 201 bp, Homo sapiens
gatagatagatagatagatagatagatagatagctaataggatagatagatagatgcacagataggatggatagatggatggatggatggatggacaggcrcgtaggtagatagataatagaatagatggatgcatggacacatggatgcacagatagcatggatggatggatggatggatggatggatggatggatagat

SEQ ID NO: 157269 - DNA, 201 bp, Homo sapiens
ttttatggaagtggttcctttatttttttgctctttttctttggattctttaaaaatatttacttttaagaatgtgtattaaaattgattttttttttttragatgcagtctctatcgcccaggttggagtgcagtggtgtgatctcagctcactgcaacctccacctcccaggttcaagccattctcttgcctcagcctc

SEQ ID NO: 157270 - DNA, 201 bp, Homo sapiens
aattccctgaagtgcaattgctgaatcaaagaacatttgcactgtacaattttaattatcattgcaaatcctttcctattagctgagtttgatggcacaarttttcccataactttaccaatactactaatgtattattaaattttaaaatctatgccaatcttcatatttcttcttttgatggacattgttttaaataag

SEQ ID NO: 157271 - DNA, 201 bp, Homo sapiens
  misc_feature (1)...(201): n = A,T,C or G
tttaaagtccagggagggtggccttcaggcatggctggatccaggtctcacacaaggtcactggaaatctgtctttctctcttggctttagctttctccangtcgcttttcctatcaaggtggccttttcctcatgatgtcaacgatgagtcccagaagctcagttcttatgggaaaggccacctttcccctagagttccc

SEQ ID NO: 157272 - DNA, 201 bp, Homo sapiens
caaggtggccttttcctcatgatgtcaacgatgagtcccagaagctcagttcttatgggaaaggccacctttcccctagagttcccagaaatggcccatgrtttacttctcctggcctggatcacaggaccaatttttcacccaatccctgtgtctctgattgcccagtcttggtaggcctgggtcttccagagctactgt

SEQ ID NO: 157273 - DNA, 201 bp, Homo sapiens
tgggccctgcagtactctggcctctcctttccttccctctcagctatcttcatctttctttcatgtattcatcaatttccatctcagcgtctcctctctcyattgccatctaccccctgttctggtgttctgggctgccctggaaccctaagagacctcaacccaaggcccagtcctggaggaacccccaactttaaggag

SEQ ID NO: 157274 - DNA, 201 bp, Homo sapiens
tgctctttgctccaggtagacattgcactggccaagctttgcccacagctggggttgctgtgctgcctccagctgaacacgtgaccgatgtgcagacaggwggggctgtggtggagatgccattgcctccatcgcccctggacttccacctgtctaacctctgttgctgtttgctcatgtctggggcgtgtctctacaatg

SEQ ID NO: 157275 - DNA, 201 bp, Homo sapiens; identical to SEQ ID NO: 146636

SEQ ID NO: 157276 - DNA, 201 bp, Homo sapiens
caaggacatttggggcatgtgagggcctgtttggttcttgtctcaggtgctgtttgacactgccgttttctcctggtggtccaaacatctgggcgttgtgwgaggtctgggggttgtgtgaggtctgggacccagggtccctatgtgaactgtctgagacattatttgagtcttgtctgaggcatgtgttatagtatattt

SEQ ID NO: 157277 - DNA, 201 bp, Homo sapiens
agcttcctggagccctggctgggtgagtatctgcaggtgaacagggttgggaaaaacgttggggggccaggggagggagaggtccttgcccatggcccttkgctgccctgctaggggatgggctcctgctgagtgctggtgacaagtggagccgccaccgtcggatgctgacgcctgccttccatttcaacatcctgaagc

SEQ ID NO: 157278 - DNA, 201 bp, Homo sapiens
cggcctgtgtctgaggtgggaacgggttgatgggtgcaggggtctgggcatgacagtggggaaaagggggacattgtagatggtccaagttccagctctcyttccctcacctcctctggagtttataggaaaaggtccatagagtacggttgggttggtcctagaagggtctgtggtgtgctcagagccccctcctacccc

SEQ ID NO: 157279 - DNA, 201 bp, Homo sapiens
gtgctcagagccccctcctaccccaccttggtctaggctgggggttggagctcggctaggcttgcaggatatgcaagcccgcatggggatccaggcacggwtacccccttctctattcctcaaactgctctaggtggggttgggtgtcccaggccaggttaccggcttgatggggccaggatggggctcctgggtgcagtc

SEQ ID NO: 157280 - DNA, 201 bp, Homo sapiens
gttgtggcaaacaaaataagttttctttctttttttttttttaaggctgaatggtattccattgtatatacacaccacatggaaaatgagcattaaattayaaaaccagtgataagaacagattcttcttgcaccaaatgagatattacagataagactagctttttccttgacaatcctgccaccccacctaatcctttc

SEQ ID NO: 157281 - DNA, 201 bp, Homo sapiens
tcaatttccatctcagcgtctcctctctctattgccatctaccccctgttctggtgttctgggctgccctggaaccctaagagacctcaacccaaggcccwgtcctggaggaacccccaactttaaggagatggacctggatagagatatccccaacttcatgggatcaggaaagggccagagggagatggatcacagccc

SEQ ID NO: 157282 - DNA, 201 bp, Homo sapiens
aaagagaatgagagagacagagaaagagagagagagagattgagtgagaatggtagctttgtgagagatggtgtgctttgttctggagcataaacaaatcytcttcagtgagatgccatagtccttagccttacaacccaaacgtctccagggggataagattctctagatttatcactctagaatgtgggcaaatctttg

SEQ ID NO: 157283 - DNA, 201 bp, Homo sapiens
tggcagttggggttggagaggtgctcaagggagcaaggagcctgccccagctctgtccccttctctggctaggccaagtggcagctcctggcctcagaggdtagtgcctgtttggatatgtttgagcacatcagcctcatgaccttggacagtctacagaaatgtgtcttcagctttgacagccattgtcaggagtaagtt

SEQ ID NO: 157284 - DNA, 201 bp, Homo sapiens
tctaccttcgggtgctgaagcagcccagagacccaagcctgccttgctgccccccaggccatgacaccacggccagtggtctctcctgggtcctgtaccaycttgcaaagcacccagaataccaggagcgctgccggcaggaggtgcaagaacttctgaaggaccgtgagcctaaagagattgaatggtgagtgcaggtgc

SEQ ID NO: 157285 - DNA, 201 bp, Homo sapiens
ggatggatggacaggcacgtaggtagatagataatagaatagatggatgcatggacacatggatgcacagatagcatggatggatggatggatggatggakggatggatggatagatagatagacaaataataggacatatggatgcatggacacacggatgcacagataggatggatggatggatggatgatggatggat

SEQ ID NO: 157286 - DNA, 201 bp, Homo sapiens
gagaaattttccatgttaaggacatcagtgtcttgcattcatgacatgcccagaaagaatgctcaggactcaacgaaggactacctccccaaaaacagggatatttttgaaatcaatttataacaatgcagacggggaaatccaacatttattgatcacataccatatgccagaaacaatgccatgtgcccattccatgat

SEQ ID NO: 157287 - DNA, 201 bp, Homo sapiens
gatgcacagatagcatggatggatggatggatggatggatggatggatggatagatagatagacaaataataggacatatggatgcatggacacacggatscacagataggatggatggatggatggatgatggatggatgggtagatagagtagataggatggatagattatgtagacagatggagtagatatatatgat

SEQ ID NO: 157288 - DNA, 201 bp, Homo sapiens
ccggtctgtcatcaacgcctcaggtaccatctggaacagctggtggggcagtgcatttgaggcctgcacttccgctatccccaagctcctgtgtgggcccygcagtactctggcctctcctttccttccctctcagctatcttcatctttctttcatgtattcatcaatttccatctcagcgtctcctctctctattgcca

SEQ ID NO: 157289 - DNA, 201 bp, Homo sapiens
cttgggtccctttccttgacccctgtgcttcccatcgttggacgggcgaggctgagcagggggaatgggcagcatcctacagagaccatggctctgacctmaaaatgctgagtgactctgggctggtacccagctgtctctggttattgaagtctctttcagttgtgagtggtggaaacccaacctggtgtggtctaagca

SEQ ID NO: 157290 - DNA, 201 bp, Homo sapiens
tgcagacaggaggggctgtggtggagatgccattgcctccatcgcccctggacttccacctgtctaacctctgttgctgtttgctcatgtctggggcgtgwctctacaatggctgttatatggccaggtctgccttgtatatttacacctgggtcctggttacacctgaaatatgttatacctggttacatctggtatata

SEQ ID NO: 157291 - DNA, 201 bp, Homo sapiens
gaggtgcaagaacttctgaaggaccgtgagcctaaagagattgaatggtgagtgcaggtgcttgtggcctcttcctgagaccttctcattggctctgctcyccaggtggggaggggaggaaaagctgtttttgttgattctgccactattgcctagtgggaataggagcagaggaccacaggcaggacttagtacccatcc

SEQ ID NO: 157292 - DNA, 201 bp, Homo sapiens
catgtattttgtggccatgtcaggacatgtgaacacatgtcagggtcatgtctcatgtccaggtccatgtcagaagatgccatatcagaagatgtcagagrgtgctgggacagacagggtgtcctaggtccttgtgaagcattctgtagaatgctgagctgtgctcaggggttgcggaacatgttggatcgtgtaggaggc

SEQ ID NO: 157293 - DNA, 201 bp, Homo sapiens
ctatccctccctcagccctggcctctggtaaccatcattctgcttctatttcttttcttttctttctttcttttttttttcatttttgagatggagtctcrctctgtcacccaggctggagtgcagtggcacgatctcagcttactgcgacctctgcctcccaggttcaagtgattctcctgcctcagcctcctgagtagc

SEQ ID NO: 157294 - DNA, 201 bp, Homo sapiens
tgaccaacatctcacccttctctatccctccctcagccctggcctctggtaaccatcattctgcttctatttcttttcttttctttctttcttttttttttcatttttgagatggagtctcgctctgtcacccaggctggagtgcagtggcacgatctcagcttactgcgacctctgcctcccaggttcaagtgattctcc

SEQ ID NO: 157295 - DNA, 201 bp, Homo sapiens
ttctggttattaatcgcttgtcagatgagtaatttgagaatattttctgccattctgtaagttgattcttcactttgttgactgtttcctttgctgtgcaraagctttttaccttgatgtaatctcatttgtctattgcctgtgcttttgaggtcttaacacagaaaatctttgcctggacccatgtcctggagtataaaa

SEQ ID NO: 157296 - DNA, 201 bp, Homo sapiens
acttcctgtattatctcacccctgatgggcagcgtttccgcagggcctgccgcctggtgcacgacttcacagatgccgtcatccaggagcggcgccgcacyctccctagccagggtgttgatgacttcctccaagccaaggccaaatccaagactttggacttcattgatgtactcctgctgagcaaggtgggcctctctg

SEQ ID NO: 157297 - DNA, 201 bp, Homo sapiens
tattgacttcctgtattatctcacccctgatgggcagcgtttccgcagggcctgccgcctggtgcacgacttcacagatgccgtcatccaggagcggcgcygcactctccctagccagggtgttgatgacttcctccaagccaaggccaaatccaagactttggacttcattgatgtactcctgctgagcaaggtgggcct

SEQ ID NO: 157298 - DNA, 201 bp, Homo sapiens
accctagggtcttgagggacagtattagcatagtgctcaagagcaggactctgttgctagactgctatttttgagctgtgtgatcgagcctcagtttcccscatgtttaaactaggaacagtaatagtatatgttatggttgtgatgagggttggataagttagtaatagggtgtccccaaaatctcagtgcagctttaat

SEQ ID NO: 157299 - DNA, 201 bp, Homo sapiens
tccccttctttgtgctgagtgtgtcctgggactgtggatcatatcagaagtgctaagtgcttctgcctgtccctctctcccaggacccatggcctgccccrctggcgggtagcagtggctgtagggaggagggctgtggccctggacctgtcctctgaccattggcttcctctccaggaggctgtgaagcccgtgctgtgg

SEQ ID NO: 157300 - DNA, 201 bp, Homo sapiens
ttatttctctagaggccttcagtctttactcttgccgctttttctccagggtcttcaccggtttgtggcccgggaaaagataatgtctgtgctgagtgaayggggcctgttccggggcctccagaaccaccccatggtactgcccatctgcaggtaacctcattttaactcctttactaagggctaccccaaaagggaatg

SEQ ID NO: 157301 - DNA, 201 bp, Homo sapiens
actccctcctcctcttatagtttttctgtagctcaggggttgacaaactggcccatggtcctaatccagcttgcggcctttttttttgagacagagtctcsctctgtcaccaaggctggagggcagtggtgtgatcttggctcactgcaacctccacctcctgggttcaagcaattctcctgcctcagcctcctgagtagc

SEQ ID NO: 157302 - DNA, 201 bp, Homo sapiens; identical to SEQ ID NO: 29415

SEQ ID NO: 157303 - DNA, 201 bp, Homo sapiens; identical to SEQ ID NO: 29416

SEQ ID NO: 157304 - DNA, 201 bp, Homo sapiens; identical to SEQ ID NO: 29417

SEQ ID NO: 157305 - DNA, 201 bp, Homo sapiens
accacaaggccagagacgctgcctggagatgtggctgtggccgttcatccagacgactcgcgatacacagtaatacccagtgcgctcctgcactctggccygccccgccaatggccttctcttctcttgggttttaaatggtggctctttctctcttgcttctacttccttttcctgagacttctctcagtggttctgatt

SEQ ID NO: 157306 - DNA, 201 bp, Homo sapiens
aaggccagagacgctgcctggagatgtggctgtggccgttcatccagacgactcgcgatacacagtaatacccagtgcgctcctgcactctggcccgcccygccaatggccttctcttctcttgggttttaaatggtggctctttctctcttgcttctacttccttttcctgagacttctctcagtggttctgattggact

SEQ ID NO: 157307 - DNA, 201 bp, Homo sapiens
aggccagagacgctgcctggagatgtggctgtggccgttcatccagacgactcgcgatacacagtaatacccagtgcgctcctgcactctggcccgccccrccaatggccttctcttctcttgggttttaaatggtggctctttctctcttgcttctacttccttttcctgagacttctctcagtggttctgattggactc

SEQ ID NO: 157308 - DNA, 201 bp, Homo sapiens
tcacagtcctgccgatgctgagatgggggcccgacatggcttgagccccttgaatgtcattgcggaggatgggaccatgacctctctctgcggggactggytgcaggtggtaccaccctatgttaccccatcctttgggggctctctgtccccctaatcctcctcctagtttcttatttctctagaggccttcagtcttta

SEQ ID NO: 157309 - DNA, 201 bp, Homo sapiens
  misc_feature (1)...(201): n = A,T,C or G
tcccggcagctgtggtggggccatcagattccagcctacctggttgtagaggaccatgcgcaggtgggtaggaagaagcacccggagggccgagtgtggcncagagcacctagcccaggagtcagagctccgcagggccaagtcccgctcctgcctggtcatgtgcttcatgctcatagtcatgtaaccttctgcgcgatc

SEQ ID NO: 157310 - DNA, 201 bp, Homo sapiens
agctgtctccctcctccccgatggatgcctggatcctgagccgccttgccctggctgcccaggagtgtgagcggggcttcctcacccgagagctctcgctygtcactcatgccctgcaccacttctggcttcacaacctctgtgacgtctacctggtgagtgaggctgggggaggcttggtattcccatgcctgcttctaa

SEQ ID NO: 157311 - DNA, 201 bp, Homo sapiens
ctagaggccttcagtctttactcttgccgctttttctccagggtcttcaccggtttgtggcccgggaaaagataatgtctgtgctgagtgaacggggcctrttccggggcctccagaaccaccccatggtactgcccatctgcaggtaacctcattttaactcctttactaagggctaccccaaaagggaatgtatggagc

SEQ ID NO: 157312 - DNA, 201 bp, Homo sapiens
agaggaaggcaggctgagggaggagtgaggccagcaggtgtgacccttgtagaggcagggccttcgacctgggtcgtgaattgcccccttccatccccagktgctgcaggaaaagctgagaagcggaaatttggaccctgcagagctggccattgtggctgcagcacaggtgagtcatcgctgcctgccccccaccagctc

SEQ ID NO: 157313 - DNA, 201 bp, Homo sapiens
tggccccactgatgcccttcctggctgaagagctctggcagaggctgccccccaggcctggttgcccccctgcccccagcatctcggttgccccctacccyagcgcctgcagcttggtgagtcccaagcaccttggagtgggtctgtgggtgaatgggggggagcaccttctgaaggggtttgctgcagggggctcatctg

SEQ ID NO: 157314 - DNA, 201 bp, Homo sapiens
agtcccgctcctgcctggtcatgtgcttcatgctcatagtcatgtaaccttctgcgcgatcaaggctccctgaagtggcatttctttatctcacccctggrggaacctggccactctaagaccacatgaggacgtgaaaaccaagtgacatttacacctgtcagctgttcttcctcactctccccaaccccttcctacttt

SEQ ID NO: 157315 - DNA, 201 bp, Homo sapiens
  misc_feature (1)...(201): n = A,T,C or G
ggtgaggacgaagcacccactagagggacaaggtttgcagggtttgcaggagagaggaaggcaggctgagggaggagtgaggccagcaggtgtgacccttntagaggcagggccttcgacctgggtcgtgaattgcccccttccatccccaggtgctgcaggaaaagctgagaagcggaaatttggaccctgcagagctgg

SEQ ID NO: 157316 - DNA, 201 bp, Homo sapiens
tccacgttgctgattcctttttcctaattcacttcctaccctacccccaaaagtatggaggccagagatcccaaggcacctccaaggaaacccccctctgytgacccctccctgcccccaggtgcttcttcatcccatggttcgggacaggcagggccggaagatgagcaagtccctggggaatgtgctggacccaagaga

SEQ ID NO: 157317 - DNA, 201 bp, Homo sapiens
  misc_feature (1)...(201): n = A,T,C or G
gttctgggtgggccgcatggtcatgttggggacccagctcacagggcagctgcccttcagcaaggtaagagcccttcagtgccctgccgctttctgtgacnccagtgttccccaaaccttgtcctcccttctaacccctaatgtggtcctttccacgttgctgattcctttttcctaattcacttcctaccctacccccaa

SEQ ID NO: 157318 - DNA, 201 bp, Homo sapiens
tatttttagtagagacggggtttcaccatgttggtcaggttggtctcgaactcctgacctcgtgatctgcccgccttggcctcccaaagtgctgggattaygggcgtgagccactgcacctggcctctaaggtgtggtttttacggtaaatgttctgaagagctcagagaaagggaagacagatgagctggaattgtcagt

SEQ ID NO: 157319 - DNA, 201 bp, Homo sapiens; identical to SEQ ID NO: 29435

SEQ ID NO: 157320 - DNA, 201 bp, Homo sapiens
atagcggcggggcctcctggtgagcgcgcgccggggcggcctccgggaagtgggagacgctgcgggtcctgggcccaggccttgggatgggcgggaaggcytggccgcgccgggctgtgggcactgcaggaggcccctgtgcaggtggagatcgccgcggccctggcgggactccttgctggctcttgggcgcgctgatgc

SEQ ID NO: 157321 - DNA, 201 bp, Homo sapiens; identical to SEQ ID NO: 29437

SEQ ID NO: 157322 - DNA, 201 bp, Homo sapiens
acgcccagctaaattttttttgtatttttagtagagacaaggtttcaccatgttggccaggctggttttgaactcctgacctcaagtgatctgcctgcctyggcctcccaaaatgcttggattacaggcatgagccaccatgcccagccctgccctgctaatttttaaaattgttctgtagagatagggttttgccatgtt

SEQ ID NO: 157323 - DNA, 201 bp, Homo sapiens
taagggctaccccaaaagggaatgtatggagcttaagggtgacaataggatgggctctgcacccctccgttagaatacgagctccgtgtcggttttattcrctattgtatcctcagtaccaagggcctggcatggcatggggtcttgtgcccctgggagaagtcacagggccggaagagcagtggactcaccctgtctctc

SEQ ID NO: 157324 - DNA, 201 bp, Homo sapiens
gtgtcggggtgagcagagggcagcgggcacctgtgcaggggcagggcaggggcaggacttctggtgctgctgccacctacatgcagactacctcgattctycccttccagcgggcgacttgcacctgtcagtctctgaggtccagagctgccgacatttctgcaacaagatctggaatgctcttcgctttatcctcaatgc

SEQ ID NO: 157325 - DNA, 201 bp, Homo sapiens
ttggcctcctattttctgttgccttccccgtggatggagagcctggtgagcatagtactctgcagggtcacccgtttacctccatttttcctgttttctgragcccatgttgggctgctaggaacccatcagtccatctctcacatgtaccttggtagtgttcacctcagcgtgggcacttacccagggtcttctggggga

SEQ ID NO: 157326 - DNA, 201 bp, Homo sapiens
tcacgggatccctgagtgtgggacagatgccctgagattcacactctgctcccatggagttcagggtaagcctgggcgaggggtgtcggggtgagcagagrgcagcgggcacctgtgcaggggcagggcaggggcaggacttctggtgctgctgccacctacatgcagactacctcgattctccccttccagcgggcgact

SEQ ID NO: 157327 - DNA, 201 bp, Homo sapiens
ccttccatccccaggtgctgcaggaaaagctgagaagcggaaatttggaccctgcagagctggccattgtggctgcagcacaggtgagtcatcgctgcctkccccccaccagctctagctcaccacctctggcttcctctgcaacccaggtcctggccctgcagccacaaaggcatctgccacccttcttcttcctctggt

SEQ ID NO: 157328 - DNA, 201 bp, Homo sapiens
atgtggtcctttccacgttgctgattcctttttcctaattcacttcctaccctacccccaaaagtatggaggccagagatcccaaggcacctccaaggaarcccccctctgttgacccctccctgcccccaggtgcttcttcatcccatggttcgggacaggcagggccggaagatgagcaagtccctggggaatgtgctg

SEQ ID NO: 157329 - DNA, 201 bp, Homo sapiens
gcagtggtgtgatcttggctcactgcaacctccacctcctgggttcaagcaattctcctgcctcagcctcctgagtagctgggagcgtggcaccatgccckgcacgtgccaccacacccagctaattttttgtatttttacaaaaattagtaattaattttttttaagtaatgtaatttttaagtaatgttatttagtaga

SEQ ID NO: 157330 - DNA, 201 bp, Homo sapiens
gcctggttgcccccctgcccccagcatctcggttgccccctaccccagcgcctgcagcttggtgagtcccaagcaccttggagtgggtctgtgggtgaatsggggggagcaccttctgaaggggtttgctgcagggggctcatctgcaggaatggttcgtactttactgtggagccctggggaagatggattgttcctgca

SEQ ID NO: 157331 - DNA, 201 bp, Homo sapiens
aattgctacacaagtatgtcttttgttacctgttccttttcttgggcaaaagcaatttcttcccccaaagcaacctgactctgttcatttgccctgaatcyaactgcaggctgtggtggagaaacaactgtggaaggaacggggagtgaggagacatgagctgagccgggaggccttccttagggaggtgtggcagtggaa

SEQ ID NO: 157332 - DNA, 201 bp, Homo sapiens
tcctttttgttttccaaataccctactcacctctctgcttctgttccagggctcaggaggaaagtacagggctgctgagcggcctccggatctggcacacmcagctgctcccaggcgggctccagggcctcatcctcaaccccattttccgccagaacctccgcattgcccttctgggtgggtatgtcacttctctctctt

SEQ ID NO: 157333 - DNA, 201 bp, Homo sapiens
gtcctatctgtggaggtgcggccgtgcaggaagggcaacattgtctaaagtcccctttctctccaggctgtggagtcgggggccctggagctcagtccctycttccaccagaagaactggcagcactggttttcccatattgggtaagggtagggtaaggggagctcttgtggagatggggaggggggactgactggttat

SEQ ID NO: 157334 - DNA, 201 bp, Homo sapiens
gacggcccgagactcggggtgcgcgaggaggatcgacagagtggtgaggggacctaggagggcgggagtggcagaggtatgagagagagagaggtgagtgrgaggcgaagagtgagaggaaggcagggagaagctaggagatcggaaggcgtgggtcagggtgaatgacgtgaagtagacttgggaagggaaaagaggtgg

SEQ ID NO: 157335 - DNA, 201 bp, Homo sapiens
gtgcagtggtgtaatcttgactcacggcagcctctacctcctgggttcaagtgattctcctgcctcagcctcctgagtagctgggattacaggcacccacyacgacgccaggctaattttttgtatttttagtagagatggggtttcgccatgttggccaggctggtcttgaactcctgacctcaagtgatccgcccatct

SEQ ID NO: 157336 - DNA, 201 bp, Homo sapiens
ggacgtgaaaaccaagtgacatttacacctgtcagctgttcttcctcactctccccaaccccttcctacttttgcagggagaagaggactgttgggtggtygggcggtcagaggctgaggccagagaggtagcagcggaactgacagggaggccaggggcagagctgaccctggagaggggtgagtgcctgagctggggag

SEQ ID NO: 157337 - DNA, 201 bp, Homo sapiens
ggagagggtggggccaaagccagctgctgcgcatgcgccggccggggccccgcccccatgcgccgcgcggctccagggccacgttccagggtcgggtttgrtggattcctcagtccctgccgccgcggggcgccctgggatagcggcggggcctcctggtgagcgcgcgccggggcggcctccgggaagtgggagacgctg

SEQ ID NO: 157338 - DNA, 201 bp, Homo sapiens
ctgggatcgagagtgttttaccatggatgttgtgagtgttctgtgccttggtccctgtgagtgatgggcgatgtttagggatctgtgtggggcagggaggmagcaatgcctgggtccctgagcagggtgatgggctgagaagtggctcttagaggtggacactcaggtcattccagggctcctcagtggctgtgactgaag

SEQ ID NO: 157339 - DNA, 201 bp, Homo sapiens
attcccacctttcaattcccatggaattaccctcattcttctgggtctgttatctcatgccatctctgtgaagcatccttggatttcccacaatatggctrtccctcctctcttcctatagaatcttttgcctcttttaatatcttagaaaaccccatactgggtttgtaagtccatttctattagcctctagaggctaga

SEQ ID NO: 157340 - DNA, 201 bp, Homo sapiens
gggaggtcctttctgagttttaaaatgacctcagaggccactcgtcctatctgtggaggtgcggccgtgcaggaagggcaacattgtctaaagtccccttyctctccaggctgtggagtcgggggccctggagctcagtccctccttccaccagaagaactggcagcactggttttcccatattgggtaagggtagggtaa

SEQ ID NO: 157341 - DNA, 201 bp, Homo sapiens
cagaggaaggtatgagcgcctagataagtggcttccagggaagaaacagggtggtgtgttgcctttgcctttaaaaaggagtggggtcttggggcagtagyaggaagcagttgccagaactgaatacttgggtctctcgggggagagaagttgggggttgaggttctgcatcttgggagggatctgatatttcaggcagga

SEQ ID NO: 157342 - DNA, 201 bp, Homo sapiens
atgggctctgcacccctccgttagaatacgagctccgtgtcggttttattcgctattgtatcctcagtaccaagggcctggcatggcatggggtcttgtgsccctgggagaagtcacagggccggaagagcagtggactcaccctgtctctctttcagccgttctggggatgtgatagaatacctgctgaagaaccagtgg

SEQ ID NO: 157343 - DNA, 201 bp, Homo sapiens
atgcagatacaatgcagcttctgatactaacctttgacctctgtccctgtacagggagctcccatccttggctaagaactgggtgatgcggatgctctttytggagcagcctttgccacaggctgctgtagctctgtgggtaaagaaggaattcagcaagtaagtctcagccagatacaaatttctcaacagctacatttc

SEQ ID NO: 157344 - DNA, 201 bp, Homo sapiens
gtttgagaggtaattgagggcagagatgcagatacaatgcagcttctgatactaacctttgacctctgtccctgtacagggagctcccatccttggctaaraactgggtgatgcggatgctctttctggagcagcctttgccacaggctgctgtagctctgtgggtaaagaaggaattcagcaagtaagtctcagccagat

SEQ ID NO: 157345 - DNA, 201 bp, Homo sapiens
gacaacatggtgttgagatcttgcatggtggagggtgacgctggtccctgaagggagatggaggaggaggcagagctgggaacaaagggttaaagggcgcsatgtaagagagctctccattcccaccacggagacatccagaccccagcagaggcccaaactgactcacaaacacacagccccatctttccccttccaaag

SEQ ID NO: 157346 - DNA, 201 bp, Homo sapiens
ctggtaaagttgtgctggagtgagatgagatgtttgagaggtaattgagggcagagatgcagatacaatgcagcttctgatactaacctttgacctctgtycctgtacagggagctcccatccttggctaagaactgggtgatgcggatgctctttctggagcagcctttgccacaggctgctgtagctctgtgggtaaag

SEQ ID NO: 157347 - DNA, 201 bp, Homo sapiens
gagcatagtactctgcagggtcacccgtttacctccatttttcctgttttctgaagcccatgttgggctgctaggaacccatcagtccatctctcacatgwaccttggtagtgttcacctcagcgtgggcacttacccagggtcttctgggggatgtacaaaaagtgcatgtggtcactgccctttgagagtgtggtgtga

SEQ ID NO: 157348 - DNA, 201 bp, Homo sapiens
tgaaggtgactccagctcacagtcctgccgatgctgagatgggggcccgacatggcttgagccccttgaatgtcattgcggaggatgggaccatgacctcyctctgcggggactggctgcaggtggtaccaccctatgttaccccatcctttgggggctctctgtccccctaatcctcctcctagtttcttatttctctag

SEQ ID NO: 157349 - DNA, 201 bp, Homo sapiens
gttccttgagatagtggattttctgtggtgctgaggacagatctcattgccctaaggagatggggtggatgggtcgagaagagagccagcagggttggtactgagtctcccaggagcccctttgccaattctgggtcccccccattgccaggagcactggcgccagccagagctggagcggcgcttctcccgggtccaaga

SEQ ID NO: 157350 - DNA, 201 bp, Homo sapiens
cagtgacacggctcaagtctacatggagctgcaggtgaccagaggggatggggagggttagggcaggcttgggaagcatgctgggaggaagggaggggctgggctctataaagtaggggaagggaccttctaatggaggatggaggcctggcagcaggcggatgtctgagccttttctccctgttcttccccagggcctgg

SEQ ID NO: 157351 - DNA, 201 bp, Homo sapiens
agatgccttgtaggcctgtgacactggtgttgagggagacattgtccatccctggaaccctctgctcaacagggggacagtcagagacttgagcatccaayccccacttcctgccagctctgtgctcagggacccacagagtcaagcaagttattgaattcagcataccgaattttatttattgccactcaggagggtggg

SEQ ID NO: 157352 - DNA, 201 bp, Homo sapiens
agaagcgcctgcgagagaagcaggcgactctggaggctgagatagcaggggagagcaaggttaggggtcagacagcttgtccttgggtttctgagacttgrgaggggctggaggagaccggctgaaatgcagtctggggtatactggatcccagcctcttctgctttctcttctcagtcacctgcagaatccattaaggcc

SEQ ID NO: 157353 - DNA, 201 bp, Homo sapiens
ccaggtttcactccgtttctacacagtcggagccccatggatctcccatctcccggaggaaccgtgaagccaaacagaagcgcctgcgagagaagcaggckactctggaggctgagatagcaggggagagcaaggttaggggtcagacagcttgtccttgggtttctgagacttgagaggggctggaggagaccggctgaa

SEQ ID NO: 157354 - DNA, 201 bp, Homo sapiens; identical to SEQ ID NO: 29458

SEQ ID NO: 157355 - DNA, 201 bp, Homo sapiens
gagtggacaagtggggatagtagtctttctctgcatatcaccatcattgtcccggtctttgtctctagtactgaacctggagagccgccctgcattacttscgctggcttccagttcctgttgctggacaccccggctcagctctggtactttatgttgcagtatttgcagacagcccaggtgaggaggcagggccactta

SEQ ID NO: 157356 - DNA, 201 bp, Homo sapiens
ttgagggagtgagtgcgggtcctacagacagggaaatggagagggaagcggggaccagggaggcgtccctcctgcaggtgtctgggcccccacccatgccygggcctcccaaggatctttagagattaattattaactgcagctaattttcatcattcttgacaccgaagggctcaggaatgtgggcccaaaagggagggg

SEQ ID NO: 157357 - DNA, 201 bp, Homo sapiens
gctctgacttcctcagagatggaagctctggagcctgttaacatttggtggagtttctaagccttatgtgtgtggatattatatatgcattagaatattcktgtgtgtgtgtgtgtgtgtgtatttttatatatatatatatattttctttctctttacttaccccaatttctcttgtctaaatctcaccttcttccactc

SEQ ID NO: 157358 - DNA, 201 bp, Homo sapiens
ggaagctctggagcctgttaacatttggtggagtttctaagccttatgtgtgtggatattatatatgcattagaatattcgtgtgtgtgtgtgtgtgtgtrtatttttatatatatatatatattttctttctctttacttaccccaatttctcttgtctaaatctcaccttcttccactcgcccattcccacctttcaat

SEQ ID NO: 157359 - DNA, 201 bp, Homo sapiens
tgcaggaatggttcgtactttactgtggagccctggggaagatggattgttcctgcagggttgctgcgatgaccctagggtcttgagggacagtattagcrtagtgctcaagagcaggactctgttgctagactgctatttttgagctgtgtgatcgagcctcagtttcccgcatgtttaaactaggaacagtaatagtat

SEQ ID NO: 157360 - DNA, 201 bp, Homo sapiens
cgagccacgtaccagctcaccaaagcccggccccgaggtgaggcaaggcgggtcctgggctcggatccctgcaggaaaagggggctggtggggaaaagagsagagcctgaagggccaacccccccgttaggaggtgcagggtaggaagggaggcaggagctgaggccttgcccctgacagtttctttctttccagtgctgc

SEQ ID NO: 157361 - DNA, 201 bp, Homo sapiens
cccggccccgaggtgaggcaaggcgggtcctgggctcggatccctgcaggaaaagggggctggtggggaaaagagcagagcctgaagggccaacccccccrttaggaggtgcagggtaggaagggaggcaggagctgaggccttgcccctgacagtttctttctttccagtgctgctgcagagctcagagcctggggacca

SEQ ID NO: 157362 - DNA, 201 bp, Homo sapiens
gcagagctcagagcctggggaccagggcctcttcgaggccttcttggagcccctgggcaccctgggctactgtggggctgtgggcctgttacccccaggcrcagcagctccctccggctgggcccaggctccactcagtgacacggctcaagtctacatggagctgcaggtgaccagaggggatggggagggttagggcag

SEQ ID NO: 157363 - DNA, 201 bp, Homo sapiens
ggcccagcaagggctggctcatatccttactcaagcccagaatcttggcaagaggcttgggaggtcctttctgagttttaaaatgacctcagaggccactygtcctatctgtggaggtgcggccgtgcaggaagggcaacattgtctaaagtcccctttctctccaggctgtggagtcgggggccctggagctcagtccct

SEQ ID NO: 157364 - DNA, 201 bp, Homo sapiens
  misc_feature (1)...(201): n = A,T,C or G
cctcacagccaggaccccatcagaaggggaggcagggactcagaggcaacaaaaggtaaggctgagggaggcccccagaaggctccacccctgagggaatntgggccaggaggggcctcattcctggatcctcacctccttttctcctcgtccagctttcttccctccagctggaattgtcaaaactggacaaggcagcct

SEQ ID NO: 157365 - DNA, 201 bp, Homo sapiens
accattcactgtgcttttggggaaaatagaaggaagtcccctctcttccactctgtgtcccacccctcccttgtgtctccaggtttgagggagtgagtgckggtcctacagacagggaaatggagagggaagcggggaccagggaggcgtccctcctgcaggtgtctgggcccccacccatgcccgggcctcccaaggatc

SEQ ID NO: 157366 - DNA, 201 bp, Homo sapiens
ctgagccttttctccctgttcttccccagggcctggtggacccgcagatccagctacctctgttagccgcccgaaggtacaagttgcagaagcagcttgayagcctcacagccaggaccccatcagaaggggaggcagggactcagaggcaacaaaaggtaaggctgagggaggcccccagaaggctccacccctgaggga

SEQ ID NO: 157367 - DNA, 201 bp, Homo sapiens
ggctgcgtgctgagagaggcctgggagggactagcagcggtctttagaccaggggttctcacgctgtcctacgtccaaagcacctggagggcttgttgacbgtggatcccccccgctccactgccaccccagagtggctcctttagcaggttggggtgggggtgggtggtgtaatgaatattcatttcttgtcccaagtgg

SEQ ID NO: 157368 - DNA, 201 bp, Homo sapiens
atagtcatgtaaccttctgcgcgatcaaggctccctgaagtggcatttctttatctcacccctggaggaacctggccactctaagaccacatgaggacgtraaaaccaagtgacatttacacctgtcagctgttcttcctcactctccccaaccccttcctacttttgcagggagaagaggactgttgggtggttgggcgg

SEQ ID NO: 157369 - DNA, 201 bp, Homo sapiens
acagtcggagccccatggatctcccatctcccggaggaaccgtgaagccaaacagaagcgcctgcgagagaagcaggcgactctggaggctgagatagcargggagagcaaggttaggggtcagacagcttgtccttgggtttctgagacttgagaggggctggaggagaccggctgaaatgcagtctggggtatactgga

SEQ ID NO: 157370 - DNA, 201 bp, Homo sapiens
ctcatagtcatgtaaccttctgcgcgatcaaggctccctgaagtggcatttctttatctcacccctggaggaacctggccactctaagaccacatgaggaygtgaaaaccaagtgacatttacacctgtcagctgttcttcctcactctccccaaccccttcctacttttgcagggagaagaggactgttgggtggttggg

SEQ ID NO: 157371 - DNA, 201 bp, Homo sapiens
agatggattgcagggaggctgggcagatggatgagtggcagagtgaagcctgggcatgagccttgcagaaaggctgccctctgacccagctttctcggtgyctccaggtggagaaccggcccctgcctggccacacacagcttcgactgcctggctgccccacccccgtgtcttttggcctcctattttctgttgccttcc

SEQ ID NO: 157372 - DNA, 201 bp, Homo sapiens; identical to SEQ ID NO: 29430

SEQ ID NO: 157373 - DNA, 201 bp, Homo sapiens; identical to SEQ ID NO: 29432

SEQ ID NO: 157374 - DNA, 201 bp, Homo sapiens
ggcgctgtctgtcgataccatgcactctagctctcaaggaggaaaggttttgtggaagggaatagagacttggaataacagacctgtgctaattagagacrggaaagatggaacaaggggagtgacccttctccacccccatatcctaatgtgctctctctctatccagaacagatctcggcccctttccaaacactcctg

SEQ ID NO: 157375 - DNA, 201 bp, Homo sapiens
aggggcctcattcctggatcctcacctccttttctcctcgtccagctttcttccctccagctggaattgtcaaaactggacaaggcagcctctcacctccrgcagctgatggatgagcctccagccccagggagcccggagctctaactcatcatccccatcagttttcctccctctcagacctgtctttgaggacaaaca

SEQ ID NO: 157376 - DNA, 201 bp, Homo sapiens
ctgagtttctgagccctatctctcatgtgtcagtggtcaccgccgaatccagacactccggccctgttccggaagagccctgatatccgtggctccatggygctgtctgtcgataccatgcactctagctctcaaggaggaaaggttttgtggaagggaatagagacttggaataacagacctgtgctaattagagacagg

SEQ ID NO: 157377 - DNA, 201 bp, Homo sapiens
ccaggccttgggatgggcgggaaggcctggccgcgccgggctgtgggcactgcaggaggcccctgtgcaggtggagatcgccgcggccctggcgggactcyttgctggctcttgggcgcgctgatgcccatcatctccctgagtttctgagccctatctctcatgtgtcagtggtcaccgccgaatccagacactccggcc

SEQ ID NO: 157378 - DNA, 201 bp, Homo sapiens
attctgggtcccccccattgccaggagcactggcgccagccagagctggagcggcgcttctcccgggtccaagaggtcgtgcaggtgctaagggctctccragccacgtaccagctcaccaaagcccggccccgaggtgaggcaaggcgggtcctgggctcggatccctgcaggaaaagggggctggtggggaaaagagca

SEQ ID NO: 157379 - DNA, 201 bp, Homo sapiens; identical to SEQ ID NO: 29462

SEQ ID NO: 157380 - DNA, 201 bp, Homo sapiens
ccactccccaaatgtccaggctcctgacccctcctttgggatgtcattgtgcccactgtgacgtgggtgtcttgctggctagctcccaaaggggccgccakatcctgtgctgggcctcccaactggtgcatggacaggctgaggaagcacaggccgggcagagccctggccaagaggggcgtcttgcgcccacactcactt

SEQ ID NO: 157381 - DNA, 201 bp, Homo sapiens
ttgaagttgctttaagagtccaggttaaggttttgttgctctggggtgggagagggaagcagagagagtcattcctactgtgagtttcctatccaaggaarggggccaggagggatacctgggaaaggagagctgtgtgtcaccctttggtcacagagggtgatggacatctccctgaaaccactgggtggccatggctcc

SEQ ID NO: 157382 - DNA, 201 bp, Homo sapiens
ggccccccaagcttccttatgggacacccagacctccgtcggtgcactctgcactcagccctgcccctcccccagtctaccctcccgaccccattcccgtytcctttcctcccccatcgcacctgcctcgtccccacctattctctggcaggtttcctgacccaccccgcctcctcccaccccatccccgtctctacccag

SEQ ID NO: 157383 - DNA, 201 bp, Homo sapiens
cgcggggcgggccggacaatgagagtgtccgcctcctgagccaataaagctgtactggttttgaatcgcggcgcgtttcccgccgctggggtcaggggtcraggttcgggtcgtggggcggagggaagagcgggcgggcgggaggcgccggcgccagacgcggagggaaggagctacgagtagccgccgagaggccgcgga

SEQ ID NO: 157384 - DNA, 201 bp, Homo sapiens
gggtttgtggtgtctaaggggtgtggttgggtgtgtgtggtgtctgggggtgttggggtgtgtggtgtctgggggtgttggggtgtgtggtgtctgggggkgttggggtgtgtgttgtctgggggtgttggggtgtgtggtgttggggggggtgtgtggtgtctgggggggtttggtgtctgagggggtgcggtatcgcgg

SEQ ID NO: 157385 - DNA, 201 bp, Homo sapiens
taaggggtgtggttgggtgtgtgtggtgtctgggggtgttggggtgtgtggtgtctgggggtgttggggtgtgtggtgtctgggggtgttggggtgtgtgktgtctgggggtgttggggtgtgtggtgttggggggggtgtgtggtgtctgggggggtttggtgtctgagggggtgcggtatcgcggtgggggtgtgtgtg

SEQ ID NO: 157386 - DNA, 201 bp, Homo sapiens
tgggggtgttggggtgtgtggtgtctgggggtgttggggtgtgtgttgtctgggggtgttggggtgtgtggtgttggggggggtgtgtggtgtctgggggkgtttggtgtctgagggggtgcggtatcgcggtgggggtgtgtgtgagagagattgggggtgttcgggcagtgtaagagcagatgtgtgaggtgcccaggc

SEQ ID NO: 157387 - DNA, 201 bp, Homo sapiens
ttttgtggggctgcagaccaaagcggcccaggaagcgccggacgtcgctgaagctggcgtggcgaggcacgttctgcagctccagtttaaagatctcagargtaaacaagtcatccctgatgtagctgtagagcccgggctgaggccccggccctgtagccgccccagcgccctctttctccacctcctccagggctgccg

SEQ ID NO: 157388 - DNA, 201 bp, Homo sapiens
agaatcaaggggatcagggttgggcttgagtgcagccctgggatacagctggggcctgctttgccagctctgcttctctgcatttctggaggtgggggtcygtgtgccaagtgatcttgaacacagctcaggagctcctcgtggagatggccttacggtcagggaacaggtgcccattcctatttaggatggtcctggttt

SEQ ID NO: 157389 - DNA, 201 bp, Homo sapiens
ccttatgggacacccagacctccgtcggtgcactctgcactcagccctgcccctcccccagtctaccctcccgaccccattcccgtctcctttcctccccyatcgcacctgcctcgtccccacctattctctggcaggtttcctgacccaccccgcctcctcccaccccatccccgtctctacccagcgtctccccgcact

SEQ ID NO: 157390 - DNA, 201 bp, Homo sapiens
cagggccgatgtcaggtggaccagtcctttcttaggtcagcaattaccatgaaatgggtcttctgtgaatcctgactcttcagacccggcagggcatgtcycttccactgctcacagctcttaggaagtcttcgctctcccttccacagatgcacagaaattcaaaacaaagtttgaagaatgcaggaaagagatcgaaga

SEQ ID NO: 157391 - DNA, 201 bp, Homo sapiens
cggccctgtagccgccccagcgccctctttctccacctcctccagggctgccggggctgcagggggcaccgagacggtagggcagctcagggcactgctgytctcctggccacagctctccatgggcttcgggccctgtgtggggacagatggggtgctagggtgaggactaggccctgggggcctggccccccaagcttc

SEQ ID NO: 157392 - DNA, 201 bp, Homo sapiens
agcgcgtgcggcggaggccgagcgtctctatgatcctggcttctggcaacgtcatcgtcacgcgccggatccaacccccaaccactttagccagctctagmggcgcgcgtggccgggacggaagtgcgcgcgggtgtcgccgggagtgcgcgctcctctggctgacgggcgggccgggcatgcgccgcgggcgttttggcg

SEQ ID NO: 157393 - DNA, 201 bp, Homo sapiens
tacggtgcatttattctttccgtcgcccacgcagcacttcattcattcggttcttacgtctggaaccgccactggcctctgtggcagaagctcgcgttccwgcgtggggcacaggtcctagatgcgccgacccaggcggcggctttgttggctgcggtgtctggttgagtgcgggccgctgcagagccgcagtgctgtggg

SEQ ID NO: 157394 - DNA, 201 bp, Homo sapiens
ggccacggcccccagtgggctcccttctggcaactgccccactttctagccttctgctgccccccactttcagataggctggctctatgtgttgggttcccttaggaaagactgggccccctgggccttgtgccctgatatctgaccctgggcttctgacttcacggccagggtcagaatcaaggggatcagggttgggct

SEQ ID NO: 157395 - DNA, 201 bp, Homo sapiens
gggaggtgtacagtgtgtggtgtctggggggcgggtgtggtatccggggtgtgtgtaggggtcatctggtgtttggtgtctaggggggtttgtggtgtctraggggtgtggttgggtgtgtgtggtgtctgggggtgttggggtgtgtggtgtctgggggtgttggggtgtgtggtgtctgggggtgttggggtgtgtgtt

SEQ ID NO: 157396 - DNA, 201 bp, Homo sapiens
actagcagtcctgtagcgacttttttcgttttactaagcaagagcacaactatttcctaattagtcaaaactgaaagagttacattttgctttaaagtaayatttcaaaatctatttcgacccatcattgtgtcctttgatcttcacacagcaggtatcatctgcattttatggatgaggaagaaactgatgctcaaagag

SEQ ID NO: 157397 - DNA, 201 bp, Homo sapiens
tgaaggtgtgtcggggcatgtgtggtgtctgaaggtgtgtggtgtctggggaggtgtacagtgtgtggtgtctggggggcgggtgtggtatccggggtgtstgtaggggtcatctggtgtttggtgtctaggggggtttgtggtgtctaaggggtgtggttgggtgtgtgtggtgtctgggggtgttggggtgtgtggtgt

SEQ ID NO: 157398 - DNA, 201 bp, Homo sapiens
gtgtggtctggggggctgtgtggtgtctgaaggtgtgtcggggcatgtgtggtgtctgaaggtgtgtggtgtctggggaggtgtacagtgtgtggtgtctrgggggcgggtgtggtatccggggtgtgtgtaggggtcatctggtgtttggtgtctaggggggtttgtggtgtctaaggggtgtggttgggtgtgtgtggt

SEQ ID NO: 157399 - DNA, 201 bp, Homo sapiens
ggttgtgtggttgggtgtggtgtttgggggtgtgtagttggtctggtgtctggggggtgtggtggggtatgtggttgggtgtggtgtctggcgggggtggytgggggtgtgtggttgggggtctggtgtctgggtgtttggtgtttggggtgtgtatgtggtgtctgggggtgtgtgtagtgtctgaaggtgtgtggtctg

SEQ ID NO: 157400 - DNA, 201 bp, Homo sapiens
cctggcttctggcaacgtcatcgtcacgcgccggatccaacccccaaccactttagccagctctagcggcgcgcgtggccgggacggaagtgcgcgcgggkgtcgccgggagtgcgcgctcctctggctgacgggcgggccgggcatgcgccgcgggcgttttggcgggaagcgcggggcgggccggacaatgagagtgtc

SEQ ID NO: 157401 - DNA, 201 bp, Homo sapiens
tggggggcgggtgtggtatccggggtgtgtgtaggggtcatctggtgtttggtgtctaggggggtttgtggtgtctaaggggtgtggttgggtgtgtgtgktgtctgggggtgttggggtgtgtggtgtctgggggtgttggggtgtgtggtgtctgggggtgttggggtgtgtgttgtctgggggtgttggggtgtgtgg

SEQ ID NO: 157402 - DNA, 201 bp, Homo sapiens
ggggctgtgtggtgtctgaaggtgtgtggtgtctggggcgggggttgtgtggttgggtgtggtgtttgggggtgtgtagttggtctggtgtctggggggtstggtggggtatgtggttgggtgtggtgtctggcgggggtggttgggggtgtgtggttgggggtctggtgtctgggtgtttggtgtttggggtgtgtatgt

SEQ ID NO: 157403 - DNA, 201 bp, Homo sapiens
ggtgtgtggttcggtgtgtgtggtgtctggggcagggggctgtgtggtgtctgaaggtgtgtggtgtctggggcgggggttgtgtggttgggtgtggtgtytgggggtgtgtagttggtctggtgtctggggggtgtggtggggtatgtggttgggtgtggtgtctggcgggggtggttgggggtgtgtggttgggggtct

SEQ ID NO: 157404 - DNA, 201 bp, Homo sapiens
gtccagctaatttttatctttttgtagagatagtgtcttgctatgttgcccaggctggtccccactgagggaaatattgtgactgtaggagcagtggggcratctccactcactgtatcctctgcctcctgggctcaagtgattgtcgtgcctcagcctcctgagtagctgggattacaggcgtgcatcaccacactcaga

SEQ ID NO: 157405 - DNA, 201 bp, Homo sapiens
tcagctcgccgcaacctctgcctcccggcttcaagggattctcctgcctcagcctcccgagtagctgggattacaggcatgtgccaccacacccggctaaktttgtatttttagtagagagggggtttctccacgttggtcaggctggtctcgaactcccgacgtcaggtgatccacccacctcagcctcccaaagtgtgg

SEQ ID NO: 157406 - DNA, 201 bp, Homo sapiens
aaaattgctggcagagctgtgaatccagtgtaaatactagcagtcctgtagcgacttttttcgttttactaagcaagagcacaactatttcctaattagtmaaaactgaaagagttacattttgctttaaagtaatatttcaaaatctatttcgacccatcattgtgtcctttgatcttcacacagcaggtatcatctgca

SEQ ID NO: 157407 - DNA, 201 bp, Homo sapiens
catcttcacgagcttctctctcttcagtcacgccgatgatggagctgaagcccaacgcaggtagcgaccgtgcctgggtctggaacacccacgctgacttygccgacgagtgccccaagccagagctgctggccatccgcttcctgaatgctgagagtgagccaagggccctggggacctgcctgacttggggctcacctg

SEQ ID NO: 157408 - DNA, 201 bp, Homo sapiens
cctgtgtggggacagatggggtgctagggtgaggactaggccctgggggcctggccccccaagcttccttatgggacacccagacctccgtcggtgcactytgcactcagccctgcccctcccccagtctaccctcccgaccccattcccgtctcctttcctcccccatcgcacctgcctcgtccccacctattctctggc

SEQ ID NO: 157409 - DNA, 201 bp, Homo sapiens
ttgaataaaactcaggcgccgtggtactttgtctaagcctggttctccaaccccagactgtccccgtgttgtctgaagcagacccctcaggttggtgagcwgggtgctctgtggccgagggctgggtgggctggcctttgcagtcatctcaccatcttcacgagcttctctctcttcagtcacgccgatgatggagctgaa

SEQ ID NO: 157410 - DNA, 201 bp, Homo sapiens
agcttgcactctggctggtcctcctcctcgagccgtttgaatcatttccttgggggtcttccctgatgccctgtgctgctcccagagcctgggtcaggttktgggttgttgtgtgtgcatcataagttggttctgggctcctgggcatctgggcagagccatctgtgtagccagcagtgtcttgtgcccatcatgggccct

SEQ ID NO: 157411 - DNA, 201 bp, Homo sapiens
aaactcaaagctgtgccaagtagctggtgaacagcagtgcccgctcagccgccttgtggctggcactttggtttgctctccaagctccggttcccattagktgttgcggagcctgaggcccaacccagggcttcctcccagtgctgatcctcgtgccaggcttctggttcactggggccaggggcccctcatggttgcctg

SEQ ID NO: 157412 - DNA, 201 bp, Homo sapiens
ggggagagttccacttgcccatgagttgggaaggagccatggctgctgcctgctcactgttcacagaatagctgtagactgccaccaacctgtggggcagcccccatctgcctgggcaagatgccctgcacaccttctctactgcactagcagggtgtaggttcccaggacctccccagcagctgtgggggacctgtacgc

SEQ ID NO: 157413 - DNA, 201 bp, Homo sapiens
tgtctcacagaaacttgttttgctcgggattgggaaactgcccggtgacagcagtgagtgagtttgctgtcctgggagggttgcctgggtcctggtagccrctggctggggtttggcatttggctctgaattggttctcactgggctggtgcatgactctctgtgtccccaccatgctccgggccaagatacaggtgctct

SEQ ID NO: 157414 - DNA, 201 bp, Homo sapiens
ctgccctgtccccccaggagctctaactaacctgctctattgtgcctctaatgcccacccgtgcgctgcagctcgaccccagcaggaaggcccctcccccygggcccagcaggcccgcggtcaggctggtggacgccgtaggggacgctaagcctcagcccgttgattcctgggtctagcttgcatgcctggtacgttctc

SEQ ID NO: 157415 - DNA, 201 bp, Homo sapiens
tgtgtgcacgtgcccgccctgggcccgtgtgagccacatgtttccggctccctgcgcccttggtgctacctgtgctgtcctggcaggccaacccttacatygccagcctcggccctgcccctgccctgtccccccaggagctctaactaacctgctctattgtgcctctaatgcccacccgtgcgctgcagctcgacccca

SEQ ID NO: 157416 - DNA, 201 bp, Homo sapiens
gctgtgtgccaatcccctggcttcctgtgcaggcctgtgtgtgtgcacgtgcccgccctgggcccgtgtgagccacatgtttccggctccctgcgcccttkgtgctacctgtgctgtcctggcaggccaacccttacatcgccagcctcggccctgcccctgccctgtccccccaggagctctaactaacctgctctattg

SEQ ID NO: 157417 - DNA, 201 bp, Homo sapiens
cctcacggtgcgtaagaggtgggaaggtttggagggacgcctccagtggaggcagggcctcctgtgttagccacaaagctgagttatctgagggggctggragccaggcgggcatgctcacatccaggttcagaggctgggccagacgaacacctgcaggggcagggcagtgcctattgagctgtatgctgggatctggct

SEQ ID NO: 157418 - DNA, 201 bp, Homo sapiens
ggctcccagcagaggagggggttgggagcggcaaggccagcatccagctcaggctctggaagggatgagcggtgccccaggcaccctgggagcagccagckctggccagaggccacacaggaccctggggcaagggcagaccaaaggggacatggaacctccctgcatatgacagggtgggctctacttcatgctgggtca

SEQ ID NO: 157419 - DNA, 201 bp, Homo sapiens
tgtaaacccatccaatcatccatctagctgtctacccttctatgacttcatccacctccctatccattcacccgtctgtctgtccatacccctcattcccyaatctgtccatccgtctgtccatcctccaccatccccccccatccatccatacgttcatccatccatcccccaccatcccatctatgcgtctgtttttct

SEQ ID NO: 157420 - DNA, 201 bp, Homo sapiens
tcctcgttctgccccttccagtgcagggaagatgatggctgggaaagtgactttgtccccttgttctagaaggtcaggggagggtcctttggaggaggcastggggcttgcacctgtcttatctctcggcttcacaggctgaaggtgccggtggttctgtctccagcctgaacccctttcttccagaacttcatgcatcta

SEQ ID NO: 157421 - DNA, 201 bp, Homo sapiens
aaattcctctaattcctcaacccacactggactcgggccccataatttcattttccggacaaggctctggccgcactcccgaggaggaatgtctgggttgkcaagatgtcgtcaaatgtcagctttggtttcagggaaaggatttagcttctaccctcaggttcctcaccatgccttcgtgttcctgacagtgtgtgctga

SEQ ID NO: 157422 - DNA, 201 bp, Homo sapiens
ttttggctctttgggctccttaaagatcgatataaatcttatgatagatttctctgtttctgcaaacaatgtcattgggattttttttttcttttcttttytttttttgacaggtcttgttctgtcatctaggctggaatgcaatggtgtgatcctagcttactgcggccttgaacccctgggttcaagcagttctttagc

SEQ ID NO: 157423 - DNA, 201 bp, Homo sapiens
gtcttggtgtccagacttggtgtcggccagcaggcgtcatgcttcctacgtctgctcatgagacccacatagaaggcccagcccagcactagtgcatggtsagagtcaaattaatgtccccagagggtccgagactcactagggggccctttttcatggcccctggtgctcagaggcctctggtgggtctcggtgctgggg

SEQ ID NO: 157424 - DNA, 201 bp, Homo sapiens
aaccactcacggcttttgttacttcctactgttctgcatgagctgggacatgaggagagtgggacaggtcctgagcgtggccacctggggaggtaggcagrcggtgcatatggtcagcacagattggccaatcgcaccccacaggcaccctgtggaacctgtcatcctatgagcccctgaagatggtcatcattgaccatg

SEQ ID NO: 157425 - DNA, 201 bp, Homo sapiens; identical to SEQ ID NO: 29469

SEQ ID NO: 157426 - DNA, 201 bp, Homo sapiens
catccgggactgcggtggtgtgcctgccctggtgcgcctgctgagggctgcccgggacaacgaggtccgtgagcttgtcactggtgagtgggacctggccrtgctcacatcccctgggaagagaagagtgtgaggctcaacccgggaggaacgaggccactcggcctgcgaccgcctgggaaagcacccggtaggcaggag

SEQ ID NO: 157427 - DNA, 201 bp, Homo sapiens
aagccaggctgaagccccagtttggagacaggcaagcttggaaggctgttttgacccctcatttctggagcactgggcagagcagcaggacggcgcctcarttgcccgggaacttggagtggttgccaggaagagtgcctcctgttgctagggcagctgccctggttgcactgcatcagttgacttacagagggtgggctc

SEQ ID NO: 157428 - DNA, 201 bp, Homo sapiens
gggctgctgtggggtttctcctggctagtagatcctgggacaatgtcctgaccccagctgggggagtttccccctagttctgccttactgtgtgacccaartgagtcttgtcctggtcagccttcagtttcttggcttgtatccacctaccatccagccagggctcctggcttccctcagtctacatacctggcagttgca

SEQ ID NO: 157429 - DNA, 201 bp, Homo sapiens
atataagggcactaatcacctcctaaaggccctacctcttaatactgtcacattggagattaggttttaatgtgaatttggggaacactagcattcacacygtagcagtgtgggtggctgcacacatgtgccagtaggtgcctttgaggagggccccaaactgtcagcacttctcccacctctttgtagtggggactggac

SEQ ID NO: 157430 - DNA, 201 bp, Homo sapiens; identical to SEQ ID NO: 29475

SEQ ID NO: 157431 - DNA, 201 bp, Homo sapiens
  misc_feature (1)...(201): n = A,T,C or G
tattgctgtccttgtcagcttgggccgaaacaggccttggggtgggtgggttcaggaccaggaggaaggcaccctggtgtgctggccagcatgagctgagncagagctgctgtgtgtggagacctgcactccaggggtgactgagcagcaggcctgcccaccaatgtccctccttgccccaggagcagagcccaggcagcc

SEQ ID NO: 157432 - DNA, 201 bp, Homo sapiens
ggacaccatgatgtcccagctaggggtggtggttgacatcaggaaggcatcctgcaggtctcactggcacctcctggggcctggaggagcctgtggcagcmaggccatgcagcttggggagggccctgaagacttcaccccccagggtctatgtccttatctgccaactcagcctgaggagacctgagatgggggtccagc

SEQ ID NO: 157433 - DNA, 201 bp, Homo sapiens
agggcatctcagggtggcaggaggggctgtcccactgcccttaactcctcgtaggtcaccacacttcagggaggccaggtcagccagacaccaaacgacarccctggtaacagggtccgcaggagggtggttggctgggcaggtccgaggctgcccaggcacacttgctcactctccctcctgttgcttgctcctttcttg

SEQ ID NO: 157434 - DNA, 201 bp, Homo sapiens
cggggcaggctgtgagtcttaggtcctcaagccactcagcgcggcaggggttgggcctggctctgatgtgggccagcctatcctctttgagcctcagtttycccactggcaagtccagtcagtaggcatgtggatagaaaagtctcagtccagagttgtcttgcctagaattccagtgtcgtcaccccatgcagaatggtg

SEQ ID NO: 157435 - DNA, 201 bp, Homo sapiens
agtgacctaggctgagggatctagggcagatgggagggacaggatgactgactccttgcctgttcccaagtccttgggcatggaaagctgccggccgggcyagcctagtgggagctgggtctgctgccgcctggctgtgtgggaggaccagcgtctggccgagaatgtcactgctcaggccatttggccatgcagggtctt

SEQ ID NO: 157436 - DNA, 201 bp, Homo sapiens
agcgatggcaggacctgctgcctgctgtgtgccaatcccctggcttcctgtgcaggcctgtgtgtgtgcacgtgcccgccctgggcccgtgtgagccacaygtttccggctccctgcgcccttggtgctacctgtgctgtcctggcaggccaacccttacatcgccagcctcggccctgcccctgccctgtccccccagga

SEQ ID NO: 157437 - DNA, 201 bp, Homo sapiens
ggtgccatgtggccctggggccaggcacctgtgcagtcagaggcccggggcaggctgtgagtcttaggtcctcaagccactcagcgcggcaggggttgggmctggctctgatgtgggccagcctatcctctttgagcctcagtttccccactggcaagtccagtcagtaggcatgtggatagaaaagtctcagtccagagt

SEQ ID NO: 157438 - DNA, 201 bp, Homo sapiens
tgagagcccaccagggtccaccagcgatggcaggacctgctgcctgctgtgtgccaatcccctggcttcctgtgcaggcctgtgtgtgtgcacgtgcccgycctgggcccgtgtgagccacatgtttccggctccctgcgcccttggtgctacctgtgctgtcctggcaggccaacccttacatcgccagcctcggccctg

SEQ ID NO: 157439 - DNA, 201 bp, Homo sapiens
ctgcccatcctggctagatgccgatccccggatgttggtgccatgtggccctggggccaggcacctgtgcagtcagaggcccggggcaggctgtgagtctyaggtcctcaagccactcagcgcggcaggggttgggcctggctctgatgtgggccagcctatcctctttgagcctcagtttccccactggcaagtccagtc

SEQ ID NO: 157440 - DNA, 201 bp, Homo sapiens
agggcttgggtttcagctcctgcccatcctggctagatgccgatccccggatgttggtgccatgtggccctggggccaggcacctgtgcagtcagaggccyggggcaggctgtgagtcttaggtcctcaagccactcagcgcggcaggggttgggcctggctctgatgtgggccagcctatcctctttgagcctcagtttc

SEQ ID NO: 157441 - DNA, 201 bp, Homo sapiens
gtctgggctgagagggagatctgctcctacagggcctccctcagagcgcccctcatgccccaccttaccccatctacagacggatactccacggtggaccrgagggagcggaggccacggggcgccagctctgcaggagaggcctctgagaaggaacccttgaaagtaagtggtcatgtggctgtgggcaggtccccggtg

SEQ ID NO: 157442 - DNA, 201 bp, Homo sapiens
aacgtttcctcagtcttgctttataccctcctcactctgtcgccagaactgcagcccctcagtgcctgggcccctgcttgaactcagatgagccccgcccrgggcccagcagagagagctcagggcctgacacacatttgccagatacagatggggcagcccagccccagcagtgatgggccacacaagccttctcctgct

SEQ ID NO: 157443 - DNA, 201 bp, Homo sapiens
catggacactggggccagacagggatccagggactgcagccaactcctgttgagagtcagcccaccattccacagccccaccctaaagatgttgcagagasctgagccaccagctggctatgggcctctcactactctacacctcagtttctccatctgccagccagctctgagactcccagagtggatgctgggcagatg

SEQ ID NO: 157444 - DNA, 201 bp, Homo sapiens
agggtacagaggggagcagcccagagttgggtctgaggcagaggctgtgtggggctgcagggccagggtccctgagagtgggccagcctgggcaggtgcaygtcagacatggacactggggccagacagggatccagggactgcagccaactcctgttgagagtcagcccaccattccacagccccaccctaaagatgttg

SEQ ID NO: 157445 - DNA, 201 bp, Homo sapiens
ctggcccctcccacaagcccaagggagctcatgggaaaccccaggcctgggcagcagcctgtttctgggccagtcctgggggccccagacctggtgcaccrgagattgaagagccaagggagggatgagtgctgggaggccgggcggggtgcaagaggagcaaggatggggccccagctggggagggggtgatgagagacg

SEQ ID NO: 157446 - DNA, 201 bp, Homo sapiens; identical to SEQ ID NO: 29480

SEQ ID NO: 157447 - DNA, 201 bp, Homo sapiens
aaagcacccggtaggcaggagtgcagctgctgagacgcttgccccaggagccaggcatcaggcccagacactgtgacaggttccccagtctctaccatagyagggaggctgacgctgcgcccctcgggcatgtcccctcacctcctgccttcacacctcctgcccccacagaaactctcctgggacccacctccttggttc

SEQ ID NO: 157448 - DNA, 201 bp, Homo sapiens
ctgtgttagccacaaagctgagttatctgagggggctgggagccaggcgggcatgctcacatccaggttcagaggctgggccagacgaacacctgcagggrcagggcagtgcctattgagctgtatgctgggatctggcttgagagagaggtctgtcctggtggggcctagccagttggaagagcctgcatgtcaccaggg

SEQ ID NO: 157449 - DNA, 201 bp, Homo sapiens
tgagttatctgagggggctgggagccaggcgggcatgctcacatccaggttcagaggctgggccagacgaacacctgcaggggcagggcagtgcctattgrgctgtatgctgggatctggcttgagagagaggtctgtcctggtggggcctagccagttggaagagcctgcatgtcaccagggtggagggctccagccgca

SEQ ID NO: 157450 - DNA, 201 bp, Homo sapiens
cctgccctggtgcgcctgctgagggctgcccgggacaacgaggtccgtgagcttgtcactggtgagtgggacctggccatgctcacatcccctgggaagaraagagtgtgaggctcaacccgggaggaacgaggccactcggcctgcgaccgcctgggaaagcacccggtaggcaggagtgcagctgctgagacgcttgcc

SEQ ID NO: 157451 - DNA, 201 bp, Homo sapiens
ggcagggggtcctgcagatcttggtgtcaggggcaggcttgacccggcctcaggggtctcagagggggtctgccttgcccggtgtccaagacaggaatggrgtctgcctagcatgctgatcttcaccaggagccaagatgtcccccaccccccaaagggcctgtcgggacttctaggtgggataagcagcagccatatggg

SEQ ID NO: 157452 - DNA, 201 bp, Homo sapiens
cacaccccctacgccggctctgactcccgggacctgcaaaggagcttccggagctttaatggaagtcttctctgcctccgaggcgcacgtgatgggagggrtagagacaggccctgcccactaatggatgctggaggagatctctaaggaaaacgggatcctccccctctcagcattgaggtggggggaggcataggcagt

SEQ ID NO: 157453 - DNA, 201 bp, Homo sapiens
ctgtttccctgttcgtgatgctggagccattggcttggcctttgtggggtttgacataagaaggtggctccagcctggcccttcccctcccatttttcacygcagcagaactagattccctagggtgtggcccacattgaggctggcctgggggagcagtgggggtgcattcggggcttctgtgcctcgatggggagaacc

SEQ ID NO: 157454 - DNA, 201 bp, Homo sapiens
gatgccctggtgggaagatgttcccacagcctggagctaccctgacctcctcaggcaaaagacttcaagacctcaggctactgcccctccacctaccaccyctgcccctgaactctccccccgaccccctacccttgattttctcaggctgggattgaagagagcatgtgttgccagggctgcagctcaactggctgggct

SEQ ID NO: 157455 - DNA, 201 bp, Homo sapiens
cccgaggccgcctctcaggcgccagtgtgctcagtccaaccctcccagaccggaactgtcctcggacaggcagtgtgggaggacccaaggcaccccggagkgttgatgccctggtgggaagatgttcccacagcctggagctaccctgacctcctcaggcaaaagacttcaagacctcaggctactgcccctccacctacc

SEQ ID NO: 157456 - DNA, 201 bp, Homo sapiens
ctactccttgagtcttggtgtccagacttggtgtcggccagcaggcgtcatgcttcctacgtctgctcatgagacccacatagaaggcccagcccagcacyagtgcatggtcagagtcaaattaatgtccccagagggtccgagactcactagggggccctttttcatggcccctggtgctcagaggcctctggtgggtct

SEQ ID NO: 157457 - DNA, 201 bp, Homo sapiens
gggtcagccccaggaggaggcccagagctctgcctgcagcttagaggctgacctgggagcctcattttctctgctggccattatcctcagactgggctccrgcccctactcagcctcaggaggtatagagccttctgtgttccatggccaggccctaagaactctaaagttggggtatgcagtgagcagttagaccactgg

SEQ ID NO: 157458 - DNA, 201 bp, Homo sapiens
gtgtactaggcaccatgtgaagagtgggcaggacacagcccaacactcagaacagcaccctccactgagccctcagggcccaggcagctggatggggtctrttctgggcagctctttggtctgcctagagacactttaggggtttgcctgcaccatgcctaaccctgccacagtgttcattgcatgcactggtgggtcagc

SEQ ID NO: 157459 - DNA, 201 bp, Homo sapiens
cagctggtcctccaggtaacagcctagtgacttgggaagggtgaaaattgccaagtgggaaaacaatcagtgggtcctggtggaccacaagccagcatgcrctcgcttattgcaagatttgctggggctcctggggaggaaaggaaaatgggatcccaggttgggctggaagtcccacttgggtgtactaggcaccatgtg

SEQ ID NO: 157460 - DNA, 201 bp, Homo sapiens
ttagtccccagagccagggtgtgctggaggggcttaggtcagggaagctgtccgcagggtctgcagcccaagcctggtcctgctagatgggggatggggtrtgtggtgtagacgagggtccatgtctctgcacagggagggaagtaagccaccccaggtccatgaggccagtggctatcctgtggtcctgattgttgccat

SEQ ID NO: 157461 - DNA, 201 bp, Homo sapiens
cgcccgcgcgccaccgcagccagcccagtaccgcccagcccgaagccggcgcgttcaccattgggccgcgcagcgaggggcggggcggcgcgccgcatgcmggcgtcccgttggctgggcgcgctgtcgctcggaggctgccacctcctggcgccccgcccccggggctgcgccaaagcttcgggctgcgcgggcgtctga

SEQ ID NO: 157462 - DNA, 201 bp, Homo sapiens; identical to SEQ ID NO: 29481

SEQ ID NO: 157463 - DNA, 201 bp, Homo sapiens
catgctccgggccaagatacaggtgctctcagcccagcgctgctgggtgagtttgcagtcctgaagaaggtgtgatggggcagctcagaggcagggctggmggctgctgtgacgatgtccacgcgccccacttgcctgtgcagggcctacgaggacacagcagatgatggcggcgagctggcggacgagcggcctgcgttc

SEQ ID NO: 157464 - DNA, 201 bp, Homo sapiens; identical to SEQ ID NO: 29482

SEQ ID NO: 157465 - DNA, 201 bp, Homo sapiens; identical to SEQ ID NO: 29483

SEQ ID NO: 157466 - DNA, 201 bp, Homo sapiens
tccccagacacctggcttggatgaccggagctcggcctccaagctgcctattgagggcgtggagttggaaaggagccaagcaaggcccctcggtacccccmacatgcttggtgcaggcagaaggaagcctgaaggccagctggtgggtgaccacacacaggctcagcagggacagtgaaggactagccctgtgcctgcgta

SEQ ID NO: 157467 - DNA, 201 bp, Homo sapiens
aggaaggctgaaagctgtgtgagtacaggcacccccttgtctcctgctccagcccataagcctgagctccccaggcttgagtgccaggtcccccatcccasacaaatggttattcacacctggccacagctccagggccaggaacctgcctgcttccccgccctccctgtactggagactgttgggggcagctgcctgcct

SEQ ID NO: 157468 - DNA, 201 bp, Homo sapiens
ggagccaggccccgcctgccacccttcactggcctgacccttcggaaattcctctaattcctcaacccacactggactcgggccccataatttcattttcyggacaaggctctggccgcactcccgaggaggaatgtctgggttggcaagatgtcgtcaaatgtcagctttggtttcagggaaaggatttagcttctaccc

SEQ ID NO: 157469 - DNA, 201 bp, Homo sapiens
gcggaggccacggggcgccagctctgcaggagaggcctctgagaaggaacccttgaaagtaagtggtcatgtggctgtgggcaggtccccggtgaggcccygtgtctaggggttgctggagagcagcctaggccatgctgggtctggtctgggccctggggtacagctgggttgtggggccaagcccaggaagcagcccct

SEQ ID NO: 157470 - DNA, 201 bp, Homo sapiens
ccgggaggggaccaaggcctgaagtgggcctgctggttttatggggtgtagatggtgctgggtggaggagagatatttggtttaggggtgcttagagggtraggtacagggcagctagagagggattagtgctcagccaggggctctgacccacaagtggaggggagtctggagagttggcagggtgttggtgagagctgg

SEQ ID NO: 157471 - DNA, 201 bp, Homo sapiens
agtgctgtgcctaagtggtagggagaaggccatggcctccggatgcctgagtgacctaggctgagggatctagggcagatgggagggacaggatgactgastccttgcctgttcccaagtccttgggcatggaaagctgccggccgggccagcctagtgggagctgggtctgctgccgcctggctgtgtgggaggaccagc

SEQ ID NO: 157472 - DNA, 201 bp, Homo sapiens
acctctcgctggaccggcgcaacaaagacctcatcggtgaggacgcctgcaaagcccacgcctgggcaccgaactgtgcctgcagctttggggtcccatcrgaggggcttggaggatgagtggtttgggagtccaggccccggccctctcgcttgggcgctgtcccaactggaggtagctccagtccccccggccctgtct

SEQ ID NO: 157473 - DNA, 201 bp, Homo sapiens
cacatgcacacacatgcatatgcacatgtgcctggcttggtccccagttcttccctgcctcaggccctgcatcccaccccccatgatcccaccctgaggcrtagccagtcgcccaccctcacttggaccccttcccatgatgaagaggctgtcgtgagacggggaaacacaccgttggggcaccagaatggaccatgacca

SEQ ID NO: 157474 - DNA, 201 bp, Homo sapiens
acttggccaaagtctttcggcgggaaagtgacacccctgccgcagggagggggagggagcagaagtccaggccggcagtgggtggggggaggtggtgggargtggggggacagggggcgacccggggctgcagggccccgccccctgtctctggggggcgggacctcacattgcccgccccccgcccgccacgcccacccc

SEQ ID NO: 157475 - DNA, 201 bp, Homo sapiens
caaagctgtcagctcttttttatcataaaacagcttctgagctgtgagagacgggagccaggcagcaggcagcagcgtgttgaggctgacatttacagagrgacagtatgcagcccctgcaggcctgcagacggcctggtatagagagaggcccaggcttcagcacagcccgcaggtcagagctgggcaccctcctcccta

SEQ ID NO: 157476 - DNA, 201 bp, Homo sapiens
gggggccagcgcagccctggctgtgttctggtagacagctggcaaggggtcaggatgggagccaggccccgcctgccacccttcactggcctgacccttcrgaaattcctctaattcctcaacccacactggactcgggccccataatttcattttccggacaaggctctggccgcactcccgaggaggaatgtctgggtt

SEQ ID NO: 157477 - DNA, 201 bp, Homo sapiens
tgtatgttacaaatacttgatcccaacatgtcgattgtcttttcattttctttgtggctgcttcttccattatggaaaattacaaaagcacagaagtggaragcctagtgtgatgggtcctgcacaccccacaccagcctcaccatgctggagtcatggtctgcgagtaacgccagcacccgtcatttcatcaaaacgctc

SEQ ID NO: 157478 - DNA, 201 bp, Homo sapiens
gtccctggcctctgctttcactcgcctgcctggtggggagggtatctggtttgtctatttcctactgaggttctgattatgccagcggcgcgtgcttcgargagtggtagactggcaggggcaggactgtggggctctggagcagcctatgagagcacctaatgggctgaggatgccactttgttgttgtatgttacaaat

SEQ ID NO: 157479 - DNA, 201 bp, Homo sapiens
tggggagattggtccctggcctctgctttcactcgcctgcctggtggggagggtatctggtttgtctatttcctactgaggttctgattatgccagcggcrcgtgcttcgaggagtggtagactggcaggggcaggactgtggggctctggagcagcctatgagagcacctaatgggctgaggatgccactttgttgttgt

SEQ ID NO: 157480 - DNA, 201 bp, Homo sapiens
ggggaaatcaaatttccaggctgaatctgattatggctctctgacagtgggcaccgccctggcccctggggagattggtccctggcctctgctttcactcrcctgcctggtggggagggtatctggtttgtctatttcctactgaggttctgattatgccagcggcgcgtgcttcgaggagtggtagactggcaggggcag

SEQ ID NO: 157481 - DNA, 201 bp, Homo sapiens
gcccccagcagtgaccctgccttgaccggaccccagcttccgtatcagccccacacagcccctagtccccctggacctcccatccagcatgccccctgggsctggccagtgtagctttggtcttggccacctttggccttgggcactgcattagtgcagggcaggagcagcgtgggaagaggccctttctgagtattctcc

SEQ ID NO: 157482 - DNA, 201 bp, Homo sapiens
cctgtggctgtctgcctctgatcccagcctagctgtgaaccctgtcagttcgctcctcagggatgctttggtccctgtgcccaccccagagtacagaggayggggctcagctccatgtctgggccttttacaccccgcctccgcctccactgcgcctgccctccctaaggcagggcatgggccacacggcaccttgcgggg

SEQ ID NO: 157483 - DNA, 201 bp, Homo sapiens
gtccctcagcctctccagcctcagagactccctttgcaccctcccactcagggtcccggcccctccctccagccacccaggcctgatcccttgcggtcagmccagacttaattctcccacccacaccatcctctgatccattctgaaccatatggcctacgtccaccacagcaaccaccctatggccactccctgccacgg

SEQ ID NO: 157484 - DNA, 201 bp, Homo sapiens
atagatggcgctgtgtgtcctctcatggtggaaggggtaaaccagccctcaagagccgctttgataaggacactgatcatataagggcactaatcacctcytaaaggccctacctcttaatactgtcacattggagattaggttttaatgtgaatttggggaacactagcattcacactgtagcagtgtgggtggctgcac

SEQ ID NO: 157485 - DNA, 201 bp, Homo sapiens
attgtgaataatgctgctgtgaatatgattgtgcacatatctcttggagactctgctttcaattctttttttttttttttttagacggagtctcgctctgycgcccaggctggagtgcagtggcacgatcttggctcactgcaagctccgcctcccaagttcacaagtagctgggactacaggcgcctgtcaccacgcccg

SEQ ID NO: 157486 - DNA, 201 bp, Homo sapiens
cattagctgagacaggaagccgcagggtcctcccctgaggaaggctgaaagctgtgtgagtacaggcacccccttgtctcctgctccagcccataagcctsagctccccaggcttgagtgccaggtcccccatcccagacaaatggttattcacacctggccacagctccagggccaggaacctgcctgcttccccgccct

SEQ ID NO: 157487 - DNA, 201 bp, Homo sapiens
gggcgtcttgcactgagcactccagccgagcgcggcccgaccccgcagccgtgcccgccccgcgcgacgcttggcgcctagctgccagggccctgcagccrccgaaactttccaacagcccgaggggcggcaggccgggaactttcctggggcagcgcgccgccgggaagctcaggggcaccgacggcccggaggtgtcct

SEQ ID NO: 157488 - DNA, 201 bp, Homo sapiens
catacttaaaatggaactaaaggacttcagctccctttccctacatccaggcatatttagaaataaggaaaagaaaggtgccccgtgggtattttttagastaggctcttaatgctgctgtctaataacctcaggtgagtacccaggctgctgtgggggaaacctcccctatggtatgggccaggggggtgcagtgggagc

SEQ ID NO: 157489 - DNA, 201 bp, Homo sapiens
ttggcaagatgtcgtcaaatgtcagctttggtttcagggaaaggatttagcttctaccctcaggttcctcaccatgccttcgtgttcctgacagtgtgtgytgaccatggtttgccccagagggtttgcgggccggggctttccccacttagtgaggttccagcatttccttcctgcccaccggcccttacacagcccacc

SEQ ID NO: 157490 - DNA, 201 bp, Homo sapiens
gaggtaagaagctctaatgagctcttcctgcccttcccagcgggctccaagccgcccacggcccatgtttctgctaggtctagcaggaagcagaggagccrggttagagtcccaaaacccatggggagtgagccggctgcttccggccagcctcggattaatggcttttaatttagaatttaatcagtgtgcttccctcta

SEQ ID NO: 157491 - DNA, 201 bp, Homo sapiens; identical to SEQ ID NO: 29468

SEQ ID NO: 157492 - DNA, 201 bp, Homo sapiens; identical to SEQ ID NO: 29470

SEQ ID NO: 157493 - DNA, 201 bp, Homo sapiens
gcaggaaggtccagctggagagagcggtcagcgtctggaggtgggagagtgcctggcatgtatgtctgagcaaccctctccccgcctccgcagtgggccaygtacatccgcgccacagtgcgcaaagagcgcgggctgccggtgcttgtggaactgctgcagtctgagaccgacaaggtggtgcgcgccgtcgccatcgct

SEQ ID NO: 157494 - DNA, 201 bp, Homo sapiens; identical to SEQ ID NO: 29472

SEQ ID NO: 157495 - DNA, 201 bp, Homo sapiens
attgtcacatccgaagatggcacaacccggcgcaccgagaccaaggtatggccaggcccaggcagtgggtgggtgagcagggccaggctgctgcagctgtyccacctgcagagtggacatggaagcttgccacgtggggcctctcattgctcgagtgggaaattaaggccagccagaccccagcaaagcagtttctaggcc

SEQ ID NO: 157496 - DNA, 201 bp, Homo sapiens
tctgcctcacctcccaccacctttcccttccaggaaagaaggatggtgagatggaccggaactttgacacgctagacctgcccaagcgaactgaggccgcyaaaggtgagtgggctgagatgaagccagctccactgggggatgtctgggctcaggattgccctggtagtgaagctttgagccatcaagcaggcctggagg

SEQ ID NO: 157497 - DNA, 201 bp, Homo sapiens
gagggtgattcagcaccaggacacctgctgagggtttagaatgggaggaagtgccatgggtcatgtcaggcaaggttgggggagacaggcacagagaggcmgagggcttgctcggcctcacggtgcgtaagaggtgggaaggtttggagggacgcctccagtggaggcagggcctcctgtgttagccacaaagctgagtta

SEQ ID NO: 157498 - DNA, 201 bp, Homo sapiens
tgaattgtaaaagccagaggtagacacatccgtgacttcctgggcttcttttctggacagaaggctcacaccctaactcagattccagccctgacgctgayagccccgttggacgtactcctgttgaggtggtttctggccgtttttctgtggttggaagagcactgtctgtcgttctcgctctggaaactcctatcatgt

SEQ ID NO: 157499 - DNA, 201 bp, Homo sapiens
ggtcccatcggaggggcttggaggatgagtggtttgggagtccaggccccggccctctcgcttgggcgctgtcccaactggaggtagctccagtccccccrgccctgtctctgaagctcagcgccctgctcacaggggctcctgtgaccgcctgcacacaggcggtctccaggggctctcctggcagtgcccctcgccctc

SEQ ID NO: 157500 - DNA, 201 bp, Homo sapiens
gataacgcgcgctcgctcctgcaggcacgcggggtgccagcgttggtggctctcgtggcctccaggtgtggaggggcggggtcggtggcttggggagccgsggaggtgggggaggggccaccactgaccccgcccccggccccacagccaatcggtacgcgaagcgaaggcggcgtcacacgtgctgcagacagtgtggag

SEQ ID NO: 157501 - DNA, 201 bp, Homo sapiens
cacgctgccactggtggacaagagccttggtgagtggtggagcttagggagcctagagggtggcgaccccagctgccccagttgcctgacccttgggtgarggtgaaggaggagtcaggcctcccactgagacggcttccataggccactttccctgccctctgcctcttggctactcccttcccacagcatccgcgctgt

SEQ ID NO: 157502 - DNA, 201 bp, Homo sapiens
tctctgaaggatcacgtttctgaaggatggtcaacagcattagacatgctgacaaggaaccgtggcagcccagtgtcacctacagtcctggacatgtgggrgcaagaaggtacacatgagtgtgtggttatgagtcaggagcaccacgggatgaccttcagatcaggcatgacaaggtcctgcttagaggacggtctgggc

SEQ ID NO: 157503 - DNA, 201 bp, Homo sapiens
gaacctcaggagaggcacgtggcctcgcccacaaggcgggagcggactctagggaggtggagcagatgtcttatggggctgtgagcacctgcgtggggcarcaggaccctgagcctggctaccctggggtgggaatactgctgtgctgtgtgtgatggggaagacgtcattatcagtccacatctctgaaggatcacgttt

SEQ ID NO: 157504 - DNA, 201 bp, Homo sapiens
aggcaggaagacctgagttaaatcctggcccagcccttgtctggctgggacccagtttctccatgtgtaaaatggggtatatagccaacctgaggcacctrgtagagtcagtgagatgacggctcacagccagtgtgtctcggttctgtggcacatggtgactccgggggagaggctggtgcttatcagggataaaaaaaa

SEQ ID NO: 157505 - DNA, 201 bp, Homo sapiens
acccttaggaaggatacccacagctctggctgctcctaccactcagcctcctgtggtgctgctatcctctgctcccacccatctcctgggggaagccctcyccaatgcctcacttggaccccttcccagggtctgctattggctctaccatatggttgcaggttcttggcctggctggaccccatgaggtaggaggcccat

SEQ ID NO: 157506 - DNA, 201 bp, Homo sapiens
gccagtggccggtcagctcctaagcaggtgatccaggccttagatcaggcgacagtgtgagccgcagcgtgtctgggaaggcatttcccccagtcttgccmcatcctatccgcaatgtctgctcccagctgtcccctgtccccaccctacccccattctggggtccaccagcgcccagcagaggactgggcacagaacatt

SEQ ID NO: 157507 - DNA, 201 bp, Homo sapiens
cgtgacttcctgggcttcttttctggacagaaggctcacaccctaactcagattccagccctgacgctgatagccccgttggacgtactcctgttgaggtsgtttctggccgtttttctgtggttggaagagcactgtctgtcgttctcgctctggaaactcctatcatgtggaagtttggccctgggctctgtcttctgt

SEQ ID NO: 157508 - DNA, 201 bp, Homo sapiens
aggttgggcaccttagtgacagagagcctctagggctacctgggccagccctgtgtgggcttctctgccccgatcccccctggctgccacatgcagcccgyctcctcctcctgccttgcagagggcgagaaaactggcagccgggatgtgatccccatggatgcgctgggcccaggtgagtgcagatgcagtgtggttggt

SEQ ID NO: 157509 - DNA, 201 bp, Homo sapiens
gagcctagagggtggcgaccccagctgccccagttgcctgacccttgggtgagggtgaaggaggagtcaggcctcccactgagacggcttccataggccaytttccctgccctctgcctcttggctactcccttcccacagcatccgcgctgttgtcaagctggggtgaggctgccagctggcagaggttgggcaccttag

SEQ ID NO: 157510 - DNA, 201 bp, Homo sapiens
tccctccccaccccaggcctcctggatgctcctgctgccaggcaggtccaactgatttgagcctcagtttgctcctctgtgaaatgggaacgcttttcccyttgggtgactatatgttgatagtaaatattacgtgactcatccacacccatccctggccccagctcacccacgccctgggagctctgaagcgggaagcgg

SEQ ID NO: 157511 - DNA, 201 bp, Homo sapiens
gcggctggggcagatggcacaggcccagcaccaaggtctctgctctcctgagcatggctgccagactctccccacaacactggccagtgtttctggatgtytccagggagatacatgattgttttgcaccaatcaagccaagttcggcaatgagaaggtcatcgtggggtttggtcaccttcccactgtggccttggagta

SEQ ID NO: 157512 - DNA, 201 bp, Homo sapiens
ttgggctcgtcttaggtggataggtggctggggcactagctgctggtgcagttgagaagatggagccagcttaaagataagatgcgggcgcgtttttggcrcagtgtctggtcttctgcgctctgctccaggggttccaggcaggttggccctagatgcaagatacaggggtccagccagtggtagggtagctcacccctc

SEQ ID NO: 157513 - DNA, 201 bp, Homo sapiens
gtgcaatctcaccttaactcattctctgtgtgtgctagccaggccttggacaggggaggggcctgcccctgcagtctgttcttcaggacacagaccgtggkgcatctgtgaagtccggtggtttgggtagataagtaatatgggaccagggcccagccacctgtgccccagcatccctctgtgtgttggtccaatcttgct

SEQ ID NO: 157514 - DNA, 201 bp, Homo sapiens
gccaggccttggacaggggaggggcctgcccctgcagtctgttcttcaggacacagaccgtggtgcatctgtgaagtccggtggtttgggtagataagtamtatgggaccagggcccagccacctgtgccccagcatccctctgtgtgttggtccaatcttgcttttctgctccctgtgttccttgcattttgccacaaaa

SEQ ID NO: 157515 - DNA, 201 bp, Homo sapiens
agttgacttacagagggtgggctctattgtcagtgggggagggtgggccctgttgctagggggcgtagctctctgcacagcttcagttactggtgaaagcmggtcctcttgctaggggtgtggccttggttatacaactctcagttactggccaatgctggtcttgttgccagggagggtgggccctattaccaggggcgt

SEQ ID NO: 157516 - DNA, 201 bp, Homo sapiens
ggcttggtctgaggggcctgcagtctgaggacatgcaagtaacacaaagctgtgtaggggtcaaagggggtgggggcaccagggcaccctaccctggaccrccagagcactaggatcctgtgggaacagaggctctgctgtgtccatctaacaacatggtcaccctctccagctgctcccagcccacccaacacagacgca

SEQ ID NO: 157517 - DNA, 201 bp, Homo sapiens
gattcctgtcctgggcctgggaactgggcccttggagcctctgaggtggctagcagtctgaccccttggaggagatggggacagctctaggtgtaggtggrcagaaaccagcactgcatcctcactcatgggccagggaggcaactacagggatgcgggagctggtctgagccattgcctcttctgtaagcaaggcccagt

SEQ ID NO: 157518 - DNA, 201 bp, Homo sapiens
ttgctaggagagcgttcctggttgacacctccctccccaccccaggcctcctggatgctcctgctgccaggcaggtccaactgatttgagcctcagtttgytcctctgtgaaatgggaacgcttttccccttgggtgactatatgttgatagtaaatattacgtgactcatccacacccatccctggccccagctcaccca

SEQ ID NO: 157519 - DNA, 201 bp, Homo sapiens
aggcctcactggccacgatgccggaggcacctgatgtgctggaggagaccgtgacggtggaggaggaccccggcacacccacttcccatgtgtctattgtmacatccgaagatggcacaacccggcgcaccgagaccaaggtatggccaggcccaggcagtgggtgggtgagcagggccaggctgctgcagctgtcccacc

SEQ ID NO: 157520 - DNA, 201 bp, Homo sapiens
agctctaactaacctgctctattgtgcctctaatgcccacccgtgcgctgcagctcgaccccagcaggaaggcccctccccccgggcccagcaggcccgcrgtcaggctggtggacgccgtaggggacgctaagcctcagcccgttgattcctgggtctagcttgcatgcctggtacgttctctcatctggttgttcgtcc

SEQ ID NO: 157521 - DNA, 201 bp, Homo sapiens
catcatttcctccttgtagggaagggtggaggggaaagggggtatgggaggaggctcgatggtcatccgtcccgtctctcccctcgaggggggggccagcrcagccctggctgtgttctggtagacagctggcaaggggtcaggatgggagccaggccccgcctgccacccttcactggcctgacccttcggaaattcctc

SEQ ID NO: 157522 - DNA, 201 bp, Homo sapiens
caaggcttctatactcaaggtgtctggggcaggtgagggaggaggccccaggacaccatgatgtcccagctaggggtggtggttgacatcaggaaggcatsctgcaggtctcactggcacctcctggggcctggaggagcctgtggcagccaggccatgcagcttggggagggccctgaagacttcaccccccagggtcta

SEQ ID NO: 157523 - DNA, 201 bp, Homo sapiens
cggcttctgtctgtgcaggaaggaggctgaagtctgaagagggaagcccgggtaggccttctgctccctgagagggttcctcctctcccctccacaccccmtacgccggctctgactcccgggacctgcaaaggagcttccggagctttaatggaagtcttctctgcctccgaggcgcacgtgatgggagggatagagaca

SEQ ID NO: 157524 - DNA, 201 bp, Homo sapiens
tcccccaggataggaccctgacctggggaggcttcccagcccacgagccttggcaggcaggtcctgagggcagcgctgagcatctaacctggctcacctcycaggcccaagaatgggcagagtctgcctctggagcctggcagagcttagtgtctgtgcaggccccagggggcccaggcaagggacccattgtgcagggac

SEQ ID NO: 157525 - DNA, 201 bp, Homo sapiens
tggctgtgttctggtagacagctggcaaggggtcaggatgggagccaggccccgcctgccacccttcactggcctgacccttcggaaattcctctaattcmtcaacccacactggactcgggccccataatttcattttccggacaaggctctggccgcactcccgaggaggaatgtctgggttggcaagatgtcgtcaaa

SEQ ID NO: 157526 - DNA, 201 bp, Homo sapiens
agcccttgtgacctaaacacctcttagaggtcctaccttcaacactgttgcgttgggaattaagtttccaacacgtgaactttgggggacacgttcagccyatagcacaaactagtatttattctgatgtaaatggacggcaaggatttaactttgtttttacagctgcatctgaactgtttcctttttgtttgtttgttt

SEQ ID NO: 157527 - DNA, 201 bp, Homo sapiens
cgttgattcctgggtctagcttgcatgcctggtacgttctctcatctggttgttcgtccacctgttcctgccctctgggccagggcttcttgttagtctcygctgcctgcacgctctgctcttcccgcacgttccccgcaggactttggcctccagtccagcagcccagtggcccattcccggaaagaccaggcagaggtc

SEQ ID NO: 157528 - DNA, 201 bp, Homo sapiens
ggtgattgcttattcctgtctgctgtggtgattggtttttcatgtctgccctgggcactggtgcgatgggtgatggcatttgtgccatctctgctctggcytgggcaacctgggccctggcttgcggctgcctgctctgctgggccctggggtgtggtcctgtccacagcgggaggcagctggggagggagcctcagggct

SEQ ID NO: 157529 - DNA, 201 bp, Homo sapiens
ctcacccttttagtttttgtttatgatcattttgatgtcaaaaatgtttcatattttgtggtgaagtgtgttggatttttccccatttttagatattccgtctctctgtgtagtcaactctccctagcatgcagccagataaagatgcacctgtcttttcttctagaaggtatttttactttagttttgtacacagcattt

SEQ ID NO: 157530 - DNA, 201 bp, Homo sapiens
ctgtctgctgtggtgattggtttttcatgtctgccctgggcactggtgcgatgggtgatggcatttgtgccatctctgctctggcctgggcaacctgggcyctggcttgcggctgcctgctctgctgggccctggggtgtggtcctgtccacagcgggaggcagctggggagggagcctcagggctcagctgggacagggg

SEQ ID NO: 157531 - DNA, 201 bp, Homo sapiens
tcacccttttagtttttgtttatgatcattttgatgtcaaaaatgtttcatattttgtggtgaagtgtgttggatttttccccatttttagatattccgtctctctgtgtagtcaactctccctagcatgcagccagataaagatgcacctgtcttttcttctagaaggtatttttactttagttttgtacacagcattta

SEQ ID NO: 157532 - DNA, 201 bp, Homo sapiens
ggggagctgggagggtgtgatggggtggtgcgtgctgagaccaggcctgagtgagaagggctggcggggacacagatgccctgccgtttcccatagctggscagcagtggtgtcctctcagagaccagcaccagcctggcctcctccatcagccgccgtgtgcctgcagggggttgcggcttcgtctcctgcggccgcctg

SEQ ID NO: 157533 - DNA, 201 bp, Homo sapiens
ctgcagccatcctgggcatttcctgactggcgggagctcccctgccagtgctgttttccacttatctaagcagagtgtgttctttgtcaaaacaacagagrggaaagcaggaaccccccagctcctgcagagaggcttctcggtgctgtctctgcccagcctcagcctggcctcctgggctgtccggctcatccatccgga

SEQ ID NO: 157534 - DNA, 201 bp, Homo sapiens
ggtaattctatttttaattttttgaggaattgccatactgatcttacattcccaccagcagtgcacaagggtcttaatttgtctgtatctctgccaaaactttttttttttttttagactagccatcctaataggtgtaaggtgatatttcattgcagccttgatttgctcttccctaatgatagaaatgttgagcaaatt

SEQ ID NO: 157535 - DNA, 201 bp, Homo sapiens
tgcgtggtaccttgcagaaagatggttggaccaaggcgcgcttccaggtgcggcttccctggccttccttccattccctgctcactttgccttattcccaytccatgtgcttcacccaccctgtgtctgtgttttatgtctcagtcagctgctgctactgccaaggggcctaagggagcactgagtcctgggggcttcgat

SEQ ID NO: 157536 - DNA, 201 bp, Homo sapiens
cgtgcccttggggtgctgttagagcacacgggttgatgtgctcggcctgtgccgggctgggtacttgcacacgtgtatgtacatgcatgtgtccctgtctkaggggtcatgtatatgcatgtgtgtgtgcctgggcatgtgtagcaggggccgggctttcctgtgatcactggctgactcatgcacctgccacccgggtga

SEQ ID NO: 157537 - DNA, 201 bp, Homo sapiens
gccggcgggggcgggtctctttgtgcgtggccttggggccctaccctacccgtccgggcgtcttgcactgagcactccagccgagcgcggcccgaccccgyagccgtgcccgccccgcgcgacgcttggcgcctagctgccagggccctgcagccaccgaaactttccaacagcccgaggggcggcaggccgggaactttc

SEQ ID NO: 157538 - DNA, 201 bp, Homo sapiens
taatttttaaataattaaatattggctgcttacaatatttcaccgtttcttagctatgtgtaatgtaacatacttaaaatggaactaaaggacttcagctycctttccctacatccaggcatatttagaaataaggaaaagaaaggtgccccgtgggtattttttagagtaggctcttaatgctgctgtctaataacctca

SEQ ID NO: 157539 - DNA, 201 bp, Homo sapiens
ccgccacagcaggcaagaccggctccacccagcttcctgcggcagaccaggacccttccccagacacctggcttggatgaccggagctcggcctccaagcygcctattgagggcgtggagttggaaaggagccaagcaaggcccctcggtaccccccacatgcttggtgcaggcagaaggaagcctgaaggccagctggtg

SEQ ID NO: 157540 - DNA, 201 bp, Homo sapiens
gcctggaggcaggaagacctgagttaaatcctggcccagcccttgtctggctgggacccagtttctccatgtgtaaaatggggtatatagccaacctgagrcacctggtagagtcagtgagatgacggctcacagccagtgtgtctcggttctgtggcacatggtgactccgggggagaggctggtgcttatcagggataa

SEQ ID NO: 157541 - DNA, 201 bp, Homo sapiens
gagcagcatctcctcttcctcggggcgcagtgctggtggatgggctcccaaccgggcctgcccatctcaggtgcacacacacactcatattcacatgcacrcacatgcatatgcacatgtgcctggcttggtccccagttcttccctgcctcaggccctgcatcccaccccccatgatcccaccctgaggcgtagccagtc

SEQ ID NO: 157542 - DNA, 201 bp, Homo sapiens
cctgtcgggacttctaggtgggataagcagcagccatatgggtgtggacgagtgtgcctgctggtgcgtgtgcctgtggggcagctgtgggtccctgtgcstgggtgtgcttgtgtgtgtgtctgtgtgtgtcttagttcattcacgctctgccaccaaataccttagatggagtcctttataaacaacagaaacatactg

SEQ ID NO: 157543 - DNA, 201 bp, Homo sapiens
ccgcgcgccaccgcagccagcccagtaccgcccagcccgaagccggcgcgttcaccattgggccgcgcagcgaggggcggggcggcgcgccgcatgccggygtcccgttggctgggcgcgctgtcgctcggaggctgccacctcctggcgccccgcccccggggctgcgccaaagcttcgggctgcgcgggcgtctgagcg

SEQ ID NO: 157544 - DNA, 201 bp, Homo sapiens
cactagcagggtgtaggttcccaggacctccccagcagctgtgggggacctgtacgccacctgcccctgccccactgaccccaggcctccctcttcttgtmcccctggtgggtgctcagtgcccagaagtgatgggatgaggttccacatgctgcctgcttgatccagggtgtgcagtgggaacctgaggcttccgggagg

SEQ ID NO: 157545 - DNA, 201 bp, Homo sapiens
gaaaaatatggctctttttgcctgaccccacaggcagtcagaccttatggttgtcttcgttccctaaaaatcactgttattctgttctttttcaaggtgcrctgatttcatattgttcaaacacacgttttacaatcaatttctacagttaacacaattatcacagtggtcctgaggtgatgtatattatcagcttacgaa

SEQ ID NO: 157546 - DNA, 201 bp, Homo sapiens
ttttctgtaagtgtcagccggctgagaaatgaagagaaagagtacaaagaggaattttacagctgggctgctgggggtgacatcacgtatcggtaggaccrtgatgcccacctgagccgcaaaaccagcaagtttttattaaggattttaaaaggggaggggttgtgccaatagggagtaggtcacaaagatcacatgctt

SEQ ID NO: 157547 - DNA, 201 bp, Homo sapiens
aggaatttaatatagcagagataagcataatgtttagactctgcgtgacccatagttaccccggagaatacacagacaactcaccaatcgttggggagccraacaagcatttctgtggactggaccgatgaacatttctccgcacctaccaaagggaatcgggttcccacatgcacttaggaaaaagaaaaccacgttggg

SEQ ID NO: 157548 - DNA, 201 bp, Homo sapiens
cattttaacaggaatttaatatagcagagataagcataatgtttagactctgcgtgacccatagttaccccggagaatacacagacaactcaccaatcgtyggggagccaaacaagcatttctgtggactggaccgatgaacatttctccgcacctaccaaagggaatcgggttcccacatgcacttaggaaaaagaaaac

SEQ ID NO: 157549 - DNA, 201 bp, Homo sapiens
actgcacctgtggtctcccagagctggtatcccagtaacaactacagttctgaagatgatgatatcccacctcccgaggtcaccaggcaccggccccactrgccagacttcccaacttctccccagacccctagactctagaggttagaggctgcacagagcaatgggaggatacacactcgtcctcctggagcccctgaa

SEQ ID NO: 157550 - DNA, 201 bp, Homo sapiens
attttccatgggaacccgaactcccccattttaacaggaatttaatatagcagagataagcataatgtttagactctgcgtgacccatagttaccccggasaatacacagacaactcaccaatcgttggggagccaaacaagcatttctgtggactggaccgatgaacatttctccgcacctaccaaagggaatcgggttc

SEQ ID NO: 157551 - DNA, 201 bp, Homo sapiens
agttagaacagcttttgccaaaaggtcgcagtctataggaagcaaaatgacctcggtacaaagagtctgtaataccgttttaacatatggagaagtaggamcatactgagtacaagcatccttgaattcttttaaaaaggtaagattgagcggcgtatatcgacacacttgtaccccttgagcattaggaggttccagcat

SEQ ID NO: 157552 - DNA, 201 bp, Homo sapiens; identical to SEQ ID NO: 29520

SEQ ID NO: 157553 - DNA, 201 bp, Homo sapiens
actcttacaaaactttgttctaatcttgctttctaatagccacgaatcaaacactttccttggcattttagggttcatgagatttgtgtgtgccttgggargcagtcaagtccaaggcctgaagtttgctgatgcagtgcccaagcccgggcaaatggaagcttgaaattagccctggctaatgtttttttttctttcttt

SEQ ID NO: 157554 - DNA, 201 bp, Homo sapiens
atgagatttgtgtgtgccttgggaagcagtcaagtccaaggcctgaagtttgctgatgcagtgcccaagcccgggcaaatggaagcttgaaattagccctrgctaatgtttttttttctttctttctttcttttttgagacagagtcttgctctgtcgcccaggctggagtacagtggtgtgatctctgctcactgcagcc

SEQ ID NO: 157555 - DNA, 201 bp, Homo sapiens
agtgcttttcttctactcttgggtggaagaggaagaggaggcttatcctccatgagccctcatggggagtgggccgtaggatgggtttctcagccaggggygactctgcgctgtctgcctcagacatttgggaatgtctggagacagttttggttgtcactggggaagggtttgctcccctttgcggggagcccagggatg

SEQ ID NO: 157556 - DNA, 201 bp, Homo sapiens
gaagatgctgcagctgatgaggctgggccttagggtgcggggggtggtggaatctgcttgtgggcgggagatgtggctatgtggctataaaggatgaagaygaacgccctgtttgcttttcagcctcgcttggatcaaggttaaaaggccggttgtggccttcttggtggaagaaagagagagataaggcactgtcctccc

SEQ ID NO: 157557 - DNA, 201 bp, Homo sapiens
aaggatctggcgccgtggcattccagtgcttttcttctactcttgggtggaagaggaagaggaggcttatcctccatgagccctcatggggagtgggccgyaggatgggtttctcagccaggggcgactctgcgctgtctgcctcagacatttgggaatgtctggagacagttttggttgtcactggggaagggtttgctc

SEQ ID NO: 157558 - DNA, 201 bp, Homo sapiens
ggctgggcgttggtgtgtgcctgtggtcccagcactttgggaggctgagctgggaggattgcttgagtccaggaggtcaaggcgtaagcaagctgtgatcrcaccgctgcacaccagtgcctgggcaacaaagtgagactctgtctctttaaaagaaaaaagaaaaaaaagcctttttttaaattaaaaaaaaaatcaagt

SEQ ID NO: 157559 - DNA, 201 bp, Homo sapiens
taaggatctggcgccgtggcattccagtgcttttcttctactcttgggtggaagaggaagaggaggcttatcctccatgagccctcatggggagtgggccrtaggatgggtttctcagccaggggcgactctgcgctgtctgcctcagacatttgggaatgtctggagacagttttggttgtcactggggaagggtttgct

SEQ ID NO: 157560 - DNA, 201 bp, Homo sapiens
actctgttgcccaggctggagtgcagtggtgcgatctcggctcactgcaacctctgcctcccgggttcaagcgattctcctgtctcagccctctgagtagycgggactacaggtgtctgccaccacaccccgctaattttttgtgtttttagtggagatggggtttcaccatgttggccaggctggtctcaaactcctgac

SEQ ID NO: 157561 - DNA, 201 bp, Homo sapiens
agcagcagggggtctacacccaaggccagcgggccagcatcagtggccagggcaggtggtgcagcccctacaggtattaaggcccaggcacagggcgcccyatcaggaagcatctccctctgaactgcctctccatccagatgggcctgggccaggtcttactcttgggcagtagaggaagatgccctctcctggccccaa

SEQ ID NO: 157562 - DNA, 201 bp, Homo sapiens
gtgacgtggtggaggtacggcatgcgtcccgggaccagggcccctgcccctgcctgctccaccacccctgctcgctgggctccggctgctgccgtcctgtwggagagaaacgacactttctctgatgacagaggctctgggccaaaccccagggccagcctgtctggagttctggggcaacctggacatgggcctcggctc

SEQ ID NO: 157563 - DNA, 201 bp, Homo sapiens
cccacatctacgccattggtgacgtggtggaggtacggcatgcgtcccgggaccagggcccctgcccctgcctgctccaccacccctgctcgctgggctcyggctgctgccgtcctgtaggagagaaacgacactttctctgatgacagaggctctgggccaaaccccagggccagcctgtctggagttctggggcaacct

SEQ ID NO: 157564 - DNA, 201 bp, Homo sapiens
agccccgacactcagaagatcctggtggactcccgggaagccacctctgtgccccacatctacgccattggtgacgtggtggaggtacggcatgcgtcccrggaccagggcccctgcccctgcctgctccaccacccctgctcgctgggctccggctgctgccgtcctgtaggagagaaacgacactttctctgatgacag

SEQ ID NO: 157565 - DNA, 201 bp, Homo sapiens
ttggcagccatcgggcacctcggccctgctctcctggccgtgaggtgaccttagtgctggctaggccctcaggcagggctgcccctgtgagagcagcagcrtcaggtggggctgcagtttggtggggctgcagttgagagcacctgtttcctggcctcgggtttgggctcctcccacagggtcttggcacatgagctcacc

SEQ ID NO: 157566 - DNA, 201 bp, Homo sapiens
cctctctgccacaccctgcatggggcagtgtcaccctctcctgcccccaacacccctgagtgacattgggcagttccccaggccccctgggtggtccacaygcaggggaggggacacacagttatggagggcttcgagggccacagcggggcagcaggggagggcagggcctggcagggctctgaggagtggacagggggt

SEQ ID NO: 157567 - DNA, 201 bp, Homo sapiens; identical to SEQ ID NO: 29516

SEQ ID NO: 157568 - DNA, 201 bp, Homo sapiens
ggattggctgtaggtaaatttgtttgtgctgggggctgcgttgggactgcttgacgcaaaaacacaacattggtctgagtccgaggtgtcccatttgataytggggcctgggactggccttgcttcctgtttccctggttctgtggcaagggattttcatctatatcagactgagtggcaagtacttgcccaatgtttacc

SEQ ID NO: 157569 - DNA, 201 bp, Homo sapiens
tggtctccttcctctaccaccatcttcgagctgggctctctggctgggcactgcatggccctgcaagctgcctgaggttcttcctggaccaggcaggggcrtaaagaggtacacgctggcgtcctggctgccaccccgagcagaaggcaggcagggaggaactggctccgtgtgctcccatgtccctctgcgcccgggctg

SEQ ID NO: 157570 - DNA, 201 bp, Homo sapiens
aggcaggcagctcagggctgcttcgctctccctgccacgccctcccagggtgtctgccaaggcttgcttgcgttttagtccctttgattgccagacctttyggttttccttgagtaaacctgagaaattcctgactttatttttttttgccagttggaagcataaactgtttgagatccgcttcctccaccagcacatctt

SEQ ID NO: 157571 - DNA, 201 bp, Homo sapiens
ttgctactggagggcggccgagataccccacgcacgtgagtgtccccagagcatagcgtccctgctgccgtggcccattcccggcctctttgagggatacrtttttacacacgtgcttcccacagcagcagcttgcacaccctttccccctatactcactatcatcactttctgctttccaattctcttgaatccacactg

SEQ ID NO: 157572 - DNA, 201 bp, Homo sapiens
tggggaagggtttgctcccctttgcggggagcccagggatgctacagccatgcacagcacagccccaccaagaacagtgcatctccaaggccaggagtgcrggtgggaggccgcttcagctgagctcttctgggaaggggaccacgtggcccagccacacccacattggctcagataggcctctgcctgcagtgggtagcc

SEQ ID NO: 157573 - DNA, 201 bp, Homo sapiens
gagacggcccagggagtgcagggtggggccagagccgggtgctctccgcctggccccgcggccgccgtcccgccgccttcacatgtttttatggtgcaatraaaatatgactttaattcctcagattgttctgtgtaacctgcaattacccccggcgacatcctccacacttctgctgtggcaccggatctcgcaaagacg

SEQ ID NO: 157574 - DNA, 201 bp, Homo sapiens
gggccaacagtggtttcgatcctgcgtctccctggagacggcccagggagtgcagggtggggccagagccgggtgctctccgcctggccccgcggccgccrtcccgccgccttcacatgtttttatggtgcaataaaaatatgactttaattcctcagattgttctgtgtaacctgcaattacccccggcgacatcctcca

SEQ ID NO: 157575 - DNA, 201 bp, Homo sapiens
cccaccagcctggtgccccacgcttggcttgagggctagttcacacttatgtccagagcccacagctatctgacaggccagccggcacctgcatacatggwtgtccaactgggtcttgttaccatgacaaattcagtacttaatgattagaactgagtggaaaccaattaaaaaaaaaagaacaacatggtgaaaagtctt

SEQ ID NO: 157576 - DNA, 201 bp, Homo sapiens
tctgtttccttcaggtcgagtcccagacaccagaagtctgaatttggagaaggctggggtagatactagccccgacactcagaagatcctggtggactccygggaagccacctctgtgccccacatctacgccattggtgacgtggtggaggtacggcatgcgtcccgggaccagggcccctgcccctgcctgctccacca

SEQ ID NO: 157577 - DNA, 201 bp, Homo sapiens
tggcatctcatggcacccggttcctgaggggctgtgccccctcgcgggtcaggaggctccctgatggccagctgcaggtcacctgggaggacagcaccacmggcaaggaggacacgggcacctttgacaccgtcctgtgggccataggtaagggcacgtcgagccacacgctctgtctctggtctccccgaggtgcatgga

SEQ ID NO: 157578 - DNA, 201 bp, Homo sapiens; identical to SEQ ID NO: 29527

SEQ ID NO: 157579 - DNA, 201 bp, Homo sapiens
cagggccaggctggggcatcctgagcaaacgcctcccagtgcaggggcttctaagtgcagttaagtttagatttggttttaaagaagggacagactgcctytggactgcagccctgaaaaactggaagttgagatcttcatgtgcccctttggcgtccccagcccctctggatggttctctgtccctctcttgagggtgag

SEQ ID NO: 157580 - DNA, 201 bp, Homo sapiens
agagcacatggcatctcatggcacccggttcctgaggggctgtgccccctcgcgggtcaggaggctccctgatggccagctgcaggtcacctgggaggacmgcaccaccggcaaggaggacacgggcacctttgacaccgtcctgtgggccataggtaagggcacgtcgagccacacgctctgtctctggtctccccgagg

SEQ ID NO: 157581 - DNA, 201 bp, Homo sapiens
gggctctggggaggcctctctgggggtactcagggccccctgcttcaccgtggccgcctccccccggcggggccgcgctcgatagggataaacaaagggcrtcctgaggaaactcttatcagaacattacacctcccagagctgttttgttaggagcctgctataaatttttatcatttcaaaatatttttgtagcaccgc

SEQ ID NO: 157582 - DNA, 201 bp, Homo sapiens
cccacgtgcagctgccccgctgggagttcttgttcgtgttaggttctgtgcccgtttgcatgtgtgtgcatgcatgtgtctacatgagtgtgtgcatatgwatatatgaatgaatgtacccatgcgagtatgtgcgtgtgtgtgtacatttgtgcccgtgtaagagtatgtgcatgcaggtgtgtggcatgtgtgcacata

SEQ ID NO: 157583 - DNA, 201 bp, Homo sapiens
tagggtctgcatggcgccgaggggctctggggaggcctctctgggggtactcagggccccctgcttcaccgtggccgcctccccccggcggggccgcgctygatagggataaacaaagggcatcctgaggaaactcttatcagaacattacacctcccagagctgttttgttaggagcctgctataaatttttatcatttc

SEQ ID NO: 157584 - DNA, 201 bp, Homo sapiens
cataccaccatgccccagtaatttttttagtttgtagagatggggacaagctgtattgctcaggctggtcttgaactcccgggctcaagcagtctgtccaycttggcctcccagagtgctgggattgcacacatgacccaccgcacccaacctctgggtcttttaatgcagcggtaagttgagtggttccagccccctacc

SEQ ID NO: 157585 - DNA, 201 bp, Homo sapiens
atcctgtaaccaggccacagcggtgacaggcagaaggggaagttcccaggggcccaaacctccccgggggaccccagaccccggcctggccacagctgctycccacacacaggaggtatcaagaaacggggctcatccttagcagcctatcccaggtggatgttggcgtggaaggtgtcccgggtgggctaaagtcgggca

SEQ ID NO: 157586 - DNA, 201 bp, Homo sapiens
aatgctaaatataattgggagtggggagtagttaaattatgcttttaaaccagccttgtcttcttttacagtaacttgaagaggtttagtaattttttcaygttttggaccgagaccgagtctggaaacaaaccccatgttttccattatatgttgactgggagcactgtaaaagttatgtggaatattaatttcagcccc

SEQ ID NO: 157587 - DNA, 201 bp, Homo sapiens
aatgttttagtccaccttggtggctcatgcttgtaattctagcaccttgggaggccaaggtggaaggattgcttgaggccaggtgtttgagaccagcctgsgcaacatagccagaccccatctctacaaaacaaaaaaatttagctggacgtggtgatcggtgcttgtagtcccagctattctggaggctgaggctagagg

SEQ ID NO: 157588 - DNA, 201 bp, Homo sapiens
tgatgcaccaggcggcactgctgggaggcctgatccaagatgcccccaactatggctgggaggtggcccagcccgtgccgcatgactggtaaggatctggygccgtggcattccagtgcttttcttctactcttgggtggaagaggaagaggaggcttatcctccatgagccctcatggggagtgggccgtaggatgggtt

SEQ ID NO: 157589 - DNA, 201 bp, Homo sapiens
tctgcctgtccccctcctgccaggctgatggttgatgggattccagctccatagggcctctgaactgctggccaagggtccacgctacagggcaggggccrtgggaactgctggccaaggtctgtggtgctcaggccctccggtggggtgatcaccatgcacctgtctgacccacggctttctctttttctcctcagattc

SEQ ID NO: 157590 - DNA, 201 bp, Homo sapiens
tcctgggtttacaccattctcctgtctcggcctccccagcagctgggactacaggcgcacatcgccatgctcagctaattttttgtatttttagtagagayggggtttcaccatgttagccaggatggtctcgatctcctgacctcgtgatctgcctgcttcggcctcccaaagtgctgggattacaggcgtgagccaccg

SEQ ID NO: 157591 - DNA, 201 bp, Homo sapiens
gaaaatcttatctttatctttcagaaaagtcaagtactttaacatcaaagccagctttgttgacgagcacacggtttgcggcgttgccaaaggtgggaaasaggtgagcatctgacttactcgcgtggctccttgtggacccttctgcagaccttgggcaccaactgcagctgtgtttggcctgggtgctgttcttagtaa

SEQ ID NO: 157592 - DNA, 201 bp, Homo sapiens
cacatcccctccatgcttctcagcatggttgccgcttacctcttggtccatctgagccacagcaccaggccctgctgggggctggagctcccttttaccastgttccctattgatccagttggtgaggtttaatttgcagaggaagtgtttgaaaatcttatctttatctttcagaaaagtcaagtactttaacatcaaag

SEQ ID NO: 157593 - DNA, 201 bp, Homo sapiens
ggctggagtgcagtgacacgatcttggctcactgcaagctccacctcctgggtttacaccattctcctgtctcggcctccccagcagctgggactacaggygcacatcgccatgctcagctaattttttgtatttttagtagagatggggtttcaccatgttagccaggatggtctcgatctcctgacctcgtgatctgcc

SEQ ID NO: 157594 - DNA, 201 bp, Homo sapiens
tctctccgggaatgggccgccctctgggccttctcttgggcgttctgtgcctggacacacacttacttactgtgcagagcatgctctggcaggctctgggrgttcatgtcctgctcatgggtggggatgaggacaaggagcagatgggagtgactgtaggggaaggggagactgccctttgctgctgagcagagcctggag

SEQ ID NO: 157595 - DNA, 201 bp, Homo sapiens
tgggctgcatccccaagaagctgatgcaccaggcggcactgctgggaggcctgatccaagatgcccccaactatggctgggaggtggcccagcccgtgccrcatgactggtaaggatctggcgccgtggcattccagtgcttttcttctactcttgggtggaagaggaagaggaggcttatcctccatgagccctcatggg

SEQ ID NO: 157596 - DNA, 201 bp, Homo sapiens
atatggaccccggggctgctcccctggcccctgagtgcctcccgtagtcgggtgggacatttctacctggtcccatcctggaggccaggtgcgcaactcasggtgcctggcatcacagtgcccctcctgcagtgggcactctgtcccctggttggctcctccaccaaggaggctccctgtccccctggccccaggccctcg

SEQ ID NO: 157597 - DNA, 201 bp, Homo sapiens
ctggccttgctgtctccctagcaaggtggctggggcttggggagcgctcctctgcaaccctgtgctgggggcagctggctcggccgggaagacacagctcyagatattttgttcagaaaagaaactgcagtgtttattttcttcagaaaaaaaacatttagaagattttttttaaagctctttcgtttagaaggaatctag

SEQ ID NO: 157598 - DNA, 201 bp, Homo sapiens
ctgaaattaatatggaccccggggctgctcccctggcccctgagtgcctcccgtagtcgggtgggacatttctacctggtcccatcctggaggccaggtgsgcaactcacggtgcctggcatcacagtgcccctcctgcagtgggcactctgtcccctggttggctcctccaccaaggaggctccctgtccccctggcccc

SEQ ID NO: 157599 - DNA, 201 bp, Homo sapiens
tcctctgaccaccaggtatggaattgtaaatgctgagatggagttagaacagcttttgccaaaaggtcgcagtctataggaagcaaaatgacctcggtacraagagtctgtaataccgttttaacatatggagaagtaggaccatactgagtacaagcatccttgaattcttttaaaaaggtaagattgagcggcgtatat

SEQ ID NO: 157600 - DNA, 201 bp, Homo sapiens
tacacttagtggctttttgatttattgcatgttcagaaaggcctgccccacccccaagattttttttttttttttttaagccctgtattttccttatgggygtccacaagtcggattttcttttacttccttgggctggctgcacttcttctgcggtgtggtggagatgggttgcccgggccccagtgcccatctcgaggc

SEQ ID NO: 157601 - DNA, 201 bp, Homo sapiens
gcttctagatggatacaaccaggtgcatgtccaaggcacagaggagggtatttataacccatagtaacattaaatgcagtgccttctcctggctgagcggkgcaacggtcatctgtagttccaggcatccacacactatcgttagtatagatttctgcaggagcatccatccaggtgagaggtcgaataagtggaggaaaa

SEQ ID NO: 157602 - DNA, 201 bp, Homo sapiens
tagttagaacaatattctctgaagttccattaattaataatggctgtacagcacatgtgagggccccactcattttttacttggccgcagccccggacacrctgtcgagcccttcaggggtgctgaaagcctttgtccaacagctccggctccggtgtggccacagcggccttgctccagtgagggccaagcaaacaccag

SEQ ID NO: 157603 - DNA, 201 bp, Homo sapiens
gcgggaagggacacgttgggggcagcctcagaagtgggggtgcctgggctttggcagccttggggtgactgggcttaggtgcctctggtctctgccaccaygtgtcacagcagtgaggggaaggcccttggctgccttgttctgagggcaaggagaagccctgtggcccagaagcccccagccccaccccagccatgctgc

SEQ ID NO: 157604 - DNA, 201 bp, Homo sapiens
ctctttgtgtcacatgcagtggggaacttcggttttcggggcccaagggccctccctgactccagacctgctttcaggttcccacgaccgtcttcaccccrctggagtatggctgtgtggggctgtccgaggaggaggcagtggctcgccacgggcaggagcatgttgaggtgaggcctgggagcagcacagctgaggaca

SEQ ID NO: 157605 - DNA, 201 bp, Homo sapiens
tgtgggtgtgttgtacacacgtgtgtgtgcatgcatgggtgtgtggctcagttctgagagtgtggcgcaggcgtgggcaggtgggtcgcctactgtgcttkcagcctgctctgggcgcatctggtcctggtctgtgatcgctgctctttgtgtcacatgcagtggggaacttcggttttcggggcccaagggccctccctg

SEQ ID NO: 157606 - DNA, 201 bp, Homo sapiens
gctacgtccacccaggtttgctgtgcctggcctggctgcttggattgcctgatgcctgctctgctgctgtggtttacgggggtcccaggcctgggtgggasagggtctgtcctgcagagcatggctccagccactggctgcctgcacgtgagagggcctgcacacaccccgtggccagccaagccctcatccccatcccag

SEQ ID NO: 157607 - DNA, 201 bp, Homo sapiens
ggcggaggttaccgtgagccaagattgtgccactgcactccagcctgggtgacagagcgagactccatgtcagaaagtgtcagctgggccaggctccctcrgaagcctctggggtaggatgccccaggcgtccctcgggttgtggctatatcactcctctctctgcctcatcgtcatgtgacagtctcctgggtgtgtctc

SEQ ID NO: 157608 - DNA, 201 bp, Homo sapiens
gtgtctgcgtcctggggctgtggtaccaaatcaccacacacgggtggcccagaacaacagacatggattatctcacgtttggggggcagtagtctgaaatsaaagtgtcagctggggctgggtgcagtgtctcatgcttgtaatcccagcactttgggactccgaggcaggcagattacttgaggtcaggagttcaagacc

SEQ ID NO: 157609 - DNA, 201 bp, Homo sapiens
gctgagacagggtttcatcatgttggccagcctggtctcgaactcatgacctcaggtgatttgcccacctcgtcctcctacagtgctgggattacaggcasgagccactgcacccggtctctaagtggacattctgagaaacagtttaaacacaaccgctctaggtcaaagccactgaagataacctttcagccccctctc

SEQ ID NO: 157610 - DNA, 201 bp, Homo sapiens
agtgttggggattttctaaagggagatgcccactcggagggcaaagggtgatggcataggggctgcatataaccccggacatggtgctgacgtggcccccctgtgccttccccaaggggcggcctgagctgacacccacagcgatcatggccgggaggctcctggtgcagcggctcttcggcgggtcctcagatctgatgg

SEQ ID NO: 157611 - DNA, 201 bp, Homo sapiens
agagttaacacccaaccagtggtcccttgagcggctgggaagagcctgtgggcggggcgggggctattgtttaatgagatgttgtgtgctgtgcgccgcccgccgggatgtttccgtagttagtcaggcctgctggaatgcgcaggctgcgctctgagtttatctccacggatctctatgcatttctggaatgccaaacaa

SEQ ID NO: 157612 - DNA, 201 bp, Homo sapiens
tagctgggattacgggtgcatgccaccacacccagctatttttgtatttttaatagagacagggtttctttcttttcttttctttctttttttttttttttgagacagagttttgctcttgttgcgcaggctggagcgcaatggtgcaatcttagctcactgcagcctccacctcctgggttcaagcgattcaacctcccg

SEQ ID NO: 157613 - DNA, 201 bp, Homo sapiens
gtagctgggattacgggtgcatgccaccacacccagctatttttgtatttttaatagagacagggtttctttcttttcttttctttctttttttttttttttgagacagagttttgctcttgttgcgcaggctggagcgcaatggtgcaatcttagctcactgcagcctccacctcctgggttcaagcgattcaacctccc

SEQ ID NO: 157614 - DNA, 201 bp, Homo sapiens
aagcgtgcagaggagagtgtgggtgcagcgtcagatgttctgttccggcacggagcaggcaccaggaagtgctgggcctggtgggctggacaccaggttgragagggaccagacggctgagcgtgagcccccggcctgcagggaccacagcccctccttcgtgccccagccctgcccatggggcccagctccttcctctga

SEQ ID NO: 157615 - DNA, 201 bp, Homo sapiens
cctatttccatgcctcttttatctcttgtgactacttttaaatttatctttatttccttcgggacctggggacagggtttggtcagcacctgcaaggtctrtagttgccatagtgccatagttaccatgaggaacatgatgagtgctcttggcttcccaggaccagccaggcaagcgtgcagaggagagtgtgggtgcagc

SEQ ID NO: 157616 - DNA, 201 bp, Homo sapiens
ggaattccaaacactctagaagaacagggaagcctccagcagtcacctgaacataaattcaaatgtgctcttcccacgtcccaggcacccggtggggcctyggcggcacctgcgtcaacgtgggctgcatccccaagaagctgatgcaccaggcggcactgctgggaggcctgatccaagatgcccccaactatggctggg

SEQ ID NO: 157617 - DNA, 201 bp, Homo sapiens
cagttttggttgtcactggggaagggtttgctcccctttgcggggagcccagggatgctacagccatgcacagcacagccccaccaagaacagtgcatctycaaggccaggagtgcgggtgggaggccgcttcagctgagctcttctgggaaggggaccacgtggcccagccacacccacattggctcagataggcctctg

SEQ ID NO: 157618 - DNA, 201 bp, Homo sapiens
gattcggcatcaaaaggaggaaaaaggttcaaagggcatttatcatggggttcagaatcacggatgtgaggggcggtagtggggacaacagacagaaaagyttccccttcccatactcacagtccagacacggcaatagccaaattccaaatttctaggtattctggactcagaatggggaatatcatacgagacttaggg

SEQ ID NO: 157619 - DNA, 201 bp, Homo sapiens
tgtcctcaggtctatcacgcccattataaaccactggagttcacggtggctggacgagatgcatcccagtgttatgtaaaggtgagcatccctgtggcccrgggtgctgaggatgagagggagggtggcaaagagcctggcagggtgaacacccgaggactggccccacccatgcctcccaggcagggtgcagggtggatg

SEQ ID NO: 157620 - DNA, 201 bp, Homo sapiens
cacagagctggtgcccttcctctgcccacgaatcccgtggcccacgactgctcatgaatacagcctgaagagctgtacctggaattttaatgcccttgtcrtttgcagaaaatatgccagagtgtcatgtatccattacgtaataagctcttacaaagaaggaacatggtgaagatgcctataaatggatgagaaaaggca

SEQ ID NO: 157621 - DNA, 201 bp, Homo sapiens
gcacccagactgtttttttaatctttgactatctgctgagttacacatgatctgactctgtttgcatttgctgtgatcagtggtcttttcacacatttacstgaaaagcctcgtgtcacagcctcatttgagatgagcgtgtctgtgagcatgcccatgtgtgctgcacaaatcgccagcatggtccttgtccactttcac

SEQ ID NO: 157622 - DNA, 201 bp, Homo sapiens
agcttttctaacaccttctagtttcatgttagtgggatgtttaagccaggaggaaggccataaattagaggaaataatagaaacatcagccccagtatcarctaggccctcaaccttttttccttgaatgtgtatggtgcaggtaggccattgtttagaaattacattaatccaataagcggctttttcaccgctggagcc

SEQ ID NO: 157623 - DNA, 201 bp, Homo sapiens
ccaggacaggggctagacactccacagagagcaagaggacgtagagcagggggcagggtgtctcaccccgtcttccgcacagacccctctccgcccttcaytgaggccttcgagagcagggcagggccagagcctctctcccacggccacctggtcttcatggcctgtcttcttgtgctttgcagcaaatgtcctccatgg

SEQ ID NO: 157624 - DNA, 201 bp, Homo sapiens
agccctccagctcttctgctttactcacagtgacagccccaatccgactagtctcagctcccaccactcacaccctccgtgggctccccactttccttcaygtgcttctggacagtcctctccttcaccttactgtggctgtcaccctgcctgcctgctctctgcccctgcccggctagctgcgaggctggagctgcaccc

SEQ ID NO: 157625 - DNA, 201 bp, Homo sapiens
ggacagcaccaccggcaaggaggacacgggcacctttgacaccgtcctgtgggccataggtaagggcacgtcgagccacacgctctgtctctggtctcccygaggtgcatggagaatctttgccccacttcctgtcacctcccagggctcccccatcctgctggctgccaggcgggttggccgctccccagtgcacctcga

SEQ ID NO: 157626 - DNA, 201 bp, Homo sapiens
tgtgatctcagctcactgcaacctctgcctcccgggttcacgccattctcctgtctcagcctcccgagtagctgggactacaggcgcccaccaccacgccyggctaattttttttatttttagtagagacggggtttcactgtgttaaccaggatggtctcaatctcctgacctcatgatccacccacctcggcctcccaa

SEQ ID NO: 157627 - DNA, 201 bp, Homo sapiens
ctgcaggtcacctgggaggacagcaccaccggcaaggaggacacgggcacctttgacaccgtcctgtgggccataggtaagggcacgtcgagccacacgckctgtctctggtctccccgaggtgcatggagaatctttgccccacttcctgtcacctcccagggctcccccatcctgctggctgccaggcgggttggccgc

SEQ ID NO: 157628 - DNA, 201 bp, Homo sapiens
tgtggatatatgttttaaattattttgggtaagtgcctaaaaatggaccaactggatcgtgtggtatatctcttatttaggtattttttcatttcttttarcagcattttgtagtttcttttttactcaagtttttttttttattaaaaaaaagaaagatgagggtctctctgtgttgcccaggctggtctcaaaatcctg

SEQ ID NO: 157629 - DNA, 201 bp, Homo sapiens
ttgtcactgacacacacgcccttcaccaccaggcgatttgctgattcacaacatgcttgacagtgtagccttggaaagtgggctttgtcccctggggcaarctgtttgaacagtaaccttggagcccacgagctgaccaagggcctgggcaaaggctgcggggttctgctctgactgcacttggtcaataagggcctcagc

SEQ ID NO: 157630 - DNA, 201 bp, Homo sapiens
agtgcctaaaaatggaccaactggatcgtgtggtatatctcttatttaggtattttttcatttcttttaacagcattttgtagtttcttttttactcaagtttttttttttattaaaaaaaagaaagatgagggtctctctgtgttgcccaggctggtctcaaaatcctgggctcaaatgatcctcccaccttggcctccc

SEQ ID NO: 157631 - DNA, 201 bp, Homo sapiens
ggagagaagtgacctaaactatcctagttgaaggaatctatccttgaaagtcatcattgaaggaattcaaaaagagaaaacttaagggaaaggaaaaaaayagttttaaattttaaagagtgggcatgtgggagagggggtggagatagttaagagttataggaaaacatttccaattaatatgaggagaaattttatatt

SEQ ID NO: 157632 - DNA, 201 bp, Homo sapiens
aaaagggacccaaaggtctgggatcttgaacactgaaggaggaacagtgttctgtgagaaaggtttgtttttaacatgttaatttcttcaacaaaccattygaatacttaatgtggtccaagctctgggccaggacccggaacaacaaagacaaaccaggaccaaagcccctgactgacggagttctgcagtttagttacc

SEQ ID NO: 157633 - DNA, 201 bp, Homo sapiens
gcttcagctgtttttcctgactttaaatgttccctgtgttgctgcaagcctgtggttaatttccataattctgaatctcccagttcttgccagttttatcrctgtttttaacagagaggtgaataactcctggcccagtcttgtgggttgtgggggcagagttgaggaaggggccccggggtgaggggttggggggcagct

SEQ ID NO: 157634 - DNA, 201 bp, Homo sapiens
acagctgcttatttggtgacttttcggaactgactttgtagactcttattctttgatgtatgtggccactgaagtctttacttggttagcttagtggtcarctaagaactgcatggagatttccctaaactaagaactctcccggtctttgctgagggctctgtgtgcgtttggaggggatgccttccacactcaacaggc

SEQ ID NO: 157635 - DNA, 201 bp, Homo sapiens
  misc_feature (1)...(201): n = A,T,C or G
gcggttgcacgtagggatggatgtcacgttttgccacctttaaaagcactcttgttttttgatatttctatgaatgtaccatttgaatctaatagtccatngtgaggccctgcagctaacacctgtgttgtggattttacattttgtttcgtatcttcacaggaggaagatggcagaagctgttcaaaatcacgtgaaatc

SEQ ID NO: 157636 - DNA, 201 bp, Homo sapiens
tgttttgccagccttgtcatgcccgttctcttggtgttaccacacccctgaaatcagaaggtgacaccatctggtgggcaccacagctccctgctggaacrtgtccgggtgatgaggactgtccccaagagaggtccagccacctcttgctgcacaccagggctgtacgtggcctcttaggaccgtgctgagctggcttcc

SEQ ID NO: 157637 - DNA, 201 bp, Homo sapiens
tctttaagcctaggcttcgtgggcctgaattaatgcttttgtttctgcttcctccccccattccaattttgaacaagaaagcctgccctgtgattaggctmatcctgcagtagttattatgcctctttggaaaatgtttgcacaccaaaaagcacagagagctgagctgctgggatcacatggaaaactgatttttatttg

SEQ ID NO: 157638 - DNA, 201 bp, Homo sapiens
ccaggctgaagtgcagtggtgtgatcttggctcactgcaaccgacacctcccgggttcaagcaattctcatgcctcaccctcccaagtagctgggattacrggtgcatgccaccacacccagctatttttgtatttttaatagagacagggtttctttcttttcttttctttctttttttttttttttgagacagagtttt

SEQ ID NO: 157639 - DNA, 201 bp, Homo sapiens
gtcatctgaccagtgtccgtttcagacctgcctgccacctcctgcagaggccaggagcccctctacgctgctggtgcttcacatttggccagttctaagtrgacattcttttttcttgagacagtctcactctgtcgcccaggctgaagtgcagtggtgtgatcttggctcactgcaaccgacacctcccgggttcaagca

SEQ ID NO: 157640 - DNA, 201 bp, Homo sapiens
ctcttcctttcccgcgtgccaggaaccagtctaaggccgactccagtttccaccggtggcacccctgccttgtctcctgtgccggctgtcatctgaccagygtccgtttcagacctgcctgccacctcctgcagaggccaggagcccctctacgctgctggtgcttcacatttggccagttctaagtggacattctttttt

SEQ ID NO: 157641 - DNA, 201 bp, Homo sapiens
tgcctaatggtatcaggctgtggtgctgcagacagatgcagggaggccaggcaggccaggtgccaacagctccccatgaagggctggtttctccggatgargtcagtaccagagccactggcactgtgctggtggccctgcagcagggcctgaggcctgggcatgcggaagattctggagtcccgcgcttagcactctttg

SEQ ID NO: 157642 - DNA, 201 bp, Homo sapiens
gtcaccaggcaccggccccactggccagacttcccaacttctccccagacccctagactctagaggttagaggctgcacagagcaatgggaggatacacaytcgtcctcctggagcccctgaagaacagttaactaaatcaggacaataatcataactgagcactcgaagcagaggctgggtgtctggtcactcaggacag

SEQ ID NO: 157643 - DNA, 201 bp, Homo sapiens
gggccagatcccaggacttgagcattgttggggtacagtccagggtgtggctggctcctcttcagcttgtccagatagggaggaggccattgggagccagmaggtgtcccttgaaggaggcccctctggactcttgaggcctgggagctgatggatctcactgcctaatggtatcaggctgtggtgctgcagacagatgca

SEQ ID NO: 157644 - DNA, 201 bp, Homo sapiens
cacctggggttgggagggaaaagctgctgtggccatccgctggcctggcaaaatcacacccatctgagttaggggagaaagggacctctgctggctgttcrgctatgaagaggcccatgcggtgccctctctccgggccccaggctgtgtggagactggcagggggcagctgtgctgaccccctggactggccatcccctg

SEQ ID NO: 157645 - DNA, 201 bp, Homo sapiens
attagttagaggggtttacattgccattagggaggattgaaccagacccattttgatttggcatgccagtttctgaggagtcggtacagatctcatcaggtatgagggcagtctctgacgcgaacgtctcttcctcgtggtttttattgtcagtattcacacgaagtttaagtctcctagtgggcacccagacgggattga

SEQ ID NO: 157646 - DNA, 201 bp, Homo sapiens
gcagggcaggtgcgtccccttccccctggtgggctcatagctgcgggtaggggcccggggctcattgagaaggtgcgattccagaaaaaaaaaaaaaaaaagaagataaatattttaaaataataagcttcaagaatctaagtccagttccaaaggcatacgctcctctgtgcctggtccaaggtgcctcactggggcaag

SEQ ID NO: 157647 - DNA, 201 bp, Homo sapiens
gggtttcactgtgttagccaggctggtctcgaactcctgacgtcatgatccgcccgcctcagcctcccaaagtgttgggattacaggcgtgagccactgcrcccggtctaataataactgttaaagcaataatgaccactcgccacagagcacgctccttcctgggggtcctctgggcctgagctgggggctgcgccgtac

SEQ ID NO: 157648 - DNA, 201 bp, Homo sapiens
agcagggcaggtgcgtccccttccccctggtgggctcatagctgcgggtaggggcccggggctcattgagaaggtgcgattccagaaaaaaaaaaaaaaaaagaagataaatattttaaaataataagcttcaagaatctaagtccagttccaaaggcatacgctcctctgtgcctggtccaaggtgcctcactggggcaa

SEQ ID NO: 157649 - DNA, 201 bp, Homo sapiens
gttttttgtttgtttttgagacggtgtctagctctgttgcccaggttggagtgcaggagcgcgatctggctcaccgcaacctccacctcccgaattcaagygattctcctgcctcagccttccaagtagctgggattacaggcacccgccaccgcgcccagctaatttttgtatttttagtagagacagggtttcactgtg

SEQ ID NO: 157650 - DNA, 201 bp, Homo sapiens
cagccggcacctgcatacatggttgtccaactgggtcttgttaccatgacaaattcagtacttaatgattagaactgagtggaaaccaattaaaaaaaaaagaacaacatggtgaaaagtcttctagagataggtcagcaccatttatgcatattaccatgcaccctctaatgtctgcaggtgccctggggcagccaacct

SEQ ID NO: 157651 - DNA, 201 bp, Homo sapiens
gcaccacacagaggccacccccacagcctgcccctgtatagtctcccccacgtggcacgtgtgcctggaccacagccagagagactggggtgcccaggagrtgatgatgggggctggcggtgcccaggaggggagctgttgccagggtgggctgcagccctgggctcctctctccacccaggcactgtttgctggcatgta

SEQ ID NO: 157652 - DNA, 201 bp, Homo sapiens
aaacacaacatgcatggagcatgggagcttggcttcccggcttcctcttggcaccacacagaggccacccccacagcctgcccctgtatagtctcccccaygtggcacgtgtgcctggaccacagccagagagactggggtgcccaggagatgatgatgggggctggcggtgcccaggaggggagctgttgccagggtggg

SEQ ID NO: 157653 - DNA, 201 bp, Homo sapiens
cccttgagcaattgcttattaaggtttcagcacataaatcctacttgtcaccttccaggtttaagtcttggtatgtttcttttctttttttttttttttttgagatggagtctcgctctgtcgcccaggctggagtgcagtggcaacctccgcctcccgggttcaagcgattctcctgcctcagcctcctgggtagctggg

SEQ ID NO: 157654 - DNA, 201 bp, Homo sapiens
ggggaaggcacgcttctctgccattggttttagtgaagactaagttttttgtttttgttttttaaagaaatgtgtagatgtaccaggatttgtttgtttttcttttttttctttctttttttttggtttgagacagagtctcactctgtcacccaggctggagtgcagtggcacaatctcggctcactgcaagctccacct

SEQ ID NO: 157655 - DNA, 201 bp, Homo sapiens
gggggaaggcacgcttctctgccattggttttagtgaagactaagttttttgtttttgttttttaaagaaatgtgtagatgtaccaggatttgtttgtttttcttttttttctttctttttttttggtttgagacagagtctcactctgtcacccaggctggagtgcagtggcacaatctcggctcactgcaagctccacc

SEQ ID NO: 157656 - DNA, 201 bp, Homo sapiens
tgggggaaggcacgcttctctgccattggttttagtgaagactaagttttttgtttttgttttttaaagaaatgtgtagatgtaccaggatttgtttgtttttcttttttttctttctttttttttggtttgagacagagtctcactctgtcacccaggctggagtgcagtggcacaatctcggctcactgcaagctccac

SEQ ID NO: 157657 - DNA, 201 bp, Homo sapiens
acctgggaggcagacgttgctgtgagctgagatcatgccactgcactccagcctaggcaacagaatgagactccatctcaaaaaaaaaaaaaaaaaaaaaagccccaagccgctggctgagagcacaggtggaagaaagcagctgcctggcatctcccgtggctgaggtcctccctgaaccagccactcctctccatccca

SEQ ID NO: 157658 - DNA, 201 bp, Homo sapiens
gagcccccacagctggtgctgggcctgcatttccttggccccaacgcaggcgaagttactcaaggatttgctctggggatcaagtaagtcccgaggaatgyaggctgcgatgcgatgtgcagctgggtatccctcgagtgccggcagtcctacagtggagagctgctgccactcttgcggcatttatgtggccttcgtggg

SEQ ID NO: 157659 - DNA, 201 bp, Homo sapiens
tttctgtgcactatgctcccagccactgttttgccagccttgtcatgcccgttctcttggtgttaccacacccctgaaatcagaaggtgacaccatctggygggcaccacagctccctgctggaacatgtccgggtgatgaggactgtccccaagagaggtccagccacctcttgctgcacaccagggctgtacgtggcct

SEQ ID NO: 157660 - DNA, 201 bp, Homo sapiens
caacagtggtttcgatcctgcgtctccctggagacggcccagggagtgcagggtggggccagagccgggtgctctccgcctggccccgcggccgccgtccygccgccttcacatgtttttatggtgcaataaaaatatgactttaattcctcagattgttctgtgtaacctgcaattacccccggcgacatcctccacact

SEQ ID NO: 157661 - DNA, 201 bp, Homo sapiens
tcctttccaggggccctgagcagtggctgtgtgtagcgggaagggacacgttgggggcagcctcagaagtgggggtgcctgggctttggcagccttggggygactgggcttaggtgcctctggtctctgccaccatgtgtcacagcagtgaggggaaggcccttggctgccttgttctgagggcaaggagaagccctgtgg

SEQ ID NO: 157662 - DNA, 201 bp, Homo sapiens
tgcaataaaggatgatccactctgggaggttaaaataaagcgccctaggggcggcacagctggcaatgccaacatctccgactctgcttcctgtaccgggygtgcactacgtccgcacaagctgggctccgacaggaaggggggatgcctccgtgcccggtgcacacacacacagaaggggcccaggtgctgcacagagct

SEQ ID NO: 157663 - DNA, 201 bp, Homo sapiens
gggcggaggccttgtgagcagggtgccaaggtctctcctttccaggggccctgagcagtggctgtgtgtagcgggaagggacacgttgggggcagcctcasaagtgggggtgcctgggctttggcagccttggggtgactgggcttaggtgcctctggtctctgccaccatgtgtcacagcagtgaggggaaggcccttgg

SEQ ID NO: 157664 - DNA, 201 bp, Homo sapiens
agagccgtgggtcagagcccctgttttctgtgagtccaaaggtctgcagccctgagcctgggacaggcggttgcacgtagggatggatgtcacgttttgcmacctttaaaagcactcttgttttttgatatttctatgaatgtaccatttgaatctaatagtccatcgtgaggccctgcagctaacacctgtgttgtggat

SEQ ID NO: 157665 - DNA, 201 bp, Homo sapiens; identical to SEQ ID NO: 29517

SEQ ID NO: 157666 - DNA, 201 bp, Homo sapiens
ttcggttttcggggcccaagggccctccctgactccagacctgctttcaggttcccacgaccgtcttcaccccgctggagtatggctgtgtggggctgtcygaggaggaggcagtggctcgccacgggcaggagcatgttgaggtgaggcctgggagcagcacagctgaggacagtggcgactccacgacctcaccccatg

SEQ ID NO: 157667 - DNA, 201 bp, Homo sapiens
tggggcacagagcagctgcatctggagagccgtgggtcagagcccctgttttctgtgagtccaaaggtctgcagccctgagcctgggacaggcggttgcaygtagggatggatgtcacgttttgccacctttaaaagcactcttgttttttgatatttctatgaatgtaccatttgaatctaatagtccatcgtgaggccc

SEQ ID NO: 157668 - DNA, 201 bp, Homo sapiens
cagactcccagtgccacccccaggctgactcagagacgtgtccctccacccgtgtggccatgtgttgttccatcctaaagctatggcacactcccatcatrtccctcagtgcaaacccaccgagccctgtggtagggacgcagtgtctaggaaggcctcagagccttcagatgtggggagggtgagctggcagtggacgga

SEQ ID NO: 157669 - DNA, 201 bp, Homo sapiens
cgtgatgcacaggccaccagcactttgccagactctgtgccctgctgtaggagttcctggtctgctctggccatgtctacacaatgataagagggcagttrtggtgaatggggagggaaggggatgagagggaggtggggctgaaatgagagggagttaactgggcactttggccctgaagctgtgcttctctgatgtcca

SEQ ID NO: 157670 - DNA, 201 bp, Homo sapiens
aacaggcactgtcccctgccctgtgtgggctctgtcccctccagtccttccaggtggttctgtctggtctcaggtagtttcccaagacacatgcgccgatsagatctctcagattctctgggcagccccctcctcactgtcttctgtgcatgacctctggctgcctcagtctcccccagttctcagccctctcctgtgctg

SEQ ID NO: 157671 - DNA, 201 bp, Homo sapiens
gtttgatccttttgggtcttctgcaaaagatttgttaggtgggtatggagcagtgcccagtctagggctaatgattctcaactactggggcatgacccaaygccccaggaattatatgcttttcccagtccagattctgggaacaggcactgtcccctgccctgtgtgggctctgtcccctccagtccttccaggtggttc

SEQ ID NO: 157672 - DNA, 201 bp, Homo sapiens
gatgatgggggctggcggtgcccaggaggggagctgttgccagggtgggctgcagccctgggctcctctctccacccaggcactgtttgctggcatgtacrcggcaggcaactgtctttgctcagctgtgctcggctgatggctcccgtacaccgcagactcagctacacaagtccctgcggattgtccctctgttgagtg

SEQ ID NO: 157673 - DNA, 201 bp, Homo sapiens
gcctggccgtctagtttaggctcctagttttcccaatcaccctgtcaacttgcatgttgaaggcgggagcaacctagtcagtgttgttagttctccgaggmctttctgtgctgagcctggtccgttgtcccctgcgagagcccaagatcagagccagggtccctctcagatcacctgcctccacctccatcagctaaccgg

SEQ ID NO: 157674 - DNA, 201 bp, Homo sapiens
aaattcatcatcttaagcattttaaagtatatagttcagtggtgttaagtacgttcatattgtacaagcagcatgaccatccatctctagaacttttccaytatctccaaactgagctctgtccccattaaacactcactccctgctgcccgggcactcacccttcactgtgtgtctctatggatctgactcctcgaggga

SEQ ID NO: 157675 - DNA, 201 bp, Homo sapiens
tttagcatattaaatgttttgctgcttcaggctttccagctaggtttttttctttttttgcgtgtgaaacagggtctctctctgttgcctaggaggagtgyggtggtgtgatcatagctcactgcagcctccacctcccaggctcaatcaatcttcccatctcagccttctaagtgctgggattacaggtttgagctactg

SEQ ID NO: 157676 - DNA, 201 bp, Homo sapiens
tccccagcaccttgcatctctgcgtgtctccccaccaccgtgggacatgctggaaaaaaccagagaagagactgagacggcatcagccaggtgtcctcatygaggatcaactaggcaatcatcctcgccttccctggcccttgagcaattgcttattaaggtttcagcacataaatcctacttgtcaccttccaggtttaa

SEQ ID NO: 157677 - DNA, 201 bp, Homo sapiens
caagtccaaaaagagtttggtttcgccattttggaagtgcacttccgtgtagagatgtgtatgtggtgcctatgtgtgtgtgcatgtgtggaagtgcgtgyataccgtggtgcctgtttcccaagtgttgccggccctgagcggggctgggaatgcatctctgcaatcctgcttggctgggggtcccagggtcccccttcg

SEQ ID NO: 157678 - DNA, 201 bp, Homo sapiens
ctcgcccagttacacccttgcatttagggcaggatatgcaaagcagcagagttctgtttatatttgcagtaactcataacttcatatctttttttttttttgtgatggagtcttgctctgttgcccaggctggagtgcagtgacacgatcttggctcactgcaagctccacctcctgggtttacaccattctcctgtctcg

SEQ ID NO: 157679 - DNA, 201 bp, Homo sapiens
gggcgagggaccctgtgtcctggacaggctccatggttctccctcagagcctgggatggccatgccctccaggcctctggaggggtgcaggagtgatgaayagcctgtgcggcagcccctctgcagcacagccagccctgcccggcgggccagactcccacacacgccatctagagccagctggcacacccgcacaggtgt

SEQ ID NO: 157680 - DNA, 201 bp, Homo sapiens
catatgctggcaaaatggggccatacctgttgaccagagtgggctgagcacctggtttgtaacctaggagggtgaggaagacgtgcagaaaactcagaaaactcctgaaaaagcagtgtgagcttgtgggtgggtgagcaggacccttgagtgcactggggtggggcgggggacgttctggctgccccactcccatagcca

SEQ ID NO: 157681 - DNA, 201 bp, Homo sapiens
gtttcaccatgttggccaggctggtctcaaactcctgacctcaggtgatccacctgccttggccttccaaagtgctgggattacaggggtgagccaccacrcccagcccacgttaaccatttttaagtatacagttcaatggtattaaatgtattaataatgtcgtgaaaccatcaccactatccatgtctggaactcttt

SEQ ID NO: 157682 - DNA, 201 bp, Homo sapiens
ctgcaacctctgcctcccgggttcaagcgattctcctgtctcagccctctgagtagccgggactacaggtgtctgccaccacaccccgctaattttttgtrtttttagtggagatggggtttcaccatgttggccaggctggtctcaaactcctgacctcaggtgatccacctgccttggccttccaaagtgctgggatta

SEQ ID NO: 157683 - DNA, 201 bp, Homo sapiens
gtgtgtggtgtgtgtgtgtgaagggtgtgggtgtgtgtggtgtgtgtgtgagtggtgtgtgtgcgtggtgtgtgtggtgtgtgtgagcagtgtgtgtgagyagtgtgtgtgagtggtgtgtgtgtgaatggtgtgtgtatgtgagtggtgtgtgagtggtgtgtgtggtgtgtgtgtgtgagtggtgtgtgtggtgtgtgt

SEQ ID NO: 157684 - DNA, 201 bp, Homo sapiens
ccaggagttcgagatcagcatcagcctgggcaatatagtgagacctctactctacaaaaatctgttttggttttttttttggcttttttttttaggtggaktctcactctgtcgcccagactggagtgcaatggcgcaatcttggctcactgcaatccctgcctcccaggttcaagtgattctcctgcttcagcctccaaa

SEQ ID NO: 157685 - DNA, 201 bp, Homo sapiens
gggcggtagtggggacaacagacagaaaagcttccccttcccatactcacagtccagacacggcaatagccaaattccaaatttctaggtattctggactyagaatggggaatatcatacgagacttagggggataatgcccttatcttcctattttaagggaaagaacaaactgaaccttctatgcaaaataggatgatg

SEQ ID NO: 157686 - DNA, 201 bp, Homo sapiens
ggccaggagttcgagatcagcatcagcctgggcaatatagtgagacctctactctacaaaaatctgttttggttttttttttggcttttttttttaggtgragtctcactctgtcgcccagactggagtgcaatggcgcaatcttggctcactgcaatccctgcctcccaggttcaagtgattctcctgcttcagcctcca

SEQ ID NO: 157687 - DNA, 201 bp, Homo sapiens
agaaaggtcgttctgaatagtccaaagagttaacacccaaccagtggtcccttgagcggctgggaagagcctgtgggcggggcgggggctattgtttaatragatgttgtgtgctgtgcgccgcccgccgggatgtttccgtagttagtcaggcctgctggaatgcgcaggctgcgctctgagtttatctccacggatctc

SEQ ID NO: 157688 - DNA, 201 bp, Homo sapiens
cctgtggaccatgtaggtgcagtggtctctggttgcagggtctgttgaatcctgtgggcgctgcaccctgagacagtgccatgtgcatctctgtgcacagygggaagcctcccttctgtctgggaatctgagttttccctctgcaagtgtgtagctcccaggctcctgtgttggaaactggaacatttcaaaccgttttgc

SEQ ID NO: 157689 - DNA, 201 bp, Homo sapiens
tcctgggaactggacactccttcccttgagtccctccctgccacccgcccttccggcaggctctttgctgcctcagatcggcacttactgggcctctcggygtggaggatctactgtgcctggggacagtttgaggctgacctctggccagggattcctggaggctcttcctgagctgggacagctggacatggccatgag

SEQ ID NO: 157690 - DNA, 201 bp, Homo sapiens
ccccctatactcactatcatcactttctgctttccaattctcttgaatccacactgctgaaatgtggggtccccagtggcctccacgctgccagatcctcrggacagctctcgttctgctctccccctgccccgctggatctgtccccttccacaccaggatcctgcttcctaagtctccattgctgattcccccttttcc

SEQ ID NO: 157691 - DNA, 201 bp, Homo sapiens
gccctgtttgcttttcagcctcgcttggatcaaggttaaaaggccggttgtggccttcttggtggaagaaagagagagataaggcactgtcctccccttcrgagggtctggggatacactaatccatcaaaaccactgagggctgggcgttggtgtgtgcctgtggtcccagcactttgggaggctgagctgggaggattg

SEQ ID NO: 157692 - DNA, 201 bp, Homo sapiens
  misc_feature (1)...(201): n = A,T,C or G
ctgagggctcctgcctgtgggcagcgcagctgggtgggcagtgccagaaagagactggaagactcaatgcagagccagcaggcagcgcagctcagcaggcragagcgcagaggcagtcaggggtccctagcattgcgnnnnnnnnnnnnnnnnnnnnnnnnnnnnnnnnnnnnnnnnnnnnnnnnnnnnnnnnnnnnnnnn

SEQ ID NO: 157693 - DNA, 201 bp, Homo sapiens
  misc_feature (1)...(201): n = A,T,C or G
agcactgtgaggggtggatggtacaaaggctgcgggccctgagaggtctgagggctcctgcctgtgggcagcgcagctgggtgggcagtgccagaaagagrctggaagactcaatgcagagccagcaggcagcgcagctcagcaggccagagcgcagaggcagtcaggggtccctagcattgcgnnnnnnnnnnnnnnnnn

SEQ ID NO: 157694 - DNA, 201 bp, Homo sapiens
tgtccttggtaactcaggcatcagctttttgataagacacaaaacagaaaggagcctctcctcccatacccctggcctgggcagtggtcactgctacccakggcgcccacactctcctgagagcagtcactgctacccacggcgcccacactctcctgagagcggtcactgctacccacggtgcacccacactctcctgag

SEQ ID NO: 157695 - DNA, 201 bp, Homo sapiens
gccctggagtgtgctggcttcctcaccgggattgggctggacaccaccatcatgatgcgcagcatccccctccgcggcttcgaccaggtagtgctggaggmcccagctcccgcccctgtggctctgaggccttcctcccacagccccctcccaggcaggtgcagtgcagtcatgggccacgagtgatgcctgaatctttag

SEQ ID NO: 157696 - DNA, 201 bp, Homo sapiens
cctggtgcagcggctcttcggcgggtcctcagatctgatggactacgacaatgtgagttctctagcaggacgccacgtgcagcctaggacaggctgagttygaggctagctcttctggggtgaggggcctttgtgcgctgtgtgtctgcatgtagatgtgggcatgcgtgtgtgtgcgcttatgtgggtgtgttgtacaca

SEQ ID NO: 157697 - DNA, 201 bp, Homo sapiens
  misc_feature (1)...(201): n = A,T,C or G
gggcaaagggtgatggcataggggctgcatataaccccggacatggtgctgacgtggcccccctgtgccttccccaaggggcggcctgagctgacacccanagcgatcatggccgggaggctcctggtgcagcggctcttcggcgggtcctcagatctgatggactacgacaatgtgagttctctagcaggacgccacgtg

SEQ ID NO: 157698 - DNA, 201 bp, Homo sapiens
cagctgttttttggttggttggttgtttgttttcagacagggtctgactctgttgcccaggctggggtgcagtggcaccatctcggctcactgcaacctcsgcctctcgggctcaagcaattctcccacctcagcctcccgagtagctgggattacaggtgtgcaccaccacatccagctaattttttgtatttttagtag

SEQ ID NO: 157699 - DNA, 201 bp, Homo sapiens
  misc_feature (1)...(201): n = A,T,C or G
agacagggtcccagtgatcccctctcctggcagctgggctcatggtggttctgcttaaagaaggccacagccagcttccagcagcccagcggtcattgggnttctctgaggccccaggcagagctgcacgtgcatccgcaccagggagcactgcacaggggccctggcctggcccggccctgctctgcacctcacgggcag

SEQ ID NO: 157700 - DNA, 201 bp, Homo sapiens
gagatatacctcacattacgtatgcatttgtcccttggtacccgaggacgactgggttcaggaactcccgctgttagcagaatccatggacactgaaattygtgcatactggagtcaggcagttggccctgaagcacccacagatacagagtcagccctctgtatatatagttttgcatcctatgaatactgtttttttct

SEQ ID NO: 157701 - DNA, 201 bp, Homo sapiens
ccagcctgggtaacaagagcaaaactccatctcaaataaataaattaataaatattaaaaagtaaaaacaactgtttttattttcgagtacagttatagatagcagattcgtgtggcatgtcagctggtctgtgttagagttacaaagcaactttaaggaattccaaacactctagaagaacagggaagcctccagcagtc

SEQ ID NO: 157702 - DNA, 201 bp, Homo sapiens
ccagcctgggtaacaagagcaaaactccatctcaaataaataaattaataaatattaaaaagtaaaaacaactgtttttattttcgagtacagttatagagagcagattcgtgtggcatgtcagctggtctgtgttagagttacaaagcaactttaaggaattccaaacactctagaagaacagggaagcctccagcagtc

SEQ ID NO: 157703 - DNA, 201 bp, Homo sapiens
ccagcctgggtaacaagagcaaaactccatctcaaataaataaattaataaatattaaaaagtaaaaacaactgtttttattttcgagtacagttatagayagcagattcgtgtggcatgtcagctggtctgtgttagagttacaaagcaactttaaggaattccaaacactctagaagaacagggaagcctccagcagtc

SEQ ID NO: 157704 - DNA, 201 bp, Homo sapiens
ctaaaaactcttcaagggaaagtctcctgttaaaatagaagtctggagttgtcattgtggagatgtcaaacactccatgactgccacgaaggaggcccctygcagggtgagctgtgcagatctgcaggccctgctacaggtcctcggccgaccctcagctcacagagcctgaggaggtcacctgaggtgggaggagccagg

SEQ ID NO: 157705 - DNA, 201 bp, Homo sapiens
gacacagggcagcgctggctccgagacagcccgtgggatcttggcttctggacaggtgcgctgtgtacagtggccttcatctgtgtctggggtacacacaytcatgtggccagcaggacgagctcctagattggagcaatagagattttctttttttagctaaaaactcttcaagggaaagtctcctgttaaaatagaagt

SEQ ID NO: 157706 - DNA, 201 bp, Homo sapiens
tgtgcccaggcctgggccggggctgtctgacgggactggcaaggggcagctggagccaacagggatcgcccagacactgctctgtcccaggcctgctgcaraggaggccattgcagatgggccgccgcaaggagggctgcgggtcctcgtcagggtgggtggcggcacacacagcatgcctgctcagatgtcctacccacc

SEQ ID NO: 157707 - DNA, 201 bp, Homo sapiens
gtgcacgaggcctccctcgtccctctctactacaggcacaggctgccaccaggaactcctttcagcgcacgtctgtgtggggcccactgccgggagctccmgatctggcgagtggtgcccacagtggggcctgggacccagcctgcaaggtcgtaccatgccacttttgccccagagaggccactcaggcatcacagtgca

SEQ ID NO: 157708 - DNA, 201 bp, Homo sapiens
ttcacagcggtccgaattccccacaccctatcccagtgttccaccctaggtctgaaggcccccgccccgaatccggccgcattcggccccggtctagccascgctctcacctctcccgcgacggcccgcccgggactggacccgccccggtccggcgcaggcagcgcggcgggcagccctagctgccccagaagccccacg

SEQ ID NO: 157709 - DNA, 201 bp, Homo sapiens
atttctgtcttgacagatcgaaggtgccttggaatatggaatcacaagtgatgacatcttctggctgaaggaatcccctggaaaaacgtaaggcctgcgcrtgcttggtggggtcctctttttgttcaccagagtgagcactggacccttagagcctgtgctggtgctgggctcctggggctttctttccggtttacccaa

SEQ ID NO: 157710 - DNA, 201 bp, Homo sapiens
ggaagccctgtgcatgtgtgccctgggaaagctctgcttgattctgcaaagctggcatcctctttaaggaagccctaggacaggccaaatggagctcttgyccaaggggtcatttctgtcttgacagatcgaaggtgccttggaatatggaatcacaagtgatgacatcttctggctgaaggaatcccctggaaaaacgta

SEQ ID NO: 157711 - DNA, 201 bp, Homo sapiens
gatgacatcttctggctgaaggaatcccctggaaaaacgtaaggcctgcgcgtgcttggtggggtcctctttttgttcaccagagtgagcactggaccctyagagcctgtgctggtgctgggctcctggggctttctttccggtttacccaaaagaaggaaaaaaggcctgttatttgtggccaggtgtggtggctcatgc

SEQ ID NO: 157712 - DNA, 201 bp, Homo sapiens
acactccaagtacactctctgcagccttgcctgcctaggaaggtggaggtggctgcaaagataagtgcagccttctcatggcagacgctaggctctgatgsaggtgttgggcaggttgcccagccttgtatgacagaccctgctctgatcatggaacctcttggccttgtctgaagcagcgaccggctccagatgctctgg

SEQ ID NO: 157713 - DNA, 201 bp, Homo sapiens
tgtgctttggactggctgttggaaccgagttgtggctctgtcagttcccgcaggtgcgcacacatctcacgtgcactcagaggctggctgccaggtgaaasagtgggtgggtttggttgtggggcaggctcgctgcaggccatggcctgagtgcctggatgcagcttcccaagctttctcagctgtgagccagggctcctc

SEQ ID NO: 157714 - DNA, 201 bp, Homo sapiens
agacagagggggcacagtgcgaggctgcagggcaggatgacctaacaagggccctgctatggcaacaagaaggacaggcacctgccatggaaggtagggaygttctgagcaaagcttccggctaccaggcagctggaggagagagatgcttctccatcagcaggttcatgctccccgggggacctggtggcattttctccc

SEQ ID NO: 157715 - DNA, 201 bp, Homo sapiens
agctgcccaagataagcacatccatacagacagctgctcaccctgcctgatagcagacagagggggcacagtgcgaggctgcagggcaggatgacctaacragggccctgctatggcaacaagaaggacaggcacctgccatggaaggtagggacgttctgagcaaagcttccggctaccaggcagctggaggagagagat

SEQ ID NO: 157716 - DNA, 201 bp, Homo sapiens
gtttttttttttttttttttctgagacagagtctcactctgttaaccaggctggagtgcagtggtgctatcatagctcactgcagccttgaactcctgggytcaactcaccctccagcctcagcctccctagtagctgggactgtgggccctgcagtttctccttttagagtaggaagacctgaactgtcccaggcttgga

SEQ ID NO: 157717 - DNA, 201 bp, Homo sapiens
aaaagtattacttgggaattgataaatgttcatattgaaatgaaatcttcactatttatgttcctctgccacggctccagccagtccctccattcggggtycctgacttcctgcaacacaggtgtgagccactgtacccagactaggggtgcagtttttttttttttttttttctgagacagagtctcactctgttaacca

SEQ ID NO: 157718 - DNA, 201 bp, Homo sapiens
agagccagctggcacacccgcacaggtgtcagaggatgttagcagtgactgtttttctcctcttgaaaccagaagctgtggccagcttcactgctggtccrtgcaagtccccattgtcctgggaacagggcccccatctgtagctggacttggggcgcacaggcctcctgggccgggagggagaagcaggactctctctgt

SEQ ID NO: 157719 - DNA, 201 bp, Homo sapiens
ccgggagggagaagcaggactctctctgtccctgatctggacctgagcctgctgtgcctacatttctaggcgggagcagagtctcctacctaccctcctgkctcctggatggcagaggggcatgttggccacatgtggaggggtgggccaggagcaggggccatcttgttggaccagggcacagctcctgggggaaggcac

SEQ ID NO: 157720 - DNA, 201 bp, Homo sapiens
tcttgaactcccgggctcaagcagtctgtccaccttggcctcccagagtgctgggattgcacacatgacccaccgcacccaacctctgggtcttttaatgyagcggtaagttgagtggttccagccccctacccccaggtcctgtgagctggtcccctgacttctgtggccagcacctctgacttcctgtggccagtcatg

SEQ ID NO: 157721 - DNA, 201 bp, Homo sapiens
tagcaagtccaaaaagagtttggtttcgccattttggaagtgcacttccgtgtagagatgtgtatgtggtgcctatgtgtgtgtgcatgtgtggaagtgcktgcataccgtggtgcctgtttcccaagtgttgccggccctgagcggggctgggaatgcatctctgcaatcctgcttggctgggggtcccagggtccccct

SEQ ID NO: 157722 - DNA, 201 bp, Homo sapiens
ggctaagacatgacaaggtagggctttcagtggcatttgttacagggccagcacacagaggctccggcccagcatctgcccctgaggggttgggtggggcrgcggggttccagccaagccggggaaggaggccttcgtagcacccccagccctgtgctgcctccctggggcatctgcagcttggcggcccatctggtattt

SEQ ID NO: 157723 - DNA, 201 bp, Homo sapiens
gggcacccacaggagtgaaaatccaggcccaacaaacccaagtgtgttcaggacatggagatgcaaagccagcggtgccggtgaagcaggaccgaagggcrgggcagacctggctcaagcctggcgaggtcctggcctctagggtttcgtgggacaatcatggggccttgcggttccacagaatggaacttttccccccta

SEQ ID NO: 157724 - DNA, 201 bp, Homo sapiens
cccactcggagggcaaagggtgatggcataggggctgcatataaccccggacatggtgctgacgtggcccccctgtgccttccccaaggggcggcctgagytgacacccacagcgatcatggccgggaggctcctggtgcagcggctcttcggcgggtcctcagatctgatggactacgacaatgtgagttctctagcagg

SEQ ID NO: 157725 - DNA, 201 bp, Homo sapiens
ggtgccagtgttggggattttctaaagggagatgcccactcggagggcaaagggtgatggcataggggctgcatataaccccggacatggtgctgacgtgscccccctgtgccttccccaaggggcggcctgagctgacacccacagcgatcatggccgggaggctcctggtgcagcggctcttcggcgggtcctcagatc

SEQ ID NO: 157726 - DNA, 201 bp, Homo sapiens
cctcacgggcagctgctgacggctctttgggctcacaggggatccagcaggcgctcctggtccttaggaggcaggcagctcagggctgcttcgctctcccygccacgccctcccagggtgtctgccaaggcttgcttgcgttttagtccctttgattgccagacctttcggttttccttgagtaaacctgagaaattcctg

SEQ ID NO: 157727 - DNA, 201 bp, Homo sapiens
gaggctagctcttctggggtgaggggcctttgtgcgctgtgtgtctgcatgtagatgtgggcatgcgtgtgtgtgcgcttatgtgggtgtgttgtacacaygtgtgtgtgcatgcatgggtgtgtggctcagttctgagagtgtggcgcaggcgtgggcaggtgggtcgcctactgtgctttcagcctgctctgggcgcat

SEQ ID NO: 157728 - DNA, 201 bp, Homo sapiens
agactgaagggtaatgtgggagcccacccacgtgcagctgccccgctgggagttcttgttcgtgttaggttctgtgcccgtttgcatgtgtgtgcatgcaygtgtctacatgagtgtgtgcatatgtatatatgaatgaatgtacccatgcgagtatgtgcgtgtgtgtgtacatttgtgcccgtgtaagagtatgtgcat

SEQ ID NO: 157729 - DNA, 201 bp, Homo sapiens
atttttatttgttttgttttgtttgttttagagacagggtctcactctgtttcccgggctggagtgcagcttactgcagcctcaaactcctaggctcaagygatcctccttcctcagcctcccgagtagccgggactacaggtgcataccaccatgccccagtaatttttttagtttgtagagatggggacaagctgtatt

SEQ ID NO: 157730 - DNA, 201 bp, Homo sapiens
ggcccagcccgtgccgcatgactggtaaggatctggcgccgtggcattccagtgcttttcttctactcttgggtggaagaggaagaggaggcttatcctcsatgagccctcatggggagtgggccgtaggatgggtttctcagccaggggcgactctgcgctgtctgcctcagacatttgggaatgtctggagacagtttt

SEQ ID NO: 157731 - DNA, 201 bp, Homo sapiens
cgctggcgtcctggctgccaccccgagcagaaggcaggcagggaggaactggctccgtgtgctcccatgtccctctgcgcccgggctgaggggcctccccsctgtgcttggggcttctgggctgtgctcttccaggcaggatccagtgctccagtgctgtgcagatcccagctctgctgtgcccctgcccagaccaggtcc

SEQ ID NO: 157732 - DNA, 201 bp, Homo sapiens
tgcgctgatttcatattgttcaaacacacgttttacaatcaatttctacagttaacacaattatcacagtggtcctgaggtgatgtatattatcagcttaygaagataacaggattaagagataaagacaggcataagaaattataaaagtattacttgggggcccaggcgcggtggctcatgcctgtaatcctagcactt

SEQ ID NO: 157733 - DNA, 201 bp, Homo sapiens
tgtaaagttcctgtcttttttttaaccacgttacatataaatggtgtaacaggtttcccctaattgaagcatgtatttgggatggtctgattaaatccaarctgtcacatagacaaaattctcttttagattcctgatgtaaatctttaaatacagatcatctttccttagagcagctgaaatagccatgtaatcacatcc

SEQ ID NO: 157734 - DNA, 201 bp, Homo sapiens
aacttaagagacatttgactccattatgtatgatattttgcttattattttcaaggagactgctgtaatgctgaaaacctcaagccatgtgtaacccatgrgtggcgtggttaggagtgctaccactctttatcctattaactcaggcagccctcaaaccagcaatgcctccggtgatcaagagccagcctttcaacattt

SEQ ID NO: 157735 - DNA, 201 bp, Homo sapiens
gtttcttttgctgtgcaacagcttttcagtttgatgcatcccatttgtccatgtttctttttgttgcctgtccttttggtgtcatgtctaaggaataattkccaagaccagtgtcaagaagcattctccctatgttttcttctaggagttttacagtattcggtctaatgttaaataagtctttagtccagtttgaattga

SEQ ID NO: 157736 - DNA, 201 bp, Homo sapiens
tgtctttagactgaacacaaagctggaagcctacagatgtggagatgagcttgtttagaagataataagtttgaagacatggcaagtgtccaaactttaamtagattgtcacataggacattcttgtaaggattcaatcattggataggtggctagataagaaaatcctcaaatctccatctatacctgagagccaacaat

SEQ ID NO: 157737 - DNA, 201 bp, Homo sapiens
ctggaagcctacagatgtggagatgagcttgtttagaagataataagtttgaagacatggcaagtgtccaaactttaactagattgtcacataggacattmttgtaaggattcaatcattggataggtggctagataagaaaatcctcaaatctccatctatacctgagagccaacaatactttatgccagtacccaacac

SEQ ID NO: 157738 - DNA, 201 bp, Homo sapiens
aaaaccctttcttatactttaacactttttgatgggggcacttcttatattagaagggaaactgccatttgggggaaatattaattcctagaaagtttttragtatatttaatctactttgcctcttaataacttcataccactagttctaattctaccttctggtgcaacatagaatacagcaaatccttctttcaaaag

SEQ ID NO: 157739 - DNA, 201 bp, Homo sapiens
cctacagaacagaggttaaacttgatttaaataatgtaacagacagattaattttaaccagagagaaattttagaactaacttcttaatatgaaaaggtarcagcaattttccaaatcaaaaacgtgcaacatagagcttagggtaaattattaaccaactacatttctcattatattgcatttgtatgttttaattagct

SEQ ID NO: 157740 - DNA, 201 bp, Homo sapiens
aaagatatcattattaacgtgttccttaccacagttgagggattgagtcttattattgcattatcactgacaaaatttgacttggtggaaactactcctgrtacctctcttttctaggaggacttagtgcatgcaattggcgaaagtgcagcattgggggcagcaggagtaatattgtggggaggatatgaatattctgct

SEQ ID NO: 157741 - DNA, 201 bp, Homo sapiens
ttttactttccaaattctgtgtgctttaccacaaggaagtactgggagttctctggatggactgtgattttgcctggatctaagtctctgctcttattctkcctgtggatataaaactctgctctctctagactgtcttgtgaattcatactcattctcaagagtctactgattctcattcccaagagtcatatgaaattt

SEQ ID NO: 157742 - DNA, 201 bp, Homo sapiens; identical to SEQ ID NO: 29544

SEQ ID NO: 157743 - DNA, 201 bp, Homo sapiens
atctccatctatacctgagagccaacaatactttatgccagtacccaacacagaagcagagctgttgtatggacaatacacagctcacttagaccacttargtttgagataaggccatttaaaagcagtagcaattcttcctaaatatttcagaataaaatccaattattaattagacttgacatattcatctttgcagga

SEQ ID NO: 157744 - DNA, 201 bp, Homo sapiens
gttctctggatggactgtgattttgcctggatctaagtctctgctcttattcttcctgtggatataaaactctgctctctctagactgtcttgtgaattcrtactcattctcaagagtctactgattctcattcccaagagtcatatgaaatttaacgtgttaaggaagccttcccagactcttccatgaagtattaagca

SEQ ID NO: 157745 - DNA, 201 bp, Homo sapiens
ctgtcctgagtgaccagacacccagcctctgcttcgagtgctcagttatgattattgtcctgatttagttaactgttcttcaggggctccaggaggacgartgtgtatcctcccattgctctgtgcagcctctaacctctagagtctaggggtctggggagaagttgggaagtctggccagtggggccggtgcctggtgac

SEQ ID NO: 157746 - DNA, 201 bp, Homo sapiens
cccaacgtggttttctttttcctaagtgcatgtgggaacccgattccctttggtaggtgcggagaaatgttcatcggtccagtccacagaaatgcttgttyggctccccaacgattggtgagttgtctgtgtattctccggggtaactatgggtcacgcagagtctaaacattatgcttatctctgctatattaaattcct

SEQ ID NO: 157747 - DNA, 201 bp, Homo sapiens
tcaatcccgtctgggtgcccactaggagacttaaacttcgtgtgaatactgacaataaaaaccacgaggaagagacgttcgcgtcagagactgccctcatacctgatgagatctgtaccgactcctcagaaactggcatgccaaatcaaaatgggtctggttcaatcctccctaatggcaatgtaaacccctctaactaat

SEQ ID NO: 157748 - DNA, 201 bp, Homo sapiens
ccttctgcggctccgggctgtgtcctaaatgcaaagcacacctcggccgaggcctgcgccctgacatgctaacctctctgaactgcaacactggattgttyttttttaagactcaatcatgacttctttactaacactggctagctatattatcttatatactaatatcatgttttaaaaatataaaatagaaattaagaa

SEQ ID NO: 157749 - DNA, 201 bp, Homo sapiens
tgtgtggtgtgcaggaccacgtgggaatgttagagaaaggggaagtcactccgggcctgccctgctaacagacctgctttttggatttttccagccagggrtttttgtgtcctgttgctttttattgtttaaagtgaccctccaagcctgagggaccgtaggagctgccctgcagagcccagtgagacactagttaatgca

SEQ ID NO: 157750 - DNA, 201 bp, Homo sapiens
cagggctctggggaggtggggcacctgtagcctgacccccaccttgctgcttccaaagcttccttgcccagggctgagccttgtggggcaccccccacacygtggtctgcctgcctgcagggtgcccagggagaccctccgcctttagaagtccaagttctttcccagccccctccctgcctagctgcctgcccctggcgc

SEQ ID NO: 157751 - DNA, 201 bp, Homo sapiens
agcgatggcgacggcgcgcaccaccttgtcggtctcagactgcagcagttccacaagcaccggcagcccgcgctctttgcgcactgtggcgcggatgtacrtggcccactgcggaggcggggagagggttgctcagacatacatgccaggcactctcccacctccagacgctgaccgctctctccagctggaccttcctgc

SEQ ID NO: 157752 - DNA, 201 bp, Homo sapiens
cagggaggtggtggacggcctggagaaggccatctacaagggcccaggcagcgaagcagggccctgactgccccccccggcccccctctcgggctctctcwcccagcctggtactgaaggtgccagacgtgctcctgctgaccttctgcggctccgggctgtgtcctaaatgcaaagcacacctcggccgaggcctgcgcc

SEQ ID NO: 157753 - DNA, 201 bp, Homo sapiens
ggggaagtcactccgggcctgccctgctaacagacctgctttttggatttttccagccagggatttttgtgtcctgttgctttttattgtttaaagtgacyctccaagcctgagggaccgtaggagctgccctgcagagcccagtgagacactagttaatgcagaaaaaacagattttacttggtaactactgacaacatg

SEQ ID NO: 157754 - DNA, 201 bp, Homo sapiens
cctccaggcctgcttgatggctcaaagcttcactaccagggcaatcctgagcccagacatcccccagtggagctggcttcatctcagcccactcacctttrgcggcctcagttcgcttgggcaggtctagcgtgtcaaagttccggtccatctcaccatccttctttcctggaagggaaaggtggtgggaggtgaggcaga

SEQ ID NO: 157755 - DNA, 201 bp, Homo sapiens
cagtgagccaagatcacgccactgcactccagcctgggcaacacagtgagactccatctcaaaaaaagaaataaggaaatgctgtcagaagcctaccccayggtacctgtcatgggccttttcattggtccctttttgttgaagatgaagcactttgccctgtagctgattgcaagagatttcaggaaagcatcagagtaa

SEQ ID NO: 157756 - DNA, 201 bp, Homo sapiens
gagaacgtaccaggcatgcaagctagacccaggaatcaacgggctgaggcttagcgtcccctacggcgtccaccagcctgaccgcgggcctgctgggcccrgggggaggggccttcctgctggggtcgagctgcagcgcacgggtgggcattagaggcacaatagagcaggttagttagagctcctggggggacagggcag

SEQ ID NO: 157757 - DNA, 201 bp, Homo sapiens
atcctgacttcgtgatccgcccgcctcggcctcccaaagtgctgggattacaggcgtgagccactgcgtccggccgtattccagcttttaaaacaacaaamaacaacaaaaacttttctggaaagatccctgtcagccttgtggagtgtggagagggctgtggggagggcatttcagatgccctgaactcacgaggaggca

SEQ ID NO: 157758 - DNA, 201 bp, Homo sapiens
ttctctgcagcatacaggctggaaacgaccgccacccaccaccaggacagctgcaagccctgtgggactctccaggcccatcccagaggcatgtggggtcrgataccagtgtttcaaggcacctgcctgcaaattgattttattatactttagatgtttgagattgcttgttaacttttgtttggtgactaagtcaaattt

SEQ ID NO: 157759 - DNA, 201 bp, Homo sapiens
gatggtctcaatatcctgacttcgtgatccgcccgcctcggcctcccaaagtgctgggattacaggcgtgagccactgcgtccggccgtattccagctttyaaaacaacaaaaaacaacaaaaacttttctggaaagatccctgtcagccttgtggagtgtggagagggctgtggggagggcatttcagatgccctgaact

SEQ ID NO: 157760 - DNA, 201 bp, Homo sapiens
catgttctgaaggtggcacccaagtcttgtacagtcctttcctgcaggagtcacgctgggcagaaagtggaaacctggccccaggggctaggcacaggcgyggtgccgtggcctagtgaggagcacccatcctggtttggggcaggttctctgggcacctctgaccctcacctcccccaccccccggtctgtttgcaggaa

SEQ ID NO: 157761 - DNA, 201 bp, Homo sapiens
atggaaaacattcctgtcttttttttttttttgagacggagtctcactctgttacccaggctggagtgcagtggcgtgatctcggctcactgcaagctccrcctctggggttcacgccattctcctgcctcagcctcccgagtagctgggactacaggtgcctgccaccacacccggccaattttttgtatttttagtaga

SEQ ID NO: 157762 - DNA, 201 bp, Homo sapiens
cctccacggttcaagcgattctcctgcctcagcctcccgagtagctgggactacaggcacccgccaccatgcccggctcattttttgcatttttagtggaracagagtttcaccatgttggccaggatggtctccaactccagaccttgtgatctgcctgcctcagcctcccaaagtgctgggattacaggcgtgagccac

SEQ ID NO: 157763 - DNA, 201 bp, Homo sapiens
agtgagccgagatcgcgccactgcactccagtctgtgtgacagagtgacagcccgtctcaaaaaataaataaataaataaataaataaataaataaataaataaaatgaagcagcagcagctttgttagtgtttgttcaaggcctgataggccaaggtgaggctcagccgagaaacgtgctcagaggagcctggccggagt

SEQ ID NO: 157764 - DNA, 201 bp, Homo sapiens
cagtgagccgagatcgcgccactgcactccagtctgtgtgacagagtgacagcccgtctcaaaaaataaataaataaataaataaataaataaataaataaataaaatgaagcagcagcagctttgttagtgtttgttcaaggcctgataggccaaggtgaggctcagccgagaaacgtgctcagaggagcctggccggag

SEQ ID NO: 157765 - DNA, 201 bp, Homo sapiens
gcagtgagccgagatcgcgccactgcactccagtctgtgtgacagagtgacagcccgtctcaaaaaataaataaataaataaataaataaataaataaataaataaaatgaagcagcagcagctttgttagtgtttgttcaaggcctgataggccaaggtgaggctcagccgagaaacgtgctcagaggagcctggccgga

SEQ ID NO: 157766 - DNA, 201 bp, Homo sapiens
ccgcgccgcgccccgcaccccgcccgccacggcctgcgtccgccaccggaagcgccctcctaatccccgcagcgccaccgccattgccgccatcgtcgtgsggcttctggggcagctagggctgcccgccgcgctgcctgcgccggaccggggcgggtccagtcccgggcgggccgtcgcgggagaggtgagagcgctggc

SEQ ID NO: 157767 - DNA, 201 bp, Homo sapiens
gagggcgaggggcactgccaggagagcccctggagaccgcctgtgtgcaggcggtcacaggagcccctgtgagcagggcgctgagcttcagagacagggcyggggggactggagctacctccagttgggacagcgcccaagcgagagggccggggcctggactcccaaaccactcatcctccaagcccctccgatgggacc

SEQ ID NO: 157768 - DNA, 201 bp, Homo sapiens
ttggagcgtcccaggacatcatcccccagctgaagaagaagtatgatgtggacacactggacatggtcttcctcgaccactggaaggaccggtacctgccrgacacgcttctcttggaggtgagccccaaccaggatggcatccgtgccagctgctgcccagagcccattcagtcagcctcagcctctccaaagagccagg

SEQ ID NO: 157769 - DNA, 201 bp, Homo sapiens
tggccttgagcacttccccatcccccatggctcttggccattggaccccagttggccacagagccgcgggcaggtgggacaggcgggcactgggtgcctcyttgcaccagccaggcccagcctgcagagtggagtgggccggtccctcctgccaggcaaaggaagggggcttcgggcccctccctgctgtggcctcctccc

SEQ ID NO: 157770 - DNA, 201 bp, Homo sapiens
acagcgcggatgctgtgggaagggagtagccaagaggcagagggcagggaaagtggcctatggaagccgtctcagtgggaggcctgactcctccttcaccytcacccaagggtcaggcaactggggcagctggggtcgccaccctctaggctccctaagctccaccactcaccaaggctcttgtccaccagtggcagcgtg

SEQ ID NO: 157771 - DNA, 201 bp, Homo sapiens
gacccctcccgcagccagagggctggagcctgctcagaggtgctttgaaggtgagttggccaacggaagccggggcagtgccagggtgggtacagattccsgcccggtgcatgggcacaggtctgctgagcacatgtccactctgcctgtgtaaataggccacatggcctgaaatcccctagaagcctggtgtccgcatga

SEQ ID NO: 157772 - DNA, 201 bp, Homo sapiens
acgccgtgattcaggagcaccagccctccgtgctgctggagctgggggcctactgtggctactcagctgtgcgcatggcccgcctgctgtcaccaggggcraggctcatcaccatcgagatcaaccccgactgtgccgccatcacccagcggatggtggatttcgctggcatgaaggacaaggtgtgcatgcctgacccgt

SEQ ID NO: 157773 - DNA, 201 bp, Homo sapiens
gtaaataggccacatggcctgaaatcccctagaagcctggtgtccgcatgacctccccctagggcggagcctctgcttccctgttctcttctgctctgtcytctggtgccctgaggctggcctccaggggtgtcccctctgtggccctaggcctgcctccttgcctgggtgtgcctttctaaaatggagcgtccagcagag

SEQ ID NO: 157774 - DNA, 201 bp, Homo sapiens
ctctcagagctggagagttgcaggaggcctgggggagggtctgtggagccccagactcagagggccttggtgacttctccaacaggctccctgttggaggmcttggggtaccccagggcctttccctgcaagagagaggctgctccaccaggaaggggcccaggactccccagggtcggggggatgtgtggtgtgcaggac

SEQ ID NO: 157775 - DNA, 201 bp, Homo sapiens
cttggtgacttctccaacaggctccctgttggaggccttggggtaccccagggcctttccctgcaagagagaggctgctccaccaggaaggggcccaggastccccagggtcggggggatgtgtggtgtgcaggaccacgtgggaatgttagagaaaggggaagtcactccgggcctgccctgctaacagacctgcttttt

SEQ ID NO: 157776 - DNA, 201 bp, Homo sapiens
cccaacactttgggagtccgaggagggaggattccttgagcccaggagtttgagaccagcctgagaaacatgctgaggccctgtctctacaaaacaaaaarttgaaaaattagctgggcatggtggtacatgtctgtagtcccatgtactctgaagactgaggcgggaggatcacttgagcccaggagttcaaggttgcag

SEQ ID NO: 157777 - DNA, 201 bp, Homo sapiens
tggtgtgtggtgtgaagtctgtgatgatggcataggcattggtatcccagttgtggttactttctggagagagcatgcggcatgcaggagctggaggggggtcttcctgggcggcctgtgtagcagcagctccaggcacaaaggctgcccctggagaatctgttgtggttctgagttctttcaagtttatatcaagttttc

SEQ ID NO: 157778 - DNA, 201 bp, Homo sapiens
gccaggagtttgaaacaagcctgggcaacataaagaccccatctctacaaaaaatttaaaaattagcccggcgtggtggcatgggcctatagttccagctrcttgggaggctgaggtgaaaagatcgtttgagcctgggaggtggaggctgccatgagccatgatcttgcctctatactccagcctgagcaacagagagcc

SEQ ID NO: 157779 - DNA, 201 bp, Homo sapiens
ctctttgggagaggtggggggccgtgcctggggatccaagttcccctctctccacctgtgctcacctctcctccgtccccaaccctgcacaggcaagatcktggacgccgtgattcaggagcaccagccctccgtgctgctggagctgggggcctactgtggctactcagctgtgcgcatggcccgcctgctgtcaccagg

SEQ ID NO: 157780 - DNA, 201 bp, Homo sapiens
agcaggggcactcagggacttcctggtgtgtggtgtgaagtctgtgatgatggcataggcattggtatcccagttgtggttactttctggagagagcatgyggcatgcaggagctggaggggggtcttcctgggcggcctgtgtagcagcagctccaggcacaaaggctgcccctggagaatctgttgtggttctgagttc

SEQ ID NO: 157781 - DNA, 201 bp, Homo sapiens
gaacgagttcatcctgcagcccatccacaacctgctcatgggtgacaccaaggagcagcgcatcctgaaccatgtgctgcagcatgcggagcccgggaackcacagagcgtgctggaggccattgacacctactgcgagcagaaggagtgggccatgaacgtgggcgacaagaaaggtggggtccgggccagcaggtgctc

SEQ ID NO: 157782 - DNA, 201 bp, Homo sapiens
aggacatcatcccccagctgaagaagaagtatgatgtggacacactggacatggtcttcctcgaccactggaaggaccggtacctgccggacacgcttctyttggaggtgagccccaaccaggatggcatccgtgccagctgctgcccagagcccattcagtcagcctcagcctctccaaagagccaggcattccagtaga

SEQ ID NO: 157783 - DNA, 201 bp, Homo sapiens
cacatcagtgacacactgccccatccctccctggtggtcagcgacactgagtggctctgtgatcctccactgggcttgggacacccaccctcacggcctcyccacctggtgctcgctcacctgcagctctcccagaaactggacactgctgttagcagccggactaggagcacgaggggcacagcccccatgcctggctag

SEQ ID NO: 157784 - DNA, 201 bp, Homo sapiens
gagcccaccctctgtaagtcaactgatgcagtgcaaccagggcagctgccctagcaacaggaggcactcttcctggcaaccactccaagttcccgggcaaytgaggcgccgtcctgctgctctgcccagtgctccagaaatgaggggtcaaaacagccttccaagcttgcctgtctccaaactggggcttcagcctggctt

SEQ ID NO: 157785 - DNA, 201 bp, Homo sapiens
gaaaccccatctctactaaaaatacaaaattagccaggcgtggtggcgggcacctgtagtcccagctacttgggaggctgaggcaggagaatggtgtgaayccgggaggtggagcttgcaatgagccgagatcacaccactgcactccagcctgggcgacacagcaagactgcgtctcaaaaacaaaacaaaacaaaacaa

SEQ ID NO: 157786 - DNA, 201 bp, Homo sapiens
gatcctccactgggcttgggacacccaccctcacggcctccccacctggtgctcgctcacctgcagctctcccagaaactggacactgctgttagcagccrgactaggagcacgaggggcacagcccccatgcctggctaggtagggccgctggaccctggacacggattggaaggaaccagcactagcagaagcctgagg

SEQ ID NO: 157787 - DNA, 201 bp, Homo sapiens
gtttactcagttgcatgcaggtactgaattcttgttctgcttgatcttgggctagcaggtacatgaacccatcttttctcaaccagtggagatcctggctyagtgcagtcatgtgatctcaaagttaagaaatgctgtcacgcccaggtgcagtggctcaggcctgtaatcccaacactttgggaggccaaggtggctata

SEQ ID NO: 157788 - DNA, 201 bp, Homo sapiens
ggttcaagcgattaccctgccttagcctcctgagtagctgggactacaggcgcgcgctgccacacccggctagttttttgtagtttagtagagatggggtytcaccacattggccaggatggtctcaatatcctgacttcgtgatccgcccgcctcggcctcccaaagtgctgggattacaggcgtgagccactgcgtccg

SEQ ID NO: 157789 - DNA, 201 bp, Homo sapiens; identical to SEQ ID NO: 29567

SEQ ID NO: 157790 - DNA, 201 bp, Homo sapiens
cgcttgaacccgggacatggaggttgcagtgagccaagatcacgccactgcactccagcctgggcaacacagtgagactccatctcaaaaaaagaaataargaaatgctgtcagaagcctaccccatggtacctgtcatgggccttttcattggtccctttttgttgaagatgaagcactttgccctgtagctgattgcaa

SEQ ID NO: 157791 - DNA, 201 bp, Homo sapiens
gctggggccctgtgcccccttgtggagggttaggggacaacctggctcttgtgagggtctagccatcccctcagtgggttctgtgagcatcggaggcacgrggggtgaggggctcaggagcaggttgcaattcaaaatcaagggctgctttgaggaggcctctccaccgggctgctgtagtcaccaagtccagcccatgcc

SEQ ID NO: 157792 - DNA, 201 bp, Homo sapiens
tgcagtgagccgagatcgcgccactgcactccagtctgtgtgacagagtgacagcccgtctcaaaaaataaataaataaataaataaataaataaataaataaataaaatgaagcagcagcagctttgttagtgtttgttcaaggcctgataggccaaggtgaggctcagccgagaaacgtgctcagaggagcctggccgg

SEQ ID NO: 157793 - DNA, 201 bp, Homo sapiens
ttgcagtgagccgagatcgcgccactgcactccagtctgtgtgacagagtgacagcccgtctcaaaaaataaataaataaataaataaataaataaataaataaataaaatgaagcagcagcagctttgttagtgtttgttcaaggcctgataggccaaggtgaggctcagccgagaaacgtgctcagaggagcctggccg

SEQ ID NO: 157794 - DNA, 201 bp, Homo sapiens
gagggccttgtgaggtggccgtgggcactgtagcccccaggcactgcattgtggcctgggcgtgttggcctttgagcctttggccttgagcacttccccakcccccatggctcttggccattggaccccagttggccacagagccgcgggcaggtgggacaggcgggcactgggtgcctctttgcaccagccaggcccagc

SEQ ID NO: 157795 - DNA, 201 bp, Homo sapiens
ccaaggcgggcggatcatgaggtcaggagatcgagaccatcctggctaacatggtgaaaccccgtctctaccaaaaacacaaaaaagttagccgggcgtgstggcgggcgcctgtagtcccagctactgggaggctgaggcaggagaatgccatgaacccgggggatggagcttgcagtgagccgagattgcgccactgca

SEQ ID NO: 157796 - DNA, 201 bp, Homo sapiens
ccactggatcacaaatcaaaccatgtgactcccgcatgagcaggcagagtggagataacacggatcgctgtgtacactgtgtgctccggttgttgcatccragggttgatcggatggtggttcccatccagatccaagtcctggcccctgatcacagagaaacacagctggacattaaagtggtgaggacggaaattataa

SEQ ID NO: 157797 - DNA, 201 bp, Homo sapiens
aagaagtggggagtggggaggaagaacagtggggactcagtggagtgaggaaagtggaaaattaccaaaagcaggaagggagggttagccttgggaaaccratctgggtttgccacgggggcttactgaagtcaggcccccagtcccacagaggctgggagacaggggccccatcttcaggtgttggccagaacacaggaa

SEQ ID NO: 157798 - DNA, 201 bp, Homo sapiens
gaacccgggggacggagcttgcaatgagccgagattgtgccactgcactccagcctgggcgacagagcaagactctgtctcaaaaaaaaaaaaaaaaaaaagcctgggactcttagcgcctcagagccttactcagaatcataaaatcattagaagcaatgtctgtcctcactgctgcatccgatattcttccggaccact

SEQ ID NO: 157799 - DNA, 201 bp, Homo sapiens
gagggttagccttgggaaaccgatctgggtttgccacgggggcttactgaagtcaggcccccagtcccacagaggctgggagacaggggccccatcttcargtgttggccagaacacaggaaattctcttggtagccatgactttctcaggcaggcgctttgaagggggctgggatcattttaggaatgtggccttgagct

SEQ ID NO: 157800 - DNA, 201 bp, Homo sapiens
gctgaggcaggagaatggcatgaacccgggggacggagcttgcaatgagccgagattgtgccactgcactccagcctgggcgacagagcaagactctgtcycaaaaaaaaaaaaaaaaaaaagcctgggactcttagcgcctcagagccttactcagaatcataaaatcattagaagcaatgtctgtcctcactgctgcat

SEQ ID NO: 157801 - DNA, 201 bp, Homo sapiens
agccatgtgcagtatggcttacacctgtaatcccagcactttgggaggctgaggctggagaatcacttgaggccaggagtttaagaccagcctgggcaacrtagcaagacgctgtctctacaaaaataatttttaaaaaattagccaggcactgcggcatgcccctgtgtagtcccagttactcaggaggctgaagcagga

SEQ ID NO: 157802 - DNA, 201 bp, Homo sapiens
ccgggcgttgtggtgggcacctatagtcccagctacttgggaggctgaggcaggagaatggcatgaacccgggggacggagcttgcaatgagccgagattrtgccactgcactccagcctgggcgacagagcaagactctgtctcaaaaaaaaaaaaaaaaaaaagcctgggactcttagcgcctcagagccttactcaga

SEQ ID NO: 157803 - DNA, 201 bp, Homo sapiens
cagggccgaggctggcgatgtaagggttggcctgccaggacagcacaggtagcaccaagggcgcagggagccggaaacatgtggctcacacgggcccaggrcgggcacgtgcacacacacaggcctgcacaggaagccaggggattggcacacagcaggcagcaggtcctgccatcgctggtggaccctggtgggctctca

SEQ ID NO: 157804 - DNA, 201 bp, Homo sapiens
cggtggcgcacgcctgtaatcccagcactttgggaggccgaggcgggcgaatcacgaggtcaggagatcaagaccatcctggctaacacggtgaaaccccwtctctactaaaaatacaaaaaattagccgggcgttgtggtgggcacctatagtcccagctacttgggaggctgaggcaggagaatggcatgaacccgggg

SEQ ID NO: 157805 - DNA, 201 bp, Homo sapiens
aacacaactcactagtttatataagagctagttctcacttttttttttactctattttatatattttttcttttcttttcttttcttttcttttttttttytttttctgtagagacaaggtcttgctgtgttgcccaggctggtcttgaactcctagcctcaagtgatccacttaccttggcctcccaaagtgctgggatt

SEQ ID NO: 157806 - DNA, 201 bp, Homo sapiens
gcaattaacaaaacacaactcactagtttatataagagctagttctcacttttttttttactctattttatatattttttcttttcttttcttttcttttyttttttttttttttttctgtagagacaaggtcttgctgtgttgcccaggctggtcttgaactcctagcctcaagtgatccacttaccttggcctcccaaa

SEQ ID NO: 157807 - DNA, 201 bp, Homo sapiens
cggctcacgcctataatcccagcattttgggaggtcaaggtggacagatcacctgagatcaggagttcaagaccaggctggccaacatggcaaaaccccayctgtactaaaaatacaaaaattagctgggcgtggtgccatgtgcctgtggtcccagctacttgggaggctgagacagcagaattgcttaagcctgggagg

SEQ ID NO: 157808 - DNA, 201 bp, Homo sapiens
ctctggcctttggccttttcctgtgagctgcatgttggccactgtgacctatctgtctcatcatctttttcttactggtttgtgtatgttcttggtaaacyagcccttggtcttacacatcatttccaaggtactaaggactcttcaggggaaatacaacttgagcagagtggttccctcctcttgtggttcacaaggtgc

SEQ ID NO: 157809 - DNA, 201 bp, Homo sapiens
gcgcatggcccgcctgctgtcaccaggggcgaggctcatcaccatcgagatcaaccccgactgtgccgccatcacccagcggatggtggatttcgctggcrtgaaggacaaggtgtgcatgcctgacccgttgtcagacctggaaaaagggccggctgtgggcagggagggcatgcgcactttgtcctccccaccaggtgt

SEQ ID NO: 157810 - DNA, 201 bp, Homo sapiens
ggcactgaggcccagaagcttcatgctctttagagccagaggtgtcaagcccagctgcctgtgtcctggccgcactgtgaggcactgaggatgccctcacrcgtgcatctgcatgtggcgtgcatgtggcaagcatgtgcaggtgctgtgtgggcacgatcatgcctgccctctactgtgctggagaggtaagaccatcag

SEQ ID NO: 157811 - DNA, 201 bp, Homo sapiens
cagggccagggagtgtgaccctgcaggctccacacaggactgccagaggcacacacctgctctgtctacccgagggcaccagagggcacgagaaggctggytccctggcgctgacacgtcaggcaactgaggcacaaggctggcatttctgaaccttgcccctctgcaaacacaagggggcgatggtggcactccaagcaa

SEQ ID NO: 157812 - DNA, 201 bp, Homo sapiens
ctcttgcctcaacctcccaaagtgctgggagtacaggtgtgtgcttggtctgaggctccaactttttgttgttgtttctcgagacagtctctcgctctgtygcccaggctggagtgcagtggcgcgatcttggctccctgcaacctctgtgaggctccaactcttgaagggaggagagtctaaggagggtgggccagatga

SEQ ID NO: 157813 - DNA, 201 bp, Homo sapiens
ggctccaactcttgaagggaggagagtctaaggagggtgggccagatgaaaaccacctcagcatagtgtcacctgctcctctgacactgtcgcttctccayggcattagattttcagtcctgctcagacgctgatgcatgtttagccagttctccaggtggtctgagtagctggtaggaggcttgcagtgtcgggcgacag

SEQ ID NO: 157814 - DNA, 201 bp, Homo sapiens
ttgggctgggatcagactctcagagctggagagttgcaggaggcctgggggagggtctgtggagccccagactcagagggccttggtgacttctccaacargctccctgttggaggccttggggtaccccagggcctttccctgcaagagagaggctgctccaccaggaaggggcccaggactccccagggtcggggggat

SEQ ID NO: 157815 - DNA, 201 bp, Homo sapiens
ggtcaaggtggacagatcacctgagatcaggagttcaagaccaggctggccaacatggcaaaaccccatctgtactaaaaatacaaaaattagctgggcgyggtgccatgtgcctgtggtcccagctacttgggaggctgagacagcagaattgcttaagcctgggaggcagaggttacagtgagcccagatcacaccatg

SEQ ID NO: 157816 - DNA, 201 bp, Homo sapiens; identical to SEQ ID NO: 29569

SEQ ID NO: 157817 - DNA, 201 bp, Homo sapiens
ctcaaaaaataaataaataaataaataaataaataaataaataaataaaatgaagcagcagcagctttgttagtgtttgttcaaggcctgataggccaagrtgaggctcagccgagaaacgtgctcagaggagcctggccggagtgtgatgggggagtctttgtccaggctgctgccacggtgggcctcaggactcatggc

SEQ ID NO: 157818 - DNA, 201 bp, Homo sapiens; identical to SEQ ID NO: 29571

SEQ ID NO: 157819 - DNA, 201 bp, Homo sapiens
gcagctttgttagtgtttgttcaaggcctgataggccaaggtgaggctcagccgagaaacgtgctcagaggagcctggccggagtgtgatgggggagtctytgtccaggctgctgccacggtgggcctcaggactcatggcctgggcgctgggggtggggctgccactcagccttgaggagagcaatgaggaggtcagatt

SEQ ID NO: 157820 - DNA, 201 bp, Homo sapiens
gttcaaggcctgataggccaaggtgaggctcagccgagaaacgtgctcagaggagcctggccggagtgtgatgggggagtctttgtccaggctgctgccayggtgggcctcaggactcatggcctgggcgctgggggtggggctgccactcagccttgaggagagcaatgaggaggtcagattccactcacatccagtgcg

SEQ ID NO: 157821 - DNA, 201 bp, Homo sapiens
aggaaatctcaagtcagtctgagatcaagacaatgtcacaggccacatgcagtggttcacgcctataatcccaacactttgggagtccgaggagggaggaytccttgagcccaggagtttgagaccagcctgagaaacatgctgaggccctgtctctacaaaacaaaaaattgaaaaattagctgggcatggtggtacatg

SEQ ID NO: 157822 - DNA, 201 bp, Homo sapiens
tatggcctggtttctcctaggttataattgtagagcgaagattattataatattggaataaagagtaattgctacaaactaatgattaacaatattcatayataatcatatctatgatctatatctaatgtaactattcttattttatatattttctttattatactggaacagctcgtgccctcggtctcttgcctcggc

SEQ ID NO: 157823 - DNA, 201 bp, Homo sapiens
tcacttctcaccgtgtcccttcagctcttatcactgtatggcctggtttctcctaggttataattgtagagcgaagattattataatattggaataaagaktaattgctacaaactaatgattaacaatattcatacataatcatatctatgatctatatctaatgtaactattcttattttatatattttctttattata

SEQ ID NO: 157824 - DNA, 201 bp, Homo sapiens
ggacgaacaaccagatgagagaacgtaccaggcatgcaagctagacccaggaatcaacgggctgaggcttagcgtcccctacggcgtccaccagcctgacygcgggcctgctgggcccggggggaggggccttcctgctggggtcgagctgcagcgcacgggtgggcattagaggcacaatagagcaggttagttagagct

SEQ ID NO: 157825 - DNA, 201 bp, Homo sapiens
atagccaggtacagggtggaacatgaaagcggaccaggagcgtgactgcttaagcacagcatcacagggagacggttaggcctccggataactgtgggcaracctgacactccacaagaggtggttgagcagagtcttctctaactcccacagggaaagggagacttcctttcccggtctgctaagtaacgggtgcttttt

SEQ ID NO: 157826 - DNA, 201 bp, Homo sapiens
cactaccaccaagatgcggagaccagtagtggccccgaatgccaggctgcgctgttatttattggatacaagacaagggggcagggtaaggagtgtgagcyatctccagtgacaggtaaggtcacatgggtcacgtgtccactggacgggggcccttccctgtttggcagccgaggcggacagcgagaggagacagcttat

SEQ ID NO: 157827 - DNA, 201 bp, Homo sapiens
tttttatttgacagcaccttgcatgaaattctgtagggtccagccctacagggtctgtgggtttttctccccgtgtgcagagatgagagatcgtagaaatraagacacaagacaaagagatagaagaaaagacagctgggcccggggaccactaccaccaagatgcggagaccagtagtggccccgaatgccaggctgcgc

SEQ ID NO: 157828 - DNA, 201 bp, Homo sapiens
ctctacaaaaaatttaaaaattagcccggcgtggtggcatgggcctatagttccagctgcttgggaggctgaggtgaaaagatcgtttgagcctgggaggyggaggctgccatgagccatgatcttgcctctatactccagcctgagcaacagagagcccctatctttaaaaaaaaaaaataataataaaataaaaaaata

SEQ ID NO: 157829 - DNA, 201 bp, Homo sapiens
acctgccggacacgcttctcttggaggtgagccccaaccaggatggcatccgtgccagctgctgcccagagcccattcagtcagcctcagcctctccaaasagccaggcattccagtagagccctgtgtggacacagctcgctctggaggcaccacctgaggtctgggagtgtgggggactgaggaggccctgtggtgggt

SEQ ID NO: 157830 - DNA, 201 bp, Homo sapiens
tcaagcgattctcctgcctcagccccccaagtagctgggattacaggtgtgcaccatcacacccagctaatttttgtatttttagtagagatggggtttcrccacactggccaggctggtcttgaactcctgaccccaggtgacctgcccaccttggccttccaaagtgttgggattacaggcgtgagtcaccgcgtccgg

SEQ ID NO: 157831 - DNA, 201 bp, Homo sapiens
acatttaccaatatgcatgtaactcaaggaagtttaaatagcattaaaaaaaatttttttttagtttttttttttttttttttttttgagacagagtcccrctgtgttgctcaggctggagtgcagtggcacgatctcggctcactgcaacctccgcctcctgggctcaagcgattctcctgcctcagccccccaagtagc

SEQ ID NO: 157832 - DNA, 201 bp, Homo sapiens
tgcggagcccgggaacgcacagagcgtgctggaggccattgacacctactgcgagcagaaggagtgggccatgaacgtgggcgacaagaaaggtggggtcygggccagcaggtgctcagctctgggacagggacccaggaccaggcatcaaagcccttacaggagaagctgttatcaccccatttccagggggctgggaac

SEQ ID NO: 157833 - DNA, 201 bp, Homo sapiens
tacccccaactccgggccatggggcttccctacccctgggtgtcctctaagccagctgggagacaacagcctgagtccgtgtctgcttctgtattttgtgyggttttagaggatccctgggctgcctggggaagcacccagggccagggagtgtgaccctgcaggctccacacaggactgccagaggcacacacctgctct

SEQ ID NO: 157834 - DNA, 201 bp, Homo sapiens
ctggagctgggggcctactgtggctactcagctgtgcgcatggcccgcctgctgtcaccaggggcgaggctcatcaccatcgagatcaaccccgactgtgycgccatcacccagcggatggtggatttcgctggcatgaaggacaaggtgtgcatgcctgacccgttgtcagacctggaaaaagggccggctgtgggcagg

SEQ ID NO: 157835 - DNA, 201 bp, Homo sapiens
tgggaactttatacaatatctggaatccttatattaacatttaccaatatgcatgtaactcaaggaagtttaaatagcattaaaaaaaatttttttttagkttttttttttttttttttttttgagacagagtcccactgtgttgctcaggctggagtgcagtggcacgatctcggctcactgcaacctccgcctcctggg

SEQ ID NO: 157836 - DNA, 201 bp, Homo sapiens
atcctggctcagtgcagtcatgtgatctcaaagttaagaaatgctgtcacgcccaggtgcagtggctcaggcctgtaatcccaacactttgggaggccaasgtggctatatcacttgaagtcaggagttcgagaccagcttggccaacatggtgaaaccctgtctctaccaaaaaatacaaaaattagccagttgtggtag

SEQ ID NO: 157837 - DNA, 201 bp, Homo sapiens
cgtggggcttctggggcagctagggctgcccgccgcgctgcctgcgccggaccggggcgggtccagtcccgggcgggccgtcgcgggagaggtgagagcgstggctagaccggggccgaatgcggccggattcggggcgggggccttcagacctagggtggaacactgggatagggtgtggggaattcggaccgctgtgaa

SEQ ID NO: 157838 - DNA, 201 bp, Homo sapiens
ttttcctccacttattcgacctctcacctggatggatgctcctgcagaaatctatactaacgatagtgtgtggatgcctggaactacagatgaccgttgcmccgctcagccaggagaaggcactgcatttaatgttactatgggttataaataccctcctctgtgccttggacatgcacctggttgtatccatctagaagc

SEQ ID NO: 157839 - DNA, 201 bp, Homo sapiens
tccattttctgttctgtgttgtgttcataaactaccagcgggaccatctgttgagacttggtagcaaaggatttttgctggatgatgcaagcagtcaagcwtttaatgaggaaacaaaaataacaggccaggcacagtggctcatgtctgtaatcccagcacttttggaggccgaggaggatcacttgaggccaggagttt

SEQ ID NO: 157840 - DNA, 201 bp, Homo sapiens
ccaccctcacggcctccccacctggtgctcgctcacctgcagctctcccagaaactggacactgctgttagcagccggactaggagcacgaggggcacagsccccatgcctggctaggtagggccgctggaccctggacacggattggaaggaaccagcactagcagaagcctgaggtgtgaaagggcagagaatgttcca

SEQ ID NO: 157841 - DNA, 201 bp, Homo sapiens
aaagatcgtttgagcctgggaggtggaggctgccatgagccatgatcttgcctctatactccagcctgagcaacagagagcccctatctttaaaaaaaaawaataataataaaataaaaaaataaaaagaaagaaagaaataaaaacaaagatgaatggagctgttgataaacccagtttttgagcctacagggcagcagt

SEQ ID NO: 157842 - DNA, 201 bp, Homo sapiens
gtacatgtttattaacagaccagaatacctttagccagtctgtaccatataaaaataagaagccaaaaagtacaaaaagttacgcttaataatgaatgttkcagcactttcttctcttcaggtattatttagatattcaatgaatgtctattatttaacttcacttagtatgactctgaggttgaaagttactgaaaacat

SEQ ID NO: 157843 - DNA, 201 bp, Homo sapiens
tgactctgaggttgaaagttactgaaaacatcttggaagcttttttaggccaatatattatcaaacgcaattaacaaaacacaactcactagtttatatargagctagttctcacttttttttttactctattttatatattttttcttttcttttcttttcttttcttttttttttttttttctgtagagacaaggtctt

SEQ ID NO: 157844 - DNA, 201 bp, Homo sapiens; identical to SEQ ID NO: 29575

SEQ ID NO: 157845 - DNA, 201 bp, Homo sapiens
ctgcacaggggcctcacgtgactgcagggctctggggaggtggggcacctgtagcctgacccccaccttgctgcttccaaagcttccttgcccagggctgrgccttgtggggcaccccccacactgtggtctgcctgcctgcagggtgcccagggagaccctccgcctttagaagtccaagttctttcccagccccctccc

SEQ ID NO: 157846 - DNA, 201 bp, Homo sapiens
aggtgagagcgctggctagaccggggccgaatgcggccggattcggggcgggggccttcagacctagggtggaacactgggatagggtgtggggaattcgraccgctgtgaagtgatctgacgttgggtgggagtctccggacttggggtggggaatctggatgggaactggggaattcggaccttgggtggggatctttg

SEQ ID NO: 157847 - DNA, 201 bp, Homo sapiens
agttcatcctgcagcccatccacaacctgctcatgggtgacaccaaggagcagcgcatcctgaaccatgtgctgcagcatgcggagcccgggaacgcacaragcgtgctggaggccattgacacctactgcgagcagaaggagtgggccatgaacgtgggcgacaagaaaggtggggtccgggccagcaggtgctcagctc

SEQ ID NO: 157848 - DNA, 201 bp, Homo sapiens
agcaggtgccaaggcagaatcggatgtgaccaggagaacacccttgaaggataaagcgaatgtgcgaccaccatgcaggtctggcccatggaagggagggragggggccccgacggggccacagtaaaggagtggaggggccccacaggcagggatggcccagctggccccctggggctgtgaatctgcaggtgcagtgca

SEQ ID NO: 157849 - DNA, 201 bp, Homo sapiens
ggcagaatcggatgtgaccaggagaacacccttgaaggataaagcgaatgtgcgaccaccatgcaggtctggcccatggaagggaggggagggggccccgrcggggccacagtaaaggagtggaggggccccacaggcagggatggcccagctggccccctggggctgtgaatctgcaggtgcagtgcagcctcttgcctc

SEQ ID NO: 157850 - DNA, 201 bp, Homo sapiens
gaatcggatgtgaccaggagaacacccttgaaggataaagcgaatgtgcgaccaccatgcaggtctggcccatggaagggaggggagggggccccgacggrgccacagtaaaggagtggaggggccccacaggcagggatggcccagctggccccctggggctgtgaatctgcaggtgcagtgcagcctcttgcctctctc

SEQ ID NO: 157851 - DNA, 201 bp, Homo sapiens
ggcagccgccctgctcaaggcctaggccattgtcctcctcccgggtggcgctttgttctacgtcttttcagctgacattgctaggacatttttttttttttctaaatgaaaacacatcatgattcatggtggtacttcctgctcaactccggaccttggggctgtcccctgacctcactgaccttgcagccgtgtggtgtc

SEQ ID NO: 157852 - DNA, 201 bp, Homo sapiens
agcgattctcctgcctcagcctcccaagtagctgggattacaggcatgcatcaccatgtctggctaattgtgtatttttaatagagactggggtttcaccrtgttggtcaggctgttcttgaactcctgacctcaggtgatccacccgcctcagcctcccaaaatgctgggattacagacgtgagccaccgtgcctggttg

SEQ ID NO: 157853 - DNA, 201 bp, Homo sapiens
actttcttctcttcaggtattatttagatattcaatgaatgtctattatttaacttcacttagtatgactctgaggttgaaagttactgaaaacatcttgkaagcttttttaggccaatatattatcaaacgcaattaacaaaacacaactcactagtttatataagagctagttctcacttttttttttactctatttta

SEQ ID NO: 157854 - DNA, 201 bp, Homo sapiens
tgattcaggagcaccagccctccgtgctgctggagctgggggcctactgtggctactcagctgtgcgcatggcccgcctgctgtcaccaggggcgaggctsatcaccatcgagatcaaccccgactgtgccgccatcacccagcggatggtggatttcgctggcatgaaggacaaggtgtgcatgcctgacccgttgtcag

SEQ ID NO: 157855 - DNA, 201 bp, Homo sapiens
acccgagggcaccagagggcacgagaaggctggctccctggcgctgacacgtcaggcaactgaggcacaaggctggcatttctgaaccttgcccctctgcraacacaagggggcgatggtggcactccaagcaaaggggcgtgtgggtgctgcaggaggagcacagagcactggcgcccctcccctcccgccctgcagatg

SEQ ID NO: 157856 - DNA, 201 bp, Homo sapiens
gggtcggggggatgtgtggtgtgcaggaccacgtgggaatgttagagaaaggggaagtcactccgggcctgccctgctaacagacctgctttttggatttytccagccagggatttttgtgtcctgttgctttttattgtttaaagtgaccctccaagcctgagggaccgtaggagctgccctgcagagcccagtgagaca

SEQ ID NO: 157857 - DNA, 201 bp, Homo sapiens
ctgaggaggccctgtggtgggtggagatgggtggggagctgggccaggggcctggctgggtggcctgttgggaactggggagccagctgcctgtgcaggtrcaaaatgggtggcagaagtggggtgcacaccccagaccagacaccagggcagaaacggcacaggaccaaggagatggggtggggaagggccgctctgggc

SEQ ID NO: 157858 - DNA, 201 bp, Homo sapiens; identical to SEQ ID NO: 29574

SEQ ID NO: 157859 - DNA, 201 bp, Homo sapiens
cgacaagaaaggtggggtccgggccagcaggtgctcagctctgggacagggacccaggaccaggcatcaaagcccttacaggagaagctgttatcaccccrtttccagggggctgggaaccctgggatatgcccagatagggctggggggctcctctggagtcccagggtgccagggtccctgatgacccctgcaggccct

SEQ ID NO: 157860 - DNA, 201 bp, Homo sapiens
agacctgctttttggatttttccagccagggatttttgtgtcctgttgctttttattgtttaaagtgaccctccaagcctgagggaccgtaggagctgccctgcagagcccagtgagacactagttaatgcagaaaaaacagattttacttggtaactactgacaacatgagaaaaagctggctccatgctgatttgtcta

SEQ ID NO: 157861 - DNA, 201 bp, Homo sapiens
cccgcttgaacttcagcctggggcacaggatgtgttaccgggctcacggagtgactcagggaactagtgccgccccagggccccaaggtgggcggttcggkgattcagagagggcagctctgtgttaggacacactggggccagccaggaagggtggaaaagatagggaccagcgtgagcatagaggctaagggaccatgg

SEQ ID NO: 157862 - DNA, 201 bp, Homo sapiens
gggggcaaagggcagctacaagaccacctgagtcccaatagggatttgagttcttggtgacaccaagtcagggaggagacaaattagaaatgtcagtctgragagagtggtaggtagccagatactgaaggaaagtagatgggaggatttggtaagggctgacgtgtaggaaggcagtgacagtccaagtgacaggcagat

SEQ ID NO: 157863 - DNA, 201 bp, Homo sapiens
aactcactagtttatataagagctagttctcacttttttttttactctattttatatattttttcttttcttttcttttcttttctttttttttttttttkctgtagagacaaggtcttgctgtgttgcccaggctggtcttgaactcctagcctcaagtgatccacttaccttggcctcccaaagtgctgggattacagg

SEQ ID NO: 157864 - DNA, 201 bp, Homo sapiens
cacatgaatccctggggcgtccagagcatgggtgaccagcacgggctcaccacatgaggccaaggggctgcaccatacagcctctcctttggccacccgtsactacccccaactccgggccatggggcttccctacccctgggtgtcctctaagccagctgggagacaacagcctgagtccgtgtctgcttctgtattttg

SEQ ID NO: 157865 - DNA, 201 bp, Homo sapiens
gcggccggattcggggcgggggccttcagacctagggtggaacactgggatagggtgtggggaattcggaccgctgtgaagtgatctgacgttgggtgggrgtctccggacttggggtggggaatctggatgggaactggggaattcggaccttgggtggggatctttggaccggggtggggtccccagactccttgtgga

SEQ ID NO: 157866 - DNA, 201 bp, Homo sapiens
gtgagggtctagccatcccctcagtgggttctgtgagcatcggaggcacggggggtgaggggctcaggagcaggttgcaattcaaaatcaagggctgcttygaggaggcctctccaccgggctgctgtagtcaccaagtccagcccatgcccaaaggaagaggaatgagttcccccttaaaaaaaaaaaaaaaaagaaaaa

SEQ ID NO: 157867 - DNA, 201 bp, Homo sapiens
tgaggcatgagaatcgtttgatcccaggaggcaaaggttgcagtgagccaagattgcactactgcactccagcctggggtacagagaaagactccgtctcaaaaaaaaaaaaaaaaaaaagaaaagaaaatcaaatatttattggatgcttctatgtgccaagcactgtcctagttccttgccttgcataccagactttat

SEQ ID NO: 157868 - DNA, 201 bp, Homo sapiens
tggtaggtagcaacaacaacaaaaacaataaaaccggaaatgactgcaatgcactccctatatgccaggttctttggtaagtagtccacatgacttactgyattgactcccttaggagagctgttaacattatactaatgttgtcaatgaaaaagctaagataggccaggcatggtggctcatgcctgtaatcccagcact

SEQ ID NO: 157869 - DNA, 201 bp, Homo sapiens
acaaaataagacatattttctatttttccagccagatagtctctgaacctttgccattgatcaatgaaagcagccatagacaatatgtaaatgaatgagcrtgtgtgtgagcctgaaaaactgtttacggacactgaaatttgaattttgttttatcttcatatatcacaaaagagtcttttttccccaaccattttaaaa

SEQ ID NO: 157870 - DNA, 201 bp, Homo sapiens
gtagtccacatgacttactgtattgactcccttaggagagctgttaacattatactaatgttgtcaatgaaaaagctaagataggccaggcatggtggctyatgcctgtaatcccagcactttgggaggttgaggcgggcagatcacctgaagtcaggagtttgataccagcctggccaacgtggtgaaaccccgtttcta

SEQ ID NO: 157871 - DNA, 201 bp, Homo sapiens
ttacatgatcatgcctgtaatctcagcactttgggaggccaaggcgggcggatcatgaggtcaggagatcaagaccatcctggctaacatggtgaaacccygtctctactaaaaatacaaaaaaattagctgggtgtggtggcgggcacctgtagtcccagctactcgggaggctgaggcaggagaatggtgtgaacctgg

SEQ ID NO: 157872 - DNA, 201 bp, Homo sapiens
aacaaaataagacatattttctatttttccagccagatagtctctgaacctttgccattgatcaatgaaagcagccatagacaatatgtaaatgaatgagyatgtgtgtgagcctgaaaaactgtttacggacactgaaatttgaattttgttttatcttcatatatcacaaaagagtcttttttccccaaccattttaaa

SEQ ID NO: 157873 - DNA, 201 bp, Homo sapiens
tgagcagggccgcttcaagaagaatgaagcctttgtgcctttttcctctggtaggtttctctggtctgacttcctccaggcatgtgctaaatccacccccmagccactggtctgtatttgaagttcaagtcacagtgtgaatttgaaggttatatcatagaaccataaagttttagaatcccagaattagtaaatattagg

SEQ ID NO: 157874 - DNA, 201 bp, Homo sapiens
gttcaagtcacagtgtgaatttgaaggttatatcatagaaccataaagttttagaatcccagaattagtaaatattaggatgtttgactctgataattagaaaaaaaaagttgggatggtaatagcactaaacagggcataaaccaactggctggctgttaagaacaaaataagacatattttctatttttccagccagat

SEQ ID NO: 157875 - DNA, 201 bp, Homo sapiens
acagtggctcatgcctgtaatcccagcactttgggaggccgaggcaggtggatcacttgaggccaggtgttcgagaccagcctggccaacatggtgaaacmctgtctctactaaaaatacaaaaattagccaggcgtggtgacaggcgcctgtaatcccagctacccaggaggctgaggcacaaaaatcacttgaacccgg

SEQ ID NO: 157876 - DNA, 201 bp, Homo sapiens
acaaattaccaggaacttagtcatctaaaacaacacaaatgtattatccttctgttctgaatttcagaagttcaaataggctttcactagctgacaccaayggaccatctgattctctgccttttcggggtgttaaagctgtactccttgtaatcctgggttcacgactctgtcctccatcttcaaagccagcagcgtagc

SEQ ID NO: 157877 - DNA, 201 bp, Homo sapiens
aataagacatattttctatttttccagccagatagtctctgaacctttgccattgatcaatgaaagcagccatagacaatatgtaaatgaatgagcatgtrtgtgagcctgaaaaactgtttacggacactgaaatttgaattttgttttatcttcatatatcacaaaagagtcttttttccccaaccattttaaaatgcc

SEQ ID NO: 157878 - DNA, 201 bp, Homo sapiens
gaggccgaggcaggtggatcacttgaggccaggtgttcgagaccagcctggccaacatggtgaaaccctgtctctactaaaaatacaaaaattagccaggsgtggtgacaggcgcctgtaatcccagctacccaggaggctgaggcacaaaaatcacttgaacccgggaggtgtaggttgcagtgagccgagatcatgcca

SEQ ID NO: 157879 - DNA, 201 bp, Homo sapiens
gaacacagcaaggggagggaggcagaagcctgagactgagatcttggcaggtgtagctctggccaatggagaacgatggaggattctccgacgcttctccytgaccatccttcgggacttcgggatgggaaagcagagcattaaggagcgaattcaggaggaggccagctacctactggaggagttccagaagaccaaggt

SEQ ID NO: 157880 - DNA, 201 bp, Homo sapiens
aaaacaacacaaatgtattatccttctgttctgaatttcagaagttcaaataggctttcactagctgacaccaacggaccatctgattctctgccttttcsgggtgttaaagctgtactccttgtaatcctgggttcacgactctgtcctccatcttcaaagccagcagcgtagcttcttcaagcctctgtttgcttctgg

SEQ ID NO: 157881 - DNA, 201 bp, Homo sapiens
aaataagacatattttctatttttccagccagatagtctctgaacctttgccattgatcaatgaaagcagccatagacaatatgtaaatgaatgagcatgygtgtgagcctgaaaaactgtttacggacactgaaatttgaattttgttttatcttcatatatcacaaaagagtcttttttccccaaccattttaaaatgc

SEQ ID NO: 157882 - DNA, 201 bp, Homo sapiens
acccgggaggtgtaggttgcagtgagccgagatcatgccactggactccagcctgggtgacagagtacgaccctgtctcaaacaaacaaaaaacaacaacmaaaagtgtatgtcatttggaacctggagtcaggacagtggttgggaatctggactccactccatcatttagaaatggtggggtcttgggtgagtcacttc

SEQ ID NO: 157883 - DNA, 201 bp, Homo sapiens
ctcccctgtgcctgcaggaaagcgcatctgcttgggcgaggccatggcccgcatggaactctttctctacttcacctccacccttcagaacttctctctakgctcgctggtgccacttgtggacatcgatatcacccccaagctctcaggctttggcaacatcaccccgacctatgagctctgccttgtggcccgctgagc

SEQ ID NO: 157884 - DNA, 201 bp, Homo sapiens
gagggcaagggaaggattttgttttgttttgttttgagacagagtcttgctcttgtcacccaggctggagtgcaatggcatgatctcagctcactgcaacytccacctcccagtttcaagcgattctcctgcctcagcctcctgagtagctggtattacaggcacctgccaccatgcccggctaattgttgtatttttagt

SEQ ID NO: 157885 - DNA, 201 bp, Homo sapiens
actccaagctcagggagaaatacagccctgtgttcactgtgtacatgggtcccggccagtggtggttttatgtggacacgaagcagtgaaggaagccttgrtagaccaagcggatgagttcagtggccgtggagaactggcttcaataaagcaaaacttccaaggtcatggtaggtagcaacaacaacaaaaacaataaaa

SEQ ID NO: 157886 - DNA, 201 bp, Homo sapiens
cttttgccgagaatgacagaagccaagacttccgtgcctctttcccagtattccttccaagcccagatttaccttggttccttagtaccatgtttatatcmctctaaaatcgccatcctctaaaatcctcaactggcctatgcttggtactccagtcagcccctcctcttgtgttttccttcactccaagctcagggagaa

SEQ ID NO: 157887 - DNA, 201 bp, Homo sapiens
atctctaactgcccacatccttcaattccaaggaggctcaccacattctgcctatcaatctatctatctatctatctatctatctatctatctatctatcyatccatctatctttctattaccttttttcttctgtccattgatctatattcatcagaaaatccattcattattctttctataaaaatatctttcactcta

SEQ ID NO: 157888 - DNA, 201 bp, Homo sapiens
ttattctttttcattattttggagagtcttcctctcttgcccacgctgtggtgcagtggcgtgatgtcagctcatgcaacctctgccttctgggttcaagygattctcctgcctcagcctcctgagtagctgggattacaggcatgtgccaccacacccagctgattttgtatttttagtagagacagggtttcaccatgt

SEQ ID NO: 157889 - DNA, 201 bp, Homo sapiens
gcatgcctctttcccattctttaaaaaacccatgtatgagagccaagctgggaccatggctttttggttcttttaagtaaagaccaaatgtcctggcagcrttcaagactccaagctgcctgtctcccgatgtctgatgagtaattgagcatcaccagtgtgtcagttgttaagttaaagaagcgaccaaacaggcctggt

SEQ ID NO: 157890 - DNA, 201 bp, Homo sapiens
ctttatgtaatgtttacaactctatgaccttgtccaaacagcacactcattttgaagatgatgaaacaagttcagaaggtgaagtcactcatccctaaagygcagaggagtaactccagcagtggtgatcttaatcagtcacataaccgcttgtcatttgtgtcaatcctgtcctagtcacctagcatgcctctttcccat

SEQ ID NO: 157891 - DNA, 201 bp, Homo sapiens
tgggtggatcacgaggtcaggagtttgagaccagcttgaccaacatggtgaaaccctgtctctattaaaaatacaaaaattaactgggccggtggcaggtrcctgtaatcccagttactctggaggctgaggagagagaatcacttgaacccaggaggcggaggttgcagtcagccgagattgtgccattgcactccagcc

SEQ ID NO: 157892 - DNA, 201 bp, Homo sapiens
tcgaactgatgctacgtttcagtctttcatgaaggtgagtctgtctgtctcctttaatagggctaaaagcaactaatcctatagccagattcacatagaamcttatgacttctaaaagatagactctcagaaacacagactttgcaaatcttagaattctgaaattccagaatcctaaaatgttggaaacacacattctca

SEQ ID NO: 157893 - DNA, 201 bp, Homo sapiens
gaaacacagactttgcaaatcttagaattctgaaattccagaatcctaaaatgttggaaacacacattctcagtgcattgaaataagattttcatgatctsaggactttggaatcacagtacattatatttttaaacacaggattctttgactcagcttgtcttagcactttgagacttggtatcatgaagtcttaagatt

SEQ ID NO: 157894 - DNA, 201 bp, Homo sapiens
ttagcactttgagacttggtatcatgaagtcttaagattctagaaatttaacatttcagagagagaagtatgaatcttggaatttatcgaatccaggtccmttattttggagatgcagacagtaactcttgtgggaagggatgagcttttgccgagaatgacagaagccaagacttccgtgcctctttcccagtattcctt

SEQ ID NO: 157895 - DNA, 201 bp, Homo sapiens
ccagatttaccttggttccttagtaccatgtttatatccctctaaaatcgccatcctctaaaatcctcaactggcctatgcttggtactccagtcagcccmtcctcttgtgttttccttcactccaagctcagggagaaatacagccctgtgttcactgtgtacatgggtcccggccagtggtggttttatgtggacacga

SEQ ID NO: 157896 - DNA, 201 bp, Homo sapiens
tctctatgttggtcaagctggtttcgaactcccaacctcaggtgatccacctgcctcagcctcccatagtgctggaattacaggtgtgagccactgagccygggggattagtgatattctttatgcacccatagccaaccctcataccccttatagctaaccttatttctcatcttcctatacttatacacatacctaacc

SEQ ID NO: 157897 - DNA, 201 bp, Homo sapiens
ttgttcccctattggctagggttagaccgcacaggctaaactaattccaattggctaaagagaatgatggggtgagtgctttggtgggagtcacggcagagaaggtagcaggtagcaggtaattggaatgagttagggtggagcaggtgattggaatgtagggtggagcaggtgatcagaatgagtcagggtggagtatat

SEQ ID NO: 157898 - DNA, 201 bp, Homo sapiens
aggataggaaaaagatgtgtatgtattttgaaagaagaattttatttcctcctttctattaagtctcctttcatccttaggaaaagcctaagattagagayccagaactcttacaccttcatttttctgcaggagaagtgagatgtgaggctcccaataacaaattggacaaattctcaggaatactgacctataagggga

SEQ ID NO: 157899 - DNA, 201 bp, Homo sapiens
tgttcccctattggctagggttagaccgcacaggctaaactaattccaattggctaaagagaatgatggggtgagtgctttggtgggagtcacggcagagaaggtagcaggtagcaggtaattggaatgagttagggtggagcaggtgattggaatgtagggtggagcaggtgatcagaatgagtcagggtggagtatata

SEQ ID NO: 157900 - DNA, 201 bp, Homo sapiens
ttcccctattggctagggttagaccgcacaggctaaactaattccaattggctaaagagaatgatggggtgagtgctttggtgggagtcacggcagagaaggtagcaggtagcaggtaattggaatgagttagggtggagcaggtgattggaatgtagggtggagcaggtgatcagaatgagtcagggtggagtatataat

SEQ ID NO: 157901 - DNA, 201 bp, Homo sapiens
cccctattggctagggttagaccgcacaggctaaactaattccaattggctaaagagaatgatggggtgagtgctttggtgggagtcacggcagagaaggtagcaggtagcaggtaattggaatgagttagggtggagcaggtgattggaatgtagggtggagcaggtgatcagaatgagtcagggtggagtatataatcg

SEQ ID NO: 157902 - DNA, 201 bp, Homo sapiens
aagaatttaccgtatagcattctttttacataaactctccccccacctctttttttctttttcctttttaaattttcctaaagatgataaccattcttttytaaagcgaacttgcttcatgtctgtggactagactgcctaaggccataagattagaagttaggataatacgtgttatattgataacttttagcaaacttt

SEQ ID NO: 157903 - DNA, 201 bp, Homo sapiens; identical to SEQ ID NO: 29588

SEQ ID NO: 157904 - DNA, 201 bp, Homo sapiens
aggttcaaatgcaacagatattttttgagcgcttactatgtgccaggtattcatctagacatgaggcctagcattgaaccaaaagagacaaaaaccccttmtaaatttaagaatgagtcgtcagcatattaagtgcctactcattacccagtgcagcgtcaaagcatggtgaagtagtaggaagaatctgtattctagatt

SEQ ID NO: 157905 - DNA, 201 bp, Homo sapiens
tgcttccttgcccctccatgcccttctctctcaacttactggcaagaaagttgaggctatgcggaataatagtcatgggtaagaaggtatcacctttaacytgaactttgcccgaaggctgagtcactttattcagttgaaaacaattattgggccttttttgcttaaggtctcaatcttatctcttcctgtttagtgtct

SEQ ID NO: 157906 - DNA, 201 bp, Homo sapiens
ctcagtgacatgtgacaatacaatgaaggttgttgtggggaggggcagcttgctccaccaataactcaggaacactctttctagctaatggccccaccaayctcttggatttcaggatcttctactggattccctgcattcaaccagcagatggggaaaaagagagaataggaagactcacacatgattttttttcttttc

SEQ ID NO: 157907 - DNA, 201 bp, Homo sapiens
tgatggacttacaggtctgccctttccttgcccagtggcctcactcatcactcaaaagcaggggctgctcatcccagccctccagctcagccctcctccamggggaaggtcacctggggttcaagaactgggaaatcctggtgggatccctcacaggtttcccttgtttgggcagtggtggctgccaatgacctcaagtgg

SEQ ID NO: 157908 - DNA, 201 bp, Homo sapiens
tttgagcatgtcctaaattgtgccagccaaaccaaccttctatggacccttgttaataaattggacagcttttatgattattttgattttctttaggctcytttgaacaattttagacttgtttttgcttaactcagacagaaaaattaatgaagctttaggggatggtcagacttagaggtgcaggagatcagtagtagc

SEQ ID NO: 157909 - DNA, 201 bp, Homo sapiens
tgtgaatattcggactaactccctgaatgatcctcccaagcccagaagcagacaggcaaagttgaagaagcaacaaatagtggagatggtattgaagtagragtcagaagattgggcccagttctgctacattctagtcaggagatgacctttaacttctcagagcctcaataacttgaatctgttatctaggactaataa

SEQ ID NO: 157910 - DNA, 201 bp, Homo sapiens
atgcctggttgactggaggaccaccctagtggaaaggggacagtctgggcctctggcctgccgtgcacacaagcctaacaattgtttttgtttaacgtgcrgacagaatagttgatccatttcaaccaggcatttacatccttagtatcctgtctcaattgccaaagtttgttttaagtctttaacttctaccatcactat

SEQ ID NO: 157911 - DNA, 201 bp, Homo sapiens
aagaaacagtggatttatataaaaggacttttttggaaaatttggccctcctcaaagcagctgtcttcttaggaaaggtgttctaggaatacccatgcctrtgtgtagctggcaaagtggtgatgtatgtcatgccctgcagatagcaatcctgcattcagagacaaaacagacagtggactgtagactttttcccgctct

SEQ ID NO: 157912 - DNA, 201 bp, Homo sapiens
gaagaagtcataatccttgtcccatacttgatctgaagtggcacgtttgctatcattccctcccactctttggcataggatacctactctagagggaagartcaaactctggctggctacccatggcttcagcaagctttcagatttgaattagccgctaatttctgtaggctatatctaatcagaattagaacagaagta

SEQ ID NO: 157913 - DNA, 201 bp, Homo sapiens
gcatcaaccaatgggtggataaagaaaatttcatatatatatacaccatggaatactactcagccataagaaggaatgaaataatgtcttttgcagcaacrtgggtggagctggaggacattattctaagtgaagtaactcaggaatggaagactagctactgttatgttctcacttataagtgagagctaagctatgagt

SEQ ID NO: 157914 - DNA, 201 bp, Homo sapiens
tacgtgcttgggttctggaactggttcaaaacctgtttcttctactcagtagctaagtgactttagacaaaattctttctcactcttaagttcctcatctrttattaaaagaggattattgtaaatattaaataatatgtataaatacttagcatagtacctagcacttagttagttattactatgttttattactattat

SEQ ID NO: 157915 - DNA, 201 bp, Homo sapiens
ctagcatgccctgaatttgtcatgtcacctcagatatctatgtgggcctcatttttcttttttataagatagaaataatattctctaccttagaggatgcwtgtgaaaatagaaaggaaataatatatattaaagcaattaatattttataacatgatattactatgcaagtgatattattagtgtggtagttagcatgga

SEQ ID NO: 157916 - DNA, 201 bp, Homo sapiens
ctctccctctttcccctctctgtctctctctgcctcttcccccccacacacctctctttcccctctctctctgcctctttcccctctctgtctctctctgyctctatcccctctctgtctctctctgcctctcttcccccccaccgcgtctttccctctctctctgtctctgcctctctttccctctctcctctctgtctc

SEQ ID NO: 157917 - DNA, 201 bp, Homo sapiens
ctctctgtctctatctcgctctcctctctgtctgtctctctctgtctctctctctcttcccctagggtagggacctacgggagtggaactactctctcttcccccaagaagaaaggaaagggcagcgggggggttgtgtcaggttcaacccttgaaattagcagaaggctcaacccctcaacaccagggatgtctcacctt

SEQ ID NO: 157918 - DNA, 201 bp, Homo sapiens
tgtctgtctctctctgtctctctctctcttcccctagggtagggacctacgggagtggaactactctctcttcccccaagaagaaaggaaagggcagcggkggggttgtgtcaggttcaacccttgaaattagcagaaggctcaacccctcaacaccagggatgtctcaccttgcccgtcctggaaggctcaacccctcaa

SEQ ID NO: 157919 - DNA, 201 bp, Homo sapiens
ttactttcttcactgtatgtacttcagcagctactcacacacaattgccactcataaaagctcatttttcagcgaaaggtttttttcctgaaagcaataayagtggggctgccaaccagcacaaatgtagttaagttttcccaaggttggttacatggtagtgagtatctttgggaagctctgagcagagaactaatgcca

SEQ ID NO: 157920 - DNA, 201 bp, Homo sapiens
tgttctgtgattatatagatcttcccataaggaggaggcgattgtcctctactggaggagtttggacagcaatctgaccccaattgagcagaacatgtttytaagcatttttcacttgtgtacttgttcattcaacaaatctttattatatccagagcctaatgctgagccaagcggtaggctacagagatttaaagaaaa

SEQ ID NO: 157921 - DNA, 201 bp, Homo sapiens
cacgagaaacctaggaataatgaatatttcactaacttgagtatggtgatggtttcacagatatgtgtgtgtatgcgtgtgtgtgtatgtctagtatatarttgtatactttaaatatgtgtgattttagggggatagtgactgaaaggggacatagggtggtttatgggtgctgagaatattcaatttatttgttctggg

SEQ ID NO: 157922 - DNA, 201 bp, Homo sapiens
taggacctagggttctaataaagtaggatcaagtagagactggggtcaacattctcagtcaggtttctcctgctgtaggttaatgtgtgtgggggtggggygggggggcaggggtcgagggatgaaggtggctatcttggacctggaaggtggagctgggactgtagagaagagaggagcctacaaaatctccttggtatt

SEQ ID NO: 157923 - DNA, 201 bp, Homo sapiens
tgaggccagggagcacctttatgagaccagtggccttgattttggtcagttttgtcaagagtgacaaaattatttatttcactctttattgaagccacttyttgctaaatgggaggctgtctgtgcttctttggtctgactagctctggtattaagtaatctctagggtctgtagcaataaccaaacaaactgatgattta

SEQ ID NO: 157924 - DNA, 201 bp, Homo sapiens
ctgaagccagccccaagctttgtatccaaagtttcagagttaggagatgaagatgatccaatgacatccactttgagtaattttttcaccttcagttcacsagtacctatgggagtgggagaaacctcacagaacatgaatacctctaaaagactaactggtccccattgatgttgctttctcccatattgacttttggca

SEQ ID NO: 157925 - DNA, 201 bp, Homo sapiens
aaattctttctcactcttaagttcctcatctattattaaaagaggattattgtaaatattaaataatatgtataaatacttagcatagtacctagcacttrgttagttattactatgttttattactattatctcccttgaaaatcccaaggagggcttctgctggactttcttttctgtcctatgtactgctgcctagag

SEQ ID NO: 157926 - DNA, 201 bp, Homo sapiens
gccagccccaagctttgtatccaaagtttcagagttaggagatgaagatgatccaatgacatccactttgagtaattttttcaccttcagttcacgagtasctatgggagtgggagaaacctcacagaacatgaatacctctaaaagactaactggtccccattgatgttgctttctcccatattgacttttggcataaag

SEQ ID NO: 157927 - DNA, 201 bp, Homo sapiens; identical to SEQ ID NO: 29586

SEQ ID NO: 157928 - DNA, 201 bp, Homo sapiens
tgggattacaagcgtgagccaccgcacctggctgtctctcaccttttgtcaggccactaacttatttttctccttcaaatctttttttttctttttttaattttttttttttaccttttttatttttatttttttgttttttcctcctccaaagctttctttcccatttttggatgcaagccagtgctctaggattccctc

SEQ ID NO: 157929 - DNA, 201 bp, Homo sapiens
gagccgagatcatgccactgcataaacaaataactttttagtatgtgtgtcccatctgatatttgggacatacttatcttgtatctgaatgttttatttgstaaatctggcaaccctaaacagaaggggttaaggtttgaatcctttagatttaaattgcttttttagcatcaccaaggcattttgtttctaactgacggc

SEQ ID NO: 157930 - DNA, 201 bp, Homo sapiens
ccttgaaaatcccaaggagggcttctgctggactttcttttctgtcctatgtactgctgcctagagactgtgaactatagggcctccctgccctcctaggmgagggacgctttgctgagagataaggctctagactgtagaactgaagcagcacatatgttggataaaatgttaatttaattcttttttttttcatgtatc

SEQ ID NO: 157931 - DNA, 201 bp, Homo sapiens
attccttttctgccctcctccttcttttcctggttacttaaatttcagcgtgctactttcttttgtttcatcttacagagctcattttccattttagtttstgccatttccttgctaggataatcgccaatcttctgtagctttaacccctaaaacccgaggtggtattacatatgttgcgtaagagctaagtctttcacc

SEQ ID NO: 157932 - DNA, 201 bp, Homo sapiens
ataataatgttcaccttgcatggtggtcgtaggagttaagtatggttctgaaaatgttagttctgtttctccaaaaaactattagcccttggaaaaagggyatctcatttatctctgtatacacagtatatttgtgatacagtttctatcacaatgttgtgcacacagccaacattcaataaatatatattgaatattgaa

SEQ ID NO: 157933 - DNA, 201 bp, Homo sapiens
gagagagagtgaggaggatcctatacttttaaatcatcagatcttgtgagaacacaagaatagcatgagggaaagccgcctccatgattcagtcacctccyaccaggtccctccccaacactgggagttacaattcaacatggtatttgggtgggggacacagagccaaaccatatcaaatagttctggataataatagta

SEQ ID NO: 157934 - DNA, 201 bp, Homo sapiens
agaaatcaacagctcttgcagtaagaagcttgttcttgcctatttctcactgtagttacagggaaagtgtgagtagctttgggagagggtgtatgatagcwgtgaaagaaagtaaatcagtgtctgtaaaatgcttaggttgaacatctgttcctaaggtgactgcttttgtcacactgtaatgttaacagcccaccttcc

SEQ ID NO: 157935 - DNA, 201 bp, Homo sapiens
aaactaaagccaagaaatgaaaagtgacttgccctaggtcacttaacaatttagttgcagagtccagtctagaatagctaaaatgtcctgagcatttttawttattaggaattgttttcaaatattttgtgtgccttaactcattaatcctcccaataaccttatgagtagatattattatcatttccatcttacagaaaa

SEQ ID NO: 157936 - DNA, 201 bp, Homo sapiens
ctgtctacttaattccccaaccagagtgtgaacttttaaaaagcatacacttgtgctctttaacccctcactctccacagtaggtggtgtacaaaatgctstgagatatatctagaggttgcataaatgccttccatgtccagaatactgtgctaggaagacactatgtggtttatacaaaaagacagttatccctgccct

SEQ ID NO: 157937 - DNA, 201 bp, Homo sapiens
gtacagctagcattccctagcaatcactctgtgtcctttctgtgcggggctgtataggttatggtgggattggtccagatccaccttgaaagcttggtgtkgccttactctatcctaggacctagggttctaataaagtaggatcaagtagagactggggtcaacattctcagtcaggtttctcctgctgtaggttaatgt

SEQ ID NO: 157938 - DNA, 201 bp, Homo sapiens
  misc_feature (1)...(201): n = A,T,C or G
taatttctgtaggctatatctaatcagaattagaacagaagtacctttaacaatggacttttaagaaagaaaaatcacatctttcagcgtaagttgtcgcngtcgtattcattgtgaatattcggactaactccctgaatgatcctcccaagcccagaagcagacaggcaaagttgaagaagcaacaaatagtggagatgg

SEQ ID NO: 157939 - DNA, 201 bp, Homo sapiens
tttctcaggagcctaaactaactacaagtcagtaacttccttctttggactagagaggtgtctacgttctggctggtaactcctacccctggtcctacccsggtcctccaggctctgtttcagcctttcccctcctggctcactgtttacaggtgtggtcaggaattctctgaaccagccgcaaatgctgctgagcattat

SEQ ID NO: 157940 - DNA, 201 bp, Homo sapiens; identical to SEQ ID NO: 29583

SEQ ID NO: 157941 - DNA, 201 bp, Homo sapiens
ctcctctaggcaggggagtgatgcttcaggacgtgacaggctgttctaacatgtgtctacctgagggctagttgaaggatccaggagtattttcttcttgrgtgggccctgaacaaagccaaaaattgtagaaaccagtctagaaaaagtcctgctcatctgtggccactgccttctagccgtcctccaccttgcagaaag

SEQ ID NO: 157942 - DNA, 201 bp, Homo sapiens
accgagaagccattactatgtgctaggctagagatataaataagacatggtctctgccctaaaagggctcaaaatgtagctagggaaataagttaccttayttgagtttccaaggtattttcaaatgtcttacgagatttgctatttatcagcatcctaagaggtaggcagtgcaacaatttttagagccattttagacac

SEQ ID NO: 157943 - DNA, 201 bp, Homo sapiens
gggaaatatttgtaaaccctgcatccatcaaaggactaatatccagaatctaaaagaaactcaaacaaatcagcaagaaaaaaactaataatcccatcaaraagtgagcaaatgacatgaatagacatttctcaaaagaagatatacaaatgtccaacaaacatgaaaaaaatgctcagcattactaatcatcagggaaat

SEQ ID NO: 157944 - DNA, 201 bp, Homo sapiens
aagggaactacattgtgtaatatttcaaaatgttaatcttctatatgcagtttgttataggtctatttcctgaacattttcttgtgtgattttagaaaagrcatcaaagtgacgatcgagtcaacaaccagcctgttctgctactggtgaatggcaagtaagttcttctagagaagctggtttaggtaggaccagtcctga

SEQ ID NO: 157945 - DNA, 201 bp, Homo sapiens; identical to SEQ ID NO: 29582

SEQ ID NO: 157946 - DNA, 201 bp, Homo sapiens
gcttttgcctctgtggatgaaaaccctatcccccatgctctggctataggtttttgacagaattcaagagtgcaggagacttccacagcagtccccagtcyggaccaaactgaaacactcaagcactcgacgttctgcctatgcattctcccataaacaaggctttggggccctcatcacttctggcaagatagtgaagcc

SEQ ID NO: 157947 - DNA, 201 bp, Homo sapiens; identical to SEQ ID NO: 29584

SEQ ID NO: 157948 - DNA, 201 bp, Homo sapiens
aatgagtgcaaacaggggaaatgccagagacttataaaatcagatctcatgagactcattcactatcatgagaacagcatgggggaaaccacccctgtgayccaattacctccacgtggtcccacccttgacacgtgaggattatgggattacaatttaagatgagattttgggtggggtcacagccaaaccataactgtc

SEQ ID NO: 157949 - DNA, 201 bp, Homo sapiens
agctgaaaaaagtatttaccctactctgatcatccttttctgggttctgcatttccttacacatacacacacccaaacacattttagtttcctcctttccrggctttctaaaccctgtaccggggctttttggcaataaaaaaaaaaggaccctatgtaactagattaccttatttagtaatatttattgagtatctacta

SEQ ID NO: 157950 - DNA, 201 bp, Homo sapiens
aatcccagcactgtgagagtccaaggccggcagatcacttgaggccaggagttcaagactagcttggccaacatggcaaaacctgtctctactaaaaataaaataaataaataaataaataaataaataaataaataaataaataaattagccaggcatggtgacacatgcctatagtcccagctacttgggaggttgagg

SEQ ID NO: 157951 - DNA, 201 bp, Homo sapiens
ttggccaacatggcaaaacctgtctctactaaaaataaaataaataaataaataaataaataaataaataaataaataaataaattagccaggcatggtgrcacatgcctatagtcccagctacttgggaggttgagggacaagaatcgcgtgagcctgggaggtggtggttgcagtgagccaagattgtgctattgcagt

SEQ ID NO: 157952 - DNA, 201 bp, Homo sapiens
gaacgaaatgatgggaaggacatctccgactaccagtccttctccctggtggtgcagacctccttgatctgggtggtcgcaatgcaggtgtggccagtggyggtgggggtaaggggattgggtgggggcctctctgaaagagtgggaggaatagagggtgagagtgtgggaagggagcaaccttcattacataattggagg

SEQ ID NO: 157953 - DNA, 201 bp, Homo sapiens
atcccagcactgtgagagtccaaggccggcagatcacttgaggccaggagttcaagactagcttggccaacatggcaaaacctgtctctactaaaaataaaataaataaataaataaataaataaataaataaataaataaataaattagccaggcatggtgacacatgcctatagtcccagctacttgggaggttgaggg

SEQ ID NO: 157954 - DNA, 201 bp, Homo sapiens
tcccagcactgtgagagtccaaggccggcagatcacttgaggccaggagttcaagactagcttggccaacatggcaaaacctgtctctactaaaaataaaataaataaataaataaataaataaataaataaataaataaataaattagccaggcatggtgacacatgcctatagtcccagctacttgggaggttgaggga

SEQ ID NO: 157955 - DNA, 201 bp, Homo sapiens
tctgaggctgcaacatcaggaatacagattggtgctatggcttggtgatctacactggtacgtttcccttggcccccagcctgctaaattccattcatggmtgagctatgggtacttagttttcaggatgtggatatgacactcagatatatttcagaacactatggttttgagatagataggcaggtagaaggatggatg

SEQ ID NO: 157956 - DNA, 201 bp, Homo sapiens
cccagcactgtgagagtccaaggccggcagatcacttgaggccaggagttcaagactagcttggccaacatggcaaaacctgtctctactaaaaataaaataaataaataaataaataaataaataaataaataaataaataaattagccaggcatggtgacacatgcctatagtcccagctacttgggaggttgagggac

SEQ ID NO: 157957 - DNA, 201 bp, Homo sapiens
ccagtctctactggtaacatctattttctaaaaccccatgaaaaagtaggagatactgcacccgtacaacagttctgtttgtgtcctgtacagtggtcacktgtcttttactctagtgaaaccaacctgaaagtgaagcaggccatctcagttaccagtgacatggaagatcgcctggagcttctgtctacctttaatggt

SEQ ID NO: 157958 - DNA, 201 bp, Homo sapiens
taagcatgataagtaagttaaatataaaccatgggatgtagctgtgggtagactgaaccagaaacacatgatgaaatggtggcgagaaagcaaattagttrctgccctttctgcagggccatggatactggccttttctgtgatgactctctgctacatcatttagctgttcttcttagcatacatttttttttaagagat

SEQ ID NO: 157959 - DNA, 201 bp, Homo sapiens
tagtcccagctacttaggaggctgaggcaggagaatggcgtgaacccgggaggcggagcttgcagtgagccgagatcccgccactgcactccagcctgggygacagagagagactccgtctcaaaaaaaaaaaaaaaaaaaaaaaaaggaaagtagagaaatagaaataaaaagaaaagacaaaactgagtatattaggaa

SEQ ID NO: 157960 - DNA, 201 bp, Homo sapiens
gagatttaaagaaaagaaaaaacatggtctctaccttttttaaataaattgacatgaaattgtacgtatttattgtgtacaatatgatgttttgaaatatmtacataccttctagaatggttatatcaagctaattaacatatgcagtacctcacatagtatctctgcagggaaggcttatggcctgggcaatttttagtt

SEQ ID NO: 157961 - DNA, 201 bp, Homo sapiens
gaatcccaaggaagacactctgattttcagatgcttagccctgctaagaaagaaaccaggatgatatatttgcttgtcctgttctgacgcagaaccattcwttttctgctttctccttagtgttgaaataataagattgggcaacagtttatatatcaactgggatcggaagatgttttatgcaccaaggaacacaccagc

SEQ ID NO: 157962 - DNA, 201 bp, Homo sapiens
tatgagtacacaaaggcatacaaagtggtaaaatggactttggagactcagaagggggagggtgcaaatggagtgaggaataaaaaactacatattgggtwcggtgtacattgcttgggtgatgggtgcaccaaaatctcagaattcacaactatataatgcatccatgtaaccaaaatcacttgtacctcaaaagctact

SEQ ID NO: 157963 - DNA, 201 bp, Homo sapiens
ctcattttccattttagtttctgccatttccttgctaggataatcgccaatcttctgtagctttaacccctaaaacccgaggtggtattacatatgttgcrtaagagctaagtctttcaccctggcatttgagtcaaaactctaagcattatatccttaaacagaggcttcttctattttgagacttctactaccttttta

SEQ ID NO: 157964 - DNA, 201 bp, Homo sapiens
attgtcctctactggaggagtttggacagcaatctgaccccaattgagcagaacatgtttctaagcatttttcacttgtgtacttgttcattcaacaaatytttattatatccagagcctaatgctgagccaagcggtaggctacagagatttaaagaaaagaaaaaacatggtctctaccttttttaaataaattgacat

SEQ ID NO: 157965 - DNA, 201 bp, Homo sapiens
tttttggttgttgttagaggcagggtctccctctgtcactcaggctgaagtgcagtggcatgatcaagctcactgcagcctccaactactgggctcaagcrattcttccaccttagcctcccatgtagctaggactacaggtgtgtggcaccatgccagctacattaaaaaaattttttttgtagagacagggtctcacta

SEQ ID NO: 157966 - DNA, 201 bp, Homo sapiens
tgagcttctccagaagggatcctgtctaattatttttcagcctccactagtatagtccagcataaggctgtgaaaagagcaagccttgagaaatgctatastgtctgattgattattatttggaaaatcatggagagaacaccaaggaaatcttagttttggcttggatctctaaactcctaagtgctaagctatttgacc

SEQ ID NO: 157967 - DNA, 201 bp, Homo sapiens
atgtatatttttttaacaacaatttaaagaaattcaaaccctcctttaaaacccttgccaagtctctgctgtgttcacttaccaacaggtgatacttatgrcaaggatggacagagggtgacggtctctgaggtgagtgattacagctccatgggaaatgcatgtgggagctgagtgaggctgtgcttcagagaagcatcc

SEQ ID NO: 157968 - DNA, 201 bp, Homo sapiens
gataaaggaggacaaatggatgaatgttcaagtgggagatataataaaactagaaaataatcagcctgtcatggtgagtacctcttttggctgtgacttgytcttttttggattgagtgggtaccagggactcttggagcacttctgctaccactccttttggtgacctttgttgcccattttgcatcagaaatcaacagc

SEQ ID NO: 157969 - DNA, 201 bp, Homo sapiens
gaggacagacaagatgaacgtaggtaaactcaggaaaatgtatctgagtatgtcattattattacctctgaagtgtgtgtgtgtgtgtgtgtgtgtgtgtrtatacatgcacatatggcagatcaacctggcaatcagattgttaacctaccaaacaactgatcaggaaaggaaatatatttttcaaaagtaaatactttg

SEQ ID NO: 157970 - DNA, 201 bp, Homo sapiens; identical to SEQ ID NO: 29585

SEQ ID NO: 157971 - DNA, 201 bp, Homo sapiens
gatcattcgagactactaacaacacctctatgcacacaaactagaaaatctagaggaaatggataaattcctggaaacatacaactctcctagattaagtygggaagaaataggtcccctgaacagactaataacaagcagtgagattgaatgagtaatttttaaaaattgctagcaataaaaaagcccagggccagatgg

SEQ ID NO: 157972 - DNA, 201 bp, Homo sapiens
tgaggacaacctactggacaatgataaaccatgttgtcatctggggtagcctgggtttctacttttgggtgtcattcctcctgtacagcgatggcttgtgyctagtattccctgacgtcttccaattcctaggtaaggccctgcccagtgggcggagggtggggaaccaggtatatttatttaataaatgtttaccgagaa

SEQ ID NO: 157973 - DNA, 201 bp, Homo sapiens
gggagaaatagacagcagtacagtaaagtagagaacctcaataatccactttcaacagtagaatcattcagaaagagaatcaaggaaacagtggacttgawtaacactatgaacaaatggacctaacagatatatacagaacattccattcccaaacagcagaatatattgttcttttcaagtgcacatggatctgttctc

SEQ ID NO: 157974 - DNA, 201 bp, Homo sapiens
aacccactctttctttactcctctcttagctttttctagctttgttctcatcctttttcctctgctcctccttctcctactctatattccctttgccttcytctatctgcccctgctccatctctcctattctttctctttcttctctccacatttcctgtctcctctcgaactctattttcctttccaactttcaattct

SEQ ID NO: 157975 - DNA, 201 bp, Homo sapiens
tggccttgaactcctgagctcaagtgatcctcccgccttggccttccaaactgctaggatcacaggcgtgagcaaccatgtctggccatactccttattcttttttttttttttttttttttttttttttgagatggagtctagctctgttccccaggctggagtacagtggtgcagtctcggctcactgcaagctccgcc

SEQ ID NO: 157976 - DNA, 201 bp, Homo sapiens
acaaactaaataaggcaccagggaccaatcatggagaaactgagatatgtcacctttcagacagataattcaaaatagctgttttgaagaaacgcaaagamattcaagataacaggaaggaattcagaattatatcacataaatttaacaaagaggctgaaatagttaaaaagaattaaacagaaattctagagttgaaaa

SEQ ID NO: 157977 - DNA, 201 bp, Homo sapiens
gtgttgttcccctattggctagggttagaccgcacaggctaaactaattccaattggctaaagagaatgatggggtgagtgctttggtgggagtcacggcagagaaggtagcaggtagcaggtaattggaatgagttagggtggagcaggtgattggaatgtagggtggagcaggtgatcagaatgagtcagggtggagta

SEQ ID NO: 157978 - DNA, 201 bp, Homo sapiens
tgttgttcccctattggctagggttagaccgcacaggctaaactaattccaattggctaaagagaatgatggggtgagtgctttggtgggagtcacggcagagaaggtagcaggtagcaggtaattggaatgagttagggtggagcaggtgattggaatgtagggtggagcaggtgatcagaatgagtcagggtggagtat

SEQ ID NO: 157979 - DNA, 201 bp, Homo sapiens
gttgttcccctattggctagggttagaccgcacaggctaaactaattccaattggctaaagagaatgatggggtgagtgctttggtgggagtcacggcagagaaggtagcaggtagcaggtaattggaatgagttagggtggagcaggtgattggaatgtagggtggagcaggtgatcagaatgagtcagggtggagtata

SEQ ID NO: 157980 - DNA, 201 bp, Homo sapiens
ataaacaggaggaaggagcagcaccaaatccaagatggcggccagcaggaggctgatgaaggagcttgaagaaatccgcaaatgtgggatgaaaaacttcygtaacatccaggttgatgaagctaatttattgacttggcaagggcttattgttcctgacaaccctccatatgataagggggccttcagaatagaaatcaa

SEQ ID NO: 157981 - DNA, 201 bp, Homo sapiens
aacttctggagcgtggaaagtgattgttaaattgccttaattctctacctaacatttttctacaatgcaagcatctaagaaaagactgaaaaagtggtgamccagatatttgaaaagtcagctttcacccaaatatgagaaaatttttaaatgtcaggtgggcaatgatgttggtcttgctcctccagggtgtttgtcttg

SEQ ID NO: 157982 - DNA, 201 bp, Homo sapiens
ttggactcaggtggcattggtaaaggaaatgaaacgcatgcaaatttcacagacaaaagagtagctttgccacctctcattttggctgggctgctctgagrtgctgcatcttttatagtgtctaggctctcatccttaatgacattttcatattctccatcccccatcccccaccgcctctccagtaaggactttttgaca

SEQ ID NO: 157983 - DNA, 201 bp, Homo sapiens; identical to SEQ ID NO: 29590

SEQ ID NO: 157984 - DNA, 201 bp, Homo sapiens; identical to SEQ ID NO: 29591

SEQ ID NO: 157985 - DNA, 201 bp, Homo sapiens
gagcgtggaaagtgattgttaaattgccttaattctctacctaacatttttctacaatgcaagcatctaagaaaagactgaaaaagtggtgacccagatayttgaaaagtcagctttcacccaaatatgagaaaatttttaaatgtcaggtgggcaatgatgttggtcttgctcctccagggtgtttgtcttgcagggaca

SEQ ID NO: 157986 - DNA, 201 bp, Homo sapiens
ggcaggataatcgtttggaccctggaggcagaggctgcagtgagcccagattgcgccattgcactccagcctgggcaacaagagcaaaactctgtcccccscccacaaaaaaaaattgattgaaatacctggaattcacaccataattggggtgtctttaggctgaaatggagacaacagaaggtgaggtggcttggactc

SEQ ID NO: 157987 - DNA, 201 bp, Homo sapiens
attgaactatgatggcaccactgcactccagcctaggcaaaagagaaagaccttgtctctggaaaaaaacaaaaccaaaaaccaccaccaccaccaccaacaccaccaccaccaccaccaccaacaaaaaactcagaaaacaaaagtaaaacaatggactttttaatcctaaagtgaggtaatatacctgaacacccatat

SEQ ID NO: 157988 - DNA, 201 bp, Homo sapiens
ttgaactatgatggcaccactgcactccagcctaggcaaaagagaaagaccttgtctctggaaaaaaacaaaaccaaaaaccaccaccaccaccaccaacaccaccaccaccaccaccaccaacaaaaaactcagaaaacaaaagtaaaacaatggactttttaatcctaaagtgaggtaatatacctgaacacccatata

SEQ ID NO: 157989 - DNA, 201 bp, Homo sapiens
tgaactatgatggcaccactgcactccagcctaggcaaaagagaaagaccttgtctctggaaaaaaacaaaaccaaaaaccaccaccaccaccaccaacaccaccaccaccaccaccaccaacaaaaaactcagaaaacaaaagtaaaacaatggactttttaatcctaaagtgaggtaatatacctgaacacccatatat

SEQ ID NO: 157990 - DNA, 201 bp, Homo sapiens
taggccaatctcaaaagaaacttaagaacattggggtgtgtgtgtgtgtgtgtgtgtgtgtgtgtgtgtgtgtgtgtgtggtggggttttgttgttgttgyttggtttttttgagacaaggtttcactctgttgcctaggttcgagtgcagtggcatgatcatggctcactgcagacttgacctcttggcctcaagcgatc

SEQ ID NO: 157991 - DNA, 201 bp, Homo sapiens
  misc_feature (1)...(201): n = A,T,C or G
tagatgctgtattttgaaatatattaagtccaagtttttgtatttagatgtcaaattttatttctgaaaatgaggtgagttttaaaaattattttataagnagatgttcattatataaaaaattaggacagaactgtagaatgtagaaagaaaccactactatcctcaccacccaaagataaatctcagtattatttttat

SEQ ID NO: 157992 - DNA, 201 bp, Homo sapiens
tagatgactttgggtttccttatatgctgtgtaatttttagctgtgagtttgtctttagcaggagtcctatttcatttatttgatatagcccatcaagtgyttatactatagaattcactgattctggcgatttttccccatccacactaacatttatttttattcttgcatatattacgagaagatacatagcacttgaa

SEQ ID NO: 157993 - DNA, 201 bp, Homo sapiens
gtatgcactgcctgattgtgactttttaatagataatataactcatgctaaacttgtcagcagttgtattattatccatcccagaaatacccagcaaacayttgttgagggattaagcagattcagtacactgtactccataaactgaggtctaagcacccttcattcatgacaaagttgagatttttcttaaaggttgtg

SEQ ID NO: 157994 - DNA, 201 bp, Homo sapiens
ttggaaagaaggaagaacttaggtgaagaaaaggaaaaagaggaatgggagcaaaaataaaaaaatcaacaaaaaacaaaatctctttgttttcttgaggactttaaagttggaataatgtctctttatcttttatttagtttgaagaagaatttcttgaaacgagaataatatgaaaagttgcagaagggtaagcctaga

SEQ ID NO: 157995 - DNA, 201 bp, Homo sapiens
tttggaaagaaggaagaacttaggtgaagaaaaggaaaaagaggaatgggagcaaaaataaaaaaatcaacaaaaaacaaaatctctttgttttcttgaggactttaaagttggaataatgtctctttatcttttatttagtttgaagaagaatttcttgaaacgagaataatatgaaaagttgcagaagggtaagcctag

SEQ ID NO: 157996 - DNA, 201 bp, Homo sapiens
gtttggaaagaaggaagaacttaggtgaagaaaaggaaaaagaggaatgggagcaaaaataaaaaaatcaacaaaaaacaaaatctctttgttttcttgaggactttaaagttggaataatgtctctttatcttttatttagtttgaagaagaatttcttgaaacgagaataatatgaaaagttgcagaagggtaagccta

SEQ ID NO: 157997 - DNA, 201 bp, Homo sapiens
acccaccaattccggacacattttggtgacccagaagggattattgcctatcaccaagcagtaagactatcaccaagtggtgagaccattgcctattgttragcggtaagactgtcacctattggcaagcagtgagtaccattggaccccttttgcttgctattctgtcctatttttccttagaatttgggggctaaatac

SEQ ID NO: 157998 - DNA, 201 bp, Homo sapiens
cattacaattaacccctgatcaacatgggagttggggcatataattttgacttctcaaaaactatgaatagcctactgttgaatggaagccttactgatarcataaacagtggattaaacatattttgtagctatatgtattaagtactgtattcaaagtaagctaaagaaaaaactttattaagaaaatcataaagaaga

SEQ ID NO: 157999 - DNA, 201 bp, Homo sapiens
ctgcctttgaaaaggtaggcttcagggatccagggcttttaccttttctgtttctgagaatatttcaagagtgaatatctgaaaagacacacagaggccaygttagagctttactgcttttggatcaaaactttaaaaaggattccagaacaaattacaggtaaaattatggaaactccaacaaaatagagttggaatata

SEQ ID NO: 158000 - DNA, 201 bp, Homo sapiens
tatcaattgggatatgaatagaccatttatctctcatcctctcatcctgagcttgttctcatggcagcaaggcagagttctgagagtgagagtgaaagcayactggcctcctaagttctgggttcagaattggcacctcatcatttctacctcattacactcattaaaggaagccacaaatagactgggaaatagacccca

SEQ ID NO: 158001 - DNA, 201 bp, Homo sapiens
tcaagcttgacttagctaggctgcactcactcatgtctatagttagctaggtagctctggtcgtgggtgttggctatcaattgggatatgaatagaccatktatctctcatcctctcatcctgagcttgttctcatggcagcaaggcagagttctgagagtgagagtgaaagcacactggcctcctaagttctgggttcag

SEQ ID NO: 158002 - DNA, 201 bp, Homo sapiens
tattgctcacctgtctatgggtgagcaagtatctgagtggcccatctggatcaagcttgacttagctaggctgcactcactcatgtctatagttagctagrtagctctggtcgtgggtgttggctatcaattgggatatgaatagaccatttatctctcatcctctcatcctgagcttgttctcatggcagcaaggcagag

SEQ ID NO: 158003 - DNA, 201 bp, Homo sapiens
gctcaaaccacagatggatgcttgcttttcggccaagtgtctttggttgaaatggatggaatggtgctgacgcagactagagccatcctcaactatcttgytgagaagtacaacttctatgggaaggacctgagggaaaaagtcaggtaccatagtgttcattactctacttgattcttagacaagcttcttcacttctcc

SEQ ID NO: 158004 - DNA, 201 bp, Homo sapiens
tcccagctacttggaaggctgaggtgggagaattgcttgaactcaggaggtggaagttgcagtgagctgagattgtgccactgcatgctagcctgggcaasagagtgagactccatctcaaaaaaaaaaaaaagaatatgaatattttaggggtatgcactgcctgattgtgactttttaatagataatataactcatgct

SEQ ID NO: 158005 - DNA, 201 bp, Homo sapiens
tatttctttgctcacacccttacttattcctttataataattcctaaaacaagaattgataggtcaagaatatgaatgtgaccagatgtggtggctcgtgyctgtaatcctagcattttgggaggctgaggcaggtggatcactagaggtcaggagttcaagactagcttggctaacatggtgagaccctgtctctactaa

SEQ ID NO: 158006 - DNA, 201 bp, Homo sapiens
aaaatcacagatagaaattagaagtgaaccatccttagatttactgcaaccactgaacaagggtatcttaacctctctttgctcaaaccacagatggatgmttgcttttcggccaagtgtctttggttgaaatggatggaatggtgctgacgcagactagagccatcctcaactatcttgctgagaagtacaacttctatg

SEQ ID NO: 158007 - DNA, 201 bp, Homo sapiens
ttgctgagtagctgggattagaggctcatgccaccatgcccggctaatttttgtatttttagtagagacagggtttcaccatattggccaggctggtctcraactcatgacctcatgatccatctatcttagcctcccaaagtgctgggattacaggtgaaagccaccacgcctagcccctgttaacattcttatagctat

SEQ ID NO: 158008 - DNA, 201 bp, Homo sapiens
acaggcagatcacctcaggtcaggagtccaagaccagtctggccaacatagtgaaaccctatctctactaaaaatacaaaaattagctgggcgtggtgggrcatgcctgtaatcccagctattcgggaggctgaggcaggagaattgcttgaatccgggaggtggaggtttcactgagccaagatcacaccactgcactcc

SEQ ID NO: 158009 - DNA, 201 bp, Homo sapiens
aaagagagaaattttaaagctgggcatccgggggagacatcacatgtcggtaggttccatgatgccccacaaaccgcaaaaaccagcaagtttttattagsgattttcaaaaggggagggagtgtgcgaataggtgtgggtcacagacatcaagtactttacaaggtaatagaatatcacaaggcaagtggaggcagggag

SEQ ID NO: 158010 - DNA, 201 bp, Homo sapiens
atacccacaggtgtggaggggcaggccaccccttcaccttcgtccctctctccctccctttctctctctctctctctcacacagacacacacacacacatacacacacacacacacacacacacacacacacacggtctcactctgttgcccaggctggagtgatcatagctcactttagcctcgacctcttggacctaac

SEQ ID NO: 158011 - DNA, 201 bp, Homo sapiens
aatacccacaggtgtggaggggcaggccaccccttcaccttcgtccctctctccctccctttctctctctctctctctcacacagacacacacacacacatacacacacacacacacacacacacacacacacacggtctcactctgttgcccaggctggagtgatcatagctcactttagcctcgacctcttggacctaa

SEQ ID NO: 158012 - DNA, 201 bp, Homo sapiens
tccttgttcttgccaaatgctgctcccacccctggccccaggcagtcactgatcttctggtcctggtctattttacttctgcacagtagcactggcttgarcccacaatgccaagacagtgctcctgggccttcttcttgtggctctttcttcctgaatcaggaaggtccagcagaatttccctcctaaccctgtagctcc

SEQ ID NO: 158013 - DNA, 201 bp, Homo sapiens
tcctgtcctcaagtgatccacccaccttggcctcccaaagcactgagattacagtgtgagctaccatgccaggccttttttttttttttttaatttttaaragatggcatctcagtatgttgcccaggccagactcaaactgctgggctcaagcaatcctcccatctcagcctcccgcatagctgggccatagatgtacca

SEQ ID NO: 158014 - DNA, 201 bp, Homo sapiens
gaaatagaacattgttggcatcccggaaaccttaaatgctcctccccaataacaaccccattctcctcactagaagtaacgattatcctgcttccttggtrattattttcttgcttttcttcatagtttcacctcctatgtatgcatccctcaacactagttttgttttacccgttttggaattgctataaatggggaaga

SEQ ID NO: 158015 - DNA, 201 bp, Homo sapiens
attgatcggctgttcatcatgttcctgacacacagcttaatttgcatcagcaaaggccacaccagttagccttcagaaactcttatcaagtaggtcatgahggtgactttggttaagaggatagaatgaaactcatatgtgtcagagctaattggtttaattcttcccatctcactgaagaatcctttaagaatccccaca

SEQ ID NO: 158016 - DNA, 201 bp, Homo sapiens
atagcatgactgctaacattgatcggctgttcatcatgttcctgacacacagcttaatttgcatcagcaaaggccacaccagttagccttcagaaactctyatcaagtaggtcatgatggtgactttggttaagaggatagaatgaaactcatatgtgtcagagctaattggtttaattcttcccatctcactgaagaatc

SEQ ID NO: 158017 - DNA, 201 bp, Homo sapiens
gttttgataaaagagacagagctctagaatggctactgctagaaaaggcaaacacatagcatgactgctaacattgatcggctgttcatcatgttcctgamacacagcttaatttgcatcagcaaaggccacaccagttagccttcagaaactcttatcaagtaggtcatgatggtgactttggttaagaggatagaatga

SEQ ID NO: 158018 - DNA, 201 bp, Homo sapiens
caaaaaaatcaatctttctcacaaaagctttagaaacatcatcaacaaatcatgataatctcacctgattaaagatctctggattcctttcattgaacatmtgagcattaaagagaaatttaacttgtctttatatgaagggaaaataacagaggaggaagaagaaagagaagaggaaaaatcattggggaagttggagaa

SEQ ID NO: 158019 - DNA, 201 bp, Homo sapiens
tgaaggcctgcagcttcactcctgaggccagcgagaccacgaacccaccaggagaaatgaacaactccagacaggaggaacgaacaactccagacgtgctkccttaagagctgtaacactcaccacgaaggtctgcagcttcactcctgaagccagcgagaccatgagcccaccagaaggaacaaactccaaacacgtcca

SEQ ID NO: 158020 - DNA, 201 bp, Homo sapiens
cttccttggtaattattttcttgcttttcttcatagtttcacctcctatgtatgcatccctcaacactagttttgttttacccgttttggaattgctatamatggggaagaaataccatacagctggtcagtatattgtttaatttttttaaatatcctttagaaaactttgagccaggaatcatggcagccagacccaag

SEQ ID NO: 158021 - DNA, 201 bp, Homo sapiens
gcatgaattctgggtgggtgcgggctccctgcccccccccccccaccccatgggctcctgtgctgcccgagcctccctgatgggtgctgccccctgctccrcggtgcctggtcccattgaccgcctaagggctgaggggtgcaggtgcgtggtgcaggattggcaggcacctccacccacgtggcctcagtgcaggatcca

SEQ ID NO: 158022 - DNA, 201 bp, Homo sapiens
ccctgccctcctactacattcctttttgctgaaataatgacaataataatcaataaaaactgagggaactcagagaccggtcccggtgcaggtccttggtrtgctaagcgctggtcccctgggcccactgttgtttctctatactttgtctctgtgtcttatttcttttctcagtatctcatcccacctgactagaaatac

SEQ ID NO: 158023 - DNA, 201 bp, Homo sapiens
tattctttaccccactgagatgtttgggtggaaagaaacataaatctggcttacgagcgcgtccagtcatagtaccttcccttgaacttaagtatgacgtrgattctattgctcacatgtttgttgctgaccttctccttattatcaccctgccctcctactacattcctttttgctgaaataatgacaataataatcaat

SEQ ID NO: 158024 - DNA, 201 bp, Homo sapiens
ctgccttgttattctttaccccactgagatgtttgggtggaaagaaacataaatctggcttacgagcgcgtccagtcatagtaccttcccttgaacttaaktatgacgtagattctattgctcacatgtttgttgctgaccttctccttattatcaccctgccctcctactacattcctttttgctgaaataatgacaata

SEQ ID NO: 158025 - DNA, 201 bp, Homo sapiens
gaagtaagacatgtttgcagcaatgctgccttgttattctttaccccactgagatgtttgggtggaaagaaacataaatctggcttacgagcgcgtccagkcatagtaccttcccttgaacttaagtatgacgtagattctattgctcacatgtttgttgctgaccttctccttattatcaccctgccctcctactacatt

SEQ ID NO: 158026 - DNA, 201 bp, Homo sapiens
tgggaagtaagacatgtttgcagcaatgctgccttgttattctttaccccactgagatgtttgggtggaaagaaacataaatctggcttacgagcgcgtcyagtcatagtaccttcccttgaacttaagtatgacgtagattctattgctcacatgtttgttgctgaccttctccttattatcaccctgccctcctactac

SEQ ID NO: 158027 - DNA, 201 bp, Homo sapiens
tggtgggaagtaagacatgtttgcagcaatgctgccttgttattctttaccccactgagatgtttgggtggaaagaaacataaatctggcttacgagcgcrtccagtcatagtaccttcccttgaacttaagtatgacgtagattctattgctcacatgtttgttgctgaccttctccttattatcaccctgccctcctac

SEQ ID NO: 158028 - DNA, 201 bp, Homo sapiens
tacaaataattcaaacctaagcagtggcccccataatgaccccttgatgttggtaattactccttcttttagactcctctgtaagctttaaatgtgtgatygctgcatgagtttcttggcacagggctagagggaggggttaagaccaagccagagacggtttgcttccattgactgccggccctgagcaaaattgataga

SEQ ID NO: 158029 - DNA, 201 bp, Homo sapiens
tatggtgggaagtaagacatgtttgcagcaatgctgccttgttattctttaccccactgagatgtttgggtggaaagaaacataaatctggcttacgagcrcgtccagtcatagtaccttcccttgaacttaagtatgacgtagattctattgctcacatgtttgttgctgaccttctccttattatcaccctgccctcct

SEQ ID NO: 158030 - DNA, 201 bp, Homo sapiens
cgtataaaacccgattgtacatttgttcaattctgagatgagagaaaaactgccctatggtgggaagtaagacatgtttgcagcaatgctgccttgttatyctttaccccactgagatgtttgggtggaaagaaacataaatctggcttacgagcgcgtccagtcatagtaccttcccttgaacttaagtatgacgtagat

SEQ ID NO: 158031 - DNA, 201 bp, Homo sapiens
ttctgagatgagagaaaaactgccctatggtgggaagtaagacatgtttgcagcaatgctgccttgttattctttaccccactgagatgtttgggtggaargaaacataaatctggcttacgagcgcgtccagtcatagtaccttcccttgaacttaagtatgacgtagattctattgctcacatgtttgttgctgacctt

SEQ ID NO: 158032 - DNA, 201 bp, Homo sapiens
tttctccccatgtgatagtctgaaatgtggcctcgtgggatgagaaagacttgaccgtccccctgcccgaaacccgtaaagggtctgtgctgaggtggatyagtagaagaggaaagcctcttgcagttgagatagaggaaggccactgtctcctgcctgctcctgggaactgaatgtctccgtataaaacccgattgtaca

SEQ ID NO: 158033 - DNA, 201 bp, Homo sapiens
ctaagcacccttcattcatgacaaagttgagatttttcttaaaggttgtgactgctattgaggccctgattttactctttcttatttcaggcatttaaaayaagaatcagcaacatccctacaattaagaagttcctgcagcctgggagtcagaggaagccacccccgatacccactatgttgaacttgccaggaagatag

SEQ ID NO: 158034 - DNA, 201 bp, Homo sapiens
gggacctctgccattaaaagcggggtattgtccaaggtttctccccatgtgatagtctgaaatgtggcctcgtgggatgagaaagacttgaccgtcccccwgcccgaaacccgtaaagggtctgtgctgaggtggattagtagaagaggaaagcctcttgcagttgagatagaggaaggccactgtctcctgcctgctcct

SEQ ID NO: 158035 - DNA, 201 bp, Homo sapiens
ctcccaaagcactgagattacagtgtgagctaccatgccaggccttttttttttttttttaatttttaagagatggcatctcagtatgttgcccaggccaractcaaactgctgggctcaagcaatcctcccatctcagcctcccgcatagctgggccatagatgtaccattaagcctggctccattattcttttatgctg

SEQ ID NO: 158036 - DNA, 201 bp, Homo sapiens
agatggcatctcagtatgttgcccaggccagactcaaactgctgggctcaagcaatcctcccatctcagcctcccgcatagctgggccatagatgtaccaytaagcctggctccattattcttttatgctgttaaaaagaaaaagactacagaagaccattaaaacaaattcattaagcaattagcatataatggggaata

SEQ ID NO: 158037 - DNA, 201 bp, Homo sapiens
ttttgttaaataatagtttagatccaacgtgtttttaaacttcttctaatttttttttaagccactacttatgtatatttatcaacacatttaactgattscttggctcaccattgctccttgcttctcatgcctttcttctgggtgctttttccttctaagggaagaacattttttttggagttctttcaggaaaggtct

SEQ ID NO: 158038 - DNA, 201 bp, Homo sapiens
tggcatgatcatggctcactgcagacttgacctcttggcctcaagcgatcctcccacctcatcctccagagtagctgggaccacaggtgagtgccaccacrcctggctatttttttaatcagggaacctgccccgatagtcacttaggttcttttctattttccttaagcattggccagcttgagaaataaagggacagag

SEQ ID NO: 158039 - DNA, 201 bp, Homo sapiens
ctatttctttcttaaaaaaaagttttgtagagatgggggtctcactctgttgttgggctggtcttgaactactgagctcaaacaattctcccacctcagcygcccaaagtaccaggattacaggtgtgagccaccacacttggcctcttatagctatttctttgctcacacccttacttattcctttataataattcctaa

SEQ ID NO: 158040 - DNA, 201 bp, Homo sapiens
tgcaccaggaaatcagccatttttttaaggagctctggttccttttatgtttaactttttcatgccaatagtagtcctagagaattatgatatttgtatgktgttggcacacacaggcaaagcagctggcagctggaagagactgctttgggggctccatcactccaagcctcttttgacaacctcaagagcttgctcttc

SEQ ID NO: 158041 - DNA, 201 bp, Homo sapiens
ctgtcctcaagtgatccacccaccttggcctcccaaagcactgagattacagtgtgagctaccatgccaggccttttttttttttttttaatttttaagaratggcatctcagtatgttgcccaggccagactcaaactgctgggctcaagcaatcctcccatctcagcctcccgcatagctgggccatagatgtaccatt

SEQ ID NO: 158042 - DNA, 201 bp, Homo sapiens
gtcagtacttttattttcttgcttaggaactttactttctccttaaaacaaatgtgtatagatagctaaatcctcctttgaactgtactcaaacattatasccttcctctctcccttctcagaggcaaccactatcagaaatttgatgtaagttctttctcttcatttttaaaaattgagacctggctttgagctgtttta

SEQ ID NO: 158043 - DNA, 201 bp, Homo sapiens
aggtttataggcatgagccaccatgcccggccaccttgtacttactcttaataagtactccacatcccccttttctgtgtactactcatagtgcactgaaygctgcattcaacattctcctattctctccccactcctaacaaaatatgttcttagaaaataaactggtaagctattctacatgaaggtagaaatgactga

SEQ ID NO: 158044 - DNA, 201 bp, Homo sapiens
agggctatgttacttctattctgtaagacacaatgtactaaataattttgattgtgttttggatttaaatacaaacttactaatttccttatgttgagtcraagaactgggaactattcaaaatgtgatatcaccctcccttgccattgagacttgggcttgtgttatttttttagttgccaaaccatcttttcatgatat

SEQ ID NO: 158045 - DNA, 201 bp, Homo sapiens
ttgccaaaccatcttttcatgatattccttctgatcaagagaatatatcctggaggctgctgtttcaaacaaagcattctctctggggctttgggatagamcttttctctgtgtgaaagagaatgatactgagcagaaaacaaaccctgcttctctgattcacctattactagataactaaactgctttttccaaatcaaa

SEQ ID NO: 158046 - DNA, 201 bp, Homo sapiens
gagaaagaggaggggttggtcttgctgtctcaggggtggcagaagtggaagaaaattcatgtataagtggacctgtatagttcaaacctgtgttgttcaarggtcaactgtatttaaaatattttcagaagcagaactgctatgtacctactacttggcagtaacaaatgtcagtacttttattttcttgcttaggaactt

SEQ ID NO: 158047 - DNA, 201 bp, Homo sapiens
tgagactccatctcaaaaaaaaaaaaaagaatatgaatattttaggggtatgcactgcctgattgtgactttttaatagataatataactcatgctaaacwtgtcagcagttgtattattatccatcccagaaatacccagcaaacacttgttgagggattaagcagattcagtacactgtactccataaactgaggtcta

SEQ ID NO: 158048 - DNA, 201 bp, Homo sapiens
atcaacatgggagttggggcatataattttgacttctcaaaaactatgaatagcctactgttgaatggaagccttactgataacataaacagtggattaaacatattttgtagctatatgtattaagtactgtattcaaagtaagctaaagaaaaaactttattaagaaaatcataaagaagagaaaatatatttactatt

SEQ ID NO: 158049 - DNA, 201 bp, Homo sapiens
aagaaggtggaactatatgattcatttatatcatagttgttatttctgaaataagtagatgctaaatacttgggtgtagtctttggccagggctatgttayttctattctgtaagacacaatgtactaaataattttgattgtgttttggatttaaatacaaacttactaatttccttatgttgagtcaaagaactgggaa

SEQ ID NO: 158050 - DNA, 201 bp, Homo sapiens
gcagacagcatagacactatctataaaatctccagcaagcctttgtttctttgcagtcagcttctcttctgcagatcctgcccattgcctcctcacaacawagtttcctactttcttgaacaaatctgcctttctttacaactatcttggtaaattcttttacccccgtgccaccagcccagatggtcgttactcacccac

SEQ ID NO: 158051 - DNA, 201 bp, Homo sapiens
aggagaatcacttgaacccgggaggtgggggttgcagtgagctgagatcgcaccattgcactccagcctgcatgacagagcgagactccgtctcaaaaaamaaaaaaaaaaaaacaattctctgttattgacacacagcagtgaagtgtggcacctgggtagtgcattctggcccaaataaccctccttaatcggatgttg

SEQ ID NO: 158052 - DNA, 201 bp, Homo sapiens
gacctgacgatgatgataattgtggcccccttcaaatcccctgaggaaaaacaggagacccttgcttccatcatgtagaaagctaaaactcagtacttgcytgcctttgaaaaggtaggcttcagggatccagggcttttaccttttctgtttctgagaatatttcaagagtgaatatctgaaaagacacacagaggccat

SEQ ID NO: 158053 - DNA, 201 bp, Homo sapiens
tttgtattttcagtagagacaggtttcaccattttggccaggctggtctcaaactcctgtcctcaagtgatccacccaccttggcctcccaaagcactgarattacagtgtgagctaccatgccaggccttttttttttttttttaatttttaagagatggcatctcagtatgttgcccaggccagactcaaactgctggg

SEQ ID NO: 158054 - DNA, 201 bp, Homo sapiens
tgacttttgtattttcagtagagacaggtttcaccattttggccaggctggtctcaaactcctgtcctcaagtgatccacccaccttggcctcccaaagcrctgagattacagtgtgagctaccatgccaggccttttttttttttttttaatttttaagagatggcatctcagtatgttgcccaggccagactcaaactg

SEQ ID NO: 158055 - DNA, 201 bp, Homo sapiens
attactcaattttttctttttctttttctttctttctttctttttttttttttttttttgagacagagtcatgctctgttgcccaggctgcagtgtaccarcatgatcttggctcactgcaacctctgcctcctgagttcaagtgattctcctgcctcagcctcccaagcagctgagaccacatgcatgtgccaccacgcc

SEQ ID NO: 158056 - DNA, 201 bp, Homo sapiens
atattactcaattttttctttttctttttctttctttctttctttttttttttttttttttgagacagagtcatgctctgttgcccaggctgcagtgtacyagcatgatcttggctcactgcaacctctgcctcctgagttcaagtgattctcctgcctcagcctcccaagcagctgagaccacatgcatgtgccaccacg

SEQ ID NO: 158057 - DNA, 201 bp, Homo sapiens
tgggctgagctgagagtcaagagagaggaaagccattcagctccggggtcctgacaacaagttggctgaccctgcggtcatgagcggaactctcaaaggcrtgtcacctaagcgagactcgcccatctatcctgtctatcctgacccttgccccctgggtcctaatgcctgccagacaaacttcctctcttctccgagatt

SEQ ID NO: 158058 - DNA, 201 bp, Homo sapiens
aaagaaaaattatttgtaattcaaataggacaatgaaagtatattactcaattttttctttttctttttctttctttctttctttttttttttttttttttgagacagagtcatgctctgttgcccaggctgcagtgtaccagcatgatcttggctcactgcaacctctgcctcctgagttcaagtgattctcctgcctca

SEQ ID NO: 158059 - DNA, 201 bp, Homo sapiens
ggctgaagcacttgaaactgagagatggagtttgccgtaagccgagattgcaccactgcagtccagcctgggtgacagggcaagactccataattaatacatacatacatacatacatacatacatacatacatacatacatacatacatacatcaagggggtgatgtctctgtttgtgaatggtaccagcatgtgtacaa

SEQ ID NO: 158060 - DNA, 201 bp, Homo sapiens
atgaaaccctgtctctactaaaaatacaaaaattagttgggcacgatggcagctgcctgtaatctcagctactcaggaggctgaagcacttgaaactgagagatggagtttgccgtaagccgagattgcaccactgcagtccagcctgggtgacagggcaagactccataattaatacatacatacatacatacatacata

SEQ ID NO: 158061 - DNA, 201 bp, Homo sapiens
ggaggctgaagcacttgaaactgagagatggagtttgccgtaagccgagattgcaccactgcagtccagcctgggtgacagggcaagactccataattaatacatacatacatacatacatacatacatacatacatacatacatacatacatacatcaagggggtgatgtctctgtttgtgaatggtaccagcatgtgta

SEQ ID NO: 158062 - DNA, 201 bp, Homo sapiens
gaggctgaagcacttgaaactgagagatggagtttgccgtaagccgagattgcaccactgcagtccagcctgggtgacagggcaagactccataattaatacatacatacatacatacatacatacatacatacatacatacatacatacatacatcaagggggtgatgtctctgtttgtgaatggtaccagcatgtgtac

SEQ ID NO: 158063 - DNA, 201 bp, Homo sapiens
cctgtctctgaaaaaagaagacagcagagagtagccattgagctgagaactgcaccatggcaaaagacatcaagaccaaaatcaagaactacaggactgcyccttttgacaggcgcttccccaaccagaaccagaccaggaatggctggcagaaatacctggacctccaccacttcaagaaggcaatgactgctaaaggag

SEQ ID NO: 158064 - DNA, 201 bp, Homo sapiens
gggagtaaaagaacctcacttagatcattgtgacaggcctgggaggttgttgcccaatatcctctctcactccttcttcccagtaaaagaatacataagtkttagctaaatacatatcagaaggaagactatgttttccagcctcccttgcagctaagtggggtcatgtgactagttcaagccaaaggacatgaataaaag

SEQ ID NO: 158065 - DNA, 201 bp, Homo sapiens
aggctgaagcacttgaaactgagagatggagtttgccgtaagccgagattgcaccactgcagtccagcctgggtgacagggcaagactccataattaatacatacatacatacatacatacatacatacatacatacatacatacatacatacatcaagggggtgatgtctctgtttgtgaatggtaccagcatgtgtaca

SEQ ID NO: 158066 - DNA, 201 bp, Homo sapiens
gacaggcgcttccccaaccagaaccagaccaggaatggctggcagaaatacctggacctccaccacttcaagaaggcaatgactgctaaaggaggtaatgyatggccgggtgcagtggctcacgcctgtaatcccagtactttgggaggccaaagctggtggattacttaaggtcaggagttcgagaccaacctggccaac

SEQ ID NO: 158067 - DNA, 201 bp, Homo sapiens
ctggccaacatgatgaaaccctgtctctactaaaaatacaaaaattagttgggcacgatggcagctgcctgtaatctcagctactcaggaggctgaagcayttgaaactgagagatggagtttgccgtaagccgagattgcaccactgcagtccagcctgggtgacagggcaagactccataattaatacatacatacata

SEQ ID NO: 158068 - DNA, 201 bp, Homo sapiens
tcagaccatcttgtgagattgtttgcctatctcataatacagttttatgcagaaaggttgaaactatgtaaatggtttttatggaaattatcagttacaayattttaaaggtgtagaatggcatctttgtttataggagaacatttgtaaataaagttaaatttctaagtcaagcacttgtttttgtaccttagtataaac

SEQ ID NO: 158069 - DNA, 201 bp, Homo sapiens; identical to SEQ ID NO: 29604

SEQ ID NO: 158070 - DNA, 201 bp, Homo sapiens
gttctttttggaagcattgcggggcactggctgtgaacctgaggaggctgtcatgataggagatgtaagtagaagaacccaggaggtgctcccagctcacstgttgtgctgggaaagccagcttagaaacactgctttaggaaaggggacattctgttactgacaatgtggacagtatatatataaatggctacctataaa

SEQ ID NO: 158071 - DNA, 201 bp, Homo sapiens
atgtagttccaaaagcaaagaagtgctcaaaaaacaaaaggatggaggcacaggagccaacctgagagagctctcaatggccaaagctaaaacaattttagcaacaaactaaatgacatagtattagcttatggcacaaagaatagaataaatatctgtgagcccatactgattacataaaataaatgattgagtaaatca

SEQ ID NO: 158072 - DNA, 201 bp, Homo sapiens; identical to SEQ ID NO: 29599

SEQ ID NO: 158073 - DNA, 201 bp, Homo sapiens
gtgtttactggctttactttcatttcagggaaatatcgagcatcagatgaagaaaaaattaatccacctccttacttaacttgtgagagtttccctcatgctgtggaccacattctgcagcacctattgtgaagcaatgtgtgcatctgaagcaacttgaaatgcagcttcttattgtctggaatgaatcccttaccaact

SEQ ID NO: 158074 - DNA, 201 bp, Homo sapiens
tgttgtcttattttgaggcattgccacagtgactcaaccttcagtgactaccaccctgatccgtcagcagccatcaacatcgaggcaaggccttctgcccrcaaaaagattatgactccctgaaggctcagatgattgttagcatttttcagcaataaagtatttttaaattaacacacatacttttttttagacacaatg

SEQ ID NO: 158075 - DNA, 201 bp, Homo sapiens
tttcctccctcccctctcttcttccctccattcattctttaaaaagatatttataggatagttactatgtgctagtcactatgttaggtacttggaatacrttgggacatgtaacagatatagcccctgtctcaaataacttagtcttcttaaatgtgagacagatgttaaacaaataaatgcataattacaaattgttgt

SEQ ID NO: 158076 - DNA, 201 bp, Homo sapiens
gtgagcccatactgattacataaaataaatgattgagtaaatcaatggagaacaagtctttctcacagaagaatttgaaataatatatgaggacactcctstttttagaaggtggagtttagttcctccctaccctctttaatgactcagccccaaagaataaaatgtgaaagggaaaaatactgaatgtggaaaaacctg

SEQ ID NO: 158077 - DNA, 201 bp, Homo sapiens
gagatgtaccaggagatcaatgttgttctcatgcctgttaacacaacacccattctgccacccatggatcagggagtcgttttgactttcaagtcttactrtttaaaaaatatattttgtaaggccatagctgccatagacaatgatttcctctggtggatctaggcaaagaaaattgaaaaccttctggaaaggattcaa

SEQ ID NO: 158078 - DNA, 201 bp, Homo sapiens
aatgagggtcttttgacccacaatcagatgagagttctgccttgggcagatgaaaggtgggcaggagaaagtcagagagattctgtttacttcaacaaagkctatgggagttatgagccaggaatcgtggaaaaaatcattttgtatatttatatatcacactgttattaggtatgaaaacatccttctttcgcccacttt

SEQ ID NO: 158079 - DNA, 201 bp, Homo sapiens
gagttctgccttgggcagatgaaaggtgggcaggagaaagtcagagagattctgtttacttcaacaaaggctatgggagttatgagccaggaatcgtggamaaaatcattttgtatatttatatatcacactgttattaggtatgaaaacatccttctttcgcccactttgataagaaatctcctattaacttatttttct

SEQ ID NO: 158080 - DNA, 201 bp, Homo sapiens
attgttcaccagagttctttttaaaaacctgaaagtaaatagtgatacctctgtaagcgttttgcttcctatagttttaattcaagtgttttttttttttwaaaaaaaacctaagtattgtaaaaggtttatggatcaaattttggatttgtaatttttaaaaccagttttctccaaaatggaagcagcttaacactaagc

SEQ ID NO: 158081 - DNA, 201 bp, Homo sapiens
actttaaagtacagtattttgacctgttcattcatagtgggataaattctaaggacaaaagaactacaaagagatcttaaactgcgttcaggagtcttatyttattagtaatactggtattttttttaattaaaggtatatataggaaaaagcaaagtagtaactattagattttagtgtcagtgaaaagagatgcaataa

SEQ ID NO: 158082 - DNA, 201 bp, Homo sapiens
caccatgcctggctaattcttgtatttttagtagagatggggttttgccatgttggtcaggctggtctcaaactcttgacctcaggtaatccacccacctyggcctcccaaagtgctgggattacaggtgtgagccactgtgcccggccttgtattttgctaaatttcatatttatttgcttattgctaatacatagaaag

SEQ ID NO: 158083 - DNA, 201 bp, Homo sapiens
ttttgttgtgatgcacccattcaaatcttttacgttttctgattgggatgtctttttcttactgatttgtcaaagttgtttttttttttttttttttttttgagtcagagtttcactcttgttgcccaggttggagtgcaatggtgtaatctcggctcactgcaacctctgcctcccgggttcaagcaattctcctgtctc

SEQ ID NO: 158084 - DNA, 201 bp, Homo sapiens
gatgagaatatttgcattatacataaccaaagatgaagaagactctgctaatgatttagtcctttcatccacccattctttggagtacattattctcaggyttaaaaataaaataaatgaatgaattgttcaccagagttctttttaaaaacctgaaagtaaatagtgatacctctgtaagcgttttgcttcctatagttt

SEQ ID NO: 158085 - DNA, 201 bp, Homo sapiens
tgcagaaatggcagagccctgggcacttttattctcttcctgccacaaagcaaaaataaaacagcttaggattataggaaacaatcgggaagggcccgtgstgtacaaagctaggaagatcagggctcagaggtactttagtactttcccagaggtaaccattcctggttgacagcatttatattatttcctggatgtaca

SEQ ID NO: 158086 - DNA, 201 bp, Homo sapiens
agcaagcaagacctgttagaaaggttgagaaaattggaatttgatatctctgaagatgaaatattcacatctctgactgcagccagaagtttactagagcrgaaacaagtcagacccatgctgctagttgatgatcgggcactacctgatttcaaaggtaggggaaatttggaaaatttaaagattggatatttatatgta

SEQ ID NO: 158087 - DNA, 201 bp, Homo sapiens
ttaaagaacaatctttgcagaaatggcagagccctgggcacttttattctcttcctgccacaaagcaaaaataaaacagcttaggattataggaaacaatygggaagggcccgtgctgtacaaagctaggaagatcagggctcagaggtactttagtactttcccagaggtaaccattcctggttgacagcatttatatta

SEQ ID NO: 158088 - DNA, 201 bp, Homo sapiens
ttcagtccttggaattttaattaccttgcattcatcatcattgatgatgtatatttatccttatcttgaataataattagaaagaggagcttctttttcaractgatctgttattcccaagtgtgaagtgaacatcagacagtcagagtctgtttaagtatctggatttaacttgattctacctgttaggacaatgggata

SEQ ID NO: 158089 - DNA, 201 bp, Homo sapiens
tagaagaacccaggaggtgctcccagctcacctgttgtgctgggaaagccagcttagaaacactgctttaggaaaggggacattctgttactgacaatgtrgacagtatatatataaatggctacctataaaatgaggtttcctgtcgatgtttagtggtattcttctaaagaactgaaatttttattatttctgacattt

SEQ ID NO: 158090 - DNA, 201 bp, Homo sapiens
tcaaaatattgcatattggactagcttagaaaatttttctttaatagcctggtaaagtttttgtatttaactgcaagaatgctataaaaaaaaaacaaacmagaattttcttaccagtgcaaggatctgtaagaaccattctaacttatacattatgtagaattcatttcttcatgtatatactacagaaatagaatgttt

SEQ ID NO: 158091 - DNA, 201 bp, Homo sapiens
gaaaattgtgaaagaatgtgtacattgtgatttcatttttgtaacattctaaaatggtaaaactaagcaattggtaaaaaatatgaagaaaagaaagaaarttattatcacaaattaattgtaccagttacttccaggaaatttaactgaccaggttcttacaggaggcttcagcaatattgccattagttctgttcttaa

SEQ ID NO: 158092 - DNA, 201 bp, Homo sapiens
ctgttgacagcctttggtgtttgcagacttaaattttgcccatctgtaggttggtgcattgatctcactgtgcttgaaatttgcattttcctgattaccartgagctttgagtatcttcatttatttgctgttcagatttgctctttttttttttttttttttgagacacattcttgctctgtcgcccaggctgaagtgca

SEQ ID NO: 158093 - DNA, 201 bp, Homo sapiens
gggtaatctaatgggattactgggtcagatggtatttctggttctagggctttgaggaattgtgtggctctaaatttaaatcactccttcagctttctctygctgctctgcctgagatttttatatggtagccctgctccctgggctaggattttttacactttgtttattcacctacatggaatttatagccagaaattt

SEQ ID NO: 158094 - DNA, 201 bp, Homo sapiens
ggaagaacttctctatctgtgtgccacaaatagctaaagctattgatcaccttagccctttgagtggcagggctgagcctgggatgattggaggccctggmtggtcacctgtggccgtgagcaccttgtcagtttaccccagtgtactaggcaaatgttatttcccatgtgtgtcttgatgggaaaacagctggaaagcac

SEQ ID NO: 158095 - DNA, 201 bp, Homo sapiens
tatacagattttaagtatacaactcaatacaattttacacatagatatacctatgtaacccccatttggtgatcaagatatagaacattttcagcatcctyggtggctccctttcccagtcactaccactccttccccaggataaccactgctctgacttctataattattgccatttcttaatcttcatatgaatgaaat

SEQ ID NO: 158096 - DNA, 201 bp, Homo sapiens
aacccaacctttctctgagcgggacacaattcacaattctttataggtattactttctttaatcctcttatcaaccattagagttgtgttattatttctayattagcaatgaagaaactgaggcaaaaaggttaagaaggttgcccaggttcacccagctagtgagtggagatgtatacccaggctataaatttatacaac

SEQ ID NO: 158097 - DNA, 201 bp, Homo sapiens
ggcaaatttagtaacaaatctttgttagtaatttcttcatctgagcaccatcattctcaagagaaggtaatatctatatagacattatctggaccttggtyttcccaactaaggtgtaaaaccagtgtgtgtagaaaggggtgaggggtggttcgagagcagataatcgaagatcctgtgtagctgtaatgttttttttgt

SEQ ID NO: 158098 - DNA, 201 bp, Homo sapiens
cctcctacctcagccacccaaagtgctgggattacaggtgcgagccactgtacctggccaacaatcttcttttaaaagagaaaaatagcttcttggacacrtgcttctaaattttttcattaaatttttattcctgttgtatatctaattttatacattattaataacattatttccattaatataacaggtttattataa

SEQ ID NO: 158099 - DNA, 201 bp, Homo sapiens
atagaaaccttgtgaaggagtttatactaacgatatttaagcttgggaagaaaactggcagtagagcttgctgcggggaccatgctatggacaggtgccttcagggtgctaacgagagtgaggtatatattaattacctttgtacatttgatgctggctcccttcctgtaagaagttataatcagtaagataagacaggaa

SEQ ID NO: 158100 - DNA, 201 bp, Homo sapiens
gtactgcctgggaattaagtacacacatcaatcaagctgataagtcttatccccagttaatatatgataaaatattaacaaagctaaatcaaatgagttttcagtttaggctatataagtggaaagcaattttgaggtctgttgcataaagaattctagttccgtggtagagtagcaaataagtgggcttgggggtggggt

SEQ ID NO: 158101 - DNA, 201 bp, Homo sapiens
tagactatggaaaaccaaaatttatgtgactcgctttattgcgatacttgctgtattgcaatggtctgcagctgaatccaaaatatctcatagatatccctgtatttggaagaatcccagattggttttcaggttccagcttccagcactggttctagctctccttgattggtgccagcatctcagatgatctcatctgta

SEQ ID NO: 158102 - DNA, 201 bp, Homo sapiens
ttgagaggattgattcacaattttgaaagagtttctgttgtgaatactgtgaaacaacatcacatactacagagaattctttcatgaaaggaagattaaaytgatgcagcaagcttcattgttgtcttattttgaggcattgccacagtgactcaaccttcagtgactaccaccctgatccgtcagcagccatcaacatcg

SEQ ID NO: 158103 - DNA, 201 bp, Homo sapiens
tgttttctccctccattcatcatttatccatccatgaaagcacaggctgctgcagtgagtgaatcagccatgagcaatgcaggcagctccattcactcaaygaacgttattgagcccctgctgtgtgctaggtgctagaactaaaacatatacctaagccacttttgtcaatttctattttgtagaaaccccacttgcaga

SEQ ID NO: 158104 - DNA, 201 bp, Homo sapiens
aggacaacacggcgcggtagctgcaccgcctcggcggaaatcccgggcgaaggggtggggcggagccgggaaatccggggcttccggcgcggccagggccyaacttccggcgtccgtcgggcagcagcggggctgtctatcccggctgaggacccgcggccagtgcgggtggctggctttgccattagcgggggcctttcc

SEQ ID NO: 158105 - DNA, 201 bp, Homo sapiens
gcatgtgaaacagtcatctagaaaaaaaataggatctttctttgccttcatatatcatcaacatagcatcctgttttctccctccattcatcatttatccrtccatgaaagcacaggctgctgcagtgagtgaatcagccatgagcaatgcaggcagctccattcactcaacgaacgttattgagcccctgctgtgtgcta

SEQ ID NO: 158106 - DNA, 201 bp, Homo sapiens
tgtttaaagtagatgttattctggatagtgtgaagtttttacattgaacatgaaatatttttcaatcaagaaaaaagtgtttctctttggaaaagtcaacygattctgaaagaatatgatagttttatgaagctttgccacattgcttcttttcagagaggatacttagagtgcaatggcacaatatagaaaatggagttt

SEQ ID NO: 158107 - DNA, 201 bp, Homo sapiens
tagaactttgcatcatgtgtatcctgtgatttttgtagcccttgatatatccataatgttccctccttgcttctctctcccagccctccacatacataacscaacctttctctgagcgggacacaattcacaattctttataggtattactttctttaatcctcttatcaaccattagagttgtgttattatttctacatt

SEQ ID NO: 158108 - DNA, 201 bp, Homo sapiens
tcttctccaccatgatgcaaagatgtggaaaagagggtttttcaggctttgtgtttgtctggcaaagcctcttaaagtagttgtagaaaacagtaggtctsttgttgaaagagctgagtttaggcagagaaaactgggaaaagcagaagaatcaacaatagagaccacaaagggatgagagagcaaggagaaaggtgaagg

SEQ ID NO: 158109 - DNA, 201 bp, Homo sapiens
caataaagcaagttgcataattatttcttataataattacatatatattatttttagagatggagtctctctggctggtctggaatcctggcctcaagtgrgcctcccatcttggtctcccaaagtgctgggattacaggcatgagccactgtgcctggcctccaataggcttatagttagacaaaattttcagattttct

SEQ ID NO: 158110 - DNA, 201 bp, Homo sapiens
aaaacgcatagtacagcctttctacaaatatcttttaaatgcctgaacggaattgagaattgtggttggtttttttttttttttttttgagaccaagtctygctctgtcatccaggctggagtgcagtggtgtgatctcggctcatctcgaaaaacaaaaaaacccaaagtttgagcatttaagtaatggaccaattataa

SEQ ID NO: 158111 - DNA, 201 bp, Homo sapiens
tggccatggtgactgccagagtctcctcagctgccacttcacaaaagaggtaccatgtctgcaccaagagtggcaaaaaggaggaggtggcagtggtggaygagggagagccacatattctgtttcaggttacagcagcaaagaagggcgatgagaatatttgcattatacataaccaaagatgaagaagactctgctaat

SEQ ID NO: 158112 - DNA, 201 bp, Homo sapiens; identical to SEQ ID NO: 29600

SEQ ID NO: 158113 - DNA, 201 bp, Homo sapiens
gtatctggcaggtttttccactgtaaaggaatcttttttttttttttttttttttttttttgcgacagaatctcacactatcgcccaggctggagtgcagkggtgcgatctcggctcactgcaacctccacttcccgggttcaagtgattctcctgcctcattctcagcctccctagtagctgggattacaggcaactgcc

SEQ ID NO: 158114 - DNA, 201 bp, Homo sapiens
ttttgagtactataatatgaaaccatactgtatatattcttttttgacttgcttttttcaccctctagtagatttccgagagttgtgtaaggtgatgtgtrtgaatgtaagttctttctactgccatttttttctgtgtgtaaatataccacaacttatttatccattctgttgttgatggacatttgtattgtttccatt

SEQ ID NO: 158115 - DNA, 201 bp, Homo sapiens
taatggtgttaatttgatcatttgatttaaggtgtatctggcaggtttttccactgtaaaggaatcttttttttttttttttttttttttttttgcgacaraatctcacactatcgcccaggctggagtgcagtggtgcgatctcggctcactgcaacctccacttcccgggttcaagtgattctcctgcctcattctcag

SEQ ID NO: 158116 - DNA, 201 bp, Homo sapiens
gactacacgcgccgccaccacgcccagctaatttttttttttttgtattttttagtagagatggggtttcaccatgttagccaggatggtctcgatctcckgacctcgtgatccacccacctcagcctcccaaagtgctgggattacaggcgtgagccaccgtgcccggccaacaaaggatttttttgaaggatacaaatt

SEQ ID NO: 158117 - DNA, 201 bp, Homo sapiens
gctctgtcacccaggctggagtgcagtggcacgatcttggctcactgcaagctccgcctcccaggttcacaccattctcctgcctcagcctcctgagtagytgggactacacgcgccgccaccacgcccagctaatttttttttttttgtattttttagtagagatggggtttcaccatgttagccaggatggtctcgatc

SEQ ID NO: 158118 - DNA, 201 bp, Homo sapiens
attagtttactagcacagctcaccaaattcagggaaacacttacttacatttatcaatgtactacaaaggattttttttttttttttttttttttttttgrgacagagtctcgctctgtcacccaggctggagtgcagtggcacgatcttggctcactgcaagctccgcctcccaggttcacaccattctcctgcctcagc

SEQ ID NO: 158119 - DNA, 201 bp, Homo sapiens
attctgccacccatggatcagggagtcgttttgactttcaagtcttactatttaaaaaatatattttgtaaggccatagctgccatagacaatgatttccyctggtggatctaggcaaagaaaattgaaaaccttctggaaaggattcaacattctagatgccattaagaacatttgtggttcatgaaaggtcaaaatgtc

SEQ ID NO: 158120 - DNA, 201 bp, Homo sapiens
ttttagaatgtgggtcttagacattttgttaaattcttgtctttcatgttgtttgatggtattgtaaattgtatttttgtttttgtttttctgagacagartttcacccttgttgcccaggctggagtgcaatggcatgctctcagctcactgtaacctctgcctcccaggttcaagcgattcttctgcctcagcctccca

SEQ ID NO: 158121 - DNA, 201 bp, Homo sapiens
tcttaatagtatgagaagatcaggttcttaattttgatgtagttcaatttgtcagtattttcttctgttttgtttaagaaatctttgcttaccccaaggtsatgaagatattttcctgtgttttcttctgtaagctttattgttttacttttagcaattaggtgtagaatctattttgaattaatttttgtgaattgtgtg

SEQ ID NO: 158122 - DNA, 201 bp, Homo sapiens
tcccttcttcctttccttttgtcattgtcatgaatgggtttatgtgttttactttctggccacctaaattgtacattaggatagacatcttcaagatcagyatcaaataatatgtattactatcttgacttttttgtgtgagtagtatgttttttgtttttattttgtttttgagatggcatctcactctgtcgcccaggc

SEQ ID NO: 158123 - DNA, 201 bp, Homo sapiens
attccatggttccaacaccatattattgatcattttattttttctttactaatctgaaacactacttctatcatatatgaattttctacacatattgggayctttttctgtattttctgttccattgatcagttcgtctccatatgtactaataccacaccattttaattaattacaagacctcattaagtaagtctggat

SEQ ID NO: 158124 - DNA, 201 bp, Homo sapiens
tttaaacaccaagatgcttgacttgaagggaaaaataggatttttttttttgagtaatttatccctgcttaaagacagattgccctatacgtaacagctaygcagaaaaagttataaaattgtctttggttttacattgataaatgaaaaacattaaaattctccaattgaacaagatatgcagggatttttatggggttt

SEQ ID NO: 158125 - DNA, 201 bp, Homo sapiens
ccaccatgcccagctaatttttgtatttttagtagagatgcagagacgcggttttaccacgctggtctcgaactcctgacctcaagtgatccgcccgcgtyggccttcccaaaagtgctaagccactgcacccagccctgttcttcttttttttttttccaacaggaagtttatttaaacaccaagatgcttgacttgaag

SEQ ID NO: 158126 - DNA, 201 bp, Homo sapiens; identical to SEQ ID NO: 29605

SEQ ID NO: 158127 - DNA, 201 bp, Homo sapiens
tcactacatttttttcagtaattaataagagaattactgtgccagtgtgacattggaggtattttggggtttcaattaattaaatgttagtgggattttcytttcgtgtttttcatgattcactagttttagtttgaacttttgatagtttatgtctgttgagttgattggtattacttttaagtgtgttgaatgttaaca

SEQ ID NO: 158128 - DNA, 201 bp, Homo sapiens
ctggggcctggaccatttgtgactgctttagagtatgccacagataccaaagccacagtcgtggggaaaccagagaagacgttctttttggaagcattgcrgggcactggctgtgaacctgaggaggctgtcatgataggagatgtaagtagaagaacccaggaggtgctcccagctcacctgttgtgctgggaaagccag

SEQ ID NO: 158129 - DNA, 201 bp, Homo sapiens
tgttagaaaggttgagaaaattggaatttgatatctctgaagatgaaatattcacatctctgactgcagccagaagtttactagagcggaaacaagtcagrcccatgctgctagttgatgatcgggcactacctgatttcaaaggtaggggaaatttggaaaatttaaagattggatatttatatgtacttacaaatcatt

SEQ ID NO: 158130 - DNA, 201 bp, Homo sapiens
agtcttgctctgtcacccaggttggagtgcagtggtgcgatcttggctcactgcaagctccgccttccgggttcatgccattctcctgcctcagcctcccrggtagctgggactacaggtgcccaccaccacgcccagctaattttttgtatttttagtagagacggggtttcaccatgttagtcaggatggtctcgatct

SEQ ID NO: 158131 - DNA, 201 bp, Homo sapiens
cttaccagtttttaattgtccattgtttcctaaactgtatttttaatttcatttgctctctcctagggaatgaaggatggcagcatgccgtgcattaaaasctgttttggtagatctcagtggcacacttcacattgaagatgcagctgtgccaggcgcacaggaagctcttaaaaggcaagctatcctccaggttcagct

SEQ ID NO: 158132 - DNA, 201 bp, Homo sapiens
tttataggagaacatttgtaaataaagttaaatttctaagtcaagcacttgtttttgtaccttagtataaacctgtcagtgttaactgcattaatctccawtttgggtgaacacctcttattatatgttctttgctgtaaaattgccgagtatagagttaatgaaagtaaatatttacatgtatttttttttcttcagtga

SEQ ID NO: 158133 - DNA, 201 bp, Homo sapiens
gaagcccaagtttaaagtgagttttaaaaataagcataccagagtttattcatcaataaatgtttactctttcaaagtagtcagggtaggaaacgataagyttctacattgctcaagatctttttggactcctattttggaattgctttctgagctagtacatgttctttgggatatttttattggttacaatttgtatgc

SEQ ID NO: 158134 - DNA, 201 bp, Homo sapiens
aatattctgtggctctaaatttattttaaattccggggtacaagtacaggatgtgcagagttgttacataggtaaacgtgtgccatgaagatttgctgcayctatcaacccatcacctaggtattaagcccggtaggcattagctatttttcctgatggtctccctcccctgcagtcccaacaggccggagtctgtgttgt

SEQ ID NO: 158135 - DNA, 201 bp, Homo sapiens
gcccacctcagcctctcaaaagtgctggaattacaggcgtgtgccagcacgcccgagcagcagttttatcttttattattactcctatgattctctactgwctatgctaatctccaaaggaaaacagtatccaggctgatccaccaaaaacaataaatgcgattctacctccagtgagaatccaggttatggaaaagagtt

SEQ ID NO: 158136 - DNA, 201 bp, Homo sapiens
gtaaggacatacccaagactgcgtaatttatacaggaaagatgtttaatggactcacaattccacattgctggggaggcctcacaatcatggcataaggcraaggagtaacaaaggcatgtcttacatgctggcaggcaagagagcatgtgtggggaactgctctttattaaaccatcaaatcttgggagattttctcact

SEQ ID NO: 158137 - DNA, 201 bp, Homo sapiens
aacaatgacatctctaagtagctatgtaaactgtaaacctgccattctggaggggcaagaggctacacattgtcatgttgctggccataaaaacatttggsacagttttaacaaattaggagattttatagggccagaatgtaaaagctgccttttgacttctgaatttggccctctccaggttacgtggtgcttctgtaa

SEQ ID NO: 158138 - DNA, 201 bp, Homo sapiens
gaggcagaggttgcagtgagctgagagatagtgccactgcactccagcctaggagatagagtcagaccttgtctccaaaaaaaaaaaaaaagaaagaaaaaacaaagttttggacaagaagagaggtcatagtgatcaagtgatcaagttagtgggactaactgaagaagtaagtatattttgaggtatgagtggggcacc

SEQ ID NO: 158139 - DNA, 201 bp, Homo sapiens
ccggggaggcagaggttgcagtgagctgagagatagtgccactgcactccagcctaggagatagagtcagaccttgtctccaaaaaaaaaaaaaaagaaagaaaaaacaaagttttggacaagaagagaggtcatagtgatcaagtgatcaagttagtgggactaactgaagaagtaagtatattttgaggtatgagtggg

SEQ ID NO: 158140 - DNA, 201 bp, Homo sapiens
ggtggggctcaagatgtcggcatgctgggcatcttagtaaagactggtatgtatcttctgtataaagcattttctaaaacagaatagtagaatacacagtwgcttaaagaacaatctttgcagaaatggcagagccctgggcacttttattctcttcctgccacaaagcaaaaataaaacagcttaggattataggaaaca

SEQ ID NO: 158141 - DNA, 201 bp, Homo sapiens
gatggcttgagccggggaggcagaggttgcagtgagctgagagatagtgccactgcactccagcctaggagatagagtcagaccttgtctccaaaaaaaaaaaaaaagaaagaaaaaacaaagttttggacaagaagagaggtcatagtgatcaagtgatcaagttagtgggactaactgaagaagtaagtatattttgag

SEQ ID NO: 158142 - DNA, 201 bp, Homo sapiens
tctttatcccaggagttgctggccctgggacaggatgagaggtgggaagggatgcaacagctgtgctgcatggggggctgttggttacccaggaaagtggyggttccctgccccccaccgtctcattgtccacattctttttcccacctccctatctcctctcccccatctccactcttcaacagggcaagtttagctgta

SEQ ID NO: 158143 - DNA, 201 bp, Homo sapiens
tatacttttgccattcatactgtcttgattattgtagcttcataataagcctaaatatctggtagtgtacatcctccaactttattatttaagattgtctyggctattctacctcctttggatttccacacagattttgaaatcaactttgaagtcacaaacaaagcctgctgggagtttgatccttccttaaatctatgg

SEQ ID NO: 158144 - DNA, 201 bp, Homo sapiens
aaaaaaactacatggaattacttagcctaggaaacgtttgaggccttttttccctatattaagaaactgctctccatctcctagagtagcttattaaaatrtcgttatacctgaagagaaatggcatcacaactttcatgtttaaatttatagatgaagcctttttaagaataatgtatttgaagttttgttaataacatt

SEQ ID NO: 158145 - DNA, 201 bp, Homo sapiens; identical to SEQ ID NO: 29606

SEQ ID NO: 158146 - DNA, 201 bp, Homo sapiens; identical to SEQ ID NO: 29607

SEQ ID NO: 158147 - DNA, 201 bp, Homo sapiens
cttccatatcaaaaccaccaattgtgggccacaatcttctcaggttacaatgggtctggttctctctcttctgcctcccccctccacctataaggaccctstcgattacatcaggctaccgagatcatcccagatgagctccgcatctcagggatggctgatgagcaagctcaatttcacctgctgccctaattccccttt

SEQ ID NO: 158148 - DNA, 201 bp, Homo sapiens; identical to SEQ ID NO: 29608

SEQ ID NO: 158149 - DNA, 201 bp, Homo sapiens; identical to SEQ ID NO: 29609

SEQ ID NO: 158150 - DNA, 201 bp, Homo sapiens
aaagaaactaaccccggggatccaaaggttccaattcaaccttatttggttgtgtatgtaccaggaatgaatctcaactcactgtgtgaatgtttagagascaggtgcagcctagagatgtaacgatgaggaaggagaggctgaggtttgaaagaggtgatggggacagtgaagaacaaaggcagttcagcctagccagtg

SEQ ID NO: 158151 - DNA, 201 bp, Homo sapiens
tccagcccagttgccggaagccggagatccggggggcggaacctctccgcctcctccgggaagagccccgcctccttaaagagacagcagctcccagagayacctgcgtgctgcggcgcgcagagcccgctcccgcccgcccttctcccgaggctgagcctcgagttcttaaagagacaggcgagggcggagtggtggggt

SEQ ID NO: 158152 - DNA, 201 bp, Homo sapiens
cccctgtttaaaatcttctaacgtctttccagctgtacttacaagtgttgtccaataactataaataggatttctctgctgacagatcctgacatgggggktaatttactggtctgggctgttttcccatttatacaaaggagttggacttgatagtcttcactggattctcgaaatggtgttctctgcactgtggtctgt

SEQ ID NO: 158153 - DNA, 201 bp, Homo sapiens
tccccagtccaggaaaaccagtttcgtcgacttgagttcttgaccgttccagttttctcttttttgtcctcccagcttctcttcctgccagaacttccttytccccgacttgcccactcagccagcccagcttgtgaatggctgccagattgctcttctctgagtacataccagctcaaccactttcagcagctcccctct

SEQ ID NO: 158154 - DNA, 201 bp, Homo sapiens
acagagtgactctctggggtcattggaggccagtgaccagccacttggccacaattgacctctgagctgccctcctgaagcctgggcctccttgtcacatrggtgagaaatcatagtgcagtcaaccagcagagactgaggccactcaatgcctcctcaggccttttaagaaaaagtctgacccaaggacaaggagagggg

SEQ ID NO: 158155 - DNA, 201 bp, Homo sapiens
cagttttctcttttttgtcctcccagcttctcttcctgccagaacttccttctccccgacttgcccactcagccagcccagcttgtgaatggctgccagaytgctcttctctgagtacataccagctcaaccactttcagcagctcccctctgcatttaggatgaagcccaggctcagccttggattccaggtcctccctg

SEQ ID NO: 158156 - DNA, 201 bp, Homo sapiens
gcacccaactggtataccttcaaattgcaagtcatctactgctgccattcggccagtgagtcttctcccaattatgaggaagaaaatttgcagggttctawaagaaaaaaataggtaaacataataggatgacagtataaagtatctgcaaacaactcttatgtattagaaatggtatcactttcccttgcctcccttttc

SEQ ID NO: 158157 - DNA, 201 bp, Homo sapiens
acttggccaccaggaagctcagagtcaaaatatagctcagttataacaaatgcatgggacctatggcctgtgtgtattccgttttcccctcctgttctacrcctcccagaggggcatgattaaaaaaaattctggccaggcgcagtggctcacgcctgtaatcccagcactttgggaggccaaggccggtgaatcgcttga

SEQ ID NO: 158158 - DNA, 201 bp, Homo sapiens
cccctctgcatttaggatgaagcccaggctcagccttggattccaggtcctccctggtcaggctccagcttttcttctcaattctacctctgagctcccckccacactcatttctttcggacaaactgttgggccttgtacatctcttgtactttcccttgtctttgcctttgctgacatcggctggtcaagaatgccctt

SEQ ID NO: 158159 - DNA, 201 bp, Homo sapiens
agtgttgcctggctgcagcctctctgcccatagaactcagagcttactctggctttgccgagatggggctgccccagccagggctgtggctgaagaggctytgggtgctcttggaggtggctgtgcatgtggtcgtgggtaaagtgcttctgatattgtttccagacagagtcaagcggaacatcctggccatgggcgaga

SEQ ID NO: 158160 - DNA, 201 bp, Homo sapiens
gacatcaaatagcaactaaaagacacgatgccaggtcaagagagggactacagaagattagaaatgtctttgtatttcaggctgggcacggtggctcaggyctgtaatcgcagcactttgggaggccgaggccggcggatcacttgaggtcaggagtctgagaccagcctggccaacatagtgaaaccccgtctctactaa

SEQ ID NO: 158161 - DNA, 201 bp, Homo sapiens
  misc_feature (1)...(201): n = A,T,C or G
tgcctaggacccatcctggggtggggggtagggggaaataaaaataacagaattgaacataggagtgaaaatggtgcttgtaaaagaaagctgtgtgtagngtctcagtttgtgatggttgttgctgtttcaggtaataggccactggtgctgaattttggaagttgtacctgaccttcatttatgttcaaatttgaccag

SEQ ID NO: 158162 - DNA, 201 bp, Homo sapiens
cccagagacacctgcgtgctgcggcgcgcagagcccgctcccgcccgcccttctcccgaggctgagcctcgagttcttaaagagacaggcgagggcggagyggtggggtcgctgagtgtgactacttgggctggccttgctccagggaacgtagaaaattctcgagtttagggttttcttactgtgtgtttatacctcttt

SEQ ID NO: 158163 - DNA, 201 bp, Homo sapiens
caacctttttcagcacccagtatttctggttcgtcttgaaggtccgttggcagcgactagaggacacgactgagctagggggtctggccccaaactgcccrgtggtccgcctctcaggacagaggtgcaacatttgggagtttatgcaaggtcaggaggctgccacacacttgaggggtgcttgaaatagcagtggtagag

SEQ ID NO: 158164 - DNA, 201 bp, Homo sapiens
agccacttaccagccatgtgaccatgggcgagtgctttcacttcttggagttccttcaatttcctcttctgcaaaatgggaatgttggtctccacctcacsggggatgaaataatgcacacgaatgtccctagcatttggactggagctgcatcctcccggcttccttttgaacccagatgatggcccagtcctggtctgg

SEQ ID NO: 158165 - DNA, 201 bp, Homo sapiens
gtcaagaatgcccttcccctctccatcgtcgtctatatccccctcattcatgtgggtccagctctcctgacaccttgtcctccatgaagccacctcagctycctacagctaggcatgtgctctctcccttcggctcatggctctctgtctgcacctctccttggacactgctgcttcctgctcagcacctggtacctaagc

SEQ ID NO: 158166 - DNA, 201 bp, Homo sapiens
ctccatcgtcgtctatatccccctcattcatgtgggtccagctctcctgacaccttgtcctccatgaagccacctcagcttcctacagctaggcatgtgcwctctcccttcggctcatggctctctgtctgcacctctccttggacactgctgcttcctgctcagcacctggtacctaagcacaagtcttatttccctgcc

SEQ ID NO: 158167 - DNA, 201 bp, Homo sapiens
gttgcccaggctggtctcgaactcctggactcaagtgatccacccacttcggccttccaaaatgctgggattacaggcatgagccactgtgcctggcctakcctgtgtttttgaaagaatgttctttagaacctaagttccacagatatgctttactatgtagtgttgcctggtcaaagtagttgggaaaccctgaatact

SEQ ID NO: 158168 - DNA, 201 bp, Homo sapiens
tttttgaaagaatgttctttagaacctaagttccacagatatgctttactatgtagtgttgcctggtcaaagtagttgggaaaccctgaatactatatccycctcctatgcaatttcatgtgcaatttcatgtgcacatgagtgtatgcacatgaggagtttacagttccatagaacagatggaggtaataaacaaatcct

SEQ ID NO: 158169 - DNA, 201 bp, Homo sapiens
tgagagtatactacattctggagattcgaggatgaatgaggaacaggccctgccctcaggggacaatgagtaggggggtttgggggtatgtggacacttamacaggccatgtcacagtgcaagactagccatgctccaataaatgtatggtaagggctcaacaatgtcagctctggccgtaagaaaccacaggaggccagc

SEQ ID NO: 158170 - DNA, 201 bp, Homo sapiens
tcaccatgttactcgggctggtctcaaactcctaggttcaaacaatctgcccacctcggcctcccaaagtgctggaattacagtcgtgagccactgcacccagcctatatttgtatttttgaaagaacactgtggtgaagaattaggagaaaaaatagtacttaaactcagtatgaattagaatcatctggaaggctgtta

SEQ ID NO: 158171 - DNA, 201 bp, Homo sapiens
tggtaataactaacttaccacatgcccatgtgccaagcactgtaacagaaccaggccaatttgctgaatgccagtcatctgcagttcagttccctgaaagycagcttgcctcatggccaattcatggaatgtacttgcatcatgtaactgtccactttcagtgaggcagtttacattttaaagactgttgaatttggtctg

SEQ ID NO: 158172 - DNA, 201 bp, Homo sapiens
acgcctttaattccagcactttgggaggctgaggcgggcagatcacttgaggtcagaagttcaagaccagcctggccaacatgatgaaacctcgtctctaytaaaaatacaaaaatcagccaggcatggtggcatgcacctataatcccagctactcagaaggctgaggcatgagaatcacttgaacccaggaggcagagg

SEQ ID NO: 158173 - DNA, 201 bp, Homo sapiens
  misc_feature (1)...(201): n = A,T,C or G
ttgaattagccatgctgatggctcctacacagacatcatttgaccacctcttgcaactaacctccagacctacatgttccttacaacttggaaatccttanaagttgggaatgcctgattcgtttctcttgcagggtaaatctggcccttggaactacaacccagaggaagttcgtgctgttctggaaaagctccacagtt

SEQ ID NO: 158174 - DNA, 201 bp, Homo sapiens
ggcagatcacttgaggtcagaagttcaagaccagcctggccaacatgatgaaacctcgtctctactaaaaatacaaaaatcagccaggcatggtggcatgmacctataatcccagctactcagaaggctgaggcatgagaatcacttgaacccaggaggcagaggttgcagtgagccgagatcgcaccactgcactccagc

SEQ ID NO: 158175 - DNA, 201 bp, Homo sapiens
aaaatacaaaaatcagccaggcatggtggcatgcacctataatcccagctactcagaaggctgaggcatgagaatcacttgaacccaggaggcagaggttrcagtgagccgagatcgcaccactgcactccagcctgggtgacacagcgagactctgtcttaaaataaaataaaataaaatataaaataaaataaaaactg

SEQ ID NO: 158176 - DNA, 201 bp, Homo sapiens
actacagaaatagtcaaccaccagctagaagccatgattgggggccgggtgcggtggctcgagcctgtaatcccagcacttttggaggccaaggcgggtgkgtcatctgaggtcaggagttcaagaccagcctgaccaacacggtgaaaccctgtctctactaaaaatacaaaaattagccaggcgtggtggcaggcgcct

SEQ ID NO: 158177 - DNA, 201 bp, Homo sapiens
gctgaccctacctattcagataaaacaagcaaaaacttgcaggcaaattcccaaggtgcaagggtcacagtagaagaatgtgggtccttcatcctttcctktaccttgggacatggttcaggcatgattgaggcaccctgggcactgaatccctaccttgggttaggccctgtgcaaatactggaaacacaaaaatgaatt

SEQ ID NO: 158178 - DNA, 201 bp, Homo sapiens
gactacagaaatagtcaaccaccagctagaagccatgattgggggccgggtgcggtggctcgagcctgtaatcccagcacttttggaggccaaggcgggtrggtcatctgaggtcaggagttcaagaccagcctgaccaacacggtgaaaccctgtctctactaaaaatacaaaaattagccaggcgtggtggcaggcgcc

SEQ ID NO: 158179 - DNA, 201 bp, Homo sapiens
cagggtaaatctggcccttggaactacaacccagaggaagttcgtgctgttctggaaaagctccacagttaatctggacagatacctcaattctaggtgaycaacgggagggcttctcaaggcttagctctccctgagacccagctggcttttacccttgacctgtgtccctagctgaatcactagctcagatttttctga

SEQ ID NO: 158180 - DNA, 201 bp, Homo sapiens; identical to SEQ ID NO: 29610

SEQ ID NO: 158181 - DNA, 201 bp, Homo sapiens
gtgcaacagagtggaaccctgtctctacaaaatatttaaaaattagtgggatgaggtggtgtgagcctgtagtcccagctactcaggaggctgagttgggrgggtcacttaagcccaggaggtcgaggcttcagtgagccatgttcatgctagtgcactccagcctaggtaacagagttaagaccttgtctcaaaaataaa

SEQ ID NO: 158182 - DNA, 201 bp, Homo sapiens
tcatcaggaaccagagcttacggggccttgtgtgtcgtagctgcaggttgactttatcctgagagtactggtgagttctggaagggtttccaagcgagaartaaacatgatcagttctgcttattagaaagacattggccgagcatggtggctcacacctgtaatcccagcactttgggaggccgaggccagcgggtcact

SEQ ID NO: 158183 - DNA, 201 bp, Homo sapiens
ctgaggtaggatgggtagaacttgatgtgaaggctggagaagattaggccagtctgaaggtctgattatggaagaaaagcttatttgtacagaacccttcyctttttgaaagactatgtcactttatgtcctctagtttttctacttctctgtccaaccttcctgttaactgctgatgccactgtacacactttctcaacc

SEQ ID NO: 158184 - DNA, 201 bp, Homo sapiens
ccagcccctgctaagtcatgctctctaggtgtcggaccccagtgcctaggacccatcctggggtggggggtagggggaaataaaaataacagaattgaacwtaggagtgaaaatggtgcttgtaaaagaaagctgtgtgtagggtctcagtttgtgatggttgttgctgtttcaggtaataggccactggtgctgaatttt

SEQ ID NO: 158185 - DNA, 201 bp, Homo sapiens
tcagggaaactctcagccacctccagccctctgtgcgtccacacacgcacacacacacaatatacacacactcttggacacacacagaacaaaacatcgartaactggcatggtgtggcagaaggcaagttctggatgatttactttctggatacctgagagttaatctgaaattggcttcatttcagcccctgtttaaaa

SEQ ID NO: 158186 - DNA, 201 bp, Homo sapiens
acctccagccctctgtgcgtccacacacgcacacacacacaatatacacacactcttggacacacacagaacaaaacatcgagtaactggcatggtgtggyagaaggcaagttctggatgatttactttctggatacctgagagttaatctgaaattggcttcatttcagcccctgtttaaaatcttctaacgtctttcca

SEQ ID NO: 158187 - DNA, 201 bp, Homo sapiens
taaaaaaaattctggccaggcgcagtggctcacgcctgtaatcccagcactttgggaggccaaggccggtgaatcgcttgaggtcaggagttcaagaccakcctggccaacatggagaaaccctgtctctactaaaaatacaaaaattagccaggcatggtggtgcacgcttgtaatcccagctacttaggaggctgaggc

SEQ ID NO: 158188 - DNA, 201 bp, Homo sapiens
attttagagaggagtaaaccagctccagcccctgctaagtcatgctctctaggtgtcggaccccagtgcctaggacccatcctggggtggggggtagggggaaataaaaataacagaattgaacataggagtgaaaatggtgcttgtaaaagaaagctgtgtgtagggtctcagtttgtgatggttgttgctgtttcaggt

SEQ ID NO: 158189 - DNA, 201 bp, Homo sapiens
agcctcattcctgggctcaagcagtcttgctgcctcagcctcccaagtagctgggactagacatgtgtcaccacgcctggataatttttttttaagagacrgggtcctgctatgttgcccaggctttttgggttcctacctaaagagtgacagagtgactctctggggtcattggaggccagtgaccagccacttggccac

SEQ ID NO: 158190 - DNA, 201 bp, Homo sapiens
aatttcatacagctgatacttagagttgatcatgaccataagtcttttgggttctttattttttatttttattgagatggggtctcatgctgttgcccagrctggagtgcaatggcacgatcgtagctcacagcagcctcattcctgggctcaagcagtcttgctgcctcagcctcccaagtagctgggactagacatgtg

SEQ ID NO: 158191 - DNA, 201 bp, Homo sapiens
gacttctgactctcagctcgtgcacttgctgctactggatacgacagcaggagctcagggaaactctcagccacctccagccctctgtgcgtccacacacrcacacacacacaatatacacacactcttggacacacacagaacaaaacatcgagtaactggcatggtgtggcagaaggcaagttctggatgatttacttt

SEQ ID NO: 158192 - DNA, 201 bp, Homo sapiens
tcgtctctactaaaaatacaaaaatcagccaggcatggtggcatgcacctataatcccagctactcagaaggctgaggcatgagaatcacttgaacccagraggcagaggttgcagtgagccgagatcgcaccactgcactccagcctgggtgacacagcgagactctgtcttaaaataaaataaaataaaatataaaata

SEQ ID NO: 158193 - DNA, 201 bp, Homo sapiens
tttaaagactgttgaatttggtctgagccccgtggctcacgcctttaattccagcactttgggaggctgaggcgggcagatcacttgaggtcagaagttcragaccagcctggccaacatgatgaaacctcgtctctactaaaaatacaaaaatcagccaggcatggtggcatgcacctataatcccagctactcagaagg

SEQ ID NO: 158194 - DNA, 201 bp, Homo sapiens
aatctcttgaaccccggtggcggagattgcagtgagtcaagattgtgccactgcattccagcctgggcaacagagtgagacgctgtcacaaattaaaaaaagtctcagttttctctctctaactccatccactccccagtccaggaaaaccagtttcgtcgacttgagttcttgaccgttccagttttctcttttttgtcc

SEQ ID NO: 158195 - DNA, 201 bp, Homo sapiens
ttttgaacaaggaaccctgcattttcatttggcggcaggcccagcaaattatgcagctggtcctgctcctagcattcactctctttgtggagctgccttcsgtgcctccctacttcatagctcagggaggagatacaagctcatagcaacagcttacatttatgaagcacctactatgggccagtaaccagtttaagccct

SEQ ID NO: 158196 - DNA, 201 bp, Homo sapiens
ctggtcctgctcctagcattcactctctttgtggagctgccttcggtgcctccctacttcatagctcagggaggagatacaagctcatagcaacagcttayatttatgaagcacctactatgggccagtaaccagtttaagcccttatctctattaatttatttaatcctcctaacagtgctacaaaggattattatgccc

SEQ ID NO: 158197 - DNA, 201 bp, Homo sapiens
gaacttcttgtggattgtttctctaagtaacatcaccaccttcccaggcactcaaatcacaaaccatccagtctggcatttcagcccctggaacactgctsttactgtacaggctgatctgcctgggctgctctttgcccacctctctgcctggttaactcttgttcaatcttcagactgttgctcaatgacgcttctttc

SEQ ID NO: 158198 - DNA, 201 bp, Homo sapiens
ggagattgaggctggcagatcacgaggtcaggagttcgagaccatcctggccaacatgatgaaaccccgtctctactaaaaatacaaaaattagccaggcktggtggtgtgcacctgtaatcccagctactcgggaggctgaggcagaagaatctcttgaaccccggtggcggagattgcagtgagtcaagattgtgccac

SEQ ID NO: 158199 - DNA, 201 bp, Homo sapiens
ggtgggcacccaactggtataccttcaaattgcaagtcatctactgctgccattcggccagtgagtcttctcccaattatgaggaagaaaatttgcagggktctaaaagaaaaaaataggtaaacataataggatgacagtataaagtatctgcaaacaactcttatgtattagaaatggtatcactttcccttgcctccc

SEQ ID NO: 158200 - DNA, 201 bp, Homo sapiens
cccgtctctactaaaaatacaaaaattagccaggcgtggtggtgtgcacctgtaatcccagctactcgggaggctgaggcagaagaatctcttgaaccccrgtggcggagattgcagtgagtcaagattgtgccactgcattccagcctgggcaacagagtgagacgctgtcacaaattaaaaaaagtctcagttttctct

SEQ ID NO: 158201 - DNA, 201 bp, Homo sapiens
ttttcctggaatataattggtatatgtcttccactttccatcatgtatgtaaaatttcatagtaaaacttaccgatagtttcaataaagaaattatctgcaaaaaaaaaaaaaacccaaacaaacaaaaacttccatacataaccatccatataccttttccataatatagggaattataaactgttttttctgtgctgtt

SEQ ID NO: 158202 - DNA, 201 bp, Homo sapiens; identical to SEQ ID NO: 29621

SEQ ID NO: 158203 - DNA, 201 bp, Homo sapiens
aatactattaaagtattttttcctggaatataattggtatatgtcttccactttccatcatgtatgtaaaatttcatagtaaaacttaccgatagtttcartaaagaaattatctgcaaaaaaaaaaaaaacccaaacaaacaaaaacttccatacataaccatccatataccttttccataatatagggaattataaact

SEQ ID NO: 158204 - DNA, 201 bp, Homo sapiens; identical to SEQ ID NO: 29623

SEQ ID NO: 158205 - DNA, 201 bp, Homo sapiens
cagccccatcccgccacccccgggctgcacctcggcccctccccggcccgcgcccctgcccggggcgggccaggaacctcggcccgcgccgctggggactytggagcggaggaggaagcgcggcggggcgggggcgggggtgtgtcgggttttataacccgcagggcggccgcggcgcaggagaaggggcagagccgagca

SEQ ID NO: 158206 - DNA, 201 bp, Homo sapiens
gaggaagcgcggcggggcgggggcgggggtgtgtcgggttttataacccgcagggcggccgcggcgcaggagaaggggcagagccgagcaccgcgcaccgsgtcatgggggccgcctcgggccgccgggggccggggctgctgctgccgctgccgctgctgttgctgctgccgccgcagcccgccctggcgttggaccccg

SEQ ID NO: 158207 - DNA, 201 bp, Homo sapiens
tgtatgaaccgatctggcagaacttcacggacccgcagctgcgcaggatcatcggagctgtgcgcaccctgggctctgccaacctgcccctggctaagcgkcagcaggtgggctgagggctgaggcagagctcgggggcggcctcctagtgccccatcgtgggggtcgggggagagcagcccatcagggagggaggaaccc

SEQ ID NO: 158208 - DNA, 201 bp, Homo sapiens
ccgcgccgctggggactttggagcggaggaggaagcgcggcggggcgggggcgggggtgtgtcgggttttataacccgcagggcggccgcggcgcaggagaaggggcagagccgagcaccgcgcaccgcgtcatgggggccgcctcgggccgccgggggccggggctgctgctgccgctgccgctgctgttgctgctgccg

SEQ ID NO: 158209 - DNA, 201 bp, Homo sapiens
cccgcgccgctggggactttggagcggaggaggaagcgcggcggggcgggggcgggggtgtgtcgggttttataacccgcagggcggccgcggcgcaggagaaggggcagagccgagcaccgcgcaccgcgtcatgggggccgcctcgggccgccgggggccggggctgctgctgccgctgccgctgctgttgctgctgcc

SEQ ID NO: 158210 - DNA, 201 bp, Homo sapiens
accctccacctcatttgctcacagtagcctctaatctttgtgctatctctcagttccctttgggttccatgtttgccttattctcctccatgcctagctgkatttcagagttaagtttatgattatgagataaaaactaaataacaattgcaaaaaaataaaataaaaagaaagaagaggctgggagcggtggctcactcc

SEQ ID NO: 158211 - DNA, 201 bp, Homo sapiens
ggcccgcgccgctggggactttggagcggaggaggaagcgcggcggggcgggggcgggggtgtgtcgggttttataacccgcagggcggccgcggcgcaggagaaggggcagagccgagcaccgcgcaccgcgtcatgggggccgcctcgggccgccgggggccggggctgctgctgccgctgccgctgctgttgctgctg

SEQ ID NO: 158212 - DNA, 201 bp, Homo sapiens
cgcagggcggccgcggcgcaggagaaggggcagagccgagcaccgcgcaccgcgtcatgggggccgcctcgggccgccgggggccggggctgctgctgccsctgccgctgctgttgctgctgccgccgcagcccgccctggcgttggaccccgggctgcagcccggcaacttttctgctgacgaggccggggcgcagctct

SEQ ID NO: 158213 - DNA, 201 bp, Homo sapiens
tctctttcctacctttcaaggttattgtaaataccaaattagattgtttatacacaagaatttagcactaaagcactatacaaatgtaagctatttatttytatttatccttctccttcatgaataagaccctaaaaatagaagatatttttaatttttactcactgggctcaaggttgcagtgtctgtattattgcaaat

SEQ ID NO: 158214 - DNA, 201 bp, Homo sapiens
atttgaaactagatttacctctgaattacattgcaatttcaacctgtcctttttagtactttgacccactgaatcatttgttacagttttgtggggttttkggggcaggggcggaggggtgttttttttttttgacacaaggtcttgctctgtcacctaggccaagtgtagtgccgtgatcataactcactgcaacctcaa

SEQ ID NO: 158215 - DNA, 201 bp, Homo sapiens
ttgtgaggggctgtcctgtgcatcatagaatgaccagcagcagcagcactgactgacaaaccaaaaatgtctccagacattgccaaatgtccccttggggrcaaaatttccatctgttaagaaccattggcctaatgcttggcacataataagtgctcaataaatattagcactgtgactgctattattatttttacagtt

SEQ ID NO: 158216 - DNA, 201 bp, Homo sapiens
atgtacatatacattttacttgaaacaaacattattttttgggtatgataatcagttttcttcactttagctgatccaaaaatggcatcttctgctactcstttatagctttctaatgaatttgaaactagatttacctctgaattacattgcaatttcaacctgtcctttttagtactttgacccactgaatcatttgtt

SEQ ID NO: 158217 - DNA, 201 bp, Homo sapiens
aattgttttttctagttctgtgaagaatgatgatggtattttgatggaaattacattgaatctgtagattgctttgggccatatagtcgttttcacaataytgattatgcgcatccatgagcatgggatatgtttccatttgtttgtgtcatctatgatttctttcagcagtgttttttagttttccttgtagagatcttt

SEQ ID NO: 158218 - DNA, 201 bp, Homo sapiens
aaggtgtcaacatggaattcaggctttaggagctgaggtgtcctggtttttgtttaactgagagattgtttcttgggtggaattggtcctgggaggctatrgaaggcatgtgagctgtcttattcagattgacatctacctgcttcaaaatgttcatctaacattggtgctcaggggccacattttgggagatgaggggta

SEQ ID NO: 158219 - DNA, 201 bp, Homo sapiens
tcattcttataccttggcatcctcatagcttagttcccacttgtaagtgagaacatacgatatttggtttatcattcctgagttacttcacttagaataayggcctccagctccatccaagttgctgcaaaggccattattgctttctgttttacggctgagtagtattccatggtgtatatataccacattttctttatc

SEQ ID NO: 158220 - DNA, 201 bp, Homo sapiens
tggattgagaggaattagaaatgcctggtgagtgctgctgctcttagaactggcatgaccctgtgggaaagggaatcctgaagctatgcctttggagttaytagagacattggctctggtggagcgtaaagctttgaagttagggcagctcctgcacctgcctcatgatgctctcatctcccttgagcctgagctgtgtca

SEQ ID NO: 158221 - DNA, 201 bp, Homo sapiens
cttgagtccccaaagtcctttatatcattcttataccttggcatcctcatagcttagttcccacttgtaagtgagaacatacgatatttggtttatcattyctgagttacttcacttagaataatggcctccagctccatccaagttgctgcaaaggccattattgctttctgttttacggctgagtagtattccatggtg

SEQ ID NO: 158222 - DNA, 201 bp, Homo sapiens
acactgtatccagtatgtagtcttttatccccttgagtccccaaagtcctttatatcattcttataccttggcatcctcatagcttagttcccacttgtargtgagaacatacgatatttggtttatcattcctgagttacttcacttagaataatggcctccagctccatccaagttgctgcaaaggccattattgcttt

SEQ ID NO: 158223 - DNA, 201 bp, Homo sapiens
gtcccttctcttcctgacattcactgatcccacgagcagcatagtttcgcagaaacctaaatggagacccagagtggaatgaaagagcctggagaccttcktatcattgtaagaagatgaaatactttggctttttgatttcctaaaggttttgctaattccagtgcctcctggctgagggatagtagatacaagtagtcc

SEQ ID NO: 158224 - DNA, 201 bp, Homo sapiens
ggggaaaccaattctgcctacttgggaagccagaacatgaccgcgtaggcaagacctagctctgcgcacgcgcagagccaccacgtctggcgttcgcgtgrgaaccttctgggcgtgggcttcctgcggctgagtggcagcttccatccggtgggttttgctcggcgcacccgggaggcggggccagcgaggcaagatgga

SEQ ID NO: 158225 - DNA, 201 bp, Homo sapiens
ttcaggtaggcggccagagccatgctcttggcctctggggctggactttcgctggctgatttcttggaaggggtcccaggctcgggtcaccttggagaatmcacagctcttgtcaaggacaaccgccccaatctctgccttgccacccccaggctggtctctgtcccatatatccccgatacaagaccgaagctatctgta

SEQ ID NO: 158226 - DNA, 201 bp, Homo sapiens
aatttgagcacatcagttgtcaattcatcttttcccatccccagcacttcttcattttgctagttgatgcagcagcccttgtgtctgaaagttgttactcwcactttatttccgtttatgttttgaactaagaatcattctaaaatgtctgttttcttttgggtattcacaggacaaatgatgcgaaggttggtacattag

SEQ ID NO: 158227 - DNA, 201 bp, Homo sapiens
tttatagtctcctgtaaacaggaagtgtctcagtctgatgtaactgctacgtagtacctggacggcctgcccctcaatcttcaagggggtatgtgtctttyggccagctctcttcctgcttctgctgtcttgctgacccacgctgctggcccaagcttgggactgggcctgagaagggaggagttattcatctcttcaagc

SEQ ID NO: 158228 - DNA, 201 bp, Homo sapiens
gtgcagatttcccttgacctcaatttcctgtccttgatgtagaatgatagtttccttctggtatagggaggatatctttgatgtgggaattttttctcctrctttcagaaagaaaaaggccatattattcttgtgcctgctgtttttctttaccttttttttttttttttttttttttgagacaatgtcctgccctgtcac

SEQ ID NO: 158229 - DNA, 201 bp, Homo sapiens
ccacctcccaggttcaagcaattcttgtgcctctgccacctgggtagttgggattacaggtcccatgaccacacccagctaatttttgtatttttttttttataggggtggggtttctccatgttagccaggctggtctcaaactcctggcctcatgtgatccgcctgcctcagccttccaaagtgctgggattacaggtg

SEQ ID NO: 158230 - DNA, 201 bp, Homo sapiens
aagtttgaacattctagcaaaggagagtgatccacatagcccctagtagacatgcactgtcaatattggacatagttccattaatccttttttttttttttgagacagggtcttgctcttgtcacccaggctggagtgcagtggcatgatctcagctcactgcatcctccacctcccaggttcaagcaattcttgtgcctc

SEQ ID NO: 158231 - DNA, 201 bp, Homo sapiens
aagccatcctcctgcctcagcacccggagtagctggggctacaggcatgggccaccatgcccggctactgtttgtatgtatgtatgtatgtatgtatgtatgtatttagtagagacagtgttttgccatgttgcccaggctggtctcaaactcctgggctcaagctatctacctgccttggcctcccaaagtgttgacatt

SEQ ID NO: 158232 - DNA, 201 bp, Homo sapiens
gaagatgaaatactttggctttttgatttcctaaaggttttgctaattccagtgcctcctggctgagggatagtagatacaagtagtcctgtaatctgaaragactacatttatatttttagtgtaatttgagcacatcagttgtcaattcatcttttcccatccccagcacttcttcattttgctagttgatgcagcagc

SEQ ID NO: 158233 - DNA, 201 bp, Homo sapiens
tgtcccaacagtgtcctttatagagagatccaatcacacatttcatatggatctcaagttctttagtctccttcacacttgattggttcctcaacttttcygtgattttcatgaccttgacgcttttgaaaattacttgacagttatattgttgaaggtccctcagtgagtttgttgaatgtttcctcatgactaggttca

SEQ ID NO: 158234 - DNA, 201 bp, Homo sapiens
caagccatcctcctgcctcagcacccggagtagctggggctacaggcatgggccaccatgcccggctactgtttgtatgtatgtatgtatgtatgtatgtatgtatttagtagagacagtgttttgccatgttgcccaggctggtctcaaactcctgggctcaagctatctacctgccttggcctcccaaagtgttgacat

SEQ ID NO: 158235 - DNA, 201 bp, Homo sapiens
tcaagccatcctcctgcctcagcacccggagtagctggggctacaggcatgggccaccatgcccggctactgtttgtatgtatgtatgtatgtatgtatgtatgtatttagtagagacagtgttttgccatgttgcccaggctggtctcaaactcctgggctcaagctatctacctgccttggcctcccaaagtgttgaca

SEQ ID NO: 158236 - DNA, 201 bp, Homo sapiens
aattcattatttgtatctgtatcaactcctattttaatcaatgggttataatccattgctttaaatggttcttttattgttcaaattgggctcaatttgactagttggaacccattcaagctgcatttggagttctttggaggtttttagaggggaggggttctcagtttttaaaaatattttatttgagatagggtctca

SEQ ID NO: 158237 - DNA, 201 bp, Homo sapiens
ctcaagccatcctcctgcctcagcacccggagtagctggggctacaggcatgggccaccatgcccggctactgtttgtatgtatgtatgtatgtatgtatgtatgtatttagtagagacagtgttttgccatgttgcccaggctggtctcaaactcctgggctcaagctatctacctgccttggcctcccaaagtgttgac

SEQ ID NO: 158238 - DNA, 201 bp, Homo sapiens
tgtgtcatctagggagttaaagaaaatagcttctgggccgggcgtggtggctcacacacagcaccttgggaggccaaagcaggcagatcatgaggtcaggwgatcgagaccatcttggctaacacagtgaaaccccgtctccacttaaactacaaaaaaaaattagccgggcctagtggcggtcgcctgtagtcccagcta

SEQ ID NO: 158239 - DNA, 201 bp, Homo sapiens
tccagccttggagacagccatttctctgaggagccctgtgtttgtttgcttttttttgttgtttttttgtttctttggagacggagtttcactcttactgmccaggctggagtgcaatggcgcaatctcagctcaaccgcaacctccgcctctgggttcaagcgattctcctgcgtcagctggtcttgaactcccaacctc

SEQ ID NO: 158240 - DNA, 201 bp, Homo sapiens
tttgttgaatgaatggatgtacatatacattttacttgaaacaaacattattttttgggtatgataatcagttttcttcactttagctgatccaaaaatgrcatcttctgctactcctttatagctttctaatgaatttgaaactagatttacctctgaattacattgcaatttcaacctgtcctttttagtactttgacc

SEQ ID NO: 158241 - DNA, 201 bp, Homo sapiens
cagtgcttccaggccttctcagtggacaagctaggaaacatgggtaatgattgtgtgtccccaccagtaccactgacggcagtccagcactacagtttacrctccagttttctccctttccacatttatagctggtttcttcttaatatagttatttgatcaattccactgtgtgtaactaagttcccattgctgccctct

SEQ ID NO: 158242 - DNA, 201 bp, Homo sapiens
taaaggaaggaggcaaggcaagtgtggaagcaggctactcacttaagctgttgtaagtcatggcctaggctgttgatgaggttggactagggtgctagtgrtgcaggttgtgagatttgggatcgtattagttgtctatactgtggaacaagttatcctaaacttagcttaagacagtaaatgttatctcacagcaatttg

SEQ ID NO: 158243 - DNA, 201 bp, Homo sapiens
cagaaaataattttgtccctgaaaatttttctgtgcccagggaaaaattaataaatggttttgcccttgaaaggccaatttgtttaagatgcttaacgtcrtggtggtcagctgtttttcatttggcgtgatgtgttctagaagcctttgtagagaaacagggtggcaggtgagggccattacatggaggcgatagagaag

SEQ ID NO: 158244 - DNA, 201 bp, Homo sapiens
ttgaaccaagttaaaaaaaaaaacaaagcaagacatggcttggttagatttttctctattgcacgtataccgttttcccacttggtggcactttctgttcrtttcttagtaacatgtctttctctctcagcatagttacaccagtctctcctcgtacattgatttttcttattaaaattaatttactgaagtaatacataa

SEQ ID NO: 158245 - DNA, 201 bp, Homo sapiens
ggtttgaagtattggaaccttgaagtcctttgaaccaagttaaaaaaaaaaacaaagcaagacatggcttggttagatttttctctattgcacgtataccrttttcccacttggtggcactttctgttcatttcttagtaacatgtctttctctctcagcatagttacaccagtctctcctcgtacattgatttttcttat

SEQ ID NO: 158246 - DNA, 201 bp, Homo sapiens
gaggaattagaaatgcctggtgagtgctgctgctcttagaactggcatgaccctgtgggaaagggaatcctgaagctatgcctttggagttattagagacrttggctctggtggagcgtaaagctttgaagttagggcagctcctgcacctgcctcatgatgctctcatctcccttgagcctgagctgtgtcatctaggga

SEQ ID NO: 158247 - DNA, 201 bp, Homo sapiens
aacctaacacagtctgcttacaaacttgattcattcaacgaatatatattgagcacccccctatatgtcaggccttgatgggtttatatattcacagtggygagtgaaatatgtatggtctttgttcttttgtagtttataggcacttaatgaatactagtactaatactgtgttctaatttagtgtctttttttacagta

SEQ ID NO: 158248 - DNA, 201 bp, Homo sapiens
ctgtgggaaagggaatcctgaagctatgcctttggagttattagagacattggctctggtggagcgtaaagctttgaagttagggcagctcctgcacctgyctcatgatgctctcatctcccttgagcctgagctgtgtcatctagggagttaaagaaaatagcttctgggccgggcgtggtggctcacacacagcacctt

SEQ ID NO: 158249 - DNA, 201 bp, Homo sapiens
aatttgagtgtagcttagctgggtgcctcaggctcagggtctcacaaggttacagctgagatcttctctgaggctgctgtgctctcaaggtttgacttggraaggacccactgccacacttactcatgtggctgtagacagacctcagaagatttgcttcccagctcattcagtagacctctgcacaggccgcctcttgac

SEQ ID NO: 158250 - DNA, 201 bp, Homo sapiens
gagtagaataccctgaaagtatttaagtagataacaaataacattttattttattttgaggcagtgtctcgctctatcacccaggctggagttcagtggtrcgatcttggcttactgcagcctcgacctcctgggctcaagccatcctcctgcctcagcacccggagtagctggggctacaggcatgggccaccatgcccg

SEQ ID NO: 158251 - DNA, 201 bp, Homo sapiens
ctggagttcagtggtacgatcttggcttactgcagcctcgacctcctgggctcaagccatcctcctgcctcagcacccggagtagctggggctacaggcaygggccaccatgcccggctactgtttgtatgtatgtatgtatgtatgtatgtatgtatttagtagagacagtgttttgccatgttgcccaggctggtctca

SEQ ID NO: 158252 - DNA, 201 bp, Homo sapiens
tcagcttttatttaacacatttcactgagtattcattgcttcatttaatattgattctaacattttacaaagatgccttgttggaaaattccatatgtggratgtggaaataaactatgtattactcttggtgaatgaggaactgctcagcatgttcattatagaaaattcaaaaaataacaaaagaaataagaatagcct

SEQ ID NO: 158253 - DNA, 201 bp, Homo sapiens
tatttaatgttgagacagggtctcgctctgtcacccagtctagagtgcagtgactcgatcatggctcactacagcctcaactttctgggctcaagctgtcmtcctacctcagccacccaagtagctgggattacaggcatgtgtcaccatgcctggctaattgtttaaaaaaatttttttttggagagacgaggtcttgct

SEQ ID NO: 158254 - DNA, 201 bp, Homo sapiens
attttttagaatagtttgttgttgtttttttattttaagttctagggtacatgtgcacaacgtgcaggtttgttacatatgtatacgtgttttggaatacrttgttgttaagaatgatataaacctataaatttaatatagagagatgtcaaagatgtgtgtaatataaaaaaattccagtagcagaacaatgtttggtat

SEQ ID NO: 158255 - DNA, 201 bp, Homo sapiens
aataaactatgtattactcttggtgaatgaggaactgctcagcatgttcattatagaaaattcaaaaaataacaaaagaaataagaatagcctgttatccyaccacttgtagaaaccactgctattaatattttgatacacatttgaccttcagtatctgtgggttctgcatccatggattaaaccaacattagatggaaa

SEQ ID NO: 158256 - DNA, 201 bp, Homo sapiens
gcctcctaaagctgtattaaaagatgaaaagtgaatgggaggaacttactgtgattagggtttctcagcctcagcagtgttaacactatggggcagataaktctattcattttttgtttttttatttcaatagtttttggagtacaggtggtttttggttacatggataagttttttagtggtgagttctgagattttggt

SEQ ID NO: 158257 - DNA, 201 bp, Homo sapiens; identical to SEQ ID NO: 29625

SEQ ID NO: 158258 - DNA, 201 bp, Homo sapiens
gtaagtgagaacatacgatatttggtttatcattcctgagttacttcacttagaataatggcctccagctccatccaagttgctgcaaaggccattattgytttctgttttacggctgagtagtattccatggtgtatatataccacattttctttatccactcgttcactgatgggcatttaggttggttccttattttt

SEQ ID NO: 158259 - DNA, 201 bp, Homo sapiens
gttccttatttttgcaattacaaattgtgctgctataaacatgtgtatgcatgtgtctttttcatgtaatgacttctttttctttgggtacatacccagtrgtgggattgctggatcgaatggtagttctgccttcagttctttaaggaatctccttactgttttccatagttgttgtactagttcacattcccaacagca

SEQ ID NO: 158260 - DNA, 201 bp, Homo sapiens
ttagtagagacgaggtttcaccatgttagccaggattgtgttgatctcctgacctcgtgatccacccacctcggcctcccaacgtgctgggattacaggcrtgagccactgcgcccggcctaccaaccactttttttaaagatagggtctcgctatgttgcccaggcaaaagtacagtggtgtgaccatggcttactgcag

SEQ ID NO: 158261 - DNA, 201 bp, Homo sapiens
caaatgtccccttgggggcaaaatttccatctgttaagaaccattggcctaatgcttggcacataataagtgctcaataaatattagcactgtgactgctrttattatttttacagtttgagtatcccttacccaaaatgcttgggaccacaagtatttcagattttaggtttttttggattttggaatatttgcattata

SEQ ID NO: 158262 - DNA, 201 bp, Homo sapiens
ggcggtctccgaggctatctacgggtttttttcaggtaggcggccagagccatgctcttggcctctggggctggactttcgctggctgatttcttggaagrggtcccaggctcgggtcaccttggagaatccacagctcttgtcaaggacaaccgccccaatctctgccttgccacccccaggctggtctctgtcccatat

SEQ ID NO: 158263 - DNA, 201 bp, Homo sapiens
cagtgacgtgatcccagctcactgcaacctctgcctcccgggttcaagcgattctcctgcctcagcctcctgagtagctaggattacaggtgcacaccacyatgcccagctaacttttgtatttttagtagagacggggtttcaccatattggccaggctggtctcaaattcctgacctcaggtgatctgtccacctcggc

SEQ ID NO: 158264 - DNA, 201 bp, Homo sapiens
taatctcacctagggaaagatttcccttagagacattagtgttttggatagaattttagtcagcttctctgtttcatttaatgttctctaatcttatgggraacattagaaatcttgtggaaaaatgagctcattttatctctctggtctaaaggccttcacttctttgaagctaccagccaccagtaaaggctgctaagt

SEQ ID NO: 158265 - DNA, 201 bp, Homo sapiens
tgagactagcttatttatttatttatttatttatttatttagagacagagttatgctcttgtcgcccagactgggatgcagtgacgtgatcccagctcacygcaacctctgcctcccgggttcaagcgattctcctgcctcagcctcctgagtagctaggattacaggtgcacaccactatgcccagctaacttttgtatt

SEQ ID NO: 158266 - DNA, 201 bp, Homo sapiens
tttcatttaatgttctctaatcttatggggaacattagaaatcttgtggaaaaatgagctcattttatctctctggtctaaaggccttcacttctttgaakctaccagccaccagtaaaggctgctaagtccaccagtacaaaaacaaaagatggtggtgcaaacttcttggatgggcagttgagctacacgtgccttgaa

SEQ ID NO: 158267 - DNA, 201 bp, Homo sapiens
gctcaagcgatcttcccaactcagcctcctgagtagctgagactagcttatttatttatttatttatttatttatttagagacagagttatgctcttgtcrcccagactgggatgcagtgacgtgatcccagctcactgcaacctctgcctcccgggttcaagcgattctcctgcctcagcctcctgagtagctaggatta

SEQ ID NO: 158268 - DNA, 201 bp, Homo sapiens
aaacttcttggatgggcagttgagctacacgtgccttgaaaataagaaacggattgcctagaacctaacacagtctgcttacaaacttgattcattcaacraatatatattgagcacccccctatatgtcaggccttgatgggtttatatattcacagtggtgagtgaaatatgtatggtctttgttcttttgtagtttat

SEQ ID NO: 158269 - DNA, 201 bp, Homo sapiens
tggagttcagtggcacattaatagcccactacagcttcaatatgctgtgctcaagcgatcttcccaactcagcctcctgagtagctgagactagcttatttatttatttatttatttatttatttagagacagagttatgctcttgtcgcccagactgggatgcagtgacgtgatcccagctcactgcaacctctgcctcc

SEQ ID NO: 158270 - DNA, 201 bp, Homo sapiens
ctggagttcagtggcacattaatagcccactacagcttcaatatgctgtgctcaagcgatcttcccaactcagcctcctgagtagctgagactagcttatttatttatttatttatttatttatttagagacagagttatgctcttgtcgcccagactgggatgcagtgacgtgatcccagctcactgcaacctctgcctc

SEQ ID NO: 158271 - DNA, 201 bp, Homo sapiens
attctgtcttcccttctttcccatgtaaacccctcagcttagcttcctgcactctgtcccacaaactttgattcctcctttccctgtcattagcagcagcrtcggtggtctcttccctttcaactccaggtatccagcttttaggtcggatttctggaacatatcctcttaaattgttaagcacttatgactgaaatattt

SEQ ID NO: 158272 - DNA, 201 bp, Homo sapiens
gctggagttcagtggcacattaatagcccactacagcttcaatatgctgtgctcaagcgatcttcccaactcagcctcctgagtagctgagactagcttatttatttatttatttatttatttatttagagacagagttatgctcttgtcgcccagactgggatgcagtgacgtgatcccagctcactgcaacctctgcct

SEQ ID NO: 158273 - DNA, 201 bp, Homo sapiens
ctgtgtatatttggggtggtcttgaaggacagtagagggcaaatctcaatttgtaggcagaattccaagcactgtcttttatcatgtactttgacttgagrgaaacatgatctgaggtgaggatctgtaaccgtaaccagtcactggctagatagtcagagatggagaaaagcaacatggaagattagtgtaaaagttttg

SEQ ID NO: 158274 - DNA, 201 bp, Homo sapiens
aggctggagttcagtggcacattaatagcccactacagcttcaatatgctgtgctcaagcgatcttcccaactcagcctcctgagtagctgagactagcttatttatttatttatttatttatttatttagagacagagttatgctcttgtcgcccagactgggatgcagtgacgtgatcccagctcactgcaacctctgc

SEQ ID NO: 158275 - DNA, 201 bp, Homo sapiens
cacagctcactccagcctcaacctcctgggcttaagccatcctcctgcctcagcctcccaagtagctgggactacaggggtgcatcaccacaacctgctggtttttttttaggagataggggtctcacagtgttgcccaggctaaaattttatttttaattgacaaataataattgtatatatttgtggggtacaatatga

SEQ ID NO: 158276 - DNA, 201 bp, Homo sapiens
ttctcctgctttcagaaagaaaaaggccatattattcttgtgcctgctgtttttctttaccttttttttttttttttttttttttgagacaatgtcctgcyctgtcacccaggctggagtgcagtggtacagtctgcagcctcgacctcctgggctcaaatgatcctcctatctcagcctcccaagtaggtgggattacag

SEQ ID NO: 158277 - DNA, 201 bp, Homo sapiens
ttatttttaattgacaaataataattgtatatatttgtggggtacaatatgatgttttgatacatgtttacattgtggaatgattaaatcaagccaattartaaatcaattacctcacatacttatcatttttttgtggtaaaaacacttaaaattattttagcaatttccaaatatacagtgaattattatttattacag

SEQ ID NO: 158278 - DNA, 201 bp, Homo sapiens
gagataggggtctcacagtgttgcccaggctaaaattttatttttaattgacaaataataattgtatatatttgtggggtacaatatgatgttttgatacrtgtttacattgtggaatgattaaatcaagccaattagtaaatcaattacctcacatacttatcatttttttgtggtaaaaacacttaaaattattttagc

SEQ ID NO: 158279 - DNA, 201 bp, Homo sapiens
ttgacttgggaaggacccactgccacacttactcatgtggctgtagacagacctcagaagatttgcttcccagctcattcagtagacctctgcacaggccrcctcttgacatggcgtctggcttccccagaccaaggtggaaggcacagtctttttaaacctcatctaggaagtgatatcccatacttcagttgtctattt

SEQ ID NO: 158280 - DNA, 201 bp, Homo sapiens
gtgcatcaccacaacctgctggtttttttttaggagataggggtctcacagtgttgcccaggctaaaattttatttttaattgacaaataataattgtatrtatttgtggggtacaatatgatgttttgatacatgtttacattgtggaatgattaaatcaagccaattagtaaatcaattacctcacatacttatcattt

SEQ ID NO: 158281 - DNA, 201 bp, Homo sapiens
aactgctacgtagtacctggacggcctgcccctcaatcttcaagggggtatgtgtcttttggccagctctcttcctgcttctgctgtcttgctgacccacrctgctggcccaagcttgggactgggcctgagaagggaggagttattcatctcttcaagctttcaggcctcagggagaatctttcagtaagccatggtaca

SEQ ID NO: 158282 - DNA, 201 bp, Homo sapiens
tcagcatgttcattatagaaaattcaaaaaataacaaaagaaataagaatagcctgttatcccaccacttgtagaaaccactgctattaatattttgatayacatttgaccttcagtatctgtgggttctgcatccatggattaaaccaacattagatggaaattatatcagaaaaaagttcacaaagttccaaaaagcaa

SEQ ID NO: 158283 - DNA, 201 bp, Homo sapiens
gtagatgttgtaagatgaaaggttcttgtatcggctcgaaccctgagagtgcatcagcagacagcatggcagtgtggagcaacacactgttttaatgagcrcctgggtgcaggtgggctgatgcctaaaatggcgttagcaccaaatgaggatggggcaggggttttatagtctcctgtaaacaggaagtgtctcagtctg

SEQ ID NO: 158284 - DNA, 201 bp, Homo sapiens
tctgttctgttccattggtctacctagctacttttataccggtagcatagtgttttggtaactgtagcctcgtagtataatttgaagttgggtaatgtgawgtctctagatttgttctttttgcttagtattgctttggctgtgtgggctcatttttggttccatatgaattttagaattgttttttctagttctgtgaag

SEQ ID NO: 158285 - DNA, 201 bp, Homo sapiens
tgtgcataaattatatgcaaatgctacatttgcatatccacaaatgatcatttgtggattttggcatccacagggtgtcctggaatcaatcccccatagayactagggacaactgtttattcttatctcctcgatttctatgcatatatattcttttgtttttgttattaatgtaattgagctttttgaagaagtagcctg

SEQ ID NO: 158286 - DNA, 201 bp, Homo sapiens
gaaacgaggtaggagaaatagctagggcccaaatcatgtagatgttgtaagatgaaaggttcttgtatcggctcgaaccctgagagtgcatcagcagacarcatggcagtgtggagcaacacactgttttaatgagcgcctgggtgcaggtgggctgatgcctaaaatggcgttagcaccaaatgaggatggggcaggggt

SEQ ID NO: 158287 - DNA, 201 bp, Homo sapiens
ggaagataatatgaagctgggcctcatgggaatcaagagcaatggaagggtcaggtggctgttttatacagcagttagagaaagcttctttgagaaagtgrcatttgaggaaagacgtagaagcggggagaaagcgttccaggcagagggaaccacaggtgcaaagcctgtatgtttgagatgtattgcttggtctgttca

SEQ ID NO: 158288 - DNA, 201 bp, Homo sapiens
catccacagggtgtcctggaatcaatcccccatagacactagggacaactgtttattcttatctcctcgatttctatgcatatatattcttttgtttttgktattaatgtaattgagctttttgaagaagtagcctgggtttgcaagttattttaacttttggcagcctggttttctcacttactatatttggataataat

SEQ ID NO: 158289 - DNA, 201 bp, Homo sapiens
ccatgtgctaggtgctgtgctaaacaaaaacatacgttatctaccttaatcttcaacatctccttgagataagcacttctgtgctcctccgcccccatttyacagatgaagaaggtaagtcattgaatagttaggaatatttctcaggaatgtggttgctttggatgcatgttggtctataagaagtaaacatcttatgta

SEQ ID NO: 158290 - DNA, 201 bp, Homo sapiens
aatataaaatcgacctctgattgggaaattgcctctggattgagaggaattagaaatgcctggtgagtgctgctgctcttagaactggcatgaccctgtgrgaaagggaatcctgaagctatgcctttggagttattagagacattggctctggtggagcgtaaagctttgaagttagggcagctcctgcacctgcctcat

SEQ ID NO: 158291 - DNA, 201 bp, Homo sapiens
agacagacctcagaagatttgcttcccagctcattcagtagacctctgcacaggccgcctcttgacatggcgtctggcttccccagaccaaggtggaaggmacagtctttttaaacctcatctaggaagtgatatcccatacttcagttgtctatttattagaagcaagtcaatcagtccagccacacttaaaatgagggt

SEQ ID NO: 158292 - DNA, 201 bp, Homo sapiens
agatcctatctctacaaaaatcttctgaaagtcagccaggcatggtggtggcatgctcttgtagtgttagctatgtaggaggctgaggtaggagtatcacrtgagcccaggagttcgaggctgcaatgagccatgatagtgctacttcattccagcctgggtgacagagtgagaccctgtctccaaaagaaagaaagaaag

SEQ ID NO: 158293 - DNA, 201 bp, Homo sapiens
caactcaaaaaggaaattaagaaaacaatcacatttaaaatagcatcaaaaagaataaaatatttaggaataacttaatcaagtaggcaaaagacttatayactgaaaactacaaaacagtgctgaaagaaattagatgcaaataaatggaaagacattcgtgtttgtggattggaagacttaatattgttaaaatcccat

SEQ ID NO: 158294 - DNA, 201 bp, Homo sapiens
agctcagaagtttgagatcagcctgggcagcatagtgagatcctatctctacaaaaatcttctgaaagtcagccaggcatggtggtggcatgctcttgtartgttagctatgtaggaggctgaggtaggagtatcacatgagcccaggagttcgaggctgcaatgagccatgatagtgctacttcattccagcctgggtga

SEQ ID NO: 158295 - DNA, 201 bp, Homo sapiens
ccagggccatttttctttgcagatttttaaaaagtcctaaaattcatacggaatctcaaaagaccctgaatagacaaaataatcttcagaaaaataaagcyggaggccttccacttcctgacttcaaacattgtacaaagatgcagtaatcaaaacagagtggtactggcataagaacagacatatagaccaacggagtag

SEQ ID NO: 158296 - DNA, 201 bp, Homo sapiens
gcatcattgctgaatcatatggtagctcaatttttagttttttgaggaacttcctaactgttctctataatggttgtactaacttacattcccaccaacgygtttgagggttcccttttctccgtatcctcccagcatttattattgcctgtcttttgtataaaagccattttaactgggatgagataatatctcattgta

SEQ ID NO: 158297 - DNA, 201 bp, Homo sapiens
aatttgtatgactttataatacgcatattttgaaatgaaattctaaatgctcacttgaattaccaaattttgcatgacgtatttcaaagcaaagtacttayatctgtttcatagattgctgaaataataccatacagttgatatacaattaaactctggagctcctttccagtggtctagaaaatttcacccaaaaactag

SEQ ID NO: 158298 - DNA, 201 bp, Homo sapiens
attcattcaacgaatatatattgagcacccccctatatgtcaggccttgatgggtttatatattcacagtggtgagtgaaatatgtatggtctttgttctyttgtagtttataggcacttaatgaatactagtactaatactgtgttctaatttagtgtctttttttacagtaccttcattttcctatatgttttattctc

SEQ ID NO: 158299 - DNA, 201 bp, Homo sapiens
taggttaattgggtggagaagtgactaagaagataaaagttaatttaacaacgtttgtgcagatttcccttgacctcaatttcctgtccttgatgtagaaygatagtttccttctggtatagggaggatatctttgatgtgggaattttttctcctgctttcagaaagaaaaaggccatattattcttgtgcctgctgttt

SEQ ID NO: 158300 - DNA, 201 bp, Homo sapiens
gattgctgttgcactctttttagtgggaaataacaacctgtggttccgttaaggtctgaggagctgtggggtttttttgtttttttttttccacattctaygtctctttatttttttccttcaacttttattctaagctccagggtacatgtgcaggatgtgcaggttgacataggtaaacatgtgccatgatggtttgct

SEQ ID NO: 158301 - DNA, 201 bp, Homo sapiens
aaaatttccatctgttaagaaccattggcctaatgcttggcacataataagtgctcaataaatattagcactgtgactgctattattatttttacagtttkagtatcccttacccaaaatgcttgggaccacaagtatttcagattttaggtttttttggattttggaatatttgcattatacgtcccagtttagcatctc

SEQ ID NO: 158302 - DNA, 201 bp, Homo sapiens
ttctagttctgtgaagaatgatgatggtattttgatggaaattacattgaatctgtagattgctttgggccatatagtcgttttcacaatattgattatgygcatccatgagcatgggatatgtttccatttgtttgtgtcatctatgatttctttcagcagtgttttttagttttccttgtagagatctttcacttccat

SEQ ID NO: 158303 - DNA, 201 bp, Homo sapiens
tcagcctcccaaagtgctggaattacagatgtgagtcactgtgcctggccacagcatttttgtttgtttttgttgttgttattttgagacagggtctcactgtcgcctaggctggaggcagtggtgtgatcttgactccctgcagccgtgacctcctgggttctagccttcctcctgcctcagcctcctatgtagctggga

SEQ ID NO: 158304 - DNA, 201 bp, Homo sapiens
ttggttttaggtttagaaccatcaaccttctccaaaggggcattctatatgttaggaggactatttgagaccaaggtgtcaacatggaattcaggctttargagctgaggtgtcctggtttttgtttaactgagagattgtttcttgggtggaattggtcctgggaggctatggaaggcatgtgagctgtcttattcagat

SEQ ID NO: 158305 - DNA, 201 bp, Homo sapiens
tcccttcagcccaggggtttgaggttgcaaggaggtatgattgcaccactgtactccagcgtgggtgacagagtgaaaccctgtctctgaataaaaaaagytctttggttcttaccgtgagaaagcagcactgattaggagctttctcatgctacatcatttggggattgctgttgcactctttttagtgggaaataacaa

SEQ ID NO: 158306 - DNA, 201 bp, Homo sapiens
aaatgcagattaccttttacttattggtttaaagtccatcataggaatgaatggattcagtgttccctattggcaggtaagagcagtaaggaaggggtagraggaattaatacttattatgtgcttatatggctgatgctgaactaggtgaatgtatgtgatgtttaattttcacagcaactctaagatgtaggtatagtc

SEQ ID NO: 158307 - DNA, 201 bp, Homo sapiens
tttcccaaggtctcctccatctgcctgcacattcccctgcctcactggattatagtttacttttagttagctattcttaagatttatttctctaaatgaarcagtaaatgttgattgaaatctgtatttttaaaaagagatgaggtcatgtttaagtaccgttagtcaatttttgttgattatatgtttacctgggaaaac

SEQ ID NO: 158308 - DNA, 201 bp, Homo sapiens
atctctaatctgaaatctgaaatgctctaatgagcatttcttttgagtgtcataacagcacacaaaaaaagtttccaattttggagcttttggaattggaratacccaacctgtaccttcttgaattgttgaattttctcccatgtgcatttgttacttttataataataaaaaaatactctcttgattgagatgaaaagt

SEQ ID NO: 158309 - DNA, 201 bp, Homo sapiens
cacaagtatttcagattttaggtttttttggattttggaatatttgcattatacgtcccagtttagcatctctaatctgaaatctgaaatgctctaatgarcatttcttttgagtgtcataacagcacacaaaaaaagtttccaattttggagcttttggaattggagatacccaacctgtaccttcttgaattgttgaat

SEQ ID NO: 158310 - DNA, 201 bp, Homo sapiens
cctgacctcaggtgatctgtccacctcggcctcccagagtgctgggattacaggtgtgagccactgtgcctggcctatttttatttttagtagaagtgagstcttgctatgttgcacagtctgatctggtttccctgatgattagtgacaatgagcatttttttcatatagctgttgaccatttgtatgtcttctgagaaa

SEQ ID NO: 158311 - DNA, 201 bp, Homo sapiens
gtctttgcacttgctcttccttctgcctagaatattaacatctttgtgttgctcctttttttggtatcattcatatcttactttacaagtatcacctcctcaacagaatgttctgtgtccatctaatctaaagtagcttcctcaggaacttcctattattgtttatttgtatgaatttccttgttttattttattcatagt

SEQ ID NO: 158312 - DNA, 201 bp, Homo sapiens
ggtctttgcacttgctcttccttctgcctagaatattaacatctttgtgttgctcctttttttggtatcattcatatcttactttacaagtatcacctcctcaacagaatgttctgtgtccatctaatctaaagtagcttcctcaggaacttcctattattgtttatttgtatgaatttccttgttttattttattcatag

SEQ ID NO: 158313 - DNA, 201 bp, Homo sapiens
aggtctttgcacttgctcttccttctgcctagaatattaacatctttgtgttgctcctttttttggtatcattcatatcttactttacaagtatcacctcctcaacagaatgttctgtgtccatctaatctaaagtagcttcctcaggaacttcctattattgtttatttgtatgaatttccttgttttattttattcata

SEQ ID NO: 158314 - DNA, 201 bp, Homo sapiens
ggttatacccagcagcatcattgctgaatcatatggtagctcaatttttagttttttgaggaacttcctaactgttctctataatggttgtactaacttayattcccaccaacgtgtttgagggttcccttttctccgtatcctcccagcatttattattgcctgtcttttgtataaaagccattttaactgggatgagat

SEQ ID NO: 158315 - DNA, 201 bp, Homo sapiens
caatgctgcaacaaacatcggagtgcaaaagtctcttcgatatactgatttcctttcatttaggttatacccagcagcatcattgctgaatcatatggtakctcaatttttagttttttgaggaacttcctaactgttctctataatggttgtactaacttacattcccaccaacgtgtttgagggttcccttttctccgt

SEQ ID NO: 158316 - DNA, 201 bp, Homo sapiens
atgatctccagttccatccatgttgttactaatgacaggatgttgttcttttttatggctgaatagtaccccattgtatttaagtatcacattttctttaytcattcatctgttgacagacacttaggttgcttccaaattttggctgttgtgaacaatgctgcaacaaacatcggagtgcaaaagtctcttcgatatact

SEQ ID NO: 158317 - DNA, 201 bp, Homo sapiens
tctctctcttctctttttttagaaatgggatcccccgctgtccaggcacgatcatggctttctgcagccttgaactcctgggctcatgtgatccctgcctyagcctcccaagtagctaggactacaggtgcctgccaccatgcctggctaatttttgcattttttgtagacatggggtctcatgttgcccaggctggtctc

SEQ ID NO: 158318 - DNA, 201 bp, Homo sapiens
ttactatatttggataataatatttatcacgagttgttataaggatcaaataggttaatatttgtaaagtgtatagattagtgcccatgacttataaatgytatctataagtattaaataaattaggcaaataacccgcttttaaaacatatatggtgaacattttctcaagtcataaaatattctctgtctctctctctc

SEQ ID NO: 158319 - DNA, 201 bp, Homo sapiens
tggcagataatattttcttcaaagtaagtccttcctaatgtttattttctgctccagaaaaatcagaatattaggagactgtgttctaagaaactataaamtgcattaattgggtagtttctcttatgttacagaatgttacttttctttataccctttctctgttaaaatgtgttcattataagcagaagacaagattgt

SEQ ID NO: 158320 - DNA, 201 bp, Homo sapiens
tcaatggcagataatattttcttcaaagtaagtccttcctaatgtttattttctgctccagaaaaatcagaatattaggagactgtgttctaagaaactayaaactgcattaattgggtagtttctcttatgttacagaatgttacttttctttataccctttctctgttaaaatgtgttcattataagcagaagacaaga

SEQ ID NO: 158321 - DNA, 201 bp, Homo sapiens
ctccctacccggcctcccaaagtgctgggattacaacagtgagccaccgcgcccaccagagccaattatttttagatgaggaaactgaaattcccaaaggrggaatccccgtgtgagaaagcctcgtgtaggtgagctttccagcatatgcccgccttctagatttaacctctgaaaactaaattttaaggtacctttgct

SEQ ID NO: 158322 - DNA, 201 bp, Homo sapiens
ggtttttggggcaggggcggaggggtgttttttttttttgacacaaggtcttgctctgtcacctaggccaagtgtagtgccgtgatcataactcactgcarcctcaaaatcctgggctcaagctatccttctgcctcagcttcctgagtagctgggagtataggtgcatgccaccacacccagctaatgtttttgtttttg

SEQ ID NO: 158323 - DNA, 201 bp, Homo sapiens
atcaggctttcttccctcccctctgcttttaaaatcacttgatggacatttatctccatcagccattcttcttatctacctccagacagatggctctgtaygaatcactgggacaagaacatctgcgtattacctaatgaacacttaactattgtgctcagttgtgtttgttcactgataatccaccaggctggatacttt

SEQ ID NO: 158324 - DNA, 201 bp, Homo sapiens
ttgtcaaaaatactgaaagagtaagaagctggttcaccttagttgaatgctgtagaaggaaatttgtgtttgattggttaaactagtttgacttcagtggwccatacttagccaactccagtacttggaaatggctaaaattaaaaagcctaacaatacaaagtgttagcaaggatatgtagcaactggaactcaaacgtt

SEQ ID NO: 158325 - DNA, 201 bp, Homo sapiens
ctgatgaccttacagaatttattgaaagcataaggaagctattcagttttttgtgttttttaaaaaagaatttacctgtgtgattttctttttttttttttcttaaaaatcctacatatctctgttcccaggctatctatagctttagacattttatttctgtcatgatgaacagtctttctagcataagcagtgttcttt

SEQ ID NO: 158326 - DNA, 201 bp, Homo sapiens
tggttattccaggaagcctgtaaagaacaaccttgccaggtaggaaatttgcctcctatgattaatgacttcagctagatttttaaaatagtgtcagttcwgtagctatccttttctacgtctagatagctgacatttgattctcctctaagaaaaataaagctttctttttattttctaattgctgtttaagtatgtcat

SEQ ID NO: 158327 - DNA, 201 bp, Homo sapiens
agctgaaaaattcctgtcacctactgactttgtagcagtcctaacttcatagcacgaggcattactcaggtgtttatggtgatgctgggttaacctagtgyactgccagtcatataaacgtatagcatataaaattatgtacactacatgatacttgataataaccaactttgttactggtttatatatttactatacttt

SEQ ID NO: 158328 - DNA, 201 bp, Homo sapiens
acagtgacttggcaggatcaagtcaaggccctacttcctggagtctttccgtgagaaagggaaagtctttccagtggggaaagggttaaaaaggtaggtgrggatttctctataaaaagctttaaataccaggttaaggagcttaatattagtacgtgcaggcagtgtagaatatttaatattttttgaggaagggaacac

SEQ ID NO: 158329 - DNA, 201 bp, Homo sapiens
atgtgtgaattacagaagtaatagattttaatgctaactataaaagtctcatcagtgtagctctccatttcctctctgcctactagcagatggaaaaaaaatgatatttaatctgcatttctgattatgagtaagtttgaacataattttaatgtgtttattgcccatttctcttttttttctttttttttttcttttttt

SEQ ID NO: 158330 - DNA, 201 bp, Homo sapiens
gtgggaagattgagcccaggaggtcacggatgcaataagccttgattgtgccactgtactccagaaacaaagtgagaccctgtctcaaaaaataaaaaaaataaataaaaattcaaatcaagtatcttctaatgccaccattatactcttcagtgtatttgtacaggacgaccgtacttgaagctattagctgagttcgag

SEQ ID NO: 158331 - DNA, 201 bp, Homo sapiens
ctagttttaggttcattgaggtcttgattatattcacattcacatattatccgattccatgaatatgaattggtcagtgtctcaaaacacactagtgtccrcaggattgattactgaggaacttaatttcttagctatgttgaataattatttccatagcagggaggtagggataacgttggtggagtcttacaggtgatt

SEQ ID NO: 158332 - DNA, 201 bp, Homo sapiens
gaaaaaaaatgatatttaatctgcatttctgattatgagtaagtttgaacataattttaatgtgtttattgcccatttctcttttttttctttttttttttctttttttttccaagcagggtctcgcactgtcgcccgggctggagtgcaatggtgcaatctcagctcactgcaacctctgcctcctgggttcacatggtt

SEQ ID NO: 158333 - DNA, 201 bp, Homo sapiens
atgtgctgtagatgaagggagaggaatagacgctcttctccttggatggcccctgaaacgcttccataaatgaaatttgcagaatagtttattcttacctrtcctttcttgagtttccattcattcaaggaacgatttagagttctccaatttctttttgtgttgcctctctgtgtcttaatttctctttgatttggggga

SEQ ID NO: 158334 - DNA, 201 bp, Homo sapiens
ataggagagaaatggcaggataagtaagaaaaatatacagtatgtgagaaggctttttgagaatttgtattaacctggtatttacttttgtgagacaaacagattcaaggattttggactcattgccaccttaactccattatttcctgatgtaaaacagggacagttgaaatccttaacagatagaaagccagttcagtg

SEQ ID NO: 158335 - DNA, 201 bp, Homo sapiens
tataggagagaaatggcaggataagtaagaaaaatatacagtatgtgagaaggctttttgagaatttgtattaacctggtatttacttttgtgagacaaacagattcaaggattttggactcattgccaccttaactccattatttcctgatgtaaaacagggacagttgaaatccttaacagatagaaagccagttcagt

SEQ ID NO: 158336 - DNA, 201 bp, Homo sapiens
ttataggagagaaatggcaggataagtaagaaaaatatacagtatgtgagaaggctttttgagaatttgtattaacctggtatttacttttgtgagacaaacagattcaaggattttggactcattgccaccttaactccattatttcctgatgtaaaacagggacagttgaaatccttaacagatagaaagccagttcag

SEQ ID NO: 158337 - DNA, 201 bp, Homo sapiens
gttataggagagaaatggcaggataagtaagaaaaatatacagtatgtgagaaggctttttgagaatttgtattaacctggtatttacttttgtgagacaaacagattcaaggattttggactcattgccaccttaactccattatttcctgatgtaaaacagggacagttgaaatccttaacagatagaaagccagttca

SEQ ID NO: 158338 - DNA, 201 bp, Homo sapiens
aggccgaggcgggcggatcacaaggtcaggagatcgagaccatcttggctaacacggtgaaaccccgtctctactaaaaatacaaaaaattagctgggcgyggtggcgggcgcctgtagtcccagctactcgggaggctgaggcaggagaatggcgtgaacctgggaggcggagcttgcagtgagccgagattgcgccact

SEQ ID NO: 158339 - DNA, 201 bp, Homo sapiens
tttttgttttgcgttttagttctgctcaggttcttatgctaaatggaaataatatttttagaaatgtttaaaataatctggagtaaatgtgtgaatcttayatattatgaaaacaccaatatatgaatgtccaccaaataagtaagcattctaagtagtttcctcctcttttgtaagatcactttggatgtattagttgag

SEQ ID NO: 158340 - DNA, 201 bp, Homo sapiens
gtatactatcctaaccaaatcagtcttaatcttagcccttatcatctgggctgggcgcggtggctcacgcctgtaatcccagcactttgggaggccgaggygggcggatcacaaggtcaggagatcgagaccatcttggctaacacggtgaaaccccgtctctactaaaaatacaaaaaattagctgggcgtggtggcggg

SEQ ID NO: 158341 - DNA, 201 bp, Homo sapiens
tgtagatgattcaagctaaggaatactttaaactggtattttagaataagctcaattaaaggtagatgtattttactgcctgataaggactaggataagawatttaaagtgcaatatgctcttggctgtttctagtatagaggacaaatttttgtaagataaagaggagggaaagtccatgatttcctgaaatattagtat

SEQ ID NO: 158342 - DNA, 201 bp, Homo sapiens
agctggtatttagcattttacagtcagaatatatgaaagcacctgttttctgtcagcactagatgttacaattcttaatattttccttgagtgaatatgcrtgtgtgaattacagaagtaatagattttaatgctaactataaaagtctcatcagtgtagctctccatttcctctctgcctactagcagatggaaaaaaaa

SEQ ID NO: 158343 - DNA, 201 bp, Homo sapiens
ggtaggaaatttgcctcctatgattaatgacttcagctagatttttaaaatagtgtcagttctgtagctatccttttctacgtctagatagctgacatttkattctcctctaagaaaaataaagctttctttttattttctaattgctgtttaagtatgtcattgttgccttattgggggtgagggtgatagataattgta

SEQ ID NO: 158344 - DNA, 201 bp, Homo sapiens
acaaagttgtagatacattttgtttctctgttataaaaataacatactcattttaggaaatttgaagggaaaaagggaaaggtcaccaataacctatgacscaagataaactttgttaatattttggtatattttcttttgggctttccttttcctgagcatattgattttatatagttgaggttgcctttcattatataa

SEQ ID NO: 158345 - DNA, 201 bp, Homo sapiens
ccaatatttagaaattaggtagaggaagcaataagccctcagtgagatatgacatgtctaaaacttggactcttcatcttctgccacaaacctattttcayctgcagccttgcccccattgctgttgatggcaacttcactcttccattactgaggccaaaaaccttggcagtagtgtgtatagtagtaagattggaaaca

SEQ ID NO: 158346 - DNA, 201 bp, Homo sapiens
caaagtgctgggattacaggtgtgagccacagtgcccagccaggaagtatcttcaatctaaagatttcgccaaactccaagcaacttttttttttttttttaaacatagctacctattgactgcctccaaataatttcctttaagtgcccaagatgtggcttcaaacattaaaatctcagactattaatctactgtctcag

SEQ ID NO: 158347 - DNA, 201 bp, Homo sapiens
cttgtagcctatctagaacacttaacattactgtgtccaagttgtctttgtaagtcacaaataatttgtatgcataaaatatttctgtccacttctgcagygttaaataccataccttgagacctagaaagacttttagattaatgtaatattttatggtagttttataattgtattcttctttacttgatctttttaaat

SEQ ID NO: 158348 - DNA, 201 bp, Homo sapiens
cattgggaaaaatgtatactcattctgaaataattggctcaaaaagtgaactttgggaacataacctgttttagcctgtatgatgttaaattacacagtaygaataattctgaattcttttaaaaattgaacattaaatatatgctttttgctctccagcatggtgcctgtgtaaatgcaatggacttgtggcaattcact

SEQ ID NO: 158349 - DNA, 201 bp, Homo sapiens
agaaaaatgactctgtaaattgtttccttttcagtccgcctgccactgcccccgaccatacacagatatacacaagacaggaatttttcttttttttttttgagatggagtctagttctgtctcccaggctggagtgcagcgtcacgatctcagctcactgcaacccccaccttccgggttcgaccgattctcctgtctca

SEQ ID NO: 158350 - DNA, 201 bp, Homo sapiens
tgaaagtgtcttgtatcttgatttgggtgatggtatcacagatatatacatttgtcagaattcatcaaagttgtatgtttcactgtatgtcagctataccrcaagaggagcattcattcttggaagagatgcaggttaaatctaaagcttcgttcttaactgttcttaaaagtagaaaagttaagtagacccttgttggta

SEQ ID NO: 158351 - DNA, 201 bp, Homo sapiens
ttgtatgtgattgcagacctttgacttgcagcctctgagacccatgtacctgagttcaagaagtggtatgtaacacccatgaaggcagagactttggtagraaggttttcataggaaagatacaagcaaatcagtcaatataattttgggaatctacaaagctaattgataacacaaaaagcttccaacttgaggcaaggg

SEQ ID NO: 158352 - DNA, 201 bp, Homo sapiens
agatagtttctcaagttattgaaatgtccactgtaatttttaatcagctactcataagttgtgatgttggggagaaagagtttttcttttcatttccagartaagtttgaaaatgtggaagtaggtacgtaactagtttcattttaagaaagtaaagtgtgacaaaataatatttcagactgtaacgggtattttctttta

SEQ ID NO: 158353 - DNA, 201 bp, Homo sapiens
atgttggccaggctgacctcaagtgatcgacccacctcggcctcccaaagtgctgggattacaggcataagccactgcacctggccccattctagcagatytgattaaaatgattatcttttctacccacctcctctccaaaaaactttcagttttaaggaacaaatacattgctgaatattttccaggaaatacaaacaa

SEQ ID NO: 158354 - DNA, 201 bp, Homo sapiens
ctgtcccaacactttctctaattcaaaagatatttacttcctaagtacacgacaaagtcttcatttcaaaccattcactcagtttccatggtaacattgcrggcttccttggctaccataagtcgcattagttgactgtggaatttctcaatcttctttacatcttgagcttggtctgttttatacaccaaacaaactaaa

SEQ ID NO: 158355 - DNA, 201 bp, Homo sapiens
aaggaattctagcaagagttttgtcactgtatcataaggttgtgatttacatatttaagttttatactttgaacatctgaaaatgtatacatactaaataygcagaactctattgtagagtgagaaacatttgaactttgagctttcagtcacttattttgtattctttctttgaggttagcagtagtagtaccacccaag

SEQ ID NO: 158356 - DNA, 201 bp, Homo sapiens
ttagttgactgtggaatttctcaatcttctttacatcttgagcttggtctgttttatacaccaaacaaactaaatcatctgttactttaacacacaagttmccatcagaatgcctatatttgagaaccacacgtgccttcatagggtcagcgaggtaaagcttctcggcagcgcggctgaactcctcccaggtctggtact

SEQ ID NO: 158357 - DNA, 201 bp, Homo sapiens
cagataaaggcatggtggaagggaacagagagtgttaagaggataatgagcacagtgacttggcaggatcaagtcaaggccctacttcctggagtctttcygtgagaaagggaaagtctttccagtggggaaagggttaaaaaggtaggtggggatttctctataaaaagctttaaataccaggttaaggagcttaatatt

SEQ ID NO: 158358 - DNA, 201 bp, Homo sapiens
taatgtgtttattgcccatttctcttttttttctttttttttttctttttttttccaagcagggtctcgcactgtcgcccgggctggagtgcaatggtgcratctcagctcactgcaacctctgcctcctgggttcacatggttctcctgcctcagcctcccaagtagctgggattacaggtgcacaccaccacacccggc

SEQ ID NO: 158359 - DNA, 201 bp, Homo sapiens
gactttgtagcagtcctaacttcatagcacgaggcattactcaggtgtttatggtgatgctgggttaacctagtgtactgccagtcatataaacgtatagyatataaaattatgtacactacatgatacttgataataaccaactttgttactggtttatatatttactatactttttattgtgattttagagtatactca

SEQ ID NO: 158360 - DNA, 201 bp, Homo sapiens
aggtaaagcttctcggcagcgcggctgaactcctcccaggtctggtactgcggcatcgtggcctagagtggaaaagtaaagagaagcaaggcctcagaacycggcccaacaaactacctacgtccgggagtcgccaaccgacgcgagtcctgcaatgccattctttcttagctttacttctcagactccttttcatatact

SEQ ID NO: 158361 - DNA, 201 bp, Homo sapiens
cctatcaaagaacaggagctgagcttcctttctgcacatatttgcctgtcttcctccagctccttatttagagagtatactggaatagcttcataataatrcaaataataatacagcacagagcaaaacacaagactttctcttttttttttttttttttgagacggagtcttgcactgtcgcctaggctggagtgcagtg

SEQ ID NO: 158362 - DNA, 201 bp, Homo sapiens
gcctcaggcaggttctttaggacgtgttccagaagaagacattattataggagatgacagctccctgtatgttattgcccctaaagaccttccagtgggasaagatatggaggtggaagacagtgatattgatgatcttgagcctatgtaggcctagctaatatgtgtgtctatatcttagtttttaacagaaaagttgta

SEQ ID NO: 158363 - DNA, 201 bp, Homo sapiens
tggggaaactagtgaaaaaatgacatctataatttagttaataagttttgacaaatgtgctatggttatataaaatggtaacattaggggaaagtgggtgragggtacataggaactctgtactttcatcctttctaaatatctaaattatcacactatgaaatgtttttaaaattgatagtaagcggccaggtgcagtgg

SEQ ID NO: 158364 - DNA, 201 bp, Homo sapiens
attatcttgatcattgacatttggaaaacacacaaattcattgctgaggtaaacaatctattatgggacagaatatacattcaataggtggtaaactgtgkatttctcattctagggtgatttaaaattacctgaggctatgcaagtttctgtcataattcttcctcatatttacaaagaagaaagagattaaatgttgaa

SEQ ID NO: 158365 - DNA, 201 bp, Homo sapiens
gaaccaggaagttccagtgacttgttccagttcagatagctaattaatgacagaaccacagttagatttctgtttgctctcttaatttaatacttttgcamcattccaatggcttgcttatagagcaggccatctttagtcatctcctttatgttcctttatattgcttacatcacattttataatcattatacacattta

SEQ ID NO: 158366 - DNA, 201 bp, Homo sapiens
ccaacctgatgttagtcaaccaacagggattctgtacttacacctgatttgcaaagtggaactggtagctgcctgtgatgatcttctaacaatctatcatgctgacttaacagccttacctatcattcaatgcatcaagtcaatagatgactagtaccatactgatctttcagtattgataaatatcatcttgtatatgtt

SEQ ID NO: 158367 - DNA, 201 bp, Homo sapiens
acagttgaagagtcttgtgctactaacctactatttatttatttatttttgagatggagttctgcttttgtcgcccagactggagtgcagtggcgcgatcycggctcactgcaacctctgcctcaagggtttaagcaatgctcctgcctcagcctcccgagtagctgaaattgcaggcacccaccaccatgcccggctaat

SEQ ID NO: 158368 - DNA, 201 bp, Homo sapiens
attatcttctgttaatagaaagctggtatttagcattttacagtcagaatatatgaaagcacctgttttctgtcagcactagatgttacaattcttaatawtttccttgagtgaatatgcatgtgtgaattacagaagtaatagattttaatgctaactataaaagtctcatcagtgtagctctccatttcctctctgcct

SEQ ID NO: 158369 - DNA, 201 bp, Homo sapiens
ggtagccttcatgacttggtaaatttattctctagatttgagcaaaaatacttgctttggcattggataataggcctcataaaagaattgagacttaaaaktagtaaaaagtgttaaatacatgattgtatggttttaaattttgcattgcgggctaatttcaattttttctgctttgttaaggttaatgctctggataat

SEQ ID NO: 158370 - DNA, 201 bp, Homo sapiens
tgtaggttgaattacttctttcagagtaactacaataggactaaaatctcttaccttttaaaattgatatttctgtaattcgttgtgcttctcagtcacartatcagaattagggttttgttcatgctttgccatatttaaattatattttgacaatatgtgttttggaagagatgttctcagttatgtcttatattttaa

SEQ ID NO: 158371 - DNA, 201 bp, Homo sapiens
tatttccatagcagggaggtagggataacgttggtggagtcttacaggtgattttttttttattgtgaaaaatttcaaagatataaccaagtagaaagaaytttgcagaaaatacctgcctaccacttagatactattactaacattttactctagtgttttattacatatctttccattttttcctccatccaccaatat

SEQ ID NO: 158372 - DNA, 201 bp, Homo sapiens
aagttgacagttgaagagtcttgtgctactaacctactatttatttatttatttttgagatggagttctgcttttgtcgcccagactggagtgcagtggcrcgatctcggctcactgcaacctctgcctcaagggtttaagcaatgctcctgcctcagcctcccgagtagctgaaattgcaggcacccaccaccatgcccg

SEQ ID NO: 158373 - DNA, 201 bp, Homo sapiens
cacgtcaacattttaaaattttcagatttgggatgtttgacctgtattaacctgtttgcttcactttttaaaatgaataatcctccattgtgatagtactrgcacaaattgctgggttttctcatatttttaaatatattttattaggtataatagcattttaaaacttgcttatggcagatgttgtctctgacacgtacc

SEQ ID NO: 158374 - DNA, 201 bp, Homo sapiens
aacatttggaattcattccacccatatgttagttgaccagatacaattaagttacaatgaagcaaaatgctgtagagaacatacaggggctttagagtcaracagactgggcctagaattccagctgcacgatttaagttgtacaatcttatgaactgcctaacctctaaaccttagttacctcatctatagatagaggta

SEQ ID NO: 158375 - DNA, 201 bp, Homo sapiens
gctgaagtcagggctaatgacagcaagagctgaccttcccctctgacattttcctacttggcttctgcaatgccattctttctctttttttttttttttttatattttatctaatattttatttactgatctctctgaaacatgccaaaattcatatagctaagggaacttaccatgctaaaatgttgttcaacatgacaa

SEQ ID NO: 158376 - DNA, 201 bp, Homo sapiens; identical to SEQ ID NO: 29629

SEQ ID NO: 158377 - DNA, 201 bp, Homo sapiens
aaaactgaatcttgactccagcagaacatttgaaagttgctatggataagaatgaaacatcaaacagattgcacttggacttaaagacaactgagtggtaytttcctaagacctagtattttactaaataagaatgaaaggctgactagaggtcatacctacagagggagttagctaatgtgagggtgtaagtagttacca

SEQ ID NO: 158378 - DNA, 201 bp, Homo sapiens
agacctagtattttactaaataagaatgaaaggctgactagaggtcatacctacagagggagttagctaatgtgagggtgtaagtagttaccaggatagtraagttaagcaaagtcaggagaaagcaagtagatagggattgagaatgcagattctgagcagtgctgagtcaattggcaacacttgcctaaatagtttggc

SEQ ID NO: 158379 - DNA, 201 bp, Homo sapiens
atgcttatccagtttgcagattaacatgaagctgggaaggataactaatattcaagttgatagaatcaaggctcaaaaccatctcaccaggctctaagctytgggtgaagccagtaagattaatggggctcagcaaggacacttaagttcacgaaataagtcgcacaagaaaaagatgggagaggagaaaatactttggtg

SEQ ID NO: 158380 - DNA, 201 bp, Homo sapiens
gtacctcctcttacctctgacaatcctggttttttgttttgtgtatttcatgattgtttaaaacaattttttgaaaaatcggggaataccttttaaagtaytcctgttcttttggggctagattgatgaagagaaaaggagcagtgagaaatatttcctctttcacagatattacttttacgctttctaccaattggagat

SEQ ID NO: 158381 - DNA, 201 bp, Homo sapiens
gggaataccttttaaagtattcctgttcttttggggctagattgatgaagagaaaaggagcagtgagaaatatttcctctttcacagatattacttttacrctttctaccaattggagatttgttcgctttaacctgttccagattttaaatgtaaatactaccaggaggtatgcttttttgatcaattgcacctttgttg

SEQ ID NO: 158382 - DNA, 201 bp, Homo sapiens
attaactatttcaattgtaaatttcctaaaaacaagaagattttattcaaatttcgccagtcgttccggatttttcttagctcttataaataattgaaatmttgtatttaacagcctgtccatagcaaagaagtatataactgtgttttgctctcagtgagagccaaaagtagttctagagcagtgttgtgaactgggagt

SEQ ID NO: 158383 - DNA, 201 bp, Homo sapiens
tcttctagataaatattatttaagaagtaattccttaggagaaaaatgactctgtaaattgtttccttttcagtccgcctgccactgcccccgaccatacrcagatatacacaagacaggaatttttcttttttttttttgagatggagtctagttctgtctcccaggctggagtgcagcgtcacgatctcagctcactgc

SEQ ID NO: 158384 - DNA, 201 bp, Homo sapiens
cacagatatacacaagacaggaatttttcttttttttttttgagatggagtctagttctgtctcccaggctggagtgcagcgtcacgatctcagctcactrcaacccccaccttccgggttcgaccgattctcctgtctcagcctcctaagtagctgggattacaggtgcgcactgccacgcccggcaaatttttgtattt

SEQ ID NO: 158385 - DNA, 201 bp, Homo sapiens
agaagaggtgacacaaacttggggagaaagttatcttgatgcccatcatagaaatgaaagaaatatgtggcattccttacaatcttagaactcttggagtrggggtaggagcttgcattgtagagtcctagctaaacaaggtaacacttattttatatttatagtatgttatgttactgttagtatgagtatgctactgaa

SEQ ID NO: 158386 - DNA, 201 bp, Homo sapiens
aatctaaagtcaagagccaaaggggctttgctgtgagctttgtgcctggattttgtgatatttcttctaccattgctgagaaaatttagacttcttcatgrgaagacttcttcatgaaaagacttctagaagtgtgcactgttattgtgactatcaatcagtgttcattttctccttcactagtccatgttattccatgct

SEQ ID NO: 158387 - DNA, 201 bp, Homo sapiens
gctgttccataattacaaaataaactacagtgtgtcctgagcagccatgactaccaactttatttaggcttctggttcctcataaagagatccttagaatrtggagatttacattgactctgatgatatgcctattcatgttctacctggccagtgagaacatgatcagaatataccctgcagagcattttttcttccaga

SEQ ID NO: 158388 - DNA, 201 bp, Homo sapiens
ggaggtcctgttttccttcccctctctccagagcatggagcaggtgtaggagcttccactgaaccttccacctctgctttgggcactgaagcagatgcctytcttgcctctaccactgaggacattgactagagcagtggaaagaaaggaggaaggaattctttttgagatgagaaggaaggggaatcttttctgcagact

SEQ ID NO: 158389 - DNA, 201 bp, Homo sapiens; identical to SEQ ID NO: 29628

SEQ ID NO: 158390 - DNA, 201 bp, Homo sapiens
agtactcctttcataagaataccgtgtgtgtgtgtgtgtgtgtgtgtgtgtgtgtaatttttttttttttttttttttttttgagacgaagtttcactctygttgcccaggctagggtgcaatggcgttatcttggctcactgtagcctcaaatatattctcttaaaagatgcatgttacagtttggttttttcccatttt

SEQ ID NO: 158391 - DNA, 201 bp, Homo sapiens
tgtatcgtaattaatgaaaggcagaagtggaaggatagaagagaagaggtataagaaagagaataagaatgtgaaagttgggccgggtgcggtggctcacrcctgtaatcccaacactttgggaggccaaggtgagtggatcacctgaggtcaggagtttgagaccagcctgaccaatatgttgaaaccctgtctctacta

SEQ ID NO: 158392 - DNA, 201 bp, Homo sapiens
gcagaggttgcagtgagccaagatcacaccactgcactccagcctcggcaacagagcaagactcggtctcaaaaaaaaaaaaaaaaagaacatatgaaaawtcaagttttagcatagattttagaaatttgtagaagggagccaggcacggtggctcatgcctgtaatcccagcactttgggaggctgaggcgggtggatc

SEQ ID NO: 158393 - DNA, 201 bp, Homo sapiens
aattgactgttttcttaattctccccaggactgtataaaccatcagcatttttttttccttttttcttttttggagatggagtctgggttggtcacccacrctggagtgtgatggcacgatctcaactcactgcaacgtctgcctcccaggttcaagcgattctcctgcttgaccctcccaagtagtagagacagggtttt

SEQ ID NO: 158394 - DNA, 201 bp, Homo sapiens
tgaaaagtaaaaatagtataacatgaaagttaatttttaatgaaatatgactttattttgaatgtagtttaaaattttgactacattaatgcattaaaaaatccagtaatatttaactgcctctgtattctttttataataattctttgtataaacattagtaacagtgatgttaaccttcaaagtagagtctcaatataa

SEQ ID NO: 158395 - DNA, 201 bp, Homo sapiens
acctatcattcaatgcatcaagtcaatagatgactagtaccatactgatctttcagtattgataaatatcatcttgtatatgttgcagatgcctcagtcargcatttgtcacagtctttattctgtaaaacactctccatatgctcttcataatccttaaagattattgcagttcagccacttctgtaagtgtttattagc

SEQ ID NO: 158396 - DNA, 201 bp, Homo sapiens
agttcttgaagtaagttatccttgagcactgtctattcagttctctctcaagcctgacacttttctagctgctatgggaaggtatatgaatatgccagccrtatctgggcttttctaagcagtctcagtttaaagtactctgtcagaatacatttactgatttttgttgttgttcagaaaataatgttactgtagatttgc

SEQ ID NO: 158397 - DNA, 201 bp, Homo sapiens
ccaggctggtctcgaactcctgacctcaggtgatccacccgcctggcctcccaacgtgctgggattacaggcgtgagccaccgtgcccggcctaagatagrtatattcttttgactctttaagcactctgatttattatctatgttgcttttcttccccaaactttcatacttttcataactacacttcctcctctgaacc

SEQ ID NO: 158398 - DNA, 201 bp, Homo sapiens
ctatgggaaagatacactcaccggagaaaagaagtttctgaagaaaaccacaaccatgccaatgaacgaatgctatttcatggtaagattcctccccaccractctaccactgtcttccacattaggatagtttttttgttcagatatgaaataataataagcctgtatattctttatgtcagtattttaagataaaccta

SEQ ID NO: 158399 - DNA, 201 bp, Homo sapiens
agtccagactcagcaggaaccattgaaagacattatataaatagggttggatgtagagtgatggtagaaaagtattatggaaaagataaaatagaataccygaatgtggttaatttgaaagtgcctttttgttttgcgttttagttctgctcaggttcttatgctaaatggaaataatatttttagaaatgtttaaaataa

SEQ ID NO: 158400 - DNA, 201 bp, Homo sapiens
attgtgtatgtgttgaggggtgggggacgctatttcaaatattcttaatttaaaacagattaatatggaactcagacaaatacattggggaaaaaggataytcttctctttctagtactttatacagaaaaaactcggcatgtctgatttggaggtgtttttgtaatagttttaagttaatgagaatggaagtgttttaat

SEQ ID NO: 158401 - DNA, 201 bp, Homo sapiens
atttgcaaacttctgctccaggtatatttaaatacttaactgtaaagagtatgaattacatagcatatgtttatggttttctaaataattctagtataaasttaaactagtaagcaatgggaagcaatgttacctaattctgtacctagattttagaataaatataataaacattttatattttaatccacaagtatgttt

SEQ ID NO: 158402 - DNA, 201 bp, Homo sapiens
tcccagggcttgcaacttcaggtcttacctgtttctccgacaagagtcttccccagagtaacccttcttactgttttgactcttgctgtagaaatatgtaygtaaaactgggcccagtggctcacacctgtcggtaatcccagcacttcgtgaggctgaggcgggtggatcacctgaggttaggagtttcagaccagcctg

SEQ ID NO: 158403 - DNA, 201 bp, Homo sapiens
accagtggatattttacaataacaagaatacagagatttatactttatttaaatgttcatgaaaagtaaaaatagtataacatgaaagttaatttttaatraaatatgactttattttgaatgtagtttaaaattttgactacattaatgcattaaaaaatccagtaatatttaactgcctctgtattctttttataataa

SEQ ID NO: 158404 - DNA, 201 bp, Homo sapiens
caatgcttatttttttatcctgattgactacaggtttctgaaagtccccaaatatattatctttttataaactttaatagtactctcttcatcttttccaraaaaatatattttaaaaatgttttgagtcatttagtgactgctgtcttactgatttcagttactcttcttaggaactttttcaacattatgtttttcttg

SEQ ID NO: 158405 - DNA, 201 bp, Homo sapiens
ggctttcttccctcccctctgcttttaaaatcacttgatggacatttatctccatcagccattcttcttatctacctccagacagatggctctgtatgaawcactgggacaagaacatctgcgtattacctaatgaacacttaactattgtgctcagttgtgtttgttcactgataatccaccaggctggatactttattc

SEQ ID NO: 158406 - DNA, 201 bp, Homo sapiens
atggtgcagtagcagtttcttacaggttcccagagatttacaggccctgctccaagatggtgcagaggagtagggtgtaatttgaggtggatgtgattttwaaaaaaagtctttaaaaaaccatgtctggtctctgcgctctcatgataggtgtcctgggatgattacccttaacctaccaaaggaactatgttctccaat

SEQ ID NO: 158407 - DNA, 201 bp, Homo sapiens
gatctagaatgtgaataaagtattttagaggttacttccctgataggggtaataataactgtggaactatgacaaagtagatgtgagtagagaagtctaasgaaaaacagaaaagaatggaagctaatagggatacatgataaaagataagagagggaatggtaaaatcaggggctaccttaaaattgaaaggtagaaaaa

SEQ ID NO: 158408 - DNA, 201 bp, Homo sapiens
cacacctctataaaaaattacaaaaattagccaggagtggtggtgtgcacctgtagtcccagctattcaggaggctgaggtgggaagattgagcccaggakgtcacggatgcaataagccttgattgtgccactgtactccagaaacaaagtgagaccctgtctcaaaaaataaaaaaaataaataaaaattcaaatcaag

SEQ ID NO: 158409 - DNA, 201 bp, Homo sapiens
aagtgagaccctgtctcaaaaaataaaaaaaataaataaaaattcaaatcaagtatcttctaatgccaccattatactcttcagtgtatttgtacaggacraccgtacttgaagctattagctgagttcgagttcactttattactagtatgttacattcagtaagaacaattgaagtaggctctgccagtccccatgtgc

SEQ ID NO: 158410 - DNA, 201 bp, Homo sapiens
attgctgggttttctcatatttttaaatatattttattaggtataatagcattttaaaacttgcttatggcagatgttgtctctgacacgtaccctaggcrgatgatgtcagcgctcttctgacagcagccatgcccccatctgctctgccctcttgttacaagcctcaagtgctcaatggtgtgagaagcccaggagcca

SEQ ID NO: 158411 - DNA, 201 bp, Homo sapiens
atttcagatttatacaaaatctctttttttatgttttcagtaatgtctatgccttataaatacatatatatatgtatacatgtaatgacttttttatgttwacaagtggaagtattatgacataggactaaaaaagaaaaaacaagtaaagtaattttacttcttttctaaattagctggttataataatttagaagttgc

SEQ ID NO: 158412 - DNA, 201 bp, Homo sapiens
aaaaaaaataaataaataatataaaaaaataaaaaggttaattgttttggctaggctcagtggctcatgtctgtaatcccagcactttgggaggccgaggygggcagatcacgaggtcaggagattgagaacatcctggctaacatggtgaaaccccatctgtactaaaaatacaaaaaaaaattagccaggcgtggtggc

SEQ ID NO: 158413 - DNA, 201 bp, Homo sapiens
cggacaacaaggtattttattttaataattgctgttgtcagtttaacagtttgcataaaggcaaccctcagtgtactaagttataatttaaaaatatgtakagagaatctgtttaataggaagaatactaatttaggattcaggaaactgggattaagtcttagctgtgctactgacttaaacttactgagctgctgctgt

SEQ ID NO: 158414 - DNA, 201 bp, Homo sapiens
atatttatgtccttggaacctattgctatgcataaggctatagtttagattgacaagctttcctgagttgtatccacttcacatattatctcccttgttartgtgctttcctcttagcaactcagccatgttgtttaccagattcttacctaccttgtgatgactagaatcatacctaatctaaagtcaagagccaaaggg

SEQ ID NO: 158415 - DNA, 201 bp, Homo sapiens
ccggacaacaaggtattttattttaataattgctgttgtcagtttaacagtttgcataaaggcaaccctcagtgtactaagttataatttaaaaatatgtatagagaatctgtttaataggaagaatactaatttaggattcaggaaactgggattaagtcttagctgtgctactgacttaaacttactgagctgctgctg

SEQ ID NO: 158416 - DNA, 201 bp, Homo sapiens
gtgacagcctctaaaaggttttaagcagaaaagtgacttgatctaatttttgtttgttttaattagttggatgggaaaggtttggacaggaattacagaagaaacaggaagactggtttagaaagccattgtgtgatagtccaggtgaatatttcagtgatttgacttaatagtgacagtagaattaagaaaagtaaatgg

SEQ ID NO: 158417 - DNA, 201 bp, Homo sapiens
tattttatattactgtttacgtatgacacataaaacaagaaaggggaaaaacagtgtatcacttctgtctatagatttcttctgatttcttcatttcttcrccccatctacctctagggatccagggcttagtataataataaatacaatgttgccacttctctttcccagggcttgcaacttcaggtcttacctgtttct

SEQ ID NO: 158418 - DNA, 201 bp, Homo sapiens
ttcccagggcttgcaacttcaggtcttacctgtttctccgacaagagtcttccccagagtaacccttcttactgttttgactcttgctgtagaaatatgtwtgtaaaactgggcccagtggctcacacctgtcggtaatcccagcacttcgtgaggctgaggcgggtggatcacctgaggttaggagtttcagaccagcct

SEQ ID NO: 158419 - DNA, 201 bp, Homo sapiens
tccggacaacaaggtattttattttaataattgctgttgtcagtttaacagtttgcataaaggcaaccctcagtgtactaagttataatttaaaaatatgtatagagaatctgtttaataggaagaatactaatttaggattcaggaaactgggattaagtcttagctgtgctactgacttaaacttactgagctgctgct

SEQ ID NO: 158420 - DNA, 201 bp, Homo sapiens
acaatacaaagtgttagcaaggatatgtagcaactggaactcaaacgttgccacgtagcagtggaactcaaatgttgctggtggctggctgcataaagtgygatagccacattagaagactctttgacattttctaataaagttaaacatatatctaccatgacagcatatgtgcataaagaaatgtttatgatagctgat

SEQ ID NO: 158421 - DNA, 201 bp, Homo sapiens
tacctgtttctccgacaagagtcttccccagagtaacccttcttactgttttgactcttgctgtagaaatatgtatgtaaaactgggcccagtggctcacrcctgtcggtaatcccagcacttcgtgaggctgaggcgggtggatcacctgaggttaggagtttcagaccagcctggccaacatggcgaaaccccgtctct

SEQ ID NO: 158422 - DNA, 201 bp, Homo sapiens
gtattcttctttacttgatctttttaaattcttttgctttaaatcctttagcaaaaggataaaaactataatagaaataagttttatttcatggctttaasagcacctaagttcctctactagacttgcagagatgtgtacctctgagttctctctagcaaaaaagcatgctcttgtggccttctggggaagaggactctg

SEQ ID NO: 158423 - DNA, 201 bp, Homo sapiens
ttcactcagtttccatggtaacattgcgggcttccttggctaccataagtcgcattagttgactgtggaatttctcaatcttctttacatcttgagcttgktctgttttatacaccaaacaaactaaatcatctgttactttaacacacaagttcccatcagaatgcctatatttgagaaccacacgtgccttcatagggt

SEQ ID NO: 158424 - DNA, 201 bp, Homo sapiens
gatcttagcaaactaaagttaatagtaaatgaggcccgggcacagtgccacaggctataatcccagcactctgggaggcaaaggcaggagtatcacctgarctcaagagttcaagaccagcctgggcaacaatggtgacacctcatctctacaagaaaatagaaaaatgagccgggcatggtggcacagaactgacactct

SEQ ID NO: 158425 - DNA, 201 bp, Homo sapiens
tcccaaggaaagaggagagagaagtcaatgtgcagggggtgagggaaagcaccacatttgcagatagaatcttgtatcgtaattaatgaaaggcagaagtrgaaggatagaagagaagaggtataagaaagagaataagaatgtgaaagttgggccgggtgcggtggctcacgcctgtaatcccaacactttgggaggcca

SEQ ID NO: 158426 - DNA, 201 bp, Homo sapiens
gtttcagtacagctttttcagctgcattacagatgttaggaaatcattaaaatcactgagctatagctaatacctcagtggagttccatcatagacacagyggactcatacaagtttgtctaaatatacatgatttaaacatggtataaaaagcaagaaaaaataatgcaaaatttctgccatttcgtgtaatgtgggaga

SEQ ID NO: 158427 - DNA, 201 bp, Homo sapiens
gcattatttgagccaagactaaaaccatcagcttccaggtgtgctctaggaaccagcagggggctgtagcacctttaaacacagctaagaaacaacactaktattgtgaattttgttcctagaaatactcctaatgagactgatatccaccttaaaatcttctgcggacaaaaattttctgaatcagaaggtcgagggagt

SEQ ID NO: 158428 - DNA, 201 bp, Homo sapiens
atctctctctggaaatggtgaatttcaagcatcctcaaacacatgaaacagcattggtaatgtttcagatttaagtttttaaaatacaataaccaagaacrtgctaaactaatcataatatcctacttttagaactagcatttttttgagtctatagttttaaaaaattactgcctatgcaaatattttttaaaaatttaa

SEQ ID NO: 158429 - DNA, 201 bp, Homo sapiens
aaaaaacatctctctctggaaatggtgaatttcaagcatcctcaaacacatgaaacagcattggtaatgtttcagatttaagtttttaaaatacaataacsaagaacatgctaaactaatcataatatcctacttttagaactagcatttttttgagtctatagttttaaaaaattactgcctatgcaaatattttttaaa

SEQ ID NO: 158430 - DNA, 201 bp, Homo sapiens; identical to SEQ ID NO: 29630

SEQ ID NO: 158431 - DNA, 201 bp, Homo sapiens; identical to SEQ ID NO: 29631

SEQ ID NO: 158432 - DNA, 201 bp, Homo sapiens; identical to SEQ ID NO: 29632

SEQ ID NO: 158433 - DNA, 201 bp, Homo sapiens
gcttcatttcccaataaaggagtgacttcaatcatcccagcaatcacttggttcacattcattcagctctctatggaccagaaatctgataaatgagttcktctttggggatcaatatttattgacttgtagtaactgccgccaataaagcagtctttaccatgaaaaaaaaaaaaagaaaatgtggcacatatacaccat

SEQ ID NO: 158434 - DNA, 201 bp, Homo sapiens
caatcacttggttcacattcattcagctctctatggaccagaaatctgataaatgagttcttctttggggatcaatatttattgacttgtagtaactgccrccaataaagcagtctttaccatgaaaaaaaaaaaaagaaaatgtggcacatatacaccatggaatactatgcagccataaaaaggaagcattcatgtcgt

SEQ ID NO: 158435 - DNA, 201 bp, Homo sapiens
tcatttcccaataaaggagtgacttcaatcatcccagcaatcacttggttcacattcattcagctctctatggaccagaaatctgataaatgagttcttcyttggggatcaatatttattgacttgtagtaactgccgccaataaagcagtctttaccatgaaaaaaaaaaaaagaaaatgtggcacatatacaccatgga

SEQ ID NO: 158436 - DNA, 201 bp, Homo sapiens
atcacatagtgaagtccctttgccacatgaggtaatatattcacagacactttgggggccattttctgcctaccagaaattaaaaaactcacaaagcatgrccttactgtttctaacctaactacaccatctctacaggttttgcttccaggcacagagtctactaggctccatttgggttttggggcaggtgcataccta

SEQ ID NO: 158437 - DNA, 201 bp, Homo sapiens; identical to SEQ ID NO: 29636

SEQ ID NO: 158438 - DNA, 201 bp, Homo sapiens
gtgaattatggtagagtcacatggtggactactgcgctgcaatgagaaggagcaatcttcagaccaatccagggacatgaaaggatctcacacccattatrctgactgagcagaaagggtaggacaaagtaggacatacatatatcctgtatgatttgatgcttatgatgtttaaaaacaggctaactctaaccgtaaccc

SEQ ID NO: 158439 - DNA, 201 bp, Homo sapiens
aggagagaggctgggagcaactcactgacacagttgtgtcctggctaaatcagaactcgatctggcttgtcttcttgctctggggctcttatgctcagaaraagggcagtgccatggataggaaacagcaccacattctgcagctggctcatccctccctgttgtctgcatatagaggttctttggatgtagacacttttc

SEQ ID NO: 158440 - DNA, 201 bp, Homo sapiens
agcattttagacaaaatgaaaacacagataaaaggttaagatgtaggaagaagcaaaaggcaagaatgtgataagatgtagagaaaccttaataagcttggatagtttaaaataacatatataacattaaaatataagaaaaaaaggagctataagagaagtgggaaggactttaagtgttataaactctttttattaccc

SEQ ID NO: 158441 - DNA, 201 bp, Homo sapiens
gggaggcagaggttgcagtgagccaagatcatgccactgcactccaacctgggtgacaagagcaaaactccatctcaaaaaaaccaaaaatttatatatayatatagtacctttacagaagtaccagttatactaaaagcttacttctcaacagcaacaatgtaagctctaggacagtggaacgataatattaatgtacag

SEQ ID NO: 158442 - DNA, 201 bp, Homo sapiens
acccgcccacctcgacctcccaaagtgctgggattacaggcatgagccaccacgcccagccctctttgtggttttttgtttgtttgtttgttttaaagacrggttcttgatctctctgttgcccaggatggagtgcagtggtgatcatagcttcttgcagcctggaactcctgggctcaagtgatcctcccactacttggc

SEQ ID NO: 158443 - DNA, 201 bp, Homo sapiens
agcacaaatcattttgcttatattaatagtattaaattatagattcctataatattgaaaatgggaaagttcctgagatacatttttgttgtttctgattwtcttgttgagaatcttaattaatggcacatcaatatattgtttttaaataaaaatgttttcaaatgaaaattattcaagaaacttatttttaattgtttt

SEQ ID NO: 158444 - DNA, 201 bp, Homo sapiens
tgactttctgtcaagatgaacagctgatagacttaatgctgttgttgtatcaaccaagtaagagcactcatggtttgtttgggttttggccagatgctttrtataggaaaatgctctcagcttttttggtctttctttggttatgccaagaaattgagaaagtgagcacagagaaaatgaggttgagcgttacaggaacag

SEQ ID NO: 158445 - DNA, 201 bp, Homo sapiens
ggtgtttcaacattctctactggcatttaatgcagctctgaataagtgtgatacatgccttattctcaaggtttttgtttgtttgtttttctatttttatkttttttttagagacagagtcttgctctattgcccaggctggagtgcagtggtccaatctcagctcattgcaacctctgtctcctgggttcaagtgattct

SEQ ID NO: 158446 - DNA, 201 bp, Homo sapiens
ctcccttcacttgctctctctcctgctccaccatgtgaagttgtgccggtttccccttccaccatgattgtaagttttaaaatattctgtttgggccaggygcggtggctcacacctgtaatcccaggagttttagaggcctaggcgcatggatcacctgaggtcaggagttcgagaccagcctggccaacatggtgaaac

SEQ ID NO: 158447 - DNA, 201 bp, Homo sapiens
cccttcacttgctctctctcctgctccaccatgtgaagttgtgccggtttccccttccaccatgattgtaagttttaaaatattctgtttgggccaggtgyggtggctcacacctgtaatcccaggagttttagaggcctaggcgcatggatcacctgaggtcaggagttcgagaccagcctggccaacatggtgaaaccc

SEQ ID NO: 158448 - DNA, 201 bp, Homo sapiens
agcatctcactagatgcagaaaaagaatttgggaaaagtcacaataattgttatcattattggttaactaggaatagatagaatttccttaaccagataayctacgtggattaaaaatgcgcacaggtggtataattctaaagaaacttgcaatgttaaataccataaaataaagagtgatgatttctgggagggaagaaa

SEQ ID NO: 158449 - DNA, 201 bp, Homo sapiens
ggccagatgctttatataggaaaatgctctcagcttttttggtctttctttggttatgccaagaaattgagaaagtgagcacagagaaaatgaggttgagygttacaggaacagacacgggaaataacaaatcagatcaaacaggaatcagaaacaggaagtttagaaataattagaatacaattaaactattggatctta

SEQ ID NO: 158450 - DNA, 201 bp, Homo sapiens
tgaaaaaaaacactcatcaattcatttggctgcctttttttttttaatttcagctttgtttaattatgactttctgtcaagatgaacagctgatagacttratgctgttgttgtatcaaccaagtaagagcactcatggtttgtttgggttttggccagatgctttatataggaaaatgctctcagcttttttggtctttc

SEQ ID NO: 158451 - DNA, 201 bp, Homo sapiens
tgttggccaatgacaagttacatggtttacccctgtcctatatcatcacctgtcaatatgacatcttaagagatgatggactcatgtacatcacgcgactktagaactctggagttcaagtgacacataaccacagtgaagatggattccatggagcactttcctataatgggcttaaaattgagtatggaatagaaaatc

SEQ ID NO: 158452 - DNA, 201 bp, Homo sapiens
attagagctatcagccatacaacatgaaaaaactgtcctactttgttcaatgaattcaaaatgagggttacgaatttcagcagaaaatttgaggttttttwaaaaaaattctaaaacaaagtaataaccttataaaaattaaaaccttaaaaatggcataagtaattttacacagctgaagagatcatttgtaaattgata

SEQ ID NO: 158453 - DNA, 201 bp, Homo sapiens
agtaagcaagaaacaatgaaggaaagcaagttgaatcagcagacaatagaaatgctctacaaaatttagatattagagctatcagccatacaacatgaaamaactgtcctactttgttcaatgaattcaaaatgagggttacgaatttcagcagaaaatttgaggtttttttaaaaaaattctaaaacaaagtaataacct

SEQ ID NO: 158454 - DNA, 201 bp, Homo sapiens
cagctacagaatagcacctaaatatcattttccagatcaatttgaagatgtatataatgcactaagatggttgttatgccaagatattcttgaaaaatatsgtagagagcctaaaagaattggcatttctggagacactgctggtggaaatttagctgcagcagtgacccaactggtatgatgctcggatttgttttattt

SEQ ID NO: 158455 - DNA, 201 bp, Homo sapiens
aaatgcattctcactgaaatattctgtcaaaaggtcaactggtaaaaggtcaagggaaattgaacacacggcatgattctcagttgaaggagagtgagccrctgaggcgacagggcagctccctggctggctgcccccagtgtccacactggccctcggagacctgtggtttttttctagtgaggctaactacttggatat

SEQ ID NO: 158456 - DNA, 201 bp, Homo sapiens; identical to SEQ ID NO: 29640

SEQ ID NO: 158457 - DNA, 201 bp, Homo sapiens
attacaggcatgagccaccgtgtccagactgagattttgctttttaatcacagattagatggtctctttccccaccaatgaaaaaaatagcacaaatcatyttgcttatattaatagtattaaattatagattcctataatattgaaaatgggaaagttcctgagatacatttttgttgtttctgattatcttgttgagaa

SEQ ID NO: 158458 - DNA, 201 bp, Homo sapiens
aaaatggtaacaaatttggtaagttcagaatttcattgtctctgtgaatatttaagtttaatcaggagaaaataattaccagctatattatttttaaaackttctgctgtcttggaaattttgctcttaaagtttgcttgacgattttcaaaccttaaaaaaaaaaacaaacttcattctttaacacaaatccctaacaga

SEQ ID NO: 158459 - DNA, 201 bp, Homo sapiens
atgcagctctgaataagtgtgatacatgccttattctcaaggtttttgtttgtttgtttttctatttttatgttttttttagagacagagtcttgctctaytgcccaggctggagtgcagtggtccaatctcagctcattgcaacctctgtctcctgggttcaagtgattctcctgcctcagcctcccaagtagctgggat

SEQ ID NO: 158460 - DNA, 201 bp, Homo sapiens
tggaaaatacataccataaaaacacatttaaagatattgctaggttaaaaaagaaggttacatcattacagaaaaagtttaaattaccaagaaaatacaayaccctaaatctgcgtggatttaataatatggccttaaaataaatgaagaaaatattaacagaagtgcagggaaaaatacacaagtccacaatgatagcga

SEQ ID NO: 158461 - DNA, 201 bp, Homo sapiens
gctggagtgcagtggtccaatctcagctcattgcaacctctgtctcctgggttcaagtgattctcctgcctcagcctcccaagtagctgggattacaggcrtgcgccaccgcacccagtgcatttttctatttttagtagagacggagtttcgccatgttggccatgctggtctcgaaccccccgacctcaggtgacccgc

SEQ ID NO: 158462 - DNA, 201 bp, Homo sapiens
gtgtgattgactgaaatacataaaaggcattgctggagaaatacagtaccatcatagtctttaaattattcttgcaaataccttgtgaaattgaatgcccmaaacactataaaatatacttgggcaaacaagtaagcaagaaacaatgaaggaaagcaagttgaatcagcagacaatagaaatgctctacaaaatttagat

SEQ ID NO: 158463 - DNA, 201 bp, Homo sapiens
gtctgaaaatccaatagtgctttaaatgttataccaaaaagagaggtaagagaatgggagaaagagatactgaaaaatataacagtaggctgggtgcggtrgctcacgcctgtaatcccagcactttgggaggccaaggtgggtggatcacctgaggtcaggagttcaagacctgcctgaccaacatggtgaaaccatgtc

SEQ ID NO: 158464 - DNA, 201 bp, Homo sapiens
gagggactataggacttactcagaactaattcgttcagtgttaaagccaaattagaattcttagttatttgatccttttctttttctttttttttttttttgttttttgttttttgttttttgtttttgagacggagtcttgctttgtcacccaggctggagtgcagttggccaggctggagtgcagtggcacaatctcgg

SEQ ID NO: 158465 - DNA, 201 bp, Homo sapiens
taaatgttataccaaaaagagaggtaagagaatgggagaaagagatactgaaaaatataacagtaggctgggtgcggtggctcacgcctgtaatcccagcrctttgggaggccaaggtgggtggatcacctgaggtcaggagttcaagacctgcctgaccaacatggtgaaaccatgtctctacgaaaaatacaaaaaaat

SEQ ID NO: 158466 - DNA, 201 bp, Homo sapiens
agccctctttgtggttttttgtttgtttgtttgttttaaagacgggttcttgatctctctgttgcccaggatggagtgcagtggtgatcatagcttcttgyagcctggaactcctgggctcaagtgatcctcccactacttggcctcctgagcagttagggctataggcacatgccaccatgcttagttatttttttaaac

SEQ ID NO: 158467 - DNA, 201 bp, Homo sapiens
caaagtagaaagagcagaagggaaacatcatgggaagaaagactattttgtttctgattgcaggggtccttggggcatattatgtttatactcctctctcrgataatattgaggaactctggtgactggtgtggatagctacacctgtgaaaatggtaacaaatttggtaagttcagaatttcattgtctctgtgaatatt

SEQ ID NO: 158468 - DNA, 201 bp, Homo sapiens
cattttagacaaaatgaaaacacagataaaaggttaagatgtaggaagaagcaaaaggcaagaatgtgataagatgtagagaaaccttaataagcttggatagtttaaaataacatatataacattaaaatataagaaaaaaaggagctataagagaagtgggaaggactttaagtgttataaactctttttattacccta

SEQ ID NO: 158469 - DNA, 201 bp, Homo sapiens
gcattttagacaaaatgaaaacacagataaaaggttaagatgtaggaagaagcaaaaggcaagaatgtgataagatgtagagaaaccttaataagcttggatagtttaaaataacatatataacattaaaatataagaaaaaaaggagctataagagaagtgggaaggactttaagtgttataaactctttttattaccct

SEQ ID NO: 158470 - DNA, 201 bp, Homo sapiens
cagtggatcccaaattttaacttgcatcagaatcacctgaagtccttcttaaaactcaaattgctggtctctactcccctaatttagtaccccattaacargaaacatttagcacaccctgaaaatatgcatgttgatttatagataatatttctcttaacaccactataatttgaatatttaaaacatgaaaattaaaat

SEQ ID NO: 158471 - DNA, 201 bp, Homo sapiens
gatccttttctttttctttttttttttttttgttttttgttttttgttttttgtttttgagacggagtcttgctttgtcacccaggctggagtgcagttgsccaggctggagtgcagtggcacaatctcggctcactgcaacctctgcctcccaggtccaagcgattctcctgcctcagcctccccagtagctgggattac

SEQ ID NO: 158472 - DNA, 201 bp, Homo sapiens
tccccaccaatgaaaaaaatagcacaaatcattttgcttatattaatagtattaaattatagattcctataatattgaaaatgggaaagttcctgagatayatttttgttgtttctgattatcttgttgagaatcttaattaatggcacatcaatatattgtttttaaataaaaatgttttcaaatgaaaattattcaaga

SEQ ID NO: 158473 - DNA, 201 bp, Homo sapiens
aaagcaagttgaatcagcagacaatagaaatgctctacaaaatttagatattagagctatcagccatacaacatgaaaaaactgtcctactttgttcaatraattcaaaatgagggttacgaatttcagcagaaaatttgaggtttttttaaaaaaattctaaaacaaagtaataaccttataaaaattaaaaccttaaaa

SEQ ID NO: 158474 - DNA, 201 bp, Homo sapiens
aatagtattaaattatagattcctataatattgaaaatgggaaagttcctgagatacatttttgttgtttctgattatcttgttgagaatcttaattaatsgcacatcaatatattgtttttaaataaaaatgttttcaaatgaaaattattcaagaaacttatttttaattgtttttcagctcatagaagacccagatgt

SEQ ID NO: 158475 - DNA, 201 bp, Homo sapiens
gcaacatgaacaaaatataccattatcaagttgctaataatggaaggaaactgtattttataaaaatcagttaatttccctcatattagtaaattacagargcaaaatgatatagcatctcactagatgcagaaaaagaatttgggaaaagtcacaataattgttatcattattggttaactaggaatagatagaatttcc

SEQ ID NO: 158476 - DNA, 201 bp, Homo sapiens
tgtttctgattatcttgttgagaatcttaattaatggcacatcaatatattgtttttaaataaaaatgttttcaaatgaaaattattcaagaaacttattkttaattgtttttcagctcatagaagacccagatgtcaagatcaaactcaagcttcagtctttaatatatcctgcccttcagacgcttgacatggatttac

SEQ ID NO: 158477 - DNA, 201 bp, Homo sapiens; identical to SEQ ID NO: 29643

SEQ ID NO: 158478 - DNA, 201 bp, Homo sapiens
cagataaaatttttagaaaaaaatgttagcagattcatagataccatatacttgcagaaggaattatacttttcatatattattcacactatttatatgayatttagctaaaattgcacacctatgagttgtcaatttaaagtattccataattataactagcctactatattatggataaaattgtttttgttactgttt

SEQ ID NO: 158479 - DNA, 201 bp, Homo sapiens
catacattttactgaaatgttgactccatcatatcaagacaaacatgttagataacaaaacacttcagctgtccaaaatttatttctttggagctatgtakatttaaaagaactattttaaatctcattctgaaagagggcataataaataccaaaagctgtagcaaatctcaggtaagaagagaatgtgtttcacgcact

SEQ ID NO: 158480 - DNA, 201 bp, Homo sapiens; identical to SEQ ID NO: 29646

SEQ ID NO: 158481 - DNA, 201 bp, Homo sapiens
ttgaattggagcctctatgttcaggtttcaccaggtttatgtttttaattaatatcctattcagctttctgtaatttccactgaggttttctagaacaagrcaagtcagaaattgatctttaattataagctaagagcaaactgccaaagaactgagacaaattttgaagaaagaggtctatcaggactaactattttaag

SEQ ID NO: 158482 - DNA, 201 bp, Homo sapiens
caattattcacagcagttttcatggtactatataacatccaatttacagaattaaaggtaatgtaatttgaaagaaaaatacctggttttaaggaatgaakggccatgtcaactattggaagcatctttgaattggagcctctatgttcaggtttcaccaggtttatgtttttaattaatatcctattcagctttctgtaa

SEQ ID NO: 158483 - DNA, 201 bp, Homo sapiens
ccatcctttgttagaggatgaaagacttctaactggccttttaggttgcctgagacctttagacaaacagtcaaaaatttaaaatttaaaatgtggcacaytgttgcatggggtagtaaatcttgaccttaaaactggtatttgtaagaaaaacagaaagaattcagggatcccctttgatggctcttaattctatacagt

SEQ ID NO: 158484 - DNA, 201 bp, Homo sapiens
tttagtatttggaggcccaaatgtcttagctaaaagtgttcattctaaactcacaggaaaagtgaaatatgaaaatatatagaaaaatcttaggcagtatwtttcaattttaagcaacaactatttacaggtttttcaataggcattacattaaaaatgaaatatatagttaataaatatgaaaactgtggatataatcaa

SEQ ID NO: 158485 - DNA, 201 bp, Homo sapiens
tcagtccaaatttattataagcaattttcaggtccatatgtttaggatatttcatttgtttggttatggcatatatggtaacatgtggtttacatacaaaractgcgacatatattttgcaggcctttacacaaaagtgttttccctaaagggagaagagaaaagttgaatgcagaagtaaaaaaaaaaaaattcatttgc

SEQ ID NO: 158486 - DNA, 201 bp, Homo sapiens
aagaagtcacatcactcagcaatgagtattacaattattcacagcagttttcatggtactatataacatccaatttacagaattaaaggtaatgtaatttraaagaaaaatacctggttttaaggaatgaatggccatgtcaactattggaagcatctttgaattggagcctctatgttcaggtttcaccaggtttatgtt

SEQ ID NO: 158487 - DNA, 201 bp, Homo sapiens
ctggagtgcaatggcgtgatcttggctcactgcaacctccacctaccaggttcaagcaattcttctgcctcagctttctgagtagctgggattataggtgygtgccaccacacctggctaattttttgtatttttagtagagacggggtttcaccatgttgggcaggctggtctcgaactcctgacctcaggtgatccacc

SEQ ID NO: 158488 - DNA, 201 bp, Homo sapiens
atttccagttctttttttcttactccattgaagtgtaattagcagtatgtgaaaatttccactttatcctcaatcagtagcctctccttccaattagcatwttttttctattaattttgtaaagtgggattcttgttttacacatacccctggaaagtatacttaaactgtgagaccctgggattttatatttccaaatag

SEQ ID NO: 158489 - DNA, 201 bp, Homo sapiens
agtccaaatttattataagcaattttcaggtccatatgtttaggatatttcatttgtttggttatggcatatatggtaacatgtggtttacatacaaacamtgcgacatatattttgcaggcctttacacaaaagtgttttccctaaagggagaagagaaaagttgaatgcagaagtaaaaaaaaaaaaattcatttgcat

SEQ ID NO: 158490 - DNA, 201 bp, Homo sapiens
ttccagttctttttttcttactccattgaagtgtaattagcagtatgtgaaaatttccactttatcctcaatcagtagcctctccttccaattagcatatwttttctattaattttgtaaagtgggattcttgttttacacatacccctggaaagtatacttaaactgtgagaccctgggattttatatttccaaatagaa

SEQ ID NO: 158491 - DNA, 201 bp, Homo sapiens; identical to SEQ ID NO: 29653

SEQ ID NO: 158492 - DNA, 201 bp, Homo sapiens
tagtatttggaggcccaaatgtcttagctaaaagtgttcattctaaactcacaggaaaagtgaaatatgaaaatatatagaaaaatcttaggcagtatttrtcaattttaagcaacaactatttacaggtttttcaataggcattacattaaaaatgaaatatatagttaataaatatgaaaactgtggatataatcaaca

SEQ ID NO: 158493 - DNA, 201 bp, Homo sapiens
ccaccgcgctcagctgcatgaccttttaacttgcctcatacactcaatatactcaaggtataccttccaaagtgaaaaattatggcacgttgcagtcctgwccactaattgagaactttgatgcattggattttggagacctcattttatcacctggtccttttactttatgacttgtcatgctgccatcttttgatggga

SEQ ID NO: 158494 - DNA, 201 bp, Homo sapiens
cctttgttagaggatgaaagacttctaactggccttttaggttgcctgagacctttagacaaacagtcaaaaatttaaaatttaaaatgtggcacactgtkgcatggggtagtaaatcttgaccttaaaactggtatttgtaagaaaaacagaaagaattcagggatcccctttgatggctcttaattctatacagtccta

SEQ ID NO: 158495 - DNA, 201 bp, Homo sapiens
tgactaacatattttgggcctaaaacctttacatttagaatctttttgtttggtatttgaaaataatgtatgtcctccatttattggtcaaaagcagtgcytatttatttctacgtttaatcagagagactttgtaatagttatttaatattatttatgttcattcatttgttgtatataatgaggttaattgctatgata

SEQ ID NO: 158496 - DNA, 201 bp, Homo sapiens; identical to SEQ ID NO: 29650

SEQ ID NO: 158497 - DNA, 201 bp, Homo sapiens; identical to SEQ ID NO: 29651

SEQ ID NO: 158498 - DNA, 201 bp, Homo sapiens; identical to SEQ ID NO: 29652

SEQ ID NO: 158499 - DNA, 201 bp, Homo sapiens; identical to SEQ ID NO: 29655

SEQ ID NO: 158500 - DNA, 201 bp, Homo sapiens; identical to SEQ ID NO: 29649

SEQ ID NO: 158501 - DNA, 201 bp, Homo sapiens
aagctaaaatgccaaatgcttgctttctcagcctcctttgcagctaggctacaagcatatgatttaggttttgccaatctgtttgccagtgctgaatttcsactttggaattaataaaaaaagaagcagattcagttatgctttctcttgtttctggtggaggccatgtagcagctgctacaatatctgttgcatagggaa

SEQ ID NO: 158502 - DNA, 201 bp, Homo sapiens
ccttgaggaagaagtcacatcactcagcaatgagtattacaattattcacagcagttttcatggtactatataacatccaatttacagaattaaaggtaawgtaatttgaaagaaaaatacctggttttaaggaatgaatggccatgtcaactattggaagcatctttgaattggagcctctatgttcaggtttcaccagg

SEQ ID NO: 158503 - DNA, 201 bp, Homo sapiens
tcgactttggaattaataaaaaaagaagcagattcagttatgctttctcttgtttctggtggaggccatgtagcagctgctacaatatctgttgcataggraacaagtgggagtggtgctggtggctttgcagttagcctaggattgagcaattgctgcaactgttgctctctgcagcttcagcgttacttcttactggtg

SEQ ID NO: 158504 - DNA, 201 bp, Homo sapiens
acatttcatgttactgtttttaaatgttcccttaactacagagctaatgtgcttatatctgtcaggggtctcatgtgaacctctaaatatttaaagattcwttagctccctggagggccaccatgatttccaaaacaagtcacaatacctaaagatctaattgtacaatttccctcagaaatagccttgaggaagaagtca

SEQ ID NO: 158505 - DNA, 201 bp, Homo sapiens
tctatctgcctcatgtaaggtgcaggtgacataattaggtaatcaagcaaaagatcacattttttaataagaaagagacactggctattattttgagtggyaaaacaggttattcagtcccagtttaaaatggaaatgacagagaccaagatcaagatttctaatttgagatgtgcctgtgatgcaattacatttgctgaa

SEQ ID NO: 158506 - DNA, 201 bp, Homo sapiens
aatgaatggccatgtcaactattggaagcatctttgaattggagcctctatgttcaggtttcaccaggtttatgtttttaattaatatcctattcagcttsctgtaatttccactgaggttttctagaacaagacaagtcagaaattgatctttaattataagctaagagcaaactgccaaagaactgagacaaattttga

SEQ ID NO: 158507 - DNA, 201 bp, Homo sapiens
agcgttacttcttactggtggtgacagtggtttcctccctggatgagttctacagcatggtttggggtacatttcctggctgcctagctttgatctggctytctagccttctcaacagttctacaagttccccactatttctgtggtaaacctatttattgttaatgtcagccataattggcttctgtgttttatattttt

SEQ ID NO: 158508 - DNA, 201 bp, Homo sapiens
cagtccaaatttattataagcaattttcaggtccatatgtttaggatatttcatttgtttggttatggcatatatggtaacatgtggtttacatacaaacrctgcgacatatattttgcaggcctttacacaaaagtgttttccctaaagggagaagagaaaagttgaatgcagaagtaaaaaaaaaaaaattcatttgca

SEQ ID NO: 158509 - DNA, 201 bp, Homo sapiens
tacagcatggtttggggtacatttcctggctgcctagctttgatctggctttctagccttctcaacagttctacaagttccccactatttctgtggtaaasctatttattgttaatgtcagccataattggcttctgtgttttatattttttaaaattccaagatatacaaatgtaacagatagctcaacaaacatatgtc

SEQ ID NO: 158510 - DNA, 201 bp, Homo sapiens
ggttttaaggaatgaatggccatgtcaactattggaagcatctttgaattggagcctctatgttcaggtttcaccaggtttatgtttttaattaatatcckattcagctttctgtaatttccactgaggttttctagaacaagacaagtcagaaattgatctttaattataagctaagagcaaactgccaaagaactgaga

SEQ ID NO: 158511 - DNA, 201 bp, Homo sapiens; identical to SEQ ID NO: 29654

SEQ ID NO: 158512 - DNA, 201 bp, Homo sapiens
acatccaatttacagaattaaaggtaatgtaatttgaaagaaaaatacctggttttaaggaatgaatggccatgtcaactattggaagcatctttgaattrgagcctctatgttcaggtttcaccaggtttatgtttttaattaatatcctattcagctttctgtaatttccactgaggttttctagaacaagacaagtca

SEQ ID NO: 158513 - DNA, 201 bp, Homo sapiens
  misc_feature (1)...(201): n = A,T,C or G
atacctggttttaaggaatgaatggccatgtcaactattggaagcatctttgaattggagcctctatgttcaggtttcaccaggtttatgtttttaattantatcctattcagctttctgtaatttccactgaggttttctagaacaagacaagtcagaaattgatctttaattataagctaagagcaaactgccaaagaa

SEQ ID NO: 158514 - DNA, 201 bp, Homo sapiens; identical to SEQ ID NO: 29656

SEQ ID NO: 158515 - DNA, 201 bp, Homo sapiens
cacggttccacgcatcacatcttcacacaaggcaggaaaaaagggaaaggggcagtagttaaaaggctgttagagtgctaggtttcctgtttaagatagcrtcccccatggcagcgcaggcctggaagcttctgcaagccctagcgctgctgccccgcttcctggtggccaggtcccgggcagttcaattaacctccagaa

SEQ ID NO: 158516 - DNA, 201 bp, Homo sapiens
gggctcccacctttcccaagccctgcatttcacatattttgcccctattctactctacactcaacccccaactctctgagttccactccacatgaccccgsccccatcttaacttgctgtgtcctcaccctactccacagatccctgcctcccgtgcctttgctccaggtgaggccatacacttggcggaggcctatttgc

SEQ ID NO: 158517 - DNA, 201 bp, Homo sapiens; identical to SEQ ID NO: 29664

SEQ ID NO: 158518 - DNA, 201 bp, Homo sapiens; identical to SEQ ID NO: 29659

SEQ ID NO: 158519 - DNA, 201 bp, Homo sapiens; identical to SEQ ID NO: 29660

SEQ ID NO: 158520 - DNA, 201 bp, Homo sapiens; identical to SEQ ID NO: 29661

SEQ ID NO: 158521 - DNA, 201 bp, Homo sapiens; identical to SEQ ID NO: 29668

SEQ ID NO: 158522 - DNA, 201 bp, Homo sapiens
ggtaacagataacccaaagtcactttccctagccaacagatttgcagttgtggaatcagaatagtacaagatgaataaaagcctgaatctgattttgcatygtgtctccgttccatcaccaggcctgtctcaggcccacagcctgaagtgtaaagaggccatggctggtgtttctttctttttctgcctcatgcttcttct

SEQ ID NO: 158523 - DNA, 201 bp, Homo sapiens; identical to SEQ ID NO: 29669

SEQ ID NO: 158524 - DNA, 201 bp, Homo sapiens
atgtgtctggttttaatcaaggcgtgtgctgttcttccagttccctcacatcgggctaacgcaaaagacaccagaatccatcaccagtgctacgtcaaaasagccccagagtccacacttgcctcggcaagcggaggggaagctgccgcccatatacaaagtccgggagaaggtgagtcctgaacactggccactgccatg

SEQ ID NO: 158525 - DNA, 201 bp, Homo sapiens; identical to SEQ ID NO: 29670

SEQ ID NO: 158526 - DNA, 201 bp, Homo sapiens; identical to SEQ ID NO: 29671

SEQ ID NO: 158527 - DNA, 201 bp, Homo sapiens; identical to SEQ ID NO: 29672

SEQ ID NO: 158528 - DNA, 201 bp, Homo sapiens
gaaactatttcaaaatattaaagaggagggaattctccctaattcattctatgaggccaaccagcatcacactgataccaaaaccagagatagacacaacaaaaaaaagacaactacagggtatgcagaggtgccccaaccacactctgtccacagactctcagttattttaggagatccctggccaaagatttatttctg

SEQ ID NO: 158529 - DNA, 201 bp, Homo sapiens; identical to SEQ ID NO: 29674

SEQ ID NO: 158530 - DNA, 201 bp, Homo sapiens
atcacaggagattactgtctgtccatacccaccagacacagaactgaacacccacacaccagttttcaaagagggaacttacaatgaatgctggctgcccrgggcagcccatgagtgtatctgggactcaagctggagttttccaggggagaaagcctgggaagcttgtggcaaggaagttgggaattgcccaccctactg

SEQ ID NO: 158531 - DNA, 201 bp, Homo sapiens
atctgggactcaagctggagttttccaggggagaaagcctgggaagcttgtggcaaggaagttgggaattgcccaccctactggaaagggcttctcagggrtgagtgaaaatccaggctcaggtgtcagccctttgtggaaacatgacactctcagtatagacagtcgtgaagaacaaggctgagggattttgaagtaaac

SEQ ID NO: 158532 - DNA, 201 bp, Homo sapiens
ttcagaggcaatatgaggaggttggggggatggcaggggcatcctcagggttggggggcaggccaagggatgagatggcaaaggacagctttggaatcagmtagacgatccagcgtgccttcctacacttgcatgaggtgccagtgaattcgaagagggccgggactcaccattgttttcttttcctaaaccttttgtata

SEQ ID NO: 158533 - DNA, 201 bp, Homo sapiens
tggccatggaagacttatcttcatggcacagagaggttgtgcagagatgagtcagactcaggggctgagtaacagcagagcagagagtgcagaagtggacsctcagaagcgagtttatgtgtgtcttttcctctatctgctggctgtggctggtactgcaacctatcccaaagtaacagcctagtcaatgaggtatatgct

SEQ ID NO: 158534 - DNA, 201 bp, Homo sapiens
aaagtcctagttacaccctaaataggagctaagcagctgggaatgcagaaaacgcaacaataagtgatgtgcccggcgtgggctctcctgtgtgcactttyctgccacatttctatttttttttttttttttttgagatggagtctcgctctgtcacccaggctggaatgcagtggtctgatttcagctcacggcaacctc

SEQ ID NO: 158535 - DNA, 201 bp, Homo sapiens
aaagcagcagacattctcagggctgtggagggatgggggaggcccagagcccagggacgtccaggcagctgtgttcagtgggcatcagccctgaggactcyggtgcgggggtctctgcattggggtttctctcttgtgccttcagaaacccgatgaaggcaatgtatccaggcacattctacttccaatttaaaaacctat

SEQ ID NO: 158536 - DNA, 201 bp, Homo sapiens
ccctgggtgtctgtggggaccgggccagcgcccactgcaactggcagcctggatacctgggctgggaggggagggcccagggccaggagagaggcctgctrggccctcactgttttctccttgttttttctcagattttaaatattgttgggaaaactttgtgtacaatgataatgagccattcaagccttggaagggatt

SEQ ID NO: 158537 - DNA, 201 bp, Homo sapiens
tggttctccaatgctgtggggcgggtcagtgtcccctgggtgtctgtggggaccgggccagcgcccactgcaactggcagcctggatacctgggctgggasgggagggcccagggccaggagagaggcctgctgggccctcactgttttctccttgttttttctcagattttaaatattgttgggaaaactttgtgtacaa

SEQ ID NO: 158538 - DNA, 201 bp, Homo sapiens; identical to SEQ ID NO: 29682

SEQ ID NO: 158539 - DNA, 201 bp, Homo sapiens; identical to SEQ ID NO: 29683

SEQ ID NO: 158540 - DNA, 201 bp, Homo sapiens; identical to SEQ ID NO: 29685

SEQ ID NO: 158541 - DNA, 201 bp, Homo sapiens
tctgtaccagaaaataagtcacttcttccaaagatgcctccactgtgagcagagtaggatgcacacgaccccagacacaggctcctcctctgtgagcacckttcacctttcagaatgacacctgcaacatggagtgtaggaaaaaatatgatgatcaggagaaatgctcttattttaggccaggcacggtggcttatgcct

SEQ ID NO: 158542 - DNA, 201 bp, Homo sapiens
gcctgtagtcccagctactcaggaggctgaggcaggagaattgcttgaacctgggaggcagaggttgcagtgagccgagattgtgccactgcactccagcyttggcgacagagcaagactccatctttgaaaaaaataaaaataaaagaataaagagagaaggagaaggatagaagaagggaaactcaatgaataaaacac

SEQ ID NO: 158543 - DNA, 201 bp, Homo sapiens
ttttttttttttttttttgagatggagtctcgctctgtcacccaggctggaatgcagtggtctgatttcagctcacggcaacctctgctttccaggttcaygcgattctcctgcctcagtctcccgagtagctgggattacaggcacctgccaccatgcccagccaattcttttgtatttttagtagaaacaggattttgc

SEQ ID NO: 158544 - DNA, 201 bp, Homo sapiens; identical to SEQ ID NO: 29686

SEQ ID NO: 158545 - DNA, 201 bp, Homo sapiens
agagaaggagaaggatagaagaagggaaactcaatgaataaaacaccctggggcctactatgtagccagaaaaatgaaaagtaaagaaataaaataaggcygtgcatgtggtttatgctcatagtcccagagctttgggagggtgaggcaggaggatcgcttgagcccaagagttcaagatcagcctgggcaacatggtga

SEQ ID NO: 158546 - DNA, 201 bp, Homo sapiens
agagagccaggccatagcaggggctgaggatgcctggtgaatggatgcctgggagaaaagatggcagaattcacacatgagtctatgagacagggaaagamtcaataaaataaagaaggaaggggccgggcacggcgcggtggctcatgcctgtaatcccagcactttgggaggctgaggcaggcggatcatgaggttggg

SEQ ID NO: 158547 - DNA, 201 bp, Homo sapiens
ctgggaggtcaaggctgcagtcagcccagatcccaccactgcaccccctaacctgtgcaccagagagagaccctgtctcaaaaatgagtaaataaggaaayggcccggggctccaggcccgccctctgctcccatcgccccacccctgcactcctcctgctcctggtctgagctcccctgtcctcctcctcctccttcgcc

SEQ ID NO: 158548 - DNA, 201 bp, Homo sapiens
  misc_feature (1)...(201): n = A,T,C or G
ctgaggagagtgggtgcaggagggacagcatgaggggcagatggttctccaatgctgtggggcgggtcagtgtcccctgggtgtctgtggggaccgggccngcgcccactgcaactggcagcctggatacctgggctgggaggggagggcccagggccaggagagaggcctgctgggccctcactgttttctccttgtttt

SEQ ID NO: 158549 - DNA, 201 bp, Homo sapiens; identical to SEQ ID NO: 29677

SEQ ID NO: 158550 - DNA, 201 bp, Homo sapiens; identical to SEQ ID NO: 29678

SEQ ID NO: 158551 - DNA, 201 bp, Homo sapiens
  misc_feature (1)...(201): n = A,T,C or G
ggggcgggtcagtgtcccctgggtgtctgtggggaccgggccagcgcccactgcaactggcagcctggatacctgggctgggaggggagggcccagggccnggagagaggcctgctgggccctcactgttttctccttgttttttctcagattttaaatattgttgggaaaactttgtgtacaatgataatgagccattca

SEQ ID NO: 158552 - DNA, 201 bp, Homo sapiens; identical to SEQ ID NO: 29679

SEQ ID NO: 158553 - DNA, 201 bp, Homo sapiens
ttgtccgccaggcccctcctgccacttcctgccaggcggtcctgctgggcctcagccctggcctccccctgccccagccccacctctgggctccctccccsctggttcccccgctgcccccactcccagccaagctccttgccctgctgtgtggtcccacgactgctgcttctgaatgggccaccttccccacttgcccca

SEQ ID NO: 158554 - DNA, 201 bp, Homo sapiens; identical to SEQ ID NO: 29680

SEQ ID NO: 158555 - DNA, 201 bp, Homo sapiens
ccaacctcttcagcataaagctcctgcccaaacccctcctgctcctaaatgtctgtctctggtgttaaccagaggctgctcttcccaggctgctggatggytaccttgcaggctgtcacccttaacaagaaataaagtgtcctttgcaaatgcatcccttgtgtaatttgtaggtcaccgcgccatgggaacacgctacca

SEQ ID NO: 158556 - DNA, 201 bp, Homo sapiens
taccaggaggggctccgcagcctgagtcaggaaggggtcgctgtggagatcatggactatgaaggtgagacgtggggggctgaggagagtgggtgcaggarggacagcatgaggggcagatggttctccaatgctgtggggcgggtcagtgtcccctgggtgtctgtggggaccgggccagcgcccactgcaactggcagc

SEQ ID NO: 158557 - DNA, 201 bp, Homo sapiens; identical to SEQ ID NO: 29684

SEQ ID NO: 158558 - DNA, 201 bp, Homo sapiens; identical to SEQ ID NO: 29688

SEQ ID NO: 158559 - DNA, 201 bp, Homo sapiens; identical to SEQ ID NO: 29689

SEQ ID NO: 158560 - DNA, 201 bp, Homo sapiens; identical to SEQ ID NO: 29690

SEQ ID NO: 158561 - DNA, 201 bp, Homo sapiens
ctacaaaatgggagaaaattttcacaacctgctcatctgacaaagggctaatatccataatctacaatgaactcaaacaaatatacaagaaaaaaacaaasaaccccatcaaaaagtgggcgaaggacatgaacagacacttctcaaaagaagacatttatgcagccaaaaaacacatgaaaaatgctcatcatcactggc

SEQ ID NO: 158562 - DNA, 201 bp, Homo sapiens; identical to SEQ ID NO: 29691

SEQ ID NO: 158563 - DNA, 201 bp, Homo sapiens
ataaagagtcaagacccatcagtgtgctatattcaggaaacccatctcacgtgcagagacacacataggctcaaaataaaaggatggaggaagatctaccwagccaatggaaaacaaaaaaaggcaggggttgcaatcctagtccccaataaaacagactttaaaccaacaaagatcaaaagagacaaagaaggccattac

SEQ ID NO: 158564 - DNA, 201 bp, Homo sapiens; identical to SEQ ID NO: 29692

SEQ ID NO: 158565 - DNA, 201 bp, Homo sapiens; identical to SEQ ID NO: 29693

SEQ ID NO: 158566 - DNA, 201 bp, Homo sapiens; identical to SEQ ID NO: 29694

SEQ ID NO: 158567 - DNA, 201 bp, Homo sapiens
tctttgtaaactcctctactataaagggtacagggtttaatggtttatgaaatagagtttcatcctaagtttcattcatggttctggtaataattcccagrgtgaatgagaaaattgccgaacccctctgtgagtcagttgcctcatacacaaaatagaattaatgaagcttggttgtcattaaggcttcttaagatctgc

SEQ ID NO: 158568 - DNA, 201 bp, Homo sapiens; identical to SEQ ID NO: 29695

SEQ ID NO: 158569 - DNA, 201 bp, Homo sapiens; identical to SEQ ID NO: 29697

SEQ ID NO: 158570 - DNA, 201 bp, Homo sapiens
attttgtacactcttgtgccaactgctttgatagtaacaaaatgtatttctcgaactcctaggtataaaactcaagtatccgcaatttaaattctttttcsctcacttctattatgtttccggtctcaatagaaatcgatgccaatccagaaatacaagcattattctaatacttctcacacattacagagatagattaaa

SEQ ID NO: 158571 - DNA, 201 bp, Homo sapiens
aattttgtacactcttgtgccaactgctttgatagtaacaaaatgtatttctcgaactcctaggtataaaactcaagtatccgcaatttaaattctttttycctcacttctattatgtttccggtctcaatagaaatcgatgccaatccagaaatacaagcattattctaatacttctcacacattacagagatagattaa

SEQ ID NO: 158572 - DNA, 201 bp, Homo sapiens
gctgtattctctatgtaaattatattctgtaaaatataacattgaaagctgcattaaatatattgtgtaaatatgtaaaaataaaatcagattatgagagytaaatgttaatcaaggcacaatcacataatataaaattatattttcctgaatgatggaattactaccaatctcccccaggacacttcatctgcacggagc

SEQ ID NO: 158573 - DNA, 201 bp, Homo sapiens
agcaagagtagaatcaaccacaactgcctttgtaattatttaaagcatgtgtgcctataagtaattggcattttatataatcaagaatctttgatataatratctctcaactatttgaaacatggctcacatatattaattttatatgcaaatatatatataacatcactgtatatgaaactaaattttggactttagaac

SEQ ID NO: 158574 - DNA, 201 bp, Homo sapiens
gattaaggctgtgattaaataagaaagagaggggaggtagttctcaatggaacttagaagaagacctcttttcccatctcagttcctaagaggttgccctrgtgcctctatgatactggttttagtggctttccctgcagagtaatttcttaattctccaatggggatacagaaggtggatctgaatgcttttcagaagtg

SEQ ID NO: 158575 - DNA, 201 bp, Homo sapiens
gaatcaaccacaactgcctttgtaattatttaaagcatgtgtgcctataagtaattggcattttatataatcaagaatctttgatataataatctctcaastatttgaaacatggctcacatatattaattttatatgcaaatatatatataacatcactgtatatgaaactaaattttggactttagaacagcttcttag

SEQ ID NO: 158576 - DNA, 201 bp, Homo sapiens
aatcaaccacaactgcctttgtaattatttaaagcatgtgtgcctataagtaattggcattttatataatcaagaatctttgatataataatctctcaacyatttgaaacatggctcacatatattaattttatatgcaaatatatatataacatcactgtatatgaaactaaattttggactttagaacagcttcttaga

SEQ ID NO: 158577 - DNA, 201 bp, Homo sapiens
gcaaatatatatataacatcactgtatatgaaactaaattttggactttagaacagcttcttagaatcttgacttaaatgtccacagtaatatttgacttaaaaaatttagcacactgtcactatgatgaaaaaaattactataaaattatttaaaaaatttttccaccctaacatttagaacattctcacatttgtggtt

SEQ ID NO: 158578 - DNA, 201 bp, Homo sapiens
taaacccgtggccacaggcagggcagcaaccccaaaaggcttcaggaggaggggagtgtggcaggctcccagccggctcccacggctcccctctcctgccygcccttccagctggctgtgtcagcctctccctctcccttgcatcgtttccatctcccagccaagacctccctgacagatctgcccaggctgtagacaata

SEQ ID NO: 158579 - DNA, 201 bp, Homo sapiens
gaaactaaattttggactttagaacagcttcttagaatcttgacttaaatgtccacagtaatatttgacttaaaaaatttagcacactgtcactatgatgaaaaaaattactataaaattatttaaaaaatttttccaccctaacatttagaacattctcacatttgtggttaaaacctattgtgattgttcttagaattt

SEQ ID NO: 158580 - DNA, 201 bp, Homo sapiens
tgagattacaataacaatacctcctctcatagaatagccagcaagtctccactaaataagagtgccttgattttatagatgtttaatcatggatattgaghtaatgcgaacgatttgtagacacaggagtttattaaagaattatataatacctttcaagtgttgaaattaagcctgcatccccacaattttcagaggtgc

SEQ ID NO: 158581 - DNA, 201 bp, Homo sapiens
ccagcaagtctccactaaataagagtgccttgattttatagatgtttaatcatggatattgagataatgcgaacgatttgtagacacaggagtttattaargaattatataatacctttcaagtgttgaaattaagcctgcatccccacaattttcagaggtgctgatgcctaataaactcaaccccttgcatgccaaaat

SEQ ID NO: 158582 - DNA, 201 bp, Homo sapiens
agtctagagaactttcagccaaaataccatcacatattgtcccttcccagttcccttcttctatgagaacactcactaaacacatgctacattttctcacygtatcttccatgtctcttaatgactctgtccacattttgcatttttaaaaattttctgtaatgcattctgaaatatttatgaactctcaccatggccatg

SEQ ID NO: 158583 - DNA, 201 bp, Homo sapiens
gagattacaataacaatacctcctctcatagaatagccagcaagtctccactaaataagagtgccttgattttatagatgtttaatcatggatattgagawaatgcgaacgatttgtagacacaggagtttattaaagaattatataatacctttcaagtgttgaaattaagcctgcatccccacaattttcagaggtgct

SEQ ID NO: 158584 - DNA, 201 bp, Homo sapiens
ctaaataagagtgccttgattttatagatgtttaatcatggatattgagataatgcgaacgatttgtagacacaggagtttattaaagaattatataatayctttcaagtgttgaaattaagcctgcatccccacaattttcagaggtgctgatgcctaataaactcaaccccttgcatgccaaaattggcttaaagccca

SEQ ID NO: 158585 - DNA, 201 bp, Homo sapiens
ttagtagttaagttttgggggagtcaaagttatagtggattttctactgtgcagtggggccagcgccccaacctccgtgttgcttaagggtcaactgtacwtgttatttcctttcctgtaagagaaaaatgatgagaaggtcttttctccaataagtgtattcaaaatgtagcagatttgaaatgtgttggcgccaccatt

SEQ ID NO: 158586 - DNA, 201 bp, Homo sapiens
gacatggaaataggggcctccctctgctgatgaaaaccagcccagccctgaccctgcagctctgggagaggagccccagcactgggattccgaggctttcyattcggtgatcagcactgaacacagaggactcaccatggagtttgagctcagctgggttttccttgttgctattttacaaggtgattcatggagaactaa

SEQ ID NO: 158587 - DNA, 201 bp, Homo sapiens
tcatggatattgagataatgcgaacgatttgtagacacaggagtttattaaagaattatataatacctttcaagtgttgaaattaagcctgcatccccacrattttcagaggtgctgatgcctaataaactcaaccccttgcatgccaaaattggcttaaagcccacccattacccaagctacacttcaagcatcaaggtt

SEQ ID NO: 158588 - DNA, 201 bp, Homo sapiens
cctctgtccctgacacacagggatccttaccctccccagggtctgtgctccccagggaggagccgcacctctgggcgccctgagccccagccctgcagggyaggcaccccatgcggtggttgcaggcacccggcagtcgctccatcctggttttcggcctttagtgcacagaagcgtgaagaagcggtggtcactggcacg

SEQ ID NO: 158589 - DNA, 201 bp, Homo sapiens
tccctctttgaattgaagtgtttcaaagatatcttattttaaaataccaaaataggaatagaatatgaagggctggttatgagtaatatgatacacttttwtgagaggatgagattacaataacaatacctcctctcatagaatagccagcaagtctccactaaataagagtgccttgattttatagatgtttaatcatgg

SEQ ID NO: 158590 - DNA, 201 bp, Homo sapiens
agggctggttatgagtaatatgatacacttttttgagaggatgagattacaataacaatacctcctctcatagaatagccagcaagtctccactaaataasagtgccttgattttatagatgtttaatcatggatattgagataatgcgaacgatttgtagacacaggagtttattaaagaattatataatacctttcaag

SEQ ID NO: 158591 - DNA, 201 bp, Homo sapiens
atgtgttatctgtagtcaaaatcccagggctcaggtctgcaggacctgggtagtctgaggggactttctcactcacccttgcctggactctcctgctgtcytctgtcaacggagatgtttggaaaacgaaacggaccttaatcacaaagggaataatcctagttttctccaatgggatattgatgtagagctgatcttatg

SEQ ID NO: 158592 - DNA, 201 bp, Homo sapiens
tggaagcatgtccctaagtgaaagagagagggagggtggattgggtggaaggttcctatatttctgtgctgtgcaaggaatctgcaaaatataattgagtsttgtgcaagtcagtgctacctctcagaggaaacccatgactcccagaaatggctctgcttatgaatcattacaaatgtaattgccaatgcggaaagtggt

SEQ ID NO: 158593 - DNA, 201 bp, Homo sapiens
gggtccttaaacccgtggccacaggcagggcagcaaccccaaaaggcttcaggaggaggggagtgtggcaggctcccagccggctcccacggctcccctcycctgcctgcccttccagctggctgtgtcagcctctccctctcccttgcatcgtttccatctcccagccaagacctccctgacagatctgcccaggctgta

SEQ ID NO: 158594 - DNA, 201 bp, Homo sapiens
aataaaatcagattatgagagctaaatgttaatcaaggcacaatcacataatataaaattatattttcctgaatgatggaattactaccaatctcccccargacacttcatctgcacggagcctggccctctcttcagatgtcccaccccagagcttgctatatagtgggggacatggaaataggggcctccctctgctga

SEQ ID NO: 158595 - DNA, 201 bp, Homo sapiens
ttaaaggtaatttgatttttctagtgctaattgaaatatttttcccttcctgattgtttactatttctctaggagatacataggtgtaggtttatctccaytgtagcttgcttagcgtgcatggaacttttgaatatgcagattagtgtcttacaaaagtctagagaactttcagccaaaataccatcacatattgtccct

SEQ ID NO: 158596 - DNA, 201 bp, Homo sapiens
tatgatacacttttttgagaggatgagattacaataacaatacctcctctcatagaatagccagcaagtctccactaaataagagtgccttgattttataratgtttaatcatggatattgagataatgcgaacgatttgtagacacaggagtttattaaagaattatataatacctttcaagtgttgaaattaagcctgc

SEQ ID NO: 158597 - DNA, 201 bp, Homo sapiens
atacacttttttgagaggatgagattacaataacaatacctcctctcatagaatagccagcaagtctccactaaataagagtgccttgattttatagatgyttaatcatggatattgagataatgcgaacgatttgtagacacaggagtttattaaagaattatataatacctttcaagtgttgaaattaagcctgcatcc

SEQ ID NO: 158598 - DNA, 201 bp, Homo sapiens
ctctccatcacgtattcctccttcccttcttttgggaaactcttttcttcttgtttgttcattttattttctgtgtccccaactcgaatggaggccacgcrgaacactgtctgtctcattcacttctgtgtccctggaacctagaaccatgcctggcacacagaacgtgcttgataggtactgagacagagacatacagag

SEQ ID NO: 158599 - DNA, 201 bp, Homo sapiens
tgtagcacccatgtcctacctgcttggttgcattgccagtgcccacggtaggctattttatccaggtttttagttttttttgtttgtttgttttcttttgktttttttttttttttttttcaggagagttagtccaaaaccaataactccataactggtagaattggaagactttaatagtgcttaacattttgtacatag

SEQ ID NO: 158600 - DNA, 201 bp, Homo sapiens
ggaaactcttttcttcttgtttgttcattttattttctgtgtccccaactcgaatggaggccacgcagaacactgtctgtctcattcacttctgtgtcccyggaacctagaaccatgcctggcacacagaacgtgcttgataggtactgagacagagacatacagagaaggaaagagggagagagacagagaaagagagag

SEQ ID NO: 158601 - DNA, 201 bp, Homo sapiens
ctctcactgtttctctccttctcatattcactttgcagttgtcaaatagcccaggtgatgttacagatttactccttataaaaggaggcattacacattayacatgcatcttagtggccttacaaaagtgtttggttcatttgtattgactattcacctttaaaatatttcaatattcattaaaatagcttccagccaata

SEQ ID NO: 158602 - DNA, 201 bp, Homo sapiens
tcactgtttctctccttctcatattcactttgcagttgtcaaatagcccaggtgatgttacagatttactccttataaaaggaggcattacacattacacwtgcatcttagtggccttacaaaagtgtttggttcatttgtattgactattcacctttaaaatatttcaatattcattaaaatagcttccagccaatatta

SEQ ID NO: 158603 - DNA, 201 bp, Homo sapiens
tccaggtttttagttttttttgtttgtttgttttcttttgttttttttttttttttttttcaggagagttagtccaaaaccaataactccataactggtaraattggaagactttaatagtgcttaacattttgtacatagctttataacagttttctttttcttttttttctgagagattcttttcaatataccccatca

SEQ ID NO: 158604 - DNA, 201 bp, Homo sapiens
gtgatgttacagatttactccttataaaaggaggcattacacattacacatgcatcttagtggccttacaaaagtgtttggttcatttgtattgactattsacctttaaaatatttcaatattcattaaaatagcttccagccaatattattagacctatgtttctagctttcttttttgtattgatatctaccttcattg

SEQ ID NO: 158605 - DNA, 201 bp, Homo sapiens
cactgcattccagcctgggcgaaagaatgagtgagactccttctcaaaaaaaaaaaaaaaaaaaaaaaaagagttgcaaagtcatactcacctttctgctyttgtcagacaattaaggggtctttgaatacttcagccctaataatttgcttcctaacatacatattgcagtgcttatctaattttaaatatatttttgtt

SEQ ID NO: 158606 - DNA, 201 bp, Homo sapiens
tctaaatatgttatttagccataggttgatgaatatttttcttggttgagaatttcagaatggcattattagtcttaacaaataatattgtttattttacmtttcattctttctgatttcaatatgattaaaggtaatttgatttttctagtgctaattgaaatatttttcccttcctgattgtttactatttctctagga

SEQ ID NO: 158607 - DNA, 201 bp, Homo sapiens
atttctctaggagatacataggtgtaggtttatctccactgtagcttgcttagcgtgcatggaacttttgaatatgcagattagtgtcttacaaaagtctrgagaactttcagccaaaataccatcacatattgtcccttcccagttcccttcttctatgagaacactcactaaacacatgctacattttctcactgtatc

SEQ ID NO: 158608 - DNA, 201 bp, Homo sapiens
ttgaatatgcagattagtgtcttacaaaagtctagagaactttcagccaaaataccatcacatattgtcccttcccagttcccttcttctatgagaacacwcactaaacacatgctacattttctcactgtatcttccatgtctcttaatgactctgtccacattttgcatttttaaaaattttctgtaatgcattctgaa

SEQ ID NO: 158609 - DNA, 201 bp, Homo sapiens
cagtacttgcctggggaaatggtagaagaagggaaggggagaggaggaggaatatagcagaacaggaggaaatgttgagaaaaattcactagtccactttsttgataatgatgagagttacatcatgtttattaattgtacattttaaatgtgtgaagtatattacctttcaattaagcctcataaaatgtattacaagca

SEQ ID NO: 158610 - DNA, 201 bp, Homo sapiens
taacaatacctcctctcatagaatagccagcaagtctccactaaataagagtgccttgattttatagatgtttaatcatggatattgagataatgcgaacsatttgtagacacaggagtttattaaagaattatataatacctttcaagtgttgaaattaagcctgcatccccacaattttcagaggtgctgatgcctaat

SEQ ID NO: 158611 - DNA, 201 bp, Homo sapiens
attttgaaattatagaatatgatatattcagctttgttaaattgtgcccaaaattactttggctatttaaaggcctttgtatttgatataactggagaaawttttaatatttttgtaaaaacatgccatggagattatttattttattggcatataatagatatacatattttatgggaacatgtaatatattgatacatt

SEQ ID NO: 158612 - DNA, 201 bp, Homo sapiens
cagagacatacagagaaggaaagagggagagagacagagaaagagagagaaaataagagaaggggaaggagagatggcggagagggagggagaaccgaacrctgaatccaggggttcctctcccacccctcatgtgcccatggtaacaagggagtccccctcttctgaccccttgttgtcaaaaagtccatcaagcaagaa

SEQ ID NO: 158613 - DNA, 201 bp, Homo sapiens
caagaacgcccgagccccaggccccctctgaaattcccaagaaggaagcaccccaagaaggaaggcgcgcaggacgctgctctggagccatcgggttcccrgtctgctcaccacgctcaaggagccccttaacaggagcaggaggagaaaagacacccagcctggggttcccccaggacaaggccatgctgtaacccaggc

SEQ ID NO: 158614 - DNA, 201 bp, Homo sapiens
tggtccagccctctcatcttgtaggtgaggaaaccgaaggcctgagggagaactgacttgccaggaacccctgttaaggagaattaacaaagagtggttaytaaaggagaactgagttgggagtcagacctggaggcccacacgcttggttaagacattataccaccttgaatctggcatgctgactgagggtgagccact

SEQ ID NO: 158615 - DNA, 201 bp, Homo sapiens
ccccaggccccctctgaaattcccaagaaggaagcaccccaagaaggaaggcgcgcaggacgctgctctggagccatcgggttcccagtctgctcaccacrctcaaggagccccttaacaggagcaggaggagaaaagacacccagcctggggttcccccaggacaaggccatgctgtaacccaggcttggtcctggccct

SEQ ID NO: 158616 - DNA, 201 bp, Homo sapiens
tctcatcttgtaggtgaggaaaccgaaggcctgagggagaactgacttgccaggaacccctgttaaggagaattaacaaagagtggttattaaaggagaastgagttgggagtcagacctggaggcccacacgcttggttaagacattataccaccttgaatctggcatgctgactgagggtgagccactccatcctcgtc

SEQ ID NO: 158617 - DNA, 201 bp, Homo sapiens
cgctgctctggagccatcgggttcccagtctgctcaccacgctcaaggagccccttaacaggagcaggaggagaaaagacacccagcctggggttcccccmggacaaggccatgctgtaacccaggcttggtcctggccctgaccgtgggaagcccaccccacaggccctcgcccaggcaggcctgaggcccatgcaccgc

SEQ ID NO: 158618 - DNA, 201 bp, Homo sapiens
agattccctctttgaattgaagtgtttcaaagatatcttattttaaaataccaaaataggaatagaatatgaagggctggttatgagtaatatgatacacktttttgagaggatgagattacaataacaatacctcctctcatagaatagccagcaagtctccactaaataagagtgccttgattttatagatgtttaatc

SEQ ID NO: 158619 - DNA, 201 bp, Homo sapiens
gggttcccagtctgctcaccacgctcaaggagccccttaacaggagcaggaggagaaaagacacccagcctggggttcccccaggacaaggccatgctgtracccaggcttggtcctggccctgaccgtgggaagcccaccccacaggccctcgcccaggcaggcctgaggcccatgcaccgctaaaggcctggagagggg

SEQ ID NO: 158620 - DNA, 201 bp, Homo sapiens
agaaaagacacccagcctggggttcccccaggacaaggccatgctgtaacccaggcttggtcctggccctgaccgtgggaagcccaccccacaggccctcrcccaggcaggcctgaggcccatgcaccgctaaaggcctggagagggggtcccaccgcagcctcacctgggtcccctggggtcagggtaagctgggacaaa

SEQ ID NO: 158621 - DNA, 201 bp, Homo sapiens
aacctggacaatatagtgagaccccgtctctacaaaaaataaaatattatccaggggtggttgtgcgcatctgtagttccaggtactactgtggctgaggygggaggagcacttgagcctgcactgagctgtgatctcaccagtgtactccagtctgggccacagagcaagaccttgacgcaaaaaaaaaaaaccaacaag

SEQ ID NO: 158622 - DNA, 201 bp, Homo sapiens
tctacatctttctccacaccctgcccaggaaaaggatgaggatgaagacctgtctgatcatctacttccatttaataactagtaaatatattttccttatsattttctttttcttttctctggcatgtttgttaagaatacagtatataagacatataacatattaaatatgtgttaattgactgcttgtgttatttgtaa

SEQ ID NO: 158623 - DNA, 201 bp, Homo sapiens
ggtactactgtggctgaggtgggaggagcacttgagcctgcactgagctgtgatctcaccagtgtactccagtctgggccacagagcaagaccttgacgcaaaaaaaaaaaaccaacaagaaaaattcttgaagattttgcattctgtctcactatccattggttttcatgtctagataatgtcagaaattctttacaatt

SEQ ID NO: 158624 - DNA, 201 bp, Homo sapiens
tacaataacaatacctcctctcatagaatagccagcaagtctccactaaataagagtgccttgattttatagatgtttaatcatggatattgagataatgygaacgatttgtagacacaggagtttattaaagaattatataatacctttcaagtgttgaaattaagcctgcatccccacaattttcagaggtgctgatgc

SEQ ID NO: 158625 - DNA, 201 bp, Homo sapiens
acaggtgtccagtcttttggcttctcagggccacattggaagaagaatgctcctaggccgcacataaaatacactaatgctaacgatagctgatgagcttaaaaaaaaaaaaaaggtttgtgcataattttcatgatacccaccaccacagataggtggaaaagtccttgtagtcaaagggttggacacagctgatctagt

SEQ ID NO: 158626 - DNA, 201 bp, Homo sapiens
tttgaacttatattttactttttttttgtgaacataccaatgcttcaatttttttccagtaatataatcaactatattatgagaaagagaaaaattttgakaaaacacaaatttcatgttttcctactctaattggcttttacataaaaatacaggtaaaatttatttttgcttttttgctatttctgttttgctattctg

SEQ ID NO: 158627 - DNA, 201 bp, Homo sapiens
cgtctgaattgtttgcaaaataaactttgctctcatggttggcctgataattagcataaagttcagaaagaataattaataataattctgtaggaaaagcstgcaagcactaggagcttcacagtctaacagtatgagcacatgcatcctccagcaacttactcaatatttccaagtcagcctgctcctatcttgaatacc

SEQ ID NO: 158628 - DNA, 201 bp, Homo sapiens
ctattgagataaaaaattcgttgtcatttattcccaagcacagctgtttgtcattttcattgaaaaagtctccatttaaactgctgtcacatataaaatcyatttatataagtctgtatttttctgttgtcttggcctttgtgggcagtagtgtgttttaaccgagcaaactgtccttccaaataatgaagctgaagtcag

SEQ ID NO: 158629 - DNA, 201 bp, Homo sapiens
atatactacattatcataaaaataagaacgttttacaaactaaagcaaaagcaaccctaggaataaaatgcacaaataaaatatgtaaacatacaattagrtgtaccatgtacccctctaatttatttagacatttaattttagtacgattttaattaaagtctgtgtattacctgtcatcgtcttagtattttttatata

SEQ ID NO: 158630 - DNA, 201 bp, Homo sapiens
cccaagtggctgctggaacaaagtcagacaccgtgccacctgtccacacttcttggctctgccatcatgctgaagatcggttgaaaggactcccttccctmcccccaaaattaaaagagcacaaactgagaaactgaatgtaggagacagcagtggattatgctgttctcaggggtcatctcaggtttggaagcattcttt

SEQ ID NO: 158631 - DNA, 201 bp, Homo sapiens
tcatctcaggtttggaagcattctttcaaactaacccatctcaggccatctgcagaaaagaaacgtggtacctaactttttttcttgtcagcatttggtargggtgttttattgaccaaatatgttcccacaacctagttttttgtaactaactgaatatagtagatttttaaattttatcatcaaaatctatagacaatt

SEQ ID NO: 158632 - DNA, 201 bp, Homo sapiens
aaaaagcacaataacctcctcattctttttcacacagagaaatgtttgttaagtaattaaagtgtagatgatgatacaaagagcttgattaaattagatgycaaagtacccttgtgattcacaatatgaatggtatttaatttctttgaaatcaataattgctgagtgacattaattaatgccagtatttcagaagttgtt

SEQ ID NO: 158633 - DNA, 201 bp, Homo sapiens
attctttttcacacagagaaatgtttgttaagtaattaaagtgtagatgatgatacaaagagcttgattaaattagatgtcaaagtacccttgtgattcasaatatgaatggtatttaatttctttgaaatcaataattgctgagtgacattaattaatgccagtatttcagaagttgttctagttagtgaaatgtataca

SEQ ID NO: 158634 - DNA, 201 bp, Homo sapiens
ttgattaaattagatgtcaaagtacccttgtgattcacaatatgaatggtatttaatttctttgaaatcaataattgctgagtgacattaattaatgccartatttcagaagttgttctagttagtgaaatgtatacaacatgcaaaagtttcagaactctgaagggcaacattattctataattaagaattcacattaat

SEQ ID NO: 158635 - DNA, 201 bp, Homo sapiens
gtgacattaattaatgccagtatttcagaagttgttctagttagtgaaatgtatacaacatgcaaaagtttcagaactctgaagggcaacattattctatrattaagaattcacattaattattggggagaaattattaagaattaatgactgagaaaatgattttatttagaaaattattttgtgcatgagcattactgc

SEQ ID NO: 158636 - DNA, 201 bp, Homo sapiens
tgagagtccggccggggatccgtaccagtggtccctgcccacctgggttaggaaaggctgactggcctggggaggctgtggacgacgtctgcggtgtcatstgagtgccacggccatcactttgagacggcgtctgcttgctgcagccaggcaaaggtcttaaggaaggccaaggccactgtcgacaggtgtgtggctcca

SEQ ID NO: 158637 - DNA, 201 bp, Homo sapiens
cagccctgcagggcaggcaccccatgcggtggttgcaggcacccggcagtcgctccatcctggttttcggcctttagtgcacagaagcgtgaagaagcggkggtcactggcacggagtcctccttgagagtccggccggggatccgtaccagtggtccctgcccacctgggttaggaaaggctgactggcctggggaggct

SEQ ID NO: 158638 - DNA, 201 bp, Homo sapiens
ctgaagggcaacattattctataattaagaattcacattaattattggggagaaattattaagaattaatgactgagaaaatgattttatttagaaaattrttttgtgcatgagcattactgcaagttttgcaagaaacataaatttaaagaaacaattatgtccacaaggtgaatttaataacatctgatattttccatg

SEQ ID NO: 158639 - DNA, 201 bp, Homo sapiens
ggaggagccgcacctctgggcgccctgagccccagccctgcagggcaggcaccccatgcggtggttgcaggcacccggcagtcgctccatcctggttttcrgcctttagtgcacagaagcgtgaagaagcggtggtcactggcacggagtcctccttgagagtccggccggggatccgtaccagtggtccctgcccacctg

SEQ ID NO: 158640 - DNA, 201 bp, Homo sapiens
caagaaacataaatttaaagaaacaattatgtccacaaggtgaatttaataacatctgatattttccatgattacagttttatttggtaaatctttaaatrcacatcatctaaagataataaatgaatcttggaaatcttgtaggtaagggtaaatgttaggatgcaattggtaacctaaatgttaccaattacatttaca

SEQ ID NO: 158641 - DNA, 201 bp, Homo sapiens
tgttaattgactgcttgtgttatttgtaaggcttacagtaggctattagtagttaagttttgggggagtcaaagttatagtggattttctactgtgcagtkgggccagcgccccaacctccgtgttgcttaagggtcaactgtacatgttatttcctttcctgtaagagaaaaatgatgagaaggtcttttctccaataag

SEQ ID NO: 158642 - DNA, 201 bp, Homo sapiens
ttcctatatttctgtgctgtgcaaggaatctgcaaaatataattgagtcttgtgcaagtcagtgctacctctcagaggaaacccatgactcccagaaatgrctctgcttatgaatcattacaaatgtaattgccaatgcggaaagtggtgtctggtgagaggtattgggtacgtgaagtcatgaatgactttatgcaacac

SEQ ID NO: 158643 - DNA, 201 bp, Homo sapiens
tgagtcaaggagtttgagaacaacctggacaatatagtgagaccccgtctctacaaaaaataaaatattatccaggggtggttgtgcgcatctgtagttcwaggtactactgtggctgaggtgggaggagcacttgagcctgcactgagctgtgatctcaccagtgtactccagtctgggccacagagcaagaccttgacg

SEQ ID NO: 158644 - DNA, 201 bp, Homo sapiens
attgagataaaaaattcgttgtcatttattcccaagcacagctgtttgtcattttcattgaaaaagtctccatttaaactgctgtcacatataaaatctayttatataagtctgtatttttctgttgtcttggcctttgtgggcagtagtgtgttttaaccgagcaaactgtccttccaaataatgaagctgaagtcagcc

SEQ ID NO: 158645 - DNA, 201 bp, Homo sapiens
gcagtagtgtgttttaaccgagcaaactgtccttccaaataatgaagctgaagtcagcctacctgcttgccatttttcttccccttccatttttctaaccycaggataattgtaagaatgaattaagatttgtgtttaaggccgggcacagtgtctcaggcctgtaatctcagtactttgggaggcagagacagatgtatc

SEQ ID NO: 158646 - DNA, 201 bp, Homo sapiens
ttttcttccccttccatttttctaacctcaggataattgtaagaatgaattaagatttgtgtttaaggccgggcacagtgtctcaggcctgtaatctcagyactttgggaggcagagacagatgtatcgcttgagctcaggagttgaagaccagcctgggcaacatactgagactctgtcttgtataattaaattaaaatt

SEQ ID NO: 158647 - DNA, 201 bp, Homo sapiens
ctaacctcaggataattgtaagaatgaattaagatttgtgtttaaggccgggcacagtgtctcaggcctgtaatctcagtactttgggaggcagagacagmtgtatcgcttgagctcaggagttgaagaccagcctgggcaacatactgagactctgtcttgtataattaaattaaaatttaataaaagaagaggaaaaga

SEQ ID NO: 158648 - DNA, 201 bp, Homo sapiens
caggataattgtaagaatgaattaagatttgtgtttaaggccgggcacagtgtctcaggcctgtaatctcagtactttgggaggcagagacagatgtatcscttgagctcaggagttgaagaccagcctgggcaacatactgagactctgtcttgtataattaaattaaaatttaataaaagaagaggaaaagacctgtgt

SEQ ID NO: 158649 - DNA, 201 bp, Homo sapiens
actgagactctgtcttgtataattaaattaaaatttaataaaagaagaggaaaagacctgtgtttcaaatttaaaaaaaggggggaaagtgtaatgcaaamtgtggactatgccagctatgattgggaaaaataatttttcctacagcattatctgtagacttgtattagcagcatactggtcataagcattttgctttcc

SEQ ID NO: 158650 - DNA, 201 bp, Homo sapiens
tctgtagacttgtattagcagcatactggtcataagcattttgctttcctcaaatatgatgaggtaagctactttaaagtgtggtggggctttcttctgcrtggctcctggaggtgttgagtcccaatttagccaattaatttgggtttagttttgatatggataagggagaccaacttcgttcatggtgcacacacagtt

SEQ ID NO: 158651 - DNA, 201 bp, Homo sapiens
accaaggcccgggcccttaaaaagactcaatgcagcctttctgtatctcatactgtattctgcaagatgctcctgtgaaagaaagttgtgctgcatcagcygtctcccttctgaagatccctgcggatgaggatttgtgttttaaaggttctgagaagtcctgcaacaacagttctcaaacttatttgtccaggggatctt

SEQ ID NO: 158652 - DNA, 201 bp, Homo sapiens
tttttgccgccgctttctgccgccgcccctttttgccgcagctttctgccgccgccgccgccgccgccgctttctgccgccgccgccttttgccgccgccrctttttgccgccgccgccttttgccgccgccactttttgccgccgtcgccgccgccgcggctttttgcctccgtccccgccgccgccgcttttgccgccg

SEQ ID NO: 158653 - DNA, 201 bp, Homo sapiens
atgaaaagatgaaatgagatgaaatgaaatcatgagatgaaatgatgaaatgatgagatgaagtgaaatgatgaaatgaaatgaagtgacgaaatgcaaaygatgagatgaaatgatgaaatgaaataatgaaatgaaaggatgaaatgatgagatgaaatgatgaaaggatgaaatgaaatgaaatgaggaaatgaaatg

SEQ ID NO: 158654 - DNA, 201 bp, Homo sapiens
tgatattttccatgattacagttttatttggtaaatctttaaatgcacatcatctaaagataataaatgaatcttggaaatcttgtaggtaagggtaaatrttaggatgcaattggtaacctaaatgttaccaattacatttacaacacatacaattacattttcacacacatgcacacactcactgatacacgtgtgtat

SEQ ID NO: 158655 - DNA, 201 bp, Homo sapiens
gaaatgtgttggcgccaccattttgcatctcactttgaaaacttattattaaaaatcgtactaaagcctaccttacttttccaaccttagaaaaaatgttrcaaagaaaaggggtgaatccatgctagtttgcactgaaatttgaaattatcttttaaaaatatatttttactttaattacttccaaaatagagatcagtt

SEQ ID NO: 158656 - DNA, 201 bp, Homo sapiens
ggagagagaggctataccatttaacctagacgtggtaggctgtacaatctaggtgtttgtaatactctctgtgatgtttgcaaaatgatgaaattgcctayggatgcatctcttagaacgtatccctatcattcagtgatgtgtgactctactaaaatgctcaatgtaagtttcaatgccctccataaaattgttgtactg

SEQ ID NO: 158657 - DNA, 201 bp, Homo sapiens
aatttgctacatcaattttttagtctcctaaaatatattctttttattttaaatttttttaaagcaaatgtgctttataatctaacagtgatatttctacyaatgaacctttatggatctgtttgtactctttttctgctttcctttcaaatgttggaatatcatttccttgtgtacttagatgcctttgaatgacaaata

SEQ ID NO: 158658 - DNA, 201 bp, Homo sapiens
gcaaaatgaaatggccacttatatggtatatggatcacttgtttctgttgagttacagattcagctgactctttctcccaatgttagttattcagagaaaraaaacatgatagtaattttggggtgacaaatacaatatttgatgaaagcaaatttattgagggttagacaaactacaagatactttaggctgcaaagtca

SEQ ID NO: 158659 - DNA, 201 bp, Homo sapiens
gccaaaataatcttgaaaaaagaaaacatgttaggataattcacacccccattctccaaactttactgcaaagcatcagtaatcaagacaacacaataccratgaaggaaaaatatatagattgatgattctacacataaatgagatcacacaacatttgtctttcttcgtctggcttattccacttagaataatgttctc

SEQ ID NO: 158660 - DNA, 201 bp, Homo sapiens
atgggaatctctgattagaacaggctttgagttctgataggagctaagagagaggctcacccagggtcagggtccttaaaaccacatggttttcacagctrtcccccctcgtcttgtaaaactgggcacgtctgactcagactgattcagttgaccctctttctgctaatccattttccttccctgtagacttgattctca

SEQ ID NO: 158661 - DNA, 201 bp, Homo sapiens
cacagtaatatttgacttaaaaaatttagcacactgtcactatgatgaaaaaaattactataaaattatttaaaaaatttttccaccctaacatttagaayattctcacatttgtggttaaaacctattgtgattgttcttagaatttagataaaaaatgttccagaaagtttgaagagaagcactttagtcgatttttat

SEQ ID NO: 158662 - DNA, 201 bp, Homo sapiens
aacgctagcttctggcaagaggctgggactggtaggtgacattctccttttgccccagtggccaaaatgtggtcacgtggccatgctttactgcaaggaaygctgggaaatgtagtctttcttctttgcagccgtcttatcatggaaacaggggagaacggatagtaggggacaactaaccagctctgccacagctgaaaa

SEQ ID NO: 158663 - DNA, 201 bp, Homo sapiens
ccctctgcctgaagccttcctgccctctctcctggctccaagcatcctgtgggcttcccccagcgctggtgccagcaaagcccgatctcctctctcgaggycgcctgcactccccctgtgcgtgcatcgcaacctctgtccctgacacacagggatccttaccctccccagggtctgtgctccccagggaggagccgcacc

SEQ ID NO: 158664 - DNA, 201 bp, Homo sapiens
ccgtggccacaggcagggcagcaaccccaaaaggcttcaggaggaggggagtgtggcaggctcccagccggctcccacggctcccctctcctgcctgcccktccagctggctgtgtcagcctctccctctcccttgcatcgtttccatctcccagccaagacctccctgacagatctgcccaggctgtagacaatacagac

SEQ ID NO: 158665 - DNA, 201 bp, Homo sapiens
ttctgacctcaggtgatcggcccacctcggcctctcaaagtgctgggattacaggcatgagccaccgtacatggctcccaatgtcattttgatttgtcacyatttgtacatggatatttttttctctcccatattcccatgccccctccaaatctttagaattctttgttaatctataatgttttgaaatttagttataat

SEQ ID NO: 158666 - DNA, 201 bp, Homo sapiens
ttggattttttgcatgaaacgtgtcggaatgtgttttgaaagctatttctcattactagccttacaaagtgcattaaacattcagaatcaccgttattctraaatatactttttacacagtacaaagaaagccaatctaatctgtccaggaaaaagggggaagaaactcttaagggagaaaatacctacaagaaatattaa

SEQ ID NO: 158667 - DNA, 201 bp, Homo sapiens
ggtcatctgtacaaacacaaatgtgatgttattgtacttcctgtaaaaaaccactggtctaaggaccaaaatcctgaacaaagtccaggtgggctgtaagrtctgatcccatctttctctctatgctcatttctaacacatttttattcactctcagagtctgataaacactggcctttttcgttttcatgaaggtttcct

SEQ ID NO: 158668 - DNA, 201 bp, Homo sapiens
agtacaaagaaagccaatctaatctgtccaggaaaaagggggaagaaactcttaagggagaaaatacctacaagaaatattaaagccagtgcaaccagatsagtatgagcaatttaattatttgatggcaacctttcactagtgtttcattttcagtagcgaatggtactgtgagcaattttggctcccccaaaaatgttt

SEQ ID NO: 158669 - DNA, 201 bp, Homo sapiens
acagtaatatgagggcagcctcaatcatttcactggatgatcctttgaaagtaagtatatgtaagtcttttctcttgtacctagtccatttcctgcagtgrgattctctagtctcatgcctgggagatataaccgtttcaatggaagatgctttgaaagctagtatccatagtcttttctcttgtccctgtccatctctta

SEQ ID NO: 158670 - DNA, 201 bp, Homo sapiens
gatcagagaagcccttactccaggcacgggtctgaatccacacaggtcggtcagccccgggcaggttcaggctattcaaactgaccttttcctggcttccrccttatcttggcttcatccctccagatgagaatgactttcaaatgctatttcctgacctagtatcatctttcagtcctaagaatgtaaatgtaactgagt

SEQ ID NO: 158671 - DNA, 201 bp, Homo sapiens
agatctcccatctgtctagtgtaattccagcctcagaaggctccacatagaatgctttcctaaaaaaatgtccactcttacaatgctgtctgggctattaytacacaggctttgtagttagaggatcactgattcaatttgtgccaagcgcaagggttctaagcattaaagaaagaccttggagattatccaatccaactt

SEQ ID NO: 158672 - DNA, 201 bp, Homo sapiens
agagcaagcactttgctcagtacttggaatatggcaataccaaacaaatgcctactattaccctattattctgtctaatcattgttggacctgatctagcrccctcatgtcagtcctactacatgaaggtaatatagacccttctcttcttaaccatcaaaggatttcagtgaagttgaacttggtttcagaaagctgggg

SEQ ID NO: 158673 - DNA, 201 bp, Homo sapiens
aattctgccacactaattttaagcctaataactcttatttattagttcttacctttgtattgatagaaattcatggttatattttttcatctttctaaatwgttttttagaaatttttatttcttatattgtctgtttcctgtgagaatgcccccaaccccaccctacaccccatttgtttgttttagtctctgcctttct

SEQ ID NO: 158674 - DNA, 201 bp, Homo sapiens
gcaggggaaatataaaaaccgattaaggtgaatgtcagtatgttcccagaacggaccgcaaaatcaatcacttccaacagaactctgacatggcaaagccrtaagtcggtggtggactaaatatggacacaaaatcttgtaaccctcccatccgccccactgagagacgtagagtttatttccctatcctctgaatttaca

SEQ ID NO: 158675 - DNA, 201 bp, Homo sapiens
aaaaccgattaaggtgaatgtcagtatgttcccagaacggaccgcaaaatcaatcacttccaacagaactctgacatggcaaagccgtaagtcggtggtgsactaaatatggacacaaaatcttgtaaccctcccatccgccccactgagagacgtagagtttatttccctatcctctgaatttacactggtcttgtgact

SEQ ID NO: 158676 - DNA, 201 bp, Homo sapiens
  misc_feature (1)...(201): n = A,T,C or G
gttcctgccaatattttatgaaattattctctaaaactctggctgtttacgataaatacttcaggattcctaacttattttatgtcaaaaagagtaagctncttgttatcttggagagaaacagtaatgtcggtataagaatcacctattataaagtcaggcctgggacaaaatgcttctgttgaaagctgctaacagaga

SEQ ID NO: 158677 - DNA, 201 bp, Homo sapiens
ctaacagagagattgtgttccgcttacctcctcctcacaggctgtacagaatcattgtcacttccacaggaggggtttcggcgacgcgtgtaagggaactytggcgacttagtgcgatcactgggagaattgtagagtccactggagagaaagaaaaatggtcaaaaagagcccagagagttcctgggggaaaacacaccg

SEQ ID NO: 158678 - DNA, 201 bp, Homo sapiens
acgaaagagaaaggccccctggataacacaacctcagctgtcatctgaccacagcctcatgaaatcgtgaacaagacgagctaaaaagctgcctgttcaayggacagaattatactagataaatagagttgttgctgctttaagccactgagttctgcagtggtttataatatggcaacagataaataagacagctcctct

SEQ ID NO: 158679 - DNA, 201 bp, Homo sapiens
atgctatttcctgacctagtatcatctttcagtcctaagaatgtaaatgtaactgagttgttctaccctcaacaaattgttttagaaacccctggggagayatggaggaagggactaatcagaagcctccaggcaccagtggggaggggtgtgtcacctctcacatcctcaggagtcttagcttaagataaagatagagct

SEQ ID NO: 158680 - DNA, 201 bp, Homo sapiens
ctcatctataatctactctctactgcagagatagaaagcctggaaattttatattcctggacactttgccagctgggttctagttaagagagactccagtkagatctgaaggcagagaacaggaaaagttattttccttctagttgtacctgtggcatcaactcttgcactcctgagaagtgggggttctttgttcggcta

SEQ ID NO: 158681 - DNA, 201 bp, Homo sapiens
catcgaattcaaaaaactgaacaagcctgggtttcattctggacagctccctctcctctacccctcatactgattctcctaccaattttacctctcactgrctactgaaaccatctacttctttatatttccacatcaccaccttggtccatgctcccattctctattgctaggactcggacaatagcctgctgcctggtc

SEQ ID NO: 158682 - DNA, 201 bp, Homo sapiens
ttcccataccctgaggctccaaattctctttatctcttctctcataatctcctccacttcaactcagcaacctacctcatacttacgactttatcatctgyaaccacctccaaacactttgctctcttaccacaatctcctcttcctcctgtttaccactcgccatttactttcaaacagcttcaatggggcatcctggtt

SEQ ID NO: 158683 - DNA, 201 bp, Homo sapiens
ctcgccatttactttcaaacagcttcaatggggcatcctggttaaaggtgctggctctagagccagacaacatgaatgtgaatcccatcttctccactgaygagttatgtgatttaaataagttacttttctactcagtgactcatttttaatagaatctcctttaaagtctcctctaaaggataaaacgaattaatatat

SEQ ID NO: 158684 - DNA, 201 bp, Homo sapiens
agttgaacttggtttcagaaagctgggggcaaagctctgggaaactagcagaagcaaaagggatcaagcaggaaaaggccagcaagtgtgtattaactagrgcataggtgaaagaagggcttggcttccaaacctgcagtgtgcacaaaaagagtcttgatggttacctgacatcatgaactgaaacttcttgtaattata

SEQ ID NO: 158685 - DNA, 201 bp, Homo sapiens
ctagggcataggtgaaagaagggcttggcttccaaacctgcagtgtgcacaaaaagagtcttgatggttacctgacatcatgaactgaaacttcttgtaaktataaaagtcatttaggctgggtgcagtgactcatgcctgtaatcccagcaatttgggagactgaggtgggaggactgcttgaggctaggaattcaagac

SEQ ID NO: 158686 - DNA, 201 bp, Homo sapiens
gacgagttatgtgatttaaataagttacttttctactcagtgactcatttttaatagaatctcctttaaagtctcctctaaaggataaaacgaattaatayatttaaaatgcatacactaggacctgggccattgttagcactcaaccaagataagctgttattgcttattcaactatttccattcttccttttctttgac

SEQ ID NO: 158687 - DNA, 201 bp, Homo sapiens
aaaaaaggaaaaagaggccgggcgcggtgactcatgcctgtaatcccagcattttgggaggctgaggcagagggatcacgaggtcaggagttcgagaccawcgtggagaaaccctatccctactaaaaataaaaaaattagccgggcctgatggcgcatgcctgtaatcccagctactcagggggctgaggcaggagaatc

SEQ ID NO: 158688 - DNA, 201 bp, Homo sapiens
acaacacaggtctgtcactggtttggtagttgtgaccagagatacactagacatatccatatttttaggaataaaggtcttccagcataactattcatcasctatagtttttgacttaagtttttaaccaaaactatgaaatggggaaaattattaatatgccatttagagttttcagaaatatattaccttacaggcaat

SEQ ID NO: 158689 - DNA, 201 bp, Homo sapiens
gatggcgcatgcctgtaatcccagctactcagggggctgaggcaggagaatcgctcgaacccaggaggcagagtttgcagtgagccaagatcatgccactrcactccagcctgggcatcagagcgagactccatctcaaaaacaaaaacaaaaaccacaaaaaccaaaaaaaggaaaaagtcatttatacaatgccaatta

SEQ ID NO: 158690 - DNA, 201 bp, Homo sapiens
taagagagactccagttagatctgaaggcagagaacaggaaaagttattttccttctagttgtacctgtggcatcaactcttgcactcctgagaagtgggrgttctttgttcggctacagtggtggtatctccagcagtgtcagcaagagtggtccctgtctagcatccatcacggtgcctgcagcattgtcagcagcaag

SEQ ID NO: 158691 - DNA, 201 bp, Homo sapiens
cactcaaccaagataagctgttattgcttattcaactatttccattcttccttttctttgaccccaataagactatctattgacctggctactctccaccrgctcttcacttctcttcactgtcttctgtactcagcttagatttcctaatccatcatttcaataacatgcatgctgatactcaacatgttcctcaactct

SEQ ID NO: 158692 - DNA, 201 bp, Homo sapiens
tttgtttgttttagtctctgcctttctagacagaagcaatgctcaaatgcaggcgttcatggctctctcttcctattcaagcagtaagtgttaaaatgacyggagccctttggatggtgcagtgcacgttaattaatggcctcacagtaatatgagggcagcctcaatcatttcactggatgatcctttgaaagtaagtat

SEQ ID NO: 158693 - DNA, 201 bp, Homo sapiens
catctgtacaaacacaaatgtgatgttattgtacttcctgtaaaaaaccactggtctaaggaccaaaatcctgaacaaagtccaggtgggctgtaaggtcwgatcccatctttctctctatgctcatttctaacacatttttattcactctcagagtctgataaacactggcctttttcgttttcatgaaggtttcctgct

SEQ ID NO: 158694 - DNA, 201 bp, Homo sapiens
aaagcaagattttcaaaattgatcaagtatattcaagcatatagctcttactacattattactatggtgctagcaaaatggtttgctggcacttgagtacrtaagacaatacgatgttaggccaggcgtggtggctcacgcctataatcccagcacttttgaaggctgaggcggggggatcacaaggttgcagtgagctga

SEQ ID NO: 158695 - DNA, 201 bp, Homo sapiens
attaatccaagatcgtcaaaaaatagaaaaggcctgggttctctgagagccccttcccccttcataagtttaaggggaaaattcacataatatgcccagcmcagtggccagcacctgccagtgctctgtaaagaggaaagtcactccacctccccactttccctcacgcttgtggcccaaggcccaagctccagtcccaca

SEQ ID NO: 158696 - DNA, 201 bp, Homo sapiens
gaaattgtaacagtatgtttgggagcaaggtatgtaaggcagttgctggtgggcatgttttgaacatgtattgggcccttatatgtatgatctctgtgatmccatcattactgttcatttcttccaggagaggaatgacacacttctcactttaattgccagattatctccaattctgaatcagtggaatataatttaata

SEQ ID NO: 158697 - DNA, 201 bp, Homo sapiens
gggatgaatccatttgatggaagtgtggtattgttcagagggtggcagaaggtagaggagtgtccattattgctaacaccttctgagtcagggtgaggggrggaatgtgcccagtacagctggaaaacagatcagagatgaagccccttgtctgttgtcacctggctgggataggcaggtgatattgttcttcacttcaag

SEQ ID NO: 158698 - DNA, 201 bp, Homo sapiens
cccagagaaaacccagtcttctctattcctcaagtaccttctaaatgagatcaaatgaaagtgttatgaaaacattacctttctccctctagaagtgatgrgctttacatgtgggatgaatccatttgatggaagtgtggtattgttcagagggtggcagaaggtagaggagtgtccattattgctaacaccttctgagtc

SEQ ID NO: 158699 - DNA, 201 bp, Homo sapiens
cattaagaaacgcctaagaataatcccagagaaaacccagtcttctctattcctcaagtaccttctaaatgagatcaaatgaaagtgttatgaaaacattrcctttctccctctagaagtgatgagctttacatgtgggatgaatccatttgatggaagtgtggtattgttcagagggtggcagaaggtagaggagtgtcc

SEQ ID NO: 158700 - DNA, 201 bp, Homo sapiens
ttgtgatcctggggtgcagctcccattcttggctgcctggctgcttctttccagacctactgtcttgtgacatccccttaggcacccagcacaggctgctktctgatttagaactgagcctgttcagttgatggctcagtgcaggcctttaaaaaacatcctgctgttggttagtacatcaatggttggcttacttatttg

SEQ ID NO: 158701 - DNA, 201 bp, Homo sapiens
aacatgtcccagtcattaagaaacgcctaagaataatcccagagaaaacccagtcttctctattcctcaagtaccttctaaatgagatcaaatgaaagtgktatgaaaacattacctttctccctctagaagtgatgagctttacatgtgggatgaatccatttgatggaagtgtggtattgttcagagggtggcagaagg

SEQ ID NO: 158702 - DNA, 201 bp, Homo sapiens
cattcaccaaggtgtttgtgatcctggggtgcagctcccattcttggctgcctggctgcttctttccagacctactgtcttgtgacatccccttaggcacscagcacaggctgctgtctgatttagaactgagcctgttcagttgatggctcagtgcaggcctttaaaaaacatcctgctgttggttagtacatcaatggt

SEQ ID NO: 158703 - DNA, 201 bp, Homo sapiens
aggtagagcaggcattcaccaaggtgtttgtgatcctggggtgcagctcccattcttggctgcctggctgcttctttccagacctactgtcttgtgacatycccttaggcacccagcacaggctgctgtctgatttagaactgagcctgttcagttgatggctcagtgcaggcctttaaaaaacatcctgctgttggttag

SEQ ID NO: 158704 - DNA, 201 bp, Homo sapiens
catctagggtcaggtgtgtatgttctatgatagcacaatgatgaaattgtgtaacgacacattcttcagaacatgtcccagtcattaagaaacgcctaagwataatcccagagaaaacccagtcttctctattcctcaagtaccttctaaatgagatcaaatgaaagtgttatgaaaacattacctttctccctctagaag

SEQ ID NO: 158705 - DNA, 201 bp, Homo sapiens
ggctatgccatctagggtcaggtgtgtatgttctatgatagcacaatgatgaaattgtgtaacgacacattcttcagaacatgtcccagtcattaagaaaygcctaagaataatcccagagaaaacccagtcttctctattcctcaagtaccttctaaatgagatcaaatgaaagtgttatgaaaacattacctttctccc

SEQ ID NO: 158706 - DNA, 201 bp, Homo sapiens
ttccacctgtagaggccaaagtgaccacactgcaggtagagcaggcattcaccaaggtgtttgtgatcctggggtgcagctcccattcttggctgcctggstgcttctttccagacctactgtcttgtgacatccccttaggcacccagcacaggctgctgtctgatttagaactgagcctgttcagttgatggctcagtg

SEQ ID NO: 158707 - DNA, 201 bp, Homo sapiens
gccatactgtacagcctgggtgtggagtaggctatgccatctagggtcaggtgtgtatgttctatgatagcacaatgatgaaattgtgtaacgacacattyttcagaacatgtcccagtcattaagaaacgcctaagaataatcccagagaaaacccagtcttctctattcctcaagtaccttctaaatgagatcaaatga

SEQ ID NO: 158708 - DNA, 201 bp, Homo sapiens
gtacagatgaagacttccacctgtagaggccaaagtgaccacactgcaggtagagcaggcattcaccaaggtgtttgtgatcctggggtgcagctcccatycttggctgcctggctgcttctttccagacctactgtcttgtgacatccccttaggcacccagcacaggctgctgtctgatttagaactgagcctgttcag

SEQ ID NO: 158709 - DNA, 201 bp, Homo sapiens
gagcaacaggccatactgtacagcctgggtgtggagtaggctatgccatctagggtcaggtgtgtatgttctatgatagcacaatgatgaaattgtgtaaygacacattcttcagaacatgtcccagtcattaagaaacgcctaagaataatcccagagaaaacccagtcttctctattcctcaagtaccttctaaatgag

SEQ ID NO: 158710 - DNA, 201 bp, Homo sapiens
tacagtaacatgctgtacacgtgtgtagccttgagcaacaggccatactgtacagcctgggtgtggagtaggctatgccatctagggtcaggtgtgtatgytctatgatagcacaatgatgaaattgtgtaacgacacattcttcagaacatgtcccagtcattaagaaacgcctaagaataatcccagagaaaacccagt

SEQ ID NO: 158711 - DNA, 201 bp, Homo sapiens
tgtacagatgaagacttccacctgtagaggccaaagtgaccacactgcaggtagagcaggcattcaccaaggtgtttgtgatcctggggtgcagctcccaytcttggctgcctggctgcttctttccagacctactgtcttgtgacatccccttaggcacccagcacaggctgctgtctgatttagaactgagcctgttca

SEQ ID NO: 158712 - DNA, 201 bp, Homo sapiens
gaatcagggaagaaaaactcattcacttatgtgaggcaaacatcacatgcagtcatactaaccaactaaacatgataagctacaaagaactatggtattcrctgctctcaaaacgctactgagattaccaagttttaagcttatttcaagattatttataggtgattccccaattgggaaactcatttctgaatttcttct

SEQ ID NO: 158713 - DNA, 201 bp, Homo sapiens
cctcaacaccaatgtggctatttgtgactgcctttgttttataatatttttattattcaccttgtacagatgaagacttccacctgtagaggccaaagtgrccacactgcaggtagagcaggcattcaccaaggtgtttgtgatcctggggtgcagctcccattcttggctgcctggctgcttctttccagacctactgtc

SEQ ID NO: 158714 - DNA, 201 bp, Homo sapiens
tcacgcctataatcccagcacttttgaaggctgaggcggggggatcacaaggttgcagtgagctgagattgtgctacagcactccagcctggaaacaaagygagattccgtgtcaaaaaaaaaaaaaattaaatattttttatttcctgtttattgcatgtttgaaacttttttctgtattttctattttgggatgtacgt

SEQ ID NO: 158715 - DNA, 201 bp, Homo sapiens
ttcctctaggccctgtccctttgatgttaagtggtggagggagttggcgggatttgcctctggcttgcggtatatccagtggattgtaacaaatccagaaytcaagttctttccatatctggaaaacaggcaggatttatcagaacctttataaatgttgtgaaaaatgaaggtgaataaacacctgtttttccagcatct

SEQ ID NO: 158716 - DNA, 201 bp, Homo sapiens
tgttacagttgcctacagtatccagtacagtaacatgctgtacacgtgtgtagccttgagcaacaggccatactgtacagcctgggtgtggagtaggctaygccatctagggtcaggtgtgtatgttctatgatagcacaatgatgaaattgtgtaacgacacattcttcagaacatgtcccagtcattaagaaacgccta

SEQ ID NO: 158717 - DNA, 201 bp, Homo sapiens
atcttttactataacttttctgtgtttatatacatttagatacacaaataccactgtgttacagttgcctacagtatccagtacagtaacatgctgtacasgtgtgtagccttgagcaacaggccatactgtacagcctgggtgtggagtaggctatgccatctagggtcaggtgtgtatgttctatgatagcacaatgat

SEQ ID NO: 158718 - DNA, 201 bp, Homo sapiens
ttggttagtacatcaatggttggcttacttatttggtgttcattttttcagttttcagaaaggtcagttgaaatgctgctggtggctgtagaattgatacrcagggaggtttttgatctgtgagctttctaagggacaattgctaagctgcactgataccttgagcccctttcctttggaacaatgtagagcccagttcat

SEQ ID NO: 158719 - DNA, 201 bp, Homo sapiens
gtgcaggcctttaaaaaacatcctgctgttggttagtacatcaatggttggcttacttatttggtgttcattttttcagttttcagaaaggtcagttgaartgctgctggtggctgtagaattgatacacagggaggtttttgatctgtgagctttctaagggacaattgctaagctgcactgataccttgagcccctttc

SEQ ID NO: 158720 - DNA, 201 bp, Homo sapiens
acgctactgagattaccaagttttaagcttatttcaagattatttataggtgattccccaattgggaaactcatttctgaatttcttctctcctaaaatakatctacaaaaattaacaaactttattccagtaagaaaatttgggatgtactgcttcaacccctgtcctaaggaaattatccagcctggagggtggggtgc

SEQ ID NO: 158721 - DNA, 201 bp, Homo sapiens
gtgttggctggagatgcctggaggtctgaaggtgtgcccttttataggcaggaattccaccaggatgggtatagcttgtttttttaaaaggcttgggactrgatacgattgccccagaagaccgtgtagacagtgaggaaggctgagcatgaatgggatgacctaccagcacaaaaagggcaggcagaaaggcagtaaaga

SEQ ID NO: 158722 - DNA, 201 bp, Homo sapiens
gcacccagcacaggctgctgtctgatttagaactgagcctgttcagttgatggctcagtgcaggcctttaaaaaacatcctgctgttggttagtacatcartggttggcttacttatttggtgttcattttttcagttttcagaaaggtcagttgaaatgctgctggtggctgtagaattgatacacagggaggtttttga

SEQ ID NO: 158723 - DNA, 201 bp, Homo sapiens
aggagtttgaaacccaatcgcagctgcaggtcccacacaactgaattcggttccgtgtgcatagcagtgttggctggagatgcctggaggtctgaaggtgygcccttttataggcaggaattccaccaggatgggtatagcttgtttttttaaaaggcttgggactggatacgattgccccagaagaccgtgtagacagtg

SEQ ID NO: 158724 - DNA, 201 bp, Homo sapiens
ggcacccagcacaggctgctgtctgatttagaactgagcctgttcagttgatggctcagtgcaggcctttaaaaaacatcctgctgttggttagtacatcwatggttggcttacttatttggtgttcattttttcagttttcagaaaggtcagttgaaatgctgctggtggctgtagaattgatacacagggaggtttttg

SEQ ID NO: 158725 - DNA, 201 bp, Homo sapiens
tgacatccccttaggcacccagcacaggctgctgtctgatttagaactgagcctgttcagttgatggctcagtgcaggcctttaaaaaacatcctgctgtkggttagtacatcaatggttggcttacttatttggtgttcattttttcagttttcagaaaggtcagttgaaatgctgctggtggctgtagaattgatacac

SEQ ID NO: 158726 - DNA, 201 bp, Homo sapiens
cttgtgacatccccttaggcacccagcacaggctgctgtctgatttagaactgagcctgttcagttgatggctcagtgcaggcctttaaaaaacatcctgmtgttggttagtacatcaatggttggcttacttatttggtgttcattttttcagttttcagaaaggtcagttgaaatgctgctggtggctgtagaattgat

SEQ ID NO: 158727 - DNA, 201 bp, Homo sapiens
actgtcttgtgacatccccttaggcacccagcacaggctgctgtctgatttagaactgagcctgttcagttgatggctcagtgcaggcctttaaaaaacawcctgctgttggttagtacatcaatggttggcttacttatttggtgttcattttttcagttttcagaaaggtcagttgaaatgctgctggtggctgtagaa

SEQ ID NO: 158728 - DNA, 201 bp, Homo sapiens
ttccagacctactgtcttgtgacatccccttaggcacccagcacaggctgctgtctgatttagaactgagcctgttcagttgatggctcagtgcaggcctytaaaaaacatcctgctgttggttagtacatcaatggttggcttacttatttggtgttcattttttcagttttcagaaaggtcagttgaaatgctgctggt

SEQ ID NO: 158729 - DNA, 201 bp, Homo sapiens
atatcgcatctcatgaacacttacaagcactgtatcctttggccacacatacttattcagtataatttcttattgctgtctcccccttttgcagtctatayctggcaatgctgatttttttttttttttaatttaacttcttggattatacttcatcatttcttgcttctgaaatttttctttagctttctatttgaccag

SEQ ID NO: 158730 - DNA, 201 bp, Homo sapiens
atatctatattctaagtcaattcccaatagaaacgatataactttttagtacaggaacacaacaggtttaactactttcacatcagtttcaagttgcattyctatatttaaggcttcattacaaacatacatgtgtccaggcaatactcatattctcctgtaccattgaaatgagatcaaaaaagtaaaaattttcattct

SEQ ID NO: 158731 - DNA, 201 bp, Homo sapiens
aaggggatggatgagactctaaagaggtcgcgctgtaagatctttgtgttatcttgattggagtggtcgtcataccaatctaacagtgataaaatgaaaahatacatacatggtattaatgtcaacattctgttttttattgtatagagttctgtaagatgtaacctttggaagaaacttgatgtaagttacatgggactt

SEQ ID NO: 158732 - DNA, 201 bp, Homo sapiens
gataaattattttattctgaaatccaaatgacaatcatttgggaaaactagagccttgccctaaggaaagtaggtcagctgcttgaaagaatattattggyaactgaggatttggcatcacttatacacttcctccattgaagacaacttactagaatggaatgttatcctctagtctttataagttttggaaatgtattt

SEQ ID NO: 158733 - DNA, 201 bp, Homo sapiens
tatttgattgactttgtaatacagattcacattgcatttccaaacaagtatctttgataccatacttcactgtctcagcaattgtatacattttctttagytagcaacccaaagtgctgttttacaataagacacatagcatcaatattcatatgtgaaatgttgagcatctgcttctgtaggcttttcaattaaatactc

SEQ ID NO: 158734 - DNA, 201 bp, Homo sapiens
gtctttataatagaacaacttacagtcctttgggtatatacccagtcataagattgttgagtctaacggtagttctgtctttaggtctttcaagaatcacygcactgtcttccacaatgtgtgaatttatacttccaccaacagtgtataagcaaacgttccttttttattccacacccttgctagcatctgtttttttgt

SEQ ID NO: 158735 - DNA, 201 bp, Homo sapiens
ctcccaagtagctgggattacaggtgcatgccaccacgcccagctaatttttgtatttttagtagagacagggtttcaccatgttggccaggctggtctckaattcctgacctcaggtgatccacccgccttggtctacccaaatgctaggattataggcatgagccaccgcgctccgccttgactttttaataatagcca

SEQ ID NO: 158736 - DNA, 201 bp, Homo sapiens; identical to SEQ ID NO: 29704

SEQ ID NO: 158737 - DNA, 201 bp, Homo sapiens
acactatgataaacataaaatctcacctatcaacattatccttgaatataaatgacttgaatgctctactctaaaaacatagagtggaaactgtaaaaaayaaaacaaaagaagacaaaacaaagaaaacaaacaaaaattccagaactcaaccatctgctgcatgtaagaggctcacttactggctaaaggcagctgcag

SEQ ID NO: 158738 - DNA, 201 bp, Homo sapiens
gtacccactcttcttgatgttgtgtttaggccatactcccctacctgtgcagaaaacttggggcagtggaggttttccaactccatgcctaggcacacttstgggcatttggtggctgtgcactagaatcccccaacacagctggtgcttgtgcctgccattatgagacatgaggcaggcctgtccagtcgggccctgcct

SEQ ID NO: 158739 - DNA, 201 bp, Homo sapiens
aagaaaaggcgaaaactggtaccagaaatgattcagtttcattcttattctttgttaaactcattcccaaagtgaatgagaaagccaatgaatgaaagccygaatcatagggtttccaccaaagatgccagttttgacagttcctcttgtctcttggaagtatctaatttagactgctccattagtaggtcaagtgatgtt

SEQ ID NO: 158740 - DNA, 201 bp, Homo sapiens
gtgcctgtcattcttgtaatcataccatgtcatgtggtttggctctatgtccccacccaaataacatctcaaattgtcaggggagggacctgcggggaggkgaatggatcatgggggctgtttcccccattctgttcttgtgataatgagagacttctcatgagatctgatagttttaatagtggcagtttttcctgtgct

SEQ ID NO: 158741 - DNA, 201 bp, Homo sapiens
cttggcaatttcaatcaatcataagattgagtcaattctggtagacatatccatctccttttctaaaactgccctgttacctcttggtcaagccatcatcrtcttttgtgtaggtcatcggaacaaagtcttaattcacctccttgcttacagtctgctttcttgccgatactttctatacgtcaagtcctcagtaacatt

SEQ ID NO: 158742 - DNA, 201 bp, Homo sapiens
aggatcacatgatttttgtttttaattctgtttacttggtgtgtcacatttattgacttgtggatgttaaaccatccctgcatccctagtaggaaactgayttgatcatggtggattacctttctgatacactgttgaattcagttagctagttttttgttgaggattttttcatctacgttcatcagggatatctgtctg

SEQ ID NO: 158743 - DNA, 201 bp, Homo sapiens
ccatcagtgtgcctgtcattcttgtaatcataccatgtcatgtggtttggctctatgtccccacccaaataacatctcaaattgtcaggggagggacctgyggggaggtgaatggatcatgggggctgtttcccccattctgttcttgtgataatgagagacttctcatgagatctgatagttttaatagtggcagttttt

SEQ ID NO: 158744 - DNA, 201 bp, Homo sapiens
caatatgaagctacctatttcaaactcaacagagttcaagtaagttgattatattacataatttttctactaggtagcctagagcccattcaaattcatcytgttcaaaaataacactctccctgggagaacatttccccctgtaagtttctcgttttatgtcaaccccatctacctaattacctaagccagaaatctatg

SEQ ID NO: 158745 - DNA, 201 bp, Homo sapiens
aaagaaaaatgcaaacccacaagtttaaaatgtaaacatgttgcccaaaaccattaaaaagtcagtttgcatgatactctcaaggttgttttttaaaaagsctgtctgttaagtaaagacagtattgttcaccctttgaagctgattctcaagaaggggtgcccttctgctactctctatgaaaataaaaatgaaaataaa

SEQ ID NO: 158746 - DNA, 201 bp, Homo sapiens
aaatatcttctaatgactcaatgaattgatttatttgggatgctttataaaaagtataactttttcctaatgcagaatgtcctagtagaaataaaaaaatmcagtatatcaataattcctagcattcccaaggaaggaaacaagtaatcgtattaagtaaaatgataaaataatacaagtcttaatgttgatgcccaacat

SEQ ID NO: 158747 - DNA, 201 bp, Homo sapiens
cgttaagtgtatagcagcgctactgacatgtgtacatttattttgtactcagaaactttactgaattcattgatcagatctaggagctttttcaatgagtstttagggttttctaggtatacaatcacatcatcagctaacagcaacagtttgacttctttttttttttttttttgagatggagtctggctctgtctccca

SEQ ID NO: 158748 - DNA, 201 bp, Homo sapiens
cctgtaaagctaagcattgagcataggtatcaatatgaagctacctatttcaaactcaacagagttcaagtaagttgattatattacataatttttctackaggtagcctagagcccattcaaattcatcttgttcaaaaataacactctccctgggagaacatttccccctgtaagtttctcgttttatgtcaaccccat

SEQ ID NO: 158749 - DNA, 201 bp, Homo sapiens
attttggccatgtgtgcctaattttcctccctccctccctccctccctccctccctccctcccttccttccttccttccttccttccttccttccttcctyccttctttccttccttctttccttcctttccttcctttcttccatttctgcttctgcttctgcttcttcctcttcttctctttctttttttttttttttg

SEQ ID NO: 158750 - DNA, 201 bp, Homo sapiens
cagtttttcctgtgctctcacttctcttctgctgtcatgtaagacctgccttgcttccccttcacctgccaccatgattgtaagtttcctgaggcctcccyagccatgcagaactgtgagtcaattaaacctctttcctttataaattacccagtctcaggtattttttatagcagtttgagaatggactaatatataata

SEQ ID NO: 158751 - DNA, 201 bp, Homo sapiens
acccatcaagcttagatttcatgacccaatctttaattacttggagaatatttgatctctctgaattctgctcttccaagaactctggcaaaaccccaaaycagttcatacccactttctttttgccagcacctgtaaagctaagcattgagcataggtatcaatatgaagctacctatttcaaactcaacagagttcaag

SEQ ID NO: 158752 - DNA, 201 bp, Homo sapiens
gtctcgaactcctgacctcattatccacacacctcggcctccaaaagtgctgggattacaggtgtcagccaccgcgcctggccggaagaagcatatttcakgcagaccatatgggttgttttcctacttcctgttttagatcttggttacattactacaaaacataatggcatatgaatatctgtctaatgccagtatcag

SEQ ID NO: 158753 - DNA, 201 bp, Homo sapiens
ttgacattcaagatttagacctgctatctctgactttaacttcttttttttgtggggggacggagtctcactctgtcgcccagagtggagtgcagtggtgygatcttggctcactgcaacttcagcctccctggttcaagcacttctcccgcctcggcctcctgagaagctgggactgcaggtgtgaaccaccatgcccgg

SEQ ID NO: 158754 - DNA, 201 bp, Homo sapiens
ttatatctgcaaattcctaaaacatggacaaagtccagtcctcttttgtgagacttttgttatcacgaaaggattttaacttgtttatattcttcttgcarcaaaagtcatttttgtagattttttctcctctcctcttgagaaatgtgcacagttggaacatcttgcatgatagtgtgtatgtattaatagatatatttc

SEQ ID NO: 158755 - DNA, 201 bp, Homo sapiens
aaaaatcaatgtttttgtcatattgcaagcatttgatgaaagttagaaatataaagatatgaggtgaaaggattcttgatctctctctgtcagtgaaatcyatgccttcccactttgtttttttctgacagcaaatattttcacactacacattacagagctggagtagaagataactaactctttatatctgcaaattcc

SEQ ID NO: 158756 - DNA, 201 bp, Homo sapiens
ctctactaaaaaatacaaaaaattagccgggcgtggtggcgggcgcctgtagtcccagctactcgggaggctgaggcaggagaatggcgtgaacccgggargcggagcttgcagtgagccgagatcacgccactgcactccagcctgggcgacagagcgagactccgtctcaaaaataaataaataaataaataaacaaaa

SEQ ID NO: 158757 - DNA, 201 bp, Homo sapiens
taagatgcaaattgttttatctaatggagtaaggacttttcatccttttctgcacacaaatatcgctgaatctcctgggtttagaagtatgaattaatacracattgagaaagtaatgttcctaaaagctaaggaacgggctgaattatttttctgttgacataaagtcttcaaaagttccaagtctcgaactaccgaaat

SEQ ID NO: 158758 - DNA, 201 bp, Homo sapiens
gggcgtggtggcgggcgcctgtagtcccagctactcgggaggctgaggcaggagaatggcgtgaacccgggaggcggagcttgcagtgagccgagatcacrccactgcactccagcctgggcgacagagcgagactccgtctcaaaaataaataaataaataaataaacaaaaaataaaaataaataaataaataaataat

SEQ ID NO: 158759 - DNA, 201 bp, Homo sapiens
tcatgcagaccttgctgtggcagcagtttctctattccttctctgggtgtattacctggcatgaggcacacctgctcccctacagtaggcactcaagccamcccctccccttttttcctgcaaagaccttcttgcaaccacagtttatgtactctgcattcctggggcatgtttccaggcatttggtacatccacttgccc

SEQ ID NO: 158760 - DNA, 201 bp, Homo sapiens
tcccagctactcgggaggctgaggcaggagaatggcgtgaacccgggaggcggagcttgcagtgagccgagatcacgccactgcactccagcctgggcgayagagcgagactccgtctcaaaaataaataaataaataaataaacaaaaaataaaaataaataaataaataaataataaaaagcagtaaaagacaaaagtg

SEQ ID NO: 158761 - DNA, 201 bp, Homo sapiens
cttcacatggtcatgctggacccacgggtatctgcttctctctacccagaggggccaaattacacatcctctatgtgaaatgtgaatgagtcaatgctccrtggggcacacttataccaatgagaaaccaacgagaaacagaatatgagattttctctttctacaaaattttagaaataaaataagaaaaaaatagttcac

SEQ ID NO: 158762 - DNA, 201 bp, Homo sapiens
ctccactcctgccaccctgccttctttcccccagcccgcaccgatggcctcatggagagttccactcctcgccagaggacatatttccaagcaatcaaaayaccctttgtcccagactagtggcctaagctgcctcttccttcccctgcaaagaacttgtacaatgacgacttttccactcctcaccaggacacagtccca

SEQ ID NO: 158763 - DNA, 201 bp, Homo sapiens
ggaggctgaggcaggagaatggcgtgaacccgggaggcggagcttgcagtgagccgagatcacgccactgcactccagcctgggcgacagagcgagactcrgtctcaaaaataaataaataaataaataaacaaaaaataaaaataaataaataaataaataataaaaagcagtaaaagacaaaagtgaaaatgttgtttc

SEQ ID NO: 158764 - DNA, 201 bp, Homo sapiens
agcacattaccatgggcaatgggaggaaaatcaagatcacattaacaagagcatgaaagacgggccattttggaagatgcaatcgtccacaaaatgtgagwatttgtcatcggattatatgaatattgatataattagcaattggtaggtctccttttggaaatatagtaattgacatgagagctaagtgaacattacaaa

SEQ ID NO: 158765 - DNA, 201 bp, Homo sapiens
gccgagatcacgccactgcactccagcctgggcgacagagcgagactccgtctcaaaaataaataaataaataaataaacaaaaaataaaaataaataaawaaataaataataaaaagcagtaaaagacaaaagtgaaaatgttgtttctagagggagatagtatgaagattttagcactcaaaacaagcatggcaaaaat

SEQ ID NO: 158766 - DNA, 201 bp, Homo sapiens
gtttggttgtgtgtttggagggggcattaaatatcagctgccccattctgacaacaaccctacaaagtaattagtagtattctcctcacaaaggaaaaaascaagtctcagagaaggaaagtaactttcatcttaaaagcaatggggaagagctggtttatataatggtcaatttcaaatatttgaacagtttaaaagatc

SEQ ID NO: 158767 - DNA, 201 bp, Homo sapiens
agtttattggcttggttagctgaaatatggattaaaagatggcccactgtgagcaagctggaaatgcctgatctcccttgttttaatatagagggaggggwtccaaaagcttagggagattgggatggtggagtagatcagtcaatttagacctactcatcccagctcagagggtccaaaagatataaccttgaccaatgc

SEQ ID NO: 158768 - DNA, 201 bp, Homo sapiens
caaatacttcttttttcactaaaaattaaaacggatctgtttccaatttctgcaaactgaaattggaccacttggtataaacctcaaaaaaattaccatarcaaatcatatatgggcaactttcatgcctgctactgtgtgggcttctcagagaggccactataacaccccgtgtcataaccagaaacactcaaactgcaa

SEQ ID NO: 158769 - DNA, 201 bp, Homo sapiens
cagttttgggccttggactgactctctgctcctcagcttgcagacagcctattgtgggactttgtgatcgtgtaagttaatagataagaaactcccatttwtgtatctcctattctgtccctttagagaaccctgactaatacagattttgataccaggagtggttctagatgaacagaatattaaggatggagttctttc

SEQ ID NO: 158770 - DNA, 201 bp, Homo sapiens
attaacataaaagaaggagaatacaaccacaaagtatattggtcttatatactgtattccacaacatgccaacaactgtcagctgatggagcaaataaatygccttttctctttttcagctatatcaaggtagaattgacaaataaaaaattgtatatatttggctgggcgtggtggctcacgcctgtaatccaagaactt

SEQ ID NO: 158771 - DNA, 201 bp, Homo sapiens
agtttttataatataggatgagacagtaatacaaatttattcaatttcatagtcaaatatttagatggtcaaatgaataagactataaaagcacatataakctaaatctcaaatctgcatttagaattaacagtgaatattacatagtttttttttacagtattctaactaaattttcaaaacagattaaaagtgtctgtg

SEQ ID NO: 158772 - DNA, 201 bp, Homo sapiens
attaatattactatgaagatgaagttacatgtatcaaccagctagcgcgtatcaatagttgtcgcttaataagtcaatggtatgctccttcagtctattattttttttcttattacctgcaatgttacatgcttatctggagtgctggcttacacttctgttacacgtgggacattgtgagatttatgtgcttgttgcaac

SEQ ID NO: 158773 - DNA, 201 bp, Homo sapiens
aaagcttttaagacacaggcaatgtggtagttctattcacttaacaaatattctttaaaatatactttctaatatacattctctgcagcattaatgatatmttccacaatacgattaaattaaaaaataaaaattattttaaaaataatttcaaaataaaattaaaattaaatttgatgttcaatttcaagatgaatatat

SEQ ID NO: 158774 - DNA, 201 bp, Homo sapiens
actggcaagttgagaggaaggtacagagactccccacataaccctgccaccatgcaggcacagcctgcctcattatcaacatcctgaccagagtggtacayttgtcacagctgatgaacctacacagacacatcatcactcaaagtctacagcttacattaactctcactcttagagctgtgtgttttatgggcttggaca

SEQ ID NO: 158775 - DNA, 201 bp, Homo sapiens
tccataatgcaatgggcctcattcagtcaggtgaaggccttaagagaaaagactcagccttcagactcaagactgcaacatcaatccttccttaggtctcyagtctattggttctgtttctgtggagaacactgactaacacactgggattctcttgctttgcaaacagaaatgggaggcaatttggaagggacttataaa

SEQ ID NO: 158776 - DNA, 201 bp, Homo sapiens
catgaatttatcttgtcttgtttctgtgcttgttttatgatgggtattattggctatctttgttttaaagttatcttatctagttgtgaatgtaatcattkcaagacaaaagacatgtattttatgcagtgttgaagcagaaataataaagtaagttatatagcttggatttctttttattaagaagaaatcttctatgtg

SEQ ID NO: 158777 - DNA, 201 bp, Homo sapiens
ttcagattggcttttatgtagccttttcagatttagcaatgtgcatttaagttgtcttcctccatgtatttttgtggcttgatagtgcctttatcgctgartaatatttaatcatctgaatgtacttcagtttatttatccattcttctactgaaggacatcttggttgcttccaagtttggggaattatcaataaagcta

SEQ ID NO: 158778 - DNA, 201 bp, Homo sapiens
agaaaaatatcttcaaaaaaatctaaatgagattcatggcgaaaacgtagcaatgtcatatttgttgttgcaggttgctagaatagttattaattggtccmcccttgataatgagtgcttggtaaagcgagataaaagacaaattcttcttatgatgacattttaggtcatagaatcaaccttcaacaagaatgagagttg

SEQ ID NO: 158779 - DNA, 201 bp, Homo sapiens
taagttttcaactcatttggataaatgtcacagaatgtactgggtcatcatctacattttattatcagttcactaaaggataataatcttaattttcttayatacagaatttaagtttagctaaaatactcattggtaaatatttgaatctgctagtaaatagtagtttcttatcaagtttttaaataaggaatgtaacat

SEQ ID NO: 158780 - DNA, 201 bp, Homo sapiens
ctgtatccctaagacttcagtcagtcatgcaattattgcccatgacataattatacttttggctaattcgtggagttacaactcaacacaaagtactagawaaatatcttcaaaaaaatctaaatgagattcatggcgaaaacgtagcaatgtcatatttgttgttgcaggttgctagaatagttattaattggtcccccc

SEQ ID NO: 158781 - DNA, 201 bp, Homo sapiens
tgacttgttttagttcctataagatcctggattttagtcctttcttggatgcatagcttgcaaaagttttctcccactctatggtttgtctgtttactccrctgattatttcttttgctgtgcagaagctttttagtttaattaagtcccatctatttatttttgtttttgttgcttttgcttttgggttcttggtcatga

SEQ ID NO: 158782 - DNA, 201 bp, Homo sapiens
tgatattcatggctgtgttatatgaaaacattagtttttaaatataaaataaattttcattagcatgtctgaatagcatcctctgagtataataagtacartggaggctgggcatggtggcttacgcctgtaatcccatcactttgggaggctaaggcagatggatcacgagatcaggagatcgagaccatcctggccaac

SEQ ID NO: 158783 - DNA, 201 bp, Homo sapiens
ctacatgtggcttgtcaattatcccagcaccatgtgttgaatacggtgtcctttccccactttatgcttttgcttgctttgttgaagttcggttggctgtragtatttggctttatttctgggctctctattctgttccattagtctacgtgtctgtttttataccagtagcatgctatttgggtgattatggccttagag

SEQ ID NO: 158784 - DNA, 201 bp, Homo sapiens
aataagtgaataataagccacaaaaataataagttacagtttttataatataggatgagacagtaatacaaatttattcaatttcatagtcaaatatttaratggtcaaatgaataagactataaaagcacatataagctaaatctcaaatctgcatttagaattaacagtgaatattacatagtttttttttacagtatt

SEQ ID NO: 158785 - DNA, 201 bp, Homo sapiens
cagacatataatcaaaaaggaatgtgtaatatatcattaataatttattgattacaaattgaaatgaaaatttttggacatattgagtaaacaaaaatacrtttcttaaaattaattttacttgtttcttttttacatttttaatgtggcatttagaaaaatttaaattatacacttcattttcatggataacacctgtct

SEQ ID NO: 158786 - DNA, 201 bp, Homo sapiens
gatggtgttttcatgtgaattgcattgaacttgtaaattacttttggaagtatggtcattttcacaatattgattctacccatccataagcatggaatctrtttccatttgtttgtgtcatctattatttctttcagcagtgttttgtgttttttcttgtagagatattttgcctccttggttaggtatattcttaagcat

SEQ ID NO: 158787 - DNA, 201 bp, Homo sapiens
tgtatatatttaaggtttaatctttcttgacatttcatccgctttcaaaaatgttcaccactacctttttcaaagtaacttgtttcttctaaaagaccacrcatccgctgatttttctatttactcccctgttctcttcaggcattgagcgttgacatttcattctaactcctcttccttagcagtccatactcgctttct

SEQ ID NO: 158788 - DNA, 201 bp, Homo sapiens
ttatcatcatcaccattattgaaatgaccagaatagttttaataagtgaataataagccacaaaaataataagttacagtttttataatataggatgagayagtaatacaaatttattcaatttcatagtcaaatatttagatggtcaaatgaataagactataaaagcacatataagctaaatctcaaatctgcatttag

SEQ ID NO: 158789 - DNA, 201 bp, Homo sapiens
aatgctttttctgcatccattgagaggatcacatgatttttgtttttaattctgtttacttggtgtgtcacatttattgacttgtggatgttaaaccatcyctgcatccctagtaggaaactgacttgatcatggtggattacctttctgatacactgttgaattcagttagctagttttttgttgaggattttttcatct

SEQ ID NO: 158790 - DNA, 201 bp, Homo sapiens
atttgagccatcacacaggattctgcttataatctcttcagataaagggaatcattttacacaaatgattaacataaaagaaggagaatacaaccacaaartatattggtcttatatactgtattccacaacatgccaacaactgtcagctgatggagcaaataaattgccttttctctttttcagctatatcaaggtaga

SEQ ID NO: 158791 - DNA, 201 bp, Homo sapiens
gtgcatatcagcttacatgtttgctcctctgtttaaggaacactggctggtcagagagttttatatagaagggagccctctcagcagagatgctgcccctygtgatctgacttccctctaaaagcaaccacttggaccaggattcagcattaactcaagagcagtcaattcacaggtcaatcgagaatcttggatatggat

SEQ ID NO: 158792 - DNA, 201 bp, Homo sapiens
aaaaggttttctaaactttctattaacaagcattattaatgtgttgttaaattcttgatgtcaaaataatacctgagggtatttgataaatcaaatgattygtgagttctatgtatatttaatttcattcaaataatttgaaataatcatcacagtataaaaataattcaaataagatatttctcacaataattatataat

SEQ ID NO: 158793 - DNA, 201 bp, Homo sapiens
ttgaatggtaatttgatgatttaattgtaaaagattccaaaacatatggatcacattttcccagttttattacagttccattgggttttcaaataatgagaaaaaaaaaaacttaaaaaaaagaaacagacccaaaacatgtgaaaaatagcttcagcatttcaacacactcaaaatcagcaggatttgctcctcccaagt

SEQ ID NO: 158794 - DNA, 201 bp, Homo sapiens
gatgatttaattgtaaaagattccaaaacatatggatcacattttcccagttttattacagttccattgggttttcaaataatgagaaaaaaaaaaacttaaaaaaaagaaacagacccaaaacatgtgaaaaatagcttcagcatttcaacacactcaaaatcagcaggatttgctcctcccaagtatgtaagtgaccta

SEQ ID NO: 158795 - DNA, 201 bp, Homo sapiens
taaaaattcctcttttctgtcatattgccctttggtttaaaagcaatggcattttcttattcctctcattctcttgacttaacttgggattgatataaaartaataagatgttgatttggaggagaaacagtcattccaaaggatggaatcacggtgaaaagtgctttaaagaaagcaaaaggttttctaaactttctatt

SEQ ID NO: 158796 - DNA, 201 bp, Homo sapiens
acctgacttggttggaacttttcaagtgccagatacagtcctggatttttaagatgcgtgaaaaagtacctgaaagccctcattgataaaaagaggagacrgtgcatatcagcttacatgtttgctcctctgtttaaggaacactggctggtcagagagttttatatagaagggagccctctcagcagagatgctgcccct

SEQ ID NO: 158797 - DNA, 201 bp, Homo sapiens
atgatgatagaggtagaatccaaataagaataatttgaagaattaaccagtgatgaggaaacagaaaataaacacagatatcctggatgaagtttgtgatrggatacagagacaggttggcagcagtaagggaaagtgaatatttttcaattcaagtacattccacatttgcatgattggtagcaaaagaaaataaaagct

SEQ ID NO: 158798 - DNA, 201 bp, Homo sapiens
tcaaatgtctcattgtttgagtttaaacaatatcttaaacaaagcagtaaaaagacatttagaatttttactttgcaaataatttaaaaattcctcttttytgtcatattgccctttggtttaaaagcaatggcattttcttattcctctcattctcttgacttaacttgggattgatataaaagtaataagatgttgatt

SEQ ID NO: 158799 - DNA, 201 bp, Homo sapiens
ggcatttggcatgcccactctcacagattaggagtacaatctatccctcccttctcatgcagaccttgctgtggcagcagtttctctattccttctctggrtgtattacctggcatgaggcacacctgctcccctacagtaggcactcaagccaccccctccccttttttcctgcaaagaccttcttgcaaccacagttta

SEQ ID NO: 158800 - DNA, 201 bp, Homo sapiens
gacacgggcaaagtcacaggtattgtacattttttagagattgcataaaatgagttgttccaataaaatgatgatagaggtagaatccaaataagaataakttgaagaattaaccagtgatgaggaaacagaaaataaacacagatatcctggatgaagtttgtgataggatacagagacaggttggcagcagtaagggaa

SEQ ID NO: 158801 - DNA, 201 bp, Homo sapiens
aagcaaatgattactattatgtaaacagtttaacttttaaatgctcagtatcttccattagatctattactagactcattttatatattcttaaaaacacygaaatttgaaagaagagatattcgattagggaatcattttaaggctaaccagcaaaatacaaagttttatataacaaaaaggaaacgcaaatcacttttc

SEQ ID NO: 158802 - DNA, 201 bp, Homo sapiens
gtttgtaaaggatttgatttgtgacgccatatattagattataaccctctaaatgcttttgttcccgttcttattatttcagtgtcatgtgaatatttagytcagtccacataactataatagacaagacaacaccattgctcaatgatgtttctttaaagattttcagtttcatagcatgcttaatgtttgttgtttatg

SEQ ID NO: 158803 - DNA, 201 bp, Homo sapiens
ttattaatagtgctgcaatgaacatacacatccatgtgtctttataatagaacaacttacagtcctttgggtatatacccagtcataagattgttgagtcwaacggtagttctgtctttaggtctttcaagaatcaccgcactgtcttccacaatgtgtgaatttatacttccaccaacagtgtataagcaaacgttcctt

SEQ ID NO: 158804 - DNA, 201 bp, Homo sapiens
gaagccatattttgatttaatcctgaaaggtttcagaaagaaatcatggactacaaaacttgtatagagtaactcttttgttttaagcaaataaatacaaygttaaaaaattctgcattggacaaaagtaaagcagtttagcttactcaaataaaacacagctgaatgatgatcagtgtattcttctatatgttattgtat

SEQ ID NO: 158805 - DNA, 201 bp, Homo sapiens
atgtgattctgctacatatgactagcatacagcttagatcatatgtgatccacaacaattaactgtactataccctggtcagaaataatcccattgatcaraaacctttatggcctggcaatgtgaaattgctgcagatattttgaaatgcttactctgaatgcttatatttatcttgccttagagctctccaccaatgcc

SEQ ID NO: 158806 - DNA, 201 bp, Homo sapiens
ttttacagttttacagttctggtaaatatttggcttctgtgcttttaagttactgttgtaactctgaagccatattttgatttaatcctgaaaggtttcaraaagaaatcatggactacaaaacttgtatagagtaactcttttgttttaagcaaataaatacaacgttaaaaaattctgcattggacaaaagtaaagcag

SEQ ID NO: 158807 - DNA, 201 bp, Homo sapiens
tgaaaaacaggcatcattaaaaagtaaagtgcacctagaaatttttttaagcatacaaaggcttacattttctcaaaatttgacacacacttgggttatartgcacaaactaaccttaaagtgtcatttgttgctatgtgattctgctacatatgactagcatacagcttagatcatatgtgatccacaacaattaactgt

SEQ ID NO: 158808 - DNA, 201 bp, Homo sapiens
cattaaacttaaataatgtaaattgtattttcttagtataactaataatgttacattataatttgaaaaacaggcatcattaaaaagtaaagtgcacctaraaatttttttaagcatacaaaggcttacattttctcaaaatttgacacacacttgggttatagtgcacaaactaaccttaaagtgtcatttgttgctatg

SEQ ID NO: 158809 - DNA, 201 bp, Homo sapiens; identical to SEQ ID NO: 29707

SEQ ID NO: 158810 - DNA, 201 bp, Homo sapiens
gtctcttcatcttagccatcaatagcccaagactattaaagaaaaggcgaaaactggtaccagaaatgattcagtttcattcttattctttgttaaactcrttcccaaagtgaatgagaaagccaatgaatgaaagcccgaatcatagggtttccaccaaagatgccagttttgacagttcctcttgtctcttggaagtat

SEQ ID NO: 158811 - DNA, 201 bp, Homo sapiens
gggctggcaaaggaccttttacataaacaaacggttagacgggagagtttcccccataagtctcttcatcttagccatcaatagcccaagactattaaagraaaggcgaaaactggtaccagaaatgattcagtttcattcttattctttgttaaactcattcccaaagtgaatgagaaagccaatgaatgaaagcccgaa

SEQ ID NO: 158812 - DNA, 201 bp, Homo sapiens
ctcattattctacaaagtgtgaaatgtacagatttggggttggataaggttatggaatgactttaataaataggtaaattttcaactttaaaaacaacagyaatagtagagaaaaatatttcattcattcctagaggacatttgtttctgttcctaatgaaaggaaagttttgaaaaatggagctattcttatgtaaataa

SEQ ID NO: 158813 - DNA, 201 bp, Homo sapiens
aaatccactgggtttcttttcaactcattattctacaaagtgtgaaatgtacagatttggggttggataaggttatggaatgactttaataaataggtaarttttcaactttaaaaacaacagcaatagtagagaaaaatatttcattcattcctagaggacatttgtttctgttcctaatgaaaggaaagttttgaaaaa

SEQ ID NO: 158814 - DNA, 201 bp, Homo sapiens
atgatttaattgtaaaagattccaaaacatatggatcacattttcccagttttattacagttccattgggttttcaaataatgagaaaaaaaaaaacttaaaaaaaagaaacagacccaaaacatgtgaaaaatagcttcagcatttcaacacactcaaaatcagcaggatttgctcctcccaagtatgtaagtgacctaa

SEQ ID NO: 158815 - DNA, 201 bp, Homo sapiens
atttctgtatgagtacatattttctttttgtcaatgtgttaaacatcatctattaggcataataacatcaagtgattatttacgcattcttaaaaaataattgaatagtaagttgtagaaaacacatacacacacaccagccttctaaacttctaaaagcacttgagaaaccaatgacactaacaactacaacttaggaga

SEQ ID NO: 158816 - DNA, 201 bp, Homo sapiens
acaacaaaagacacactaacttcttcacgtacaaatggaacaaaaacactacagaaatattgtctcccagtggtttgtaaaggatttgatttgtgacgccrtatattagattataaccctctaaatgcttttgttcccgttcttattatttcagtgtcatgtgaatatttagttcagtccacataactataatagacaaga

SEQ ID NO: 158817 - DNA, 201 bp, Homo sapiens
aacatggtgaaaccccgtccctaccaaaaatacaaaaattagctgggcatggtagcacacgcttgtaatcccagctacttgggagactgaggcaggagaaytgcttgaacctgggaggtggaggttgcagtgagccaagatggcgccactgcactccagcctgaagacagagcaagactctgtctcaaaaaaaaatattat

SEQ ID NO: 158818 - DNA, 201 bp, Homo sapiens
aaaacaacaaaagacacactaacttcttcacgtacaaatggaacaaaaacactacagaaatattgtctcccagtggtttgtaaaggatttgatttgtgacrccatatattagattataaccctctaaatgcttttgttcccgttcttattatttcagtgtcatgtgaatatttagttcagtccacataactataatagaca

SEQ ID NO: 158819 - DNA, 201 bp, Homo sapiens
cataaccaaatattgctatagtactaaaatttatcagctaaaaaattagccctaaaatatttgccagaacccacataataaaaaatgtatatatatatatrtacacacacacacacatacataaatccactgggtttcttttcaactcattattctacaaagtgtgaaatgtacagatttggggttggataaggttatgga

SEQ ID NO: 158820 - DNA, 201 bp, Homo sapiens
gtccaaaagaactaaaacaggaaactccaatatctttttggggggcgacacaattcaaaccatgacagagctcaaacatgatgttgaggcaaggtaattaycttataatgaggcaaccagtataagaatgaaatccaacaacagaacaggatatggctgtgggcagaaaactagaatgaggatcactagtggcactagaaa

SEQ ID NO: 158821 - DNA, 201 bp, Homo sapiens
aaccaaatattgctatagtactaaaatttatcagctaaaaaattagccctaaaatatttgccagaacccacataataaaaaatgtatatatatatatgtamacacacacacacatacataaatccactgggtttcttttcaactcattattctacaaagtgtgaaatgtacagatttggggttggataaggttatggaatg

SEQ ID NO: 158822 - DNA, 201 bp, Homo sapiens
tgaatatttgagatgcaaaaactctatgtctctcaaatcctaatatatttgctgtctggcccattttaaggaaatctctgctaatcactgatatagaggaytttgaccttgattctagggacctgaaatttcatcacactctcccattctaggagaaaagataaagtactggcccatttgtgaatcacagtagattcattg

SEQ ID NO: 158823 - DNA, 201 bp, Homo sapiens
agccattaatattgagaattgctaatatactatttgtctttctacaatctcagctaaacaaaatgtataagtgaaatgtgatttcattcaatgaaaacttmtatgcacactttgagaatactttgtataaacacatttaaagattttgatatgaataaatgcaaacagttcatttcttccgttaacatgtctaggctacat

SEQ ID NO: 158824 - DNA, 201 bp, Homo sapiens
gaagaaatgtcccagtactgaaattttaaaaggcaaaaataagaatgggctatcttttcttgtctcccatcaccaccacacctttattagcatcttggggygattatacaaacttattccggacaaagagacctgagcagaaatcatcagagagattggcttgaattggcttgaagagtataattttactgtctcacagtt

SEQ ID NO: 158825 - DNA, 201 bp, Homo sapiens
ttaaacaaagatgaattttctaatttcaaaagcctttggtttatatttcccatgaatttcaatttctccaaggatttttagaacgttttcctttgtagackgccctttttctaatatgtaaggtattcaggtcactgggcatggctttttttttttggtctagcctttgtattaaatgaagtttccagtagctactgtagt

SEQ ID NO: 158826 - DNA, 201 bp, Homo sapiens
ttcattcaaataatttgaaataatcatcacagtataaaaataattcaaataagatatttctcacaataattatataatcatactactatatggctggaaakaattttaggtatcatgcaaaacgccttccaacacaactcaggaatctctttgatgtccttttctatatgcggttacacagggtcccttaatagtccaacc

SEQ ID NO: 158827 - DNA, 201 bp, Homo sapiens
tttcattttattgacagaatgccttctctttgagagaaggtctatgaaactctaaattgggatgcataatcaggatagataggtaggtggatagatagatdatagatagatagatagatagatagatagatagatagataagatagatgatagataattatatgtttataaaatatatgaggaacaaatataatatgccat

SEQ ID NO: 158828 - DNA, 201 bp, Homo sapiens
aatagaaatagaatcgtaaaaatacaggatttttggaaattaaaaactgtgtttcaaatgcaaagcatatttataataagaaagactacaccaatgttttmtataaatgaaacgtactatgtttaagaatgttttcttagctatgccctataatttatattttctcaagtgtttatccaaagtttgtctgctactgcagta

SEQ ID NO: 158829 - DNA, 201 bp, Homo sapiens
ataatcaaaaatacttggtattggatgtttccagattatcagtggcatactatttagtaaatagattagtttcttaaaaacctgtgagatgaagtgtggakaatggttggaaagaaaaagttataaaatgtaaataatacatctagaattatatcatagttgccttgcttcaaactccccgaaatctatactaaatgtatc

SEQ ID NO: 158830 - DNA, 201 bp, Homo sapiens
tgacagaatgccttctctttgagagaaggtctatgaaactctaaattgggatgcataatcaggatagataggtaggtggatagatagatgatagatagatagatagatagatagatagatagatagataagatagatgatagataattatatgtttataaaatatatgaggaacaaatataatatgccatattttcatttt

SEQ ID NO: 158831 - DNA, 201 bp, Homo sapiens
ttccacaaagagttttgaaaccacaatgcccatgtgtgtatctcatgtgtgtgatttttctctgtggaagttcagggtagggctacaaatgatttcataayatgcaagtccggaatataaaccatatggccatattttatgcttgcataaatagatcatgttatctctacacaacagtagcagtacgtgtgtaattacata

SEQ ID NO: 158832 - DNA, 201 bp, Homo sapiens
ttattttattaaagacaagaatatgtttataatcaaaaatacttggtattggatgtttccagattatcagtggcatactatttagtaaatagattagtttyttaaaaacctgtgagatgaagtgtggagaatggttggaaagaaaaagttataaaatgtaaataatacatctagaattatatcatagttgccttgcttcaa

SEQ ID NO: 158833 - DNA, 201 bp, Homo sapiens
gggaaaacagacacaagttcttagaatgagagtggctgaactgcaatgaaagactcatgcacaacctcgccaggtgtctactgttaaagtgtctagagggyattgactgaaaaagaatgggaccctgaaacttggaatggggatgtgtgggaggaccctgatgaagctggggccactgagtttgtaaatcctgatgaacct

SEQ ID NO: 158834 - DNA, 201 bp, Homo sapiens
gtgctgttttacaataagacacatagcatcaatattcatatgtgaaatgttgagcatctgcttctgtaggcttttcaattaaatactcttatacagagaawgtggttttgaacacttttatttatatcttttatgtaaataccacataggtgttcattgtttcatcccttcactatgcaatgcaactccacaaatgaggca

SEQ ID NO: 158835 - DNA, 201 bp, Homo sapiens
ttcattaatattagcaggaatcaagcaattacaaaaatttacagtgccaaactcaatccctattgtcattttatcatttattttattaaagacaagaataygtttataatcaaaaatacttggtattggatgtttccagattatcagtggcatactatttagtaaatagattagtttcttaaaaacctgtgagatgaagtg

SEQ ID NO: 158836 - DNA, 201 bp, Homo sapiens
atgagagtggctgaactgcaatgaaagactcatgcacaacctcgccaggtgtctactgttaaagtgtctagagggcattgactgaaaaagaatgggacccygaaacttggaatggggatgtgtgggaggaccctgatgaagctggggccactgagtttgtaaatcctgatgaaccttttttgtgaaaagaaacagcttccc

SEQ ID NO: 158837 - DNA, 201 bp, Homo sapiens
caactccaagcttaaaaataccttaatatacaaaatattactagtgtttcacatagaaaatttatcctctgacaatgtttagactcatcacaaggaatatyttctttagtaaatatctgtttaaagactttggataatagtgtcttcttcaatcaaggataataccagcactgaaatgactattcaataagtgaattttga

SEQ ID NO: 158838 - DNA, 201 bp, Homo sapiens
gttggtcttctagatcatcactcagctcctgagtatacagtgttactgcaaagtggtatttgattgactttgtaatacagattcacattgcatttccaaayaagtatctttgataccatacttcactgtctcagcaattgtatacattttctttagttagcaacccaaagtgctgttttacaataagacacatagcatcaa

SEQ ID NO: 158839 - DNA, 201 bp, Homo sapiens
tgagtagctgtgaatactaaagttcagcagcactaatctcaaaggaaatagtaggagaaggaatctaagttgtcattgtgatgaaataaaatagtcgcaaytgcagctggaccattaactaatattgactcttgctctagaagctgtcagagctctgcattgaaacagctgggaatgttctgtcagggagccacgggagaa

SEQ ID NO: 158840 - DNA, 201 bp, Homo sapiens
tcttcatagaatgcaataaaggcaatatacatcatgtttcacccatccagttatagcttcttggggctgagaaaaagaggggtcaaccattagaaatgtcygcaatcaatggattttcaaaccagtcttcttcccagaaatttagaattatttggtgataactatagaagacttgccatgagagattttttttttacaaat

SEQ ID NO: 158841 - DNA, 201 bp, Homo sapiens
ctgtctttgatcctggcccttgcctattttctaagggacagacgtaacgataactcagggacttcccaggtccagactactccccctgctctaccaccaayagaagtttggcaccctcatgcgatgcattggctgacaaggaaagacttaccttcacatggtcatgctggacccacgggtatctgcttctctctacccaga

SEQ ID NO: 158842 - DNA, 201 bp, Homo sapiens
tctgttacggaaggaagaacgtaatctgggtcattgatggaatggaataatcgtcatgtcaaactaaaatgcatcatgcaatgtaaagaaagatggcttaytaacagaaggaaagtgatgcagcttccttccaattagatcctaatgaaaaatgtaacatatgcagtattttggaggatttattatgagttaattagaaca

SEQ ID NO: 158843 - DNA, 201 bp, Homo sapiens
aatcaggaatatctctccatttttatacatataatcagaacaaatatggtatatgaagaaaataatttccaaaagactatatatttttattaagagtatayacatagccattaatattgagaattgctaatatactatttgtctttctacaatctcagctaaacaaaatgtataagtgaaatgtgatttcattcaatgaaa

SEQ ID NO: 158844 - DNA, 201 bp, Homo sapiens
agcctttggtttatatttcccatgaatttcaatttctccaaggatttttagaacgttttcctttgtagactgccctttttctaatatgtaaggtattcagrtcactgggcatggctttttttttttggtctagcctttgtattaaatgaagtttccagtagctactgtagttaatacaattttgcccattttgaatcaact

SEQ ID NO: 158845 - DNA, 201 bp, Homo sapiens
cctgtctttgatcctggcccttgcctattttctaagggacagacgtaacgataactcagggacttcccaggtccagactactccccctgctctaccaccarcagaagtttggcaccctcatgcgatgcattggctgacaaggaaagacttaccttcacatggtcatgctggacccacgggtatctgcttctctctacccag

SEQ ID NO: 158846 - DNA, 201 bp, Homo sapiens
gtatagaggttcctcaaaagcctaaaaatacaacattattgaaatgaaaaaactatggacatggaagaacaaatttttgttttccagggtttatggacatyggaggtggaaggggatggatgagactctaaagaggtcgcgctgtaagatctttgtgttatcttgattggagtggtcgtcataccaatctaacagtgataa

SEQ ID NO: 158847 - DNA, 201 bp, Homo sapiens
taggaataccaaatgtgtcttttgccagtatcatttcttgaggtggctacagtcccattcccgtttctctttgaaagaactaaattcaaagtgcacctaayagagtggtggttactcataaatctgttttatattccagagtgttggaggagtggggagagagagtagtttcggctgatgggatattggtagaaaaaatgt

SEQ ID NO: 158848 - DNA, 201 bp, Homo sapiens
taaagaaaaagaaaattacagaccaatgtcagccataattgtattgttatgagttgaattgtgttctactaaaatgcatgttagaattctaacttccagtrcttaaatagatctcaagggatttattctgagtaaaaaaaaaatctaaaaatattacatacttcaatattctattaatacaacattcgtttcttttttaat

SEQ ID NO: 158849 - DNA, 201 bp, Homo sapiens
accacacagtgacctgtattttactttcggagaaaaattttttcagcttacaaaatgttagctggatatttaccacttttattaccttcatggaagtccarctagactaatacgccttttgaagaatgagctaagatgaggcatttgataaatttcttacagctattgttttccctgatattatttttatggcatggaatt

SEQ ID NO: 158850 - DNA, 201 bp, Homo sapiens
caaacaggaagccctgtttttgacttttattttaagttcaggggtatacgtgcaggtgtgttacataggtaaacttgtgtcatggggattgttttaccaastatttcatcacccagatattaagcctagtacccattagtaatttttcctgatcttctccctcatcccaccctctaccttgaagtaggcccctcagtgtgt

SEQ ID NO: 158851 - DNA, 201 bp, Homo sapiens
gtatatattcaaggtgtacaatgtgtacctctgggttatttaattaatctcatgttttaggattataaaatctagaattatgtagatgaaataattcaacrtggtttttcagatgatgtggcaaaaattgtacgtctatatgcaaaaataaatgtgaatcacaccttgcaccacatgcagaaattataaaacatctccaag

SEQ ID NO: 158852 - DNA, 201 bp, Homo sapiens
aggtgaatggatcatgggggctgtttcccccattctgttcttgtgataatgagagacttctcatgagatctgatagttttaatagtggcagtttttcctgygctctcacttctcttctgctgtcatgtaagacctgccttgcttccccttcacctgccaccatgattgtaagtttcctgaggcctccccagccatgcagaa

SEQ ID NO: 158853 - DNA, 201 bp, Homo sapiens
gtactcaaccatcaaaggcaaggtgggtgtagctactgtaatggacagcagaggcaaagcagcaatcagaataatctgattcatatagagctctggcattkactaattaatcacagtgttcctagaagtgaaattgatatgaaacctactgcattcctacctaattgatacaagcagaaaacttctagatcgagtggacaa

SEQ ID NO: 158854 - DNA, 201 bp, Homo sapiens
ttctgccaaactaagcttcataaattaaggagaaatataacctttccccgacaaagaaacaccaagggaatttgtcaccactagaccagaccaccaacaartgtgcagtctacacatggaaatgaaagaatgacccacaccatcataaaagatgacagaaatacaaagctcacagataacataaagcaactacacaatgaa

SEQ ID NO: 158855 - DNA, 201 bp, Homo sapiens
caaagaaacaccaagggaatttgtcaccactagaccagaccaccaacaaatgtgcagtctacacatggaaatgaaagaatgacccacaccatcataaaagwtgacagaaatacaaagctcacagataacataaagcaactacacaatgaaaccacaaggcaactagctaacaacactatgataaacataaaatctcaccta

SEQ ID NO: 158856 - DNA, 201 bp, Homo sapiens
acataaaaatagagtgcacattattgcatgcacacacatgcacatattcactctcataccaaaagtcttcagcgatcacatcatggtgtgtgtgtgtagtyttctctgccttgcagtttcagtttcattattttacaatacattctgttacggaaggaagaacgtaatctgggtcattgatggaatggaataatcgtcatg

SEQ ID NO: 158857 - DNA, 201 bp, Homo sapiens
ctactgtggaagtaaagttctttccagaaaacacacaatcaaaagaacaatgctagaatttcttccaatgaattcagtattctaataacaaatctaaagargctctattaagtttttcttaatattaagggtctattaagaagtctgttaaggccgggctcggtggctcacgcctgtaatctcagcactttgggaggccac

SEQ ID NO: 158858 - DNA, 201 bp, Homo sapiens
taagacagaaataaaaaaattccttgaagtgaatgaaaatagagacaacataccaaaacttctgagatacaccaaaagaagtactaagagtaaagtttatrgcattaaatgcccacatcaaaaagatagaaagatcccaaattaacaacctaatgttgatccacattataaactatagaaactataaaaacaagaataatc

SEQ ID NO: 158859 - DNA, 201 bp, Homo sapiens
tggcacttttcatctgacaaagatgtttcattttttgtttttgtttttattttttacaacatctgtgcaagaacctccaacagtgagaggtttaattatgkgaactgtaatatgtcttctaagattgttattctctgattgtactgaaattcttttaaaacaaatcacagcacaaaagaaccaaacacacacacaacacac

SEQ ID NO: 158860 - DNA, 201 bp, Homo sapiens
agcaatcaggtaagagacaaaaataaaaagcatccaaattggacaggaacaagtcaaattatctctgttcactgaagacataatcatacaagcaaaaaacyctaaagatatatccaaaggactcctagacttaaataaaatcagtcaagtttcaggacacaaaatcaacgtaaaatcagttgcatttctatacaccaataa

SEQ ID NO: 158861 - DNA, 201 bp, Homo sapiens
aaacattcacaaccagttattgcatgtctactattttcctagcattttcaaacagatgtatagaaaagttgaataatctgatttctcttttagaatgaagmagcttagggtcagggaggcggaataatttgtcataggtaatgctacagttccatctgtctaatcccaggttcattttctttccaagacataatattcacc

SEQ ID NO: 158862 - DNA, 201 bp, Homo sapiens
ctggtataaaataggtacacagatcaatagaacagaatagataacccaatataaagccacatatctacaacccactgatctttgacaaaattgacaaaaakaaatgatagagaaagagcatcctgttcaataaatggtactggaatagctggctagtcatatgcagaagaatgaaactggaccacctatctctcatcacat

SEQ ID NO: 158863 - DNA, 201 bp, Homo sapiens
tttcttatcaagtttttaaataaggaatgtaacatgtttcatgatattgcctataacctttactttgattttaattaaccttttgtgaaaaagcatagtgrcataaagtgacattttagatatggtggcatgattggaagaaaaagaaaaacattcacaaccagttattgcatgtctactattttcctagcattttcaaac

SEQ ID NO: 158864 - DNA, 201 bp, Homo sapiens
gaaacactggcttttcacttattttggaacacatgaaattattttattcgttttgtgatgctgctttaaaatttaacatcatgctgagtaaatacaatacmtatgcatataggatttaactttcaactttggacagttttagaatctctgctgtacaattgaacatagatattgccatgtatattttttaagcaaacaaat

SEQ ID NO: 158865 - DNA, 201 bp, Homo sapiens
cagggaaactccctctataaaaccatcagatcccgtgagacttactatcatgagaatggcgcaggaaagacctaccctcatgattcaattacctcccaccrggtccttcccaagacacgtggggattataggagatacaattcaagatgagatttgagtgaggacatagccaaactatatcaatggtttaaagacataaat

SEQ ID NO: 158866 - DNA, 201 bp, Homo sapiens
ttccaggtgcaattattatatatttctaaaatttgcagaaatgaaaagaatattttcagccttttagaacagatcattatgattctaaatggctagcaccractatgctaaagacattatagcctgtgatatcatgtgaaaaacaaaataattccagccttcacgcaaaatgcttctgatgtcattgacctagcactgttg

SEQ ID NO: 158867 - DNA, 201 bp, Homo sapiens
tctcaaatgattccgcatatcataatcctagcgattaagagaagtggtggtgaaacactggcttttcacttattttggaacacatgaaattattttattcrttttgtgatgctgctttaaaatttaacatcatgctgagtaaatacaatacctatgcatataggatttaactttcaactttggacagttttagaatctctg

SEQ ID NO: 158868 - DNA, 201 bp, Homo sapiens
agtcagaatggctattactaaaaagtcaaaaaacaggtgttggtgtgtatgcagagaaaagggaacattgatgtgtatgcagagaaaagggaacttttatrtattgttggtagaaatataaattagttcaacttctagggaaaacagtttcgacatttctcaaacaactaaaagtagaactaccatttggcccaaaaatcc

SEQ ID NO: 158869 - DNA, 201 bp, Homo sapiens
atcatacttaccatataatttttctacagttataaagactgacgaatgcacttgtttcaaaaatgttccagactccatgaataacatgtgaaaatagtggkttttttttataattttgaagaaaatgtgcatattttatcttgaatttgagagacgagcaattttttttatctccaccatgttttctcagaaactataatt

SEQ ID NO: 158870 - DNA, 201 bp, Homo sapiens
cggttagtgagaagtcccagttgggttgtcagtcactgtttaagaattctccataatcatcagcagtgaggcttttggaaaaaacatatttcttttatttwtttttttattttttcttgagatggagtctcgctttgttgcccaggctagagtacagtggcacaatcttggctcattgtaacctcctcctcccgggttcaa

SEQ ID NO: 158871 - DNA, 201 bp, Homo sapiens
aaactaaataaataaaatcaaggttatacacactttttcagcaaaaaaagaggaagagggactattattatataagatcaggctaatactacatgaaaagktgaaaaataccttaaagaaaaagaaaattacagaccaatgtcagccataattgtattgttatgagttgaattgtgttctactaaaatgcatgttagaatt

SEQ ID NO: 158872 - DNA, 201 bp, Homo sapiens
agtgacctaaatcacagtatttctgtatgagtacatattttctttttgtcaatgtgttaaacatcatctattaggcataataacatcaagtgattatttaygcattcttaaaaaataattgaatagtaagttgtagaaaacacatacacacacaccagccttctaaacttctaaaagcacttgagaaaccaatgacactaa

SEQ ID NO: 158873 - DNA, 201 bp, Homo sapiens
ccttagtctcccgagtagctgggactacaggcacgtgccaccatgccctgctaattgttgtatttagtagagatgggatttcaccatattggccaaactgstctcgaactcctgacctcattatccacacacctcggcctccaaaagtgctgggattacaggtgtcagccaccgcgcctggccggaagaagcatatttcat

SEQ ID NO: 158874 - DNA, 201 bp, Homo sapiens
aaagaaagttccacgctgagatagttgtactggtaaattctgtctaaaactaaataaataaaatcaaggttatacacactttttcagcaaaaaaagaggargagggactattattatataagatcaggctaatactacatgaaaaggtgaaaaataccttaaagaaaaagaaaattacagaccaatgtcagccataattgt

SEQ ID NO: 158875 - DNA, 201 bp, Homo sapiens
gcagcattcaaatttagagttgcttgaataaataatcgctaatgtcagaaatatttgttaaaattccttcaattttagctaagaaaaggaaaagctctccwaagataaaggacagttccaataccgataggtaggtaggtgaggaagagatgtcttggaaaagcctcacccttgaattattctcagtgaatggaacttaac

SEQ ID NO: 158876 - DNA, 201 bp, Homo sapiens
aaagaatagtatagaatgttattaagaatgatataccaacaaacttgacaaaataaaacaaatagacaactttcttaaaaaatacaatttatcaaaattamcaataagaaagaaaatctgagtaatcctaatctccattaaggcaattaaatttgtctccataaagaaagttccacgctgagatagttgtactggtaaatt

SEQ ID NO: 158877 - DNA, 201 bp, Homo sapiens
tagtcattacggtaatagtctttggcctaaaacacagaaaatcgtaacagtgcagctactcagaagtaatatgtgacattcttttacatttttgcttatartagaaatagaatcgtaaaaatacaggatttttggaaattaaaaactgtgtttcaaatgcaaagcatatttataataagaaagactacaccaatgttttct

SEQ ID NO: 158878 - DNA, 201 bp, Homo sapiens
tctattcattataatagcgtggttggaaaagtgggttaataccttttaatgatagcagtgtaatcaaaggcattaaatactacaaacattaaagaatagtrtagaatgttattaagaatgatataccaacaaacttgacaaaataaaacaaatagacaactttcttaaaaaatacaatttatcaaaattaccaataagaaa

SEQ ID NO: 158879 - DNA, 201 bp, Homo sapiens
ttaaccttttgtgaaaaagcatagtgacataaagtgacattttagatatggtggcatgattggaagaaaaagaaaaacattcacaaccagttattgcatgkctactattttcctagcattttcaaacagatgtatagaaaagttgaataatctgatttctcttttagaatgaagcagcttagggtcagggaggcggaataa

SEQ ID NO: 158880 - DNA, 201 bp, Homo sapiens
ctagttgtgaatgtaatcattgcaagacaaaagacatgtattttatgcagtgttgaagcagaaataataaagtaagttatatagcttggatttctttttaytaagaagaaatcttctatgtgtcactccagatgttaacctttggtggtgaagagctgccaccaaaagacaatgaatacttttttcctcaccaagatagaa

SEQ ID NO: 158881 - DNA, 201 bp, Homo sapiens
tctatttctacaatacctaaaaatattaatatcattaaatacataaaaaatatcagataaacaagtaaccctggctatcactgaacagctttaaattggtrgaccaaactggtttcttaagaagtgaaacattaaaagtttattcagtaattgaagtgctttccacagaactattgctctccatgaactgcatggctcttt

SEQ ID NO: 158882 - DNA, 201 bp, Homo sapiens
aagttccagacaaatacattcaatttttaactacaattttccttttttcaagttactctgttaatcttcttccactggaactctttctccacttccctgaracttatatctcattggctctctctactttttctacacccactattcttttctccttatttttcaacccatcaagcttagatttcatgacccaatctttaa

SEQ ID NO: 158883 - DNA, 201 bp, Homo sapiens
atttgtaggaagttctaagagtctcactcaaggctctcatgtctgctcttcttcctctacacatttgtcttttcctctctcatcattcaaaatttcatcayccatccaggatagcgtcagaagttccagacaaatacattcaatttttaactacaattttccttttttcaagttactctgttaatcttcttccactggaac

SEQ ID NO: 158884 - DNA, 201 bp, Homo sapiens
cacatgacagcatgctagtgggctcgtctgttgattgaagggagagtaagttacagacctggacattaagcgacctgcagtttcatagaggagatgacacrtgagtccaattacaaagacatttgtaggaagttctaagagtctcactcaaggctctcatgtctgctcttcttcctctacacatttgtcttttcctctctc

SEQ ID NO: 158885 - DNA, 201 bp, Homo sapiens
gtccctctgtataaaacagagaaggtcttatagaatctcaggtatgacattttggccatgtgtgcctaattttcctccctccctccctccctccctccctscctccctcccttccttccttccttccttccttccttccttccttccttccttctttccttccttctttccttcctttccttcctttcttccatttctgct

SEQ ID NO: 158886 - DNA, 201 bp, Homo sapiens
taaaatataaggttttatttcctgcttagagttgtcctaggcctgtgctaatgctttctactgctttatttctaaaattttgtatatgaagctattgctayaggaaatcttttttttcttaagactttaatacctggtaatcacactactgtagaattacttctctataaggaccttatcagtaggatttagtaggcaatt

SEQ ID NO: 158887 - DNA, 201 bp, Homo sapiens
aatttcaaaataaaattaaaattaaatttgatgttcaatttcaagatgaatatataatatacaatatataaaccaacatctatttatttcatttatgaaaycataccaattctagttgtccctctgtataaaacagagaaggtcttatagaatctcaggtatgacattttggccatgtgtgcctaattttcctccctccct

SEQ ID NO: 158888 - DNA, 201 bp, Homo sapiens
attctcaagaaggggtgcccttctgctactctctatgaaaataaaaatgaaaataaaatataaggttttatttcctgcttagagttgtcctaggcctgtgytaatgctttctactgctttatttctaaaattttgtatatgaagctattgctacaggaaatcttttttttcttaagactttaatacctggtaatcacacta

SEQ ID NO: 158889 - DNA, 201 bp, Homo sapiens
gccaccatcatcaatatagctgatactgtgagacagaaggtaaagtctgaacaagtttatagcctcagtgcaagtagctgaagaacaaaaccactaactcygtgtgaagaaggatatcaaggttttttaaaaacaataaaaaatgatagtgttgtagacctagttacgcatcatataaaatcctcccatacctaccagctt

SEQ ID NO: 158890 - DNA, 201 bp, Homo sapiens
aagagcatgaaagacgggccattttggaagatgcaatcgtccacaaaatgtgagtatttgtcatcggattatatgaatattgatataattagcaattggtrggtctccttttggaaatatagtaattgacatgagagctaagtgaacattacaaaattggccttaaataattaggtccccagcttagtcaggagtctcatt

SEQ ID NO: 158891 - DNA, 201 bp, Homo sapiens
aaaaaaaacccaagagacaaccttgggttaagtttagactcaacatccagcaacatgaatcataaaaggaaaatgaaatatattggcattcaacaaaattwaaaaaaaaagaacgatttgctctttgaatgacactgttaaaaaaatcaaagaaaaagtcacagtctggtagaaaacatttcaaaacatatatatatataa

SEQ ID NO: 158892 - DNA, 201 bp, Homo sapiens
cttttccttttaaggtcttcatagtggtgtcttctttgccggaatatcatagagttggaattatacagtaggtagccttttcagattggcttttatgtagycttttcagatttagcaatgtgcatttaagttgtcttcctccatgtatttttgtggcttgatagtgcctttatcgctgaataatatttaatcatctgaatg

SEQ ID NO: 158893 - DNA, 201 bp, Homo sapiens
tatagtggcatgtacccaccgttacagtatcatgcagaatagtttcactgctttaaaaatcctctgtattccacctattcctcccttcctccccttaaatmcctggcaaccacttttccttttaaggtcttcatagtggtgtcttctttgccggaatatcatagagttggaattatacagtaggtagccttttcagattgg

SEQ ID NO: 158894 - DNA, 201 bp, Homo sapiens
tttgatagagcttgaaggaaaaagattggaagaactgggacacgcagatgaacttacagtaatgggaacaaagtataaagatctatgtatgacattttaakacccaccacagaacattcacaaagaagaggcactaacagtgcagatttaacagcagcttgttgatatcagccagcatcgcatctatgctcagacaccctt

SEQ ID NO: 158895 - DNA, 201 bp, Homo sapiens
aagtttagctaaaatactcattggtaaatatttgaatctgctagtaaatagtagtttcttatcaagtttttaaataaggaatgtaacatgtttcatgataytgcctataacctttactttgattttaattaaccttttgtgaaaaagcatagtgacataaagtgacattttagatatggtggcatgattggaagaaaaaga

SEQ ID NO: 158896 - DNA, 201 bp, Homo sapiens
tgttgctcattgacatcaggcttaaggggccccttatggacagaatatatattctctgctccattgatgtttgacctgactatgtgatgtgctttagtcartggaataaatgtaggcacgatgtatactgtttttgagaagaaactttaaaaggtactaatgaaatttctttgcctgtttgtttctgctttctgtatgggt

SEQ ID NO: 158897 - DNA, 201 bp, Homo sapiens
atttgattgactttgtaatacagattcacattgcatttccaaacaagtatctttgataccatacttcactgtctcagcaattgtatacattttctttagtyagcaacccaaagtgctgttttacaataagacacatagcatcaatattcatatgtgaaatgttgagcatctgcttctgtaggcttttcaattaaatactct

SEQ ID NO: 158898 - DNA, 201 bp, Homo sapiens
ttcattttctgtcattgaaaaacttgttctatttctacaatacctaaaaatattaatatcattaaatacataaaaaatatcagataaacaagtaaccctgsctatcactgaacagctttaaattggtagaccaaactggtttcttaagaagtgaaacattaaaagtttattcagtaattgaagtgctttccacagaactat

SEQ ID NO: 158899 - DNA, 201 bp, Homo sapiens
taattgaaagaaatgcgcaaagacccaggtaagttggggctatgtgtaatctgtactgctgctgctggttagataattttttaataactttaaaacaaagyaaattaaacaacaacaacaactaaatttgacattcaagatttagacctgctatctctgactttaacttcttttttttgtggggggacggagtctcactct

SEQ ID NO: 158900 - DNA, 201 bp, Homo sapiens
gtttctctgaatgactcgttttgagtagatatagttataaactgccataaaaacagatcttttatatgctaactagttgcatattttttcaagtaaaattmtggtaaccaataatgtggttaaaatactcttgtgtaattgaaagaaatgcgcaaagacccaggtaagttggggctatgtgtaatctgtactgctgctgct

SEQ ID NO: 158901 - DNA, 201 bp, Homo sapiens
agacttcaggactccagatgactctgaaatacttagcaacagtagaagataactacataagaggagcttggaactttggctcaccatggggaagagcaccrctgaaggctgactatatctgcactgaacttgatggagcaagaataaattttactctccactaacatctagggggttgtattttacagcaattgccaccat

SEQ ID NO: 158902 - DNA, 201 bp, Homo sapiens
attaaatattataaatatttaatggaataaatgctttgtgaacattttagagtaagtttgaattactgtttctctgaatgactcgttttgagtagatatarttataaactgccataaaaacagatcttttatatgctaactagttgcatattttttcaagtaaaattctggtaaccaataatgtggttaaaatactcttgt

SEQ ID NO: 158903 - DNA, 201 bp, Homo sapiens
cttagtcaggagtctcattaatcattttcattctataggaaagtttgccattaatattcaggtcatacaagcaaaagcagatatttatagatagccagaawcgcactgtttagcagacatgcattcataacattatgtgctaagcactaactacacctagtaaagacatcatgttttccacataaaactactatattaagt

SEQ ID NO: 158904 - DNA, 201 bp, Homo sapiens
gactgtttgtattatatattaaatattataaatatttaatggaataaatgctttgtgaacattttagagtaagtttgaattactgtttctctgaatgactygttttgagtagatatagttataaactgccataaaaacagatcttttatatgctaactagttgcatattttttcaagtaaaattctggtaaccaataatgt

SEQ ID NO: 158905 - DNA, 201 bp, Homo sapiens
ttggaaatatagtaattgacatgagagctaagtgaacattacaaaattggccttaaataattaggtccccagcttagtcaggagtctcattaatcattttmattctataggaaagtttgccattaatattcaggtcatacaagcaaaagcagatatttatagatagccagaatcgcactgtttagcagacatgcattcata

SEQ ID NO: 158906 - DNA, 201 bp, Homo sapiens
ttaatacatctaacctaccaaatatcatagcttatctacactagcctaccttaaacatacccagaacatctacattagcttatgattgggcaaaatcatcwaacagtaagcctattttataattaagtgtgcaatagctcatataacatattgaatactttactgaaagtgataaacagaatgattgtatggaatctaatg

SEQ ID NO: 158907 - DNA, 201 bp, Homo sapiens
cattttggaagatgcaatcgtccacaaaatgtgagtatttgtcatcggattatatgaatattgatataattagcaattggtaggtctccttttggaaatayagtaattgacatgagagctaagtgaacattacaaaattggccttaaataattaggtccccagcttagtcaggagtctcattaatcattttcattctatag

SEQ ID NO: 158908 - DNA, 201 bp, Homo sapiens
acctaaaccgagctgtgcattagaactcctaaagtggcctcttcttgtctaattcatatcttaataatagttgtaaactcagtaatagcttttctaaaacyccaatttaaaaatgggcaaaacatgttagtttatttagaaatatttttacctagaagtttatttagaggaacctggacccctggctcatgattgggaaca

SEQ ID NO: 158909 - DNA, 201 bp, Homo sapiens
gctggaatcttcagaagacatctttcctcacatgtgtggttgttgacgcaggttgttggctgaaacctaaaccgagctgtgcattagaactcctaaagtgrcctcttcttgtctaattcatatcttaataatagttgtaaactcagtaatagcttttctaaaaccccaatttaaaaatgggcaaaacatgttagtttattt

SEQ ID NO: 158910 - DNA, 201 bp, Homo sapiens
actggaacaattgaagataaagtatgtatgtaaatactgttaaagttaggaaaaacactaatgaaaaagtttaatggaaagttgggatctagttatgtttraataaagaatgtttcagttaccatggctacataacaaattatctcaaatctagtatttacaaaaaatactattttactaatattggattctagtaaatta

SEQ ID NO: 158911 - DNA, 201 bp, Homo sapiens
aaagacataaatttaatacctgaacctataaaaatactagaaaaaaattagaaaatcttttctggacattggcttaggcaaagaatttatgatgaagaccycaaaaacaaatgcaacaaaaacaaaaatagacaaatgagacttaattaaactaaaaagcttctatatagcagaataaataatcagcagagtaaacaggca

SEQ ID NO: 158912 - DNA, 201 bp, Homo sapiens
tgggactattagtgctatgaccctgaactaaatctattagtttagaaattatcaataataattttactcttacataatctagtgtattgtataatcaaacrtgtaacagcagttaagtcaaaaatattcagaaagaaaaccagggtcaacctgaagactgaatgtatgtttataatttttaaaggagaatttttctgtgct

SEQ ID NO: 158913 - DNA, 201 bp, Homo sapiens
agaagcatatttcatgcagaccatatgggttgttttcctacttcctgttttagatcttggttacattactacaaaacataatggcatatgaatatctgtcyaatgccagtatcagacacatatgctggtcacaaggctaaataatttacccctacatgaatttatcttgtcttgtttctgtgcttgttttatgatgggtat

SEQ ID NO: 158914 - DNA, 201 bp, Homo sapiens
attacatggatggttgtttccccagcaaacctggctaaaccatcccgactgctacaatttgactaaataaatgtagtatgtatggcagagacttcatcatyatttgtttgttgctgagttttcagttcccagatggtagtaacacatagttataactcaatgaatatttttggatgaattaatagaatggtgaaatgagag

SEQ ID NO: 158915 - DNA, 201 bp, Homo sapiens
atatggacagaaaagagaccattgtttgttaagggctgaatatgggagaaagaattgaccacaaacttgcataagggaatttttttagatgatggaaatgytctatgtcttaaatgtaatgatgatttcttgactacatgcatttatcagaatgcatagaactgtacaaccaaaaggaattaatttgtctatgagtaaatt

SEQ ID NO: 158916 - DNA, 201 bp, Homo sapiens
cacccatgcttatatcagtcttgctcctaattacccaaattaaagccaaatgtccatcaataaggaaaatatttatacaaattatggtacatctaaacaayggaataaaaaacagcaatgcaacaacattaatgattcacaaatgtattagactaattgaaataaaccagaagcaaatggtagtgcatatagtatgatttc

SEQ ID NO: 158917 - DNA, 201 bp, Homo sapiens
ctccacaaggaacattctcaaaaatcaaccatatatttgggccataaagcaagtaccaataaattttcaaaaaatctaaatcatattaagtatcttcctcraccacagtttaataaaattagaaattaatactaagaggaagtttcaaaactacacaagtacaaggaaggttgctcctgaatgacttttctgcaaacaatg

SEQ ID NO: 158918 - DNA, 201 bp, Homo sapiens
acaaacatttgagaaagccaccatagaaaggcttcaataactaaggagtttttccagactctttaccactgaaaactcccagaaacaaagtaaaaggaccytatacaacatcatacattgtagacacctcctcaagaagggaaaaagtcctttccaaagtaaagcaaaatcaaaaaatatgaaggagagacagcttatcca

SEQ ID NO: 158919 - DNA, 201 bp, Homo sapiens
accacatgcagaaattataaaacatctccaaggagatgtccaaaaaaaaaaaacccaagagacaaccttgggttaagtttagactcaacatccagcaacaygaatcataaaaggaaaatgaaatatattggcattcaacaaaatttaaaaaaaaagaacgatttgctctttgaatgacactgttaaaaaaatcaaagaaaa

SEQ ID NO: 158920 - DNA, 201 bp, Homo sapiens; identical to SEQ ID NO: 29705

SEQ ID NO: 158921 - DNA, 201 bp, Homo sapiens
agccaaatgtccatcaataaggaaaatatttatacaaattatggtacatctaaacaatggaataaaaaacagcaatgcaacaacattaatgattcacaaawgtattagactaattgaaataaaccagaagcaaatggtagtgcatatagtatgatttcactcgtatgacattttggaaaaggcaaaactatatggacagaa

SEQ ID NO: 158922 - DNA, 201 bp, Homo sapiens
aattatgttaattttatgtacacaacaaataactgaatatattgtccctgtaaaaatactaaatttttaaattaatgttcatcacctgcacttttaatagmcattatttttagggtagtttttgtttcactggcaagttgagaggaaggtacagagactccccacataaccctgccaccatgcaggcacagcctgcctcat

SEQ ID NO: 158923 - DNA, 201 bp, Homo sapiens
aaataaataaataaataataaaaagcagtaaaagacaaaagtgaaaatgttgtttctagagggagatagtatgaagattttagcactcaaaacaagcatgrcaaaaatagtatttgtgagtgctttcagcaaaggttgaaattggcagcagcacaaagggtaaaaatgtgtttaagttggagttccctcagatttgatgag

SEQ ID NO: 158924 - DNA, 201 bp, Homo sapiens
aaacctatttgaggaaataatttaagaaaacttccctagtcttgggacagatttagacattcagataccagaagctcagagaattcctagagatacattgyaagaacttcaccaatgtatatagtcatcagactatccaaagtcaatgagaggggaaaaaaaacactctaagagcatcaagagaggggtctaatcattttg

SEQ ID NO: 158925 - DNA, 201 bp, Homo sapiens
atgagatcaaaaaagtaaaaattttcattctatttcagctttcatcttagtaaaaaagagtagcagaatggagtaatgtccaaaatctagttccaggtgcrattattatatatttctaaaatttgcagaaatgaaaagaatattttcagccttttagaacagatcattatgattctaaatggctagcaccgactatgctaa

SEQ ID NO: 158926 - DNA, 201 bp, Homo sapiens
gatgatgtgctttcaaaacacaacttcagtgattccaccagtagctagttctataaatttatccttattattaaatttgaattatctttcaatgagaatgrttttcagatccatgcatttcttatgtgtgacacatttttggtaaaaaaaataaaattccaaacccttgattaaatgtttggtgataaccttttgcaggtg

SEQ ID NO: 158927 - DNA, 201 bp, Homo sapiens
catttgcttcggtgaaaattcagccacattctttgtatggggttgatttgtttgccatttctaattccctgttactcctcattggtctttcaaagagagayatttgtgtaaatgacaatatgcaattatttcataaaaagtaatatatccttccaaatttttattaatgactttgaattgtcttttgtaaattttttggat

SEQ ID NO: 158928 - DNA, 201 bp, Homo sapiens
tatatgcacactttgagaatactttgtataaacacatttaaagattttgatatgaataaatgcaaacagttcatttcttccgttaacatgtctaggctacrttttattcacaacgttcatttactcataattatctgcactatttctaggttcctgttttagtgacactcattgtgcccaaaacaatctgtggagctgtat

SEQ ID NO: 158929 - DNA, 201 bp, Homo sapiens
gactgctccattagtaggtcaagtgatgtttaaataacactgttccagctgcaaattgattcagtttactttttaaatctccaaatgttcttgttgcaaaraaagtttggagaccaggcgtttgcatctgtaatcccagcagtttgggaggttaatgtgaatggatctcttgagcacagggagttcaagaccagcctgagc

SEQ ID NO: 158930 - DNA, 201 bp, Homo sapiens
aaactgcaaaacctttttgtagaatcaggaatatctctccatttttatacatataatcagaacaaatatggtatatgaagaaaataatttccaaaagactrtatatttttattaagagtatacacatagccattaatattgagaattgctaatatactatttgtctttctacaatctcagctaaacaaaatgtataagtga

SEQ ID NO: 158931 - DNA, 201 bp, Homo sapiens
gttttcatgctgctaatacagaaatacccgagaccgggtaatttataaagaaaagagatttaacggactaatttttccacatggctgaggaggcctcacartcatgatggaagacgaaggaagagcaaagagacatctcacatggcagcaggcaagagagagcatgtgcagggaaactccctctataaaaccatcagatcc

SEQ ID NO: 158932 - DNA, 201 bp, Homo sapiens
cagtaacattgcagttcactgggaaaaggccatcagtgtgcctgtcattcttgtaatcataccatgtcatgtggtttggctctatgtccccacccaaatarcatctcaaattgtcaggggagggacctgcggggaggtgaatggatcatgggggctgtttcccccattctgttcttgtgataatgagagacttctcatgag

SEQ ID NO: 158933 - DNA, 201 bp, Homo sapiens
caaattaccaacatcatccttcatgaaattgggggaaaaaatctaaatttcatatgtaaccaaaaagacccccaatagccaaaacaatcctaagcaaaaaraacaaatctgaaggcatctagatttgcctgactttactgctggacttcaaattttacctcaaggctacagtaactaaaagagcatgatactggtataaaa

SEQ ID NO: 158934 - DNA, 201 bp, Homo sapiens
ataatctttagaatacaatgaaacatgaaataaaaataacaatattcttcaatgaaggtaagtaatagttgaatagtcccttactatattttctttacccsttttctacaaaactctatgtaattctgtttatcgatccgtcaattcttgctttgagctagatggtaagatatttacttctctatagagtaaaccttaata

SEQ ID NO: 158935 - DNA, 201 bp, Homo sapiens
gcacattaacatatgaaatgattctatacatcattttatttagggaaatgcaaattaagaccacgatgtggtagcgtacatctgttagaatggctttaaarcaaaactggtagtatcaagttgtggtgagcatgcagatcaattggaaatctcatgcaatgctagtggtaatgcaaaatgacacagctatttttgaaaatg

SEQ ID NO: 158936 - DNA, 201 bp, Homo sapiens
aaatatatttaaaattttcacaactgaataatgataaaaaattaaaaatgggcaaaatataaaactttattcaaggaaatatgtggatgcacattaacatrtgaaatgattctatacatcattttatttagggaaatgcaaattaagaccacgatgtggtagcgtacatctgttagaatggctttaaagcaaaactggtag

SEQ ID NO: 158937 - DNA, 201 bp, Homo sapiens
caataaaatgatgatagaggtagaatccaaataagaataatttgaagaattaaccagtgatgaggaaacagaaaataaacacagatatcctggatgaagtytgtgataggatacagagacaggttggcagcagtaagggaaagtgaatatttttcaattcaagtacattccacatttgcatgattggtagcaaaagaaaat

SEQ ID NO: 158938 - DNA, 201 bp, Homo sapiens
gctaaaccatcccgactgctacaatttgactaaataaatgtagtatgtatggcagagacttcatcatcatttgtttgttgctgagttttcagttcccagayggtagtaacacatagttataactcaatgaatatttttggatgaattaatagaatggtgaaatgagagaataaaataagaggataagtaccttcattacgg

SEQ ID NO: 158939 - DNA, 201 bp, Homo sapiens; identical to SEQ ID NO: 29706

SEQ ID NO: 158940 - DNA, 201 bp, Homo sapiens
atatagtgtcataatttatgagaacaatttgttgtcattagctgcattctccaaaattctgctttgcagttaagttaaacctctcttcctttctccccttytcatttgaccccttaatcttatttgcactaatttggctttcctatccaagctattctaaatattttcagaagttcttactttattttttattagttcaaa

SEQ ID NO: 158941 - DNA, 201 bp, Homo sapiens
tataatagacaagacaacaccattgctcaatgatgtttctttaaagattttcagtttcatagcatgcttaatgtttgttgtttatgatttttatgtctctygtattgaaataactgacgttactgctttgcaatgaacacctctgcattgtacacattcaattcactccatcagttctaagacagaactgagtcttcatgt

SEQ ID NO: 158942 - DNA, 201 bp, Homo sapiens
atacccagtcataagattgttgagtctaacggtagttctgtctttaggtctttcaagaatcaccgcactgtcttccacaatgtgtgaatttatacttccascaacagtgtataagcaaacgttccttttttattccacacccttgctagcatctgtttttttgtttgtttgtttctgagaccgagtgttgctctgtcactc

SEQ ID NO: 158943 - DNA, 201 bp, Homo sapiens
agggcctgacagcacagaatcccactcaataaggttgatctggctacttctctagtaaaattcccaataacttagcaactgagatcaactgtcagtctctratatggcaccttaagataaccaaccaggcatttggtagcaagttgctacccttggacttctgctctaaaagggacatgattcaccttgattatattttag

SEQ ID NO: 158944 - DNA, 201 bp, Homo sapiens
tattgggttagtccttaatttgtaaaaccctatctccaaatggtgacattctgaagcactgagagtactgtggtctcaatgtttgtgttcccccaaaattmatatgtcaaaatcctaaatccaaggtgatggtattaggaggtggggcctttggggtaatgattagatcatccccagcctccagaagtgtgagaaataaat

SEQ ID NO: 158945 - DNA, 201 bp, Homo sapiens
gcctgttactgggctttggtggaaactgtatatttgactgtgggtcatcaagtcaccatgtgacctgaactgcctgtcgtgaactgggtgctttctgaccsatctagccataaagtgggtcatgcacaacagcattccatcatcaaatggaagtggtatatatattatcgggctcaaacaagtcctgaaggcacaagtatg

SEQ ID NO: 158946 - DNA, 201 bp, Homo sapiens
ttagtagcactgggggtaaagctgattaccctccataatgcaatgggcctcattcagtcaggtgaaggccttaagagaaaagactcagccttcagactcargactgcaacatcaatccttccttaggtctccagtctattggttctgtttctgtggagaacactgactaacacactgggattctcttgctttgcaaacaga

SEQ ID NO: 158947 - DNA, 201 bp, Homo sapiens
ggtagccacggtagtggagatggagccatgcagggcctgacagcacagaatcccactcaataaggttgatctggctacttctctagtaaaattcccaatamcttagcaactgagatcaactgtcagtctctaatatggcaccttaagataaccaaccaggcatttggtagcaagttgctacccttggacttctgctctaaa

SEQ ID NO: 158948 - DNA, 201 bp, Homo sapiens
atacctttgcgtcctcatagctaagcttccacttattagtgagaacatatgatgtttagttttccattcctgagttattttacttagaataatggtctccracttcatccaggtttctgtgaatgccattattttgtttctttttatggctgagtagtattcaaggtgtatatatatatatatatatacataccatatttt

SEQ ID NO: 158949 - DNA, 201 bp, Homo sapiens
cagcttactgcaacctccgcctcccaggttcaagcaattctactgcctgagcctcctcagtagctggaattacttgcacctgccaacacgcctggctcagyttttgtatttttagtagagacgaggtttcaccatgttgggcaggctggtcttgaactcctcacctcaggtgatccgcccaccttggcctcccaaagtgct

SEQ ID NO: 158950 - DNA, 201 bp, Homo sapiens
catttcaacacactcaaaatcagcaggatttgctcctcccaagtatgtaagtgacctaaatcacagtatttctgtatgagtacatattttctttttgtcartgtgttaaacatcatctattaggcataataacatcaagtgattatttacgcattcttaaaaaataattgaatagtaagttgtagaaaacacatacacaca

SEQ ID NO: 158951 - DNA, 201 bp, Homo sapiens
tctcacttctcttctgctgtcatgtaagacctgccttgcttccccttcacctgccaccatgattgtaagtttcctgaggcctccccagccatgcagaactktgagtcaattaaacctctttcctttataaattacccagtctcaggtattttttatagcagtttgagaatggactaatatataatataagtagatcctccc

SEQ ID NO: 158952 - DNA, 201 bp, Homo sapiens
ccctttaggtatatctaaagcaaataattccagtaacattgcagttcactgggaaaaggccatcagtgtgcctgtcattcttgtaatcataccatgtcatrtggtttggctctatgtccccacccaaataacatctcaaattgtcaggggagggacctgcggggaggtgaatggatcatgggggctgtttcccccattctg

SEQ ID NO: 158953 - DNA, 201 bp, Homo sapiens
cataccaattctagttgtccctctgtataaaacagagaaggtcttatagaatctcaggtatgacattttggccatgtgtgcctaattttcctccctccctscctccctccctccctccctccctcccttccttccttccttccttccttccttccttccttccttccttctttccttccttctttccttcctttccttcct

SEQ ID NO: 158954 - DNA, 201 bp, Homo sapiens
aaaataatcttgaatttaatgtattgacatttacttaactcacaaaattttaccatgccatcagtgactttttaaagctgacatttaatgccatgcaagaygtttttgataaagaaaactgtgttgatttgcattttaacaaaagcaccatatctgggtaaccattcaagaatgttttctgtaatagatattatgccacag

SEQ ID NO: 158955 - DNA, 201 bp, Homo sapiens
ttagcttttatctgctgtttatttgccttcccacaagttgctgcttctagagtctcaaagtccttttcctgtgtcttagtacttatctaaaaatttactgtttttttttaagatgctaggtatgcaaatagaaattcaaagccaactttttgaaaattactcattccctgggtgtctcacacatctgtatgaaatatacat

SEQ ID NO: 158956 - DNA, 201 bp, Homo sapiens
gggcctcacctttgtaagcgggttcaaactgaaaatcagttattgttatacaatagtcccactcatagatgttgcaaaacgactggtgattatacatttatcccaataggcagatcttagggtggtataagttgtcatccactttacatggaaatagaaagtccatggtaggagtatgtacagacacatttacagaagcta

SEQ ID NO: 158957 - DNA, 201 bp, Homo sapiens
aacttgatgtaagttacatgggacttctctgtactatcttcccaacttctaatgaatctgtaattatttcaaaactaaaaaggtaaaagtagtatttattkcaaagagccagtattttaatttattgtgaatgaatactatggaaaaatatgatgaaaataaattactagaaaactaaaattaaacaaagatacataaact

SEQ ID NO: 158958 - DNA, 201 bp, Homo sapiens
gtcctcagtaacatttggaaaatgcaaatctgataattacttccatgtgctaaaaagaatttaatactttcccatcccatttaggaaaatatcgcatctcrtgaacacttacaagcactgtatcctttggccacacatacttattcagtataatttcttattgctgtctcccccttttgcagtctatacctggcaatgctg

SEQ ID NO: 158959 - DNA, 201 bp, Homo sapiens
gaagctagccctccaagatttcagtcacgcccagattttgctagctctgtgattttggattaggccttccccaacctggcctcaggttcctcatctgtgcrggggtgagtaataacagtacccacctcagagccattatgaagattgcagtagttaatgtagctgccatacatgaggcagccatagtcatacctcaccaaa

SEQ ID NO: 158960 - DNA, 201 bp, Homo sapiens
caggtggtgtttggttaaactgatcagttttttagtggtgatttctgagattttgatgcacccatcacccaagcagtttacattgaacccagtgtgtagtrttttatccttcatcccactcccacccttcccccaaagtccccagagtccattatattattcttatacctttgcgtcctcatagctaagcttccacttatt

SEQ ID NO: 158961 - DNA, 201 bp, Homo sapiens
gtgctttagtcaatggaataaatgtaggcacgatgtatactgtttttgagaagaaactttaaaaggtactaatgaaatttctttgcctgtttgtttctgcyttctgtatgggtcctggaataaaaatatatggatgaggattgcagctgacttcagcctacatgcagtttgaatatgaagtaagtgttgatttattattgt

SEQ ID NO: 158962 - DNA, 201 bp, Homo sapiens
tatacgtcaagtcctcagtaacatttggaaaatgcaaatctgataattacttccatgtgctaaaaagaatttaatactttcccatcccatttaggaaaatrtcgcatctcatgaacacttacaagcactgtatcctttggccacacatacttattcagtataatttcttattgctgtctcccccttttgcagtctatacct

SEQ ID NO: 158963 - DNA, 201 bp, Homo sapiens
aaggctctcatgtctgctcttcttcctctacacatttgtcttttcctctctcatcattcaaaatttcatcatccatccaggatagcgtcagaagttccagrcaaatacattcaatttttaactacaattttccttttttcaagttactctgttaatcttcttccactggaactctttctccacttccctgaaacttatatc

SEQ ID NO: 158964 - DNA, 201 bp, Homo sapiens
aaatcaatcaatgtgattcatcacataaacaaaactaaaaacaaaaaccatatgaccacctcaatagaaacagaaaaagcatttaataaaattcagcattscttcatgataaaaatcatcaacaaactaggcattgaagaaacatacctcaaaatagtaagagccatctatgacaaatccacagccaacattatatagaat

SEQ ID NO: 158965 - DNA, 201 bp, Homo sapiens
aaaatataaggttttatttcctgcttagagttgtcctaggcctgtgctaatgctttctactgctttatttctaaaattttgtatatgaagctattgctacrggaaatcttttttttcttaagactttaatacctggtaatcacactactgtagaattacttctctataaggaccttatcagtaggatttagtaggcaattc

SEQ ID NO: 158966 - DNA, 201 bp, Homo sapiens
gattcacagctgcattttaccagatgttcaaagaagagttggtaccaatcttactgaaattattcaaaaaaaaaaaaaaaaaaaaagactaaggaggagcrattactccctaactcattccacaaaatcagtatcacccttataaccaaaatcaggcaagggcaaaagaacaacaacaaaaataccacaggccaatattct

SEQ ID NO: 158967 - DNA, 201 bp, Homo sapiens
taacagtgcagatttaacagcagcttgttgatatcagccagcatcgcatctatgctcagacacccttttgctgcagcagagactcaagcacagggtagccrcggtagtggagatggagccatgcagggcctgacagcacagaatcccactcaataaggttgatctggctacttctctagtaaaattcccaataacttagca

SEQ ID NO: 158968 - DNA, 201 bp, Homo sapiens
tcattttcattctataggaaagtttgccattaatattcaggtcatacaagcaaaagcagatatttatagatagccagaatcgcactgtttagcagacatgyattcataacattatgtgctaagcactaactacacctagtaaagacatcatgttttccacataaaactactatattaagtactctgctagtatgagtattt

SEQ ID NO: 158969 - DNA, 201 bp, Homo sapiens
aaattttcaaaaaatctaaatcatattaagtatcttcctcgaccacagtttaataaaattagaaattaatactaagaggaagtttcaaaactacacaagtrcaaggaaggttgctcctgaatgacttttctgcaaacaatgaagttaagacagaaataaaaaaattccttgaagtgaatgaaaatagagacaacataccaa

SEQ ID NO: 158970 - DNA, 201 bp, Homo sapiens
acaaagaatcttggagggtgagattaatctacacagcgggtcgcccagaccatttcattcttccttgttgcacccagcatctctcttttggtatgggggarattttttacagccatctgacagaggaggaaaaaggttgagtttgtttcccaagggcctcacctttgtaagcgggttcaaactgaaaatcagttattgtta

SEQ ID NO: 158971 - DNA, 201 bp, Homo sapiens
taagaaaataattccaacccatttcctaagtagcatgcaagtttcccagctttaaatagggcctggagaaggaaacggatccatatcaggttcaggttacmatgaaagcagccatgccacctgacccataatacctataggctcatgcatttgaagtatctttagtgatgtgggagatcagaatatgcccctccaaaatat

SEQ ID NO: 158972 - DNA, 201 bp, Homo sapiens
gatcaggcacaaagaatcttggagggtgagattaatctacacagcgggtcgcccagaccatttcattcttccttgttgcacccagcatctctcttttggtrtgggggaaattttttacagccatctgacagaggaggaaaaaggttgagtttgtttcccaagggcctcacctttgtaagcgggttcaaactgaaaatcagt

SEQ ID NO: 158973 - DNA, 201 bp, Homo sapiens
tctgtttgttttcctcttgttaatctgttctttgttacagtggtcctttttaactaagaatttatgagggttgaagaaaaattatttttcttcttttgcawttgtgacaagctctggtctcagaaccacaagagagaatcctgggattctgtatttaagtcatacatccgtgtctgcattcagaacgcatctcccagcaag

SEQ ID NO: 158974 - DNA, 201 bp, Homo sapiens
ttctagagtctcaaagtccttttcctgtgtcttagtacttatctaaaaatttactgtttttttttaagatgctaggtatgcaaatagaaattcaaagccamctttttgaaaattactcattccctgggtgtctcacacatctgtatgaaatatacatgttaatgaacttctgtttgttttcctcttgttaatctgttcttt

SEQ ID NO: 158975 - DNA, 201 bp, Homo sapiens
gctgagattacacgcatgcaccaccacgttcagctaatttttgtatttttggtagagacagggtttcagcatgttggccaggctggtcttgagctcctgamctcaagtgatccacctgcctacgcctcccaaagtgctgggattgtaggtgtgagtcaggattccccatcctgagacaatgaccctgatggcatggagccc

SEQ ID NO: 158976 - DNA, 201 bp, Homo sapiens
tatttgccttcccacaagttgctgcttctagagtctcaaagtccttttcctgtgtcttagtacttatctaaaaatttactgtttttttttaagatgctagrtatgcaaatagaaattcaaagccaactttttgaaaattactcattccctgggtgtctcacacatctgtatgaaatatacatgttaatgaacttctgtttg

SEQ ID NO: 158977 - DNA, 201 bp, Homo sapiens
tcagctatatcaaggtagaattgacaaataaaaaattgtatatatttggctgggcgtggtggctcacgcctgtaatccaagaactttgagaggcagaggcsggcaggtcatgaggtcaggagattgagaacatcctggccaacatggtaaaacctgtcttgactaaaactacaaaaattagctgggcatggtggtgcatgc

SEQ ID NO: 158978 - DNA, 201 bp, Homo sapiens
atatatttttaacacattaaatatattatttataagtaatatagatgcttatttacttacaataggattctgtccaataaagtcatcttaaattgaaaatrtagtaagtcaaaatgcatttaatacatctaacctaccaaatatcatagcttatctacactagcctaccttaaacatacccagaacatctacattagctta

SEQ ID NO: 158979 - DNA, 201 bp, Homo sapiens
ctatatcaaggtagaattgacaaataaaaaattgtatatatttggctgggcgtggtggctcacgcctgtaatccaagaactttgagaggcagaggcgggcrggtcatgaggtcaggagattgagaacatcctggccaacatggtaaaacctgtcttgactaaaactacaaaaattagctgggcatggtggtgcatgcctgt

SEQ ID NO: 158980 - DNA, 201 bp, Homo sapiens
tgtcattgacctagcactgttgtttattgtctataaatgatcatttgctgtaaatgtatttaggctaaaatgaattatttaatgttaaaaatattctaccygaatatatttttaacacattaaatatattatttataagtaatatagatgcttatttacttacaataggattctgtccaataaagtcatcttaaattgaaa

SEQ ID NO: 158981 - DNA, 201 bp, Homo sapiens
gcgggcaggtcatgaggtcaggagattgagaacatcctggccaacatggtaaaacctgtcttgactaaaactacaaaaattagctgggcatggtggtgcaygcctgtagtcccagctacttgggaggctgaggcaggaggattgcttgaacctgggaggcggaggttgcagtaagctgagatcttgccactgcactccagc

SEQ ID NO: 158982 - DNA, 201 bp, Homo sapiens
tcagccataattgtattgttatgagttgaattgtgttctactaaaatgcatgttagaattctaacttccagtacttaaatagatctcaagggatttattckgagtaaaaaaaaaatctaaaaatattacatacttcaatattctattaatacaacattcgtttcttttttaatagctttaattatttttgaattataatta

SEQ ID NO: 158983 - DNA, 201 bp, Homo sapiens
caccacattcatttattgatacaagatttagttatggagtccttgttttacacatgacagcatgctagtgggctcgtctgttgattgaagggagagtaagktacagacctggacattaagcgacctgcagtttcatagaggagatgacacatgagtccaattacaaagacatttgtaggaagttctaagagtctcactcaa

SEQ ID NO: 158984 - DNA, 201 bp, Homo sapiens
tttgtgtcacccacaattgcacggtttcatatatatatactcaatgctaaagggtaacttgatagctataagatggcaatcagtgatactgaacaggtctyttccactgtgtccctcggccttcccatcagcccagtgagtaactcgaattagatgaactccccattccatgccagatcctgtttcctatgactttgtttt

SEQ ID NO: 158985 - DNA, 201 bp, Homo sapiens
atgcacatcttgccctctctgggcctcagtttccccatctataaaaaagagaatgtaggggtactgggtgcagtggctcacacctgtaattccaacacttygggaggccaaggcaggcagattgtctgagcttagaagtttgagaccagcctgggaaacatgatgaaaccccaactccactaaaaaaaaacacaaagcaga

SEQ ID NO: 158986 - DNA, 201 bp, Homo sapiens
atactatatttcatttatcagttcatcagctgatagatatttaggttgtttccacatttgggctattacgaacaatgacattttatgatgcccaagagatktcagtgtgagaaacagaagatgaaggtgcagtatgtgggaaaggcccacaccggtaaagcagatccttttccaaaaatcaataggtctgtagttgggagt

SEQ ID NO: 158987 - DNA, 201 bp, Homo sapiens
ctaaaatgctgtgtccatgttgcctcatttaagcctcaggacaaacctctgagtgaagtgccatcattactcttgtttctagctgggacaaaaaaaaaaaagctgaagttaagagaaatgaccaaggaaagttctccgtgtttgttgagttttctatgtgagatcccctggagagtggggatcctgacttatttttctcag

SEQ ID NO: 158988 - DNA, 201 bp, Homo sapiens
cttaaatgaaggaaatgtttgactttgaaagatgatgatatatgagaaagtggtgtgagtggtcagaatgaaaagctgaatggcaatttctatgcaagatkagatgatgtatgagaaggtggtgtgagtggtcagaatgaaaagctgaatggcaatttctagtcctgaaaaaagcagagtaacccccaacacaagcatccc

SEQ ID NO: 158989 - DNA, 201 bp, Homo sapiens
gtcatcaccagttaatcctagaagtattctagttctctaagcctgaaaactaaaaagaagcgtctgtcagaagagcctctggcacacagatgcaaccagcrtatgccagtctcataggaggtccacaataggtgttctatggatgcagaagaatctatagaaacagcccaagaagagaggcaggaaggtctttttgttttg

SEQ ID NO: 158990 - DNA, 201 bp, Homo sapiens
aatctgtgaacactccatggaacgatcctgcaaaatgggccaatctcatgcaaagggaaattttcaccaatcactctaattgtgcttctggtgtaagaacctttagctgaagccacctttttctgatggaattttggtcaggggcggtatgaaaattaaaggcacaattcaaagacagggaacagtgattgcatctgatgg

SEQ ID NO: 158991 - DNA, 201 bp, Homo sapiens
atatggggaaatacttattaaaatagcgagatgatgccatgttcatcctcaagttagccaaatacagtagtgcccccttatctgtggctttgttttctgcrgtttcagttacctgtggtcaactaccgtccaaaataggtgagtacagagatcacatttgcataacttttattacagtacattgttatattctattatttg

SEQ ID NO: 158992 - DNA, 201 bp, Homo sapiens
gtcatcaaagttgcaggaaataagatcaatatacaaaaaattattaatagtatttctacatagtatcaataaacaatcaaaaaataaaattaatagaacartctcattgaaaataaaattttttaaatctcatttaaaaatgtattctctagataattcatctaatttactagacttagtactaaatgccacttcttttcc

SEQ ID NO: 158993 - DNA, 201 bp, Homo sapiens
ctccagcctgggggacagagtgagactctgtctcaaaaaaaaaaaagaaataatgtcttttgcagcaacatggatggaactggaggacattatcttatgtsaaataactcagaaacagaaagtcaaataccatatgttctcacttataagtgggaactaaataatgtgtacaaatggacacagagtgtggaataatagaca

SEQ ID NO: 158994 - DNA, 201 bp, Homo sapiens
atgtttgttttttccagtaatcatgaataggtactacattatattaaatgtgttttctgatcctattaaaaaggtaaaatagtttttctctattaatagagttaattaaaaatattttcaaatgttaaattttcgttgcatttctttctttttattttcttggatttaatttcttaatttttatttgtttgggcctttgca

SEQ ID NO: 158995 - DNA, 201 bp, Homo sapiens
tatgtttgttttttccagtaatcatgaataggtactacattatattaaatgtgttttctgatcctattaaaaaggtaaaatagtttttctctattaatagagttaattaaaaatattttcaaatgttaaattttcgttgcatttctttctttttattttcttggatttaatttcttaatttttatttgtttgggcctttgc

SEQ ID NO: 158996 - DNA, 201 bp, Homo sapiens
agctgcccctctaacaaataatcctcaaatatatcaagataccagctgttattttttaaaatcagagattaccaaacccagggcctaggcacttaatcagmgaacctaaatttagatctcactgttgcctctttcctggcttacagagttgcccctccaaagcagacctacatgaggaccaaaagccaagatccaatggcc

SEQ ID NO: 158997 - DNA, 201 bp, Homo sapiens
taatcttcccacacttgacccttccactggacatcaccaaaatcaaataaacataaaatgaattgtgggtttataaaaaatgctcactactattctattatgttggggcgctgtggaaacttataatatctagagattttgagcctagtttataaaattagtggctctctttccacctccagacttcagaaaattagttcc

SEQ ID NO: 158998 - DNA, 201 bp, Homo sapiens
gagacccctgaaagccataaaacctggaaggcaatgccatgccaattaagactgatactgaaaaaatttaaggagtccattggcctcatgacctcataaayaggctttgcctgttttcatttgtgtgatctttgtttctccccacaggtcagggcttgataatagcaagtattattgttgttgctagtaccagcacgagag

SEQ ID NO: 158999 - DNA, 201 bp, Homo sapiens
cttaccctccggtaacacacttgtcttgttgccattcatgacaacaactccattagtgtgtgtgattttttattcccttgcaacttgaaatccatatcttracccagaacataaaattaaattataattagaaggttgagtttgttaaaaaatttataattatacctccctttaaaaagataaacattaaagacaaatata

SEQ ID NO: 159000 - DNA, 201 bp, Homo sapiens
agatgtgcagaaaattatatttctacatatggtataaagaaaagtctaaagattaaccaaaaaaattaggataaacaaatttaacaaagtttcaggatacragatcaatacacaaaaatcagttgtgtttctatacactacaataaattatcaaaaaggaaattaagaaaacaatcttggctgggcaaggtggcttacacc

SEQ ID NO: 159001 - DNA, 201 bp, Homo sapiens
gcaatccgcataaaactaaaccaacctgcttctctgtactgtccacacatggtaagaaaattttcttctttcctaaatactttcattgttgctactaatcrtagtgccattattgttgagtactttatgatttgccaaatacttttgtcccaatttttaattttgcaaatttttgagtctccaaaaatgttaaatagtagc

SEQ ID NO: 159002 - DNA, 201 bp, Homo sapiens
gttacctgtggtcaactaccgtccaaaataggtgagtacagagatcacatttgcataacttttattacagtacattgttatattctattatttgtttttgkttttaatctcttactatacctaatttataaatttaactgcatcataggtatgcatgtataggaaaaagcatagtgtatatagggcttagtactattgatg

SEQ ID NO: 159003 - DNA, 201 bp, Homo sapiens
accgtccaaaataggtgagtacagagatcacatttgcataacttttattacagtacattgttatattctattatttgtttttgtttttaatctcttactawacctaatttataaatttaactgcatcataggtatgcatgtataggaaaaagcatagtgtatatagggcttagtactattgatggtttcaggcatccactg

SEQ ID NO: 159004 - DNA, 201 bp, Homo sapiens
ataaaattgaagccaagctctctggggaagccattgccaccttatattgtccaggtaggagatcatagtaatgattatgacagatattattaagtgagctsttacagttgtttatctaaatttctgacataaaggtaggcaatgaggaaagtccagcattctctaaattcaccccaaggataatctcacattattgctttt

SEQ ID NO: 159005 - DNA, 201 bp, Homo sapiens
agtggcctcccatagccaatgtccatgctgactaatattcatattttaaacatcaccctgcctaggacggactcagagggccttaccccgccctctggaasgttagtgccaaaggagaagaggacaaatggagctttgaaaggatgactcaactctccaagaaggccgccagcatcctctcagacacctgtgcccttagcc

SEQ ID NO: 159006 - DNA, 201 bp, Homo sapiens
catcataggtatgcatgtataggaaaaagcatagtgtatatagggcttagtactattgatggtttcaggcatccactgagggtcttgggacacatcccccmcggataaggcaagactactaaattaagtttgataattataaatgtggtctttagagggcagtatttcagtgtccagggatgtttaaaaaaaaaaaaaaaa

SEQ ID NO: 159007 - DNA, 201 bp, Homo sapiens
tctcgaactcccgacctcaggtgatctgcccacctcggcctcccaaagtgctgggattacaggcgtgagccaccacgcccagccaataactcattattttyaaactgtattttatttattcctaacctgccctctaattcttaataggaaaaaataacaccacctcctagactgttataaaactgccaaatctgtttttaa

SEQ ID NO: 159008 - DNA, 201 bp, Homo sapiens
aatagacaacaagaaaacacataaattatcaatataataaagtttccaaaagaaactccaaaacaaaacaggcaaattaaataaattggtctgatgtggaratgggggaatgattttagatttggtgacttctgaggtgaggataagctgagatttgaatatgacagagctagcctttggaagctctgagggaacactgtc

SEQ ID NO: 159009 - DNA, 201 bp, Homo sapiens
ataatcttcccacacttgacccttccactggacatcaccaaaatcaaataaacataaaatgaattgtgggtttataaaaaatgctcactactattctattatgttggggcgctgtggaaacttataatatctagagattttgagcctagtttataaaattagtggctctctttccacctccagacttcagaaaattagttc

SEQ ID NO: 159010 - DNA, 201 bp, Homo sapiens
gcacaaaatgtaaaagggcactgaaaaatccagtgatcgagggaaataatattttaattttaaaataatttttaattaaattataaaataatttttataaytgaagttttaaatttccacaaatatttattttatatatttatgtaatgttttcataatttataattttataaactgtatactcttttcaattgaataatt

SEQ ID NO: 159011 - DNA, 201 bp, Homo sapiens
atcccattcctaaatcatactgggaatatttgaacagtttggaagtgttgttgtcctgtctttgttttaaatttcaatattttgtttatcatggatttttrcattagttttcattatttaaaaacatttcactaaaatattatttatcttgactactgaatttgctggtatccccttaaatatcacaatgtttgtggcaaa

SEQ ID NO: 159012 - DNA, 201 bp, Homo sapiens
tatttatcttgactactgaatttgctggtatccccttaaatatcacaatgtttgtggcaaatgtttcactcactccaccttagtcccatccctggttaggratagtgaagagagagagacttgtgacatgttttggaagtagagttgtcagggcttggcaatggttaggatgtggcacagatagctaggtaggtaagtcga

SEQ ID NO: 159013 - DNA, 201 bp, Homo sapiens
ctgagatgggccaaactcattaggagttgccacaactggcctactgcctttgcctgctaacagggatgctagatttaaaaaaaaaaaaaaaaaaaaaaaaactgaaaagtgattcaaagagcaggtgtctttgagaatgccagctgtcagttatggggagcatacagaagagaggaagggagtgaaccctaccctcaggcc

SEQ ID NO: 159014 - DNA, 201 bp, Homo sapiens
catggagattgatctaactggggtgtctgaatagattatctaatagagtagtattaagaacatcaaccaccacttaatgagcatttcctgtattggaatawctgcatcatttttccaagattctttctaacagatctgttattggtagaaatattccctgaggctaagaacaacttttgatgcctctccagctacagattc

SEQ ID NO: 159015 - DNA, 201 bp, Homo sapiens
attatctaatagagtagtattaagaacatcaaccaccacttaatgagcatttcctgtattggaatatctgcatcatttttccaagattctttctaacagayctgttattggtagaaatattccctgaggctaagaacaacttttgatgcctctccagctacagattcaagagtctgaagcagtgtgtggctgcaggaggac

SEQ ID NO: 159016 - DNA, 201 bp, Homo sapiens
atctatgaaggctatgggcagacggaaactgtaggttgatgctgactcactatttagccagaaaccaaacttgcccattcactgtgtaagcacactgtcaragcactaagcacgcactagaaatgcacaactggatcttaagcacaggaagaggaaatggcttaaactagggagacccctcttccatgataagacaaagaa

SEQ ID NO: 159017 - DNA, 201 bp, Homo sapiens
atctctttgtgcccgcatggcatctggcaccatgcagagccttgttcctttgctcagctcttgattaagcatatggattacagacaaaggcccagctgggmcctacccagcagaagcttccaggctgggaggcaagacagatgagcagtgattgggtgccaaggaattcagagggctgcagctgtgagcaaaggcttgggc

SEQ ID NO: 159018 - DNA, 201 bp, Homo sapiens
ttacagatttcacaacagaaacttgaactagtttccacctgacaattcctgccctctttgtggagtataaggcaatatcatgtgataagaatgaaaaaatsatggggtacaagtctgagtggaggatgtttaaaattatcactgctgaaaatggaagaaagagtagattatgaaaataaaggagaaatgggttatgataag

SEQ ID NO: 159019 - DNA, 201 bp, Homo sapiens
ctagaggctggaagtccaagatcagagtgccagaaaggccgggttttaggaagagtcctcttctaggttgcagactaccaacttctcatggtgttctcacrgacagggagagagagagagaccaagctctttccaagctctttagtgtctttcagtttgtttgtttgtttttaaagagaggcagggtcttgctttattgcc

SEQ ID NO: 159020 - DNA, 201 bp, Homo sapiens
agattgagaccatcctggccaacatgtgaaaccctgtatttactaaaaatacaaaaaattagccgggtgtggtggcacgcacctgcagtcccagctactcrggaggctgaggcaggagaatcacctgaatctgggaggcggaggttgcagtgagccaagatcgcaccactgcactccagcctggggacagagtgagactcc

SEQ ID NO: 159021 - DNA, 201 bp, Homo sapiens
caagagattctccaacctcagcctctcaaacagttgggactacaggtgtgcaccaccatgcttgctatttattttattttattttttagcacagacacagwcttgctatgttgcccagactggtttcaaactcctggcctcagggaccttcccacctcagcaacccagcatatccaagatgacagacacaattcactgtgc

SEQ ID NO: 159022 - DNA, 201 bp, Homo sapiens
gtgcctatctggattataggctgtgtgaggactgcatcttgaagccggcctgaatcccattcctaaatcatactgggaatatttgaacagtttggaagtgktgttgtcctgtctttgttttaaatttcaatattttgtttatcatggatttttgcattagttttcattatttaaaaacatttcactaaaatattatttatc

SEQ ID NO: 159023 - DNA, 201 bp, Homo sapiens
tattctccaattatacctgaaagttaacagtaattgccttttattaacaaatatctaccactgacattttcatccatcatctaagtcatgcatgttttctkgctaccatttgttccaattaagcacacacattgtggctagttggtaagacttttgtgtatcttttaatctatgaatttcctcattaccttcttttttcct

SEQ ID NO: 159024 - DNA, 201 bp, Homo sapiens
gtaaggtgagtcatgcaagtgcctatctggattataggctgtgtgaggactgcatcttgaagccggcctgaatcccattcctaaatcatactgggaatatytgaacagtttggaagtgttgttgtcctgtctttgttttaaatttcaatattttgtttatcatggatttttgcattagttttcattatttaaaaacatttc

SEQ ID NO: 159025 - DNA, 201 bp, Homo sapiens
cacaaagaaaaacaggcccaaatggctttgcggtgaattctatctaacatttaaggaagcattaacattaatccttcacaaactctccccaaaaacatatracaccaggattttggaggctgtgtctcaaaatggggtcatagtatgagccaggatcatcctgataccaaaaccaaagacatcacaagaaaagaaaaccat

SEQ ID NO: 159026 - DNA, 201 bp, Homo sapiens
aattctatctaacatttaaggaagcattaacattaatccttcacaaactctccccaaaaacatatgacaccaggattttggaggctgtgtctcaaaatggkgtcatagtatgagccaggatcatcctgataccaaaaccaaagacatcacaagaaaagaaaaccataaattaatatttctgattactataggtgccaaaaa

SEQ ID NO: 159027 - DNA, 201 bp, Homo sapiens
tcatagtatgagccaggatcatcctgataccaaaaccaaagacatcacaagaaaagaaaaccataaattaatatttctgattactataggtgccaaaaaawctcaacaaaataccagccaacctaacaaggaacatataaatggattatataccataaccaagtggaattattccagaaatacaaagttggttcaaactat

SEQ ID NO: 159028 - DNA, 201 bp, Homo sapiens
gccaacctaacaaggaacatataaatggattatataccataaccaagtggaattattccagaaatacaaagttggttcaaactataaaaaccaattaatayaccataaaacaaagtacacaaatcacatgatcatctcaacagacacagaaaaatcattgacaaaatctaacaccaacacctatttatggtaacaaccctc

SEQ ID NO: 159029 - DNA, 201 bp, Homo sapiens
tagggcttagtactattgatggtttcaggcatccactgagggtcttgggacacatcccccacggataaggcaagactactaaattaagtttgataattatmaatgtggtctttagagggcagtatttcagtgtccagggatgtttaaaaaaaaaaaaaaaaaaaaaaaaaaaaagcagtaaacgagacagtcaaaccccga

SEQ ID NO: 159030 - DNA, 201 bp, Homo sapiens
tggtttgtaaggaaaattcctttagtgattatctaatttcagattgtggatgaaaactcaaatctcctgcctccaggggaagaaggaaatattgcaatccrcataaaactaaaccaacctgcttctctgtactgtccacacatggtaagaaaattttcttctttcctaaatactttcattgttgctactaatcgtagtgcc

SEQ ID NO: 159031 - DNA, 201 bp, Homo sapiens
gtttagatcttgtggtgttttaggaagagcacaagtggtttgtaaggaaaattcctttagtgattatctaatttcagattgtggatgaaaactcaaatctyctgcctccaggggaagaaggaaatattgcaatccgcataaaactaaaccaacctgcttctctgtactgtccacacatggtaagaaaattttcttctttcc

SEQ ID NO: 159032 - DNA, 201 bp, Homo sapiens
agaagtaaaactatctctattcaacatgacatgaccatgtatatagaaaatcctaaggaatacacacacactattagagctaaaaattgaggtcatcaaarttgcaggaaataagatcaatatacaaaaaattattaatagtatttctacatagtatcaataaacaatcaaaaaataaaattaatagaacaatctcattga

SEQ ID NO: 159033 - DNA, 201 bp, Homo sapiens
ccatttcatcaattattacctaatcctgttttatcattactcctctacaatcccaaaaacaatattttctcataaatagctttagtatattttaaaaaaargcactaaaaaacaaacatattctccaattatacctgaaagttaacagtaattgccttttattaacaaatatctaccactgacattttcatccatcatcta

SEQ ID NO: 159034 - DNA, 201 bp, Homo sapiens
agggaccttcccacctcagcaacccagcatatccaagatgacagacacaattcactgtgcccagcatctcttcttataagggcactaatcccatcatgagrgtgccaccctcatgacctcatctaaacccaatgacctcccaaaggcctcatctccaaataccatcacagtgagcagtagggaattagcacataaattttg

SEQ ID NO: 159035 - DNA, 201 bp, Homo sapiens
aattgatgttctatctagacaccatgtgaaaagtttctggaaggaaagagtcagggaacaaacagtcctgttcctgcaacatgaggatgaaaataagcagraaagcttatatgatggaaacaccacagataagaatgtagagctggtaccttaggctggtggccaaatttttacatgaattggtttcagtgttttccaggt

SEQ ID NO: 159036 - DNA, 201 bp, Homo sapiens
tgttgcctggattaactgcattcactgccagatggtccataaaataggcttcctgagaagcaaaaacacaaaatatttttgagagaattgaatacccaatrtttttaaaacattcaaatagacagcatgggagaaataagaatttgtggtggggggcagggggatttcttacatttgttttatatattactactgttttta

SEQ ID NO: 159037 - DNA, 201 bp, Homo sapiens
gtgtgggagaagacaaaacagccaaattgatagcctaggctctggggagaggtctatagtttgaggaccctggtggagctatgtagttccatatggctcargaaacatcctcacttagaaagctaaagaaaattcagaacacaaggttcaaatctttgagacctcatagtcaagctcacgcttggtacgcaagttacaatt

SEQ ID NO: 159038 - DNA, 201 bp, Homo sapiens
tctatagtttgaggaccctggtggagctatgtagttccatatggctcaagaaacatcctcacttagaaagctaaagaaaattcagaacacaaggttcaaawctttgagacctcatagtcaagctcacgcttggtacgcaagttacaattcaaaactgtaaaagagggaacttgagaaatgatcaaattctgtctcagattc

SEQ ID NO: 159039 - DNA, 201 bp, Homo sapiens
taggagatcatagtaatgattatgacagatattattaagtgagctcttacagttgtttatctaaatttctgacataaaggtaggcaatgaggaaagtccascattctctaaattcaccccaaggataatctcacattattgcttttatttccacctcaatatccttttggaatacaaagcccagacacaggaatgagggaa

SEQ ID NO: 159040 - DNA, 201 bp, Homo sapiens
tagttcaagtttcaaatatggagaaatcgaataaaaaaaattgctattaaaaagatatgtgcaaaataaagacaactattttgaatgcaccataataagcrttctgtacttgaactaaaaatatactaaagtgggaagtctaagccactagtcagctgctcgggtgtcgattattataaatactgtaatgtgattcccaaa

SEQ ID NO: 159041 - DNA, 201 bp, Homo sapiens
gacaaagatgacatgataatctcaaaagacacagcaaaagcattccacaagattcaacaccttttgatgataaaaattctcaagaaattgggtagagaagraacttacctcaacacaataaaggccatatataaaaagcacatagctaactaacatcatactcaatggtcaaaaactgaaagcttttctctcatatctgga

SEQ ID NO: 159042 - DNA, 201 bp, Homo sapiens
cttatttcatcctcacaataaagctgtataataggtgcactttaaatctctgattttctagatgaggaaactgaggtacagagaagtatccaagaatctcmgagtcagaaggtgtcagagtggacatgcaaacccaaatatttccagctctggcaccctcacactgacgactgaaccacactgcctcttaggttgcccagt

SEQ ID NO: 159043 - DNA, 201 bp, Homo sapiens
tcacatgatcatctcaacagacacagaaaaatcattgacaaaatctaacaccaacacctatttatggtaacaaccctcaacaaactagcaatgaaagggarctttctcaacctgacaaagggcatacagaaaccccatagctcacatcagactcaacagtaaaaaactgaaagtgctcccactgagatcaggacttatgag

SEQ ID NO: 159044 - DNA, 201 bp, Homo sapiens
acacagaaaaatcattgacaaaatctaacaccaacacctatttatggtaacaaccctcaacaaactagcaatgaaagggaactttctcaacctgacaaagrgcatacagaaaccccatagctcacatcagactcaacagtaaaaaactgaaagtgctcccactgagatcaggacttatgagaatattcactcttcatagag

SEQ ID NO: 159045 - DNA, 201 bp, Homo sapiens
tcttgttgcccaggctggggtgcaatggcatgatcttggcctcccaggttcaagcaattctcctgcctcagcctcccaagtagctgggattataggcatgygccaccacgcccagctaattttgtatttttagtagagacagggtttctccatgttggtcaggctggtctcgaactcccgacctcaggtgatctgcccacc

SEQ ID NO: 159046 - DNA, 201 bp, Homo sapiens
cttcttaaacatcagcaccatcacatctatgaaaattaaaaataattatttaatactatctaatatctagccaatacttagactttctcaattgtactcaratgtgttttataccttttgtaaatccagaattcaatcaaagttcatgcatttatttggttctcatatctctttagttgtttttatctataactgttccac

SEQ ID NO: 159047 - DNA, 201 bp, Homo sapiens
ttttcaccaatcactctaattgtgcttctggtgtaagaacctttagctgaagccacctttttctgatggaattttggtcaggggcggtatgaaaattaaasgcacaattcaaagacagggaacagtgattgcatctgatggatgatgagcctgagaaaatagcagccaacactccttacacatactgtacctggccttgtg

SEQ ID NO: 159048 - DNA, 201 bp, Homo sapiens
gatctcactgttgcctctttcctggcttacagagttgcccctccaaagcagacctacatgaggaccaaaagccaagatccaatggccatattcttcaccargggtacaacaggagctcccaaaatggtcgagtattcccagtatggtttgggaatgggattcagccaggcttccaggtacggttctcgcacagcctgtaca

SEQ ID NO: 159049 - DNA, 201 bp, Homo sapiens
gttctcatatctctttagttgtttttatctataactgttccaccaccatgtttttcgtgacgtggacattttgaagaatagaggacggttgtgttaaaaamtgcctcactttctaggcttacatattgtttctttataatgagatccaggataaacatctttctcaagactattatgtagatgatgtatatttcttatttg

SEQ ID NO: 159050 - DNA, 201 bp, Homo sapiens
ccatctctacaaaaaaaaaatacaaaaattagccaggcatggtggcatgcacctgtagtcccagctactcaggaggctgaggtgggaggataaactgagarcaggacgtcaagagtgtagtgagctgggtgtgatggcaccactgtgctccagcctgggcaacagagcaataccctgtctcaaaaacaaataaataaaatg

SEQ ID NO: 159051 - DNA, 201 bp, Homo sapiens
tcacccataagacagattccaaagaagagacccagatatctcacatacctactgggattattgtgctgtttgagaatgagctgcttacacagcttttcacyaaagtttattagaactctaacaagcaggttgtccattagatctaagaatctggacacattggtgacgtggtctctatggcaatgagtcaaatgctgttag

SEQ ID NO: 159052 - DNA, 201 bp, Homo sapiens
actgagatcaggacttatgagaatattcactcttcatagaggttctatccagagcaatcaggcaagaaaaagaaatagcatcccaattggaaaagaagaartaaaactatctctattcaacatgacatgaccatgtatatagaaaatcctaaggaatacacacacactattagagctaaaaattgaggtcatcaaagttgc

SEQ ID NO: 159053 - DNA, 201 bp, Homo sapiens
ttaactcataatgccaccattcttagccactattaacatttgatgtgtatatatccttcattctttttctatttatttgtcttgttttataaaagtgggaytgtactctatcagcttttgtgaagcctgtttttttacttatgattttcagggatcagtaaatcttatatgacaactttttttttttttttgaaacagggt

SEQ ID NO: 159054 - DNA, 201 bp, Homo sapiens
agaagccactcggctgaaataagtcattattttcttttttgagacagagttttgctcttgttgcccaggctggggtgcaatggcatgatcttggcctcccrggttcaagcaattctcctgcctcagcctcccaagtagctgggattataggcatgcgccaccacgcccagctaattttgtatttttagtagagacagggtt

SEQ ID NO: 159055 - DNA, 201 bp, Homo sapiens
ttttgtatttttagtagaaacagggttttaccatgttggccaggttggtctggaactcctgacttcaagtgatccacctgcctcagcctcccaaaatgccracagccaccgcacccagcccttatatgaaaacatttttaataattttataaaatcttatcaaggagaactatcatgatctatttaacatatctgctattg

SEQ ID NO: 159056 - DNA, 201 bp, Homo sapiens
aaccccatctctactaaaaataaaaaaattagccaggcatggtggcatatgactgtaatcccagctactcaggaggctgaggcaggagaatcacttgaacrcgggaggtgcaggttgtagtgagcagagatcacaccactgcactccagcctgggtgacacagcaagatctgtctcaaaaaaaaaaaaaaaaagtctaact

SEQ ID NO: 159057 - DNA, 201 bp, Homo sapiens
caaaatgccgacagccaccgcacccagcccttatatgaaaacatttttaataattttataaaatcttatcaaggagaactatcatgatctatttaacatayctgctattgttgaaaattttggttacttccaatgttttatattgtaaatacttcttcaatgagtatccttgttaactctttaaatgcctctttgagtatc

SEQ ID NO: 159058 - DNA, 201 bp, Homo sapiens
gagccaagatcatgccactgcactccagcctgggtgacaagagcaaaactccatctcaaaaaaaaagaaaggaaaaaaattatatgtcaacaaaatagacmacttagaaaaaatggataaagtcctaaaaacatacaacctaccaagactgaatcataaagaattaaaaagtcagaacataccaataactaacaaagagat

SEQ ID NO: 159059 - DNA, 201 bp, Homo sapiens
aattttataaaatcttatcaaggagaactatcatgatctatttaacatatctgctattgttgaaaattttggttacttccaatgttttatattgtaaatayttcttcaatgagtatccttgttaactctttaaatgcctctttgagtatctctcgtggagtttttgagttaaagcctaggtaaaacgttttaaatatttta

SEQ ID NO: 159060 - DNA, 201 bp, Homo sapiens
atccctatgaataattatatgtcaacaaagccaggtgtggtggtgcatgcctgaaatcccagcacttttggaggccgaggccagtggatcacttgaggtcwagagttcaagaccatcctggccaacatggtgaaaccccgtctttacaaaaatacaaaaattagccgggtgtgatggcagatgcctgtaatctcagctact

SEQ ID NO: 159061 - DNA, 201 bp, Homo sapiens
tttcaccaatcactctaattgtgcttctggtgtaagaacctttagctgaagccacctttttctgatggaattttggtcaggggcggtatgaaaattaaagscacaattcaaagacagggaacagtgattgcatctgatggatgatgagcctgagaaaatagcagccaacactccttacacatactgtacctggccttgtgc

SEQ ID NO: 159062 - DNA, 201 bp, Homo sapiens
catgccatagaaatgtgaagaatccctatagaatccctatgaataattatatgtcaacaaagccaggtgtggtggtgcatgcctgaaatcccagcactttyggaggccgaggccagtggatcacttgaggtcaagagttcaagaccatcctggccaacatggtgaaaccccgtctttacaaaaatacaaaaattagccggg

SEQ ID NO: 159063 - DNA, 201 bp, Homo sapiens
tgtgtgggagaagacaaaacagccaaattgatagcctaggctctggggagaggtctatagtttgaggaccctggtggagctatgtagttccatatggctcmagaaacatcctcacttagaaagctaaagaaaattcagaacacaaggttcaaatctttgagacctcatagtcaagctcacgcttggtacgcaagttacaat

SEQ ID NO: 159064 - DNA, 201 bp, Homo sapiens
tccaggtagataggaacaaaagaaaatagagaagtgggccaggagcagtggctcacgcctgtaatcccagcactttgggaggccaaggcaggcaaatcacraggtcaagagattgagaccatcctggccaacatgtgaaaccctgtatttactaaaaatacaaaaaattagccgggtgtggtggcacgcacctgcagtccc

SEQ ID NO: 159065 - DNA, 201 bp, Homo sapiens
atgcaatatccacgtaacaaaactgcacttgttccccttaagtttatacaaaagtaaacctcaccctcactgggatatggggaaatacttattaaaatagygagatgatgccatgttcatcctcaagttagccaaatacagtagtgcccccttatctgtggctttgttttctgcggtttcagttacctgtggtcaactacc

SEQ ID NO: 159066 - DNA, 201 bp, Homo sapiens
tgtataattatttcaatatatattacaatgtaataataatagaaataaagtgcacaataaatgtaatgcactcgaatcatcccaaaaccatcctcttgccycagtctgtggaaaaattgtctcccacaaaacccaggtgccaagaaggttggggaccactgctcttcatccagtattagagagtccttgagagtcaccctg

SEQ ID NO: 159067 - DNA, 201 bp, Homo sapiens
ccccattgcttgcattaccacctgagctctgcctcctgtcagatcagaggtggcattagattctcataggagcgcaaatcctattgtgaactgtgcatgcraggaatctgggttgtgcaccccacatgagaatttaatgcctgatcatctgccactgtctcccatcactcccagatgggactctctagttgcagaaaagca

SEQ ID NO: 159068 - DNA, 201 bp, Homo sapiens
ttcagccaggcttccaggtacggttctcgcacagcctgtacaggcctgaaagttgttctcttgcaggtaaagggagcttcatgggactaaagctaagaaasgagtttcttactcaagactgcagaaagtgtcaatattgagagaaggaacagggctgagggccccaaaagatgaaaagcaaattactatagttcaaaattc

SEQ ID NO: 159069 - DNA, 201 bp, Homo sapiens
tctcccttcgctgactctcttttcggactcagcccgcctgcacccaggtgaaataaacagccatgttgctcacacaaagcctgtttggtggtctcttcacrtggacgcgcatgaaagcttcctccaaaaggaaagccagaggcacgcaggcctaggttgcctcgccgccccctgcgccctttcctgcagactggtgcatag

SEQ ID NO: 159070 - DNA, 201 bp, Homo sapiens
cagcctggattttgctaattgcagtatggtttacatgttcttctgttcccctgcatttcctgtaaattgacctagaggttaatttagtcacactcctgctygatttttttttaatcaagattacttgttagactgtgtaatgttgttctgttaggaggcacataatgtctggttatgatcaataactagatccattaattt

SEQ ID NO: 159071 - DNA, 201 bp, Homo sapiens
gcaaatgctgtgtctaggattttattacataaaagcagactcaaattagcagcacttatgaaattaccattattcattttaagatagtcctttgctttcaygcctatctcgcctttttttaacattggtcaaaaggaaatagtaagttctcaacctgaatgaaacaaatattagtatttactttaactattgtatcattct

SEQ ID NO: 159072 - DNA, 201 bp, Homo sapiens
gggaccagggtgcactcctcccttctccatatatgtgagatctgtctgtgtgattacatctgatgtgcccttttggtggcatccagaaagctgcacagtgrtggctctaacaacacatgcatctctcctaatgagagagctctcaattattataaattactcaacatgataaagttaaattggcttttaaactacgctgac

SEQ ID NO: 159073 - DNA, 201 bp, Homo sapiens
aaattttcgttgcatttctttctttttattttcttggatttaatttcttaatttttatttgtttgggcctttgcatttagagacatgaataaaatgagcaygtaattttcctctcaaaaaataagaaaaaattaaaatgttccttgcatactaaagtataaacaaaaatgaaataaatgaaattgaaaaataaaatgttcc

SEQ ID NO: 159074 - DNA, 201 bp, Homo sapiens
tattcttcaccaagggtacaacaggagctcccaaaatggtcgagtattcccagtatggtttgggaatgggattcagccaggcttccaggtacggttctcgyacagcctgtacaggcctgaaagttgttctcttgcaggtaaagggagcttcatgggactaaagctaagaaaggagtttcttactcaagactgcagaaagtg

SEQ ID NO: 159075 - DNA, 201 bp, Homo sapiens
cagtggtggctctaacaacacatgcatctctcctaatgagagagctctcaattattataaattactcaacatgataaagttaaattggcttttaaactacrctgacattatcacaagaaatttcaacattatatctgtaaacaaaatgaaaagctgttagattattttttagatatagtttctactattataaagttctag

SEQ ID NO: 159076 - DNA, 201 bp, Homo sapiens
gtaaacaaaatgaaaagctgttagattattttttagatatagtttctactattataaagttctagtatttttcttaaaccaccacaaaagaaatttgaacwctgccttagtctgcttgggttactatagcaaaatgctatcaactgagtaactcatatataacagaaatttatttctcacaactctggaggctgggaagtc

SEQ ID NO: 159077 - DNA, 201 bp, Homo sapiens
agagtggggatcctgacttatttttctcagtctcccctggggctagccagagtgctcaattcatatcactaaatgattgtgagagggaagtaaatgtaggyttctggattcatcattctatcaggtgagctgggaggaatatgcttcagcaagaggccacatgctttacctcacaggtgacagagggatcatggatgaaga

SEQ ID NO: 159078 - DNA, 201 bp, Homo sapiens
tccggaagcacaaaggtcctggtatcttgtccatggcaaatgctggacccaacacaaaaggcttccagtttttcatgtgcaccaccaagactgagtggtcrgatggcaagcacgtggtctttgacaaggtgaaggacagcatggatatcatggatgccatggagcactcttagtctaggaatggcaagaccagcaagaaga

SEQ ID NO: 159079 - DNA, 201 bp, Homo sapiens
aactgagggatgaaagagattagatatggggaaaaggagaatgagtcagaaggaggggtggaagcacagggtggtagaagaaaacactggccccgcagtcyggcagtcctggttcccaggcccagtctatgaaatgtgtctctgagatcttccatcgactgaacctggagagatcagccatttctggttttgaacaaagaa

SEQ ID NO: 159080 - DNA, 201 bp, Homo sapiens
cagaggtggcagaggcagaagaaaatcctcctataagtagacctgcacagttcagtgctgtgttattcaagaatcaactgtaatttcttcacctgtaaaaygcttactcaaacttcaagattcaattcaggctaattactgtatcctcagtaatacccgcacagagaaagcccccaaatcttggcaaataatgattcaact

SEQ ID NO: 159081 - DNA, 201 bp, Homo sapiens
tagagtcaagcctatctggattccaggctgcagacttacttctacttcttcctggctaagtaccctagatgtaggacttctccttttttttttttttttttaagagggagtctttctcctgtcccacaggctggagtgcaatggcgtgatctcagctcactgcaacctccacctcccaggttcaagtgattctccttcctc

SEQ ID NO: 159082 - DNA, 201 bp, Homo sapiens
tttgcaggcattttcattttacctttcccttacaaggtagaccctgttaggcccattttacagatgaagaaactgaggcccagggagatgtgaagtgttcragtgaacttagctggacaatagcagttccagttttctaatctgtgtctggcttcctatccaatggcctccctactccccaggagctaccagacactcagt

SEQ ID NO: 159083 - DNA, 201 bp, Homo sapiens
tgatcagggcataagctttagagtcaagcctatctggattccaggctgcagacttacttctacttcttcctggctaagtaccctagatgtaggacttctccttttttttttttttttttaagagggagtctttctcctgtcccacaggctggagtgcaatggcgtgatctcagctcactgcaacctccacctcccaggttc

SEQ ID NO: 159084 - DNA, 201 bp, Homo sapiens
ggtcttttacaagcctctggcgccttccgccagggttgtgagaccgattgagttggaagggccagcacctgtgcactcggtggcccagtggctctccattsctctctgcctggctttgccctgaacccccaggtcaattcaacccaaaccatgggtaaagcagagctctaacagagaacgatcagcggagatttgtgacag

SEQ ID NO: 159085 - DNA, 201 bp, Homo sapiens
ttgatcagggcataagctttagagtcaagcctatctggattccaggctgcagacttacttctacttcttcctggctaagtaccctagatgtaggacttctccttttttttttttttttttaagagggagtctttctcctgtcccacaggctggagtgcaatggcgtgatctcagctcactgcaacctccacctcccaggtt

SEQ ID NO: 159086 - DNA, 201 bp, Homo sapiens
agtgactcatacctgtaatcccagcactttgagtggaggaggcgggcagatcacctgaggttaggagtttgaggccagcctgaccaacatggcaaaacccygactctactaaaaaatacaaaaattagccaggtgtggtggtacacacctgtaatcccagctactcaggagggtgaggcaggagaattgcttgaacccggg

SEQ ID NO: 159087 - DNA, 201 bp, Homo sapiens
cactattaaagagaagggattcagcacttagctcacccatagtgtttgattctggctcctcttggggcaacagcaaagtatgggggctatgctgacatcaygatctatgatgctgccgccaccatggtttattagcctgcctgtgccacttcctgagcctccaaatcacacagaatgtaagacagacaaaaatgtcatcag

SEQ ID NO: 159088 - DNA, 201 bp, Homo sapiens
ccaggggtcccttgaggtagagacactattaaagagaagggattcagcacttagctcacccatagtgtttgattctggctcctcttggggcaacagcaaastatgggggctatgctgacatcacgatctatgatgctgccgccaccatggtttattagcctgcctgtgccacttcctgagcctccaaatcacacagaatgt

SEQ ID NO: 159089 - DNA, 201 bp, Homo sapiens
attattaggaaatgtattacctcaaatagaacaactacagggatttcaggtgagttacagaagaggcacacacacactcacacacacacacacacacacacccctacacatccttacccattatagtaagtccccgttttaattattcaaaggtagagaatattattgaattcagaataacacgtcagtcagtcaggtgca

SEQ ID NO: 159090 - DNA, 201 bp, Homo sapiens
aattattaggaaatgtattacctcaaatagaacaactacagggatttcaggtgagttacagaagaggcacacacacactcacacacacacacacacacacacccctacacatccttacccattatagtaagtccccgttttaattattcaaaggtagagaatattattgaattcagaataacacgtcagtcagtcaggtgc

SEQ ID NO: 159091 - DNA, 201 bp, Homo sapiens
ttaccacaacagggggacagcatgcataagagtaactcccagaggcaagcagagctgagaaagtcctgagctatagtttgaccctttggacccagatgtayccagacttttcagctatgtaagccattaaatgctattttttttaaatattttgagacagggttactatggggtttctcaaacttgcagctcatgcatgat

SEQ ID NO: 159092 - DNA, 201 bp, Homo sapiens
tgcagtgagctgagatcacgccactgcactccagtctgggtgacagagcaagaatctgtctcaaaaaataaataaataaataaataaaagaagcagcaggrtgaagggatatacccaacagaaatgcaaacacatgtccacacaaacacatgtatgcgaatgttcatagtagcattatccacaattgccgaaaaatggaaa

SEQ ID NO: 159093 - DNA, 201 bp, Homo sapiens
gaattattaggaaatgtattacctcaaatagaacaactacagggatttcaggtgagttacagaagaggcacacacacactcacacacacacacacacacacacccctacacatccttacccattatagtaagtccccgttttaattattcaaaggtagagaatattattgaattcagaataacacgtcagtcagtcaggtg

SEQ ID NO: 159094 - DNA, 201 bp, Homo sapiens
gatgaatacatacacttcataccatctcacaacctacctgggtttcctcatctgagcttgaagaaaagaaaaatgaacactttgccaaaaccgccatcctycatccaccaaaagcccttctctcttgtgcctggttcaattattcttttctgaggggcaacatgcaggatgagaaaaaagggccaggtcctaagtggggct

SEQ ID NO: 159095 - DNA, 201 bp, Homo sapiens
tgatacctaaacaaacacccagactcattatgtcaataacctggtaaatgttttacttgctggtttccagctgccatgaggaaagatcctcccatttgccrgatgctcaaatggtgcctggaaaacagatctataaggtgcattatcctaggagggagcactacagtaaatcaacaatttcagggttgctgaatgtttcat

SEQ ID NO: 159096 - DNA, 201 bp, Homo sapiens
aggcagaggttgcagtgagctgagatcacgccactgcactccagtctgggtgacagagcaagaatctgtctcaaaaaataaataaataaataaataaaagmagcagcaggatgaagggatatacccaacagaaatgcaaacacatgtccacacaaacacatgtatgcgaatgttcatagtagcattatccacaattgccga

SEQ ID NO: 159097 - DNA, 201 bp, Homo sapiens
agaattattaggaaatgtattacctcaaatagaacaactacagggatttcaggtgagttacagaagaggcacacacacactcacacacacacacacacacacacccctacacatccttacccattatagtaagtccccgttttaattattcaaaggtagagaatattattgaattcagaataacacgtcagtcagtcaggt

SEQ ID NO: 159098 - DNA, 201 bp, Homo sapiens
ccaactacttgggaggctgaggcaggagaatcgcctgaacccgggaggcggaggttgcagtgagttgagatcgtgccattgcactccagctgggcaacaayagcaaaactccatctcaaaaaaaaaaaaaaaaaaaaagaagaagacccatgttctgggacttactgctatcacagagatgctagtcattcgtttgttgta

SEQ ID NO: 159099 - DNA, 201 bp, Homo sapiens
ccacccgccctggccgcccgcacggaagggccggactttacccagcaaatcgggaaggaactgaagcctctgaacttgggacttgggctccgtcgataagrccagtggacaaacagagggcagggaccagggctcccctttatacacacagaagcccggctccaggctgatactgctgagatctttgccctttagttcaaa

SEQ ID NO: 159100 - DNA, 201 bp, Homo sapiens
ctggattgcatattcttcctctctctctctaaaaggacagacatcccctaaaagagtctacaaaaatagcaaatgtgcaggctaggtgcagtgtctcacayctgtaatcccagtactttgggaggccaaggtgggcagatcacttgagctcaggagttcaaaaccagcctggacaaaatggcaaaaccccatctctccaaa

SEQ ID NO: 159101 - DNA, 201 bp, Homo sapiens
ttgaacctgggagtcggaggttgcagtgagctgagatctcgccactatactccagcctgggtgacaatgttagactccatctcaaaaaaaaaaaaaaaaagagcaaatgtgccacataattctctcatcagtggtacaagccagacacattatccctgaatgcctgcactgcatggaccagaagaattagcctgtgatggt

SEQ ID NO: 159102 - DNA, 201 bp, Homo sapiens
caggcagccttgtgtctacacaggaaaacaaaggtagataaatgcaggaattcacagccctataaaaaacgaattaagataaaatgcgtacccttactacwtaatgagggaggtttatgaacacaaatgcatgacaatgactcagaggaacataattatcttatcgtaagttaaaggcaatcaattttcatttctaagtaa

SEQ ID NO: 159103 - DNA, 201 bp, Homo sapiens
atgttgccttagaattgaggttcccctttcaatctcacccctgtcctagctaaggcattctatcactacccctgtcttcttttttctatttcaagtcacargaagaaaactatgcatttcttgttagaaactaaaaggaaactctctcacctgcagtagatgttacaggagcagactcacagaagaattaaatgattggaa

SEQ ID NO: 159104 - DNA, 201 bp, Homo sapiens
catctcaaaaaaaaaaaaaaaaagagcaaatgtgccacataattctctcatcagtggtacaagccagacacattatccctgaatgcctgcactgcatggaycagaagaattagcctgtgatggtctgtgaactgttttccttgatcaagtgtgagtcattaggtctgtgctaggtccttattgagaagtagctccataaga

SEQ ID NO: 159105 - DNA, 201 bp, Homo sapiens
gggagaaaaggggtgaatgaaacgcccaagatggcttaagaagcagtctcatctggccaggcacggtggctcatgcctgtgatcccaacactttgggaggyctaggtgggtggatcacctgaggtcaggagctccagaccagcctggccaacatggcgaaaccccgtctctactaaaaatacaaaaattagccaggtgtgg

SEQ ID NO: 159106 - DNA, 201 bp, Homo sapiens
tctgttaatagaaaagagggcagtggctcaagcctgtgatcccagcactttgggaggcctaggtgggttgatcacttgagctcaggagttggagaccagcytgagcaacaaagtgaaaccccatctctaaaaaaatttttaaattacccaggtgtggcggtacacatctgtagtcccagctactcaggaggctgaggtagg

SEQ ID NO: 159107 - DNA, 201 bp, Homo sapiens
tacctacttcacctcttaatccttagcacctggtggatgcaagctccctaggaactcccgttgaataaagggatgattaaatgaaggcaccgattctcagyttctctcatctgtaaaatgcaggtgataactatctggatgactcctgattttcctccagatcagatgagacataggagatgaaaggaccttggaactaac

SEQ ID NO: 159108 - DNA, 201 bp, Homo sapiens
agacacaagacatggtttttcacattaaatcatttaattctcacaatagccaccagctaggtattatcagcactctgttaatagaaaagagggcagtggcycaagcctgtgatcccagcactttgggaggcctaggtgggttgatcacttgagctcaggagttggagaccagcctgagcaacaaagtgaaaccccatctct

SEQ ID NO: 159109 - DNA, 201 bp, Homo sapiens
cacagaatgtaagacagacaaaaatgtcatcagagtacaagagcaaagcaagctgctttactgggtacctactagacacaagacatggtttttcacattaratcatttaattctcacaatagccaccagctaggtattatcagcactctgttaatagaaaagagggcagtggctcaagcctgtgatcccagcactttggga

SEQ ID NO: 159110 - DNA, 201 bp, Homo sapiens
tttccagctgccatgaggaaagatcctcccatttgccagatgctcaaatggtgcctggaaaacagatctataaggtgcattatcctaggagggagcactayagtaaatcaacaatttcagggttgctgaatgtttcatagctattttttgtcagggaggggggtaaaggcatggtgtactggaaaaagcatggattaaact

SEQ ID NO: 159111 - DNA, 201 bp, Homo sapiens
cagacaccttgttctgatgaagtgaatggggaggctgggcctgggggtgggagaatagccacatgatagcccctcacccctgcatgccagcaggcagcagrgaaggcagacaggagcccagagggccagcagcagtgaccacggggcctacatttttctggcaacgagggttggcaagggagaacagacagaagcctgcta

SEQ ID NO: 159112 - DNA, 201 bp, Homo sapiens
gaccaccggcaaagcacgtaggatcatccagtgtgacccctgtctgagcctgctgcctggggatctccagggcctcagcctcaggcaggcccaggtgagaygaggacaagatgcccacacgaccttgaaattccaggcccgaccactgcagccccattaacggcctgttttcccttaagtggagaagaagcagactaagtc

SEQ ID NO: 159113 - DNA, 201 bp, Homo sapiens
ctcccacctactcctccccacctgcccacagccagtgcttggccacagggaaaggtgagcatcgtctacccgctcaggctcacctgtggccatactgtagmtgttctttccaggccagtccctccaggccagtccaactgtcacctccttggcaaggcctaagtcccctggttcctctgtctgcccagcgctgtgttctta

SEQ ID NO: 159114 - DNA, 201 bp, Homo sapiens
gtgaattatgctgaaacaaatgtaggtccctctgcatccactccagatcaactaaggagaatgacaggggtagagtgggtgggagggaaggggcaatggaraggtaggaagattctttacaagaacaagtaaagtgaaagaaaaatcaccccaaaaggaagagacaaagaagtagttgaacttctttgtggcagcatcttt

SEQ ID NO: 159115 - DNA, 201 bp, Homo sapiens
agcacgtaggatcatccagtgtgacccctgtctgagcctgctgcctggggatctccagggcctcagcctcaggcaggcccaggtgagacgaggacaagatrcccacacgaccttgaaattccaggcccgaccactgcagccccattaacggcctgttttcccttaagtggagaagaagcagactaagtctaacctcagtgc

SEQ ID NO: 159116 - DNA, 201 bp, Homo sapiens
ccaggcagttgaacttcatggactacattcatgataaccttgaccttggtttctggtcaggttctgcctgtggaagacactggcaggagatgggaggtgargagaaaggctggtatgtatatcccctgctctccctctctccttcctcttgacccttcaagccagggggagtggatgaggtgccctctgttatcagtctca

SEQ ID NO: 159117 - DNA, 201 bp, Homo sapiens
ctgtgtcaggcagggtcaggctcagcagaaggcacatcacatatatcttttttattaaagacagggtctcacttgttgcccaggcaggagcacagtggcaygatcttaactcactgcagcctcgaacttctgggctcaaacaaccccccacctcagccccccaagtagctggaactataggcccataccactatgcccagc

SEQ ID NO: 159118 - DNA, 201 bp, Homo sapiens
tgaagcacaagaatcatttgaaccagggaggcggaggttgcagtgagccaagattgtgccactgcactccagcctgggtgacagagtgagactctgtgtcmcaaaaaaaaaaaaaaaaaaaatggatggatggagaaatagatggattgaaaatgagtgtgtgacagttggcagatgaatggggaattaaatggatggatg

SEQ ID NO: 159119 - DNA, 201 bp, Homo sapiens
tcgggaggctgaggtggggaatcactaaagtatagaagtttgagacagcctgagcaacattgcaagaccccagctctaaacacacacacacacacacacacagtgtttttatttttttaattagctgggtgtggtgacgtgtgcctgtagtcccagcaactcaggaagctaaggagggaggatcacttgagcctaggagtt

SEQ ID NO: 159120 - DNA, 201 bp, Homo sapiens
cttcgggaggctgaggtggggaatcactaaagtatagaagtttgagacagcctgagcaacattgcaagaccccagctctaaacacacacacacacacacacacagtgtttttatttttttaattagctgggtgtggtgacgtgtgcctgtagtcccagcaactcaggaagctaaggagggaggatcacttgagcctaggag

SEQ ID NO: 159121 - DNA, 201 bp, Homo sapiens
gtctcactatgttggtcaggctggtctcaaactccagacttcaagttatccacctgcctcgccctcccaaagtgctgggattacaggcgtgagccaccacrcttgacctagaagccacttagatctgatgcctgggctttagagtggcagcggatataagagcaatggtccatgtcttttctaaataaaaaaccaaaagac

SEQ ID NO: 159122 - DNA, 201 bp, Homo sapiens
acactccgtgctcctcaagtttgcagacaacctattgtgggaccttgtgatcatgtaagttaatgcttaatttatctatctatctatctatctatctatcbatctatctatctatccccctaggaaaccctgactaatacactgtctcaacaacaacaagaacaaagcttaagctctggtggctcctggtctctgagtttg

SEQ ID NO: 159123 - DNA, 201 bp, Homo sapiens
gaggatgacttcctgctcaaccactgcccacaaggatgccacagaggcaggtgcctcattcaattaggagattttgaaaaatacatgcaaaacatgcttttcaaaacaaagtactcaacaagcaggggcagagtatcaccacctctcccaaccaactgggcagacctagtctccctcaatctacatatttctactgccaca

SEQ ID NO: 159124 - DNA, 201 bp, Homo sapiens
actcccaggctatgtgttatgagcactctctgaatgttgaacgccttaagcaatcatcttagtcttcccaacaatccttaaggtagtgtttctcaaacttsagtgcacatcagaatcacttagaaggcttgttgaaacacagattgctggactccaccctcagagcttctgatttagtaggtatggggtggtactcaggct

SEQ ID NO: 159125 - DNA, 201 bp, Homo sapiens
gactccaccctcagagcttctgatttagtaggtatggggtggtactcaggcttccaggtgatgctgttactgctggtctgggaaccacacaccacactttragaactactgctagaaggaactattctctcattttacaaatgaaaaaactgaggctcagaaagattcagcaaattgcctacaatcatatgatgtagaaga

SEQ ID NO: 159126 - DNA, 201 bp, Homo sapiens
acaatccctaaatctcttaacttccctctaatagtgttcctcaaatggaagtggcttgagtgcttaatctcaatcccaaacaaaggaattagatgtgtctygaatctaaccaatgtcctatgactgacccaagtacaaacatgcctttaggttcttactactcaaagtgtggttcacccaccagcagaatcacctgggagc

SEQ ID NO: 159127 - DNA, 201 bp, Homo sapiens
gctttgccctgaacccccaggtcaattcaacccaaaccatgggtaaagcagagctctaacagagaacgatcagcggagatttgtgacagggctcttgaagsacagtgtggcaggctggccggccaggtgcccattcacaatgtgtgagtgccccacgctccagggcatgtcacaccatgcccagcctcacaagcactggga

SEQ ID NO: 159128 - DNA, 201 bp, Homo sapiens
gatctgtaatttttcagtccttctccaagttttcagtgtcctgggcccagcttaaagggcaaacgggatgaagaacgaggtgccaagcaacagaatatgcytgctagcaggtgatttggggtttccttctgcatagtcatggggcaggaacacccagtctttgcccatggtagcagtggccagggctcctagaagtcatcc

SEQ ID NO: 159129 - DNA, 201 bp, Homo sapiens
ttaagagagtggcccctagagtcagatagcctgggttgaagtctgggtcaacaacagaccacctgtgtatactttgggtcagttacttaacatcgccgaacttagtcttctcatggcttcttcaccttaaaatgagaataacatctatcccacttacaatggctgttgagtgcattatgagttaatgaagaaatgccttgc

SEQ ID NO: 159130 - DNA, 201 bp, Homo sapiens
tctgtgaatgcctgggtcctgggatgcagtgcctggattcctagaagggcattcttagcagagaaagcagcctgtgcaaagagctgtggtcgagagagcayggagcatttgggaacttgcaagagcttctgtggctggactagggagggtgggaaagtggtgagaattgaggccgagagaaagcagggcctggtttccatg

SEQ ID NO: 159131 - DNA, 201 bp, Homo sapiens
gtcagtgaaaatactgtacgtcaaaatgtatggaacacaactaaatcaacaccggagagggaaatctgtaactgtaaatgcttagatggccaggtgcagcrgctcacacctgtaatcccagcactctgggaggccaaaatgggcagatttcttgagcccaggagttcaaaaccagcccaggcaacatggtaagacccccgt

SEQ ID NO: 159132 - DNA, 201 bp, Homo sapiens
actggtggaactgggatcctggcattttggccctcccttctccactgcaatgccagcccccgagatggcatgtacaaatctacgttatctgttatttttcmcatgctgccagcatgtcacaaatccagtctaaataaaatgtacaacttcctcttgctaccacagctcaccctccagctaggatttctaatttgctgtcac

SEQ ID NO: 159133 - DNA, 201 bp, Homo sapiens
ctactattactttcatttgatattaaatacaaatttgcatatacaacacacataacatatgcacacacggttgccccacattagcagagacaaaatgaaawggaatctactgcctttgagaaataggacaagatgcaatggctcacacctataatcccggcacattgggaggccaaagcaggcggatcacttgagcccagg

SEQ ID NO: 159134 - DNA, 201 bp, Homo sapiens
agcagagacaaaatgaaatggaatctactgcctttgagaaataggacaagatgcaatggctcacacctataatcccggcacattgggaggccaaagcaggyggatcacttgagcccaggggttcaagactattctggacaacataatgagactccagtctaaaagaaacaaacaaacaaacaaacaaaactcaaaaataaa

SEQ ID NO: 159135 - DNA, 201 bp, Homo sapiens
aagtgggggtggcttgggatcccacccccagacggttcatccatctattggcaataacaagccctagcataacacccttcagattataaaatccagacgcwtctcacatcacttttgattcccaccactccccctactcccaggaggtaaggatctttgtgctaatgctaggaaaaaaactgaagcagaggaaaggtctac

SEQ ID NO: 159136 - DNA, 201 bp, Homo sapiens
ccttagtatggaggtttcagagaggcccccatggggagcacacttccccaaaagccaattaccaaaatggccagaaggataaatgtgccagcctcagcccrgcatatattctttgagtcttcaccagaaagctaaagtggcatttgacaaaacctctggagtgtttcaaactatgttatcaggcccaaatcctgatgacag

SEQ ID NO: 159137 - DNA, 201 bp, Homo sapiens
gcctccagcaatcctctcatcttagcctcccaaaatgctgggattacagagaagagaacatttaaatatgacttgtttttttcaccttcatcattccttasacagcttcttccatctagaagtggaagagcagtatagagaagaggatatagttgtatataatttgtcataagtatatgacgtataagttattatttatac

SEQ ID NO: 159138 - DNA, 201 bp, Homo sapiens
gtataatctaatcagctgccagtaaatctaaaggaggcagaaaaacatgaaaacgtgagactgactagcctcctagcctacatctttctcccttgctgaaygcttcctgccctcaaacatcagactccaatttcttcagttttgagactcggactacactccgtgctcctcaagtttgcagacaacctattgtgggacctt

SEQ ID NO: 159139 - DNA, 201 bp, Homo sapiens
taaaatgagaataataatagcacatacctcacagggttgttatgttgattatttgagataatgcacttaaaacaatttgcacaatgccggctcagtacaawgttagatgtactttgggtaggctggaggaggaaaaagggagtggatgtattaactggtaatttagttctgttttgctccctgccatggcttgttctcacc

SEQ ID NO: 159140 - DNA, 201 bp, Homo sapiens
aaagaaagaattttttagaatgtagcagtatgcccagaatgggagaaattccaggcagagaccagcatgtgctcagggcatgggtgaaaaaggtcttgggstgttaaagacactgaaatcagaccaggaggactgaaacagtcactccaccacttctttgtgtgtgaccttatacaaggccctgcagctccctgagttatt

SEQ ID NO: 159141 - DNA, 201 bp, Homo sapiens
ctcaagtttgcagacaacctattgtgggaccttgtgatcatgtaagttaatgcttaatttatctatctatctatctatctatctatctatctatctatctrtccccctaggaaaccctgactaatacactgtctcaacaacaacaagaacaaagcttaagctctggtggctcctggtctctgagtttgggaccctggtcta

SEQ ID NO: 159142 - DNA, 201 bp, Homo sapiens
cacacttgctctcacctccaagactttgcactagctattccttgtgcctggaaggctttttctcacacttagctctacagttgacccttgaacaacacaggagttacaagtgccaacctctcccacaaccccacatagtcaaaaatccacaaaaattctgactccctcaaaacttaattactaatagcctactgttggcca

SEQ ID NO: 159143 - DNA, 201 bp, Homo sapiens
aattcaggagttggaggttgcagtgagccgagatcaggcctctgcactctagcctgggtgacagagtgagactctgtctcaaaaaaaaaaaaaaaaaaaaacccagatggaaaggagctccaggagggttttttggaggaggcagacctgactgaaaggctgacaggtaggagtgagccagataaagagggggctgtgaag

SEQ ID NO: 159144 - DNA, 201 bp, Homo sapiens
tccagtgagtctgccatcctcctggtctacgagggccttgtctattcgtctttctctctgtcttttttttttttagttgtaataaaacatacatattatgyaagtgctttcccctttcagggcctcggtctccccatttaaaaagcaaacgggttggctaggtgaaatctgctgctgtgcctctattcaggagaagccggc

SEQ ID NO: 159145 - DNA, 201 bp, Homo sapiens
aaaaaaaaaagaagaagaagaaaagaaaattaatggcaatgcaaaatggaggctgggcgcaattgctcatgcctgtaatgccagcactttgggaggttgarctaggcagatcacttgaggtcaggagttggagaacagcttggccaacatggtgaaacctcatctctgctaaaaatacaaaagttagctgggcatggtggc

SEQ ID NO: 159146 - DNA, 201 bp, Homo sapiens
cgtccagtatgtacacacagaatgccttctccagccagggcactgtgctaagccccacaggctggaaggacagagaaggcccggtccctgagaagcagggrccaacatctgaatgaggaattaacgtgttcacacaaagcagttcacacaatgcactttattcattcattcagcaaatatttattgaacacctactatgtg

SEQ ID NO: 159147 - DNA, 201 bp, Homo sapiens
ggcagtgcgtgtctgtaatcccagctactcaggaggctgacgcaggagaatctctggaagctgggagacagaggttgcagtgagccgagatcatgccactrcactccagcctgagtgacagagcaagattctatctaaaaaaaaaaaaaaaaaaaaaatgggtctcactgtgatgtccaggcaggtcttgggctcctagac

SEQ ID NO: 159148 - DNA, 201 bp, Homo sapiens
agcctcctgagtagctagaactacaggtgtgctccaccagagggccaattttttaattttgttgtaaaaatggggtctcatggctgggtgcagtggctcaygcctgtaatccaagcactttgggaggccgaggcaggcggattacctaaggtcaggaatttgagaccagcctggccaacatggtgaaaccctgtctctact

SEQ ID NO: 159149 - DNA, 201 bp, Homo sapiens
gctcactgcaggctcagactcctgggctcaagcaatcctcctgcctcagcctcctgagtagctagaactacaggtgtgctccaccagagggccaatttttwaattttgttgtaaaaatggggtctcatggctgggtgcagtggctcacgcctgtaatccaagcactttgggaggccgaggcaggcggattacctaaggtca

SEQ ID NO: 159150 - DNA, 201 bp, Homo sapiens
aaagaaaagctatggctattacacttcccaacgtgatgttcttgctgaccaacatgatggacacatttattgaaaccagcgccacacaaacctgggttttytaatgacaacagaaacaagtctctccttccctggcacatctcagatggattaaaaatcttgaagtgggccgggcacggtggctcatgcctgtaattccag

SEQ ID NO: 159151 - DNA, 201 bp, Homo sapiens
gtagtcccagctacttgtgggggctgaggctggaggatcgcttgagcccaggaagtcgaggctgcagtgagccaagatccagccactgcactccagcctgrgtaacaaagtgagacctagtttcaaaaacaaaaaaaacctgatccaagtactcctccaagaaacctgcttggtctcctcctcccaacacactccctactt

SEQ ID NO: 159152 - DNA, 201 bp, Homo sapiens
cctggggatctccagggcctcagcctcaggcaggcccaggtgagacgaggacaagatgcccacacgaccttgaaattccaggcccgaccactgcagccccrttaacggcctgttttcccttaagtggagaagaagcagactaagtctaacctcagtgcctcatggagtctgaccaccacagggcaccaggatcctttgaag

SEQ ID NO: 159153 - DNA, 201 bp, Homo sapiens
aatgccccatcccagacatatgaaatcagaatctgcattttaacaagatccccaggtaatctacttgcacactgtgtttaagaagcactgggggccgggcrcggtggctcacacctgtaaccccagcactttgggaggccaaggcgagagaattgcttgagcccaagagtttgagaccagcctggacaacatagcgagacc

SEQ ID NO: 159154 - DNA, 201 bp, Homo sapiens
cacggtggcttatgcctctaatccctgcactttgggaggccaaggcgggcggatcacctgaggtcaggagttcaagaccagcctggccaatgtggtgaaamcccatctccagccgggtgcggtggctccacgcctgtaatcccagcactttgagaggccgaggcaggcagatcacgaggtcaagagatcaagatcagcctg

SEQ ID NO: 159155 - DNA, 201 bp, Homo sapiens
tagtcctagctacttgggaggctggggcaggaggatcgcttggccccagagtttgaggttacagtgagctatgatcaggccactgccctccagcctgggtracaaagaaagaccctgtctcaaaaaagtaaaataatttccattttgattaaatgtgaaaatgatattttagatatattgggttaaaggaatatagtatta

SEQ ID NO: 159156 - DNA, 201 bp, Homo sapiens
gaaaaagaagtaaagaaataaaaaggaatgtccttaactagaagaagaatatttgcaaaaatccaaaataaatattatacttaatggtgaataattagaaraatttccctaatagtcagcatataaaagaaaggtacaaaaattctttattcccaaattatgattgtctacagacaatattcaaataccaataaaaactgt

SEQ ID NO: 159157 - DNA, 201 bp, Homo sapiens
atggactttcttgaatctcaaagtattctgacagctgtgtcccagaccgcattgctccttggaaacttgaacttcacattaaccccatctcctctgttacyccacaatctccctttacctcccctcatagagggtgctcatggcttgcaaatccgtagcttccagagggctggggagagcactctgatgaccagaccaatg

SEQ ID NO: 159158 - DNA, 201 bp, Homo sapiens
atcctcccatttgccagatgctcaaatggtgcctggaaaacagatctataaggtgcattatcctaggagggagcactacagtaaatcaacaatttcagggytgctgaatgtttcatagctattttttgtcagggaggggggtaaaggcatggtgtactggaaaaagcatggattaaacttggattcataattcacggtaag

SEQ ID NO: 159159 - DNA, 201 bp, Homo sapiens
agaaagttggtagtctgcaacctggaagaggaaccgtggcagaacctgaccatgctggcagcctgaccttggattttcagtccccaaagtgtgagaaatcratctctgttttctaagccacccagtccatagtaatttgctaatagcagcctgaactaagacagacactcagctccagtcacactgaactaactgttcccc

SEQ ID NO: 159160 - DNA, 201 bp, Homo sapiens
agagcctggactctacacttaccaagaatcctcactccatgcaatcaaccccagctctgaacaccagggaggagttcagctcctgccttccgcccccgtgrgggccctcgtgatgaatacatacacttcataccatctcacaacctacctgggtttcctcatctgagcttgaagaaaagaaaaatgaacactttgccaaaa

SEQ ID NO: 159161 - DNA, 201 bp, Homo sapiens
actggggtcatgtttgtcccattcatagctgtgcctccagctactgagcatagcctggagcaaacaggtgctcaacaaatacatgttgactacattttaayttaataactcctctcctgacaatttactccgagaagtcaactcagaagaaattttcaaaacaccatagacatagatagtcgccataatctaaaatgttca

SEQ ID NO: 159162 - DNA, 201 bp, Homo sapiens
cacacgcctgtaattccagctacttggaaggctgagtgaggcaggagaatcacttgaacctggaagacggaggttgcagtgagctgaaatcgcatcactgmactccagcctgggtgaccgagcaagactctgtctcaaaaaaaaaaaaaaagaaattccagacttgatagtaatgcctatttgatatcaagcaaaatcagg

SEQ ID NO: 159163 - DNA, 201 bp, Homo sapiens
tgtcctgaagattagatgtatttgttctcttctacaatgctttagataagataaggacacaagagccagtgaatacacatcaggacctgcacagaagtatwgagaagtatcaccactgtcactagggtggatcataaagctgaaaaaaatgcccatttgaaaaccaataacccatgatctgagacccagatatttaatatg

SEQ ID NO: 159164 - DNA, 201 bp, Homo sapiens
gcagtgagctgaaatcgcatcactgcactccagcctgggtgaccgagcaagactctgtctcaaaaaaaaaaaaaaagaaattccagacttgatagtaatgsctatttgatatcaagcaaaatcaggtctgttttcctagtagctgaacttgttctcctcttctttcttataaagaaaagtctagatatcgtaatgctgact

SEQ ID NO: 159165 - DNA, 201 bp, Homo sapiens
acatgttagaaacctctctagtgttttaacagtgcaataacattcaagcatgtgactagcagacttgtcttctggaatggggtctagactagtttgggtgytgttgaactcaggttgcatatggcccaagctgcatgcttgtactggttcatcacggattgaaaaataaaaaattaaaataaataggccgggtgtggtggc

SEQ ID NO: 159166 - DNA, 201 bp, Homo sapiens
tccatgttttttccatgtctcaacatatcaactttgttcttagactggctcccctcatggtcccaagagggctgccacagttctagacctcacatctggaytgaaaaacatccagaggcagaaaaagcctgaatcttctagtggtaagagtagaagaaaccttttccaggtgcctcccatcagctccctgctttaattttt

SEQ ID NO: 159167 - DNA, 201 bp, Homo sapiens
gcttggattcatcttccacaactgtaaaatggagataggtccagctgcttggctgggtgactgggagaataaaaaatgagataatagatgaaaagtacccwgcagagcacctgggggcaggtaaaaaaggctcatacactgtgggtcacagtggagagtttcagaaatgcccagaacctaccaagcaacctctcaatggca

SEQ ID NO: 159168 - DNA, 201 bp, Homo sapiens
gaaatctgtccgccacgcaccccccaagcttaaaggcaaataaataaataattgcatgtgtggtgaaactgtgaagcaaacgtagagcttaaagaaagaaytttttagaatgtagcagtatgcccagaatgggagaaattccaggcagagaccagcatgtgctcagggcatgggtgaaaaaggtcttggggtgttaaagac

SEQ ID NO: 159169 - DNA, 201 bp, Homo sapiens
tttcactgttagtcattctgaaaaaaaaaaagaaaagaaaagaaaaaaagctcaaaacataccatatcgagttttcagggctcttaagcagagacagaccratcaataggttggcactactccttgcttaattgcctatttcccattgtttgcctgaggactgagcctggctccaagtgaacatgccatttggcttctctc

SEQ ID NO: 159170 - DNA, 201 bp, Homo sapiens
tctctcacctgcagtagatgttacaggagcagactcacagaagaattaaatgattggaaaatagaaaataaagattttctcttccccagcctgtaactackcctgtaccctgatccctaatgcaagaacacgggaataagcctgggcaatatcgtgagacctcgtctctacaaaaaatttttacaaattacccagatgtgg

SEQ ID NO: 159171 - DNA, 201 bp, Homo sapiens
ctagtggatgaggtgggaggatcatttaagcccagcaaatcaaggctgcagtgagccgtgaccacgctgctacatcgcactccagcctgggcaacagagcragaccctgtctcaaggaaaaaaaaaaaaacatgagaatggttgactgagcctgagcctggatctgcctggagacgtgtggtcagtggaaggggtgtcttt

SEQ ID NO: 159172 - DNA, 201 bp, Homo sapiens
gaacaggcaacaacctccgtccagggcccctatctacatgtgggacttccacccatcatgggttgctggggccttcttctctctcctgaagttttgaaaakagagataatgcagtcataaaaagaaatgaactaatggcattcgcagcaacctggatggaactggagactattattccaagtgaagtaactcaggaaatgg

SEQ ID NO: 159173 - DNA, 201 bp, Homo sapiens
ctcagtgatgagtgtaccactaaaggatgactcttgtaatcaaataccacctgtttcccaaacacctatggaaataaaaaataaaattaaaaattaaaatwaaaaaaaatagagacaaaatgtaaaaggaagaaaggagtcaaagaaatcaccaagtcaagagtgctgggtctgggccttaaaccttacccttcctctctg

SEQ ID NO: 159174 - DNA, 201 bp, Homo sapiens
ttaccccacaatctccctttacctcccctcatagagggtgctcatggcttgcaaatccgtagcttccagagggctggggagagcactctgatgaccagacmaatgctgcttcacccaggaaaagccctattgtaagttatgactagggtagggatggatttcctttggagccaaagatgaagcattagcaagagtctgctt

SEQ ID NO: 159175 - DNA, 201 bp, Homo sapiens
aagtcaagagtgctgggtctgggccttaaaccttacccttcctctctgtgaaatgggcacagcctcttcctctctgatctggtttcccagttcccttccasactggcctctggtgcttgcaggtgctaaagctaagacacgcatccctcttgctcctgacagcctagcctgggttggggggatcctgccagcaacaccacc

SEQ ID NO: 159176 - DNA, 201 bp, Homo sapiens
catggactacattcatgataaccttgaccttggtttctggtcaggttctgcctgtggaagacactggcaggagatgggaggtgaggagaaaggctggtatrtatatcccctgctctccctctctccttcctcttgacccttcaagccagggggagtggatgaggtgccctctgttatcagtctcaaagtactgctttttgg

SEQ ID NO: 159177 - DNA, 201 bp, Homo sapiens
gtgggtggatcacctgaggtcaggagctccagaccagcctggccaacatggcgaaaccccgtctctactaaaaatacaaaaattagccaggtgtggtggcrggcacctgtaaccctagctactcaggaggctgaggtgggagaatcacttgaacccgggaggtggaggttgcagcgagctgagttcgcgacactacactcc

SEQ ID NO: 159178 - DNA, 201 bp, Homo sapiens
ttccctcctcagccgatcttccacactgactttaagtatagctacctaaaatctttctacgtcaagtataatccagggaccggtagcctctgcatacccckgggaacttgttaaaaatgcagaatgccccatcccagacatatgaaatcagaatctgcattttaacaagatccccaggtaatctacttgcacactgtgttt

SEQ ID NO: 159179 - DNA, 201 bp, Homo sapiens
gggattggctccaggaatcagtgtttcaacaagcctgccaggtgcaggtgctgcttgagtttaagaagcactactctgaaggccgggcgcggtggctcacrcctgtaatcctagcactttgggaggccgaggcgggtggatcacgaagtcaggagattgagaccatcctggctaacacggtgaaaccctgtctctactaaa

SEQ ID NO: 159180 - DNA, 201 bp, Homo sapiens
cggggcttcaccgtgttagccaggctggtctcgaactcctgaccttgtgatccacctgcctcggcctcccaaagtgctgggattacaggcatgagtcaccrtgcctggccttaatcacatgctctgaaggggcagagctaggactctaggtcccaggaatacagttttggagcttgaaccttaacaatgtttcctcctccc

SEQ ID NO: 159181 - DNA, 201 bp, Homo sapiens
gtggcgcaatctcggctcactgcagcctccatacggggctcactaccccgccatttctttctacttcagtttgctaagcttttttttaaaaaaaaaaaaaatcacgtagggccgagcgcagtggctcacgcctgtaatctcagcactttggaaggcagaggtgggcagatcacctgaggttggaagttcaagatcagcctg

SEQ ID NO: 159182 - DNA, 201 bp, Homo sapiens
aagtgagccatgtttgtgccactgcagtttagcctgggtgacagagcaagacctggtcttaatcaatcaatcaagcaaaaacaaacaaacaaacaaacaaaaaaacttagattagaaaaacaagaaatgctgaaatgtaataaactaaacatccaacttaaggaattagaaaataaccacaggataggaccgggcacagtg

SEQ ID NO: 159183 - DNA, 201 bp, Homo sapiens
caagtgagccatgtttgtgccactgcagtttagcctgggtgacagagcaagacctggtcttaatcaatcaatcaagcaaaaacaaacaaacaaacaaacaaaaaaacttagattagaaaaacaagaaatgctgaaatgtaataaactaaacatccaacttaaggaattagaaaataaccacaggataggaccgggcacagt

SEQ ID NO: 159184 - DNA, 201 bp, Homo sapiens
tcaagtgagccatgtttgtgccactgcagtttagcctgggtgacagagcaagacctggtcttaatcaatcaatcaagcaaaaacaaacaaacaaacaaacaaaaaaacttagattagaaaaacaagaaatgctgaaatgtaataaactaaacatccaacttaaggaattagaaaataaccacaggataggaccgggcacag

SEQ ID NO: 159185 - DNA, 201 bp, Homo sapiens
ttcaagtgagccatgtttgtgccactgcagtttagcctgggtgacagagcaagacctggtcttaatcaatcaatcaagcaaaaacaaacaaacaaacaaacaaaaaaacttagattagaaaaacaagaaatgctgaaatgtaataaactaaacatccaacttaaggaattagaaaataaccacaggataggaccgggcaca

SEQ ID NO: 159186 - DNA, 201 bp, Homo sapiens
acacctgtaatctcagcactctggaaggccaagactggtagattgcttcagcccaagagttagagaacagcccaagagttggagaccagcctgggcaacawagtgaaaccctgtctctataaaaagtacaaaaattagccaggtgtggtggcagacacctgtggttccagctacttagggggctgaggtaggaggatcacc

SEQ ID NO: 159187 - DNA, 201 bp, Homo sapiens
taatagtacctatttcaaggagatatcgaaaggattgagagaaattaagtgcctattacaatacgtggtccatactgggttattcagtaaggttcttcagygttgccatcttttttcactattgcacgttgatttgtgaatatgatctctcagtaaccctttctcctggagaagaaagaatcatgtgtcaaactttcagtc

SEQ ID NO: 159188 - DNA, 201 bp, Homo sapiens
aaaaaaaaattaattaattaattaattaaaaaaaaaacagacttattcccccatgtcacatgttcatttccctgaagacatcacaagctcaaagcctcccmggctcaaagtgttcagtgcttgatatgctatccctgtccacctgcaaaggcactgtcctgaagattagatgtatttgttctcttctacaatgctttagat

SEQ ID NO: 159189 - DNA, 201 bp, Homo sapiens
tcaactttgttcttagactggctcccctcatggtcccaagagggctgccacagttctagacctcacatctggattgaaaaacatccagaggcagaaaaagmctgaatcttctagtggtaagagtagaagaaaccttttccaggtgcctcccatcagctccctgctttaatttttttttttttttgaaatggagttttagct

SEQ ID NO: 159190 - DNA, 201 bp, Homo sapiens
gtgaaggcacttatagcaatgggaacatctttggaggggagggagaacaaatgtgagtaggatggggtgctggacacctctcatctgacccccagatccaytctgtacatttcagcactttgctctgtgccccaggcagttgaacttcatggactacattcatgataaccttgaccttggtttctggtcaggttctgcctg

SEQ ID NO: 159191 - DNA, 201 bp, Homo sapiens
gaaaacatttttggaatattgttatagctaagaccctgggtttcaagaaccaaggctcatttaagctcatttttaaaggacggggaatgtatgtggggctrttcagtggtctcatgcagacattccaggacaggaagggccacagtggggactgagaaacattgtcacccccggcagctcctaatgttttttctgtttctg

SEQ ID NO: 159192 - DNA, 201 bp, Homo sapiens
tccactatcacctctctcttcttcttactcaactagaaaagccctgctctccatgaaaacatttttggaatattgttatagctaagaccctgggtttcaaraaccaaggctcatttaagctcatttttaaaggacggggaatgtatgtggggctgttcagtggtctcatgcagacattccaggacaggaagggccacagtg

SEQ ID NO: 159193 - DNA, 201 bp, Homo sapiens
gcctggcctatcttcaggttgatttttgttccttatgttcttgcaacacagtgtaagtccctctctaggagctctcatcatgttaattagaaactgcttgyttgcatctcttctttccccactagattatgagggctttgaagatctggaccacaccacgaccacctttgaatccacagcatggagcttggtgttgaacat

SEQ ID NO: 159194 - DNA, 201 bp, Homo sapiens
gggacaatcaaacaatttgtccaacatctcatcactagaaagtatcagagcccaaattctagctccaaccctgactctaaaacctgcagcctttgtatgcrgacatactgtgttccagtgcagaatagaatgccaagtcacaagcaaagagaaaaggacataccagaaaacattgtcagcccaagaatataaccagagaag

SEQ ID NO: 159195 - DNA, 201 bp, Homo sapiens
acattatgatcccataaacacggttcacatatgcaagttacatataaagcacaccctcagtcccaaagccctaccccataagttgccttgattggatttcrtaagactactaaggcagtgtcgctcgaatctggtccatggactgatgctagtctgcgaactacgcgtttccagttcacaataataaacacagaattgaaa

SEQ ID NO: 159196 - DNA, 201 bp, Homo sapiens
caacaaacatttattgagctctgactggatttacagacctgtcttagaaactgagggatgaaagagattagatatggggaaaaggagaatgagtcagaagraggggtggaagcacagggtggtagaagaaaacactggccccgcagtctggcagtcctggttcccaggcccagtctatgaaatgtgtctctgagatcttcc

SEQ ID NO: 159197 - DNA, 201 bp, Homo sapiens
gaactcccaacctcaggtgatctgcccacttcggcctcccaaagtgctaggattacaagtgtgagccacagtgcccagcccctttttattttcttcgtacktatacactgtcacacattatctcatttgcttacattttgctgtgtttacccatttatttacgtgtttgctttctttagaatacagtagctcccccttatt

SEQ ID NO: 159198 - DNA, 201 bp, Homo sapiens
tagttcttttctgtgacagttggagagatattttaaatctcagccagtgggcaaagcataatttgtttctgatctacatttttgctttgaagaaaccatcractctattaataaaacaaatgctgttttcttttccttgagaatccacaacctgcacagcctctgcttgacaatctgagacaaaataaatgtgataaaatg

SEQ ID NO: 159199 - DNA, 201 bp, Homo sapiens; identical to SEQ ID NO: 29717

SEQ ID NO: 159200 - DNA, 201 bp, Homo sapiens
tgctggggaaagtacaacctgaatacccttttctgaccaaagggaagcaaaatctaccaggttaaagtagtgccactaacagttgagttttaactgcttgkaactgtaatcctttcagcaagacttctctttgcctcaaataaaaagtgcttttgtgaacttgaaaaaaaaaagatttatcttggactgaactaaaaccta

SEQ ID NO: 159201 - DNA, 201 bp, Homo sapiens; identical to SEQ ID NO: 29719

SEQ ID NO: 159202 - DNA, 201 bp, Homo sapiens
atataggtagtctgtggattatgttttgataatgactttttttctccagtcctactcatacaggaccctctttgcctttttaaaaactattattaagttgttatctctgaaatcagacaggctataagaaaaaaaagatcttaaaaaagacaataataggtgttatttcaaagaagtgtattttgataagaaaagcaaggg

SEQ ID NO: 159203 - DNA, 201 bp, Homo sapiens
attaggcgttctgaggattcattttaccaaacagattgagattttccagaacacgtaatgatttgctctggcatttccttctctatcttttcacatttgtsctgccatcaggaccatagtgactgcttttgtttttggaaatgtctttttaagactaaacttttctagttcttaaaaaggtacctatttcaagttgtgtat

SEQ ID NO: 159204 - DNA, 201 bp, Homo sapiens
gttgactctctgtattcccataagttgttctggtctgtatccagttgataatgcagttgttatttttatagtagtctaagtacatatttgcacaacaggckgtgtcaactcatctaagttacttgctgttatttgcctgatacttttaaattacagagctccattactgaagtcattatttgtggttaagagggagtggta

SEQ ID NO: 159205 - DNA, 201 bp, Homo sapiens; identical to SEQ ID NO: 29720

SEQ ID NO: 159206 - DNA, 201 bp, Homo sapiens
gaaagcagaattcaaattcatatctgtctgactccaacaaaatgcttcttaaatgagtttcatgaaagtggtaacattggttgtcttgtctgtaaccacarccttagtgtctagagtggtgtctgatacaaagtgaggtactcagtaaatatctgttcagtgaagaaatggatgagtcatctcttaacagagtgaaataga

SEQ ID NO: 159207 - DNA, 201 bp, Homo sapiens
ccaggtccgagcaattctcctgcctcagcctcccgaatagctgggattacaggtgtgagccaccacacctggctattttttttttttttttttttttttttgtatttttagtagagacagggtttcaccatgttggccaggctggtcttgaactcctgaccttgtgatctgcccacctcggcctcccagagtgctgggatt

SEQ ID NO: 159208 - DNA, 201 bp, Homo sapiens
cccaggtccgagcaattctcctgcctcagcctcccgaatagctgggattacaggtgtgagccaccacacctggctattttttttttttttttttttttttttgtatttttagtagagacagggtttcaccatgttggccaggctggtcttgaactcctgaccttgtgatctgcccacctcggcctcccagagtgctgggat

SEQ ID NO: 159209 - DNA, 201 bp, Homo sapiens
tgcagtggctccaccttggctcactgcaacctccgcctcctgggttcaagtgattctcgtgcctcagcctcctgagtatctgggattttaggcatgtgccmccgtgcccggcaaatttttttttttttttttttttttttttttagcagagacggggttttgccatgttggccaggctggtctcgaactcatggcctcaag

SEQ ID NO: 159210 - DNA, 201 bp, Homo sapiens
ggatattaggtggatcagtagatgttggagcttcatgctggtttttggagaagagtaatttggatttgtgcaaagtaatttgcttgtttttctggcaaacrgctaattactatttacaagatctataaacttcggaagcaaaaatatcttgccttggcaggaaaaatatacccagagtcgatttttcttcaacaaaaatgg

SEQ ID NO: 159211 - DNA, 201 bp, Homo sapiens
ttcgtccagaagaggttgaaattttggtctgtggaagtcctgacctggatatgcatgctctgcagagaagtactcagtatgatggctatgcaaaaacggayttaactataaagtgagctctttatacttctgatagtgggggatgtggagagggaacagcagacagtgtggttcatttatttgcataacttacaatctttg

SEQ ID NO: 159212 - DNA, 201 bp, Homo sapiens
atgcaggagaaaaatggttcctgtactatccactgctgaacttatatacttttataaaaatattattttataatgttagtcaaaagtctaatacgtatatrgaagctcaccattccttaattttacagaaattcaggatattatgtatgcttaaggaaagtcctttccttagagcttcctttatattactttattatagga

SEQ ID NO: 159213 - DNA, 201 bp, Homo sapiens
catgctggtttttggagaagagtaatttggatttgtgcaaagtaatttgcttgtttttctggcaaacggctaattactatttacaagatctataaacttcrgaagcaaaaatatcttgccttggcaggaaaaatatacccagagtcgatttttcttcaacaaaaatggtttgatttactatgagaaatcatgacttttgtg

SEQ ID NO: 159214 - DNA, 201 bp, Homo sapiens
ctttatacttctgatagtgggggatgtggagagggaacagcagacagtgtggttcatttatttgcataacttacaatctttgaatcaattaagttagtcaraatattagagagtcccacagtcttattttatctctggaaagtctatgagaattttaatatgaaatcactccctttgggagaaaattctataagcaagttt

SEQ ID NO: 159215 - DNA, 201 bp, Homo sapiens; identical to SEQ ID NO: 29722

SEQ ID NO: 159216 - DNA, 201 bp, Homo sapiens
agtgaagaaatggatgagtcatctcttaacagagtgaaatagatttgaatgtgtgtgtcctggtattttttaaagttgcatagcagtcattttgtgtgtgwttcaagacttagtatttttttttaatttttttccctagcttacctgtggcccatacctgcttcaatcaactttgccttcccccctacaagagcaaaaagg

SEQ ID NO: 159217 - DNA, 201 bp, Homo sapiens
atgtcagttacaagcacaaaagaatataactgcttttataaatcttttgaatcatgtacaagacttatatctacattttttgatcaccagttgtaccaaaacactaatttttgaaaaagataggttaaagtatttgacaaaagtgaatacaataataacacttgtgtcaaaatgatatagcttagtataaaaataaaattc

SEQ ID NO: 159218 - DNA, 201 bp, Homo sapiens
gcaggggcacactgacacctcacactgcagggtactccaacagacctgcacctgagggtcctgtctgttagaaggaaaactaacaaacagaaaggacatcyacaccaaaaacccatctgtacatcaccatcatcaaagaccaaaagtagataaaaccacaaagatggggaaaaaacagagcagaaaaactggaaactctaa

SEQ ID NO: 159219 - DNA, 201 bp, Homo sapiens
tgcctcttgctctgctgctttagctccggagtgtttggcgatggggcagcaggaggtggggaggctcatgtcgaggtttaatgcattcaaaaggattaatrccatactgcaccatttgagaatgtccaagcacacagatgcagcagaagacgtgctattggggggggggaaagaaacgtgtgcagatgtatccatggctag

SEQ ID NO: 159220 - DNA, 201 bp, Homo sapiens; identical to SEQ ID NO: 29724

SEQ ID NO: 159221 - DNA, 201 bp, Homo sapiens
cctcaaggagtcctcatctttttgctggtggattgtcttgcctcaatgtcagtggcagctgattgatcagagtggtggttgctgaaagttgaggtcactgwagcaatttcttaaaataatacaagaattgagtttacccctttgattatatcttcctttcatgaaagatttctatgtagtatgtaatgccatttgatagca

SEQ ID NO: 159222 - DNA, 201 bp, Homo sapiens; identical to SEQ ID NO: 29725

SEQ ID NO: 159223 - DNA, 201 bp, Homo sapiens
tgtgagtcctaaatccaatggcagtcatccttacaagagacaaaagagaagacaggagcagagggaaagccatgtgaagacagaggcagagactggagtgmtgtggccacaagccaaggacccccaggattgcctgccagcctggtacacagaagagaaggggagaagacggattctcccctgagcctccagagggagcca

SEQ ID NO: 159224 - DNA, 201 bp, Homo sapiens; identical to SEQ ID NO: 29726

SEQ ID NO: 159225 - DNA, 201 bp, Homo sapiens; identical to SEQ ID NO: 29727

SEQ ID NO: 159226 - DNA, 201 bp, Homo sapiens
aagagatctgtggtcttggtaaataacaatgaggaaatgtgaactgatgagggaagcttccagaaagagaccagagagggggtgattgccagtcagcccgwatcttcctcctgaaatgctaccctgatttaaaatcagctttacaataaagagtatgactccacctattttcgtctggttataaaaaattgctaatgcctc

SEQ ID NO: 159227 - DNA, 201 bp, Homo sapiens
gacttcccacaacaacacacttcatggggggacatagggtgaactactacacttcaccaaccagccaggacacattccacacatcaagctctgagagggayggcagatggtcatcctccaggtccagagctatgcccactggcaggacatcaccaggcaccgcatggaggtgatcagcaacttttcccagcagcacttcct

SEQ ID NO: 159228 - DNA, 201 bp, Homo sapiens; identical to SEQ ID NO: 29730

SEQ ID NO: 159229 - DNA, 201 bp, Homo sapiens
aggatgacttggaattagagtccgtatagcagaaagagcagcagggctgtccttgggtatccgttgctcagccaagtcatcaaataaaaaggatgattgcrcaagtggaccatgtgtcaatctgtgggtttctgcatggccaagagccagaccctccctcctggctctgctggcccaacccaccaagggatgctttattta

SEQ ID NO: 159230 - DNA, 201 bp, Homo sapiens; identical to SEQ ID NO: 29731

SEQ ID NO: 159231 - DNA, 201 bp, Homo sapiens
tcctcatcatcactcatctgccaagctcctcaatcatagccaagatcccatccctccatgtactctgggtgtcagcatctgtcctcttcagtctctatacyccttccacttgcctgagctgaagtgccttgtgaagcctgcaataaactgctttgcaaattcatctggaagtgtctgtgtgtcttcgtcggccactctgct

SEQ ID NO: 159232 - DNA, 201 bp, Homo sapiens; identical to SEQ ID NO: 29733

SEQ ID NO: 159233 - DNA, 201 bp, Homo sapiens; identical to SEQ ID NO: 29734

SEQ ID NO: 159234 - DNA, 201 bp, Homo sapiens
gaatccagtctccacactaagaagcctgtattaacccgctggagacacgtggcacagctgacagccagcgctgacttccagacaagtaaggctctcttacrtcatccagacccagctgaaccaacagaggactgcagccacgtgggtgacaccagatgagactggacaaagcactgcctgagtccagcctaagttgctggc

SEQ ID NO: 159235 - DNA, 201 bp, Homo sapiens
gactgtccacgacagccagccttgccctggtgtgtgcagtgggatggggttggcaactagaacgaggctcacgctttgcagaggggcacacaggcaaggcycagagctggagctgagaggaagctggatagaacatgatgacctgcagctgtgagtttctcatgggggaagctctggctcttcctcatgattgaatccctg

SEQ ID NO: 159236 - DNA, 201 bp, Homo sapiens
tcacagcaatccaacataaaattgataaattggacttcatcacaattaaaagtttttgtgcatcaaaggacactatgaagaaagtgagtcctgcaaatcamcgcatacctctaagtgatggaaacagcattcccatcatcagacttggtacctactcagagcctaaattgacccctaagggggccgatgacttactcaagg

SEQ ID NO: 159237 - DNA, 201 bp, Homo sapiens
gagatgtcactacagcccaagtagtctgtctctacatttagtctgagtcttcatcagtgaaggttgtcattggtctggggtgctgacacactgatgaagcytacatataccaaaatgaagacacagctggggaggccatcagggggaaaatagcagaaggaaaggtgcagaggaaggatatcttctactgtggaaaactgt

SEQ ID NO: 159238 - DNA, 201 bp, Homo sapiens
gatgcttagcagaagcagatgtgatctctaggctagtaagcctgagaaacgctaaaattgaaaaatgaaatagctcatttggatgagcagagctaggcgaytggagggcgaaacaatctgatggtgaaaatgccattgatgaaaaatttgtactggtatcacttaaaagcttgcctcacattcacctcccagcaattttag

SEQ ID NO: 159239 - DNA, 201 bp, Homo sapiens
gggccaagaaattcgcactccccctttcggttcacaggcaggaagccctggaggtttgagggtttggggtgtgtgtatgtatctgtctgtctgaattttgmtttttctctcatttgaccattgttttaatgctcctttttttaaaaaaaataattcttatctaattcctatcttgattggtaaagtccatctctaggcaaa

SEQ ID NO: 159240 - DNA, 201 bp, Homo sapiens
ggcccgggctgtgcctggctccctggtgggagcagaagtgcccatggcctctcctgccctcccaacagggcccctaaacaaattcccacacccaggtgagytaccaggagcgatcaggtgggccgaggacatttgcttgcttcaccttccctgtttctttagattgaaattcagcctgccccacttctcaggaagatgcca

SEQ ID NO: 159241 - DNA, 201 bp, Homo sapiens
gggacggttaggagaaaaggagtctctgctggttttattctgcagctacctccccaggaagtggaggactgtggggcctttgagaaagcacctgccgacasggccaagaaattcgcactccccctttcggttcacaggcaggaagccctggaggtttgagggtttggggtgtgtgtatgtatctgtctgtctgaattttgc

SEQ ID NO: 159242 - DNA, 201 bp, Homo sapiens
gagtcctgcaaatcaccgcatacctctaagtgatggaaacagcattcccatcatcagacttggtacctactcagagcctaaattgacccctaagggggccratgacttactcaaggccacacagcaagtaggtggtaggtagagatgtcactacagcccaagtagtctgtctctacatttagtctgagtcttcatcagtga

SEQ ID NO: 159243 - DNA, 201 bp, Homo sapiens
tctctgctggttttattctgcagctacctccccaggaagtggaggactgtggggcctttgagaaagcacctgccgacagggccaagaaattcgcactcccyctttcggttcacaggcaggaagccctggaggtttgagggtttggggtgtgtgtatgtatctgtctgtctgaattttgctttttctctcatttgaccattg

SEQ ID NO: 159244 - DNA, 201 bp, Homo sapiens; identical to SEQ ID NO: 29738

SEQ ID NO: 159245 - DNA, 201 bp, Homo sapiens; identical to SEQ ID NO: 29739

SEQ ID NO: 159246 - DNA, 201 bp, Homo sapiens
aagactgcctgccttaaaaagcttggatctgatgtctttaactacaagacagtagagtctttgaagaaactttgaagaaagcctctcctgatggttacaaytgttattttggtaatgtaagtggatggttttcaaacactgttatctcccagatgaagaaatttggaagaattgccacatgtggagctatctctatatata

SEQ ID NO: 159247 - DNA, 201 bp, Homo sapiens; identical to SEQ ID NO: 29741

SEQ ID NO: 159248 - DNA, 201 bp, Homo sapiens
atccttgggctcctgagcttcaggatgattcatgctgagatggaccctgaagaagcactttgttggcaatcctactaatagtgactttgagttgaagacakctgagctcccacccttaaaaaatagagaggtcctgcttgaagctttgttcctcactggggacccttacatgagagtggcagccaaaagactgaaggaagg

SEQ ID NO: 159249 - DNA, 201 bp, Homo sapiens; identical to SEQ ID NO: 29743

SEQ ID NO: 159250 - DNA, 201 bp, Homo sapiens; identical to SEQ ID NO: 29744

SEQ ID NO: 159251 - DNA, 201 bp, Homo sapiens; identical to SEQ ID NO: 29745

SEQ ID NO: 159252 - DNA, 201 bp, Homo sapiens
ctgctgtggccaggagccccataataccagccatggtcaaccccaccattttcttcgacatcaccatgatagcgagcccttgggctgcgtctgttttgatytgtttgcagagtagtttccaaagacagcagaaaacttttgtgctctgagcacatgagagaaaagatatggttttaaggattcctgctttcacagaattat

SEQ ID NO: 159253 - DNA, 201 bp, Homo sapiens
gcttcttttaattctctgagtgtgattatagtagctgctttaaaattgttatcagctaaacctaacatctgagttcactttcaataaagattccataagcrtccttctatcctgaatatgaaccaccctttcttgtttctttgcacgtctggcaattttttggttcaaaacctgatattgtaggtgacatgttgtaatgac

SEQ ID NO: 159254 - DNA, 201 bp, Homo sapiens
tgaccgggtcatgggactgggctcatgagggtgaccgttactgctccatttgcaattttctgagtatcagaggagcaagatgctaggatgtgtgacccaawggagcttgtagttcgtctgtgtgtctttttgtctctctctctctctctgtctgaaaagaccaagcccaagcctccacccatttacctactatgcaggtct

SEQ ID NO: 159255 - DNA, 201 bp, Homo sapiens
agtaagcacctgcggagggaggagaaacactgagctaagacggggtcgcagctggggagcctgcggagggaggagaaacgctgagctaagacggggtcgcrgctggggagtctgtggggcggtctgcacaggtctgacttctctggtctcagtgttcttccgtcctgtcatgggggagaattctgtccatggcaccccctt

SEQ ID NO: 159256 - DNA, 201 bp, Homo sapiens
gcagcaggtgaagagggagcaggcgagtcacatagtgagagcaggagcaggcgagagagaggccagaggtgccacacgcttctaaatgaccagatctcgcrggaacccactatcacaaagacagctctgagccgtgagggatccgcctcatgatccacacaccttctgccaggccccacctctagcactggggatcacaat

SEQ ID NO: 159257 - DNA, 201 bp, Homo sapiens; identical to SEQ ID NO: 29748

SEQ ID NO: 159258 - DNA, 201 bp, Homo sapiens; identical to SEQ ID NO: 29749

SEQ ID NO: 159259 - DNA, 201 bp, Homo sapiens; identical to SEQ ID NO: 29750

SEQ ID NO: 159260 - DNA, 201 bp, Homo sapiens
ttacaactcctctagggggttctagtacaggctaaagaactcttatggagtcactcaattttaaagcagaaaataatcaaaaagggtgtcttacctaagtytgtccttttgttctctgggaaaaggagggagagttaaacagcttcccaacatgttcttggcagagtcagacctagaggctgggttttgctccccacatgc

SEQ ID NO: 159261 - DNA, 201 bp, Homo sapiens
tgggaatgaggacaaagttgtgcttgtatttaatgaatggcaccctctgacctacctaaaagcttctgagagcgcgggtgagaagctgggcccctggcgtragcaggggagggagcagagaggtactgaggggcgctttgtgcgggtgggcttacagccagagctcgggcgcacagagccaattgtgtgggctccaggaca

SEQ ID NO: 159262 - DNA, 201 bp, Homo sapiens
aggtgcacagacggtggtgccactcaaacttgggttttaattccagcgctatttactagctgagagattttatgttatttaacctctctgagccagtctcyccacctatgaaacagggattccagctagcacacagggttggcactggggctaaagggagttctccatgtaaggcaaatgagagacacttggagggcatca

SEQ ID NO: 159263 - DNA, 201 bp, Homo sapiens
ttcaccccatcacatccttccatgggggaccacaggcttcagcccattccaagggcctctgttgctcctgctgacgtatccctaggggctccagggcaatygcacactcagccctggtctttgggctgccccctcaccaggtctgggctccttctttgttaggaagcttcagacaggctcaggcaggcaggacatttccac

SEQ ID NO: 159264 - DNA, 201 bp, Homo sapiens
ctaggggaaaattggaataattaaccattgagaatgagcgtcttcaaaagagcttaattttggggaaatgaagagctacagagaagcacaaagaagtgatyacttagaataggaacagaggattattatatggagaatagagatggaagagaaagtgcttaaatacataaagccccttttcctcccccatgacgggttatg

SEQ ID NO: 159265 - DNA, 201 bp, Homo sapiens; identical to SEQ ID NO: 29754

SEQ ID NO: 159266 - DNA, 201 bp, Homo sapiens; identical to SEQ ID NO: 29755

SEQ ID NO: 159267 - DNA, 201 bp, Homo sapiens
ttttttcctcatcactgtgattacctggagatataagtattattgttattatttgtttttcttaaacagaggtggagctctccctgtgttgcccaggctgktctcagtactactgggctcaagcaatcctcctgcctcagcctcccaaagagctgggattccagacgtgagccactgtgcccagcctacttttataactca

SEQ ID NO: 159268 - DNA, 201 bp, Homo sapiens
ttcaggttattttgattcaaatttggctgggtgtggtggctcacgcctgtaatcccagcactttgggaggcagaggtgggtggatcacaaggtcaggagaytgagaccatcctggctaacaaggtgaaaccccgcctctgctaaaaatacaaaaaattagccaggcgtggtggcgggcgcctgtagtcccggctactcagg

SEQ ID NO: 159269 - DNA, 201 bp, Homo sapiens
ttctcatgtctacaggggctgcaagacaacatagctgggtaaagtaggcctggtgtaagaatccagtagcagccaggcatggtggctcatgcctctaatcycagcactttgggaggccaaggcaggcggatcacctgaggtcaggaatttgagaccaacctgaccaacacagagaaaccccgtctctactaaaagtacaaa

SEQ ID NO: 159270 - DNA, 201 bp, Homo sapiens
caggcgcgcaacaccacgctcggctaatttttgtatttttagtagaaacagggtttcaccatgttggccaggatggtctcaatctcttgacctcgtgatcygcccacctcggcctcccaaagtgctgggattacaggtgtgagccaccgcgtccagccacagaaagaattcttacaactcaatgataaaaagacaaataac

SEQ ID NO: 159271 - DNA, 201 bp, Homo sapiens
tgctaagcacctgagaggagggtctcagtgtcagtgtcacctcctccacgaagctttggagctctccctgggaataagtaagctcttctctggttattatrgttcaaaggaaggtgcacagacggtggtgccactcaaacttgggttttaattccagcgctatttactagctgagagattttatgttatttaacctctctg

SEQ ID NO: 159272 - DNA, 201 bp, Homo sapiens
aaagaagaaaatatgggccaggcacggtggctcacgcctgtaattccaacactttgggaggccaaggcgggcagatagcttgagctcatgagttcaagacyagcttgaccaacatagtgaaaccctgtctctacaaaaaaaatacaaaaattggctgggtgaggtggtacatgcctgtagtcccagctacttgggaggttg

SEQ ID NO: 159273 - DNA, 201 bp, Homo sapiens; identical to SEQ ID NO: 29760

SEQ ID NO: 159274 - DNA, 201 bp, Homo sapiens
ataatagatatttgataaatggcacttcccttttctttctccatggactgagatcatatcagggcactctgccttagacagtgactgaggcctcattctcrtgtctacaggggctgcaagacaacatagctgggtaaagtaggcctggtgtaagaatccagtagcagccaggcatggtggctcatgcctctaatcccagca

SEQ ID NO: 159275 - DNA, 201 bp, Homo sapiens
tgtgggccttaaggcctaagtctttttcttgagacagggtctcattttgtcacccgggctggactgcagtggcatgatctcagctcactgcaacctctgcytcctgggctcaagcgatcctcccacctcagcctcccgagtagctgggattacaggcatgcaccactacacctggctaatgttttgtagagacagtgtttc

SEQ ID NO: 159276 - DNA, 201 bp, Homo sapiens
aggccttcagtgtgtttggaagatcttgttttagaagaccttattttggctgggtgcagtggctcaggctcgtaatcccagcactttgggaggccgaggcrggtggatcacctgaggtcaggagttcaagaccagcctggccaacatggcgaaaccctgtctttactaaaaatacaaaaattagctgggcatggtggcagg

SEQ ID NO: 159277 - DNA, 201 bp, Homo sapiens
ctttgggttctcctgaattgccttttaggtgaaaggcatttgtgtttcttggtagctggttcctgctgagtaaggcgggacaggctctggcttcccaggtragactggagaggccaaggcaatccttcactcctggagagctggggaggagcccacaccactggggcaattgagaccccggtcccctcccctcccctcccc

SEQ ID NO: 159278 - DNA, 201 bp, Homo sapiens
cctaaatgggaaacatgggagggagaacatctcatgctgtccaagcagcaagtcacccatgacccttctccctgtgtgccatgtcaactggtcactaagcrctgtgacccaacccttttactcttccctcccccatctcactgctctggtccaagcattggtttttcaccttgataactacaacagccactatccctctac

SEQ ID NO: 159279 - DNA, 201 bp, Homo sapiens
tcactggtttccgggtgaagataccggcagagcagaccaggggcacctgccaaacatcaacagatccagatccgttaataggcactttaattaattaattwatttatttatttatttattttttggagacagagttttgctcttgttgcccaagctggagtgcaatggtgcaatctcggctcactgcaacctccgcctcct

SEQ ID NO: 159280 - DNA, 201 bp, Homo sapiens
tacaacagccactatccctctacggtactgtgcccagaaatctatccttcttgcaactgtcaagcaatcctttaaggcaagatttccttttttttttttttgacacggagtttcgctcttgttccccaggctggagtgcaatggcgcgatctcagctcactgtaacctccacctcctgggttcaagtgattctcctgcctc

SEQ ID NO: 159281 - DNA, 201 bp, Homo sapiens
tctgttgctcctgctgacgtatccctaggggctccagggcaatcgcacactcagccctggtctttgggctgccccctcaccaggtctgggctccttctttrttaggaagcttcagacaggctcaggcaggcaggacatttccactgttgccagccctgccccaggtaggtggggaggagcagatttctcccacccagtggc

SEQ ID NO: 159282 - DNA, 201 bp, Homo sapiens
tggcttgtgctggggctagtaaaatccactccaaggggcccagccctcaggggtggcgactattttgtagtgtgatgctctggaacaagatgaccacacgygcgaggcactgccacagaaaatcctccatgggcctgtccactacttttctgacagcctggatgcagctcctcccagaataggcactcacaaccctttaag

SEQ ID NO: 159283 - DNA, 201 bp, Homo sapiens; identical to SEQ ID NO: 29758

SEQ ID NO: 159284 - DNA, 201 bp, Homo sapiens; identical to SEQ ID NO: 29759

SEQ ID NO: 159285 - DNA, 201 bp, Homo sapiens
tccaagtcccacctcgcctggcccaaaagcccccaccccttttttttttcccctgaggtggagtcttgctctgttgcccaggctggagtacagtaacacartctcggctcactgcaacctccgcctcccaggttcaagtgattctcctgcctcagcctcctgaatagctgggattacaggcacatgccaccatgcctggct

SEQ ID NO: 159286 - DNA, 201 bp, Homo sapiens
catgccaccatgcctggctaattcttgtatttttagtagagaaggggtttcgtgatgttggccaggctggtctcgaactcctgacctcaggtgatccaccygcctcgccttcccaaagtgctgggattacaggcgtaagctaccatgcccagcggtgtatacacacacacacacacacacacacacacacacacgcacaca

SEQ ID NO: 159287 - DNA, 201 bp, Homo sapiens
cctggccaacatggtaaaaccccgtctctactaaaaatacaaaaattagccaggcgcagtggtgcgtgcctgtaatcccagctactcgggaggctgaggcrggagaatcgcttgaacccaggaggcggaggtcatagggaactgagatcttggaaataagttaacaatgaggaaagatagaatatgggggcagacatgggg

SEQ ID NO: 159288 - DNA, 201 bp, Homo sapiens; identical to SEQ ID NO: 29753

SEQ ID NO: 159289 - DNA, 201 bp, Homo sapiens
accctgggacagtcaaatctaaaactctggcctcaggtacagcgcagactgtaggcgaggaaccagactgaaagccgggcagaacttactgagagtctgcmctacagagaaaaagaaacagtcaaggtctcctgtcccatctatgcgttcttgggggtcagaaactgttggatttctaatagggaccgggtactttggagg

SEQ ID NO: 159290 - DNA, 201 bp, Homo sapiens
aacaaacaaacaaaaaaacaaattcaccaaggcagctagggaggtttgtttcctggagctcacttggagcttgtagaagtacgtgctgatgtcacaaacakggatgtagaaactttagagattccccttctccctcctgtattaacaagtgaactagctgggcgtggtggctcatgcctgtaatcccagcactttgggagg

SEQ ID NO: 159291 - DNA, 201 bp, Homo sapiens
cagtgagccaagatcgcgccactgcactccagcctgggcgacagagcgagactccgtctcaaaaacaaacaaacaaacaaacaaacaaacaaacaaaaaaacaaattcaccaaggcagctagggaggtttgtttcctggagctcacttggagcttgtagaagtacgtgctgatgtcacaaacatggatgtagaaactttag

SEQ ID NO: 159292 - DNA, 201 bp, Homo sapiens
agttcaagaccagcctggccaacatggcgaaaccctgtctttactaaaaatacaaaaattagctgggcatggtggcaggcgcctaaaatcccagctactcsggaggctgaggcaggagaatagcttgaacctgggagcctgaggcagcagtaagctgagatcgtgccattgcactccagcctgggcaacagagcaagcctc

SEQ ID NO: 159293 - DNA, 201 bp, Homo sapiens; identical to SEQ ID NO: 29765

SEQ ID NO: 159294 - DNA, 201 bp, Homo sapiens; identical to SEQ ID NO: 29774

SEQ ID NO: 159295 - DNA, 201 bp, Homo sapiens; identical to SEQ ID NO: 29773

SEQ ID NO: 159296 - DNA, 201 bp, Homo sapiens; identical to SEQ ID NO: 29777

SEQ ID NO: 159297 - DNA, 201 bp, Homo sapiens; identical to SEQ ID NO: 29776

SEQ ID NO: 159298 - DNA, 201 bp, Homo sapiens; identical to SEQ ID NO: 29780

SEQ ID NO: 159299 - DNA, 201 bp, Homo sapiens
ctcatttctgcagccttaacaacaacgcctagcactgagagttgtatatctcatcaagaatcccctttcaacaatcccatgtagcacttgctccaattatygtaatcgataatgtcacaaagtgaataattccaaaagtcaagatggctttttgacatatcaatgtccaaaacatatcaatagctcaacagtaaatattta

SEQ ID NO: 159300 - DNA, 201 bp, Homo sapiens; identical to SEQ ID NO: 29784

SEQ ID NO: 159301 - DNA, 201 bp, Homo sapiens
ccatacctcggtgcttccgtaaatagcaccagctgaactctcagctgacagccaatataaacagtcaggcaagtgtgagagccatcttggatgccctaacstgttgaattttcaccatagctaacatctgactttaaattgtgtaagagactttgagaacttccagtcaatctcactaaatccttgtcccacaaaatgatg

SEQ ID NO: 159302 - DNA, 201 bp, Homo sapiens; identical to SEQ ID NO: 29785

SEQ ID NO: 159303 - DNA, 201 bp, Homo sapiens; identical to SEQ ID NO: 29786

SEQ ID NO: 159304 - DNA, 201 bp, Homo sapiens; identical to SEQ ID NO: 29787

SEQ ID NO: 159305 - DNA, 201 bp, Homo sapiens; identical to SEQ ID NO: 29788

SEQ ID NO: 159306 - DNA, 201 bp, Homo sapiens; identical to SEQ ID NO: 29789

SEQ ID NO: 159307 - DNA, 201 bp, Homo sapiens; identical to SEQ ID NO: 29790

SEQ ID NO: 159308 - DNA, 201 bp, Homo sapiens; identical to SEQ ID NO: 29792

SEQ ID NO: 159309 - DNA, 201 bp, Homo sapiens; identical to SEQ ID NO: 29766

SEQ ID NO: 159310 - DNA, 201 bp, Homo sapiens; identical to SEQ ID NO: 29767

SEQ ID NO: 159311 - DNA, 201 bp, Homo sapiens; identical to SEQ ID NO: 29768

SEQ ID NO: 159312 - DNA, 201 bp, Homo sapiens; identical to SEQ ID NO: 29769

SEQ ID NO: 159313 - DNA, 201 bp, Homo sapiens; identical to SEQ ID NO: 29770

SEQ ID NO: 159314 - DNA, 201 bp, Homo sapiens; identical to SEQ ID NO: 29771

SEQ ID NO: 159315 - DNA, 201 bp, Homo sapiens; identical to SEQ ID NO: 29772

SEQ ID NO: 159316 - DNA, 201 bp, Homo sapiens; identical to SEQ ID NO: 29775
  misc_feature (1)...(201): n = A,T,C or G

SEQ ID NO: 159317 - DNA, 201 bp, Homo sapiens; identical to SEQ ID NO: 29778

SEQ ID NO: 159318 - DNA, 201 bp, Homo sapiens; identical to SEQ ID NO: 29779
  misc_feature (1)...(201): n = A,T,C or G

SEQ ID NO: 159319 - DNA, 201 bp, Homo sapiens; identical to SEQ ID NO: 29781
  misc_feature (1)...(201): n = A,T,C or G

SEQ ID NO: 159320 - DNA, 201 bp, Homo sapiens
tcataagatgcatattcattgttacatattgctaaatctcaaaagtcttaaacaagttatttacaaagggaatcacataaaatatacaaatacatgtaccycttagaagtttgttcagctataaaatgagcagcagatttcaatttcctccactgtcatcccatgaaaaatgagttttattgtaagtgttgtaaaccttag

SEQ ID NO: 159321 - DNA, 201 bp, Homo sapiens; identical to SEQ ID NO: 29782

SEQ ID NO: 159322 - DNA, 201 bp, Homo sapiens; identical to SEQ ID NO: 29783

SEQ ID NO: 159323 - DNA, 201 bp, Homo sapiens; identical to SEQ ID NO: 29791

SEQ ID NO: 159324 - DNA, 201 bp, Homo sapiens
cagaaattttactgcatttttctctccttcattcgtgaaatagggatagaagcaatccttctcctcatatgcattgtaaagctcacagtgtagaagtcaawggttagctttgttactatcgtgttcttcaaaagcatcatcatgatcatcatcaacaatcttatgtttcacaagtactggaaatcttaatatcactttgct

SEQ ID NO: 159325 - DNA, 201 bp, Homo sapiens; identical to SEQ ID NO: 29793

SEQ ID NO: 159326 - DNA, 201 bp, Homo sapiens; identical to SEQ ID NO: 29794

SEQ ID NO: 159327 - DNA, 201 bp, Homo sapiens
gcttcattaaaatcctcaatgtaattttagaaaatcgagagcatatttgtttcattatttaattcaactggatatgtagtgcatgtctcttctttaaaagwtgtataccctctttaaaattttttaggaaaaatgtaatgagagaagcattttaattgagaaggaatcatgccagtctatttgctgtcaagtaatagggtt

SEQ ID NO: 159328 - DNA, 201 bp, Homo sapiens
gtcaccttgattcgtgtcctttttccctgaccttactttcccttccgtctattcctctcgccccaggccgttactgggtagatgtaaggagtggagaggcwggggaagtgaccagagactcgtgggttagacccgtcttgggttcttagtcaccacctctaaccctgtcggtcattgatgaggttagtagctccgatctga

SEQ ID NO: 159329 - DNA, 201 bp, Homo sapiens
tgttgagcatggcagaaatgtatcctctgatgacatgcttcccagcttcaccactgatattagatggtttgggctgctgtaacagtataccacagaccagmtggcttcaacaatagaaatttagtttctcacagttctggagccgtaggagtcccagatcaaggtgccggctcatttggttcctaatgagggctcccttcc

SEQ ID NO: 159330 - DNA, 201 bp, Homo sapiens
ttttggttggttttcctaagacatactttaaaaagatgttctataaatttcctagttaaattatggggattttggagtatgtacatgataaattataataygtatatggttgaagttattttattttttactaatgaattattttaatattccttattgaataaatgctgtaacttgtttgctatggaacttattcttaaa

SEQ ID NO: 159331 - DNA, 201 bp, Homo sapiens
aaatagcaatgtgtatgcacattctctttagttaaggcaccaattgttttggttggttttcctaagacatactttaaaaagatgttctataaatttcctarttaaattatggggattttggagtatgtacatgataaattataatacgtatatggttgaagttattttattttttactaatgaattattttaatattcctt

SEQ ID NO: 159332 - DNA, 201 bp, Homo sapiens
ctaattttctaacattacaaaagagcaaggataaaagaaccccaaactgatgttttggaaagcattctactttgaaagtaacttctggttcagaggatgamttttaaaatgtggtaatgtttctggtgtgcctgggaagatgcaataaagtttgttaggtacgcaggcaaatttcagtcatttgtatgtcaggataatcac

SEQ ID NO: 159333 - DNA, 201 bp, Homo sapiens
agttttctttgatagcctggtctcacattgacttcatctaagcttattacattcgtctcataaatcgtttgctttttccccagccttagctccagggaccmgcctactgaacatcgaaaaggtcaggaacgagatcacgggactgagacggcgagccggctagagcggatagagccgtactgccgctctagtttttctttt

SEQ ID NO: 159334 - DNA, 201 bp, Homo sapiens
tcttttgttttttgagacggagtctcactctgtcaccaggccagagtgcagtggcgtgatcttggctcactgcaacctccgcctcccaggttcaagcgatyctcctgcctcagcctcccgagtagctgggactacaggctaatttttgtatttttagtagagatggggtttcaccatgttggccaggatggtctcgatctc

SEQ ID NO: 159335 - DNA, 201 bp, Homo sapiens
acaatttggggacactgtggaagaacttcttgcttggggagttctgcagcagtcgaaggtacaagaatataaaaactggtatctcgacacagctcttacascatattctcaacacaaggaacagtaatgtgccgcagcaattccttcggtggaaaaaactgactgtatccgcgtaagaggagtaattcttttttgaatttt

SEQ ID NO: 159336 - DNA, 201 bp, Homo sapiens
attttatgttgacaaatatattattgtgccacactttctatattaaaactagattaaatatattttacatatatttatttaaaatttttccagcacctatyaaaatacttttttgtgttccaattaaggtagtcttaatgcaaacttacaacttttgaactggaatattaaatttatacacttagatcttagaatttatgg

SEQ ID NO: 159337 - DNA, 201 bp, Homo sapiens
cttttttgttttttatttttaggaacagcatatgccatatatgagctggctgtggcttcatttcccaagaagcaggagtgacttcagtcatcccagcaatygcttggttcagtttcattcagctctctatggaccagtaatctgataaataaccgagctcttctttggggatcaatatttattgacttgtagtaactgcca

SEQ ID NO: 159338 - DNA, 201 bp, Homo sapiens
ccagttatcagctattttttatattacatttgattactttaaaattatatcactctttttttttacattcactttagggaaggcttgcatattttgaactmtttttttctttggcatttaatcatccttagcatttctcaggcagtcttgggttaatatggaaataacctttgtatacgttcttaatcttatttttaaaaa

SEQ ID NO: 159339 - DNA, 201 bp, Homo sapiens
ggacatgtaccatagtgctaatagtggttgtctcttggggaaagacctggtggagcagagcaatttacctttataagtagtttgattatgagtgatttttkttttattatggtttctagcttttcctaaataaagcttaaagtgattaaaaatagttgtatcatatatacctaaaatacaatactttattgaacagatgta

SEQ ID NO: 159340 - DNA, 201 bp, Homo sapiens
cccaaggtggttgggatacagcttggttttatatatttttgggaggcatgagacatcaatcaaatacatttaagaaatacattggtttggttcagaaaggygggacaactcaaagcgggggacttccaggctataggtaaatttaaacattttctggttgacaactgattgagtttatctgaagatctgggatcaatagaa

SEQ ID NO: 159341 - DNA, 201 bp, Homo sapiens
gacactagttttctttgatagcctggtctcacattgacttcatctaagcttattacattcgtctcataaatcgtttgctttttccccagccttagctccakggaccagcctactgaacatcgaaaaggtcaggaacgagatcacgggactgagacggcgagccggctagagcggatagagccgtactgccgctctagtttt

SEQ ID NO: 159342 - DNA, 201 bp, Homo sapiens
tttattgagttattttaacagccacccaatgatgatgaatactgttatctccattttaaagacaagagaaactgaggtataaatagattatgtatcttacsttcagtcatgtcactaccactaaatggcagattcaggatctgtctgacttccaagttcttaacaacaatatattttttttctcttttcactccatctagg

SEQ ID NO: 159343 - DNA, 201 bp, Homo sapiens
acagaataaagaaaattgtaggtcttttaaattttaatacttaaaatactttaattctagggatttaaggagctatatcattttatatgcctgttcttttraaacttagttggaaatgagtgagacatttattattgtcttttttttttttttttaaatctaggaggatgatgaaattccactgtatctaaagggtggggt

SEQ ID NO: 159344 - DNA, 201 bp, Homo sapiens
ggtcctgttgtgcatccatgtggagagtagcatcttgtgaaccacttcaggactttccttctatatatatcgagattggtaattcgtcaagagatactgaktgcctactgtgtcctaactggttttaggtacctaggaatcactggtgaacaaaagcagattcttcccctcatatgttatagaaaggggtggtaggaaaga

SEQ ID NO: 159345 - DNA, 201 bp, Homo sapiens; identical to SEQ ID NO: 29795

SEQ ID NO: 159346 - DNA, 201 bp, Homo sapiens; identical to SEQ ID NO: 29796

SEQ ID NO: 159347 - DNA, 201 bp, Homo sapiens
gataggcattttccttcccacttcatctttagcatgtggcttctgtgaatgactcctgatttttttccccttatctgttccttagtctcctttgtatattmcttaatgttgggagttctttgagattatgttctgtgcctttaagttacacattctgcctgaacaatcttaagtaccttattattccgttgtcttaacact

SEQ ID NO: 159348 - DNA, 201 bp, Homo sapiens
atgtcttaataaaaaaataacaccagtaagatttgatgattatgttgtgatagagttggctttctgagtcccattgatggcagtgaaggctatatttcagwcaaaaacatccattatatcccacctcttacagcaagggctttaaaacattttgactgtgatgcaaaataaaagcacactttacatctaaactttgtacag

SEQ ID NO: 159349 - DNA, 201 bp, Homo sapiens
cctcatgatccgcccgcctcggcttcccaaagtactgggattacaggcgtgagccactgcgcctggcctcatggctctttttggacagggtcataagcttyttagatctgtcacccaatgtaattaattgatgtattggttaatactgtctttagcagtgctaggggattggtaagaaatccacatcatctctgcgcttgg

SEQ ID NO: 159350 - DNA, 201 bp, Homo sapiens
attctttggaaagaccgtcattaatggatctcaaattaacggtgaaagaagaatgctgacttttaggaattcttattttaaaagtagtagtagtagagacrgaataaagaaaattgtaggtcttttaaattttaatacttaaaatactttaattctagggatttaaggagctatatcattttatatgcctgttcttttgaa

SEQ ID NO: 159351 - DNA, 201 bp, Homo sapiens
aatctatgtctactttaggatctatttaatgtgaattcatggcttttttttttttttttgatatgaagtctcactctgtcgcccaggctggagtgcagtgragcgatcttggctcactgcaagctccaccttctgggttcacgccattctcctgcctcaacctcctgagtagctgggactacaggcgcccgccaccacgcc

SEQ ID NO: 159352 - DNA, 201 bp, Homo sapiens
cacgcccgccttattttttgtatttttagtagagacagggtttcacggctttagccaagatggtctggatctcctgacctcatgatccgcccgcctcggcytcccaaagtactgggattacaggcgtgagccactgcgcctggcctcatggctctttttggacagggtcataagcttcttagatctgtcacccaatgtaat

SEQ ID NO: 159353 - DNA, 201 bp, Homo sapiens
aggacatgtaccatagtgctaatagtggttgtctcttggggaaagacctggtggagcagagcaatttacctttataagtagtttgattatgagtgattttkgttttattatggtttctagcttttcctaaataaagcttaaagtgattaaaaatagttgtatcatatatacctaaaatacaatactttattgaacagatgt

SEQ ID NO: 159354 - DNA, 201 bp, Homo sapiens
gccactgtgcacggccttttttatttttttattttttatttttattttttgagcggagtttcattcttgtcgcccaggctggagtgcagtggtgcaatctyggctcactgcaaaccccgcctcctggattcaagcgattctcccgcctcagcctcctgagtagctagaatttcaggtgcgcaccaccatgcccagctaatt

SEQ ID NO: 159355 - DNA, 201 bp, Homo sapiens
tgagatggagtttcactctttttgcccagtctgtagtgcaatggggcgatcttggctcaccacaacctctgcctcccgggttcaagcgattctcctgcctyagcctcccgattagctgggattacaggcatgcaccaccatgcctggttaattttgtatttttagtagagacagggtttctccatgttgttcaggctggtc

SEQ ID NO: 159356 - DNA, 201 bp, Homo sapiens
cttagcctcccgattagctgggattacaggcatgcaccaccatgcctggttaattttgtatttttagtagagacagggtttctccatgttgttcaggctgktctcgaactccggacttcaagtgatctgcctgcctagtaatagaattttttctttgaaacggagtttcacacttgttgcccaggctggagtgcaatggcg

SEQ ID NO: 159357 - DNA, 201 bp, Homo sapiens
gaattcttattttaaaagtagtagtagtagagacagaataaagaaaattgtaggtcttttaaattttaatacttaaaatactttaattctagggatttaargagctatatcattttatatgcctgttcttttgaaacttagttggaaatgagtgagacatttattattgtcttttttttttttttttaaatctaggaggat

SEQ ID NO: 159358 - DNA, 201 bp, Homo sapiens
aacccccacgccctagctattggcacgtggtaattttgcccagagttttggttatatgcataatccagaggggtgtagaaaaccaggtcctttcagtaccratctaaggaagacatgaattggggtgtttataaaccttggtgaggaagagaattttaactgggactggtaacttggtgggcccattgacatacagtagat

SEQ ID NO: 159359 - DNA, 201 bp, Homo sapiens
tggcagttcgacgtctggtctaacgatgtcacgctagccaaccacatggaggctggcggcaaggcagggtgagtgacagctgtgggtggcttggggccccracctgggttcccactcaagcccacccagggtgaccatcctgcagaggcgaggcggggcagggtggggtgggcaggatgggcagcaagcacctgtgggggc

SEQ ID NO: 159360 - DNA, 201 bp, Homo sapiens
gcttggggccctagggtttgaattgtggtgaacccactaattgcagtttggtttttcacgggggctgacattatgactttgagttttctgccctctccacsctgatccctgcccccctgtagacgcatccacatcaccaaggctacactcaactacctgaatggggactacgaggtggagccaggctgtgggggcgagcgc

SEQ ID NO: 159361 - DNA, 201 bp, Homo sapiens
gtagacgcatccacatcaccaaggctacactcaactacctgaatggggactacgaggtggagccaggctgtgggggcgagcgcaacgcctacctcaaggascacagtatcgagaccttcctcatcctgcgctgcacccagaagcgggtctgtgggctgggggccggggggctgaggggctcccttcctccagggaggaaca

SEQ ID NO: 159362 - DNA, 201 bp, Homo sapiens
agctcctcatggtttccttgacacgtttgtaagcgttggccagttccttggccatagtatcaatgaactgggtcctccaggctctttacccacatctctcrgtgcctgggtcacaaggcctcccgcagcttcctgccctagaccctgagttccctggctcttggttcttttagctggacaagcggtccaaaaaggatgaaa

SEQ ID NO: 159363 - DNA, 201 bp, Homo sapiens
gagagagaagactctttgacccccgcaccttcaccttccctgcacctgcagcctcacccccattctgtgtgcctggcctccagccttctcccagctttacycctgctccatccccaggttggtccgggaggtgacaggggtgaacgtgaacatgcgtgtgggaattcacagcgggcgagtacactgcggtgtccttggtct

SEQ ID NO: 159364 - DNA, 201 bp, Homo sapiens
gtgtccttggtctcaggaagtggcagttcgacgtctggtctaacgatgtcacgctagccaaccacatggaggctggcggcaaggcagggtgagtgacagcygtgggtggcttggggccccgacctgggttcccactcaagcccacccagggtgaccatcctgcagaggcgaggcggggcagggtggggtgggcaggatggg

SEQ ID NO: 159365 - DNA, 201 bp, Homo sapiens
acagacagatagatgagatcctggggagtgtgttggcccatagatagctgactgagactctgtgtatttgtacaatgcctgtcagctcttgaatctcatarcttcactgacccaaacctctttggaagtggcctcttgggccccgggccgtgtcctagtgccctctctgttgtagcatattttggagaagttgagcagagg

SEQ ID NO: 159366 - DNA, 201 bp, Homo sapiens
gggcatattaggggccatcaagctacattcctgatgagattggccagactgataagagaatgagtctgaatccccagctggcctgcaggcggctgtgtgcyattccctagcggcatccagaaagaggactcttaaacgtttggataaattggaagtaacactccatggccgggagtggtgaacgacacgttcattccttag

SEQ ID NO: 159367 - DNA, 201 bp, Homo sapiens
aaaaggcaagttattccaggcacggggtgaatctgtttgcttctcgtttctttccctcccacttctctttcctactatttttaatttgtaaaattaatttkctttccaggagaatcactgtttacgtattaagatccttggggattgttattactgcgtctcggggctgcctgaagcaagggctgaccacgcccactgctg

SEQ ID NO: 159368 - DNA, 201 bp, Homo sapiens
acaggaggaaaagtgaattgagccaagacccccatttaacattctgacagtagagacacctcttggccctgggttaccagacagcagagtggagaaacctrgccttccccagggctccaaacttgaatgtccacagacctggtcagtgccactaagggctccagccaccaccctccctcccctgagcaaagagcagttggc

SEQ ID NO: 159369 - DNA, 201 bp, Homo sapiens
taagcctgtcccaggaccatgccgagttccggcgtgggcctgcgctcactgccctaaaaggcaagttattccaggcacggggtgaatctgtttgcttctcrtttctttccctcccacttctctttcctactatttttaatttgtaaaattaatttgctttccaggagaatcactgtttacgtattaagatccttggggatt

SEQ ID NO: 159370 - DNA, 201 bp, Homo sapiens
tgcctcttcagtctcacctcttccttaaaggtgtttgctaccccataaatatattactgctactgaaacaattttatttcactttgttttcatagaagagrtgatggactagtgctgatttgaaacatctcatccagtcattaaaggcttatatttgcaagctatcttgccatgaggagtacagcaattataaaaacaaag

SEQ ID NO: 159371 - DNA, 201 bp, Homo sapiens
actgtaaagttgttagaaaaggcaaaaaaggtaaaaaggggatttaatgtttggtatcacaaatgactatgttagcaagctcagttggtttacaatctaartatgttttaactaattgctattattttagtagtaactcctgatcccttgttggaaattttgtcttagaaaatatgagatatttcagccaggcgcggtggc

SEQ ID NO: 159372 - DNA, 201 bp, Homo sapiens
ctacatcttttggctgggtgtggtgactcatgcctgtaatcccagcactttgggaggctgaggtgggcggatcacctgaggtcaggagttccagaccagcytggccaacatggtgaaacactgtctctactaaaaatagaaaaattggccaggggtggtagtgtgcgcctgtaatcccagctactcgggaggctgaggaac

SEQ ID NO: 159373 - DNA, 201 bp, Homo sapiens
agtggttataaaattaatgagtcatgaccattctttttttttgtaatcacatggaatagaatatatcacagggcattgcatgtagtccaggtgattatggyttcatgaaacttttgttttgaaatacaatataaacacatatacatacagacatttgtggcttggcttgcaatgccaaatgtatttttagtgtgactcatt

SEQ ID NO: 159374 - DNA, 201 bp, Homo sapiens
gggtctcaccatgttcagcccaggctggtcttgaactcctgagctcaagcgatctgtccgccttggcctcctaaagtgctgtggattataggtgtgtgccrccacaccagccttattttatcttttaattcaatatttccatgaactttgaagtcactttctatattatatactagtggctttcaaactgcaagtcaaaaa

SEQ ID NO: 159375 - DNA, 201 bp, Homo sapiens
aataaaaaggctgggcatggtgcctcccgcctataatcccagcactttgggaggccaaggtgggaggattgtttgagcccaggagttttgagaccagcccrggcaacatagagagacccgtctctattaaaaataaagaaaggaaattagcctggtgtgctggtacacacctgtggtcccagctgcacaggaaggtgaggt

SEQ ID NO: 159376 - DNA, 201 bp, Homo sapiens; identical to SEQ ID NO: 29806

SEQ ID NO: 159377 - DNA, 201 bp, Homo sapiens
ttccccaggctggagtgcagagatgcagtcctggctcacagcaacctctgcctcctgggttcaagagattctcctgcctcagcctccccagtagctgagaytataggcacctgcccccacaccagctaatttttgtatttttagtagagatgcggtttcaccatgttggccacactggtcttaaactcctgacctcaggtg

SEQ ID NO: 159378 - DNA, 201 bp, Homo sapiens
tgcgatctctgcctcccatactcaagcaatcttctcgagtcccgagtagctgggactagaggtgtgcgtcaccacgcctgactaattttttggtatttttygtagacacagagttttgctatgttgcccaggttggtcttgaactcctgggctcaatgatccatctgccttggcctcccaaagtgttgggattacaggtgt

SEQ ID NO: 159379 - DNA, 201 bp, Homo sapiens; identical to SEQ ID NO: 29807

SEQ ID NO: 159380 - DNA, 201 bp, Homo sapiens
gaggatgaacttataaagagtttgtcagtcctggcgtgacgtttcgtggccctggttggcgcagaaatcttccccatacccatgcagctttcttctctggkactgcctaatatctaatctcagtaggaaaattaatgctgtttcgtattttcttacaggactcatgttcaacacggggattgggcagcacattttgaaaaa

SEQ ID NO: 159381 - DNA, 201 bp, Homo sapiens
gggtctgagtttctcctggttcccaattctgtgtctttttgtggattatctactttatagctggacctttgtatttgttcaagataattattcttctattyctaatcacctttttgatcacttagtttttatgtactccatctatttatgtctaaactacacattagaaagtttgttccccagaaaaacatatagtactac

SEQ ID NO: 159382 - DNA, 201 bp, Homo sapiens
gctatcttgccatgaggagtacagcaattataaaaacaaagccagctctctcattctgtggcaataaaaaaaaggctgaatgtgttctcctaccttataatcagctgccaatgctttgctatttctctcccaagaaaattcattgcagttaaaattcatttatagttgacaatgaccattttccttattcctttctgcttt

SEQ ID NO: 159383 - DNA, 201 bp, Homo sapiens
gtgtcatgtaattaacctgggaaaatgcagctcatcaatttggggttcaagggtaaaagagaggtgagacacagttttacagggcttggagatttttttttaggggattttttgtggagagtctagaacttctctaagaatttaagaggtattaggattttgcactttaaatatatttagtgtttgcttcataagtttaaa

SEQ ID NO: 159384 - DNA, 201 bp, Homo sapiens
tgacccaaggctagtagctgaacttcacaaaagagttcagggcacgtgagtatacataatagaattaaagtgcatttcaatctcatgaaacaacattcttyttacatttcttcttttctcatcaggcctgtggccagcaaacttcaagtactggtgggtgatgtgctgaaaacagatttgccattctttgatacttgtgtg

SEQ ID NO: 159385 - DNA, 201 bp, Homo sapiens
agctatcttgccatgaggagtacagcaattataaaaacaaagccagctctctcattctgtggcaataaaaaaaaggctgaatgtgttctcctaccttataatcagctgccaatgctttgctatttctctcccaagaaaattcattgcagttaaaattcatttatagttgacaatgaccattttccttattcctttctgctt

SEQ ID NO: 159386 - DNA, 201 bp, Homo sapiens; identical to SEQ ID NO: 29811

SEQ ID NO: 159387 - DNA, 201 bp, Homo sapiens; identical to SEQ ID NO: 29812

SEQ ID NO: 159388 - DNA, 201 bp, Homo sapiens
tgatttattttcgtttcccagtcttaaaaaatcttgaaagggcactcttttttcttcagttaataatgtaaaaaaaaaaaaaaaaaaaaaaaaaaaacctkcagtgacatggctaaattccccagagcctcagtttttttgatatagactaaaatgctggtatcatcacttacaaaagtgtcttgaacttgatggagctta

SEQ ID NO: 159389 - DNA, 201 bp, Homo sapiens
cttctgccaattccaaacagcttcttgttcagttaccttgaaacaaatgccagtgagttcttaggcctgggataatgaaagtctaagataattttagtcarattcattacgacataaaggctctaatgaaagaggcaccaacatggcatggttttaaccaatacatatcttataaatttagtcagacaataacatttcttt

SEQ ID NO: 159390 - DNA, 201 bp, Homo sapiens
gccgcgggcggcaggagcagcgccgggagctgaagagcgctggaggtgcggatccccgcgaggaagctggggtcggtcgggtcaggtcttccggcaggacytagcctggggtgcggaccaagacctgatcggcagaggccggtcaggacgcgctcccgtgagcgcggaaggcaggggtgggtccccgactcggccgcaggc

SEQ ID NO: 159391 - DNA, 201 bp, Homo sapiens
aggtggaatccagtgttgtaaggatagaacctaagaatccaccaccacccatcaattttcaggtgaggttaaaatactagctcattcaataaaggaaaaaraagtccaggcgggaagatgtgtgcctataacagcagaaaaatattgaatcaacctaaatattcaaacataggaaaatgttaattaggacacatccctgtg

SEQ ID NO: 159392 - DNA, 201 bp, Homo sapiens
ccaagattgtgccactgcactccacactccagcctgggcaacagagcgagattgtcaaaaaagaaaacaagatcctgaaacatttcttcaaagaattacaragaattgtaatggagatgaaatatggctttaccagtgtgatcctaaagacaaagcagagtgaaagtgatgcctaccaagaaacggagtggctccagtcaa

SEQ ID NO: 159393 - DNA, 201 bp, Homo sapiens; identical to SEQ ID NO: 29804

SEQ ID NO: 159394 - DNA, 201 bp, Homo sapiens
atcctctcattattaacagcattatcgataaggtgggtgtggaagaggaaagggagagagttgttggtttattaattttattcctatgaatacataagcgyagaaagtctgcctgccgtaaattagatgctctgtaaatatttgttgaatgaatcaaataattgtctaggattcttgggctgtcttctgcatgataagctt

SEQ ID NO: 159395 - DNA, 201 bp, Homo sapiens
taaactatctttagagcttgggaggctctaaagcaaacttaatgaagaaagtttgctggagttgagagtcagatcacattttttggcaaaacaggaaaacrctcccaaactctgaccatatatctgctctagttttttgttggaaaaatgaggtgatgatggaccccttccacacttgtgaaggatatgtgtcatgtaatt

SEQ ID NO: 159396 - DNA, 201 bp, Homo sapiens
aagctatcttgccatgaggagtacagcaattataaaaacaaagccagctctctcattctgtggcaataaaaaaaaggctgaatgtgttctcctaccttataatcagctgccaatgctttgctatttctctcccaagaaaattcattgcagttaaaattcatttatagttgacaatgaccattttccttattcctttctgct

SEQ ID NO: 159397 - DNA, 201 bp, Homo sapiens; identical to SEQ ID NO: 29805

SEQ ID NO: 159398 - DNA, 201 bp, Homo sapiens
caagctatcttgccatgaggagtacagcaattataaaaacaaagccagctctctcattctgtggcaataaaaaaaaggctgaatgtgttctcctaccttataatcagctgccaatgctttgctatttctctcccaagaaaattcattgcagttaaaattcatttatagttgacaatgaccattttccttattcctttctgc

SEQ ID NO: 159399 - DNA, 201 bp, Homo sapiens
tagagcttgggaggctctaaagcaaacttaatgaagaaagtttgctggagttgagagtcagatcacattttttggcaaaacaggaaaacactcccaaactytgaccatatatctgctctagttttttgttggaaaaatgaggtgatgatggaccccttccacacttgtgaaggatatgtgtcatgtaattaacctgggaaa

SEQ ID NO: 159400 - DNA, 201 bp, Homo sapiens
tcttagattttcatttgcaccaaatgttattgaggtaattttgttaaccacgtagatcatgaagaaatctaaaaatggagtcagattaagagctcttatcrgagcacatatgagtaaagatgttcaggtgtaaattaacttctgtgttctgatgttgccagaagagctaaagtgtttgtgcttgcttttaggctgccttaa

SEQ ID NO: 159401 - DNA, 201 bp, Homo sapiens
gcaagctatcttgccatgaggagtacagcaattataaaaacaaagccagctctctcattctgtggcaataaaaaaaaggctgaatgtgttctcctaccttataatcagctgccaatgctttgctatttctctcccaagaaaattcattgcagttaaaattcatttatagttgacaatgaccattttccttattcctttctg

SEQ ID NO: 159402 - DNA, 201 bp, Homo sapiens
atagcaacagtttttttttgaatgctcagggcattttgcttgctgactttctttaggaccaaagaatgaaaacatctgcttattacaagagtgttttgagraagttagctaagatgtagcagagtaactcctgggaaagcttccccagagattcctccaccataatacttctactccttcctctcatcagacgagggcaat

SEQ ID NO: 159403 - DNA, 201 bp, Homo sapiens
tggcgtgaacccgggaggcggagcttgcagtgagccgagatcgcgccactgcactccagccttggcgactgagcgagactccgtctcaaaaaaaaaaaaaagtttatggggacaatatcccaaagaaatcagcagtttactaatggataactcattttaagaagggctgagacaatgttgaagatgaagcctacagtggca

SEQ ID NO: 159404 - DNA, 201 bp, Homo sapiens
ccttggcctcccaaagtgttgggattacaggtgtgagccaaagcacccagccagtgatttttattattgaaataatctagcttaattcatccttgagcatycagttgtgccttctgtgaggatagcatatctggttactaaataaaagttgcctttgtgagtactacttaaatactttttcattaacaggtgggaaagaat

SEQ ID NO: 159405 - DNA, 201 bp, Homo sapiens
gatttttttttaggggattttttgtggagagtctagaacttctctaagaatttaagaggtattaggattttgcactttaaatatatttagtgtttgcttcrtaagtttaaatattcaacaacttttaaaattccttaatttcaccatacagaatatagatttaatttcatctaaaatgaaattattgcttaaatggcttat

SEQ ID NO: 159406 - DNA, 201 bp, Homo sapiens
aggctggagtgctgtggcgcgatctcggctcactgcaacctctgactccctggttcaaacaattctcctgcttcagcctcctgagtagctgggattacagrcacgtgccgccacgcccagataatttttgaatttgttagtagagacagagttttaccatgttggccaggctggtctcagtctcctgaactcatgatccgc

SEQ ID NO: 159407 - DNA, 201 bp, Homo sapiens
tctctctttaattgagaggttatttgggggtagtgtgctggaagtcctgcttctgagaccagacagcctttccctatttttgaatcttcctgccgttaagyctaggttagaatttttattaccttatgtctagacaattgcagtggtttcctaactggtctctagtataagaggtcttcaaaaagttcatggaaaatgtgt

SEQ ID NO: 159408 - DNA, 201 bp, Homo sapiens
ttatcaggtatgtcctcacattttcaggaacatcatactaactgttcctctgatgtgtctttcccggaaataactagttaattctcttacagatctcttcrccttttgtcttcaagctgttgctacatcgaccttttttcaggtttgtgacaaaagactagagttactgccaaattttgaaagacttacagttcaggtggt

SEQ ID NO: 159409 - DNA, 201 bp, Homo sapiens
acacctgtggtcccagctgcacaggaaggtgaggtgggaggatcccatgagcccaagacttcgaggcagcagtgagctatgatagcgccacttcactccarcctgggcaacagagtgagaccccatctcttaaaaaaaattattttttaataaaaataaaaagtcagtgaaacctcagctgaaattgcaataaaatttcaa

SEQ ID NO: 159410 - DNA, 201 bp, Homo sapiens
atgaggagtacagcaattataaaaacaaagccagctctctcattctgtggcaataaaaaaaaggctgaatgtgttctcctaccttataatcagctgccaawgctttgctatttctctcccaagaaaattcattgcagttaaaattcatttatagttgacaatgaccattttccttattcctttctgctttcttttcaggtg

SEQ ID NO: 159411 - DNA, 201 bp, Homo sapiens
gcaggagcagcgccgggagctgaagagcgctggaggtgcggatccccgcgaggaagctggggtcggtcgggtcaggtcttccggcaggacctagcctgggktgcggaccaagacctgatcggcagaggccggtcaggacgcgctcccgtgagcgcggaaggcaggggtgggtccccgactcggccgcaggccctgcgcgtc

SEQ ID NO: 159412 - DNA, 201 bp, Homo sapiens
acatagagagacccgtctctattaaaaataaagaaaggaaattagcctggtgtgctggtacacacctgtggtcccagctgcacaggaaggtgaggtgggargatcccatgagcccaagacttcgaggcagcagtgagctatgatagcgccacttcactccagcctgggcaacagagtgagaccccatctcttaaaaaaaat

SEQ ID NO: 159413 - DNA, 201 bp, Homo sapiens
tgacctcatgattcgcccaccccagccttccaaagtgctgggattacaggcgtgagccactgcacccggcccatttttgtttgttgtttgaagtatgcgartataattaaaggaatattgatggtagaaatgggagaagaagtttgtcacataaatcatgtaagagttcctgttgggataacaataaaagatttatattcc

SEQ ID NO: 159414 - DNA, 201 bp, Homo sapiens
tggaactggcaacatgactgtaaagttgttagaaaaggcaaaaaaggtaaaaaggggatttaatgtttggtatcacaaatgactatgttagcaagctcagytggtttacaatctaaatatgttttaactaattgctattattttagtagtaactcctgatcccttgttggaaattttgtcttagaaaatatgagatatttc

SEQ ID NO: 159415 - DNA, 201 bp, Homo sapiens
aacctaagaatccaccaccacccatcaattttcaggtgaggttaaaatactagctcattcaataaaggaaaaaaaagtccaggcgggaagatgtgtgcctrtaacagcagaaaaatattgaatcaacctaaatattcaaacataggaaaatgttaattaggacacatccctgtgctgaagtagatggaataatttgatgca

SEQ ID NO: 159416 - DNA, 201 bp, Homo sapiens
aatgtatgtcttacttttgcatgtgtgtgccagccagatcaagattacagaacattttcttcacttcagaaagtttccttcaattgtatatattaaaagayaaaataatacctagtgggcatagacaagaacaagaagtttgtaatttgaagaaaatgtctatcttctatttcaggaatgggatggtctagtaaggataac

SEQ ID NO: 159417 - DNA, 201 bp, Homo sapiens
tgcctgactgtagccctggctagcagggaggctgaggtgggaggtttacctgagcctgggaagttgaggctccagtgagccgtgatcctgccacttcactrcagcctgggtgacacagtgagaccctgtctcaaaaaataaaaataaaactaaagatagatctgggagccaaacagagtaagaaacacattgtttaccatg

SEQ ID NO: 159418 - DNA, 201 bp, Homo sapiens
aattggctgggcatggtggtgcctgactgtagccctggctagcagggaggctgaggtgggaggtttacctgagcctgggaagttgaggctccagtgagccrtgatcctgccacttcactgcagcctgggtgacacagtgagaccctgtctcaaaaaataaaaataaaactaaagatagatctgggagccaaacagagtaag

SEQ ID NO: 159419 - DNA, 201 bp, Homo sapiens
ttgcttttaggctgccttaagaccaactgatgtagtgctggaagttggacctggaactggcaacatgactgtaaagttgttagaaaaggcaaaaaaggtaraaaggggatttaatgtttggtatcacaaatgactatgttagcaagctcagttggtttacaatctaaatatgttttaactaattgctattattttagtagt

SEQ ID NO: 159420 - DNA, 201 bp, Homo sapiens
atatacattaagagtagatttttttgtttaatttcacaaaactattttgcagagttcacttgtatcatctctatccttatagtaaaaattttaagatttawctcggctttctcaggttatttccctctacccctatgaactgctgagttttagttccttttctggccttcagttttcactatctgtaaagctgaaggactg

SEQ ID NO: 159421 - DNA, 201 bp, Homo sapiens
cacattagaaagtttgttccccagaaaaacatatagtactacatataaattatttggtgtatgctagtaccacatataaattgcttggagtattactgctytctgagttattgatgttctcttatggttatggatgattgggtgttaggaagtgaaatacacacggtgcagattacacttatggttaaaagcaaggaaagc

SEQ ID NO: 159422 - DNA, 201 bp, Homo sapiens
atgcaaggtagttttgaagtgagacccagtctcaaaaaaaaaaaagaaaaaatggaataaaactaggaaaacaaggtaaaatgaaaatagttgttttaaartagtattatgggtaacatcttttcattgtaattgttttttgagatttaaaaacaagaaagaagaccacttgatataaaaccttactacagccacattaga

SEQ ID NO: 159423 - DNA, 201 bp, Homo sapiens
gtttttaatcattaagatgttaactttcagaaggtcttgcctatttagccaattcacttttaaagcttccatgttctagaggctgaataaaaaatgagagyagattgttctaaaagtcattggtttgactttttctaagctggaaacacagttctatataactaagacaaatggagtttatattttattggctggctagca

SEQ ID NO: 159424 - DNA, 201 bp, Homo sapiens
gtgacaaacgggcccgttccatggacatagatgacttcatcaggtaattacatttttgttttcctaagtgtttacatttctttactgtgacaccttcagaytggagattttaaaggcttttaagcggtataaggtgctacctgggagagttattgcatagcacttccatggcatggaatagtatttggtgtagaagatgga

SEQ ID NO: 159425 - DNA, 201 bp, Homo sapiens
gagcagcgccgggagctgaagagcgctggaggtgcggatccccgcgaggaagctggggtcggtcgggtcaggtcttccggcaggacctagcctggggtgcrgaccaagacctgatcggcagaggccggtcaggacgcgctcccgtgagcgcggaaggcaggggtgggtccccgactcggccgcaggccctgcgcgtcgccg

SEQ ID NO: 159426 - DNA, 201 bp, Homo sapiens
tagtgacaaacgggcccgttccatggacatagatgacttcatcaggtaattacatttttgttttcctaagtgtttacatttctttactgtgacaccttcarattggagattttaaaggcttttaagcggtataaggtgctacctgggagagttattgcatagcacttccatggcatggaatagtatttggtgtagaagatg

SEQ ID NO: 159427 - DNA, 201 bp, Homo sapiens; identical to SEQ ID NO: 29810

SEQ ID NO: 159428 - DNA, 201 bp, Homo sapiens
tggagttttctatagttacaaggcaattatgattttaatattacagtctaacaacctgcatgtaatactttatgatattcaattaattttattactgtaawtctagttttcctctctttagttagtgctatttatacactagcctcaagggttactttttaaaattttatgtttaaatttcaaaacactcaataaaagcca

SEQ ID NO: 159429 - DNA, 201 bp, Homo sapiens
tcattaattttttgattcttacttcctatttttaaagtaagtttcaagcaatgcagaatttttttttcaaatgaatacatatggctcattttattcaatamtcatacttacagaatatatgcaaatccgcctttccaatgataaatagtagtatttaagactgataaacttttgaaagggcagttaaaggttatagtctac

SEQ ID NO: 159430 - DNA, 201 bp, Homo sapiens
agtaattatttatatgtgttatgtttatttttaaagaatacaattaaaatgaaatgattaatctatcattgtttgcataaaaaattgaatgaatatataaraaaaacatgtacataataaaatatatagaaaataaaatctggaaacataaaaacattccctttttacttctgaagagactaaaagttcaaagaagataac

SEQ ID NO: 159431 - DNA, 201 bp, Homo sapiens
gagtgcaggggcacaatctcatctcactacaacctctgcctccctggttcaaagaattctcatgcctcagcctcccgagtagctgggattacaggcacccrccatgacatctggctaacttttgtatttttagtagagacagtgtttcatcatgttggccaggctggtctcgaacttctgatctcaggagttccgcccacc

SEQ ID NO: 159432 - DNA, 201 bp, Homo sapiens
ctaaaagttttgtacatgctcactgcagcaatcacagataagaaaaaggaaaaaaactacttaaaattcaaatgctcagaaattacaaatttaatattttrtacatattttttgctaaaacaagaccatagtatgtttgtgtgtatgtataatttaactgatttttttcctcactagctataacaaaatacatcttttcac

SEQ ID NO: 159433 - DNA, 201 bp, Homo sapiens
gcatataatgggaagttaagaccaagaaaacaactagaaacaagagagctttgaaagaaaaactaatcaggaaagctctaatggaaggtgttaacaagcarcacttttagattttaatcagtttactggtaatttcgagagcattaagtgattcttcttgggggctgtatgactctttcatctccgaacatttaaatcatg

SEQ ID NO: 159434 - DNA, 201 bp, Homo sapiens
attttcttcctcaggttttatggagattcaaaggaaagaaaccaactacattaggtgccaatactcagctctatgtttggatatgccagagtgatcttcakggtaagattatgacaaagtaaaataaggaatttcatgagggaaaaattgaattactgtttaacagctaataagtttaacaaaaatttaaaatgtatagtt

SEQ ID NO: 159435 - DNA, 201 bp, Homo sapiens
atattcctattttaaatctctcagcttgtgcaggcagggcaggtaaacatgaagtttttaaggatagaagggtcctgaaagatagtagagtatgtctgctrcataataggtactcaggttaggtttgatgaataagtggaatgaaagaatggataaatacagttggggagttcaatatttttaaatgaactcctataaggc

SEQ ID NO: 159436 - DNA, 201 bp, Homo sapiens
attataatgctctgaaaactcaaaatgctattatattgtggtttaacttgtgaaatgcatacattttcttcctcaggttttatggagattcaaaggaaagmaaccaactacattaggtgccaatactcagctctatgtttggatatgccagagtgatcttcatggtaagattatgacaaagtaaaataaggaatttcatga

SEQ ID NO: 159437 - DNA, 201 bp, Homo sapiens
tatattcctagtaacaaaatgaggtactgattttggaattaccaggaaatcttcataaactagtgtataatttacaagttttaaaattcattttttatgcragtgttaaaaataacttcaggtttgcagacaaaaaatagtataggtaattacaaaaagctatatagaatataaaaataaagagtatttcataagtattca

SEQ ID NO: 159438 - DNA, 201 bp, Homo sapiens
aatggagaaagtatggctttccacctggaacttgaatctcatttttcaatttgcataacaggcactagatttatgtaacaatttggaaagtattatggtartttatgtgagcacaactgattatttgtctagtgatctttgctattactttagtaacacatctcttggttgtcgtttgttaataataaagtaaaaataaag

SEQ ID NO: 159439 - DNA, 201 bp, Homo sapiens
ataaacttttgaaagggcagttaaaggttatagtctactgttttctaacttcagaaatacttttgtttgaaaggtgggagataaagtttcaaggagattargtcccaatattcctattttaaatctctcagcttgtgcaggcagggcaggtaaacatgaagtttttaaggatagaagggtcctgaaagatagtagagtatg

SEQ ID NO: 159440 - DNA, 201 bp, Homo sapiens
ggggtgataaaaagttttggaattcgcgaaagccattggttgtatagcattgtaagtatgctaaataccactgaattgtaaattttaaaatggttgtgtgytatgtgaatttcatcttaagttttttaaaagttgaaaaggctttaaaaaaatgtgagcccttatcacccccaccctgcacattctgatttgcctcctagg

SEQ ID NO: 159441 - DNA, 201 bp, Homo sapiens
caggatgtttttatggggtgataaaaagttttggaattcgcgaaagccattggttgtatagcattgtaagtatgctaaataccactgaattgtaaattttwaaatggttgtgtgctatgtgaatttcatcttaagttttttaaaagttgaaaaggctttaaaaaaatgtgagcccttatcacccccaccctgcacattctg

SEQ ID NO: 159442 - DNA, 201 bp, Homo sapiens
ccctttcttcttaagaatatcttattccttctcactggggatttcttggaagttgttctagtcaagtgttttccttgagctgaaagagggaagaggcataycaaaaacattgggatcaatgtagaaacttgtacatgaatgtttatagcagcattattcagcatagccaagagatggaaacaatccatatgtctgtcaaca

SEQ ID NO: 159443 - DNA, 201 bp, Homo sapiens
gtctgtcaacagatgaaatcaacaacttgtcgtacatccatacaatggaatattattcagccataaaaaggaatgagtaaagtactgatttctcctataasacagatgaaccttgaaatcattatactgtgaaagaagccagacacaaaaggtcatatactgtgaatcctgttatagggaatatccagaacagacaaagtt

SEQ ID NO: 159444 - DNA, 201 bp, Homo sapiens; identical to SEQ ID NO: 29839

SEQ ID NO: 159445 - DNA, 201 bp, Homo sapiens
cacgagggcatgccctgtgaacctgaggctcttagtgcctgggccacacaagcacacaggtcaggcttttcctgccaatcataagggaaggagtgaccaamataacatgtggggaagttacaatggtttgggaaacctcaaaaaattctaatggcagtgattttacagtctatgctaaatattaatgaattactttctttt

SEQ ID NO: 159446 - DNA, 201 bp, Homo sapiens
tccatgtggctggggaggcctaacaatcatggcggaacatgaaagccatgtctcacatggtggcagacaagagaagagagcttgtgcagggaaactctccytttaaaatgatcagatctcgtgagactcattcactatcctgagaacagtacaggagagacttgcccccataattcaatcacctcccactgggttcctccc

SEQ ID NO: 159447 - DNA, 201 bp, Homo sapiens
gcagcactagcacgagggcatgccctgtgaacctgaggctcttagtgcctgggccacacaagcacacaggtcaggcttttcctgccaatcataagggaagkagtgaccaaaataacatgtggggaagttacaatggtttgggaaacctcaaaaaattctaatggcagtgattttacagtctatgctaaatattaatgaatt

SEQ ID NO: 159448 - DNA, 201 bp, Homo sapiens
gctgctaataaagacatacccgacactgggtaatttacaaaagatagagatttattgaacttatagttccatgtggctggggaggcctaacaatcatggcrgaacatgaaagccatgtctcacatggtggcagacaagagaagagagcttgtgcagggaaactctccttttaaaatgatcagatctcgtgagactcattca

SEQ ID NO: 159449 - DNA, 201 bp, Homo sapiens
gtttcccaccttaataaactttctctgccttgttgctgtagtctctgtggcaagaagagaccctttctgataggagtcttggtagggaacagaacttgccygcccccaacccagtcccattgcacaacaccgtgatgcttcctgtgtaacatggtctaccccctctctagcagcactagcacgagggcatgccctgtgaac

SEQ ID NO: 159450 - DNA, 201 bp, Homo sapiens
ggctttgccatgttgtccagtctggtctcgaactcctgacctcaagtgatccactcgccttggcctcccaaagtgatgggattacaggtgtgagccactgygcccggcctgactctcttcaatttcttttttttcttttcttttcttttttctttttttttttgagacagagtcttgtgctgctgcccaggctggtgtgca

SEQ ID NO: 159451 - DNA, 201 bp, Homo sapiens
tctctctcagtgttctttacctgtctccatgctccctccctccatcttccaggaactgtctctacctgtggggatggacagcagcatctagcctagaggarccctctgaggtaggtcacactccagttggagttgggtgtgttgcactttggtggggatcctttcgacttggacaggccaccccccctgccccatagctca

SEQ ID NO: 159452 - DNA, 201 bp, Homo sapiens
ttttaaaccttggaactctatggtttcaggagacaacaggtagggataaagtaatatttgtttagtttttaattgaacttgtcttgaatgagaaatatatrtgtgactttaacttgtgataggtaactttaacctttgttcttatggtactttgaggtcacaatcatattacagaattgtatagaatttccttctgtaata

SEQ ID NO: 159453 - DNA, 201 bp, Homo sapiens
atacccgacactgggtaatttacaaaagatagagatttattgaacttatagttccatgtggctggggaggcctaacaatcatggcggaacatgaaagccaygtctcacatggtggcagacaagagaagagagcttgtgcagggaaactctccttttaaaatgatcagatctcgtgagactcattcactatcctgagaacag

SEQ ID NO: 159454 - DNA, 201 bp, Homo sapiens
gaaagccatgtctcacatggtggcagacaagagaagagagcttgtgcagggaaactctccttttaaaatgatcagatctcgtgagactcattcactatccygagaacagtacaggagagacttgcccccataattcaatcacctcccactgggttcctcccatgacatgtgggaattgtggaagttacaattcaagatgag

SEQ ID NO: 159455 - DNA, 201 bp, Homo sapiens
aaagatcctctgtaagcagctgatcccagtgtttgcccatcttttgctactcattgttctggaagctgtgataccaaccacattttctgatcatgtctaaktctgctgaatgcagagaggctcaggctctatctagtaaaataagggagtcagagaaatatgaacatgtgaaagtcattgagcccagactaaaattacaac

SEQ ID NO: 159456 - DNA, 201 bp, Homo sapiens
tcccatgacatgtgggaattgtggaagttacaattcaagatgagatttgggtggggacacagccaaaccatatcactccagaatatcacgatttcaaacaycatatttggaatttaaacaaaaatgttgactttagatctcaataaaatatagaatgacaaatgttaaaacatcagatctctgttttaaaccttggaactc

SEQ ID NO: 159457 - DNA, 201 bp, Homo sapiens
agtgttctttacctgtctccatgctccctccctccatcttccaggaactgtctctacctgtggggatggacagcagcatctagcctagaggaaccctctgrggtaggtcacactccagttggagttgggtgtgttgcactttggtggggatcctttcgacttggacaggccaccccccctgccccatagctcatgggcata

SEQ ID NO: 159458 - DNA, 201 bp, Homo sapiens
cttacttgtttagccatgttcctctatagctccatgtattggtctgttttcatgctgctaataaagacatacccgacactgggtaatttacaaaagatagrgatttattgaacttatagttccatgtggctggggaggcctaacaatcatggcggaacatgaaagccatgtctcacatggtggcagacaagagaagagagc

SEQ ID NO: 159459 - DNA, 201 bp, Homo sapiens
tttaaaccttatgatcagattcttcgggtttatattttcacttgtccttattaatactttttttttttctagtagcatcaagtaacagatcttcttcttcyttttttttttttttttttttttttttgagacagagtctcactctgtagcccaggctggagtgccgtggcgccatcttggcttactggaagctcgcctccc

SEQ ID NO: 159460 - DNA, 201 bp, Homo sapiens
taataaagacatacccgacactgggtaatttacaaaagatagagatttattgaacttatagttccatgtggctggggaggcctaacaatcatggcggaacrtgaaagccatgtctcacatggtggcagacaagagaagagagcttgtgcagggaaactctccttttaaaatgatcagatctcgtgagactcattcactatc

SEQ ID NO: 159461 - DNA, 201 bp, Homo sapiens
gttctggggtcatgaagggtttgcttttgttgctaggcagcacgctggggtctggtccttacagagctctctctcagtgttctttacctgtctccatgctscctccctccatcttccaggaactgtctctacctgtggggatggacagcagcatctagcctagaggaaccctctgaggtaggtcacactccagttggagtt

SEQ ID NO: 159462 - DNA, 201 bp, Homo sapiens
ggctgggtcatgtacactggggcttgtcccctagagcaatctcttttggaacccagctaccatgctgtactgaagtctaggccatcctgttgcagagtaaraccacatgggggaagatctggagttggagacactcatggaagaccatgtgaaggagatggggatcccttgctaagctccctgctgaatataagctgtggg

SEQ ID NO: 159463 - DNA, 201 bp, Homo sapiens
gcatactcttccaccattggagaatagctatgctgtgtgggcagttttctgtagctccagggaagggcctggattgttgaaggcaatgataattatcctawctcctttgcagtgattgtcagaaatggccatgtgactcaatttgaggaagtctgccaaggaattctgggaaaagtttattcactcttaagagagacccac

SEQ ID NO: 159464 - DNA, 201 bp, Homo sapiens
tgggtagagttggagtttccaagttgcagcccgaggcagctgcagaattgaggtagtgttctggggtcatgaagggtttgcttttgttgctaggcagcacrctggggtctggtccttacagagctctctctcagtgttctttacctgtctccatgctccctccctccatcttccaggaactgtctctacctgtggggatgg

SEQ ID NO: 159465 - DNA, 201 bp, Homo sapiens
tgaaaaaaatgcgcactttgaggttttagacagcgacaatgggcccaatgggccactcactgtgtagtctcctcctcttacatcatcagcatgtggctttytgtgtcaatgggacattagcaggcatgatacaagcaggggctgggtcatgtacactggggcttgtcccctagagcaatctcttttggaacccagctacca

SEQ ID NO: 159466 - DNA, 201 bp, Homo sapiens; identical to SEQ ID NO: 29838

SEQ ID NO: 159467 - DNA, 201 bp, Homo sapiens
acagagtctttcccctctcattaagaagagtgctcctcctttcttctgtgagcaggccaaatggatttgattatcaagggccaagttcatgggaagggggraagggtaacgaataggttggggcactgttgctttgcctaaccttgttaaaagaagcccgattttgtttgggaggcaactcccagccccaggtaagaaatc

SEQ ID NO: 159468 - DNA, 201 bp, Homo sapiens
atctcacagctgtcctccctgcagagaattatgctccctagagaggtaagtgaaaaaaatgcgcactttgaggttttagacagcgacaatgggcccaatgrgccactcactgtgtagtctcctcctcttacatcatcagcatgtggctttttgtgtcaatgggacattagcaggcatgatacaagcaggggctgggtcatg

SEQ ID NO: 159469 - DNA, 201 bp, Homo sapiens
ccatgggggaatgtttgtggcaggaatttcagcataatgagcagaaactggccctcccacagagtctttcccctctcattaagaagagtgctcctcctttsttctgtgagcaggccaaatggatttgattatcaagggccaagttcatgggaaggggggaagggtaacgaataggttggggcactgttgctttgcctaacc

SEQ ID NO: 159470 - DNA, 201 bp, Homo sapiens
tcggcctcccaaagtgctaggtttacaggcgtgagccactgcgcccggccgtaacagatcttcttaactacacatactctaaaatcctctttaactcaatkttttacttactttcacaattttatacttgtttctattgattcagagagtctttaggtcacaggatctcacagctgtcctccctgcagagaattatgctcc

SEQ ID NO: 159471 - DNA, 201 bp, Homo sapiens
aaagctctcgtcctgagatatgtggctaagtggggacaaattaggatgctgtctagaggaaagaaagtgaagtagtttccccctctttaggacagaaaggwaacctaatgtcatctgttccaagtagttaaccctcctctgggggtgggaatggcggacttgggattggcccgttgtaggaaggtcggccgtgggaggcct

SEQ ID NO: 159472 - DNA, 201 bp, Homo sapiens
cacccaggcaggacataagacaaaaacatagaaaacaaaatccaaacctcaatcactaatgaatgcagtgagagtttgtcaagattatctacatgattacycaggtagcagttgctatctctctgaggcttaaaattacacatattgggcacatagtatgtgctaagctttggactatgttctttcacaaagattatgtca

SEQ ID NO: 159473 - DNA, 201 bp, Homo sapiens
cacattctgatttgcctcctagggagcatactgacatgtaagttcactttataagggatgtgaggtgactacctggcttagagtgactcatcatcacttaytatgtactttggaagcttgagagcagtgcattttgggcaatttgctgattgctttaggcaatcctaacgttgagccccgtgggtagcaagaaatagcagg

SEQ ID NO: 159474 - DNA, 201 bp, Homo sapiens
gatatttagaatctaagaatatactgaaccagttttaaaataatgatcctcatacagaacacatgacttaaaaatctgcattgtctttccttgtcctgatatgtattattttatcattacttaacaggacttttgtattttaaagtattttatacacaatgtgtataggctggatttggccatactcaggggccaaatttt

SEQ ID NO: 159475 - DNA, 201 bp, Homo sapiens
atgtgaggtgactacctggcttagagtgactcatcatcacttattatgtactttggaagcttgagagcagtgcattttgggcaatttgctgattgctttakgcaatcctaacgttgagccccgtgggtagcaagaaatagcaggtgattagaacagaagcaattactctcagaaaagcatcattaatttcaaaagctctcg

SEQ ID NO: 159476 - DNA, 201 bp, Homo sapiens; identical to SEQ ID NO: 29840

SEQ ID NO: 159477 - DNA, 201 bp, Homo sapiens; identical to SEQ ID NO: 29841

SEQ ID NO: 159478 - DNA, 201 bp, Homo sapiens; identical to SEQ ID NO: 29837

SEQ ID NO: 159479 - DNA, 201 bp, Homo sapiens
aaattttaaagagatttgggggttgcaatccagcccagttaataaagatcctctgtaagcagctgatcccagtgtttgcccatcttttgctactcattgttctggaagctgtgataccaaccacattttctgatcatgtctaattctgctgaatgcagagaggctcaggctctatctagtaaaataagggagtcagagaaa

SEQ ID NO: 159480 - DNA, 201 bp, Homo sapiens
tctcacatggtggcagacaagagaagagagcttgtgcagggaaactctccttttaaaatgatcagatctcgtgagactcattcactatcctgagaacagtrcaggagagacttgcccccataattcaatcacctcccactgggttcctcccatgacatgtgggaattgtggaagttacaattcaagatgagatttgggtgg

SEQ ID NO: 159481 - DNA, 201 bp, Homo sapiens
atactcttccaccattggagaatagctatgctgtgtgggcagttttctgtagctccagggaagggcctggattgttgaaggcaatgataattatcctatcycctttgcagtgattgtcagaaatggccatgtgactcaatttgaggaagtctgccaaggaattctgggaaaagtttattcactcttaagagagacccacag

SEQ ID NO: 159482 - DNA, 201 bp, Homo sapiens
ctcacccaccctgtatctcttagagaaagcacctggctgtcttcacctacgcgagaccttctctggaatgtgatttgctgcgactgcagacatctccatayggcataatgaactcccttgagtggtctctttttaaacaattttgggtgaggggcaggtttcttggtttgtttcaaaactcatcttgaaaataatctagac

SEQ ID NO: 159483 - DNA, 201 bp, Homo sapiens
ccctgggtgcccacctgcccacttcaaccatttgtggccccttcctttcctttcttccctctctgctgctgacaccagtggctccatcgccagctccctgmagcctccaccaataatccatggctcctccaggaagtgtcgcaggcaggtggccaagaccaacttattaggtagccagaagctcacccctttcttaacaac

SEQ ID NO: 159484 - DNA, 201 bp, Homo sapiens
ttatctgttatagcaacaaccccacttctgggtactaatctgctaccaactacaggaatttaactgttctggagttagggaacagcacacacagacactcrcacaaaacaaactccacctaaaaaaactgtacgagaattccccaaacttctcaactaaataaataggtgaaaaaacaccaatctcacatatgccaatcca

SEQ ID NO: 159485 - DNA, 201 bp, Homo sapiens; identical to SEQ ID NO: 29845

SEQ ID NO: 159486 - DNA, 201 bp, Homo sapiens; identical to SEQ ID NO: 29846

SEQ ID NO: 159487 - DNA, 201 bp, Homo sapiens
acaccagtggctccatcgccagctccctgcagcctccaccaataatccatggctcctccaggaagtgtcgcaggcaggtggccaagaccaacttattaggkagccagaagctcacccctttcttaacaactttgaccacgaagcgcaaatacgatgcaggtaaatccagaggcagagcctgggtccccaggctgctggtaa

SEQ ID NO: 159488 - DNA, 201 bp, Homo sapiens
taaaatatttacatttggcctctttggaaaaagtttgctgactcatatcctagagaatacagaacactggagctgctatggaatgtgattagaaagcctgrctgtattataagtagtgaatggcatggacaatagcctctagttcttacagttcaggaaatatgaccttgatgttcaagcctccagatgtccttagcagtt

SEQ ID NO: 159489 - DNA, 201 bp, Homo sapiens; identical to SEQ ID NO: 29849

SEQ ID NO: 159490 - DNA, 201 bp, Homo sapiens
ttattttttaagatatataataatagttttacattaagtgtgatttggattccttctccagaattataaattacctaattcccttctgctaaaagacgcasgacagagaagggtaagcattttagctggacatttattcctgttgtacgatcctccccatcccctttaacgagtgctagaactacgccagagaataactgt

SEQ ID NO: 159491 - DNA, 201 bp, Homo sapiens
acaggcatgagccactgtgcccagcctgtttttaaatagtaaatatgaatataaattatatgcctaaactgagatatgagtgttataattttaacattaaygtaagatcagactgaagagtcagtgctaatgaaccacattttggttctaattgagtctaaggcaaaagtaagagctgtttgctcatcataaaccatatac

SEQ ID NO: 159492 - DNA, 201 bp, Homo sapiens
gctgaaataaaaaccagtttttcagcatgacttagcacaatgttatttattttcactgcctattagcctatgggtcatgagatttgttattctagagcagytgagtattggagtggaacaagcaaaagcaaggcatatttttctgttgtaatctgtactttttattttttaagatatataataatagttttacattaagtg

SEQ ID NO: 159493 - DNA, 201 bp, Homo sapiens
tgaggaaaatctgttaactccaaattattaagtacctaaagaaatctggagatcttaatttatttgccctatttcaggccttaccaaaaaaaaaaaaaaaagctacctggtttttgtgcatatagtagatacccaccaccaccaccaaaaataattgtggaatgaatgagatttcatggttggctttattttgggcacata

SEQ ID NO: 159494 - DNA, 201 bp, Homo sapiens
ttttaatctcaaaactgtttctttgaattctgcctgcctatccgattggttttactgaagttttccttgaggggctgtctgtcatcttttagggccctctkcaagtttttttcaaaaataacaactgcttagttgtgtgcagtgtaggactctttataggtttttgactactcttcttttcttgtagaatttcactgtctt

SEQ ID NO: 159495 - DNA, 201 bp, Homo sapiens
tccaaaggatatgaggttctcaatcacttagttcacattctgctgttgtaccacttatttttttccattgtcgtgactgggtccttcatttttcttgttayccagcaaacagtagtaatattccacatctcacttctctttttgtagacacagttcagagatctgttttcagcctacagatagactattttcagatcttat

SEQ ID NO: 159496 - DNA, 201 bp, Homo sapiens
gggcctggctgtctgaggttagatgaaaatctatcagattgtggactcctgcacatagctggccaatgtctgtcactagtggagctggcagcacccccccrcccttactcaattggaacacccctactctggtcaccctgtgtgctaggaacagagatccaagttattacccttaaataatttatagtctgagatactgca

SEQ ID NO: 159497 - DNA, 201 bp, Homo sapiens
gaaggtatatcttaaaataatgctttatgctggattagtgcatgctgtttcctaaacattttagtgtaactacacagataagaaatacatgtatgtgtctkcatggatgattaattggccaactactatttgaacagcttgagaacttcagtattgatctgtccatgttgaatcacaaacgtcatcctgcctttggaacag

SEQ ID NO: 159498 - DNA, 201 bp, Homo sapiens
ttttaactataccaaatgcagtcaggatgttttttttttttaatctaatttttgcttgcacatcaagaaaggatggtcttcttttttttttttttttttgkttttcttttttttttttttttttattatactctaagttttagggtacatgtgcacattgtgcaggttagttacatatgtatacatgtgccatgctggtgc

SEQ ID NO: 159499 - DNA, 201 bp, Homo sapiens
cagtggcgcaatctcggctcactgcaagctccgcttcccgggttcacgccattctcctgcctcagcctcccgagtagctgggactacaggcgcccgccacygcgcctggctaattttttgtatttttagtagagacggggtttcaccttgttagccaggatggtctcgatctcctgacctcatgatccacccgcctcggcc

SEQ ID NO: 159500 - DNA, 201 bp, Homo sapiens
taattctgcctttgacagctcattattatataatcttttcatttgctatttaaaacttccatcacacttgctgcctaggttagttcctactctgtattggrtgacctctagcttttgagctggttattctgacatctttttggcattaaatctatttctttccctttaggatttggtgtcataatgaaaacaagtattttt

SEQ ID NO: 159501 - DNA, 201 bp, Homo sapiens
cctgctgtgagcaggctgtaatgtctaaattcatttaccttcatcttgttattagccagagtaaaaatagtacagttagctttcccaccccattccccagrctgccacctctaaggataaccctgcttttgcatatgcttgttactatcagaggacttgtccatttctttcttttttttttttttttttttttttttgaga

SEQ ID NO: 159502 - DNA, 201 bp, Homo sapiens
agagttaggggaacaaagggagagaaagaaagtagatttgcaggattgtggtaaaatgtaacagtcatgggagactgggggagcgacccactagagaaagsggaagggaagattgtaggtgatgctgagtccaagaaaggctgttgagcatgtttagataaactggtatatatttgtttacttatgtctctcctccctgcc

SEQ ID NO: 159503 - DNA, 201 bp, Homo sapiens
ccattaaggaaatcatccaagctggactgcagtggcataatcgtggctcactgcagcttggacctcctggactccaggcatgggccaccacgcttggctawtttttttgcattttttgtagccatgggtttcaccatgttgctctggctggtcttgaactcctatactcaagcgatctgcccacattggcctcccaatgtg

SEQ ID NO: 159504 - DNA, 201 bp, Homo sapiens
aaaattaatattactgacagctggaacttttagtttggctaacaaaaaggtgacctggcttgtacctgttttagtttggagcaatgatagtatgtttggtragtagactgttttggtattcagacacaggaatggtgccctgagcatataaattccagtgtcttggccagacgcagtggctcatgcctgtaatcctagcac

SEQ ID NO: 159505 - DNA, 201 bp, Homo sapiens
tcaggggaagtttctcaggtttttggagacaatctctgtagcgcctcacttgaggctcctcctccagtgccatttctctgcatctttcctgactcttcccrttttactccgcctactgtatcaatactttattcagattgcaggtatttattggtgtctcttgtcccactgccacagtgacctcctcaagaatagtgaact

SEQ ID NO: 159506 - DNA, 201 bp, Homo sapiens; identical to SEQ ID NO: 29857

SEQ ID NO: 159507 - DNA, 201 bp, Homo sapiens
aactaaaaaaattagctgggtgtggtggtgcctgctgtaggcccagctagggggaagtagaggtgggaggatcactgggaggtagagactgcagtgagccrtgatcatgctactgcactgtagcctgaatgacagagtgagaccctatctcaaaaaaaaaaaaaaaaaatagtaattcgttgaaccagtttcttattgata

SEQ ID NO: 159508 - DNA, 201 bp, Homo sapiens
cgggaccgccgggaccgcgggggtgttgccacctccaccgaggagccggcgcggccgcgggctcctcagagccggggccccgggcccgtgacagacgggcmgaggaagggagagaggcggcggcgacaccatgtcatctcccagtccgggcaagaggcggatggacacggacgtggtcaagctgtatccttcgtggagggg

SEQ ID NO: 159509 - DNA, 201 bp, Homo sapiens
ccagcactctgggaagccgaggtgggaggatcacttgagcccaagagttcaagaccagcatgggcaaagagagagaccctgtctctacaaaaactaaaaawattagctgggtgtggtggtgcctgctgtaggcccagctagggggaagtagaggtgggaggatcactgggaggtagagactgcagtgagccgtgatcatgc

SEQ ID NO: 159510 - DNA, 201 bp, Homo sapiens
gctcactgcagcctcgaacttccggattctgaactcaatcctcctgcttcagcctcccgagtagctgggactacaggcgtgtgccaccacacctggcttayttttgtatttttcgtagaaacagggttgcgccatgttggccaaactggtctccaactcctgggctcaagcggtctggctgccttggcctcccaaagtgtt

SEQ ID NO: 159511 - DNA, 201 bp, Homo sapiens
cccaggaggcagaggttgcagtgagccgagatcgtgccattacactgcagcgtgggcaacaagagcgaaaccccgtcgcaaaaaaaaatacagagtgtaargcgtgctgagaccagagtgtttgagagctactactcctaacaaatgtatattggaagagaagtcatattatgataaagtctaggatgtgctttaattgta

SEQ ID NO: 159512 - DNA, 201 bp, Homo sapiens
catcctgaaggtataattattaaaatgctatccagtgttcataatctgcttatctaataattcaaatgctttgtttgccctgctgaggtcagactttggcytactctgtgaatgaatcagtttttgctgttgttacggatggtagagttgagtcaagatgttaatggcccttgtccaatatggggagctagttaagaatgt

SEQ ID NO: 159513 - DNA, 201 bp, Homo sapiens
tgtaatttcatttcattttcataaattgtatgttttttcttttttcttttttttgttttgagatggagtctcactctgttgcccaggccggagtgcagttrtgtgatctcggctcactgcaagctctgcctcctgggttcacgccattctcctgcctcagccttccgagtagctggggctacaggtgcctgccaccatgcc

SEQ ID NO: 159514 - DNA, 201 bp, Homo sapiens
tgtgccaccacacccggctaatttttgtatttttagtagagacgaggtttcaccatgttggcgaggctggtcttgaactcctgacctcaaatgatccaccygccttggcctcccaaagtgctgggattacaggcatgagccaccgtgcctggccataagttgtgtttgttttttgtttttatttttgtttttttgagacag

SEQ ID NO: 159515 - DNA, 201 bp, Homo sapiens
taaattactatataacttctagtcacataaaaagtgtctaagcttgtccatagcaagagagggctgcttcaaattatgattaatgatattgcagaacaaaytctgggttggtagtaatatttattggttaaaatatagtagtaggcctttaacatggatatgactgtagatctttattttagctgccacatagttgtgaat

SEQ ID NO: 159516 - DNA, 201 bp, Homo sapiens; identical to SEQ ID NO: 29865

SEQ ID NO: 159517 - DNA, 201 bp, Homo sapiens
tgcaggaagtctggtgggttgcttcagctctccacctgtgtgccctcaaaacaggtggagaaatgggctttttgtcactgaagttgagttcaaattaattrttttattattttattttattttatttgagatggagtcttgctctgtcactcaggctggagtgcagtggtgcaatcttggctcactgcaacctctgcctcc

SEQ ID NO: 159518 - DNA, 201 bp, Homo sapiens
gttaacttcatatcctattttgggcatagatttattttattattttaatttttttttttttttgagatgggtcttactctgtagcccaggctggagtgcartgatgtgatctcgggtcactgcagtctccacttcccatgttcaagcgattctcctgcctcagcctctcgagtagctggggttacagttgtgtgccaccac

SEQ ID NO: 159519 - DNA, 201 bp, Homo sapiens
atgactcatgcccgtaataccagcacgttgggaggccgaggcaggaggttcacttgaggccaggagttcgagaccagcctcaccaatatggtgaaaccccrtgtctactaaaaatatatatatataaaaagtagccgggcatggtggcgcgtgcctgtaatcccagctactcgagagacggaggaaggagaattacttgaa

SEQ ID NO: 159520 - DNA, 201 bp, Homo sapiens
gtgaaatgctgtctctactaaaaaatacaaaaaattagctgggcatggtggtgggcgcctgtattcccagctacttgggaggctaaggcaggagaatggcrtgaacccgggaggcggagcttgcatgagccaagatcgcgccacggcactccagcctgggcaacagagcgagactcttgtctcaaaaaaaaaaaaaaaact

SEQ ID NO: 159521 - DNA, 201 bp, Homo sapiens
ggcgggtggatcacgaggtcaggagatcgagaccatcctggctaacacagtgaaatgctgtctctactaaaaaatacaaaaaattagctgggcatggtggygggcgcctgtattcccagctacttgggaggctaaggcaggagaatggcatgaacccgggaggcggagcttgcatgagccaagatcgcgccacggcactcc

SEQ ID NO: 159522 - DNA, 201 bp, Homo sapiens
ggacactctccaaatatagttttagagggctgtcagtagttacatgattgcatgagatgtccctttaaaacaatttgcatctataaatgagtgggtattcraaatagtggcatagctactttttggaaagaaaaggaatataggtagacaccttgggaggttatgaacttattcttatgatgccattattgtttcaaacac

SEQ ID NO: 159523 - DNA, 201 bp, Homo sapiens
cagtgacagatctatctgattgaaggtggacacctttaaatatttggagactgtagaatggtagtaatttagttaatttaagccagcttttttttttttttgcttcactttatacatgtctaaaatattataaaatattgaacaattttaagtaagaacaataaaattgtaatatattgagcattctctgagaatcagact

SEQ ID NO: 159524 - DNA, 201 bp, Homo sapiens
ctgggtaatttttgtattttttagtagagatggggtttcaccatataggccacgctggtctcgaactcctgacctcaggtgatccacccgcctaggcctcycaaactgttgggattacaggcgtgagccgctgcgtctggccagttttttatgtatataggcaaaatgcagtcttacacattttacatgtttaacctgtct

SEQ ID NO: 159525 - DNA, 201 bp, Homo sapiens
gattattccataagccaaggagacaattgtgggaactctccttagtaaatccctcgttttaggagcatagcatttccagtttaggggaatttgtattttgstgaacatttgaatttgactaaagggaatactgggtttatatgacaggctcattagggatagattgaggaggagagggtagaaagggagagaaaagctaaa

SEQ ID NO: 159526 - DNA, 201 bp, Homo sapiens
tcatagacatccttatgaaaccacttgaacttgtttccttcagaatgttagcagagtatgcttctctttcaatgtaaagtctttggtttttttgtttttgyttttgttttgttttgttttttgagacggagtttcattcttgttgcccaggctggagtgcaatggtgtgatctcagctcaccgtaactttggctcaccgta

SEQ ID NO: 159527 - DNA, 201 bp, Homo sapiens
aatatgtagccatttgtctttgacttaactttggtattttgctgttaatcagtagttactctatccctaagttagtagtctttgttactctttaatttgtrttcaaagggtagacagttccctaaatcttttaactagttctagtgtcaattgggaacctgtggtttgcctctttatttccagtggactctgttttagtga

SEQ ID NO: 159528 - DNA, 201 bp, Homo sapiens
ctgatggttatttgacagtgagtgtcaatctttccatagaagtaggatgtactttgagaaaagaagttaaaaaaaaaaaatgatgggtatgggccgggcgyggtggctcaggcctgtaatgccagcactttgggaggctgaggccagtggatcacctgaggtcaggagtttgagaccagcctggccaacatggtgaaaccc

SEQ ID NO: 159529 - DNA, 201 bp, Homo sapiens
acgatcctgggaggacttaatgaatttgtagtgaagttttatggaccacaaggaagtaagtacatgtgttggtatgtgttcttctattacagtcttttacyctgtttcttaatagaatatcaaagacagatggtagcatgcgtagtttctgaaaagcaagtttagttggactgcagaaccagtgaggaaatctttctctta

SEQ ID NO: 159530 - DNA, 201 bp, Homo sapiens; identical to SEQ ID NO: 29859

SEQ ID NO: 159531 - DNA, 201 bp, Homo sapiens
tctcaagtgatccgcctgccctggctccccacagtgctgggattacaggcgtgagccactgtgcccagcctatttttcttttttaatgctttgtaattttmttttgggtgactatactacagcttattctttttgccattgatgaacgtttggattgtctctaatttttggatgttacaaatagtcctgtgaacattctta

SEQ ID NO: 159532 - DNA, 201 bp, Homo sapiens
ttgttgtctttctcccaccccgtgcagagtacatccagaaatacgccacggaggaggcgctgaaagaacaggaagagggtaccggggacagctcatcggaragctctatgtctgacttttccgaagatgaggcccaggatatggagttgtagtagaaaaagcacctgcttttcagaaagactattatttcctaaccatgag

SEQ ID NO: 159533 - DNA, 201 bp, Homo sapiens
tttagtgtgcatgtttctaaggtagtaagttatcgtttagaaaagaattagatcaaattagcctagactgaactatcttatttaaatatctcttgtggatrctcagggctcttgagcaaggactttaccaaaattacacctggcctcttgcagtcagttctgtgtctcattggacacgggcttggagtgccaaatatttaa

SEQ ID NO: 159534 - DNA, 201 bp, Homo sapiens
tcttagaaacgtaattatataatatgtggtcttttgtgactgttttttttttcactttgcataatgttttcaaggttgatccgtgttgcatgtatcggaakttcttatggctgaataatatttcattgtgtagataaaccacattatttgtcagataatagacatttgggttattgctgtcttttggctattatgagtgtt

SEQ ID NO: 159535 - DNA, 201 bp, Homo sapiens
ctcatgcctgggcaacagagcaagactctcttaattaaaaaaaaaaaaaagctggcacagtggcttatgcctgtaatcccagcactttgggaggccaaggygggcagatcacctgaggtcaggagttcgggacaagcctggccaacatggcaaaaccccgtatgtacttgtactaaaaatataaaaaattagccaggcgtg

SEQ ID NO: 159536 - DNA, 201 bp, Homo sapiens; identical to SEQ ID NO: 29861

SEQ ID NO: 159537 - DNA, 201 bp, Homo sapiens; identical to SEQ ID NO: 29862

SEQ ID NO: 159538 - DNA, 201 bp, Homo sapiens
agcagattgagcgatggtttttgccagctgcttcaaaaacctgacaggcaggatctgtttagactaaaatcgattcctaaaataatagacctggactgacygtaattatgtaactgcagatctaaaaatgatgaaggatttccttataaattactatggaatcatgactggtcctatactatctgggagatgaaagtaaaa

SEQ ID NO: 159539 - DNA, 201 bp, Homo sapiens
tcagtgtggctgggactgcctcggccgtttttcgtccgtaactgcttccctctggtgacactcagcagctccttttatcttcctctgtttcctcctcctcrttggtgaccttgctcttcctttctctctctcaaaggccttgtcctagtaagtacttaatatacatttgtttccttgaatacattaaagagggctgatagt

SEQ ID NO: 159540 - DNA, 201 bp, Homo sapiens
cattgtagcatttgtatgtagaaggttgattggttaaagtcatatcagtaagagatcaccaagagtaatatatagatggatataatgttttcatggtcttmctgctggatgtttactacccttttgctattcttgaatctaaacctgtaaataaattagtgattctccttggcagcaaagcttggaactatataactcttt

SEQ ID NO: 159541 - DNA, 201 bp, Homo sapiens
gcatgtgccaccacatccagctagttttttgtatttttgtagagatggggtttcaccatgttggccaggctggtctcgaagtcctaacctcaggtgatatrcccgccttggcctcccaaagtgctgggtttacaggcatgagccgctgcacctggccatagttctctcttaaggttgtgtttaaacatcccagccacttac

SEQ ID NO: 159542 - DNA, 201 bp, Homo sapiens
tgaggtcaggagttcaatcccagcctggccaacatggtgaaatacaaaaatctaaaaatacaaaaattagccatgcatggtggcaggcacctgtaatcccrgctgcttgggaggctgaggcaggagaatcgcttcaacctgggaggcggaggttgtagggagccgagaccacaccattgcattctagcctgggcaacaaga

SEQ ID NO: 159543 - DNA, 201 bp, Homo sapiens
tttctttgttcctaactataggaaataaataagagacacccttcctcatttctcaaactcactcccaccaccaatctgtgatcttgttcccccaacccccygccccctcccaatgcagtcttcctcctccaccccatcagaggtctccctgtttcaggagcagtgatctgctcctgtgggctctcttaggagtcatgctgt

SEQ ID NO: 159544 - DNA, 201 bp, Homo sapiens
aacagtgagccactgtgcccggccaacaccaggacattttaaagattgctttttttttttttttttttttgactttttctagtcatttgtttattacattkttttcaatgacaaaatattttaagcaccacaacaaatatgtggaataaaataatgaacagcatccatttcccagttgtcagattttaacattgtcttcag

SEQ ID NO: 159545 - DNA, 201 bp, Homo sapiens
atgcaagtgaattttaggtgaacttgcatttcccatgtgtgacatgtttgtttggtttttcagatcttaccaatatatttgagtccttcctgcctcagttrttggcctatcctaaccccatagatcctctcaatggtgacgctgcagccatgtacctccaccgaccagaagaatacaagcagaaaattaaaggtaagagga

SEQ ID NO: 159546 - DNA, 201 bp, Homo sapiens
tcttcacaggtgttttttattgtcaaatatgaataggtatagctttgtacaggttggtaattttaagaatttggattttggggccgggcacttgagcctgrccaacatggcaaaaccctgtctctattttaataaaaatacaaaaattagctgggtgtggtggcacatgcctgtaatcccagctactcaggaggttgagca

SEQ ID NO: 159547 - DNA, 201 bp, Homo sapiens
ttgcagtgaggtatgatcacacctatgcactccaacttgggcaacagagtgagatcctctctcaaaaaaaaaacttttttaaataaataaatgcagtagaytggtgcttatctgtcttatgaatatttgtagtcttatgtggtccatatagattcctatcctcattacccagaataattgaaaaattggttatatttacct

SEQ ID NO: 159548 - DNA, 201 bp, Homo sapiens
ggaacaaattcataggcaaagccttttattggtagcttgaggaaacttaaaagtagtaggaaagggtataaaatctctttctgggacacgctaaactcctmgttttataacacgttgtctgtgatatttctctagccctgaagcacttctgaacattacttcagaacataaaacctatgctttgtttttaaaggttttcgt

SEQ ID NO: 159549 - DNA, 201 bp, Homo sapiens
agttatatggatttggtagttaccaacatagacttcttatttttctttctttcttttttatttaaagagactgggcctcagctgggcatggtagctcacgmctgtaatcccagcactgggaggccaaggcgaagaggatcacttgagccttggagtttgggactagcttgggcaacatagaacttgtctctggaaaaaaaa

SEQ ID NO: 159550 - DNA, 201 bp, Homo sapiens
actctttaatttgtgttcaaagggtagacagttccctaaatcttttaactagttctagtgtcaattgggaacctgtggtttgcctctttatttccagtggmctctgttttagtgagatgatgagatgaaagttggcacagctttatggtcttcaagctaaaagttaaagatttggcaactctcagtgttctgaatttgtct

SEQ ID NO: 159551 - DNA, 201 bp, Homo sapiens
gtaagtttttgttcgtgaatcctgagcacatgcacgtgttgtgttaaagaggcaagaaggaacagtagagcgaatccctgtgaaaagcatgcttttccccrtgggtcacctagccagggctctgttggattggtgaacagcatgagagaaaaaaaagcactggacaatttgagctgcgtttggcaattgaggtggtgttta

SEQ ID NO: 159552 - DNA, 201 bp, Homo sapiens
accgcagcttggtatttattaattatcacccaccactctacagaggtaactatttgtcactatgaagaatgccaaagaaaatatttcctcgtaaaatttawctgcttactgtgaatgattcataaatgcctgattaaaaggtctgtgaatagagatttttatgcactgacttagctaaatgctatcttcattgagtggcat

SEQ ID NO: 159553 - DNA, 201 bp, Homo sapiens
gtaggactctttataggtttttgactactcttcttttcttgtagaatttcactgtcttttaatgtttacagactgcaagcaggataaaattaaaaattcamccattattaatattgctgctttgtaggagctggtaaaggagtagaaggtaaagatctattaattatagtgtctaatacacccttgaggaaaatctgttaa

SEQ ID NO: 159554 - DNA, 201 bp, Homo sapiens
tgtaggactctttataggtttttgactactcttcttttcttgtagaatttcactgtcttttaatgtttacagactgcaagcaggataaaattaaaaattcmaccattattaatattgctgctttgtaggagctggtaaaggagtagaaggtaaagatctattaattatagtgtctaatacacccttgaggaaaatctgtta

SEQ ID NO: 159555 - DNA, 201 bp, Homo sapiens
tatgaagaatgccaaagaaaatatttcctcgtaaaatttaactgcttactgtgaatgattcataaatgcctgattaaaaggtctgtgaatagagatttttrtgcactgacttagctaaatgctatcttcattgagtggcattgcagtctatatgtcaagttagagtaaaaactgtatttaaaatggaaaaacagaaaaggg

SEQ ID NO: 159556 - DNA, 201 bp, Homo sapiens
caggggtgacccttttatgagataccttaatcctttgcatgtctgaatacattgattctggctgtacttgaatcttgctatgtggaaaaccagattttctytttcaaatggcttgtactcccctcagtcattgtgtgttgatctcgagttgaactctgaggggccatcttacttcatgtccttggaaaaaacttcactgta

SEQ ID NO: 159557 - DNA, 201 bp, Homo sapiens
acagtgacctcctcaagaatagtgaactgtcttatttttataccctatccaagcacaatgcctgcggtgtaggtgctgaccaaatatgttctgaatgaatragagagagagagactgtggggatgggggtgatggaggatgggggtcggagatagtggtggtgatactcaccttaataaggaacttcagatattgaaagtg

SEQ ID NO: 159558 - DNA, 201 bp, Homo sapiens
  misc_feature (1)...(201): n = A,T,C or G
tcccctttcagtctgtaaggtgacacttcaagacctggtactattctgttcctcatcatacttttccccaattgggattctttttttcacagatctattanaagtatttctcttgataagtaaaaattagttgccagatacatgcaactaactttctaatttttaaaaacatgccattctttccatctgtttcaggtcagg

SEQ ID NO: 159559 - DNA, 201 bp, Homo sapiens
aacaaagttgtaaactatgatggggtaggaaacgtacaacggagtttttagcactttgctcaaaaaaaaaacaagaacaccccctaataaatggcttttgrtgatgataaacctttaagcagctcttccaactcagtgagtcgcaaattcagtaacactactggggagaatagtactctgttgtaccattgacgtagagac

SEQ ID NO: 159560 - DNA, 201 bp, Homo sapiens
tgtctgatgtttcctgatcattagattcagggcatgaacacacttaaggccagaaaactacaaagtaagatggtgtccttcttggggtatcacattcagasacacacaaggtctgtctgccccttgtgttctcagcacctggttcaggtgttgtctggtttctccattgcatagttactattttcccctttcagtctgtaa

SEQ ID NO: 159561 - DNA, 201 bp, Homo sapiens
atatttttaatcatattgcaaatgtatgtcttttgactgtcctgtctgtatcattgtctgagtctacactttgctgtcttttgctctagaaagccatcagscttggccagaattccctgtggtagcttgctcaggacctgcctaacccacgtgtttcccagcagcctcccttcttttttcctttaaattttaattatgtgt

SEQ ID NO: 159562 - DNA, 201 bp, Homo sapiens
ggtgttttttggagtcatttgatcttacccaacaaagttgtaaactatgatggggtaggaaacgtacaacggagtttttagcactttgctcaaaaaaaaaacaagaacaccccctaataaatggcttttgatgatgataaacctttaagcagctcttccaactcagtgagtcgcaaattcagtaacactactggggagaat

SEQ ID NO: 159563 - DNA, 201 bp, Homo sapiens
gtatacgcctgtacaccttctccttttgagagggcttttctgttgtgttgtggttccctgtccccagtttattcatcttctaactttagggtgtttctgtytactcagccatttaaaactcttatgttggttagtgataggactttaaagcctttatagaagtccatgcaagttcattcagatacatttcataaatacctg

SEQ ID NO: 159564 - DNA, 201 bp, Homo sapiens
ttttgaaaaaattggtcttcctgaggtataatttatatgcagtaaaattcagcaattttaagtgtatacatttgatgagttttgacacatgtatacctcgycacaatgatgatattccattaacctttctatacacagttgccagattaattttcctaaaattgtgctttgcatccgtcatctacctcggcataaaacctt

SEQ ID NO: 159565 - DNA, 201 bp, Homo sapiens
ctgcctttcatcttggctgccagagtgatcctgttttgtttttgtttttgttttttgagatggaatcttactctgtcacccaggctggagtacggtggtgygctctctgctcactgcaacctccgcttcccgggttcaagtgattctcctgcctcagccttccgagtagctgggattataggtgcccaccaccacacctgg

SEQ ID NO: 159566 - DNA, 201 bp, Homo sapiens
ctaaaggctaaaaactggcatgctaagtctagttttgttaaccccacattcctagtcagaaaggaaacaatagagcttgttgaaactaagagtgaacttayagaaatgcaatttcatatcctgtagaaatgttatttctcagaccttaatgtatttttctagataatatgattatctcatcataactttctaggtaataat

SEQ ID NO: 159567 - DNA, 201 bp, Homo sapiens
cctctgtttctggaggggagttgtttaaaaggttgatttttggtcgggcatggtggctcacgcctgtaatcccagcacttcgggaggccaaggtgtgtggrtcacttgaggtcaggagtttgagaccaccctggccaacatggcaaaaccccatctctactaaaatacaaaagttagccaggcatggtggggcgctcctgt

SEQ ID NO: 159568 - DNA, 201 bp, Homo sapiens
atatttagttggcgctgtattatagtacatgtttgaaaaagtgtttaaatattggatagcccgtagcactgggcaccattggagctgtctaaagctgtcayttccctgctcaaaaccctttgctgggtgacatctttgcctgccattcagggctctctgatactgagtggaatctacatctttgcccttactccttttttt

SEQ ID NO: 159569 - DNA, 201 bp, Homo sapiens
ccgcctcccaggttcatgccattctcctgcctcagcctcccaagtagctgggactacaggtgcccgccaccacacccggctaattttttgtatttttagtrgacggggttccactgtgttagccaggatggtctcgatctcctgacctcgtgatctgcccgtctcaacctctcaaagtgctgggattacaggtgtgagaca

SEQ ID NO: 159570 - DNA, 201 bp, Homo sapiens
tggagaggatggctgtggtttgggatttgatttttggtaggcttttttttttttttaattgttagaacttgagtgtgataaatggcttcttttttttttttaagtgggaagaaaatacaagatcattaaccacttgtgcatattctatttcaaatggcttagaaatttaaagcaaacttgttaaagtttgtagaagctgag

SEQ ID NO: 159571 - DNA, 201 bp, Homo sapiens
cactaaagcctcctgtgatgtctttcctgattccgcttccctccctgtcttcttgaattgtcatcataccattcatgtttattttctcatatatgtatgtwtgtagtattttgtatgtttatataaatatacattttgattcaatattacttttaagatttattgatattattagaagtattctagtagctttacttcatt

SEQ ID NO: 159572 - DNA, 201 bp, Homo sapiens
aaggttagttcataattggtgagttctgaatcacttcatttcctgcagtggttcctgagagaatcttagttcaaaggactgcccccgccaacccctgcccygccaaaaaaaaaaaaaaaaaaaaaactaacactaaataactaataggagaaagttggcgtgtcaacataaatattcaactgaaaagcaaaaggctaagcc

SEQ ID NO: 159573 - DNA, 201 bp, Homo sapiens
tgtgtgtttatttgcataatgttcatatatatatgcataaatatttacatgtaatagaaattatagttttataaaatatttaccctgaaaaaatatttacrcatacaatgtgagagatgcatacttgagatatgaataaatatcccttcatttaaaaataagctgatcaggacaatatttgacaaataatagtctaatgta

SEQ ID NO: 159574 - DNA, 201 bp, Homo sapiens
gaccctgtctctatttaaaaaaaaaaaaattagctgggtatggtggcacatgcctatagtccaatttacttggaagactgaggctgggaggttggcttgarcccaagagtttgaagttgcagtgaggtatgatcacacctatgcactccaacttgggcaacagagtgagatcctctctcaaaaaaaaaacttttttaaata

SEQ ID NO: 159575 - DNA, 201 bp, Homo sapiens
gagcaagactctgtctcaaaaaaaaaaacaaacaaaaaaaccccacaaaaactgtcttcaattcttttaagacccagcatctgaatacctttcagagtggrgggttttgtaagctgtagaaaatggctgtgtgaaatagccatataaatagagtgaaatagaattgggaaaattgtccttcaaagtgaatgtcaggtatat

SEQ ID NO: 159576 - DNA, 201 bp, Homo sapiens
caaagtaattttaccaaactcacattcccatcagcaacatatgagagttcctgtttattcatatccacaccatcatttatccagctttctaacattttgcytatctgatggatgtgaaatggtatcccagtgttttctcagtttattttctagtcaaatatttttggtgccttctttctgtcagaccctgtgcaaagcagt

SEQ ID NO: 159577 - DNA, 201 bp, Homo sapiens
ctttcatccatgtgccttgttttttggtgctttttttttttttttttttttactttgtttttgtttttgagacaaggtcttgctcagttacccaggcttgmgtgcagtgacacaatcatagctcactgcagcctcgacctctcgggctcaagtgatccttctacctcagccacctcagtagctggtactataggcgtatac

SEQ ID NO: 159578 - DNA, 201 bp, Homo sapiens
ccactgcacccagccaccttttttgagaggtgggaggagggaagagtttggtgtgttttttaagcatcccacttcttttcggaggtgttttcacctgtttytgtttttttattttgttttgttttgttgcctgcatggccctcttcattaagactttatcttttaaagatccccatgggctaatatgagaagatatgtgaa

SEQ ID NO: 159579 - DNA, 201 bp, Homo sapiens
agtgatctgcccacctgggcctcccaaagtgctaggattacagtcatgggccactgcacccagccaccttttttgagaggtgggaggagggaagagtttgktgtgttttttaagcatcccacttcttttcggaggtgttttcacctgtttttgtttttttattttgttttgttttgttgcctgcatggccctcttcattaa

SEQ ID NO: 159580 - DNA, 201 bp, Homo sapiens
ctctttcttttttgagacagagtcttactctgtcgcccaggctggagtgcagtggcgcaatctcggctcactgtaacctctgccacctgggttcaagcagwtctcctgcctcagcctcccaagtagctgggattacaggcgcctgccaccgcacctggctaattttgtggttttagtagagatagcatttcaccatcttgg

SEQ ID NO: 159581 - DNA, 201 bp, Homo sapiens
ccctttaactattcgccctaggcaaccacgaatctgctttttgtttctgtggatttgtcttttctggacacttcttagaaacgtaattatataatatgtgrtcttttgtgactgttttttttttcactttgcataatgttttcaaggttgatccgtgttgcatgtatcggaatttcttatggctgaataatatttcattgt

SEQ ID NO: 159582 - DNA, 201 bp, Homo sapiens
catcccaacattgatgaagcgtaagtaactattttaaaatgtttcaattttagcagcaactgctcatgattagtgtttctctgtgttataaaaagcctcgrttatctttttggaccttatcaggaggtaggactgtatgaatggtcatgtaaatgatagaatccaaaggatatgaggttctcaatcacttagttcacattc

SEQ ID NO: 159583 - DNA, 201 bp, Homo sapiens
tggagacaatctctgtagcgcctcacttgaggctcctcctccagtgccatttctctgcatctttcctgactcttcccgttttactccgcctactgtatcartactttattcagattgcaggtatttattggtgtctcttgtcccactgccacagtgacctcctcaagaatagtgaactgtcttatttttataccctatcca

SEQ ID NO: 159584 - DNA, 201 bp, Homo sapiens
ctttttattttttaagatatataataatagttttacattaagtgtgatttggattccttctccagaattataaattacctaattcccttctgctaaaagaygcaggacagagaagggtaagcattttagctggacatttattcctgttgtacgatcctccccatcccctttaacgagtgctagaactacgccagagaataa

SEQ ID NO: 159585 - DNA, 201 bp, Homo sapiens
tttgtttttatttttgtttttttgagacagagacttgctctgtcgccaggctggagttgaagcacttctcctgcctcagcctcccaagtggactacaggcrcgtgtcaccatgcctggctcttttttgtatttttagtaggcacagggtttcaccgtgttggccaggatggtcttgaaccccagacctcatgatccgcctg

SEQ ID NO: 159586 - DNA, 201 bp, Homo sapiens
tggaaaaataggtgaagcttggcctcatttatttacatattgaccccaatgtcagaagttactcagaagtgtgtgcaactctgtatagaccccttcctggractggacacagaggctgaaataaaaaccagtttttcagcatgacttagcacaatgttatttattttcactgcctattagcctatgggtcatgagatttgt

SEQ ID NO: 159587 - DNA, 201 bp, Homo sapiens
ctaattctaacattactgcatgcttactgtatgccagttactgttcaaatgctttacatatattaactcatttaatcttcacgattaatgatgtgtagatwccattatttaacctagttttaggaataagggaacagaaaggcaaagagatgaagtagattgccccagaggctcacacagtggcatttaggcattctgact

SEQ ID NO: 159588 - DNA, 201 bp, Homo sapiens
aagtgctggaattacaggtgtgagccactgcgctcagctacaataaattgttaattatggtcaccttcgaatgcacactaagacttatttctcttatctayctgtaatttggtatttgttaaccgatctctggctacctccccaccagactctagtaaccactattctgctccatttctatgaaattaacttttttagctc

SEQ ID NO: 159589 - DNA, 201 bp, Homo sapiens
gttctcaggacctcctggggctgtgtcacacaaataataaatattaaaaataaaaattataattgtattttccatttctagtgtgacagagttatgggaarcatatgtaaatcataatatcctctcatgttcttcacacttgtaagagcattaagagatggacacatagggtaaatattaatcagttttaggatgaagaca

SEQ ID NO: 159590 - DNA, 201 bp, Homo sapiens
ctcaaacctgggtcggtttgaagtgaaagcttatgttcttgccactgagtgtatcatatgacctcttagagtacattactgtaatatctgatttacaaagrtctttttatttcttgtgtcggcttccctctgtttctggaggggagttgtttaaaaggttgatttttggtcgggcatggtggctcacgcctgtaatcccag

SEQ ID NO: 159591 - DNA, 201 bp, Homo sapiens
ccagctaattttttgtgttttttagtagagacggggtttcgccacattggaggctggtcttgaactcctaacctcagatgatctacctgccttgaatcccraagtgctgggattacaggcatgagccacgacgcccagccaagatttttcaaagaacactggaaacttgaataccaaaggcactacatagatactccataa

SEQ ID NO: 159592 - DNA, 201 bp, Homo sapiens
acaaaagtaaggcttgtagatgtgaactagactgttgcaaagttctggagaggatggctgtggtttgggatttgatttttggtaggcttttttttttttttaattgttagaacttgagtgtgataaatggcttcttttttttttttaagtgggaagaaaatacaagatcattaaccacttgtgcatattctatttcaaatg

SEQ ID NO: 159593 - DNA, 201 bp, Homo sapiens
cagtgacctcctcaagaatagtgaactgtcttatttttataccctatccaagcacaatgcctgcggtgtaggtgctgaccaaatatgttctgaatgaatgwgagagagagagactgtggggatgggggtgatggaggatgggggtcggagatagtggtggtgatactcaccttaataaggaacttcagatattgaaagtgt

SEQ ID NO: 159594 - DNA, 201 bp, Homo sapiens
aggaaaaaaactaacacacacacacactacatttataaactttgaattttagttttgtggcaattcatttaggtaaagtgtgtgtgtgttttttttttttktttgtttttgtttttggagacaatctcgctctgtaacccaggctgagtacaatggcatgatctcggctcactgcaatctctgcctccctgttcaagcagt

SEQ ID NO: 159595 - DNA, 201 bp, Homo sapiens
tagctgggactacaggcacctgccaccatgcccagctgtgtttttttttttttttttggagacggaatcttgctgtgtcgcccaggctgaagtgcagtggygtgatctcggctcactgcaagctccgcctcccaggttcacgccattctcctgcctcagcctccagagtagctgggactacaggcgcccgccaccactcct

SEQ ID NO: 159596 - DNA, 201 bp, Homo sapiens
agcagaggatacaaaatggttttatgtctaatccaaaagaatgcagattaaaacgaaagtacagtatatgatttgtcaaactggcagataaaacagtgttrgaaaaggtattatgatacagccagtctaccactatgtattgcttggtaaatattttatatccttcaaataattttatttaaaaagttaaaaattatctaa

SEQ ID NO: 159597 - DNA, 201 bp, Homo sapiens
cactgcaacttccacctcccaggttcaagcaattctcctgccagtagctgggactacaggcacctgccaccatgcccagctgtgtttttttttttttttttggagacggaatcttgctgtgtcgcccaggctgaagtgcagtggtgtgatctcggctcactgcaagctccgcctcccaggttcacgccattctcctgcctc

SEQ ID NO: 159598 - DNA, 201 bp, Homo sapiens; identical to SEQ ID NO: 29855

SEQ ID NO: 159599 - DNA, 201 bp, Homo sapiens
taaaaatacaaaaattagctgggtgtggtggcacatgcctgtaatcccagctactcaggaggttgagcatgagaatcatttgaacccaggaggcagaggtygcagtgagtcttgattgtgttgctgcactccatcctgggtgacagagcaagactgtctcaaaaaaaaaaaaaaaagaatttggattttttggacaatgtc

SEQ ID NO: 159600 - DNA, 201 bp, Homo sapiens
cactttgaccacctaaacagtgagccactgtgcccggccaacaccaggacattttaaagattgctttttttttttttttttttttgactttttctagtcawttgtttattacatttttttcaatgacaaaatattttaagcaccacaacaaatatgtggaataaaataatgaacagcatccatttcccagttgtcagattt

SEQ ID NO: 159601 - DNA, 201 bp, Homo sapiens
gttttaattctgcctttgacagctcattattatataatcttttcatttgctatttaaaacttccatcacacttgctgcctaggttagttcctactctgtaytgggtgacctctagcttttgagctggttattctgacatctttttggcattaaatctatttctttccctttaggatttggtgtcataatgaaaacaagtat

SEQ ID NO: 159602 - DNA, 201 bp, Homo sapiens
ttgtttttgtttttgagacaaggtcttgctcagttacccaggcttgagtgcagtgacacaatcatagctcactgcagcctcgacctctcgggctcaagtgwtccttctacctcagccacctcagtagctggtactataggcgtatactaccacacctggctaaattttgtatttttttgtagagatggggtttcaccatgt

SEQ ID NO: 159603 - DNA, 201 bp, Homo sapiens
gcctcaagtgatcctcccactttgaccacctaaacagtgagccactgtgcccggccaacaccaggacattttaaagattgctttttttttttttttttttttgactttttctagtcatttgtttattacatttttttcaatgacaaaatattttaagcaccacaacaaatatgtggaataaaataatgaacagcatccatt

SEQ ID NO: 159604 - DNA, 201 bp, Homo sapiens
gctatgagaatataagccattgttaaaagctcttttactggtgttctgaaaataacatttttcaaaaattatgtctggcagctgaggctttggctgtggcmtacatcatccttccaatcagtttcacaaagttattggatacctactgcgagctgggcgttattctgggtgctgtagatacagaagtgaacaaattgctct

SEQ ID NO: 159605 - DNA, 201 bp, Homo sapiens
ttgtataggctggttgtgagctcctggcctcaagcatccagcccatgctccttagttttcagtgggacaacaaatggtcttcacaggtgttttttattgtsaaatatgaataggtatagctttgtacaggttggtaattttaagaatttggattttggggccgggcacttgagcctggccaacatggcaaaaccctgtctc

SEQ ID NO: 159606 - DNA, 201 bp, Homo sapiens
gttcataatctgcttatctaataattcaaatgctttgtttgccctgctgaggtcagactttggcctactctgtgaatgaatcagtttttgctgttgttacrgatggtagagttgagtcaagatgttaatggcccttgtccaatatggggagctagttaagaatgtcttctgattctatcctgtggagtgagagtatctatt

SEQ ID NO: 159607 - DNA, 201 bp, Homo sapiens
aaccccagacctcatgatccgcctgcctcagcctcccaaagtattgggattacaggcgtgagccactgagcccagccaaatttttttttttttttttttttaattttgagatggtatttcgccatgttgcccaggttggttttaaactcctgggctcaactgacccgcctcccaaagtgctggaattacaggtgtgagcca

SEQ ID NO: 159608 - DNA, 201 bp, Homo sapiens
caggaggcagaggttgcagtgagctgagatggcgctgctacactccagcctgggcgacaagagtgagactccgtctcaaataaaatgaattttggggctgrggaggcaaaattccattcagatcacctatgtacttctctaataaccgtggttatgactttagtcctgtcccaaacagttacataatggctactctgtagt

SEQ ID NO: 159609 - DNA, 201 bp, Homo sapiens
taacctcttgatcccccttcttggcctcccaaagtgctggaattacaggtgtgagccaccgctcccagccgcaaatggaacttttgcaggtggtttggccrttagccgtgtacatgcttagagtgtgtttaggctagtggacaggatgttctctgtgtgtactgtgtaaccttgaggctttgcgtctatttctatttccct

SEQ ID NO: 159610 - DNA, 201 bp, Homo sapiens
aatacacatttagctaagaaggaatattggtggcgtgtgaagatggtaagtgtttttatgtcagtaaacagtgtctggtttatcttgtattttatagattstgagacctttttttcccacatcttaacatctttgaaattgagatgtcttaaaatggtgataagtcatagtctaatgggcagcttttttctttcttggtgt

SEQ ID NO: 159611 - DNA, 201 bp, Homo sapiens
ttatgtcttcctagatggaatcattctagagttactccctcaagaactagcatgagtaacttcattgagcagtatttaagcagggatgggccagtatttgsagtagagaggagtttgtcattcacaagaggtttcaggttagtcatttaacaaaggcctacttgtaccactgtattttcacaaataaaatgaattctgtga

SEQ ID NO: 159612 - DNA, 201 bp, Homo sapiens
tgctggggatggtaggagttctcttgaaagacaggcagagttaggagggtctgggccacttagcccgtttgcttttgctttggccacaggtacgggcaggytgttttacaaggagttaaagttctgcttctaaacagatgcctttctgtttcagtgtttcttcctagtgctctgaaaaccatatgtggggaaaatagttcg

SEQ ID NO: 159613 - DNA, 201 bp, Homo sapiens
gggcaacaagagcgagactccatctccaaaaaaaaaagcaaagtgggctgggcgcagtggctcacacttgtaatcccagcactttgggaggccgaggcagkcggatcacgtggtcaggagtttgagactagcttggccaacacagtgaaaccccatctctactaaaagtacaaaaattagctgggtgtggtggcgggcgct

SEQ ID NO: 159614 - DNA, 201 bp, Homo sapiens
atagtgtgttagaagacgtttaaatatactctttgcataattataatgaccattactttagatttttgtcttttggtgtcagattaaaccagctttaaggycccactgttctttaagctgttagcaggaaaataataaacatatcttaagtctaattttgaatgccagattgcaagaatgaatgttacatagtatgtgttt

SEQ ID NO: 159615 - DNA, 201 bp, Homo sapiens
tttaagctgtgaaacagagaaagtaatgaggaatcttctagtgagtcccaccagtctcccagcctgaccagcacatccagaaatcgatcattatttttgtyattttaacctgccttcttagtgccttccttgcccttgactttgcagcagagaggagaaagaaactcgtggtctctcccataaatacacgtggtaacagca

SEQ ID NO: 159616 - DNA, 201 bp, Homo sapiens
tgggtttatttaatgagtttttaccagaacaatgtctgaaggatattttatatttttaagctgtgaaacagagaaagtaatgaggaatcttctagtgagtsccaccagtctcccagcctgaccagcacatccagaaatcgatcattatttttgttattttaacctgccttcttagtgccttccttgcccttgactttgcag

SEQ ID NO: 159617 - DNA, 201 bp, Homo sapiens
gattccttgtaaacatatcccccccaaagcactatttttgtgatacttacatattaatggattaacagacatatctttttttttttttttttttttttttwaccaaaaaacaaaaaaccaggtagtgaaaattgccaagtttcttcagctttcctagtgtgactcatctccaggagagtaggaagcaggtgggtctgaaca

SEQ ID NO: 159618 - DNA, 201 bp, Homo sapiens
aaagtatcttaatctgaacgtggtacacctattgattgtagtaggtccctgactcttgaaggaattaatttggaaggttttcagaagattaggggataatrtttaatttacactcagatttattttctaatttggagatgtagttctgatgaacatttttacttttatttcagcaccatatgaaggcggagtatggaaagt

SEQ ID NO: 159619 - DNA, 201 bp, Homo sapiens
ctgcagcctccaattcctgggctcaagcaatccttgtgcctcagcctctggagtaactgggactacagatgcatgccactgcacccagttaaaggctcttwacccttctgaggctcagtttcctcatctgtaaaatggatggatgtcctcatgagttattgaggggctcgaatgaaacatacaggccttagatgcttggaa

SEQ ID NO: 159620 - DNA, 201 bp, Homo sapiens
atggccttgcagctcactccttggagctgtggttctttgaggtgtaggtcagaaattcacggggtgcttcatcaaagtgtgcatgtctgatgaatacctaycccctgcctgcccctctctaggtatcagtggggcggggaatgtcactctcctggtgattcttgtacatgtttcttcttcccatttccggccatttttccc

SEQ ID NO: 159621 - DNA, 201 bp, Homo sapiens
aaaggtctctaaggaagtgccatttagacacaccataaaggcctggtgcagtggctcacactgttaatcccagcactttggaaggccaaggcaagaggatygcttaaggccaggagtttgagaccagcctcgccaacacagcgagatccccatctctatttaaaaaaaaaaaagacacaccttaaaggataagaatcagca

SEQ ID NO: 159622 - DNA, 201 bp, Homo sapiens
tatttttaatcatattgcaaatgtatgtcttttgactgtcctgtctgtatcattgtctgagtctacactttgctgtcttttgctctagaaagccatcaggsttggccagaattccctgtggtagcttgctcaggacctgcctaacccacgtgtttcccagcagcctcccttcttttttcctttaaattttaattatgtgtg

SEQ ID NO: 159623 - DNA, 201 bp, Homo sapiens
aatcttttgtaaataactttaagagcagcctaggaaccctgtcatcatttatacttcttaaaaattagaaaactgtgttataaggtacaggtaacaagttkagaaaccaatttgtgaaatgctaccgatctatatctacatattttcagtgaggaggaccctctactaggagcaggctgtatgcattgcctctgggttgca

SEQ ID NO: 159624 - DNA, 201 bp, Homo sapiens
tcttttattttatgaacttgttatcagtaaatttaggactcagtggtccctgaatccttggtccttgacctgttattgtcagtccttaaggcccagacatygcctttggcttcctttctggaaaatttcagaactgtataaaaatcacttgtaaaactctgacagacacattttgccaagaatgtcatttatctcttgaca

SEQ ID NO: 159625 - DNA, 201 bp, Homo sapiens
gttcttcctgcatgtttttctcatgtgcgcaatggtttcgtctcccctccacccttagaatttgcaggtctaggtcttccgcctgtgcttcccttcatgcyatagcccccatgtgacaggtgctagagactgtgtgacagccataactaaatgccacttgggacttctgcacagcatgtcagatgcacagctcattgtttg

SEQ ID NO: 159626 - DNA, 201 bp, Homo sapiens
tcgtgatccacccgccttgacctcccaaagtgctgcgattacaggtgtgagccaccgtgcctggcctagtaggatgtttttaaatagatattttggggagrgggagttggggggaagaaataaatagatgttttcattaggattttgcagagggccacctgattatttgtatgtctttgtatcatttacggggaaattata

SEQ ID NO: 159627 - DNA, 201 bp, Homo sapiens
actatttgtcactatgaagaatgccaaagaaaatatttcctcgtaaaatttaactgcttactgtgaatgattcataaatgcctgattaaaaggtctgtgartagagatttttatgcactgacttagctaaatgctatcttcattgagtggcattgcagtctatatgtcaagttagagtaaaaactgtatttaaaatggaaa

SEQ ID NO: 159628 - DNA, 201 bp, Homo sapiens
ttctctttgagatagttgatgaaaggtgcttcatatcttagtaagtttttgttcgtgaatcctgagcacatgcacgtgttgtgttaaagaggcaagaaggracagtagagcgaatccctgtgaaaagcatgcttttccccatgggtcacctagccagggctctgttggattggtgaacagcatgagagaaaaaaaagcact

SEQ ID NO: 159629 - DNA, 201 bp, Homo sapiens
ggccgtagacactgcataccctggtatgcaagcctgaggaagccttgctgtggtctacaatccttggaaacaaattctctccagccaacgaggaagcggartgcaaggaacctgctggtgtggggatttccagattttggtgcctgagtaattgctaccttggcctcctccaaatcaaagaaattaacagcttgttaaaca

SEQ ID NO: 159630 - DNA, 201 bp, Homo sapiens; identical to SEQ ID NO: 29863

SEQ ID NO: 159631 - DNA, 201 bp, Homo sapiens
gcatatatatatatacacacacacacacacatatacacacacatatatatacacacacatatatacacatatatatacacacacacacatatatatatatwcacatatatatacacacacacatatatatactttttgtagaaatggggtcttgtcctgtctgtttttgaactcctgacctcaagtgatctggctaccttg

SEQ ID NO: 159632 - DNA, 201 bp, Homo sapiens
tcataaagactgtaatttcatttcattttcataaattgtatgttttttcttttttcttttttttgttttgagatggagtctcactctgttgcccaggccgragtgcagttgtgtgatctcggctcactgcaagctctgcctcctgggttcacgccattctcctgcctcagccttccgagtagctggggctacaggtgcctg

SEQ ID NO: 159633 - DNA, 201 bp, Homo sapiens
tttttttctcttggctaagctagatcatgtggtagggtttgcgcatgcgcgtgcgtgcgtgcgtgtgtgtgtgtgtgtgtgtgtgtgtgtgtgtgtgttttgagcgcatgcgcacgtgtgtgttttgagacaggatttcactctgttgcccagatgagagttcatggtgtgatctcagctcactgcagtcgtggccacttg

SEQ ID NO: 159634 - DNA, 201 bp, Homo sapiens
agtaaagttgctatgaacattgtatggatatacgcttttttttctcttggctaagctagatcatgtggtagggtttgcgcatgcgcgtgcgtgcgtgcgtstgtgtgtgtgtgtgtgtgtgtgtgtgtgtgtgttttgagcgcatgcgcacgtgtgtgttttgagacaggatttcactctgttgcccagatgagagttcat

SEQ ID NO: 159635 - DNA, 201 bp, Homo sapiens
gtaaaatttaactgcttactgtgaatgattcataaatgcctgattaaaaggtctgtgaatagagatttttatgcactgacttagctaaatgctatcttcaytgagtggcattgcagtctatatgtcaagttagagtaaaaactgtatttaaaatggaaaaacagaaaagggccaggcaaggtgactcacacctataatccc

SEQ ID NO: 159636 - DNA, 201 bp, Homo sapiens
aaattcagctttttgggaaaaaatgtttcgcagatgtgacccataaacgtccctcctgtatttgtgtatgtatgttagaacaacctaagtttgttggttttctagtgttgcaattttcttagccccttgacctgcattttatagatatatttaaacattggtattcttttcagtcttaacagatttgatggttccaagaat

SEQ ID NO: 159637 - DNA, 201 bp, Homo sapiens
cactcaagcgacctcttttatccctaattcctttctatattaggaagagagtctcctgctcagggccccctcttctaagaaagagctctgtgtgttttcartcagtccctcctgttaagctttctggtccccgggagaaccctactgttttcctttccactgacaaagcctgtcccacccatagttgtatgtgatgaagac

SEQ ID NO: 159638 - DNA, 201 bp, Homo sapiens
gctcagtgagcaaacctggggctctgaaccgtccccttgtatgtttttcatggccttgcagctcactccttggagctgtggttctttgaggtgtaggtcasaaattcacggggtgcttcatcaaagtgtgcatgtctgatgaatacctaccccctgcctgcccctctctaggtatcagtggggcggggaatgtcactctcc

SEQ ID NO: 159639 - DNA, 201 bp, Homo sapiens
cctataatcccagcattttgggaggccgaggcgggcggatcacgagatcaggagattgagaccatcctggctacggtgaaaccccgtctctaccaaaaatrcaaaaaattagcttggcctggtggcgggcgcctgtagtcccagctgcttgggaggctgaggcaggaggatggcgtgaacctgggaggcggagcttgcagt

SEQ ID NO: 159640 - DNA, 201 bp, Homo sapiens
cttcaggcagtggttttggttggagtccagactgattatttcaggaccagctagagaaattcgcgaaggttcctgtgacaaatcgagaattttttttttttgaagggtagtttagagggtagggggagcccagagttctgaacagctagtccttggggaggggggcaagtgggggcttagagggtggtagtgtggaacaca

SEQ ID NO: 159641 - DNA, 201 bp, Homo sapiens
tttcctccaaccacaatgctgcttgaactggggtcactcaagcgacctcttttatccctaattcctttctatattaggaagagagtctcctgctcagggcsccctcttctaagaaagagctctgtgtgttttcagtcagtccctcctgttaagctttctggtccccgggagaaccctactgttttcctttccactgacaaa

SEQ ID NO: 159642 - DNA, 201 bp, Homo sapiens
agtggggcggggaatgtcactctcctggtgattcttgtacatgtttcttcttcccatttccggccatttttcccacctgacattttctccctgctccttayattacatagttctttatgatctttctcctgtgttttgtattccttctctgagagagaggggctccagttgcaatgaggttcaaatgatggttttagtgtc

SEQ ID NO: 159643 - DNA, 201 bp, Homo sapiens
tttttaaaacttgaattttctctgtaagacattgcatacttgttgaaagcagacattaaatgataacctaacaaatacttaacttaattctagatgcctawctgtttctcaggataccttgtaggttcctcttctcttaaatactggctttactcagggctgggcgcgtgactcacaactgtaatcccagcactttgggag

SEQ ID NO: 159644 - DNA, 201 bp, Homo sapiens
gagggtgactggtcagagtaggcatgcatgtgtcatttgaccaagcaagaaataaagccagttttcctatgtggacagtattgaatcattttagtgtgcaygtttctaaggtagtaagttatcgtttagaaaagaattagatcaaattagcctagactgaactatcttatttaaatatctcttgtggatgctcagggctct

SEQ ID NO: 159645 - DNA, 201 bp, Homo sapiens
taagctggttataatgccggttaaactttgtgtttaggatgttaaagtcctggaatgaatataattacctgcctatataaaaaaagctgaagtcatttgaygaaaagttaacaagtgcaggcatgtgagctatttgaaaatttaaaatgcatctgagagagctttctaagattcagagggttttatggattttttctggct

SEQ ID NO: 159646 - DNA, 201 bp, Homo sapiens
gtttttcttagataccccttgaatcggatctgtttaatggaagaggatttttctgttaagctggttataatgccggttaaactttgtgtttaggatgttaragtcctggaatgaatataattacctgcctatataaaaaaagctgaagtcatttgatgaaaagttaacaagtgcaggcatgtgagctatttgaaaatttaa

SEQ ID NO: 159647 - DNA, 201 bp, Homo sapiens
atggcgctgctacactccagcctgggcgacaagagtgagactccgtctcaaataaaatgaattttggggctgaggaggcaaaattccattcagatcacctrtgtacttctctaataaccgtggttatgactttagtcctgtcccaaacagttacataatggctactctgtagtgatctatatcttttttttttttttttga

SEQ ID NO: 159648 - DNA, 201 bp, Homo sapiens
gggatagaagcacagttataaaagcttttgtagccggagatgctggtggcttggacaaggctgccaaggtcaagaaactttgttctagacatacaccgatstgaagacatgtggctccattaaggaaatcatccaagctggactgcagtggcataatcgtggctcactgcagcttggacctcctggactccaggcatgggc

SEQ ID NO: 159649 - DNA, 201 bp, Homo sapiens
acgggatagaagcacagttataaaagcttttgtagccggagatgctggtggcttggacaaggctgccaaggtcaagaaactttgttctagacatacaccgmtctgaagacatgtggctccattaaggaaatcatccaagctggactgcagtggcataatcgtggctcactgcagcttggacctcctggactccaggcatgg

SEQ ID NO: 159650 - DNA, 201 bp, Homo sapiens
atttccagatcctactgtctagcgtagtgcctggcacctactcacactattcatttaaccagtttctgttgagcatccactgacacgtagccgaggctagkcactcagctacatgtcaggaataaaggcaaataaggttcttgccctcttggaagtcgaatttcgttcgaggtgagggaggatataaaaagacaaaatagt

SEQ ID NO: 159651 - DNA, 201 bp, Homo sapiens
agacggggtttcaccgtgttgtccaggctggtcttgaactccagacctcagacaatcagccttcctcggccttccaaagtgctgggattacaggcatgatmctgttttttgtacatctgattatgctacttcttgcctaaaactccttagttgctctttagcacccatggtttaaagcctaaccttggtataaaaatcggt

SEQ ID NO: 159652 - DNA, 201 bp, Homo sapiens
gtgaagttttatggaccacaaggaagtaagtacatgtgttggtatgtgttcttctattacagtcttttactctgtttcttaatagaatatcaaagacagatggtagcatgcgtagtttctgaaaagcaagtttagttggactgcagaaccagtgaggaaatctttctcttatcacaatcactttatatacagtcatccctt

SEQ ID NO: 159653 - DNA, 201 bp, Homo sapiens
ttagtagagacggggtttcaccgtgttgtccaggctggtcttgaactccagacctcagacaatcagccttcctcggccttccaaagtgctgggattacagkcatgatactgttttttgtacatctgattatgctacttcttgcctaaaactccttagttgctctttagcacccatggtttaaagcctaaccttggtataaa

SEQ ID NO: 159654 - DNA, 201 bp, Homo sapiens
gcttagaaatttaaagcaaacttgttaaagtttgtagaagctgagttgttgatttctgtggtggataaaagccagtgctgtatctggaaactgttttcctrtttttcttagataccccttgaatcggatctgtttaatggaagaggatttttctgttaagctggttataatgccggttaaactttgtgtttaggatgttaa

SEQ ID NO: 159655 - DNA, 201 bp, Homo sapiens; identical to SEQ ID NO: 29856

SEQ ID NO: 159656 - DNA, 201 bp, Homo sapiens
tgatcggaaaggtctctaaggaagtgccatttagacacaccataaaggcctggtgcagtggctcacactgttaatcccagcactttggaaggccaaggcargaggattgcttaaggccaggagtttgagaccagcctcgccaacacagcgagatccccatctctatttaaaaaaaaaaaagacacaccttaaaggataaga

SEQ ID NO: 159657 - DNA, 201 bp, Homo sapiens
gcagccatgtacctccaccgaccagaagaatacaagcagaaaattaaaggtaagaggatgggtagtttaacctggagacaaaagaacttaaatctgttggrcttcagtcattaaaagtccttcttaaattacttagttcctaatactttttcttaggcctaaaaagagacagctgtgggctgaagtagtgctcaccaacct

SEQ ID NO: 159658 - DNA, 201 bp, Homo sapiens
aacatggtgaaaccctatctctacgaaaaaatacaaaaattagctggttgtggtaatcccagctacttgggaggctgaggcaggagaatctcttgaacccrggaggcggaggttgcagtgagcaaggtgctgcaccaccacactcctgcctgggtgacgaagtgaccttatctcaaaaaaaaaaaaaaacacctagtattg

SEQ ID NO: 159659 - DNA, 201 bp, Homo sapiens
gccattgcactccagcctgggcaacaagaatgaaactctgtctccaaaaaaaaaaaaaaaaaagagagagagagagacccgggtgtcaggagtatggtctrtattgtcaccaaaaatgacaggagttggggcagagagcaacttgggggccaagccaggtgctgaagttctcagtgagagaagccagtggtcaaatgggcc

SEQ ID NO: 159660 - DNA, 201 bp, Homo sapiens
attattaacattttagtgtctctgttttattctgtataaaaataataggaccattacatggagttatgaagatagtgtatgaataaaaagcctaggcatcyttagaagtacgttttaaaaaggagaatagggccttggaaaagcacagagttgagtctatcagagaaggcttcctggtggaagcagaatgtcatagagaca

SEQ ID NO: 159661 - DNA, 201 bp, Homo sapiens
caaatcccttcagtttcaggaaaaaacttcagagcatcaggcaagctcctaatgtgctttgcacttggctgttccctctatagtgaccttctcctctcctyttggtaccaggtggctcctctttcacctccttcaaagcaagtcactttctcaggaagtcccttcctgaccatctcatttaaaattgccaccccgccccaa

SEQ ID NO: 159662 - DNA, 201 bp, Homo sapiens
tagcacagcacccagttgtatatatattttttaattttaaaattattttttaatacatagaaacagagttgcactctgttgcccaggctggaatgcagtgktgcgataatagctcactgcagccttgagctcctaggctcgaacagtcctcccatctcagcctccccagtagctgggactataggtgcatactaccatgcc

SEQ ID NO: 159663 - DNA, 201 bp, Homo sapiens
tgtaatccctgttactggggaggctgaggagtagaatcgcttaaacctgggaggcggagctgagattgtgccactgcactccagcctgggtgacagagctrgactccgtctcaaaaaaaaaaaaaaaaagcaaagtagaacagtggattttaatataagaatatgaaaagttcgttggtacaatttaagattccacattgc

SEQ ID NO: 159664 - DNA, 201 bp, Homo sapiens; identical to SEQ ID NO: 29866

SEQ ID NO: 159665 - DNA, 201 bp, Homo sapiens
gaggttccagtgagctgagattgtgccactacactccagcctggggagatagagcgagactccagcctggggagatagagcgagactccgtctcaaaaaawaataataataataataataataattataggatgacggcttcccggggtaacagtgtacaaagctaattcttaaaatgcaaatgccacagaatttgagccg

SEQ ID NO: 159666 - DNA, 201 bp, Homo sapiens; identical to SEQ ID NO: 29851

SEQ ID NO: 159667 - DNA, 201 bp, Homo sapiens; identical to SEQ ID NO: 29850

SEQ ID NO: 159668 - DNA, 201 bp, Homo sapiens; identical to SEQ ID NO: 29883

SEQ ID NO: 159669 - DNA, 201 bp, Homo sapiens; identical to SEQ ID NO: 29852

SEQ ID NO: 159670 - DNA, 201 bp, Homo sapiens
gctggcttggggccaggtcaggcatcagaggcacaaagtaaaggatacagagagaggggaagggagaaagggagagacagagacctgaagcgggagggccragcggcagggcgggaggcgaggatagtgggtggggctcgggctgcagggctggagcctgggggatctggagcacaggggcaggaggaagggaccggaagg

SEQ ID NO: 159671 - DNA, 201 bp, Homo sapiens; identical to SEQ ID NO: 29853

SEQ ID NO: 159672 - DNA, 201 bp, Homo sapiens
ggggagactgaggcaggagaatggcgtgaacccaggaggcggagcttgcagtgagtggagatcacactactgcaccccagcctggttgacagcaagactcygtctcaaaaaaaaaaaaaaaaaaaaattactgttaatgtaactattgtttaacttttccctgctatgggatcacattcaattgtaaaactactgtttttt

SEQ ID NO: 159673 - DNA, 201 bp, Homo sapiens; identical to SEQ ID NO: 29854

SEQ ID NO: 159674 - DNA, 201 bp, Homo sapiens
ccccgccccaacctttccatttctgttttcctcctttgctgtgtttttctccataatgctggtgaccttctaatgtaggacttattttttctaaagacctytccttacaggtatttccccttaagtcctgtgtctttgagtattggttttagtttaaatgaaaacttcccagtgcttctcatctgtagccagcattgggaa

SEQ ID NO: 159675 - DNA, 201 bp, Homo sapiens
aatttctcttttgaataaaaggcttccccctcttcatttgaagaacattaaaaacccttaaaaattttttcagcttcttatttcaatcaggagcctttctrttggacatgaccatttttccttgtagtttaagagctttggttagcatgttgcctagaggctgtttgtcatggatatacagacacatgcttgtcttccttc

SEQ ID NO: 159676 - DNA, 201 bp, Homo sapiens
tgttgtacataataaagaaatgtgctcagttgtggatttgcgcttcaacagtgcttagctagctccgtaaccaaccttctttatctgtctgcttggaaatmttcagatgaggtgtatgtggctcaggagtctaactagttatatacataaaaatggagtcttgctggctttgaacaacttagtggacattcattaaaaata

SEQ ID NO: 159677 - DNA, 201 bp, Homo sapiens
gtccaagtttgcagattttaaactgaatgcttgactagctgatggttatttgacagtgagtgtcaatctttccatagaagtaggatgtactttgagaaaasaagttaaaaaaaaaaaatgatgggtatgggccgggcgtggtggctcaggcctgtaatgccagcactttgggaggctgaggccagtggatcacctgaggtc

SEQ ID NO: 159678 - DNA, 201 bp, Homo sapiens
gcacagggcacagggtggctgcgtgtgcaccacatataaacagacactcccagcctcagtgttgtcttagaggaaatgacagacattctgaatggcagaawacattggtgagcttagcaaactcacttctgctcaaggagggctccagtttcataagccaaaataagtaaaaccagggctgtcatttggctgtgctttggg

SEQ ID NO: 159679 - DNA, 201 bp, Homo sapiens
gctgggcacagtggctcatgcctatacatccagcactttgggaggctgaggtgggcagatcacctgaggtcaggagtttgagacctgcttgactaacgtgragaaaccccatctctactaaaaaatacaaaattagctgggcgtggtggcgcatgcctgtaatcccagctacttgggaggttgaggcaggagaatcaattc

SEQ ID NO: 159680 - DNA, 201 bp, Homo sapiens
acaaatcctattaccatgttttagcttacaagctcttaaggtaagcagggttataaggtttgaacgaggatgaattacctctaaaaaacacccaaatagaygagaattgttttgagattgacaatgcaacaagagcagtgtttttgatgaacaagagcttgttttcttcattgtgatctatgcagtagcacttattttctt

SEQ ID NO: 159681 - DNA, 201 bp, Homo sapiens
cctctgaaatattactgtgtttagaagtagttgttcttaaatgggtgctatgctaatgaaccaatgagacaaaatgagatagccgcaattgttagagtagycccagtcattaaacttaaatgtgtttggacctggagaatcattttctgtaacatgattccagatgagttcactagaactaaaaagatacatacaatgtaa

SEQ ID NO: 159682 - DNA, 201 bp, Homo sapiens; identical to SEQ ID NO: 29913

SEQ ID NO: 159683 - DNA, 201 bp, Homo sapiens
ctcactctgtcacccagatgggagtgcagtagcagtatcataattcactgcagcctgaaactcctgggcttaaatgatcctcctgccttggcctcctcaadtagctgggactacaggtgtacaccgccactcctcataagaacaggcaaatctttagagacagaaattacattagtggttgcccaggactaggagaggaac

SEQ ID NO: 159684 - DNA, 201 bp, Homo sapiens
ttgtatgtcaattataccttaataaagctcagaataaaaaaaaatgctgtcattaacagagagtttgcaaatacactcaaagtctttatcattaaggacayggacaccaggcagcatgatggaactcactttcattgttcttccagcctatcaactgaatcacataagaatgaaagatgaagtaaagttttgatacggtgt

SEQ ID NO: 159685 - DNA, 201 bp, Homo sapiens
atttattgcattctgaaactatggtgtagatgacatctgcccacacattattattattattattattattattattttattatttttgagatggagtttcrctcttgttgcccagactggagtgcaatggcacgatctcggctcactgcaacctcctcttcctgaattcaagtgattctcctgcctcagcctcccaagtag

SEQ ID NO: 159686 - DNA, 201 bp, Homo sapiens
ctagaggctgggactacatagtttctaacttttcgttctttttcttcatcctctccctccctccctccctccctccctcccttccttccttccttccttcytctagcaactgttactgagacactaaaactgacatcatcattgacacttagcaattacagtatgctgctgggaagcatgggcatgctggtttcttctcat

SEQ ID NO: 159687 - DNA, 201 bp, Homo sapiens
agattgtctttgttgattatttcctttgctgtgcagaagcttgttaactttaatgcgatcctatttatctttttgcttttcttgcctgagttttttgggtsatatccaaaaagtctttaccaagatcattgtcaagtagtttgtagttttgggtcttatatttaagtctttaatccattttgagatgatttttgtatatgc

SEQ ID NO: 159688 - DNA, 201 bp, Homo sapiens
agccaatcaagcccaccctcaaaatgcatctagactctgaccacttttcatcatctccacagctaccacctagtccctgacataatcactctttttttttwatttccaacttttattttaagttcagggatacatgtgcaggatatgcaggtttgttacataggtaaatgtgtgccatggtggtttgctacacagatcatc

SEQ ID NO: 159689 - DNA, 201 bp, Homo sapiens
atttttggtggaatctttaggattttgtatatataagatcatgtcatctgcaaacagtttaacttcctcctttgcaatttgaatgccttttatttcttttycttgcctaattgctctagctaagacttccaatactatgttgaataacagtggcaagagtgggcatttgtgttttgctgatcttaaaggaaaagctttgag

SEQ ID NO: 159690 - DNA, 201 bp, Homo sapiens
ctagctaagacttccaatactatgttgaataacagtggcaagagtgggcatttgtgttttgctgatcttaaaggaaaagctttgagcttttcaccattgartatgatgctatctggtaggcttgtcatttatggcctttactgtgttgaggtacattccttctatacctaagttgttgagagtttattgaagtatgttgaa

SEQ ID NO: 159691 - DNA, 201 bp, Homo sapiens
ttctgggaatttatccatttcttctagattttctgatttcttggcgtatagttgttcataagtctcatgattctctgtatttctgtggtatcagttttaakgtctcttctttcatttataattttttaaattttactcttattttttcttagtctacctaaagggttgtccattgtgtttatgttttcaaataaccaacta

SEQ ID NO: 159692 - DNA, 201 bp, Homo sapiens
aatttatccatttcttctagattttctgatttcttggcgtatagttgttcataagtctcatgattctctgtatttctgtggtatcagttttaaggtctctwctttcatttataattttttaaattttactcttattttttcttagtctacctaaagggttgtccattgtgtttatgttttcaaataaccaactaagaattt

SEQ ID NO: 159693 - DNA, 201 bp, Homo sapiens
gggtttcaccatgttggccaggctggtctcgaactcctgacctcaggagatccacctgccttggcctcccaaagtgctgggattacaggcatgagccaccrcacccggctgctagtcaccttttctactgaatacagaagaggcgcctataggatcggttttgattatccatgagaaaagagagttttagaatgcagaata

SEQ ID NO: 159694 - DNA, 201 bp, Homo sapiens
gcatgtgaggtcgtcatctcttcgagtcttggtaaggccacttggactaaagagggagaggaaaatgtaaagttttgcttcttcatgatagtttcctaatstttgtttctttgtggtttatcctcaaaactaactgaatgatttaatagtaatgttaaatcaaagcttaaagaaaaaaattgagactaagaactagaacag

SEQ ID NO: 159695 - DNA, 201 bp, Homo sapiens
aatttccaacttttattttaagttcagggatacatgtgcaggatatgcaggtttgttacataggtaaatgtgtgccatggtggtttgctacacagatcatyctatcacccaggtattaagcccattatccaatagttattcttcctgatcctctccctactctccaacacaccctagtgtgtgttgttccccgccatgtgt

SEQ ID NO: 159696 - DNA, 201 bp, Homo sapiens
gcaaattatacttatttgaaatgcacccactaatataatttgtttctttggttaactctgtgcttaccttatattaaatattaaagaaatatttgcggagycaatatgcaagtcaaaaggcagagtctaaagggatctgagctggttgggatttttgcattattcctgtgcttttattttgtcatgggccagaaattcttg

SEQ ID NO: 159697 - DNA, 201 bp, Homo sapiens
gctatatgtaaatactatcattttatgtaaggcacttagcatctgcagatcttgatatccaatggggatcctagaactccccatgaataccaagggacaayggtatacaatacattattatgtactgtagtcaccatgctgtataatagatctttagatctgttccttctgtctaactaaaactttgcaccatttaaccca

SEQ ID NO: 159698 - DNA, 201 bp, Homo sapiens
ttaaaattaggattattgttgaggttttttttaaaattattttgttatttagggttttggctgtactccagatatgaaaggcttttgctcttattttattkcatagttcccacatcagggagttagattaccgttaaatattttctatctctctgattattcattctgagaacattaagaaatttgtgttcataatactct

SEQ ID NO: 159699 - DNA, 201 bp, Homo sapiens
tatgaagcacacattgtaaagaatgttgtactccaggcctgtgaatctcactgatatctggcagccacagttaaaatgttgtagcatctggaattgcgggytgtaattgaaactcaactgaagagctttctgtggagctggaatgaccagccaatgcataaagttgttaaacatgaaacaaagataactattatcttttaa

SEQ ID NO: 159700 - DNA, 201 bp, Homo sapiens
tgagtttctgacatgaagtttttaattgcaaattatttggcctaataccaagaacaataatagctaccaagaatactatatttttctgatcgctatgtgtrggttggttggagtgtcttaaattttttttttaataaataatctataattaccttaagtttatccttaatttcaaacatcataatgactactgattgccac

SEQ ID NO: 159701 - DNA, 201 bp, Homo sapiens
gctctttgaatgccacctgacatgaaccctctggccacttgcaaaaggaggtcagaggttgctgccactcatgctgctaataatgtctgataatgataaarccacgtcctgtttgtcttgtattttatcataaagagcactttgatgtgcagattctctttccaaggtgttaggaaaacaaaagtagataagacacatttt

SEQ ID NO: 159702 - DNA, 201 bp, Homo sapiens
tgttacaatttatgtttctgaatgttccatactagaaataaatagaaaggcaccacggtctcaaagtgtgtgtgtgtgtgtgtgtgtgtgtgtgtgtgtgwgtgtgtgtgtttataaattttatttgatagtttcaaattactaggctgaagaaagaagaacattagcaaaaaatgatagtggcattaatacatttgctca

SEQ ID NO: 159703 - DNA, 201 bp, Homo sapiens
actaaatgataaagctgttgctacatcacagcttcagaaaaaacttgggcagcttctttacctaactaatttggagaaggtattgtttctaagacatgctrctttttcctatgctgcattatcataaaccactttagtgactcctttcataattaatggtgcaaattgttgtaattagtatttggtgttatatgagtcaga

SEQ ID NO: 159704 - DNA, 201 bp, Homo sapiens
gtcggtttgtactgatttgttttactatgtttttaagcttaaaattcttctgtaccttttagacctactattgtacacagattcttaattaaagcaacaayagaagaaagaatgcaggcaatgctgaaaactgctgagagaaggtaggtaataatttaccacaagtagaagggggaaggttttcctgttaaaagtttgtat

SEQ ID NO: 159705 - DNA, 201 bp, Homo sapiens
ggcctcattcccatcactcttttttcagtttgcatgtcagcctgttctcccagcattatatttacctgaaaccgtcttactcttttatgtgtttattgtckgtctctcattagaatgtcagctcatggagattaaatagttcattttattcgctgctgaacccctcccagcacctgccacaagtgggcaccaactgactga

SEQ ID NO: 159706 - DNA, 201 bp, Homo sapiens
catatgagttttagaattgtttttcctatttttctttgtctgttttatgttgccgtaacagaatatttgaggctgggtaatttataaataaaaggagttayggccagatgcagtgactcatgcctataatctcagtgccttgggaggccaaggcaggaggatcactcgaggccaggagttcaagaccagcctgggcaacat

SEQ ID NO: 159707 - DNA, 201 bp, Homo sapiens
agaaatgctactgatttttgtgtttctattgtatcctgaaacttcactaaattcattgcttttaacagatttttggtggaatctttaggattttgtatatrtaagatcatgtcatctgcaaacagtttaacttcctcctttgcaatttgaatgccttttatttcttttccttgcctaattgctctagctaagacttccaat

SEQ ID NO: 159708 - DNA, 201 bp, Homo sapiens
gacaggaatctcctaaacagggtcaaaggccacctgtcttagtcagctcaggctgccataacaaaataccatagactcagtggaaacaatagattttattygttcattcatttattcatccattttcacacagttctggaggctggcagtccaagatcaggatgtcacatggttgggttctggtgagaactctttttagca

SEQ ID NO: 159709 - DNA, 201 bp, Homo sapiens
tcttccttcagcattcaaatattgagtagaacaactgaactgtaaggttcaactaaaggaatgcaactgtgacttgagctgtggaacggctatggcctaartcaagaattctcaacctcagcactagtgattgacattttgggccaggcaattctttcttctggggcctgtcctatgcattataagattgagcagcatccc

SEQ ID NO: 159710 - DNA, 201 bp, Homo sapiens
tttcacagaagagcaattgaatgagctcctgctgtacatatctaccagatctacctcaaaatgtaaagtcagtgaagagagcctgtcaaaaaatgtatacygattgataccatttctgtgaatttcagaaacatatataactgaattattaagaatatgtttcacatagtataagttcaatgaaaagtgtagcaggataag

SEQ ID NO: 159711 - DNA, 201 bp, Homo sapiens
cttccttcagcattcaaatattgagtagaacaactgaactgtaaggttcaactaaaggaatgcaactgtgacttgagctgtggaacggctatggcctaagkcaagaattctcaacctcagcactagtgattgacattttgggccaggcaattctttcttctggggcctgtcctatgcattataagattgagcagcatccct

SEQ ID NO: 159712 - DNA, 201 bp, Homo sapiens
attgagtgaattaaaaaactagttggctaagcgtattatagagtataaagcatcttctgtattatttatttttattatttttttaagacacagggcatctrttgccctggctagaatgcagtggtcatagctagctgcagccttgaactcctgtgccaagctgtcatcttgccttagcttcccaagtagttgtgagtacag

SEQ ID NO: 159713 - DNA, 201 bp, Homo sapiens
aattcaaaacacatgttctgagttatgatctgagtattatactggacactgatgaattggtgggtcattgattaaatataatttcattttattgcaggaattcatattttgctagttggcagagaaccttctaggggcaagatatagtagtaaatatttggatagggcaagtgaggacaagatatagatttgaattcttct

SEQ ID NO: 159714 - DNA, 201 bp, Homo sapiens
atgagatgggtcttggaaagacagtggaggttttggctctgattctgacacatactcgacaagatgtcaagcaagatgctctcactcttcccgaggtaggwgggtatagtagggcttgcaaaagcaggggacatatgttctcgaaaagcatcgtatgttgaacatttgcttggcacttaagtcaacactttctgttcactc

SEQ ID NO: 159715 - DNA, 201 bp, Homo sapiens
attcaataattatacagaaatgtaatataacacacatagatttacttaaggtattacattagtatagaatcgtagttcttacttgccagtattaatgtctyataatacttgttcttcagagtacaaattaatctctcctagggaaatttagatgtgattttggtagaccactatattaaatatattcctttgtggatatta

SEQ ID NO: 159716 - DNA, 201 bp, Homo sapiens
tgctctttaaatcaactttatgatataatttatgtataagaaaattcaatttaaagtatataatttgatgagttttgacagatgtatactctgcaatcatrtgttgaacatttatgtcaccccaaagcctgccttcctgctcctttactgtcagtcacctctttatacttccttgcccctggtaaccactcatctactttc

SEQ ID NO: 159717 - DNA, 201 bp, Homo sapiens
tcatacttacaatatatagtagccgtatttttttttcctttttggatccccagttctccccccttctaatttagggctattaaattagaatctatcagagwtaacccatatgtaccagctgatgcacctggaggcattgccatttgtctcttctgtttgggtcagtcagcttcctgtcactcctaatggtcaggtgccagg

SEQ ID NO: 159718 - DNA, 201 bp, Homo sapiens
tcaccacttgacattgggtccatggatatgtcttgctttggtctgtggcaccttagtggtttttaagcactttgaaaactacttgtgtgattggatttgcrgtaatacacctcaaccattgccataaagaacattcctgagttactttgctgatccaaggagaggggataggaactacattaagcagagccaaactgcttt

SEQ ID NO: 159719 - DNA, 201 bp, Homo sapiens
ctctagtgagtcacaaaactcctttccagtagagtaccccagtggcactagaggtacataaagtacaatatagtgctgctctgtgtcatacaaaaatgctrgtaaaacagctcttcaatttcattagtctcaactcctgtggactctggcagaggtgcagctagagaacagtaggaatagtattagctgttaataggcaaa

SEQ ID NO: 159720 - DNA, 201 bp, Homo sapiens
acaaaaatgctagtaaaacagctcttcaatttcattagtctcaactcctgtggactctggcagaggtgcagctagagaacagtaggaatagtattagctgwtaataggcaaaatagtggtttgaaaaccaagcttatatacctcagttttctcttctttcaatgtgagttcttttccaaagagcatcttagatgatccagc

SEQ ID NO: 159721 - DNA, 201 bp, Homo sapiens
tccaaagagcatcttagatgatccagcaaagaatctcaagtgggccaggtacgcactttctttccatacatgtccaaatcttaaaaaaaacatagcttaargatttagaagctttgtcactcaaaagacactcagtttttcttattgtttttaccagatgaaaacggttaaaactacatttgtaagatgccatagctttta

SEQ ID NO: 159722 - DNA, 201 bp, Homo sapiens; identical to SEQ ID NO: 29910

SEQ ID NO: 159723 - DNA, 201 bp, Homo sapiens
tgggttttcttccagtttggggcttttaatagtaaagctgttaacattcaagtttaaatttttgtggatttatgttttgatttctcttggataaatacctragagagggattactaggctgcatagtaagttatattcaattttattagaaactgatacttttccaaagtgactgtgctgtgttcaaatgttggagagttc

SEQ ID NO: 159724 - DNA, 201 bp, Homo sapiens
ggtagcactcctacaattctgacacccagaaatgtcttcagaaattgccagactgaaataatgtcatctacttgggatgtcaaatatggaagaatgcttcytaactccttccacccgccacaccctatgtctacataatgtattcatttgtataatatagaaagcattggctttggggaatataaaaactggggtttacat

SEQ ID NO: 159725 - DNA, 201 bp, Homo sapiens
tgattgacttaaacaagcactgtctgatacatagactttttgcaattatgtgaatgctctatatttgtgctgtccagtacagtagccactagtcacatagsgctactgagcacatggggctagtgagactgaagagctgagtttataacatttaattttatttatagtcatgcatcacttaatgatggggctgtgttttga

SEQ ID NO: 159726 - DNA, 201 bp, Homo sapiens
agtttataacatttaattttatttatagtcatgcatcacttaatgatggggctgtgttttgaggaatgcatcataggcaagtttgttgtgtgaacatcttaagagtatacttacacaaacctaggtggtaccgccagcctactacacacctaggctctatggtacagcctgctgctcctaggctacaaacctgtacagtat

SEQ ID NO: 159727 - DNA, 201 bp, Homo sapiens
atttgtgttggattttgtttcgctcttttaagtattgttgggctttgttctgaggggcagttaaattacttgggattgagagatttaccttcctattatawtgcttattaaatgtatttctacaatttattttattttatacaacaaattgcctttactattaaagactagcaaaaccattagaatttatttgataaatga

SEQ ID NO: 159728 - DNA, 201 bp, Homo sapiens
agtggatataatagaatttaaaaaaaaaaaaactggccaaatttatgatgttttcagctttttcaaggttgctttggtttttccaaagacttgcaaacatrttcttttagaactcacattgaaggttgcttttcactcactgataccagttactgttgttttgttctggtatgttttcagagtcaaaggccagactgcaat

SEQ ID NO: 159729 - DNA, 201 bp, Homo sapiens; identical to SEQ ID NO: 29903

SEQ ID NO: 159730 - DNA, 201 bp, Homo sapiens; identical to SEQ ID NO: 29904

SEQ ID NO: 159731 - DNA, 201 bp, Homo sapiens
atgaagaatgatgttattggttatggtaatatgaaggttacctcagattcttaccactttcaacctgctcacaatgtaaattctgttatcaatatctaatrgaaaagggcctattattatatattcgtgttaaattgttcacatatagtacacgtaactttgtgtgcaaatcttccctctagggcattccctagaaagtcc

SEQ ID NO: 159732 - DNA, 201 bp, Homo sapiens; identical to SEQ ID NO: 29905

SEQ ID NO: 159733 - DNA, 201 bp, Homo sapiens
tatcttgggaccagaagtgttttggatttcagattttttaatatttgcattatgtgcttactggttgagcatctgaaatccaaaatgcatttcccttgagmcttatatcagtgctcaaaaggtttcagttttgaagcatttcaaatttgggattttgggatttgggatgctaatctgcaataacatagaccatgtaccaaa

SEQ ID NO: 159734 - DNA, 201 bp, Homo sapiens
agggacaagacattgacgagctgtatcactttgtgaaacaaacacatcagcaagaaacgcagtccatccaagtggatgtccagcatcctgcattgatcccygtgttgagaccctaccaaagagaggctgtcaattggatgctacaacaagagtgtttcagaagcagtcctgctactggtaagaataagatgtttaaagaaa

SEQ ID NO: 159735 - DNA, 201 bp, Homo sapiens
ttggcaaacaaatattcggtgtttctgaaattttgttacttggacaagtaaattttgttaacttccatatataaggaatttttagcgtgacttttatgttstctacagtatacttggacttttatgtttaaatgcagttaagtagctttaaatgtataaaatgacccattcttcttgaaacatcatactgaattatattct

SEQ ID NO: 159736 - DNA, 201 bp, Homo sapiens
gatgctggtagcactcctacaattctgacacccagaaatgtcttcagaaattgccagactgaaataatgtcatctacttgggatgtcaaatatggaagaaygcttcctaactccttccacccgccacaccctatgtctacataatgtattcatttgtataatatagaaagcattggctttggggaatataaaaactggggt

SEQ ID NO: 159737 - DNA, 201 bp, Homo sapiens
caaaagatatcaaaatggctaatactatagaatcccatattttatatacatttattacatcttaaaaacaattgtgacagtttccaattgttcaaaacaartacaaatctgatcctcacattttcttggctgcaaacaaaggattttttaagttttctttctctattattttatagcctctgaaatattactgtgtttaga

SEQ ID NO: 159738 - DNA, 201 bp, Homo sapiens
aacctgggaggcagaagttgcagtgagctgagattgcaccgttgccctccagcctgggcgacagagcaagactctgtctcaaaaaaaaaaaaaaaaaaaaraagatgaagcatgtgtgcaaaaagattatgaatttgagatttcggcaagttgagtttgagacggctttgggacctcaaaaaagaggtaacatatagcaat

SEQ ID NO: 159739 - DNA, 201 bp, Homo sapiens
ttccagcaattctcctgccccacccctccaagtacctgggattacagacatgtgccaccaagcctggctaattttgtatttttagtagagacggggtttcrtcatgttggtcaggctggtcttgaactccagacctcaggtaatccacccctctcagcctcgtgctgggattacaggcgtgagccaccacgcccggcctgt

SEQ ID NO: 159740 - DNA, 201 bp, Homo sapiens
tttatttaatactgcctaatgctggttgtttcttttggagtcctataaatctggctgccaagaaaaatgatggctctgctccgaaaccacaaagtggctgyattaacatttagtgaatctcaagtagaaaggaacagtgaaattcctgaggaagccattctccagaataataaagtattagcgtttttctcatagtagaca

SEQ ID NO: 159741 - DNA, 201 bp, Homo sapiens
cttacatgctgcagttggaaccctgtgaaatggtatatattgttcaagatttccgaacttcagtgtctttgtcaataaaatattacaggtgctttacttasctcaactattgttcttaatacaaaatgtagaagcacattgaaaacgttataaaaacagagatgaagaatgatgttattggttatggtaatatgaaggtta

SEQ ID NO: 159742 - DNA, 201 bp, Homo sapiens
ataaaaacagagatgaagaatgatgttattggttatggtaatatgaaggttacctcagattcttaccactttcaacctgctcacaatgtaaattctgttaycaatatctaatagaaaagggcctattattatatattcgtgttaaattgttcacatatagtacacgtaactttgtgtgcaaatcttccctctagggcattc

SEQ ID NO: 159743 - DNA, 201 bp, Homo sapiens
agaaccacaggtatttttcctgcagaatatataccacttgtcatttctaaaatttcagttttatgaaatcagcagcaaaatctaaagaggttacacaaatacacttttattttcagtttttaaatcaggtgttgcaaatttttgtctttctaattcattcattatttagtattctgggatataattttgtgagttattgtg

SEQ ID NO: 159744 - DNA, 201 bp, Homo sapiens
gaaccacaggtatttttcctgcagaatatataccacttgtcatttctaaaatttcagttttatgaaatcagcagcaaaatctaaagaggttacacaaatacacttttattttcagtttttaaatcaggtgttgcaaatttttgtctttctaattcattcattatttagtattctgggatataattttgtgagttattgtgg

SEQ ID NO: 159745 - DNA, 201 bp, Homo sapiens
aaagaatgcaggcaatgctgaaaactgctgagagaaggtaggtaataatttaccacaagtagaagggggaaggttttcctgttaaaagtttgtatctttasaacttcttcacttagatgacaacgaaaaatatagcacaaatacgtttttaaaagcaaagtctgacgttttgccttttcactgtttcccagtcagtgctcc

SEQ ID NO: 159746 - DNA, 201 bp, Homo sapiens
gtagtttaatttgcatgcattacatgcatctgtcttgtgattcctctagatattacgaagaacaagagagcttatatgatacttttcttcataattaaaakcaagcgacaagtttacattttctaaagttggtaattttgcatttaagtttcttagctgttacctttcacaatagtaatagatagcattagacatctttaa

SEQ ID NO: 159747 - DNA, 201 bp, Homo sapiens
gggtttctagtttcattccattgtcagagaagatacttgatgtaatttcagtcttgatttcggacttgttttgtatcctaacatattctgctaggaaagtrggaagtaactagattgggacaaaatggttcagaactgtagtggttggaagggatcattgagcactaccactgaactggccagtctttgataaaagcaaat

SEQ ID NO: 159748 - DNA, 201 bp, Homo sapiens
atgctctgttcttttcctacgtagagttagcactacggtactagaaatgttgattataaaaaatttattctacattttttttgaacttttagtaagaaacrtattaatcagtggaaggattcatagttttcctggtatttcacttgaaatagttttaaaagtaagaccttgcaaggaacatggatgtttttgtctaaattc

SEQ ID NO: 159749 - DNA, 201 bp, Homo sapiens
aagaaaatttccagcaaacacaaaatgaaaaagagtaaacacatatgcacctgataatttgttttgatgcatttatagttttgataataaaaagtactttrtattgcttttctattctgttcttaactagattttttagtagtaatgtgtattttgtgtgtgtgttcaaagggcagccattctacaaaagtggaagctgtg

SEQ ID NO: 159750 - DNA, 201 bp, Homo sapiens
tagaaagagatgtattaatctaatttaaagaaaaataaagtctcaaggacaaggtatgaaaaaccatgtgatttgttttttctaaaatggcatatctagtrgaaagaaaaatgaagtcaaaatattaagcttctccttaaaattaccagattgctggttatgtttgtgaatatttctgttaatctcttttttttcagctgt

SEQ ID NO: 159751 - DNA, 201 bp, Homo sapiens
gcacaggactatcaaatttttttggtatcttttacggtagacagcccaatattatactttgaatacattctgaaggaaaactcactcaaatgttgctgttaaaaaaaaaaaaaacagcaaacagtttctttaacactttgtttggcaaccattctctgaatttgaggaaattgacctattattcttttctttgtattgtgt

SEQ ID NO: 159752 - DNA, 201 bp, Homo sapiens
ggtcaggagttcgagaccagtctggtcagtgtggtgaaacccctctctactaaaaatacaaaaattagctggtcgtggcagcaggtgcttgtaatcccagstactcaagaggctgaggcaggaaaattgcttgaatcctggaggtggaggttgcaaggttgcagtgagccaagaccgcatcatttgcactccagtctgggc

SEQ ID NO: 159753 - DNA, 201 bp, Homo sapiens
tgtttatgaacgaagatagggtgttatttgatgattaatagtcactgtataatgatcagttaaataatgaccaggaagcttgtgccctttttccaagtagyttgacattagcacgaggtagaaatccgagatgtttgatgccttccaacttgtacttaaggaacttaaggaacttggggctttttctgaacaaaataagat

SEQ ID NO: 159754 - DNA, 201 bp, Homo sapiens
ttaattacattcgaattcagaaccactctttgacattgtacagtttgactggtagttgctatgtttatgaacgaagatagggtgttatttgatgattaatrgtcactgtataatgatcagttaaataatgaccaggaagcttgtgccctttttccaagtagtttgacattagcacgaggtagaaatccgagatgtttgatg

SEQ ID NO: 159755 - DNA, 201 bp, Homo sapiens
ctgccactaggccccacttcccaaaacctccacgctgggtatcaaatttcagcatgagtattgctgaggacaaactcaaatcatagcactatttctgtgaaaaatgtcatcagaattttaatagggattgcattgagtctatagattatgttatttaatatttatgtaacaatattagttcagttcatgaacatatgtctt

SEQ ID NO: 159756 - DNA, 201 bp, Homo sapiens
tctacagtatacttggacttttatgtttaaatgcagttaagtagctttaaatgtataaaatgacccattcttcttgaaacatcatactgaattatattctwgattgggagtgaaagtttatattctctgtttcaacacaggccaaacagctgcgagagcactacatgagcaagtgtaatacagaagttgctgaagcccagc

SEQ ID NO: 159757 - DNA, 201 bp, Homo sapiens
agtcttccttcagcattcaaatattgagtagaacaactgaactgtaaggttcaactaaaggaatgcaactgtgacttgagctgtggaacggctatggcctaagtcaagaattctcaacctcagcactagtgattgacattttgggccaggcaattctttcttctggggcctgtcctatgcattataagattgagcagcatc

SEQ ID NO: 159758 - DNA, 201 bp, Homo sapiens
atatcaggttttatatgtaaaaacgtaactaatatattttttaattcttttttggatagtctcaagataaaacatcgggaggtgttaatccagaaccttgyccaatctgtgctcgacagctaggaaaacaggtaaaattatgataaacatcacatgcatttataaaataccttacagttttcaaaggtttctacataaaat

SEQ ID NO: 159759 - DNA, 201 bp, Homo sapiens
catcatcattgacacttagcaattacagtatgctgctgggaagcatgggcatgctggtttcttctcatagcaggaatgggaggcttaccaggaaccctcctcagaatttatgtccatgattttggctacagatgaccattaaagcagtataaggtcataaccagtaaagtcttctcctgtaactttcagaaaataaagtga

SEQ ID NO: 159760 - DNA, 201 bp, Homo sapiens
aatagtctgtgtaaacaattgaatagtctagagtaaagccaagctacagtgtatctttctacaccaatactcagatttttaccattaatattgcgccctctttttttccccaataataagtcttcagtgcatgaaaagcacttcctccctctgaaattacatcggtaaaataggtcatctcattctggaggggagaggatt

SEQ ID NO: 159761 - DNA, 201 bp, Homo sapiens
tttccatctataagtatgtcagttctatatatagatacgatgttcaacggaacaggagtcttttgaaacggatgctgaaatgtttaatttttgaaggtctygtgaaacagatcaaaggccatggtttttctgggacttttacattgggaaagaattacaaggaagaggatatatgtgataaaacaaaaaagcaggtaacag

SEQ ID NO: 159762 - DNA, 201 bp, Homo sapiens
tgagtattgctgaggacaaactcaaatcatagcactatttctgtgaaaaatgtcatcagaattttaatagggattgcattgagtctatagattatgttatwtaatatttatgtaacaatattagttcagttcatgaacatatgtctttccatttgtgttctctttaatttttttattaatgtttcatagttttcagtgtac

SEQ ID NO: 159763 - DNA, 201 bp, Homo sapiens
ttgcatttaagtttcttagctgttacctttcacaatagtaatagatagcattagacatctttaaagtgagctattacatactgctcttattttaactgatygagctaaaattaaaatgtacctttcttttttaggagaacctttcagcatttaaacgtgatccccaaatcaatattttgctgctgcccctgcacacaggtt

SEQ ID NO: 159764 - DNA, 201 bp, Homo sapiens
tattacctttattcatatatcagaatagacagttatctttgataaggcctgctaaatgtattaccttctggatgttagaagtctttgatgtttaaaaaagraaaaaaaaacacatccataataagcacttactaaatcagtatttattgagcacctactgtatgtcaggcattattctaaatactgaagattcaaattgaa

SEQ ID NO: 159765 - DNA, 201 bp, Homo sapiens
caaagtctgacgttttgccttttcactgtttcccagtcagtgctccagactttgtatatttgaattaatttattaattgtaacatgtaaatataaactatmctacattcctttgccacattggatcactttctgaggctgggagttcgaaaccagcctggccaacatggtgaaaccccatctctactaaaaacacaaaaat

SEQ ID NO: 159766 - DNA, 201 bp, Homo sapiens
gtaggtacatctcaccagaagtgtagcttttaatgggctgtttttcatgagtatgcctgacttctgtgttctttctgtggttttctggatttcatttttayttcatttttccctctcatcaggctgcagaaatggcccagcgtttgagtgggattaatcgatggtgtatcagtggcactccagtacagagaggattagagg

SEQ ID NO: 159767 - DNA, 201 bp, Homo sapiens
tgatttaatagtaatgttaaatcaaagcttaaagaaaaaaattgagactaagaactagaacagtacaatgttattcttttctaacatcagaatttcaccarttaaagcattttgagtataaagatgtggaagctttttaaaaattcttgagtatgtaaatgagaaattcttggtataagcatttatagtcttcagagagaa

SEQ ID NO: 159768 - DNA, 201 bp, Homo sapiens
tgttaacttccatatataaggaatttttagcgtgacttttatgttctctacagtatacttggacttttatgtttaaatgcagttaagtagctttaaatgtrtaaaatgacccattcttcttgaaacatcatactgaattatattctagattgggagtgaaagtttatattctctgtttcaacacaggccaaacagctgcga

SEQ ID NO: 159769 - DNA, 201 bp, Homo sapiens
gggctctctcctgttccattggtctgtatgtctgtttttatttcagtagcgtactatttttattactgtagttttaaaatgtgttttagaatcagggagtktggtatctctagctttttgctcaagattgctttggttatccaaggtcttttgtggttccatatgagttttagaattgtttttcctatttttctttgtctg

SEQ ID NO: 159770 - DNA, 201 bp, Homo sapiens
gtgctttcggtgcaaaggccctaaatcaggagtgtggtatgttagaagaatagcaaggagctacagttgctaaaagggagagaagcaggagttgaagtgartgggctcagtggggagagggattacattgggcccaggaagccactgtgaggacggtgcttttgccctgtgtgaaatcgggagccattggaaggctttgaa

SEQ ID NO: 159771 - DNA, 201 bp, Homo sapiens
cctgactttagttttggagaaaatgggattttgtgtatttcttatttaacaaatatttgtataacaaagagaggttaggtaacttgcccatagtcaggcarctagtagaagcagtggcagatttcaggcacagccattctgccttcacagtacaagctttaaccacagtgcactgctgcttctgtgtggctggtaaggcca

SEQ ID NO: 159772 - DNA, 201 bp, Homo sapiens
aaagggagaataaatgaagagtgttttaaaatatcatttctgctaatctaatgtaacaaaattttgtaactataaaacctgactacttaactaaaagatcytatgttcagggtcatagcacttaatgactttctggcatgcttttacattcaaatgtctgggtgtaaatttaatgacttctacatttcgaggctaaagaaa

SEQ ID NO: 159773 - DNA, 201 bp, Homo sapiens
tcattatatcaagatggtggggggaagctagtcaccatttctttttttcttttttcctttttttttttttttttttttgagatggagtttcactcgttacycaggctggagtgcaatggtgcgatcttggctcaccacaacctcctactcccgggttccagcaattctcctgcctcagcctcccgagtagctggcattaca

SEQ ID NO: 159774 - DNA, 201 bp, Homo sapiens
aaccccggaggtggaggttgcagtgagccaagatcgtgccactgcactccagcctgggcaacagaacgagtctgtgtctcaaaaaaaaaaaaaaaaaaaamaaacttgttaaggttaattgtggtgtcaatccaaagacaaaacaaaagcagagagactaaaccagtcttaattttaaaagcttgactctggaatcataga

SEQ ID NO: 159775 - DNA, 201 bp, Homo sapiens
ctggacataacaatcagaaaaacagctaataaagccataataaaaattaaatgattatatggcaaattatacttatttgaaatgcacccactaatataatytgtttctttggttaactctgtgcttaccttatattaaatattaaagaaatatttgcggagtcaatatgcaagtcaaaaggcagagtctaaagggatctga

SEQ ID NO: 159776 - DNA, 201 bp, Homo sapiens
ggtaagaaggtaatttgtaaggtgagagccttagtagcagtagtcaagagttttattctttgttctattaattgcacagagaaaaaacactttgacaaacmctaaaagtaatatatagaaatcttcactttgacaaggtataacaaagattttatcacttgctttcctctgggagtttcttatatcccaattacaaaaact

SEQ ID NO: 159777 - DNA, 201 bp, Homo sapiens; identical to SEQ ID NO: 29924

SEQ ID NO: 159778 - DNA, 201 bp, Homo sapiens; identical to SEQ ID NO: 29926

SEQ ID NO: 159779 - DNA, 201 bp, Homo sapiens
tatcttaaagatagcactagaggttaggtgacgtgcttaggattagatgtttgagcaatgcttttcttaaatgggaagtgaaaaaatatttctagaatgaygccatctttttcattaaagatgcacagttttgaacattgtttccagtcacaaggttgtgtccagtaatttgacttcgtcaggttaacatagttattcaat

SEQ ID NO: 159780 - DNA, 201 bp, Homo sapiens
cctttctgagctatgttttagagaaaacaatttgatatgcttcaattttgtaaaatcaaattacatatatataaaaaaacctatctgtattagacaaaaaytgtttttatttatttctgtaagatatcaattaaataaatattttagtggaaatgaaaattgtggaattctttgatttctgagacttagaacatatggggt

SEQ ID NO: 159781 - DNA, 201 bp, Homo sapiens
aatttgatatgcttcaattttgtaaaatcaaattacatatatataaaaaaacctatctgtattagacaaaaactgtttttatttatttctgtaagatatcmattaaataaatattttagtggaaatgaaaattgtggaattctttgatttctgagacttagaacatatggggttttttggttttttctttcaacaaaagat

SEQ ID NO: 159782 - DNA, 201 bp, Homo sapiens
gaataagccatgcatgcattcagttttaggaattgttatctttcatatcacatgaacaacaaactaaaaatcttaacatgataattcaacatgcaactacyaatactttacaaataatgatcaaaccaactacttacctaaatatttaggaaatgaatttaacaatgcaaggttaatcaccaatgcaagctatcctgtcag

SEQ ID NO: 159783 - DNA, 201 bp, Homo sapiens
cttgatgaagctcagatggttgagtgtcccacagtaaaagtgagagtttctgcaaaatcttttgagggctggggaagaagggtgaaaaggaattaggggamcttgagtagtttaatagtttaagcatagttaacctgtagtactgatattggtcaaaagtttgttattaaacactacttgtgcttttctcttgtgctttga

SEQ ID NO: 159784 - DNA, 201 bp, Homo sapiens
cttaacatgataattcaacatgcaactactaatactttacaaataatgatcaaaccaactacttacctaaatatttaggaaatgaatttaacaatgcaagrttaatcaccaatgcaagctatcctgtcaggtggataaagtaagaaatcatgtctttttaatctcctgctctcatttaatagctcttccaatgtgcttaag

SEQ ID NO: 159785 - DNA, 201 bp, Homo sapiens
atgaagctcagatggttgagtgtcccacagtaaaagtgagagtttctgcaaaatcttttgagggctggggaagaagggtgaaaaggaattaggggaacttragtagtttaatagtttaagcatagttaacctgtagtactgatattggtcaaaagtttgttattaaacactacttgtgcttttctcttgtgctttgaacta

SEQ ID NO: 159786 - DNA, 201 bp, Homo sapiens
tacagaaaatagcacgagtacttggcagaggccaaagttgccatctccagccttcccctgtcttcagacagccttttcaggggcatgtatagctcatcttygaagagtaaaggtccccacaccatcctcgtatcttcatcatttaatgtcagtgactctcaatactgatttttggggactgactttgttatcttgaaacca

SEQ ID NO: 159787 - DNA, 201 bp, Homo sapiens
actttgttatcttgaaaccaaatttttattgcagcttatgcttcttttcctgcaaaatagaaattaaaaaacagcctccattatctgtataatgatctttrtataggtcactactattactaaaattaataactttttccctgcttatcaaaaaatcagccttttttaaatggtctgcctttccaaaccctattgttatct

SEQ ID NO: 159788 - DNA, 201 bp, Homo sapiens
atagagagactaggtaggtagagatgggaccatggaggatgttatttgccttgttaaagaattttattttttttcttaagagtagtaggagctattgaaaygatttaaacacagtggttgggggtcattttgtggttagatttgtatttcaaaagatcactctagttgcagtgtggagagtggcttagaagagggtaagag

SEQ ID NO: 159789 - DNA, 201 bp, Homo sapiens
cataaacaaattccttaaacatttaagtccttatttttcttatctataaaataaggtgttttaaagatgaattatgatgaagtatacaaaggatttagcayagtacctaacaaatattaaatattcaatgaatgatagctgcctctacttctccttttgttgtttttattttccatttatgtagtcatttatttattttaa

SEQ ID NO: 159790 - DNA, 201 bp, Homo sapiens
caaggagctacagttgctaaaagggagagaagcaggagttgaagtgagtgggctcagtggggagagggattacattgggcccaggaagccactgtgaggayggtgcttttgccctgtgtgaaatcgggagccattggaaggctttgaacagaggcttggcatatctcacttaagttttaaaagaatcattctgagtgctgt

SEQ ID NO: 159791 - DNA, 201 bp, Homo sapiens; identical to SEQ ID NO: 29902

SEQ ID NO: 159792 - DNA, 201 bp, Homo sapiens
cctataaatctggctgccaagaaaaatgatggctctgctccgaaaccacaaagtggctgtattaacatttagtgaatctcaagtagaaaggaacagtgaawttcctgaggaagccattctccagaataataaagtattagcgtttttctcatagtagacaaaagtcatgggttttcctccttggcagggagcaaactcaac

SEQ ID NO: 159793 - DNA, 201 bp, Homo sapiens
tctgtgtcttttctggggctttttgatttttttcttgtaatgggtcttatttttctgttttattttcattttttttgcgtgcctgataattttagatttgmtgccagacatttgtgttggattttgtttcgctcttttaagtattgttgggctttgttctgaggggcagttaaattacttgggattgagagatttaccttc

SEQ ID NO: 159794 - DNA, 201 bp, Homo sapiens
tctttgctttgcctatcatttgaaatattactgttctttttttcccctctttgcttattctaactaaaaaaaaaaattaaataagaaattggcaaacaaayattcggtgtttctgaaattttgttacttggacaagtaaattttgttaacttccatatataaggaatttttagcgtgacttttatgttctctacagtatac

SEQ ID NO: 159795 - DNA, 201 bp, Homo sapiens; identical to SEQ ID NO: 29908

SEQ ID NO: 159796 - DNA, 201 bp, Homo sapiens
tgctcgacagctaggaaaacaggtaaaattatgataaacatcacatgcatttataaaataccttacagttttcaaaggtttctacataaaatctttctctygtttttctcaccactagtttctatgaaaggcaagtattaccattatcttaaagatagcactagaggttaggtgacgtgcttaggattagatgtttgagca

SEQ ID NO: 159797 - DNA, 201 bp, Homo sapiens
aacaactgctatctccagttatttttccagagcctttgtaaaaatttccattgactgagagcatcattgcctgttgataatgttgagtgtattttcctttrtcacagaattatgtcttctttggtaaatgcaaatctgtgttttaaacaggaatgcattttagtttctgatctttatcagaatgtttataagtgaatccgc

SEQ ID NO: 159798 - DNA, 201 bp, Homo sapiens
tgtgaccttttcacacatatagattgagtattgaattttcatttggcgtaaacagtttttttagttacagctttgttatataaatgcattcaataaattcycatttatccagagtagttaggaaataggggtttctctttaattatattttcaaaagaggaagcgagcattgtacatggaatatgtatactcgtctcccct

SEQ ID NO: 159799 - DNA, 201 bp, Homo sapiens
acgtgccaggcttgctttgcatgtgtacccttcctgaaaagtttttttctttccttttcaactttttttttttttctttgagacaagatctcactgtgttrcccacgttggagtgcattggcatgatcatgactcactgcagcctcaacctcccagggtctggtgatcttcccacctcaatctcccaggtatctggaactg

SEQ ID NO: 159800 - DNA, 201 bp, Homo sapiens
cgagtgcgaaatgaaataaccagcaactacaagcaacaaactggcaagctttctatgtcagagaagtaagaaaacaggaagaaaaagtatctactcataaytttaaaagcaaagaaatccttgtattttctagtttctaatttctcattattaccggctttttttctccattcataaacctatacagacacattcatactt

SEQ ID NO: 159801 - DNA, 201 bp, Homo sapiens
ctcaaccttaaaaagtgatagtcaacaacagaaagacaaataacccaatttaaaactgggcaaaggatttgaatagacatttctccaaagaagataatatrtaagtgaccaataagcacatgaaaagatgatcaacagctttagcagctgggaaagtagatatcaaaaccgaaatatgaaggtttggagaggaggaaggaa

SEQ ID NO: 159802 - DNA, 201 bp, Homo sapiens
cttaatgctccacacccccgtagatagcctattagaggagccatttgtccaaggacacattttcgacctatgggatcttcccagacctgtgatttgtataygcacacagttctgattactgacccttccagtgttctaatgagcaaacatttgtgctcaaatttccttagaaatcgtttctgcatattttattatttattt

SEQ ID NO: 159803 - DNA, 201 bp, Homo sapiens
catacatttttcatgctctttttcagttcctgagcacaggactatcaaatttttttggtatcttttacggtagacagcccaatattatactttgaatacaytctgaaggaaaactcactcaaatgttgctgttaaaaaaaaaaaaaacagcaaacagtttctttaacactttgtttggcaaccattctctgaatttgagga

SEQ ID NO: 159804 - DNA, 201 bp, Homo sapiens
gtatgctactacacgggtggatatatgtcattacacatttgctggacccatagaatgtacaacaccaaaaatggaccctaatataaactgtggactttggrtaatgatgtgtcataatttgaaacaaatgtacaactgtgatgtgggatattgatagtaggaaaggttgtgcatggggttggggggaggcaggggtatatg

SEQ ID NO: 159805 - DNA, 201 bp, Homo sapiens
attgatagtaggaaaggttgtgcatggggttggggggaggcaggggtatatgagaactctgtgtactttctgctcaattttgctgtgaacctaaaactttygtagaaaatagtctattagaaaacaatgagctatcactttacaccacatgacttgtagatgaaaagagtcaaactctgtaaaatatttgaagagatttat

SEQ ID NO: 159806 - DNA, 201 bp, Homo sapiens
actcaaatgttgctgttaaaaaaaaaaaaaacagcaaacagtttctttaacactttgtttggcaaccattctctgaatttgaggaaattgacctattattyttttctttgtattgtgtgtggtgctggtgtgggaatcaggttccgtgattgcagaggtcttcagttcttacttacaacacaaatggaagagctaaataaa

SEQ ID NO: 159807 - DNA, 201 bp, Homo sapiens
gtgaggatgtaaagcattcattgttagtgggaatgcaaaatggtacagccactttggaagacagtctagcagtttcttatgaaactaaacatactcatatstcatgaaataaatatgagaggcattattatttaagaataataaagcaaacaattataattcaatatttttaactttttcctaaaaataacaaatagttca

SEQ ID NO: 159808 - DNA, 201 bp, Homo sapiens
aatagaactgctggattgtgtggtagttctatttttaatatattgagaaacctctttactattttccaaaatggctctactaatttgtattgccaccaatrgtgtacaagggtttcctttttctccaccttctcaccaatacttatctcttgtcttttttataatagtcattctaacaggaatgaggtggtgtatctcagt

SEQ ID NO: 159809 - DNA, 201 bp, Homo sapiens
ctaagcctctgggatttttcaccttcaccctaccgtttggagtcaagatctccaggtcagttgcctggttttgatgccaggctcacagaggaggtggaggrtagtgggctgtgcaggaagctgagggagttaagtattaaggctggagcttgtgttgggtcgagggggagaaatggggttggagacgcctctgggctgggt

SEQ ID NO: 159810 - DNA, 201 bp, Homo sapiens
ctgaagtagggagcatttgggaactggagaatggcgtgcaaatgaagaaggccttctagggattggctgtgccatgtgaacagtcctgggcgtgccatccrtggagcatgccaatattgcccagaagttttgggtcagcttcttttttgtgtgaccttggtggaaaccactgagctccatggtattaagtgggccacgtgt

SEQ ID NO: 159811 - DNA, 201 bp, Homo sapiens
tacttattactgaagtagggagcatttgggaactggagaatggcgtgcaaatgaagaaggccttctagggattggctgtgccatgtgaacagtcctgggcrtgccatccatggagcatgccaatattgcccagaagttttgggtcagcttcttttttgtgtgaccttggtggaaaccactgagctccatggtattaagtgg

SEQ ID NO: 159812 - DNA, 201 bp, Homo sapiens
ttcaatggcctctgtgacaattgcttagaatccttgctgtgagttcatttgactttagcatcttttttgaggctactttttggacagctgaaattctgtgwtgcataaagtttttcctttttctctgaagtctcttaagggaagaatatatattttttttatcatgtgttcagcatgttaatcattttggtataagtcatt

SEQ ID NO: 159813 - DNA, 201 bp, Homo sapiens
tatatctctttctttttcttccgacattagaaacaaaacaaaaagaactgtcctttctgcgctcaaatttttcgagtgtgcctttttattcatctactttwttttgatgtttccttaatgtgtaatttacttattataagcatgatcttttaaaaatatatttggcttttaaagtatgcaccgtgtttgcctgtttggtgt

SEQ ID NO: 159814 - DNA, 201 bp, Homo sapiens
atctacaaaaggatcaaagcagttaatccaataatataagcataaaggccacatttacctcaacatccctgatagtacaataaaagtcttgtgtaatactrtttagtacaaagcaattttttttatattctctccttattcaagaaagacttaagttcaatgtgaatgatatgagtacttccaggagataaaaagttgact

SEQ ID NO: 159815 - DNA, 201 bp, Homo sapiens
gattttttgagctgttgctgccaagacatcatctttaatctacaaaaggatcaaagcagttaatccaataatataagcataaaggccacatttacctcaayatccctgatagtacaataaaagtcttgtgtaatactatttagtacaaagcaattttttttatattctctccttattcaagaaagacttaagttcaatgtg

SEQ ID NO: 159816 - DNA, 201 bp, Homo sapiens
tgagtccaccacagtgcacatcatgtcagcatcattgctttttgtgtctttctagttggtggaccaactgggtgatccctgccatctctgcagtggccgtygccttgatgtatcgcctatacatggcagaggactgaacacctcctcagaagtcagcgcaggaagagcctgctttggacacgggagaaaagaagccattgc

SEQ ID NO: 159817 - DNA, 201 bp, Homo sapiens
caccattgttggccaggcttgtcttgaactcctgacctcaggcattcgcctgcttcagcctcccaaaatgccgagattacaggtgtgagccacggcacccmgcctaaagtagatgtttttactctcttcagagattttacagattaactaacttctgagtattttttaaacaactcttctttattgtgactttgcttcagt

SEQ ID NO: 159818 - DNA, 201 bp, Homo sapiens
ctcaagcgatccacccacctcggcctctcaaagtgttgggattacaggcgtgagcccccacacctggcctggttgcattgtttactggcacttcgttttartcagcaggctccaccccacagccatgcactggggagtctgctcagtcctagaaattccatggggcagcacgttttacaaggtggggagaatcaacccagc

SEQ ID NO: 159819 - DNA, 201 bp, Homo sapiens
attttttgtagagacggggtttcgccatgtaggccagtttggtctcgaactcctaaactcaagtgatctgcctaggattacaggcgtgagctacggtgccyggccgggaaaggttgtttttaaatttttttttacttttatctttttgagggtctccccctgttacccaggctggagtgcagtggtgcagtcactgctcac

SEQ ID NO: 159820 - DNA, 201 bp, Homo sapiens
aattcttggtttcattagagaaagtgcaacagcaagaccccactgagcttgtgtcgagaactggtgagctgattttttgagctgttgctgccaagacatcrtctttaatctacaaaaggatcaaagcagttaatccaataatataagcataaaggccacatttacctcaacatccctgatagtacaataaaagtcttgtgt

SEQ ID NO: 159821 - DNA, 201 bp, Homo sapiens
ttgaatctgaaatggtaattactgaattataattttaaaaagtctcaaagtcagcattttggaagtggtactttcatagatttttaaattccataatgtgscttatcttttcattgcaggatgacagaccaaagttaaacaagcctccggtaagtgtgaccatctcaagtatctctggatgttctcgttgtatttaatact

SEQ ID NO: 159822 - DNA, 201 bp, Homo sapiens
aaataatacccttttgacttacttttccttgggaaaggaaaataactctggcaatactagttttatgttctgattcactagcctttctctctgaactgacyatctcacttatatttgaagataaatgtagggtgagaatggaagagcacagcctaagttcctgaaaagtacaagtaggcaaaatagtttctagtgtctaat

SEQ ID NO: 159823 - DNA, 201 bp, Homo sapiens
acaggcgtgagctacggtgcccggccgggaaaggttgtttttaaatttttttttacttttatctttttgagggtctccccctgttacccaggctggagtgyagtggtgcagtcactgctcactgaagcctcagccccttgagcttgtgccatcctcccacctcagcctctcatgtagctgggactgcaggggcatgccacc

SEQ ID NO: 159824 - DNA, 201 bp, Homo sapiens
agatgaatttaatgaaattaaataatacccttttgacttacttttccttgggaaaggaaaataactctggcaatactagttttatgttctgattcactagsctttctctctgaactgaccatctcacttatatttgaagataaatgtagggtgagaatggaagagcacagcctaagttcctgaaaagtacaagtaggcaaa

SEQ ID NO: 159825 - DNA, 201 bp, Homo sapiens
gaaaactgcaaagaagaaactcaaagctgcctggagctctgctccccgaaggtggccagcttgagcagtttgcacactcactactacaacaccttgctcgyggatgtgctttacatccatggaaatgtgctctgcatgctgctctgtaatctccctttttccccactaaactaggtgttgagggaccagtcctgaatttca

SEQ ID NO: 159826 - DNA, 201 bp, Homo sapiens
aataaattgtttttatgtggaaggtccatttagtaggaacatatctcaggaattatagtgttaactagtaaacaaaatgactcaaaatacaaatattcacwtgaaatataattgttcaggaatgtgtgctttgcaagattggaaatcatcccatttcaggagcttttaaacatacaactttattgtgtaaggggaaaataa

SEQ ID NO: 159827 - DNA, 201 bp, Homo sapiens
gataggtagattcatacatacctatcccttgttgctgttcttggtcaaaaattaaggtgaggagttgccctgttgtacttctgtttcagattaagactgtsgaattaccccatgaaattgaatgtgtattttctccattttagcactgtaaagatcagaattctgtatctaaaaacttgtctaagtctgcaattctttata

SEQ ID NO: 159828 - DNA, 201 bp, Homo sapiens
gccttcacactaagaatttattatttattgaaatcatctgtatcaagtagcatcaaatttattttatcttgccagtttttatagatccacttttagtgtayactcttaagtagaaaatagaattttcttgcagttttaaaaatcctttatactgtggaatctctaataatacatttatttagcatttctctttggcctcat

SEQ ID NO: 159829 - DNA, 201 bp, Homo sapiens
tagttgagtggagtctgaacaaccctgtcccgctgggcattcatgggaaagcactgggctggggttaggaaaactagacctggtcttagacatatcatggrggtgaccttgggcaagtcaggtatttctttcagtcactttccttgttctgaagtgggaactattctgtcactgccatctgcattgggagaaatgatatat

SEQ ID NO: 159830 - DNA, 201 bp, Homo sapiens
gtgaaaatattttagtatcagttagtttattctaagctatgttttttttttttttagttttttaaatctttaaaattttacatgagttatcagtgaaaccmatataatccaagatgtttctctctctctcttttttttttttgttagaaaattgccccacaaatggtttaggcaaggtaaaaaccagaggtcgataggtag

SEQ ID NO: 159831 - DNA, 201 bp, Homo sapiens
aagtcagaaagcagggttcccgtcccacctccctcgtgagctatcagtgtggcactgggcttcattcctctgcgtcccattttctctgtctgaaaatttargatgttgagtctctgaaggtcctttgcacctctaagcctctgggatttttcaccttcaccctaccgtttggagtcaagatctccaggtcagttgcctggt

SEQ ID NO: 159832 - DNA, 201 bp, Homo sapiens
cacgtggaaacagctttgcatctccatgcccatccccacttctgggtcctccttactgacccgcgacatcctctccccacctttctccctctctctgggcrctacagctggtcacttcccacacatggtcgcatgagtagaggcttagcaaggagtgcgttatggaggacagatttctgctactgacttcgccgaagtgga

SEQ ID NO: 159833 - DNA, 201 bp, Homo sapiens
gcctcttgggcttatgagctttagaagggtccacacaagtgctcagaatacttccctatacacagtgagcatttattagatgttacccactgatattcatyattatttgtccctagactttttccctggctgctagagtggaaaggagagaaattgaaggcatttgttcaggctgtgaaatgcagagatcttcggcagaaa

SEQ ID NO: 159834 - DNA, 201 bp, Homo sapiens
agctcacaggctgtgcataagacctgtctgcccttggcctaactaacctttaagaaccatctcatgtagaaatgtctattatttttatcataggatgtttytgtgaatgtgtgccatttggttctgtgattcaggagaatccagccagttgattaaatccagagataacttttgaagatgaaggagaggtggtgagaaggg

SEQ ID NO: 159835 - DNA, 201 bp, Homo sapiens
tgtcctagatttatgtgcatgtccgtgttcatgttgagaaggtgtgtggtgagatggtggagggatcctgctctgctggcaggtacaagccaagaacacakgttgaagctcacaggtgcagcatgtgctccgacctcctgaaataatggccactaaagctgtttttgttgtttaggcggaggggtagaaacctaagaggga

SEQ ID NO: 159836 - DNA, 201 bp, Homo sapiens
catccgtatggacaggatttctcatggctgagtatttccccttctttcagaatgtcctagatttatgtgcatgtccgtgttcatgttgagaaggtgtgtgktgagatggtggagggatcctgctctgctggcaggtacaagccaagaacacaggttgaagctcacaggtgcagcatgtgctccgacctcctgaaataatgg

SEQ ID NO: 159837 - DNA, 201 bp, Homo sapiens
gacctcttatggacgtgtttttccatttgccgtctttattatttgctttgactttctgtgaccatctcttgcttattgcatgtcctggtcattggcttccyagcccccggcaaagcctctgggagcctctctctgggttctatctgagactctagccaggattccttgcaggtgacttcctgtgctcctggggttatatct

SEQ ID NO: 159838 - DNA, 201 bp, Homo sapiens
ctcgctaggtggtgctggagcagccttccggggatagcgcgcagccatgcgggggatttaaatgatccctttctcccttgagtttgaatagaagggtgtcyttccaggaccggcggcattcccgcagtggccggctggagaccacccaccccgagagctgcggatcccgccggaggggaccccaagtgcggaggtcgggtg

SEQ ID NO: 159839 - DNA, 201 bp, Homo sapiens
ccctaaagaagtgatctttgccaccagagctgtgtgataactgcatcccgctcccttctcggcctgtcctggggacagcctcatcctggtgctcggaggcrgtatctcaactccaggcagcaggatgaaggaagacagggcacagaggatccaccactccagaaggaagacttctggaagattcttccattccatgagcca

SEQ ID NO: 159840 - DNA, 201 bp, Homo sapiens
ctgccacgtggagacgttcatgtgtgtttgttgggtgaattaactcaagtgcataataacaaaaacaaatggaaatcttcctctggaaagacggaagaccrttagggtcagctcacgtggaaacagctttgcatctccatgcccatccccacttctgggtcctccttactgacccgcgacatcctctccccacctttctcc

SEQ ID NO: 159841 - DNA, 201 bp, Homo sapiens
aaaattgctggaatagataataaatttgcaattttatttttaaatgacttaccttttttcccctactgtgtcaggaaccttaaaggcggtgtttcaaggtwggtgggtctcataactgctttgcttgcttttccctgaaaggggtctgtcttttcacgggagtttctctaacgtgctttgcagagtgatgcttgccttact

SEQ ID NO: 159842 - DNA, 201 bp, Homo sapiens
aggattccttcaatgtgttactcatccagacccacagaggccatatgactggaggtgcgggaaataggtttgagtgtctcctttcacatcgtcacatctcrttgagtaaccatgtattgtatgcttccgatatagtttctttttttcaaggaaattaagaaaggccagaaattatagtttaaggatttctaataattgtcc

SEQ ID NO: 159843 - DNA, 201 bp, Homo sapiens
catgtcagcatcattgctttttgtgtctttctagttggtggaccaactgggtgatccctgccatctctgcagtggccgtcgccttgatgtatcgcctatamatggcagaggactgaacacctcctcagaagtcagcgcaggaagagcctgctttggacacgggagaaaagaagccattgctaactacttcaactgacagaa

SEQ ID NO: 159844 - DNA, 201 bp, Homo sapiens
catttattagatgttacccactgatattcatcattatttgtccctagactttttccctggctgctagagtggaaaggagagaaattgaaggcatttgttcmggctgtgaaatgcagagatcttcggcagaaactccaggtgctctcttccagtctgggctttctgggttaatttctcactggagacccaagccctcacctg

SEQ ID NO: 159845 - DNA, 201 bp, Homo sapiens
aagtgctcagaatacttccctatacacagtgagcatttattagatgttacccactgatattcatcattatttgtccctagactttttccctggctgctagmgtggaaaggagagaaattgaaggcatttgttcaggctgtgaaatgcagagatcttcggcagaaactccaggtgctctcttccagtctgggctttctgggt

SEQ ID NO: 159846 - DNA, 201 bp, Homo sapiens
cgtcacctctgtctgtaaagtggggatagtaatggtaatgcctgcctcttgggcttatgagctttagaagggtccacacaagtgctcagaatacttccctrtacacagtgagcatttattagatgttacccactgatattcatcattatttgtccctagactttttccctggctgctagagtggaaaggagagaaattgaa

SEQ ID NO: 159847 - DNA, 201 bp, Homo sapiens
ttgagacagagtcttgctctgttgcccaggctggagtgcagtggcgcgatctcggcccactgcaacctccacctcctgggttcaagcaattctcctgcctyagcctcccaagtatctgggattacaggcacaggccaccatgcctggccaattgttttgtatttttagtagagatggggtttcgccatgttggccaggttg

SEQ ID NO: 159848 - DNA, 201 bp, Homo sapiens
cgagggggagaaatggggttggagacgcctctgggctgggtcagatcccggtgccgcgctggtgttggggtatctggtctgcgcaccgccgggtcctcccyggccaccctactgtgtggcgacggctcctccagcatgttcttcaagcctctccttttcagcttcttcatctttatttatctgctctattgatccacatcc

SEQ ID NO: 159849 - DNA, 201 bp, Homo sapiens
ttttgtattttttgtagagacggggtttcgccatgtaggccagtttggtctcgaactcctaaactcaagtgatctgcctaggattacaggcgtgagctacsgtgcccggccgggaaaggttgtttttaaatttttttttacttttatctttttgagggtctccccctgttacccaggctggagtgcagtggtgcagtcact

SEQ ID NO: 159850 - DNA, 201 bp, Homo sapiens
aggttatgtccttaagtaaatataatgattaaaatgttttactctggaagaaaacaaagttaggcattttagtgaaaagaagtttataattttccctttcracatcttctgaagaatgcattgcataaaatattgtgttcttattttcaaacaggattttagtcaatgaaataagttcagcattcccttgaacttacttta

SEQ ID NO: 159851 - DNA, 201 bp, Homo sapiens
ttctctctctctttttttttttttgagacagagtctcactttgttgcctaggctggagtgcagtggcgcaatctcagctcactgcaacctcggcctcctgsattcaagcgattctcaagactcagcctcctgaatagctgggactacaggtgcccgccaccacggctggctaatttttgtattttttgtagagacggggtt

SEQ ID NO: 159852 - DNA, 201 bp, Homo sapiens
aggacacgagcctcatgcttttactaagctgtatgagtgacatggggaagcaacttatgttattagtgaaaggttctttctctctctctttttttttttttgagacagagtctcactttgttgcctaggctggagtgcagtggcgcaatctcagctcactgcaacctcggcctcctgcattcaagcgattctcaagactca

SEQ ID NO: 159853 - DNA, 201 bp, Homo sapiens
ggttcactgcagcctccaccacctggactcaggtgattctccaacctcagcctcccaagtagcgaggactacaggtgtgcaccaccatgcctggctaattyccctttttttttttttttgtagagacagggttttgccgtgttgcccagctgccagctggtctcaaacttctgaggctcaagtggtctacctgccttggcc

SEQ ID NO: 159854 - DNA, 201 bp, Homo sapiens
acctaatttacctaaataggaaagatttatcttctccttctaactctcaaatgaactttcagtcattatgggctagacctttgtttactgtgagatcccccatccgtatggacaggatttctcatggctgagtatttccccttctttcagaatgtcctagatttatgtgcatgtccgtgttcatgttgagaaggtgtgtgg

SEQ ID NO: 159855 - DNA, 201 bp, Homo sapiens
ggtagcacgtgcttctgatctaaaagatttgacacaagccttattttcagagaacttaaaatctgaatggatagtggttttattacttaaatctttaaggrtgtgtctcatgtcttcttcatctttaagtctcttgggcatagtaggtgttcaataaatacttgtcagatgaatttaatgaaattaaataatacccttttg

SEQ ID NO: 159856 - DNA, 201 bp, Homo sapiens
tacggaaacctgtcagtatgatttgttaggatggcgtgtgtgtaatttttttaaggctgtcagtaaactacttttttcatcataattatcaatatataccrtttgaagagctactttttatggtagcacgtgcttctgatctaaaagatttgacacaagccttattttcagagaacttaaaatctgaatggatagtggttt

SEQ ID NO: 159857 - DNA, 201 bp, Homo sapiens
aaggcagagggtttttatttacctgactgatgccagcacaggtctttctagataaatgaatatgtaacctactggctcagcaagtattttttatttacggraacctgtcagtatgatttgttaggatggcgtgtgtgtaatttttttaaggctgtcagtaaactacttttttcatcataattatcaatatataccatttga

SEQ ID NO: 159858 - DNA, 201 bp, Homo sapiens
gtaattgccactcttctctattattgtacaccttgaaggcaaggttaagtcctgttgtggggtttgagggctggaatccaatttttggagctttttctaaygtcaggagtgggttgggtaataaaatgcatactgagaataagacggccttctggcctctctgggtctagggcggtaaggcgtttaagggttgttgccaaa

SEQ ID NO: 159859 - DNA, 201 bp, Homo sapiens
acaagagtgagaagattgacaagtttcaaaacatgatttagattcagtttacttggccaagtgtctctctctctctctccgtaatacatatatttcaaggraaatattagatattacaaaaagccaccctcatcttttactgtcttatcaagatgagttattttttccaaaatatcaatttttaggatttgattttcctac

SEQ ID NO: 159860 - DNA, 201 bp, Homo sapiens
gactttctgtgaccatctcttgcttattgcatgtcctggtcattggcttcccagcccccggcaaagcctctgggagcctctctctgggttctatctgagaytctagccaggattccttgcaggtgacttcctgtgctcctggggttatatctccaataagctcactcgctcagagctcttcagcacactgccctgccaggt

SEQ ID NO: 159861 - DNA, 201 bp, Homo sapiens
taacatcaattctcattaactctaaatgtggaattttaagatacagtgtgtgctttgtctatttgtgcttatagaagaagtagcataagagaatattaggwtattttatattatgaagcattttcttcttttcttgtcttctcctaaagcgagttttttcaaccctggcactgttgacattttgggccagccgatctttgt

SEQ ID NO: 159862 - DNA, 201 bp, Homo sapiens
ggagtgactgatgagaaggagaaaaactggccgtgagggacagaagtaggaatgctagctgcttctttagctaccttatcagcataagcattgccctgagygacgcgatctgatgccttttgatggcccttgcagtgaatgactccagcttcctttggaagtaaagtggccttgagaagagtttttattaaagaggcatta

SEQ ID NO: 159863 - DNA, 201 bp, Homo sapiens
ttaggttctttgtagaaggctcgaaagtaggaaatccatttgagaacaacttcattgagttgggaggtttgtttgattttgtttttggtggtaggagataygtactttgagggagtaagcttcattcatctgacaagtttatttgccccgatattttcatcccatacttcacaaaggcaaagtgtcttagggtcatcaggg

SEQ ID NO: 159864 - DNA, 201 bp, Homo sapiens
accagggactgagccccagggtgctcctgtgtttagacacgtagacgatcaggagactgtggtggccgagaaggttggatgaacacaagcgcagcctgttmccctggaagtcaaataaagaaggcaattcaaggagaagagaaccactgtgcaaaattctgctgcgaacttttatgtgtgagctgtataaagccatggagc

SEQ ID NO: 159865 - DNA, 201 bp, Homo sapiens
ttccactgctttccttggctgacagatgattctctaagtggggagacttgataagatcatcaggagagccaacgcagatggaggaggggtgaggaccaggractgagccccagggtgctcctgtgtttagacacgtagacgatcaggagactgtggtggccgagaaggttggatgaacacaagcgcagcctgttcccctgg

SEQ ID NO: 159866 - DNA, 201 bp, Homo sapiens
ttcaggcaacaattcggatgccccttcatgttcctcttgttgcttgctgcatgtcaaaccctgattggtaggaagcttctcgaggctcggactgtgtattygtgagtttcagatgcttctgcatgtttacacaggtcacttttcttgactaaatgattgatgtagtaattaggattaggctcaggagatcctctaataact

SEQ ID NO: 159867 - DNA, 201 bp, Homo sapiens
ctgctgtgtgtgggagggacctggggctcttccactgctttccttggctgacagatgattctctaagtggggagacttgataagatcatcaggagagccarcgcagatggaggaggggtgaggaccagggactgagccccagggtgctcctgtgtttagacacgtagacgatcaggagactgtggtggccgagaaggttgg

SEQ ID NO: 159868 - DNA, 201 bp, Homo sapiens
tgtgtggtggcagcatttcccatgaatgaaagactggaaggagtgtattttgggggggaaagtgagacatgccatttggtcctgttacgctggagtgtgcrttagctatggagtggaagtactgagtagctgctgtgtgtgggagggacctggggctcttccactgctttccttggctgacagatgattctctaagtgggg

SEQ ID NO: 159869 - DNA, 201 bp, Homo sapiens
tgttacactcatgtcacttttagcaaatccacgttgccttttcagcaaaattcattacagagttaagaaaaacatgccctggtaattttctgttagaaggrgcaaagattttgagtccaccacagtgcacatcatgtcagcatcattgctttttgtgtctttctagttggtggaccaactgggtgatccctgccatctctg

SEQ ID NO: 159870 - DNA, 201 bp, Homo sapiens
ctgttagaatatcactgaaggcatctgtttcatctctgaaactcccctactttatcttctacctctgcatcaccattactgccacccctctagactacgcmagcatgatcctttcccagggtaccataatcagcttctaaaagtcttcatggcatggcgatctcaggggaactgatgctagggaggatgggagaccagctc

SEQ ID NO: 159871 - DNA, 201 bp, Homo sapiens
ttcctgggcctgacactgtgctgtctcagcaaccttctgctgaaggccagactgttcagagcactcagcctcaaactttcaggtagccgactgtgaacacygtccacagccacgtgatctagctggctggctgcatccaccccaaggaacaaacagaacaattgcatttccttttcccccagggcagcatcttaggcggcc

SEQ ID NO: 159872 - DNA, 201 bp, Homo sapiens
ttctttctccttgttcattgctgacattctttgatagtcacgtccctaaacccaagtgaggccctcagagcactgaccactaaagaccaattacttttccrtcaaagtgcaaagtggtaattcaaacttcctttaactgtcaagcatcctgggctacagagccaagaagataatcaacaatcaaaaggtgatacgattatt

SEQ ID NO: 159873 - DNA, 201 bp, Homo sapiens
aactggctccgtcacctctgtctgtaaagtggggatagtaatggtaatgcctgcctcttgggcttatgagctttagaagggtccacacaagtgctcagaayacttccctatacacagtgagcatttattagatgttacccactgatattcatcattatttgtccctagactttttccctggctgctagagtggaaaggaga

SEQ ID NO: 159874 - DNA, 201 bp, Homo sapiens
tcccatcagccactgaactggttatatataatagttacaaaaccaatgtgtaagaatgatctgtgcttatctcatttatttatctaatgaatacttatggstattgaactaagagttagagaaacagtgatgaacgagacagatccatgaatcttagaaacaaattgatatgaaatgtcgctgtcactaggtgtgctccag

SEQ ID NO: 159875 - DNA, 201 bp, Homo sapiens
tattttatccaatgagacaagtgtagtaatggtagaagttgaaatactggtcagggcatagtgaccaaaatttggttaccagtacgttttagaccaaacayttactaattcagttctaaaagtaattaagaagaattttgtttctctttttcaagaagaggaaattctaacagcattctgcaggatgattgccagctcaca

SEQ ID NO: 159876 - DNA, 201 bp, Homo sapiens
atttaattgttaacctctttttactgaagttgaacctcgaagtcatggagtgaacaggtggcagagccaatcataaaaaccatattctttctccttgttcwttgctgacattctttgatagtcacgtccctaaacccaagtgaggccctcagagcactgaccactaaagaccaattacttttccatcaaagtgcaaagtgg

SEQ ID NO: 159877 - DNA, 201 bp, Homo sapiens
acatccagtccaccaggacattctgtgggcctaactttcataatgtcagaatctcaccaattttttaccatgtctactgctgctcccctggttggagcctycatcttctctcgcgtggtcccctcctgcccccgacagcatattctcaccataatagagtgacattttaaagtcagatggggtcagtccgtatactctgtt

SEQ ID NO: 159878 - DNA, 201 bp, Homo sapiens
tcggcctcccaaagtgctgggattacaggcctgagccaccatgcccagactttgacacactgatttaattgttaacctctttttactgaagttgaacctcraagtcatggagtgaacaggtggcagagccaatcataaaaaccatattctttctccttgttcattgctgacattctttgatagtcacgtccctaaacccaa

SEQ ID NO: 159879 - DNA, 201 bp, Homo sapiens
cccctgaaacacacacatacacacacacacacacacacacacagcctcccttgactcttctgccccctccaggatttcctcatttttctgctcccctgaayagtagaagcctctgaaagggttgttaagcctggtctccaatccacctcctccattcccttttaaaccacacctgttcaccacagcttctcttgccaaggt

SEQ ID NO: 159880 - DNA, 201 bp, Homo sapiens
taagatatttgtagacttagaaatcatgcattttaatctaacataaatgtttctatcacatttgcttacatagagaatattagtcgtagcaataccccttsttggttatagttttgaaagcattcttgtagaagttatttggtcctcacagtgtctccatgttagacctgccaagggaggtaggtacattgcagctgggaa

SEQ ID NO: 159881 - DNA, 201 bp, Homo sapiens
tctcttgctctcatacccacatccagtccaccaggacattctgtgggcctaactttcataatgtcagaatctcaccaattttttaccatgtctactgctgytcccctggttggagcctccatcttctctcgcgtggtcccctcctgcccccgacagcatattctcaccataatagagtgacattttaaagtcagatggggt

SEQ ID NO: 159882 - DNA, 201 bp, Homo sapiens
ccctaacgtgggaaacacacctgctccctctgcatgtccccatctcagcagatggcagttccattctcccagctgctcaggccaaaagcctgggggttgtrctcctctcttctcttgctctcatacccacatccagtccaccaggacattctgtgggcctaactttcataatgtcagaatctcaccaattttttaccatgt

SEQ ID NO: 159883 - DNA, 201 bp, Homo sapiens
actttctgcagaaagggtgctcaatggcagatggaacaatgacgagagcacacctgaacaaaggaaaagcagacatatttatcccttacacatttgggtcrtccttactgctgtgtcctgcatccattggctggagcaggaccacacactcttaaactgatacccagtttgctaatcgcctaaaactttcctaaataggta

SEQ ID NO: 159884 - DNA, 201 bp, Homo sapiens
agtcagcattttggaagtggtactttcatagatttttaaattccataatgtgccttatcttttcattgcaggatgacagaccaaagttaaacaagcctccrgtaagtgtgaccatctcaagtatctctggatgttctcgttgtatttaatacttgtcaaactgaaggcagagggtttttatttacctgactgatgccagca

SEQ ID NO: 159885 - DNA, 201 bp, Homo sapiens
ctggccgacatgtgaaactttttaaggtgacttaggattaggcaaagaattcttagatgtagtagaaatgtgatccattttcaattctttgcactggaagrttattccccccaaataacatatggttccctgcctcacctcctttgagtactcactcactatcacctcaacactatcacctgaccaccgtatttaagcctg

SEQ ID NO: 159886 - DNA, 201 bp, Homo sapiens
tttagtatcagttagtttattctaagctatgttttttttttttttagttttttaaatctttaaaattttacatgagttatcagtgaaaccaatataatccmagatgtttctctctctctcttttttttttttgttagaaaattgccccacaaatggtttaggcaaggtaaaaaccagaggtcgataggtagattcatacat

SEQ ID NO: 159887 - DNA, 201 bp, Homo sapiens
ccagctaattttttaaaattgtattttatagttatggggtctcacaatgttgcccaggttggctttgaacttgggcccaagtgattctgctgcctaggccyattgtacttgcatgatggaaatggaatataaaggcctgtgttgttttaatccacatttatggacaagttagtctcctgttgtcatctgtgtcttctgaag

SEQ ID NO: 159888 - DNA, 201 bp, Homo sapiens
gagtcgcgcgctctgctccacccgacggggctgtgtgtgctgggcctggctcgcggcgaaccgagatggcagagcagtcggacgaggccgtgaagtactayaccctagaggagattcagaagcacaaccacagcaagagcacctggctgatcctgcaccacaaggtgtacgatttgaccaaatttctggaagaggtgagtt

SEQ ID NO: 159889 - DNA, 201 bp, Homo sapiens
tcaagtgatctgcctaggattacaggcgtgagctacggtgcccggccgggaaaggttgtttttaaatttttttttacttttatctttttgagggtctcccyctgttacccaggctggagtgcagtggtgcagtcactgctcactgaagcctcagccccttgagcttgtgccatcctcccacctcagcctctcatgtagctg

SEQ ID NO: 159890 - DNA, 201 bp, Homo sapiens
cagctaattttttaaaattgtattttatagttatggggtctcacaatgttgcccaggttggctttgaacttgggcccaagtgattctgctgcctaggcctrttgtacttgcatgatggaaatggaatataaaggcctgtgttgttttaatccacatttatggacaagttagtctcctgttgtcatctgtgtcttctgaagg

SEQ ID NO: 159891 - DNA, 201 bp, Homo sapiens
aattgtattttatagttatggggtctcacaatgttgcccaggttggctttgaacttgggcccaagtgattctgctgcctaggcctattgtacttgcatgayggaaatggaatataaaggcctgtgttgttttaatccacatttatggacaagttagtctcctgttgtcatctgtgtcttctgaaggagtcacctgtttggt

SEQ ID NO: 159892 - DNA, 201 bp, Homo sapiens
gctttgaacttgggcccaagtgattctgctgcctaggcctattgtacttgcatgatggaaatggaatataaaggcctgtgttgttttaatccacatttatsgacaagttagtctcctgttgtcatctgtgtcttctgaaggagtcacctgtttggttaaataaattctggccgttttctcttaattcatttgcctgaaaaa

SEQ ID NO: 159893 - DNA, 201 bp, Homo sapiens
taatccacatttatggacaagttagtctcctgttgtcatctgtgtcttctgaaggagtcacctgtttggttaaataaattctggccgttttctcttaattyatttgcctgaaaaaaaaatttttattctacctctcctttgaacagcatcctggtggggaagaagttttaagggaacaagctggaggtgacgctactgaga

SEQ ID NO: 159894 - DNA, 201 bp, Homo sapiens
gcctgatggaaaaaccaagcagacattaccaaaggatgaaggacacgagcctcatgcttttactaagctgtatgagtgacatggggaagcaacttatgttrttagtgaaaggttctttctctctctctttttttttttttgagacagagtctcactttgttgcctaggctggagtgcagtggcgcaatctcagctcactgc

SEQ ID NO: 159895 - DNA, 201 bp, Homo sapiens
gtctcctgttgtcatctgtgtcttctgaaggagtcacctgtttggttaaataaattctggccgttttctcttaattcatttgcctgaaaaaaaaatttttrttctacctctcctttgaacagcatcctggtggggaagaagttttaagggaacaagctggaggtgacgctactgagaactttgaggatgtcgggcactcta

SEQ ID NO: 159896 - DNA, 201 bp, Homo sapiens
ggactcatctatctgacagtctgtgctgcccgtgcattgccggcacgcagggtgctttccagagggaagtgacacacgtgcctcttgtgaatcgtcatctyaggcatgccagctcttgaggccacacttagactaagatgtcagagaagtcagtctcaggtgcaggagtcaagaaaaaatagattgggtagagaataagag

SEQ ID NO: 159897 - DNA, 201 bp, Homo sapiens
ctgaatcagacagcagttaagtacaaaatcatgtgatctgaatgggaagaactgttagagctccggaaaagtagagtgctatgaactggaggagttggaaygagagggaaagttcccatcagccactgaactggttatatataatagttacaaaaccaatgtgtaagaatgatctgtgcttatctcatttatttatctaat

SEQ ID NO: 159898 - DNA, 201 bp, Homo sapiens
ctcaaggtcaggatgaatctaaaataacattcaagctcagttaaagaagtttttttttttcctacaaaagtacgtatttaggatgctttgcccaagctccrctttcttttttattactctgagagctgcttcccttgcctgagaatccccagacctccttacctctgtcctgtgactaatccccacttgtcaatcatcttg

SEQ ID NO: 159899 - DNA, 201 bp, Homo sapiens
gccttgcacatagtagacagtaaaatattttgatgaactgaatcagacagcagttaagtacaaaatcatgtgatctgaatgggaagaactgttagagctcmggaaaagtagagtgctatgaactggaggagttggaatgagagggaaagttcccatcagccactgaactggttatatataatagttacaaaaccaatgtgt

SEQ ID NO: 159900 - DNA, 201 bp, Homo sapiens
atggagtgaaaatattttagtatcagttagtttattctaagctatgttttttttttttttagttttttaaatctttaaaattttacatgagttatcagtgraaccaatataatccaagatgtttctctctctctcttttttttttttgttagaaaattgccccacaaatggtttaggcaaggtaaaaaccagaggtcgata

SEQ ID NO: 159901 - DNA, 201 bp, Homo sapiens
tcaagccatcctcctgcctcagcctcttggtagctgggactacaggcacacacctccacgcctgataaatttcatagtttttgtagagacggggtttcacygtgttgcccaggctggtctcaaactcctggactcaagcgatccacccacctcggcctctcaaagtgttgggattacaggcgtgagcccccacacctggcc

SEQ ID NO: 159902 - DNA, 201 bp, Homo sapiens
ctgtagacagtcagaactacgaggctgtctcagggaaggccagaagtctcttctgtgctatttctttatccccaaatgaactgtatgcttcttcaagattrgatcacattgatttctcatgtacttttttctgtcccacacaatgccttgcacatagtagacagtaaaatattttgatgaactgaatcagacagcagttaa

SEQ ID NO: 159903 - DNA, 201 bp, Homo sapiens
tacccgtggtagctatggggctcgttcattcctgccctcagggaaagtcactcaaatccacacttcagtgatatctcagctgctgtgagtttaggacccaytgggtcatctgtagacagtcagaactacgaggctgtctcagggaaggccagaagtctcttctgtgctatttctttatccccaaatgaactgtatgcttct

SEQ ID NO: 159904 - DNA, 201 bp, Homo sapiens
acctcaggcattcgcctgcttcagcctcccaaaatgccgagattacaggtgtgagccacggcacccagcctaaagtagatgtttttactctcttcagagaytttacagattaactaacttctgagtattttttaaacaactcttctttattgtgactttgcttcagtgagagcagaaccggaagaatgtgggacaagaact

SEQ ID NO: 159905 - DNA, 201 bp, Homo sapiens
catcacactggattccttacagataaacaatttttatttcttaagtataccttgattaatctggggaacatttttaaaaattaaaaaagataaggtgagartcatcaaactgcactgtgggatgagggctggagagtcagagaggtacccgtggtagctatggggctcgttcattcctgccctcagggaaagtcactcaaa

SEQ ID NO: 159906 - DNA, 201 bp, Homo sapiens
gaaagctttcctgacaacattgaggcacagccctttgtgcgttaagacatggcttacttcattccagcattagcagttgatacttgatcagcttgttagaygtagaaggtctcactgaagtttgagaatcacactaactttttaaagtagatttttgtttgtttgtttttgagacggaattttgctcttgtcacccaggct

SEQ ID NO: 159907 - DNA, 201 bp, Homo sapiens
attagcttgattgaatcatttcacaatgtatatgtgtatcaaagcatcacactggattccttacagataaacaatttttatttcttaagtataccttgatwaatctggggaacatttttaaaaattaaaaaagataaggtgagaatcatcaaactgcactgtgggatgagggctggagagtcagagaggtacccgtggtag

SEQ ID NO: 159908 - DNA, 201 bp, Homo sapiens
cttttccagactctgctgtgttcaggcaacaattcggatgccccttcatgttcctcttgttgcttgctgcatgtcaaaccctgattggtaggaagcttctygaggctcggactgtgtattcgtgagtttcagatgcttctgcatgtttacacaggtcacttttcttgactaaatgattgatgtagtaattaggattaggct

SEQ ID NO: 159909 - DNA, 201 bp, Homo sapiens
attacagcctatactctgttggattaattgcccattactatttattgttcttattttctattttaaagtggcagttactttgatactgagaatattttggraacagagcaagtttatgtggtaaattctgggactttagcttttagtatcaaagaaagctttcctgacaacattgaggcacagccctttgtgcgttaagac

SEQ ID NO: 159910 - DNA, 201 bp, Homo sapiens
ctatagcaaaacaaaggtttaagattcattagatgaacttagatgaccgcagggccagccgtctcgctaaccataaagactacaagcagaaaacacttgtrggtgtaagattgtacatgtgtctcctgccataactactttcagtttaaaggacaaagactttcttccttatttgcttttagaacacgtgtattacagcct

SEQ ID NO: 159911 - DNA, 201 bp, Homo sapiens
ccccctgttacccaggctggagtgcagtggtgcagtcactgctcactgaagcctcagccccttgagcttgtgccatcctcccacctcagcctctcatgtakctgggactgcaggggcatgccaccgtgcccagctaattttttaaaattgtattttatagttatggggtctcacaatgttgcccaggttggctttgaactt

SEQ ID NO: 159912 - DNA, 201 bp, Homo sapiens
cacaggcagcctgctttcattaattatttaacttaatgaatgatggggtcttgctctgttgcctaggctggagtgcactgatgcagtcatagctcactgcracattgaacttcttgcctcaagcaatccgcccacattggtctcccaaagtgttgggattacaggcgtcagccaccacacccaggcaggctgctttagatg

SEQ ID NO: 159913 - DNA, 201 bp, Homo sapiens
gatgatgctggtgccagagtagtgttttaaccttagcgctctcccatggtaaccacaaaggcagcaggagggcaggtgggaggttccagagttgtcagcaygttggtgaaatgcctgccctcattttaacgacgccgtggatgtttgtgtttgccttccgttggctgtttcaaacttaactttctagtttgacaatcatat

SEQ ID NO: 159914 - DNA, 201 bp, Homo sapiens
tagaagggaagaggagaattaaaggtgaggggagcactttggtctgcattttccagtctcttcctgcccagagcccgggcctccacctgtgcctgagatcstgttccccttcccactcacagacattccctaagccacccgatgttccccagtataaaccaggcccctccaggccacaccctgctgggttattctcatcag

SEQ ID NO: 159915 - DNA, 201 bp, Homo sapiens
acccacagcattttctttctccttacgattattgccttcacactaagaatttattatttattgaaatcatctgtatcaagtagcatcaaatttattttatyttgccagtttttatagatccacttttagtgtacactcttaagtagaaaatagaattttcttgcagttttaaaaatcctttatactgtggaatctctaata

SEQ ID NO: 159916 - DNA, 201 bp, Homo sapiens
agatgcttctgcatgtttacacaggtcacttttcttgactaaatgattgatgtagtaattaggattaggctcaggagatcctctaataactggcttaagcrggacaggagtttatttgccctaaagaagtgatctttgccaccagagctgtgtgataactgcatcccgctcccttctcggcctgtcctggggacagcctca

SEQ ID NO: 159917 - DNA, 201 bp, Homo sapiens
ttccttttctgaccaaaatatttttattaagaaccccacttctactttcattaggccaaggatattttagttctaaaaaatgatttaaaaaatataaaaayggagctatgtgaaatgaataagctctgccttctgtagaactagcacattgtccatattctactcactgtaccccagaccttcgagaatatcagctctgga

SEQ ID NO: 159918 - DNA, 201 bp, Homo sapiens
tcactcttccggggatggaagaggagagcctggtggaggaacagatacgagcccctgctctgtgactatcttatttttttccccctttttccatacacagygcatactagtgtgatcccttcttactctgtggcccttgtccggtgccagaaagtaacttcccaggatggaagaggagagcctggtggagaaacagacaca

SEQ ID NO: 159919 - DNA, 201 bp, Homo sapiens
atcagttagtttattctaagctatgttttttttttttttagttttttaaatctttaaaattttacatgagttatcagtgaaaccaatataatccaagatgkttctctctctctcttttttttttttgttagaaaattgccccacaaatggtttaggcaaggtaaaaaccagaggtcgataggtagattcatacatacctat

SEQ ID NO: 159920 - DNA, 201 bp, Homo sapiens
acctttgccctggtttcccctgtgtcaggcttggccctgttcaggtctcagcatggtgtcccatcccgttttgtgcctctgctagcagttagaccctcccrgctgtgatatgctgctttttccacgcgatgagggctcctgcctgcccgcctgctgtgcacctggcccatgtccggtgccaggaagtcactcttccgggga

SEQ ID NO: 159921 - DNA, 201 bp, Homo sapiens
tattgtattggtattccctgggttgtatctggggattctcatatgctgtcgagaacaaggtatatttgggtaacttacaaagtggagatttcgcaaaagcmtgtgggaggcattaggagctacaagatatgtgggcacgatgagtgagttccagtaagtggtttagccctaaacctggtctctctgcctgacacctgttct

SEQ ID NO: 159922 - DNA, 201 bp, Homo sapiens
cagctccgttcttgctgttgaatagaatctggcctgtgctgcctgttggcttagagctgacggctctgtggatgatggcaagaagttactttcttacatcygtagaattctgtctctagcaggcccatgccaaaatgatggcatctgaaccagcactgacgctggggaggctctggagggggcgagggataagggatgtgg

SEQ ID NO: 159923 - DNA, 201 bp, Homo sapiens
gtagaagacatttcagtaaattggggaatgcctatacaatgtaacagcatgtagccatgtcaaagtcccgttgaggaagaatacttagtgactgacatggyttgcacctgttccctccaaacctcatgttgaaatgtggcctccagggttggaggtgggcctagcaggaatgtttaggtcatgggggcagatcccttatga

SEQ ID NO: 159924 - DNA, 201 bp, Homo sapiens
ccctggaagtcaaataaagaaggcaattcaaggagaagagaaccactgtgcaaaattctgctgcgaacttttatgtgtgagctgtataaagccatggagcracaggagctgggagccgacattactgtttacaatgcaggggtgtactgtgtcttcctgaaagtcacttagtattgggtaggggtgtggcagttaatgtct

SEQ ID NO: 159925 - DNA, 201 bp, Homo sapiens
ctgtaagttggaatgactaaatctgaaagtattgttttaaaataaaggtaaggcatctttgatactataaagcagggacagaatgaaaaacaccttctctytccggaagacatctgttgtactgaaaatctgaagtcactcttgggcagaaaggaaggcttgggaggcttggagaccgcggttggaaacctggccctcctg

SEQ ID NO: 159926 - DNA, 201 bp, Homo sapiens
cctggcaaataatgattgactctgggcgatttgtctccactgacatatccttaacaggaatcaaaagttacggcagctcctgagttcagcggtccctacgygagtaacagcagtctgtgagtttacatagttgtgggtcctggctgagtcattttatatctcaccatgtggcttctctctactcagtaggtgagtggaagt

SEQ ID NO: 159927 - DNA, 201 bp, Homo sapiens
ggccagcttgagggcctgccagaggctgtgcggccatgaccatgagcaagggccttgtaggacatggcaaatactggatgtttgttaacagcagtgggaaygtgttactgttagaatatcactgaaggcatctgtttcatctctgaaactcccctactttatcttctacctctgcatcaccattactgccacccctctaga

SEQ ID NO: 159928 - DNA, 201 bp, Homo sapiens
gcgctccccgaatccgtacacctgcgcgtgcacacctgggagcgccctgcgcggcggcatcctcgctaggtggtgctggagcagccttccggggatagcgsgcagccatgcgggggatttaaatgatccctttctcccttgagtttgaatagaagggtgtccttccaggaccggcggcattcccgcagtggccggctggag

SEQ ID NO: 159929 - DNA, 201 bp, Homo sapiens
ttttagcactgtaaagatcagaattctgtatctaaaaacttgtctaagtctgcaattctttataaagggccaagtccatgtttttaacctcactcgaagtygtcctttgaacatcggctgtccctggcaaataatgattgactctgggcgatttgtctccactgacatatccttaacaggaatcaaaagttacggcagctc

SEQ ID NO: 159930 - DNA, 201 bp, Homo sapiens
cacattggtctcccaaagtgttgggattacaggcgtcagccaccacacccaggcaggctgctttagatggggaaatcaggggagggctctgaggtgttaaygtttgagcagagcataagtgaggtgatggatgaaatcttgtaaaggtctgggacaccagcatcccaagcagaaggcagatgttgggttctgagatgggga

SEQ ID NO: 159931 - DNA, 201 bp, Homo sapiens
tttaagattcattagatgaacttagatgaccgcagggccagccgtctcgctaaccataaagactacaagcagaaaacacttgtaggtgtaagattgtacaygtgtctcctgccataactactttcagtttaaaggacaaagactttcttccttatttgcttttagaacacgtgtattacagcctatactctgttggattaa

SEQ ID NO: 159932 - DNA, 201 bp, Homo sapiens
aggaggcttccaaggcgatcgggcagtgtcagtcttcagccactaagccgagaagatctgggaaggagtcagtcagtgagccttgcgccagagttccaggractctaggaatggctgccaggtgagttggacagtccaatttccagtggggtcctgcacagatgggacattgcttaggaggaatccgggctgcagacattc

SEQ ID NO: 159933 - DNA, 201 bp, Homo sapiens
atttggtggaccgttgaccttgataaatcctcagctttacaagtacaattacaactgtgtttctcacattacatgaagtgtaactgaaaaggttcagacarcagatttttaatgatagtaaaaacaaggactaaagccataaaacactcttgttttgttttgttttgtttttgcaatggagtctcgcttttgtcgcccagg

SEQ ID NO: 159934 - DNA, 201 bp, Homo sapiens
ttacactgattcacatgacttttataagtcattatgcatgacatacttattttacttttttgagacggggtctcactctgttgcccaggctgcaatgcagyggcatggatctggactcactgcaccatccacctcccggggtcaagcaatcctcccacctcagcctcccgagtagctggaccataggcacacagcactgtg

SEQ ID NO: 159935 - DNA, 201 bp, Homo sapiens
gggctgtacctcttagatcattgaatagtgcagaggtgcaggaagtgccgtttattgggatgactggtgttgggcagaggggtgaccttaccctccagtcrgtcactcagcacacaggggcttcttcccttgactgtcttcctagcaaagatgacctcgtctttccttgaagatattgataccattcagctaacacttcat

SEQ ID NO: 159936 - DNA, 201 bp, Homo sapiens
tattaagtgggccacgtgtcttctcagcgaggttcttacgtaggtatgaaggaaggaagcctgttgtgatccccgggggagctgtgagtgtagagctggcyctgaaagccttggcatctctcctgcaggaagaatcccaggagcaggtgaatcccacctgcattgagcattttttcagtttaaagcaaatccttactgcta

SEQ ID NO: 159937 - DNA, 201 bp, Homo sapiens
ttggtggaaaccactgagctccatggtattaagtgggccacgtgtcttctcagcgaggttcttacgtaggtatgaaggaaggaagcctgttgtgatccccrggggagctgtgagtgtagagctggctctgaaagccttggcatctctcctgcaggaagaatcccaggagcaggtgaatcccacctgcattgagcatttttt

SEQ ID NO: 159938 - DNA, 201 bp, Homo sapiens
ccagaagttttgggtcagcttcttttttgtgtgaccttggtggaaaccactgagctccatggtattaagtgggccacgtgtcttctcagcgaggttcttaygtaggtatgaaggaaggaagcctgttgtgatccccgggggagctgtgagtgtagagctggctctgaaagccttggcatctctcctgcaggaagaatccca

SEQ ID NO: 159939 - DNA, 201 bp, Homo sapiens
agcagcacaattcacaattgcaaaaatgtggaaccaaccaaaagcccatcaatcaacaagtgggtaaagaaactaatatatatatgatggaatactactcrgccataaaaaggaatgaattaatggcattctcagcaacctggatgagattggagactattattcaaagtgaagtaactcaggaatggaaaaccaaacatc

SEQ ID NO: 159940 - DNA, 201 bp, Homo sapiens; identical to SEQ ID NO: 29938

SEQ ID NO: 159941 - DNA, 201 bp, Homo sapiens
cactgatatgtggaaactaagctatgaggatgcaaaggcataagaatgacacaatggactttggggactcagggagaaagggtgggaaggggatgagggayaaaagactacaaattgggtgcagagtatactgctcgggtgatgggtgcaccaaaatctcacagatttgatttcattgcatctttcatcaaaactgtcaaa

SEQ ID NO: 159942 - DNA, 201 bp, Homo sapiens
tctactgatccatttacccataatgagttgggattgcttgcagatgaaattaaaatcaatggcaaaagtaaagacaaagtttttgtctgtgctagaaaggwtaaaggatcaagcagatggaaaatacatcttagtcactgggatcacgcccactcctctaggagaagggaagagcacagttatgactgggctgtgcaggct

SEQ ID NO: 159943 - DNA, 201 bp, Homo sapiens
ggaaggtagtcacttccaggtgtgatgattggggaaggggtcatgggggaaagccactgaggtgggcctttaatggagtgggaggtgggtacaggaggacwatattctatattctagacagagggaatggcctcagcaggagggtgaagatgagaccatttttgagtgtggagaacagtataacttaatatgcaagattta

SEQ ID NO: 159944 - DNA, 201 bp, Homo sapiens
atgcaatcaatcaaagcaaacctatgggacgcttatataaaaggcaggtttcagctttctactgatctctctagagcgatgttgtacaatatggtagtcaytagtcacaggtggctactgagcacttgaaatgcgaatagtccaaactaagatgtattataagttggaaatgcacgccagattttgaatattttctagagg

SEQ ID NO: 159945 - DNA, 201 bp, Homo sapiens
gaggctggagagtgggaggtagaggatcaggaaaaataattaatggatactaggtttaatacctgggtgatgaaataatctgtataacaaacccctatgaracatgtttgtctatgtaacaaacctgcacatcttgcatatgtatcccgggacttaaaagttaaaaaaaatgcaatcaatcaaagcaaacctatgggacgc

SEQ ID NO: 159946 - DNA, 201 bp, Homo sapiens
cgtggatggagttggaggccattatccttagcaaactaacacatgaatagaaaaccaaatacctactacatattctcacttacaaatgggggctaaatgaygagaacacatggacacatagagggaaacaacacacactgggacctatcagaggctggagagtgggaggtagaggatcaggaaaaataattaatggatact

SEQ ID NO: 159947 - DNA, 201 bp, Homo sapiens
gacgtttttcaaaaactctggaggggcattcaacattttttaggtggcctgaactgccgaggaaaacaaatgctggccagattccaagtgaaatactgcasaggatcccccaaggcacgaagctggctggagggagctggagggagcgccccacctgccgcgggaaactcacgaggaaagtgcagaccttcggtggcgctg

SEQ ID NO: 159948 - DNA, 201 bp, Homo sapiens
gcggatcttcatccatgtccctggatggagtaaggcacactctggaggtagcagcgagtttgaagtgtctaagaaaaaggccttctgcaattcacaattcktatggctacctgcacctttcatttacccactcaaagctaaaggtagccgacgtttttcaaaaactctggaggggcattcaacattttttaggtggcctga

SEQ ID NO: 159949 - DNA, 201 bp, Homo sapiens
atgctgttttggttactatagctctgtagtataatttgaaatcagataatgtgattcctccagttttgttatttttgctcaggatagctttggctattctmagtctttcgtgcttacacataaattttagcattttttttctatttctgtgaatatgtctttggtattttgatagggattgcatttaatctataaattgct

SEQ ID NO: 159950 - DNA, 201 bp, Homo sapiens
tagcactgagctgaggtgacggcgcggaggcgccaaaatctccacttagggcaatgaaaggtcatcggtctccctcttgccggcactgaaggaaccggcgrggtgcgacaaggtggggcggggcaaggaagcggatcttcatccatgtccctggatggagtaaggcacactctggaggtagcagcgagtttgaagtgtcta

SEQ ID NO: 159951 - DNA, 201 bp, Homo sapiens
cccagccagagagaacccaacctgagtgccagcgagagcctgtccttggtcgctccgacccctcgccaggggatgtccggtaggaatagcactgagctgakgtgacggcgcggaggcgccaaaatctccacttagggcaatgaaaggtcatcggtctccctcttgccggcactgaaggaaccggcgaggtgcgacaaggtg

SEQ ID NO: 159952 - DNA, 201 bp, Homo sapiens
tcagtctgaggtacttgttatggcagccctagtaagataaaatgggaggtaccagcgtttttaaattgattaaccataaaaattaactttgaagaagattkcaggcaatattatttaaaaatttaattaataaaatcaaattgaaaaaactctattcttcagaaaaatgccagtggcacaatattagaaataaggccaaga

SEQ ID NO: 159953 - DNA, 201 bp, Homo sapiens
gcttcaactaattttgggtttggctttctcttccttttctaattctttaagatgcattgtgaggttgtttatttgaagtttttctactttttaaatgtagrcacttccatattagtattgctttcactctatcctacaggttttggtatgttgtgtttccattatcatttgtttcaagaaattttctaatctccttcttaa

SEQ ID NO: 159954 - DNA, 201 bp, Homo sapiens
gaggcaagaacgaatcaaataaggagtgctctaatgctatacaatatacaaattctataattgcaatttataatgtttcaatttttgggaagaatcttttsatggagcaactattttataagatattatttttaatcagatacattttttgctatattagattggaaagaaacttaagagacctatgatcttgcaacatct

SEQ ID NO: 159955 - DNA, 201 bp, Homo sapiens
ggattccctgtaggggatgggaattgcacctcttctctttcttccttctagcttgtgactcatcttttactggaaggataccttcttttaatatctcctayctgatttcccatatgcaaatcaacactctcagctttcatgtgttcacaccatgagtaccatctgccagactctatctctttattagagtatttctcctct

SEQ ID NO: 159956 - DNA, 201 bp, Homo sapiens
tgaattcaaatattgatggaagcataacattatgaaaagcaataaagtgtattttcttctaaattaaaacaatatagggcagaagtgttctaaaaattggytgcaggctataaatcactctatatgtccccaaaactgatattttaccattcaaaataaaaattgtcaaatttttaggtatttttatatacatagagtaac

SEQ ID NO: 159957 - DNA, 201 bp, Homo sapiens
gtgtattttcttctaaattaaaacaatatagggcagaagtgttctaaaaattggttgcaggctataaatcactctatatgtccccaaaactgatattttaycattcaaaataaaaattgtcaaatttttaggtatttttatatacatagagtaactgatctataaaattttattaacaacactgatactgaatacaagaca

SEQ ID NO: 159958 - DNA, 201 bp, Homo sapiens
tatatatatgccagatggatagtttgcaaatattttctcccattctgtgagttgtctcttcactttgttaagtgtttttgtttttttttttttgctatgcraaaactttttacctggatatgatcccatttgtccatttttgctttggttgcctgtgcttttggggtattactcaagaaatctttgctcagtccaatgtcc

SEQ ID NO: 159959 - DNA, 201 bp, Homo sapiens
agctaggatttccagtactaggttgaataacagtggtgcaagtgggcatccttgtcatgtcccagatcttagaagaaaggctttcagttttccccattcartgtgatactagctgtgggtctgttgtatgtgacttatatcatgttgaggtctatttattttatatccagttatttagtgtttttttaatcatgaatggat

SEQ ID NO: 159960 - DNA, 201 bp, Homo sapiens
cctgtcttttaggtgaaagccattttaattggggtgagattatatcttattgtagttttgatttgtatttctctgatgattgattatgttgagcacctttyatacacgagtttgccatttttatgtcttcttttgaatttctgtcttttgctcattttaattgaattattagtaaaagacttatttcctatagagttgttt

SEQ ID NO: 159961 - DNA, 201 bp, Homo sapiens
gttgtatgtgtttagaaatttatccatttcttctaggttttccaatttattgacatatagttgctcaaagtagactcatgatgctttgaatttctgtggtrtttgttgcaatgccttcgtttgcatctctgattttatttatttttgtctctttttcttagtctggctaaaagtttgtcagttttgtttatcttctcaaaa

SEQ ID NO: 159962 - DNA, 201 bp, Homo sapiens
agtttgctagatcatatggcggctttatttttagctttttgaggaaactccaaattgttatccatattggttgtactaatttacattcccacaaacagtgwatgagcatcctcttttatccaaatatgtgccagcatttgttcttgcctgtcttttaggtgaaagccattttaattggggtgagattatatcttattgtag

SEQ ID NO: 159963 - DNA, 201 bp, Homo sapiens
tctaattattttttatggctgaatagtgctctgttgtgtatatgcaccacattttctttatccatgcatctgttgaaagacccttaggttgattccaaatytgggctattgtgaatagtggtgcaataaacataggggtgaagatatttctttgatatatggatttcctttcttttgggtatatactagcagtgagtttgc

SEQ ID NO: 159964 - DNA, 201 bp, Homo sapiens
ttcctaacctccagaactggggaaaataaatgtctgttgtttataagctacccagtttattgtattttgttacagcagcctgagtggactaagacactaartgaaacataaattttcatttaggtagatcaagtgactgatgcttcaaattaacttttctctttttctattccaagttttatatctgtgtgtgtgcatata

SEQ ID NO: 159965 - DNA, 201 bp, Homo sapiens
catggtctgaacgtttgtgtccctagccaaattcattgaaatcctaacccccaggtgatagtattgggaaatgaggcctatgggaggtgcttagaattagrgaccttataaagagaacccagagaactagcaaacctcttccaccatgtaaggacacagctagaagcttttatgtataaaccagaaagtgggtcctcacca

SEQ ID NO: 159966 - DNA, 201 bp, Homo sapiens
aaatgttcatcttttagtctttctactcgagatattagtagtttatataccacaattacagtgttatactattttgtgtttttctgtgtacttaatattaycattgagttttgtgctttcagataattccttgttttttttaatgccctcttctttcagattgaagaactccctttagcttttcttgtaggacaattctgg

SEQ ID NO: 159967 - DNA, 201 bp, Homo sapiens
cagtgtccaattcatttagcaattgtgtgggtttaaaatttttattataaagtatttttattactattgtattgaagttatatgacatgaatttatacacytccactttatactactttttgccgtgtttcataaacagagttctttaatatgtggttaaatctgaacatttaccagagataacccctctcctttcctggc

SEQ ID NO: 159968 - DNA, 201 bp, Homo sapiens
attaccattgagttttgtgctttcagataattccttgttttttttaatgccctcttctttcagattgaagaactccctttagcttttcttgtaggacaatwctggtgctgataaaattcctcagcttttatttatgtgagaaagtcttcatttctccttcatatttaaaggattttttgctggatatactattctaggata

SEQ ID NO: 159969 - DNA, 201 bp, Homo sapiens
tgcggaaaaagctagtgctaatgattggatctttattccgtgtcaagcctgctggttcttttagatttcgtataattctcataggcactcttggtgccagstgtattagtttacttacaaataaaagctaataattatgtggtactcactatgttatatagcgtgcacattggaaaatgctttacctaataattctaagag

SEQ ID NO: 159970 - DNA, 201 bp, Homo sapiens
ttcccacccctggagactctcctttggccccctcccctgctcttctctggtcctcatgcagctctttgattcatgcttcctgcttcttgatacaggtgttsttccccactccaaagacaaagtgtagaccacagagttttttgctctcctttgcctatctcctgcccatggcaaattcacacaggctgagcccaaatcggg

SEQ ID NO: 159971 - DNA, 201 bp, Homo sapiens
acccattatgctatactgtcctcttattagctgttttgagacacaactctttcaaacggaacaaattcatttcaaaaggaaaccaggacacaaggcataargaagctgcttgttcattgttgcacatgaggttattggcagacaaaggactgaattcatgtctcatctctctagctagagcactccactgtcccatgggac

SEQ ID NO: 159972 - DNA, 201 bp, Homo sapiens
ctgaatatatgtggcagtgagaggaaggaagagtgaaagattgataaaacatcttaaatgttaaccttttaaagtaaacatgcatctttaatattagaactagctaatgcttactgagtgcaaatggagagccaggttgtgctccaagtgacttttatatatcatctcatttaacaaacaataaggtactgcattctcccc

SEQ ID NO: 159973 - DNA, 201 bp, Homo sapiens
caaatgatattaacagcttctgccttgtggggttataagaattaaagaagcaatgcgtgtaaagtacctggcatttagcaggcactcagtaaatggtagaygcttccactgccggtgttccttgctctctcctagactcagacttccagctttctggccttgtgtatcccggaagctccagccaatctactttctgtgctg

SEQ ID NO: 159974 - DNA, 201 bp, Homo sapiens
agttttgtttatcttctcaaaaaaacaactttttattgtttcactgatgttttgtattttttgtttcaattccatttactttagctctaatctttattacttttttttgcttcaactaattttgggtttggctttctcttccttttctaattctttaagatgcattgtgaggttgtttatttgaagtttttctacttttta

SEQ ID NO: 159975 - DNA, 201 bp, Homo sapiens
actgtgtattttcaaatagcttgtcttcaagctcactacttctttcttctgcttgatcagttctgctattaagggaatctgatccattcttccgtatgtcwactgcattgttcaactccagaatttctgcttgattctttttagttacttcaatttcttcactaaatttatctgataggattctgcattccttctctgtgt

SEQ ID NO: 159976 - DNA, 201 bp, Homo sapiens
tatttagtgttcatgtttttggtgaggttatgtttccctggatgatcttgttgcttgtggatatttgtcagtatctgggcattgaagagttaggtgttgaytgtagtcttggcagtctgggctatttcccacccatccttcttgggagggctttccaggtatttgaggggatttgagtgttgtgatctaagtttttgttca

SEQ ID NO: 159977 - DNA, 201 bp, Homo sapiens
actagatcacatgtcccttaagttcactggctctgagcccagcacagcaccagaacttgcctagaagttgcagtccttgtggcccaaactgcctttccagytttttaggaccccagagaactttagcccatggtggcaaggtttgctgaactgaagctacaatcactggggtgggcgattcccctctggctggggcttgtc

SEQ ID NO: 159978 - DNA, 201 bp, Homo sapiens
ggggcagtcaccaccgtctccagatgagcgacaccgggagtctttaaatctcccgactgagaagctctttgtgtccagatcggaggtgggcaagtctgtgrgaccagatgcccagacttgcccattgtcccccacccccaccccaatgacacttgcttctctcttgttctatctctagttcctcactccattactctgttg

SEQ ID NO: 159979 - DNA, 201 bp, Homo sapiens
tgaagcaggagaatggcatgaacccaggaggcggagcttgcagtgagctgagatcacgccactgcactccagtctgggcgacagagcgagcctccatctcaaaaaaaaaaaaaaaagaaaaaaaaaagagaatgagatcatgtcctttgcagggacgtggatggagttggaggccattatccttagcaaactaacacatga

SEQ ID NO: 159980 - DNA, 201 bp, Homo sapiens
taagatgtattataagttggaaatgcacgccagattttgaatattttctagaggggaaaaaaagtaaactatctcagtaatttttatattgatcacatgttgaatgatatatattaggtatactagattaaataaaatatattattacattagtttcacttgtttctttttacttttctagatgtggctttttaaaaaatt

SEQ ID NO: 159981 - DNA, 201 bp, Homo sapiens
aagatgtattataagttggaaatgcacgccagattttgaatattttctagaggggaaaaaaagtaaactatctcagtaatttttatattgatcacatgttgaatgatatatattaggtatactagattaaataaaatatattattacattagtttcacttgtttctttttacttttctagatgtggctttttaaaaaattt

SEQ ID NO: 159982 - DNA, 201 bp, Homo sapiens
ttcaaacttaagttgtccagctccagaatctcagaccttacccattatgctatactgtcctcttattagctgttttgagacacaactctttcaaacggaamaaattcatttcaaaaggaaaccaggacacaaggcataaggaagctgcttgttcattgttgcacatgaggttattggcagacaaaggactgaattcatgtc

SEQ ID NO: 159983 - DNA, 201 bp, Homo sapiens
agatgtattataagttggaaatgcacgccagattttgaatattttctagaggggaaaaaaagtaaactatctcagtaatttttatattgatcacatgttgaatgatatatattaggtatactagattaaataaaatatattattacattagtttcacttgtttctttttacttttctagatgtggctttttaaaaaattta

SEQ ID NO: 159984 - DNA, 201 bp, Homo sapiens
agctaaggcctagaattggtaaccccaagagccttcctggtgctctagcctattgcagctgagctggtacctaacctgcaagacaaagttctgtttattaytccctctgattttcttaagcagaaaggccctctttctttgtagccataacagctgggaatgtgctgggacacacctaaattcagcatggccctcagtctc

SEQ ID NO: 159985 - DNA, 201 bp, Homo sapiens
gatgtattataagttggaaatgcacgccagattttgaatattttctagaggggaaaaaaagtaaactatctcagtaatttttatattgatcacatgttgaatgatatatattaggtatactagattaaataaaatatattattacattagtttcacttgtttctttttacttttctagatgtggctttttaaaaaatttag

SEQ ID NO: 159986 - DNA, 201 bp, Homo sapiens
ggtaccctgttgctgactgctctgaatatatgtggcagtgagaggaaggaagagtgaaagattgataaaacatcttaaatgttaaccttttaaagtaaacwtgcatctttaatattagaactagctaatgcttactgagtgcaaatggagagccaggttgtgctccaagtgacttttatatatcatctcatttaacaaaca

SEQ ID NO: 159987 - DNA, 201 bp, Homo sapiens
tctcaaggttgaagataagtcaatggagagagtctacactctgatttccagtagagggtaccctgttgctgactgctctgaatatatgtggcagtgagagraaggaagagtgaaagattgataaaacatcttaaatgttaaccttttaaagtaaacatgcatctttaatattagaactagctaatgcttactgagtgcaaa

SEQ ID NO: 159988 - DNA, 201 bp, Homo sapiens
atttatccatttcttctaggttttccaatttattgacatatagttgctcaaagtagactcatgatgctttgaatttctgtggtatttgttgcaatgccttygtttgcatctctgattttatttatttttgtctctttttcttagtctggctaaaagtttgtcagttttgtttatcttctcaaaaaaacaactttttattgt

SEQ ID NO: 159989 - DNA, 201 bp, Homo sapiens
ctggaacccttgcctactttgaggtaatgtcctcagagggcctagaggacccactctctctgttctcaaggttgaagataagtcaatggagagagtctacrctctgatttccagtagagggtaccctgttgctgactgctctgaatatatgtggcagtgagaggaaggaagagtgaaagattgataaaacatcttaaatgt

SEQ ID NO: 159990 - DNA, 201 bp, Homo sapiens
acaccagtcatgccccagatgaactccagtatgaggaaaaagaggatctctggctaacactgggccctgctactaaagcaatgaacctctcttaacacccrttctagaaggggcagcactcctttcctttcaatgagattggactgtggaaggggtttgactggatgctgtacctggagatactagggaattaggcagaaa

SEQ ID NO: 159991 - DNA, 201 bp, Homo sapiens
agcacaatttattgaagtgactgttctttccccagtgtatgttcttggtgtctttgtcaaaaaggaactcactgtagatgtacggatatgtttctgggttmgatattgtattccattggtctatgtgtcagcatgccagtatcatgctgttttggttactatagctctgtagtataatttgaaatcagataatgtgattcc

SEQ ID NO: 159992 - DNA, 201 bp, Homo sapiens
aacaccagtcatgccccagatgaactccagtatgaggaaaaagaggatctctggctaacactgggccctgctactaaagcaatgaacctctcttaacaccyattctagaaggggcagcactcctttcctttcaatgagattggactgtggaaggggtttgactggatgctgtacctggagatactagggaattaggcagaa

SEQ ID NO: 159993 - DNA, 201 bp, Homo sapiens
tttttgtatatggtgactgataggggtctagtttcattcttctgcatatagatatccagttttcccagcacaatttattgaagtgactgttctttccccartgtatgttcttggtgtctttgtcaaaaaggaactcactgtagatgtacggatatgtttctgggttagatattgtattccattggtctatgtgtcagcatg

SEQ ID NO: 159994 - DNA, 201 bp, Homo sapiens
gctgaacaccagtcatgccccagatgaactccagtatgaggaaaaagaggatctctggctaacactgggccctgctactaaagcaatgaacctctcttaayacccattctagaaggggcagcactcctttcctttcaatgagattggactgtggaaggggtttgactggatgctgtacctggagatactagggaattaggc

SEQ ID NO: 159995 - DNA, 201 bp, Homo sapiens
atcactcacctgattttatggttcttataaaggcatttttttgtttagagagttgttaaatttagtgttcctgcagggaggaaaatcagtggaggcttctrtttggccatcttgctctgccttcatctcaaatgagcagttatacattttttcatcaaagtattcagcaaatgaagctccaagatgctctaaacttaggac

SEQ ID NO: 159996 - DNA, 201 bp, Homo sapiens
aagacaagtggatgcatggctgaacaccagtcatgccccagatgaactccagtatgaggaaaaagaggatctctggctaacactgggccctgctactaaarcaatgaacctctcttaacacccattctagaaggggcagcactcctttcctttcaatgagattggactgtggaaggggtttgactggatgctgtacctgga

SEQ ID NO: 159997 - DNA, 201 bp, Homo sapiens
gtccttcaagttccttcagagatataggcggcaccgctctggaatcttagcctgattccagaataaaggaatgttaatagccctctgtgagctttccaggrgcccacacaataaggttggtaggctttcaaagaaatcagttccattagtgaagtagcacaaacaattgtgaatttccttgaactcacctgaaagccttaa

SEQ ID NO: 159998 - DNA, 201 bp, Homo sapiens
atgggagaaaagttttgcaagctatacatctgacaaaggtgtaatatccagcatctataaggaacttaaactaatttacaagaaagaaacacacaaccctrttaaaaaaccattaaaaagtgggtaatggacatgaatagaaatttctcaaaagaagacataacatgcagccaacaatcatatgaaaaaagctcaacatca

SEQ ID NO: 159999 - DNA, 201 bp, Homo sapiens
atggccattcaagtggatctggacaagggtttctcgattcccctgtgatgcttgcggtttgcactttagctctttgtatatgtgtctggattatcttcatyttcagaatccccacaccctgatggctccttatcttattgccctggctagtccagggaggaagataggctggagtcatccttggtattctcccagtcttct

SEQ ID NO: 160000 - DNA, 201 bp, Homo sapiens
agtggcacaatattagaaataaggccaagaaacgaattaaagtttgtgaatatgtagcatgaataattattcagaattctacagttttatttactgtacakatgtttatttttacattttagaaactatatttttggaaatagttttaatagaactattttgtagttatttttaaagaactacttattttgttttataagt

SEQ ID NO: 160001 - DNA, 201 bp, Homo sapiens
catagtttgagttcttagatttaagtctttaatccattttatttgatttttgtatatggtgactgataggggtctagtttcattcttctgcatatagatayccagttttcccagcacaatttattgaagtgactgttctttccccagtgtatgttcttggtgtctttgtcaaaaaggaactcactgtagatgtacggatat

SEQ ID NO: 160002 - DNA, 201 bp, Homo sapiens
agccctcagaattgtgaggaaataagtttctgttgtttaagcctctcagtctgaggtacttgttatggcagccctagtaagataaaatgggaggtaccagygtttttaaattgattaaccataaaaattaactttgaagaagattgcaggcaatattatttaaaaatttaattaataaaatcaaattgaaaaaactctatt

SEQ ID NO: 160003 - DNA, 201 bp, Homo sapiens
ccccagttctactccttcccgaaaggagccacctaggtgtggaatgccccctgggaggtgccttatgtctacaaggggaaccagtggatcaggtacgacarctccaagagcttcaccctcaaggtaaggccctccacactcttcctaatgcatggttggggagagttgggggacctaccctccagttgcccttgaattgca

SEQ ID NO: 160004 - DNA, 201 bp, Homo sapiens
tgttcaactccagaatttctgcttgattctttttagttacttcaatttcttcactaaatttatctgataggattctgcattccttctctgtgttatgttgatttttttttaatttcctcaaaacagctattttgaattctctgtatgaaagatcacaaatctctgtttctttgggattggccccttgttccttatttagtg

SEQ ID NO: 160005 - DNA, 201 bp, Homo sapiens
gctgggtgacactggaaccagtttctattatttccagcaaaggggaatgggctgggatgaggatcttagaaaagaaatggagggaggacagagaattggcytgagtacagcagggccaatctgagttatgactgctccttctgtacctgccccagttctactccttcccgaaaggagccacctaggtgtggaatgccccct

SEQ ID NO: 160006 - DNA, 201 bp, Homo sapiens
attttccatttatgctaggagcacatctcatgatccatcttcttcccactcttccttccctcccttccaccctctttcttcctaatttatgtggtttaggmagctgtaatagttagtctgcctaatgattagtaggtgagtaaatgggctagatgtcatttcagtggagatttcaaccagggatttaaaaattgacatggg

SEQ ID NO: 160007 - DNA, 201 bp, Homo sapiens
cagacaaaggactgaattcatgtctcatctctctagctagagcactccactgtcccatgggacaaaagcagggcagggagctgggtgacactggaaccagkttctattatttccagcaaaggggaatgggctgggatgaggatcttagaaaagaaatggagggaggacagagaattggcctgagtacagcagggccaatct

SEQ ID NO: 160008 - DNA, 201 bp, Homo sapiens
tctcaaacattggggaattttaaaaaatatattttccatttatgctaggagcacatctcatgatccatcttcttcccactcttccttccctcccttccacyctctttcttcctaatttatgtggtttaggcagctgtaatagttagtctgcctaatgattagtaggtgagtaaatgggctagatgtcatttcagtggagat

SEQ ID NO: 160009 - DNA, 201 bp, Homo sapiens
aaacccaatacagtgatcactcacctgattttatggttcttataaaggcatttttttgtttagagagttgttaaatttagtgttcctgcagggaggaaaaycagtggaggcttctgtttggccatcttgctctgccttcatctcaaatgagcagttatacattttttcatcaaagtattcagcaaatgaagctccaagatg

SEQ ID NO: 160010 - DNA, 201 bp, Homo sapiens
atgagagggttccccaaaagataccaacagcagaatgtttagcctttgaatgctgtccacagtcactctcatgccgtgcttcattggtagagccttcagcrtccttctccccaggagaggcaggttgctgtcatttttctggattcttttctccaagaaattcaactccccagcatcctattctgtgtgtcacaggaggtg

SEQ ID NO: 160011 - DNA, 201 bp, Homo sapiens
ttgatggacagctcatgttctctacctccctgtccctgtgactgattgtatccattcatctttcacaaaaaaggaagcagaatagtggcttgggataatcycaaacattggggaattttaaaaaatatattttccatttatgctaggagcacatctcatgatccatcttcttcccactcttccttccctcccttccaccct

SEQ ID NO: 160012 - DNA, 201 bp, Homo sapiens
aatctcccagtcgatgctccatgcacgaacaattctcagcattgtagtaagcccatttggaagacaagtggatgcatggctgaacaccagtcatgccccaratgaactccagtatgaggaaaaagaggatctctggctaacactgggccctgctactaaagcaatgaacctctcttaacacccattctagaaggggcagca

SEQ ID NO: 160013 - DNA, 201 bp, Homo sapiens
tggtagagccttcagcatccttctccccaggagaggcaggttgctgtcatttttctggattcttttctccaagaaattcaactccccagcatcctattctgtgtgtcacaggaggtgccatccacaaaggattctctgtgaatagtatcccctgaagtttgccatgttgctgtacagccccacaacaacctatcaactagc

SEQ ID NO: 160014 - DNA, 201 bp, Homo sapiens
tcaagccccatctccctttccccatttactggccatggctgccataggcttgccccttcccagccagagacaggatgaccctggcaccctctgaccaagayctttttgtctttaggtctggccctcctgctgcagctgggtaagtatcccatgagagggttccccaaaagataccaacagcagaatgtttagcctttgaat

SEQ ID NO: 160015 - DNA, 201 bp, Homo sapiens
gacacccccacttgcaggacctaatgaccagggagactacaaatacttttatatggtgagtgaggaagccagtcctaacagacatcttcaaagcctgtcastggatcccctgccccagactgcaaaggagaccaagaaacttgatggacagctcatgttctctacctccctgtccctgtgactgattgtatccattcatct

SEQ ID NO: 160016 - DNA, 201 bp, Homo sapiens
ccttttaaaataaaattctactctggacattatttgtttattttaaaatttaactttcagaggatgaccgaatttccctcatttccaagttttcggaagasagcttactgttatccccagataccaacaacagcttttggatcaaaggactctaaaccgagcacgttgcagctttcttcataagagctgtgacctcgtcac

SEQ ID NO: 160017 - DNA, 201 bp, Homo sapiens
ttggaattattccctcctcctctgttgctcagaatagttgaataggattattattagttcctctttaaatgtttggtaaaattcagcagtgaagttgatakcatttggatctgtgtccctgcctaaatctcatgtcaaatcttaatccccagtcttggaggtggtggttggtgattggatcacgggagctgatttttctct

SEQ ID NO: 160018 - DNA, 201 bp, Homo sapiens
gctggaactttggatcccagggataagacctagcattcaggattgaatcatttccagattaatcagtctcttccaagctccaaggactgtaagtttctctraagtgagtgaaccccgggcctcagaccccagtgtagacatcccagaactcttctctgaccaggtctccctgaagtctgctcttccttcatcatagctctt

SEQ ID NO: 160019 - DNA, 201 bp, Homo sapiens
aaagtacctggcatttagcaggcactcagtaaatggtagacgcttccactgccggtgttccttgctctctcctagactcagacttccagctttctggcctygtgtatcccggaagctccagccaatctactttctgtgctgaggggttgatatctggctccctcatcctccccaggatgccctgtcttttcttccctgaag

SEQ ID NO: 160020 - DNA, 201 bp, Homo sapiens
ccttacgagttggatgatctcggtcaagttgcttcatctctctgaataccacttaaaggtcaaatgatattaacagcttctgccttgtggggttataagarttaaagaagcaatgcgtgtaaagtacctggcatttagcaggcactcagtaaatggtagacgcttccactgccggtgttccttgctctctcctagactcag

SEQ ID NO: 160021 - DNA, 201 bp, Homo sapiens
aggaatccaatgggtaggttttatagtcgagctcacaggaccatggtataaaggacttaggtgtgagtcctggctctgccaccttacgagttggatgatckcggtcaagttgcttcatctctctgaataccacttaaaggtcaaatgatattaacagcttctgccttgtggggttataagaattaaagaagcaatgcgtgt

SEQ ID NO: 160022 - DNA, 201 bp, Homo sapiens
agctttccctagcccacagaacccaggaaggccagatcaccttatcagctaagttgatgcttttgtcccatcaggaatccaatgggtaggttttatagtcragctcacaggaccatggtataaaggacttaggtgtgagtcctggctctgccaccttacgagttggatgatctcggtcaagttgcttcatctctctgaata

SEQ ID NO: 160023 - DNA, 201 bp, Homo sapiens
caacctcaacgcctagtgaaggaagcactgcattaacaagtatacctgtcagcaccacaacagtggccagttctgaaaccaacaccctttcaacaactccygctgtcaccagcacacctgtgaccacttatgctcaagtcagttcatctcctacaactgctgacggtagcagcatgccaacctcaactcctagggaaggaa

SEQ ID NO: 160024 - DNA, 201 bp, Homo sapiens
cctttcaacaactcctgttgactccaacagtcctgtgatcacttctactgaagtcagttcatctcctatacctactgaaggtaccagcatgcaaacctcarcttatagtgacagaagaactcctttaacaagtatgcctgtcagcaccacagtggtggccagttctgcaatcagcaccctttcaacaactcctgttgacac

SEQ ID NO: 160025 - DNA, 201 bp, Homo sapiens; identical to SEQ ID NO: 29942

SEQ ID NO: 160026 - DNA, 201 bp, Homo sapiens
ctacgcttgtggtcagttctgagggtaacaccctttcaacaactcctgttgactccaaaactcaggtgaccaattctactgaagccagttcatctgcaacygctgaaggtagcagcatgacaatctcagctcctagtgaaggaagtcctctactaacaagtatacctctcagcaccacgccggtggccagtcctgaggcta

SEQ ID NO: 160027 - DNA, 201 bp, Homo sapiens; identical to SEQ ID NO: 29945

SEQ ID NO: 160028 - DNA, 201 bp, Homo sapiens
agtatgcctgtcagacacacgccagtggccagttctgaggctagcaccctttcaacaactcccgttgacaccagcacacctgtgaccacttctgctgaaaycagttcctctcctacaaccgctgaaggtaccagcttgccaacctcaactactagtgaaggaagtactctattaacaagtatacctgtcagcaccacgctg

SEQ ID NO: 160029 - DNA, 201 bp, Homo sapiens; identical to SEQ ID NO: 29947

SEQ ID NO: 160030 - DNA, 201 bp, Homo sapiens; identical to SEQ ID NO: 29948

SEQ ID NO: 160031 - DNA, 201 bp, Homo sapiens
gaacgactccattaacaagtatacctgtcagccacacgctggtggccaattctgaggttagcaccctttcaacaactcctgttgactccaacactcctttsactacttctactgaagccagttcacctcctcccactgctgaaggtaccagcatgccaacctcaacttctagtgaaggaaacactccattaacacgtatgc

SEQ ID NO: 160032 - DNA, 201 bp, Homo sapiens
cgactccattaacaagtatacctgtcagccacacgctggtggccaattctgaggttagcaccctttcaacaactcctgttgactccaacactcctttcacyacttctactgaagccagttcacctcctcccactgctgaaggtaccagcatgccaacctcaacttctagtgaaggaaacactccattaacacgtatgcctg

SEQ ID NO: 160033 - DNA, 201 bp, Homo sapiens
ctgctgaaggtaccagcatgccaacctcaacttctagtgaaggaaacactccattaacacgtatgcctgtcagcaccacaatggtggccagttttgaaacragcacactttctacaactcctgctgacaccagcacacctgtgactacttattctcaagccggttcatctcctacaactgctgacgatactagcatgccaa

SEQ ID NO: 160034 - DNA, 201 bp, Homo sapiens; identical to SEQ ID NO: 29951

SEQ ID NO: 160035 - DNA, 201 bp, Homo sapiens
gccaacctcaactcctggtgaaagaagcactccattaacaaatatacttgtcagcaccacgctgttggccaattctgaggctagcaccctttcaacaactsctgttgacaccagcacacctgtcaccacttctgctgaagccagttcttctcctacaactgctgaaggtaccagcatgcgaatctcaactcctagtgatgg

SEQ ID NO: 160036 - DNA, 201 bp, Homo sapiens
atcgcctcacttcaacaagtatataacatcaggttttcccctcatgattaaggccgagattggtcacttgggcaaaaagtgaccactccttgatcactgcyttaatatgatttaaactagatggatatttgagggtaggagaaataacaagtgtgaacgtcttcaggtgctatgctcccttgacatagccctttgggcaag

SEQ ID NO: 160037 - DNA, 201 bp, Homo sapiens
ctcctacacctgctgaaggtaccagcatgccaacctcaacttatactgaaggaagaactcctttaacaagtataactgtcagaacaacaccggtggccagytctgcaatcagcaccctttcaacaactcccgttgacaacagcacacctgtgaccacttctactgaagcccgttcatctcctacaacttctgaaggtacca

SEQ ID NO: 160038 - DNA, 201 bp, Homo sapiens
acagcacacctgtgaccacttctactgaagcccgttcatctcctacaacttctgaaggtaccagcatgccaaactcaactcctagtgaaggaaccactccrttaacaagtatacctgtcagcaccacgccggtactcagttctgaggctagcaccctttcagcaactcctattgacaccagcacccctgtgaccacttcta

SEQ ID NO: 160039 - DNA, 201 bp, Homo sapiens
catgccaacctcaactcctggagaaagaagcactccattaacaagtatgcctgtcagacacacgccagtggccagttctgaggctagcaccctttcaacawctcccgttgacaccagcacacctgtgaccacttctgctgaaaccagttcctctcctacaaccgctgaaggtaccagcttgccaacctcaactactagtga

SEQ ID NO: 160040 - DNA, 201 bp, Homo sapiens
gtgaaggaaccactccgttaacaagtatacctgtcagcaccacgccggtagtcagttctgaggctagcaccctttcagcaactcctgttgacaccagcacmcctgggaccacttctgctgaagccacttcatctcctacaactgctgaaggtatcagcataccaacctcaactcctagtgaaggaaagactccattaaaaa

SEQ ID NO: 160041 - DNA, 201 bp, Homo sapiens
aacctcaactcctggagaaagaagcactccattaacaagtatgcctgtcagacacacgccagtggccagttctgaggctagcaccctttcaacaactcccrttgacaccagcacacctgtgaccacttctgctgaaaccagttcctctcctacaaccgctgaaggtaccagcttgccaacctcaactactagtgaaggaag

SEQ ID NO: 160042 - DNA, 201 bp, Homo sapiens
cgcctgtaattccagtactttgggagcctgaggcaggatcacttgaggccaggagctcgagaccagcctgggcaacatactgagatctaatttatttattwaaaaaaaaaaaaaacttgactgggtgtggtggtgcatacttgtagtcttagctgcttgggaggctgatgtgggaggattgcttgagcccaggaggtcaag

SEQ ID NO: 160043 - DNA, 201 bp, Homo sapiens
aggaggtggtcagcagcattgacataggtgagtgcaaccccaggccttcccccaccccatgccctgggacccgacctccatacaagcaacagttcctgccycaccttgatgtgaggccaggaatagggcctcttctgggctgtggtgttttttgttttgttttgttttgttttgtttccacccagtgctatgaatgctaaa

SEQ ID NO: 160044 - DNA, 201 bp, Homo sapiens
caacccacaaagaggcaggaaagggagaaaaagaaaaaggaggtgagacgcagtggctcatgcttacagtcccaatgctttgggaggccgaggctggaggwtctcttgaggccaggagttcaagaccagcctgggcaacataacgagttcaaaaaattaaaaaaattagccaggcacagtggtgcatgcctgtaatcctag

SEQ ID NO: 160045 - DNA, 201 bp, Homo sapiens
gtcagttcatctcctacacctgctgaaggtaccagcatgccaacctcaacttatagtgaaggaagaactcctttaacaagtatacctgtcaacaccacacyggtggccagttctgcaatcagcatcctttcaacaactcctgttgacaacagcacacctgtgaccacttctactgaagcctgttcatctcctacaacttct

SEQ ID NO: 160046 - DNA, 201 bp, Homo sapiens
attcacggaacaggtaagtctgggagagcaaggccccatagctactcagttccccccagagcagagtctgtagggtaagaaggtagctgggggctgttccsttgttagatgtgcgggagttctctcaggcccccacgtcctcagggcttgccagtgcaggagggaagagatgaggccaggttttacctgggggctgcagga

SEQ ID NO: 160047 - DNA, 201 bp, Homo sapiens
gacacagtggccccttgcctttcagatgaatattgtgtattccgggatccctgagtatgtcggggtgaacatcacaaagctacggtaagtgtctgggcccktgggaagagggtctgtggcgtggaagcagtggtcatagttataaaggcaattagaactgtgccccctgcattactgtgcccaggcagctattgcagaata

SEQ ID NO: 160048 - DNA, 201 bp, Homo sapiens
attagctgggcgtggtggcaggcatgcctgtagtcccagctacttgggaggctgaggtaggagaatggcgtgaacctgggaggcagagcttgcagtgagcygagatcacgccactgcactccagcccgggcgacagagcaagactccgtctcaaaaaaaaaaaattaaaataaataaataaataaataaataaataaaata

SEQ ID NO: 160049 - DNA, 201 bp, Homo sapiens
ggtatggtggtatacacctgtagacctagctactcaggaatccgaggcaggaggatcacgtgagcccaggagtcagaggctagagtaagccaggatcgcaycattgctctccagcctgggcagcagtgagactctgtctctaaaacaaaaaacccaaaaacctcaaggatggcctcttctgtggttcccattcctccatcc

SEQ ID NO: 160050 - DNA, 201 bp, Homo sapiens
accagcacacctgtgaccacttctagtgaagccagttcatcttctacaactcctgaaggtaccagcataccaacctcaactcctagtgaaggaagcactcyattaacaaacatgcctgtcagcaccaggctggtggtcagttctgaggctagcaccacttcaacaactcctgctgactccaacacttttgtgaccacttct

SEQ ID NO: 160051 - DNA, 201 bp, Homo sapiens
cccgttcgtctcctacaacttctgaaggtaccagcatgccaacctcaactcctggggaaggaagcactccattaacaagtatgcctgacagcaccacgccrgtagtcagttctgaggctagaacactttcagcaactcctgttgacaccagcacacctgtgaccacttctactgaagccacttcatctcctacaactgctg

SEQ ID NO: 160052 - DNA, 201 bp, Homo sapiens
ggtatgcctgtcagcactacgcttgtggtcagttctgagggtaacaccctttcaacaactcctgttgactccaaaactcaggtgaccaattctactgaagmcagttcatctgcaaccgctgaaggtagcagcatgacaatctcagctcctagtgaaggaagtcctctactaacaagtatacctctcagcaccacgccggtg

SEQ ID NO: 160053 - DNA, 201 bp, Homo sapiens
ctgaaggtaccagcatgccaacctcaactcctggggaaggaagcactccattaacaagtatgcctgacagcaccacgccggtagtcagttctgaggctagmacactttcagcaactcctgttgacaccagcacacctgtgaccacttctactgaagccacttcatctcctacaactgctgaaggtaccagcataccaacct

SEQ ID NO: 160054 - DNA, 201 bp, Homo sapiens
tcctgttgactccaacagtcctgtgatcacttctactgaagtcagttcatctcctatacctactgaaggtaccagcatgcaaacctcaacttatagtgacrgaagaactcctttaacaagtatgcctgtcagcaccacagtggtggccagttctgcaatcagcaccctttcaacaactcctgttgacaccagcacacctgt

SEQ ID NO: 160055 - DNA, 201 bp, Homo sapiens
aaggtaccagcatgccaacctcaactcctggggaaggaagcactccattaacaagtatgcctgacagcaccacgccggtagtcagttctgaggctagaacmctttcagcaactcctgttgacaccagcacacctgtgaccacttctactgaagccacttcatctcctacaactgctgaaggtaccagcataccaacctcga

SEQ ID NO: 160056 - DNA, 201 bp, Homo sapiens
gggacaaaggcaaatggagagagtaggagaacatggagatccaggaattcgtcccggaacctgcaaggccagacatacaagcagaccagatcttgcagggygccaggactaacggctataggacaggggagtctgctggaaatgaggacccatgggcctcgttacacaggggttcatctaagtgtgtggatcatggcagaa

SEQ ID NO: 160057 - DNA, 201 bp, Homo sapiens
ttgcctcctcttcattaaacacccactgggcagggcccaggtctgaagctggtgctgactccgttctctctccccaacctgccgcttctctcccatctcakctgcgtgaccacggaaactcactggtacagtggggagacctgtaaccagggcacccagaagagtctggtgtacggcctcgtgggggcaggggtcgtgctg

SEQ ID NO: 160058 - DNA, 201 bp, Homo sapiens
gggaaggaagcactccattaacaagtatgcctgacagcaccacgccggtagtcagttctgaggctagaacactttcagcaactcctgttgacaccagcacmcctgtgaccacttctactgaagccacttcatctcctacaactgctgaaggtaccagcataccaacctcgactcctagtgaaggaacgactccattaacaa

SEQ ID NO: 160059 - DNA, 201 bp, Homo sapiens
ggcctcgtgggggcaggggtcgtgctgatgctgatcatcctggtagctctcctgatgctcgttttccgctccaagagagaggtgaaacggtgagcgagccyctaccacctcctcttccaactccctccagctcctcctcttcctctgaaccctctgtctctaatcacttcatagtctaggtgggcagcgggggcagctaaa

SEQ ID NO: 160060 - DNA, 201 bp, Homo sapiens
tatacctgtcaacaccacactggtggccagttctgcaatcagcatcctttcaacaactcctgttgacaacagcacacctgtgaccacttctactgaagccygttcatctcctacaacttctgaaggtaccagcatgccaaactcaaatcctagtgaaggaaccactccgttaacaagtatacctgtcagcaccacgccggt

SEQ ID NO: 160061 - DNA, 201 bp, Homo sapiens
acctcaactcctagtgaaggaaagactccattaaaaagtatacctgtcagcaacacgccggtggccaattctgaggctagcaccctttcaacaactcctgytgactctaacagtcctgtggtcacttctacagcagtcagttcatctcctacacctgctgaaggtaccagcatagcaatctcaacgcctagtgaaggaagc

SEQ ID NO: 160062 - DNA, 201 bp, Homo sapiens
ctgctgaagttaccagcatgccaacctcaactcctggagaaagaagcactccattaacaagtatgcctgtcagacacacgccagtggccagttctgaggcyagcaccctttcaacaactcccgttgacaccagcacacctgtgaccacttctgctgaaaccagttcctctcctacaaccgctgaaggtaccagcttgccaa

SEQ ID NO: 160063 - DNA, 201 bp, Homo sapiens
atagataaagcaaaaactgacaaagctgcaagaaaaaaattaacaaattcaccaacatggtaagagatttttaaaacgcctctcttagtaattgacaaaartcagtgaggattacagaacttttgtacaaaataattagccttaatacaatacagaacaccacattcaacaaatagagggtacacatttattacctgagtc

SEQ ID NO: 160064 - DNA, 201 bp, Homo sapiens
caacctcaactcctggagaaagaagcactccattaacaagtatgcctgtcagacacacgccagtggccagttctgaggctagcaccctttcaacaactccygttgacaccagcacacctgtgaccacttctgctgaaaccagttcctctcctacaaccgctgaaggtaccagcttgccaacctcaactactagtgaaggaa

SEQ ID NO: 160065 - DNA, 201 bp, Homo sapiens
tacattttttaacatattgctttttttaagagtctaggatggttgtcttgaaaaatgtctcacactcctggtttgtttcatggtgtcatctaacttgcccmcccatccttagtatcagaggtattagaggtattctaggattggaaatactggaggttggttctagaggcttaactggaatcagattaaacatttttgtta

SEQ ID NO: 160066 - DNA, 201 bp, Homo sapiens
agaaagaagcactccattaacaagtatgcctgtcagacacacgccagtggccagttctgaggctagcaccctttcaacaactcccgttgacaccagcacasctgtgaccacttctgctgaaaccagttcctctcctacaaccgctgaaggtaccagcttgccaacctcaactactagtgaaggaagtactctattaacaag

SEQ ID NO: 160067 - DNA, 201 bp, Homo sapiens
aggggaaggcacaattggtttgtgctagaatccaggtaatgggacaagttctaaaccaaccacttaggccaggtgcggtggctcatgcctgcaatcccagmacttcgtgaggccaaggcaggaagattgtctgaagtcaggagtttaggaccagcctgggcaacaaagtgagactctgttgctataaaagaaataataatc

SEQ ID NO: 160068 - DNA, 201 bp, Homo sapiens
aactcctggagaaagaagcactccattaacaagtatgcctgtcagacacacgccagtggccagttctgaggctagcaccctttcaacaactcccgttgacwccagcacacctgtgaccacttctgctgaaaccagttcctctcctacaaccgctgaaggtaccagcttgccaacctcaactactagtgaaggaagtactct

SEQ ID NO: 160069 - DNA, 201 bp, Homo sapiens
gtgagccatttactacctgcgtgagcttgggaaagtaacttcttctctctgaacctctgctccctcagctgtaaaaacaaaaaacaaaaaacaaacaaacaaaaaaaaacacaacaacaacaacaaaactgagtagctgggcgtggtgactcacatctgtaatcccagcactttgggaggctgaggccggtggatcacctg

SEQ ID NO: 160070 - DNA, 201 bp, Homo sapiens
actcctggagaaagaagcactccattaacaagtatgcctgtcagacacacgccagtggccagttctgaggctagcaccctttcaacaactcccgttgacamcagcacacctgtgaccacttctgctgaaaccagttcctctcctacaaccgctgaaggtaccagcttgccaacctcaactactagtgaaggaagtactcta

SEQ ID NO: 160071 - DNA, 201 bp, Homo sapiens
caacaactcctgttgactccaacagtcctgtgatcacttctactgaagtcagttcatctcctacacctgctgaaggtaccagcatgccaacctcaacttayactgaaggaagaactcctttaacaagtataactgtcagaacaacaccggtggccagctctgcaatcagcaccctttcaacaactcccgttgacaacagca

SEQ ID NO: 160072 - DNA, 201 bp, Homo sapiens
gctgaagttaccagcatgccaacctcaactcctggagaaagaagcactccattaacaagtatgcctgtcagacacacgccagtggccagttctgaggctarcaccctttcaacaactcccgttgacaccagcacacctgtgaccacttctgctgaaaccagttcctctcctacaaccgctgaaggtaccagcttgccaacc

SEQ ID NO: 160073 - DNA, 201 bp, Homo sapiens
acaactcctgttgactccaacagtcctgtgatcacttctactgaagtcagttcatctcctacacctgctgaaggtaccagcatgccaacctcaacttatastgaaggaagaactcctttaacaagtataactgtcagaacaacaccggtggccagctctgcaatcagcaccctttcaacaactcccgttgacaacagcaca

SEQ ID NO: 160074 - DNA, 201 bp, Homo sapiens
gtggtggcacgcgcctgtaatctcagctactcaggaggctgaggcaggagaatcacttgaacctgggaggtggaggttgcagtgagccaagatcgcgccaytgcactccagcctgggtgacaagggtaaaactcggactcaaaaaacaaacaaattagacagtgtccgtgcaaacgcattgtaagctgtaaagtgctgtgc

SEQ ID NO: 160075 - DNA, 201 bp, Homo sapiens
aattaaaaaaattagccaggcacagtggtgcatgcctgtaatcctagctattcaggaggctgagtcaggaggatcacttgagcccaggaggtcaaggctgygtgagctatgattgcaccactgcactccaacctgggcaacagagcaagaccctgtctctaaaacaaaacaaacaaaaaaaatgtggctcatgcctgtaat

SEQ ID NO: 160076 - DNA, 201 bp, Homo sapiens
cagcatgccaaactcaaatcctagtgaaggaaccactccgttaacaagtatacctgtcagcaccacgccggtagtcagttctgaggctagcaccctttcarcaactcctgttgacaccagcacccctgggaccacttctgctgaagccacttcatctcctacaactgctgaaggtatcagcataccaacctcaactcctag

SEQ ID NO: 160077 - DNA, 201 bp, Homo sapiens
gttaacaagtatacctgtcagcaccacgccggtagtcagttctgaggctagcaccctttcagcaactcctgttgacaccagcacccctgggaccacttctrctgaagccacttcatctcctacaactgctgaaggtatcagcataccaacctcaactcctagtgaaggaaagactccattaaaaagtatacctgtcagcaa

SEQ ID NO: 160078 - DNA, 201 bp, Homo sapiens
caccctttcaacaactcctgttgactccaaaactcaggtgaccaattctactgaagccagttcatctgcaaccgctgaaggtagcagcatgacaatctcarctcctagtgaaggaagtcctctactaacaagtatacctctcagcaccacgccggtggccagtcctgaggctagcaccctttcaacaactcctgttgactc

SEQ ID NO: 160079 - DNA, 201 bp, Homo sapiens
tcatcgctgaggcttccctaagacctaccagagactccctttgtggaaagttctcttaggcacaggctgctgggagaactcctatagcagggggcccagckcagtgtgtaggacagagccatcaccccaaactgtcctgccccaaatgcctaggacagagtcatcaccccaactgtcctgcccccagctctgccttccctt

SEQ ID NO: 160080 - DNA, 201 bp, Homo sapiens
accagcacacctgtgaccaattctactgaagcccgttcatctcctacaacttctgaaggtaccagcatgccaacctcaactcctagtgaaggaagcactcsattcacaagtatgcctgtcagcaccatgccggtagttacttctgaggctagcaccctttcagcaactcctgttgacaccagcacacctgtgaccacttct

SEQ ID NO: 160081 - DNA, 201 bp, Homo sapiens
cctcctcatccctcccagggtctggctcttcgtcgctgtagccaggaccaaagtcctgtagctcatagtcctgccggtgtgagagggggcccacatccccrttggctcggggacgcacgttcccattaagcagggtgctggctgcactctccatctcgtcgatggtgaggtcacaggcatcagcgatttcgtgttttgttg

SEQ ID NO: 160082 - DNA, 201 bp, Homo sapiens
atcaaaatcatggaactcttgcccaaagaaaagactgcaaatagtcatctggtatatcttgtggaaagatgataggtttatagtgactcaaaatattttaraaaaatttctgtagtgtcaagttctttcaaacttaaaattttaaccccagaggattttcgctgaataaatgagaattggctctatttcttctacttctgg

SEQ ID NO: 160083 - DNA, 201 bp, Homo sapiens
tatatatatatatatataatctcatttaggccacagcctcttataatattctttttgtgtgctgaatatatttttaggattcatccatgttgatgtgaggwgctatgtgtccttcattttcactgctgtctggggtttctttgaccaactgaactatacctttttctatgtcctttatatttccacatacattttgaaatc

SEQ ID NO: 160084 - DNA, 201 bp, Homo sapiens
tcttctaggagttttatagttttatattttacatttaggtctgtgatccattttgagttaatttttgtgcagggtataaggtctttgtctatatttactckgtgtgtgtgtgtgtgtgtgtgtgtgtgtgtgtgtctagttattccagctccctttgttgaaaagactttcttgctctattgtgctgcctttgatgacttg

SEQ ID NO: 160085 - DNA, 201 bp, Homo sapiens
ggctggagtgcagtggctcaatcatacctctctgcagcctcaagctaggactacaggtatgcaccaccacacccagttactttattttttactagttatttatttttttagagatggtatatttagtctgttctctcattgctataaagaactacctgagactaggtaatttataagaaaagaggtttaattggctcatgg

SEQ ID NO: 160086 - DNA, 201 bp, Homo sapiens
gctggagtgcagtggctcaatcatacctctctgcagcctcaagctaggactacaggtatgcaccaccacacccagttactttattttttactagttatttatttttttagagatggtatatttagtctgttctctcattgctataaagaactacctgagactaggtaatttataagaaaagaggtttaattggctcatggt

SEQ ID NO: 160087 - DNA, 201 bp, Homo sapiens
ttgtaggcagaattagctccattctacagatgagaagacggaggcctagagaggggtatggaacttaggggtgtgttgtcagctggtgagaggctgtactragtcaagcagctgttttagctgaggccctacttgtgtgccaggcctggcccacctgccagcttgattaaggcttgcatggactggggatcagccaggggt

SEQ ID NO: 160088 - DNA, 201 bp, Homo sapiens
gttgcccaggctggtctcaaactcctggcctcaaatgatcctctgaccttagcctcccaaagtgttggggttatatgggccactgcacccagcctggggtsctaatttaaatgatattgtgtttttaatttcaaattccacttgtttgttgctggtatataggcaagcaattggcttttatatattaaccttatatcctga

SEQ ID NO: 160089 - DNA, 201 bp, Homo sapiens
accgtatttcagaacagctaaacaggaaccaggacgcagtgtatttgggggaaagggtttaaaaatggatatgttgggcccagtgactgatatgctagacygatggctgaggtaacgacacaggtgtgatgatcgtcatcacctttaactttcccctgcaccccgccgccatgccttcagttgggtgggcctggtgccctg

SEQ ID NO: 160090 - DNA, 201 bp, Homo sapiens
ctgctcaacaaaaggcttagtgtatgtatcttattagcatgaagtggggaggtggtggcagtcagtgatccttggaactatcacattgtccccgagagccygaaggtttcccaggcctcactggacactgtcatccctgggccccgagtcttgcattgttttccttctccctcctccggctgccctatttcatttggagaa

SEQ ID NO: 160091 - DNA, 201 bp, Homo sapiens
ctctttctttctccagctccttcctcctgcccaggtgccaggggagggcggagccatgcctgaccacctcactccatcctgcaggcaaacggtggagcgcrgcctgtgcctacctgcacccagcactgagccgcaccaacctcaaggccgaggccgagacgcttgtgagcagggtgctatttgagggcacccgtgcagtgg

SEQ ID NO: 160092 - DNA, 201 bp, Homo sapiens
tccacccacacaggtggaattttccagttcgttcttttgcaaatattaatcaaggccctggctggtcaacagtggattcattgtctcgtgaagagtgagcygtttctggcacatactggctgtctcccagggcccctggtggtgagccggagctgggagaggaactgttgggagcactcctggcctcggtgctccctcaac

SEQ ID NO: 160093 - DNA, 201 bp, Homo sapiens; identical to SEQ ID NO: 29960

SEQ ID NO: 160094 - DNA, 201 bp, Homo sapiens
taggacccaagagtcacggtaatccccagattctgtcattgttattcagacctttgcttctttgcctgatccatccctgggagaacaaggccatcagggtygttgacaagtcctgcgggtccagcctccacccacacaggtggaattttccagttcgttcttttgcaaatattaatcaaggccctggctggtcaacagtgg

SEQ ID NO: 160095 - DNA, 201 bp, Homo sapiens
ttcgtagttggggctgtggagtggaggagagggtgtgaagggccctgtagccacaactggaggttgaggtgggcaaacaggtgtgtctgcctgtcccctcrggggttttcccccctagctcagaaggccatgcctcaagtggccctgcatgagaggtcccaggtggcctgccggaaggcacacaatttatttggctgccta

SEQ ID NO: 160096 - DNA, 201 bp, Homo sapiens
ttgcccaggctggtctcaaactcctggcctcaaatgatcctctgaccttagcctcccaaagtgttggggttatatgggccactgcacccagcctggggtgytaatttaaatgatattgtgtttttaatttcaaattccacttgtttgttgctggtatataggcaagcaattggcttttatatattaaccttatatcctgaa

SEQ ID NO: 160097 - DNA, 201 bp, Homo sapiens
gagaagtgccaatccccaagaccaccctgtgatccagcccaactacttgtcaacaggtacttcacccacctgtgtcttcctgggcttgaacaaacgaatgyctttgtggggttcctgtttatccctgaatcatacccttggactacactttctaggacacaagtgaccctctgtcgtcccccaccgtgtcactttaggctg

SEQ ID NO: 160098 - DNA, 201 bp, Homo sapiens; identical to SEQ ID NO: 29958

SEQ ID NO: 160099 - DNA, 201 bp, Homo sapiens
gccctatttcatttggagaagggcaccctgcagcagggagtatctgccctgaagccccactgggtcgggcatgggcgtgtcaccagggcagctctatggcragaggggtccaggcctcgtccttccatccacaggactcgctggctgccctgagcatgaatgaggtcagctccgtgctccagagcctgctcttcatgttaa

SEQ ID NO: 160100 - DNA, 201 bp, Homo sapiens
agggaacagtgcctagcacatggtaggggctgagcccactgtcttgaagggatgagtacaaatactctgttttctttctcccttggaaagccctttgcccscctgccttccagcaggcagactccagcccagtctccaggttcatacacagggcacagggaagcattttacccctcagttgggggaggggcctttctgctg

SEQ ID NO: 160101 - DNA, 201 bp, Homo sapiens; identical to SEQ ID NO: 29964

SEQ ID NO: 160102 - DNA, 201 bp, Homo sapiens
agaggaggatagagccctggggaggagagcttgcctgaggaggtggggaggtctaaggggctgcagcaggaaagcccagtagtgagggaggagctcatggrgtcagatggggcagagagaccaagggcactgaggctggttggtggcagtcacaggaagccttggcaaaaggataggggagggggttttgtaaaaagagaa

SEQ ID NO: 160103 - DNA, 201 bp, Homo sapiens
ggaaagcccagtagtgagggaggagctcatggggtcagatggggcagagagaccaagggcactgaggctggttggtggcagtcacaggaagccttggcaaraggataggggagggggttttgtaaaaagagaagggctgaggttctttctccccccaggggaagaagtgtcaggtgagggtggtctggaggtggctgagct

SEQ ID NO: 160104 - DNA, 201 bp, Homo sapiens
gggagaagaaatagtaggttaccctgaggagccatccgtggaggttgagcggcctgggccccccacccttgcctgggtgttagaactccaggtttccaatsttacagtctctttttttttttttttttttttttttttgagacagagtctcactctgtcgcccaggttggagtgcagtgatatgatcttggctcatggcaa

SEQ ID NO: 160105 - DNA, 201 bp, Homo sapiens
aggctgaggaagcacccacagtggggcagcagaggggaggcaggagggcagacttacttcagaggagccacaggcatcggaggtgcccgcagaggccagcrcccacgccttaccaacaggaaaccctgccctgggtcacacggtgcggcctggcagagctctgatgcgatgtcagacttcagggctccacctcgggttttg

SEQ ID NO: 160106 - DNA, 201 bp, Homo sapiens
acttcagggctccacctcgggttttgttggcagcctgtagcctcagcccagtcccatctgcccctttttaccaagaggatccagagggcaggtgggctacrcccgagcagccagggcacaaggggccaagtggtatggcctcgtccacactgtccagaatcatctcccaggtagcagtttccaattcagttgttaattatg

SEQ ID NO: 160107 - DNA, 201 bp, Homo sapiens
ctgcgggtccagcctccacccacacaggtggaattttccagttcgttcttttgcaaatattaatcaaggccctggctggtcaacagtggattcattgtctygtgaagagtgagccgtttctggcacatactggctgtctcccagggcccctggtggtgagccggagctgggagaggaactgttgggagcactcctggcctc

SEQ ID NO: 160108 - DNA, 201 bp, Homo sapiens
acaggacttgggtccaggcactagagtggagtccgggaaaaggaagaggagcggccaggagaaaggagggaaaccaggagcagccggcccacctgccacgkcctgactggctcttctgcctcatcctcttctgcttctcaggggagggagccactgcccatctggaaacaggtgggttcatccgcagccagcctggggtcc

SEQ ID NO: 160109 - DNA, 201 bp, Homo sapiens
caggctcctggctccagcatggtcaggaggcatgggcagactgaggctggcacgaccgggaagagatctggcttagtatacccctccaagagtacaacccrgagccctgagagtgacccaggatggtgaccctgggcgttctctgcacctctggcccctgttggtgtggataacagagaatcagctctctggacagagagc

SEQ ID NO: 160110 - DNA, 201 bp, Homo sapiens
gggccaggctctgggctgtgctggcttttcagttgtgtgccagggcaggccctgctgtgagcttggtgttgttcggcacacaggctttgagacaaccaggrtgcggaggttaggcctggagacagggttcatgagtcagactttctcagggggcagtggagaggagaggaggatagagccctggggaggagagcttgcctg

SEQ ID NO: 160111 - DNA, 201 bp, Homo sapiens
ccaagaccaccctgtgatccagcccaactacttgtcaacaggtacttcacccacctgtgtcttcctgggcttgaacaaacgaatgcctttgtggggttccygtttatccctgaatcatacccttggactacactttctaggacacaagtgaccctctgtcgtcccccaccgtgtcactttaggctgtaaacttgcataggc

SEQ ID NO: 160112 - DNA, 201 bp, Homo sapiens
gtgtcctcctgtttgagggtgaagggtacttttccacctgcctccaggggaccccaggcagatgtggactcagtagggcagggtcttgcagggtctttccrtctcagctttactttgaaggcgggacttgcagtcagagctgggcatatccactctttctttctccagctccttcctcctgcccaggtgccaggggagggc

SEQ ID NO: 160113 - DNA, 201 bp, Homo sapiens
gaatcctcctttggcaaatgacccccagatgggcacaggtggccatggcccttaccacatgttttgcagtttccccaaaagactgtcatcatcagcctggsctgtgggcacagtgacaggtgtgaaggtcaagtgcaagcctggggcagtgctgacttcagggtgccaagattcagggctgtaaagtaactttctgggctt

SEQ ID NO: 160114 - DNA, 201 bp, Homo sapiens; identical to SEQ ID NO: 29966

SEQ ID NO: 160115 - DNA, 201 bp, Homo sapiens
taccaaagttataaaatgtcttgtgcaattggccacatgctcaaaattacatggaaatctgtcttgtcgtataaagcaatccgttttctgaccacaaaatktagcaaacttgtcaatagcagtctttggctccttttttttgtttttttgaaagagtctcactgtgtccctgcaggctggagtgcagtggtgcaatctggg

SEQ ID NO: 160116 - DNA, 201 bp, Homo sapiens
cccccctagctcagaaggccatgcctcaagtggccctgcatgagaggtcccaggtggcctgccggaaggcacacaatttatttggctgcctaagcctgatractttgtggctttttgaactggaggctctggcaagtcactgctcttctcagagcagtttccttttctgtaaaatggggtggtgataggggcgatgaagtg

SEQ ID NO: 160117 - DNA, 201 bp, Homo sapiens
agtagagacagggttcaccatgttggccaggctggttttgaacttctgacctcaagtgatccacccacctcggcctcccaaagtgctgggattacaggcckgagccactgcacctggccaatttttgactactgatttgagaatttgaaatgagaattgttagctgatgcaacaaagggctatggcaatgaaagccaccag

SEQ ID NO: 160118 - DNA, 201 bp, Homo sapiens
tcccaagtagctgggattataggcacccaccaccatgcctggctaatttttttgtatttttagtagagatggggtttcaccatgttatccaggatggtctyaatctcctgacctcatgatccgcctaccttggcctcccaaagtgctgggattacaggcgtgagccaccatgcccggccctactcacctgttgatagacat

SEQ ID NO: 160119 - DNA, 201 bp, Homo sapiens
tcaaacatcaaaaatggagtcaggctctattatagttttaaaatactgtttaaaaaggcagtttcaggctcacagcaaaatcgagaggagggtgaagagakttcccatataacctttgcccctacacgtgcataatcctcccattaacaacatcctcgcactaaagtggtacatttattacaaataataaacctatattag

SEQ ID NO: 160120 - DNA, 201 bp, Homo sapiens
tctttgggccattctttaatcgggttatctgttattgagttttaagaatatatttatttgtgtatttacatagtagtcctttataaggtgtatcttttgcraagatttacttctcgtctgtgacttgtctattaattctcttggtagtgtctttagcaaagtagaaaactcacatttgattgaagtccagcttatcaatta

SEQ ID NO: 160121 - DNA, 201 bp, Homo sapiens
caacactgggactgtgctgggtcagacctgaagtcagcacaggactgggtcttgcccaaggcctgctgtaaccactatgtggctaccgcctgtattcacamaaggccccagggctctacagttagccagcggtgaagccagccaggcttgtggccttccctttggggcggcaagtttccccaggccccgggcagatagaga

SEQ ID NO: 160122 - DNA, 201 bp, Homo sapiens
catctgcccggagtacccagcttacattcatcaaaattgaatagtcccctgttgcaacactagttgtaacaggttctactcggaggtccctcaagtctccsgggattagatcatgttgtagcatccactctggagatggccctgggaaaaagcaagacttccatgacactgtctttcccagcccagtctgatgccatgcca

SEQ ID NO: 160123 - DNA, 201 bp, Homo sapiens
ctttataaggtgtatcttttgcaaagatttacttctcgtctgtgacttgtctattaattctcttggtagtgtctttagcaaagtagaaaactcacatttgwttgaagtccagcttatcaattatttctttcatggactgtgcctttggtgtcataatatataaagtcatcgtcaagcccaaggtcatctagaggttctttc

SEQ ID NO: 160124 - DNA, 201 bp, Homo sapiens
cttagcgctggctgatttatagcccagataattttgatctaacagaagtactctcaacctcctggctttcacctacagagcacgtgggaccactccaggtrcctgtgtatgtacacatgtatatatttagtgtatttgacatgtttattagagtcaggcctgccttcctcaggcttcggccctggattccagccagctggc

SEQ ID NO: 160125 - DNA, 201 bp, Homo sapiens; identical to SEQ ID NO: 29971

SEQ ID NO: 160126 - DNA, 201 bp, Homo sapiens
gtgctttcaatgtaaagccccaaatacccattctctaatgcacctaccagtttcagagccacattgaacggtctgtgggagagaaaaaaaccaagcgtcaygttgaagccggcaaaccacaagctttcctttgccaaattaggcagaacaccattttccccttaaatgcatatacaagtgacaaactttcaaagaaaagat

SEQ ID NO: 160127 - DNA, 201 bp, Homo sapiens
gcatctgagaccgggtctgtctgattcccacgcccctgactcaagcaacctgacgccgatgtccggggctgccctgagggtgcaggcatgcccctcgagcyggcagtccgcgcacgccttcggggcagcctggactggcggatcagacgacgtcaggatctgggctcgagggccgggagatgagggaagaggtgctggcgg

SEQ ID NO: 160128 - DNA, 201 bp, Homo sapiens; identical to SEQ ID NO: 29972

SEQ ID NO: 160129 - DNA, 201 bp, Homo sapiens
tccttaaatggttgatagaaatcaccagtgagcttagtcaagcttggtgctgttttggaaggttatcaattattgattcaatttctttaatagatataggsttatctggagtgtctttctgcttgtgtgagttttggcagcttgtatctttcaaggaattagtccatttcatctaaattatcatctaatttatttttaaag

SEQ ID NO: 160130 - DNA, 201 bp, Homo sapiens
tcaaaggctttgagctctacagtctcgtgcctctcatgctgatcttccttcagttatttaagtcttgtccttttcccaggccctaaaccatccgttttgaragcagatgtctttctgtgtattgctgcaggaactgggtggggcagggaacagtgcctagcacatggtaggggctgagcccactgtcttgaagggatgagt

SEQ ID NO: 160131 - DNA, 201 bp, Homo sapiens
ggcacccgtgcagtgggcgtggagtatgtcaagaatggccagagccacagggtgagtggactgcagctggggtcctggaagaagggggtgggcagtgaccytggtggtccagctcagagtgggcaggagtcacgccctcacccccagacccacgtgctcatccctgtgatggcggggggaggggcgagtagctgatggcag

SEQ ID NO: 160132 - DNA, 201 bp, Homo sapiens
gagggaagcctgcccctataatccagtcacctcttccaacattggtgattacaattcgacaagagatttgggtggaggcacaaatccaaaccatatcagayggggtatttctatgttgcccaggctggtctcaaactcctggcctcaaatgatcctctgaccttagcctcccaaagtgttggggttatatgggccactgca

SEQ ID NO: 160133 - DNA, 201 bp, Homo sapiens
agctgggcatatccactctttctttctccagctccttcctcctgcccaggtgccaggggagggcggagccatgcctgaccacctcactccatcctgcaggyaaacggtggagcgcagcctgtgcctacctgcacccagcactgagccgcaccaacctcaaggccgaggccgagacgcttgtgagcagggtgctatttgagg

SEQ ID NO: 160134 - DNA, 201 bp, Homo sapiens
  misc_feature (1)...(201): n = A,T,C or G
gcacatacaaaacagttctgaaattcctgtgtgtccctcacttcctcctcctagttcctttgagcagccacatcaggctgggcctgctgcaccctgtcccngcaggccgttggtgagcataccctggatatgcggagttaagatttttaaagcccctcttcctgttttagggagaagtgagtcatctcattcccctccgtg

SEQ ID NO: 160135 - DNA, 201 bp, Homo sapiens
agagatggagtttcaccatgttggccaggctggtcttgaactcctgacctcaagtaatctacccgccttggcctcccaaagtgctgggattacaggcatgmgccaccacgcctggtcttttgcttttttttttttttttgagacggagtttcactctgttgcccaggctgctggagtgcagtggtgcgatcacagctcact

SEQ ID NO: 160136 - DNA, 201 bp, Homo sapiens
agatgtagcatcacattccacactttatggaggaagaaacaagatgagtgaggctatgtaagaagagggaggatgaaactcaggccagctgtgaacttgayaaaatcactatgtggtttggttttagctttgcgcttttctttttttcttttttcttttttttttttgagacagagtgttgtcctgttgccaaggctggag

SEQ ID NO: 160137 - DNA, 201 bp, Homo sapiens
gtcctgttgccaaggctggagtgcagtggtgcaatccgctcactgggctcaagcaaccctctgaagtagctgggactacaggtgcacaccaccatgcctgrctaattttttctttctttttttattgtttagaaatggggtcttgctatgttactgaggctgatattgaacttctggcctcaagcaatcctcctgccttgg

SEQ ID NO: 160138 - DNA, 201 bp, Homo sapiens
tattgtttagaaatggggtcttgctatgttactgaggctgatattgaacttctggcctcaagcaatcctcctgccttggcctcccaaagtgctgggattayaggcgtgagccactgcgcccagcctgtgagtttattttataactttatatttgtgatttgtgtgtgtgtgtgtatcatagttagaacagcgataccattt

SEQ ID NO: 160139 - DNA, 201 bp, Homo sapiens; identical to SEQ ID NO: 29961

SEQ ID NO: 160140 - DNA, 201 bp, Homo sapiens
gtaaaccagggttgacagaggtcactgtggatgtctatggagggaccgtcactgcttcctctgtgttcttctaggtacatgtggggcccatgcggggcacsagtgtgggctggctcaaactgagaagtgccaatccccaagaccaccctgtgatccagcccaactacttgtcaacaggtacttcacccacctgtgtcttcc

SEQ ID NO: 160141 - DNA, 201 bp, Homo sapiens
cttttcagggagtgacctggctggacctcttccaggcttatgccagcaaggaggtgattctgagtggaggtgccatcaactctccacagctgctcatgctstctggcatcgggaatgctgatgacctcaagaaactgggcatccctgtggtgtgccacctacctggtgagtccccttctttactgctccccagaggctgtc

SEQ ID NO: 160142 - DNA, 201 bp, Homo sapiens
cccaccaccatgcctggctaatttttttgtatttttagtagagatggggtttcaccatgttatccaggatggtctcaatctcctgacctcatgatccgccyaccttggcctcccaaagtgctgggattacaggcgtgagccaccatgcccggccctactcacctgttgatagacatttgagttgttgccacctttttgctg

SEQ ID NO: 160143 - DNA, 201 bp, Homo sapiens
  misc_feature (1)...(201): n = A,T,C or G
ttgaacaaacgaatgcctttgtggggttcctgtttatccctgaatcatacccttggactacactttctaggacacaagtgaccctctgtcgtcccccaccntgtcactttaggctgtaaacttgcataggcagccccgtagtgtcctgggacacatgagataaatgaagtcccagggtttagacagtaggggagattttca

SEQ ID NO: 160144 - DNA, 201 bp, Homo sapiens
gcaggagaggcagaagcaaaaaaaaaaaaaaaaaaagggggggggaaattccctaggacccaagagtcacggtaatccccagattctgtcattgttattcmgacctttgcttctttgcctgatccatccctgggagaacaaggccatcagggttgttgacaagtcctgcgggtccagcctccacccacacaggtggaattt

SEQ ID NO: 160145 - DNA, 201 bp, Homo sapiens
gctttcaatgtaaagccccaaatacccattctctaatgcacctaccagtttcagagccacattgaacggtctgtgggagagaaaaaaaccaagcgtcatgytgaagccggcaaaccacaagctttcctttgccaaattaggcagaacaccattttccccttaaatgcatatacaagtgacaaactttcaaagaaaagatga

SEQ ID NO: 160146 - DNA, 201 bp, Homo sapiens
tgtactggtgtggaagtgtgccaatgagcgcagaaaatcaaacaggctttgcagcgcctgtgatgtgtttataggaagtactggagtcggcgcagcagacrgtgggaagggaagatttgtcctggcatctgtggccaacctcctaagctggtggatttggggtctgcaggggttccatgtctggtccataacagtgcttct

SEQ ID NO: 160147 - DNA, 201 bp, Homo sapiens
tccatattgttttccacagtggctgtactaatttgcattcccacaaacaatgtacaaaggttcctgaaagggtgagtttaaacaacataactgcagaatcrtagtcatgtctgacaaataatgatatcttgacatcctcacatacgcactcagtgttcagatgagcagggtccagtgaagagcagcacattctcatggttg

SEQ ID NO: 160148 - DNA, 201 bp, Homo sapiens
ttttcctccccggatagtgcatttttatataccagtcacatgacaagcgtttattgagtgcctgctgtgtacgtggctctgggagcttctagctctccccmactgctgtctgtaagtgaatgcacatggcaggaagagcagctccatgatgggctctgccaggtgggagcttggtaactcctggcctctgaagcctgccca

SEQ ID NO: 160149 - DNA, 201 bp, Homo sapiens
gggtggcatctgagaccgggtctgtctgattcccacgcccctgactcaagcaacctgacgccgatgtccggggctgccctgagggtgcaggcatgcccctygagccggcagtccgcgcacgccttcggggcagcctggactggcggatcagacgacgtcaggatctgggctcgagggccgggagatgagggaagaggtgct

SEQ ID NO: 160150 - DNA, 201 bp, Homo sapiens
ctctgcagcctcaagctaggactacaggtatgcaccaccacacccagttactttattttttactagttatttatttttttagagatggtatatttagtctkttctctcattgctataaagaactacctgagactaggtaatttataagaaaagaggtttaattggctcatggttccacaggctttacaggaaacatggctt

SEQ ID NO: 160151 - DNA, 201 bp, Homo sapiens; identical to SEQ ID NO: 29962

SEQ ID NO: 160152 - DNA, 201 bp, Homo sapiens; identical to SEQ ID NO: 29963

SEQ ID NO: 160153 - DNA, 201 bp, Homo sapiens
gtctatggagggaccgtcactgcttcctctgtgttcttctaggtacatgtggggcccatgcggggcacgagtgtgggctggctcaaactgagaagtgccartccccaagaccaccctgtgatccagcccaactacttgtcaacaggtacttcacccacctgtgtcttcctgggcttgaacaaacgaatgcctttgtggggt

SEQ ID NO: 160154 - DNA, 201 bp, Homo sapiens; identical to SEQ ID NO: 29970

SEQ ID NO: 160155 - DNA, 201 bp, Homo sapiens
aaactcaggccagctgtgaacttgacaaaatcactatgtggtttggttttagctttgcgcttttctttttttcttttttcttttttttttttgagacagartgttgtcctgttgccaaggctggagtgcagtggtgcaatccgctcactgggctcaagcaaccctctgaagtagctgggactacaggtgcacaccaccatg

SEQ ID NO: 160156 - DNA, 201 bp, Homo sapiens
aattgttataataaaatggaagatatataaaaaagataagcccactatctgcttattagactcaacagacataggttgctgtgtcaaatgataaaactgtaaaagtttctaccctctgacttttgattctgtacttatctctctcagacaatcacaaagagtgtgtaggccagccccggtcacagagtgcaccgtatcctg

SEQ ID NO: 160157 - DNA, 201 bp, Homo sapiens
gagtgagaatgtgatttttgactttctgtgcttggcttatttcacttaacataacgacctccatttccatcagtgttgctgcaaatgacaggaactcattytttgtgatggttgaatagtactccattgtgtatatggatcacatttttaaaaaatctgtttgtccattaatgggtacttaggttgattccatgtcttggc

SEQ ID NO: 160158 - DNA, 201 bp, Homo sapiens
cagtctctttttttttttttttttttttttttttgagacagagtctcactctgtcgcccaggttggagtgcagtgatatgatcttggctcatggcaacctstgcctcccaggttcaagcgattcttttgcctaagcctcgagtagctgggactacaaggcgtgtgccaccacacccggctaatttttgtatttttagtaga

SEQ ID NO: 160159 - DNA, 201 bp, Homo sapiens
gaaatggggacagtcatagcttctaactcagagggctgtgggtggagctgaagcagcacccggcccactcaccagttgccatcaacacctctaccactgcrcatgctgaggcggaccagaaagagaacagaggcacctctcactcatgcagtgtcttgggttcagtgccagggaggccagggctgcccctgcccttccaca

SEQ ID NO: 160160 - DNA, 201 bp, Homo sapiens
aattacaacgacctctcaggtgacctcaaggctggccgagggccatctcatcacccctgtcctgttggccccaggcagccaagaccgatggctttggcccrtccttcccagggcccctggcagtgacagctccgtgtgccgcacagctcctggggtttccctggtagccacaccctgtgttcctagtacgttttgcccgtt

SEQ ID NO: 160161 - DNA, 201 bp, Homo sapiens; identical to SEQ ID NO: 29994

SEQ ID NO: 160162 - DNA, 201 bp, Homo sapiens
ggcattgcccagcagcatcatgtgttgaggtggcagcgctactcatagaagtcctttcatcctcgcggtcacccttagtccatgttacaaatgaggattcygggacttgtagaatgggtggctggccagagggccacagctagtaatggcagacataaggcttaatgggactcatctgactcaggcaaacaaggagagtat

SEQ ID NO: 160163 - DNA, 201 bp, Homo sapiens
taaatccatacaaagagaatctgctatgagcttacctcttcattttctttttcttttctattcttttcacagcaccaaaatcgaaagttcggaaaaaggawtgtcagaaatcttgaacatgttctgatgaaagaaccaagtgacccaaagtgacctggacaagattcatagactgaaagctgttgacatcgttgaatcata

SEQ ID NO: 160164 - DNA, 201 bp, Homo sapiens
catagagttttactctaatgcttgagtgaaacccaagaggggattttatttcatcagaatgtcagcatggaagaaacaagtctgtctctactttaagccartctaatatatgaaattttcattttataaaataggtcaatttaactcataatacattccttttttagtacctttaaataatattttcatcctagtaagtta

SEQ ID NO: 160165 - DNA, 201 bp, Homo sapiens
gaaccctggaggttggccacctcccttttcatcccatggttgatcgaactccctctacatatcccagactaggatcgcccggcctgtccttattttagaaraagtcacctctcccacccccttctcccaatgccccctttcaagcacgttgtcacccacctccaaggaccgtgcccaggaagatgcatttctttttgtggc

SEQ ID NO: 160166 - DNA, 201 bp, Homo sapiens
tcatccatgttgtcacagtatcagtagttcctttttattgccgactagtattccattatatgaataggacacagtttgtttatccattttcttgttgatgrccacctgtgcagtttcaggttttggctattaacattctttttcaaggttttggttctttttcaaactttctttcttcttctttttttttttttttttgta

SEQ ID NO: 160167 - DNA, 201 bp, Homo sapiens
cttgctaattattttcatctctttatgggcttgtgaataactagtgtgtggccagtatacgaagaaacgatgatagaatcagacatctttgatctcagggsctctggtggagttcatttatgcctcagtataagatgacagggaagagtttctagatgagtgcctacctctcttcattaacagactccctcctgaaggaga

SEQ ID NO: 160168 - DNA, 201 bp, Homo sapiens
aaaagacaactttttaatgaatcagttttaaatttaccctgtaataagtgagaagcatgaatatatgtaagtcatacttttaatttttatttatttatttwttttttttactatggaaatgctttaatagaggtgaacacacagcaagaacagcaagtgcccacacagacatgactatcacagaacacattgtgggcaaat

SEQ ID NO: 160169 - DNA, 201 bp, Homo sapiens
attctctcctcatcctgccttacagagtggctaagctttagtctattttgtattagggcacaggttatattttatttggggcaagaacagggaagaatctkttatttctaaaaggtgaaaatccctggattaaatttctgcatcctttctggttctgactccctaatgattctgaaaaagtgatttaggaaagagcagaga

SEQ ID NO: 160170 - DNA, 201 bp, Homo sapiens
tccacaaatgtttgttgaacaaatgaataagtggagccaggttgtctatgccctagtcccagctctctcacatgcgctagtgagagatatatacatgtataaaaaaaaatctccctgtgcctcagtttcctcatctgtaaaatggggaagatcattataggcttgtaaatgaaatgaattaatacttataaaatgcttaaa

SEQ ID NO: 160171 - DNA, 201 bp, Homo sapiens
tagacacacttgaccacccttccttcttggcctagtgtttttctgggattgtccgtaacaccaaatatttctctaaactcactaaacatctctttttaatycccattgcaaaatcctttttgtttacctgtacttattttttaactttcattttgaaataattataagttcacaagaaattacaataataatatactggga

SEQ ID NO: 160172 - DNA, 201 bp, Homo sapiens
  misc_feature (1)...(201): n = A,T,C or G
atttgaacacactgtgttgtatgtcactgtggagccgtgcattatgtgtgcagctgctctccgcctgatgagtatcctttgacttcatgagttaatgtatngtaccattcgtgtgaacaagagagtggccaaacacgtagcctgttttccaaaatatgaaaacacagacttaggaaacaccttgtaaaatatagtgtgtct

SEQ ID NO: 160173 - DNA, 201 bp, Homo sapiens
ttgggagtcaattctctagtcttttcacaaactggtcaaattatgccaggctcagtggctcatgcctgtaattccagcactttaggaggctgaggcaggaygattgcttgaggccaggagttcaagaccagtctgagcaatgtagtgagacccctgtctctacaaaataattaaaaattagccaagcatgatggtgcacac

SEQ ID NO: 160174 - DNA, 201 bp, Homo sapiens
ttgcacctgaacatggctgtgaactgctctgagacgtctctgagcagctcctggatggccgtgttgttactgatgaaagtggtggacgtttttagtcctgyggatgggatgtcccagaaagctgttttcccattgtaggggatccagtcagcaaagtagctgctgttcttggtttggacatgaagcattttctcctctacc

SEQ ID NO: 160175 - DNA, 201 bp, Homo sapiens
acattttaaacagaaaatgtatttgacactgatggaaaggagaggaggaaaattaatgacataaatttcaaagcaactattaaattatttgattgcattcytcctcttttactgtctgccaaaattgataaaaaaaatttttctaataagaatgttttaaatagtgatatcttaataagcatcaaaattaagcctgagaaa

SEQ ID NO: 160176 - DNA, 201 bp, Homo sapiens
cactgcaacctccgcctcctgggttcaagcgattctcatgcctcagcctcccaagtagctaggattacaggcacccatcaccatgcccagctaatttttgyatttttagtagagatggggtttcacaatattggccaggctggtctcaaactcctgacctaagatgatccacctgccttggcctcctaaagtgctgggatt

SEQ ID NO: 160177 - DNA, 201 bp, Homo sapiens; identical to SEQ ID NO: 29996

SEQ ID NO: 160178 - DNA, 201 bp, Homo sapiens
tatgtatttacattttaataactacatacagccacgtgccacacaatgacctgtcggtaaaggtcgttatcctggagcattaaatctactcaccttagccstattgtcccatccaagtactaaccaggcctgaccctgcttagcttccgagatcgggggacattcagggtggtatggaggtagacaaccctagtttctatg

SEQ ID NO: 160179 - DNA, 201 bp, Homo sapiens; identical to SEQ ID NO: 29997

SEQ ID NO: 160180 - DNA, 201 bp, Homo sapiens
tttataaggtttataagtgtagataccagtgtataccattttacatatggggaatcctagacttacagaagttaagttacttgcgtaagtccacataattrgtaatgtcactgtcaaaattcaaatttaaatggagtcacttccacatgctatgtgatttctcctatcctctactgcttcccatgaagtgtctgaaaccaa

SEQ ID NO: 160181 - DNA, 201 bp, Homo sapiens
agaaagcttgggccgattttgcttactcttgtgtccccagtgcaaatcctggtgctggcatagttgttgttaataagattttatcagaaaatgaaaatggyccatcttggctcctgcttaaaagtgaactatcttccctaagttggaattcaagaagcctgaaaaactgatgtccaagacactgtgtagtgccagattata

SEQ ID NO: 160182 - DNA, 201 bp, Homo sapiens
tggagaagatgaggaacttaattccatttgatcagacgaccactgaggacctgaatgaagctttcccagaaaccaaatgagacaagagaaagtatccctaytggcctcaccaaccaatcgagaatttataaagttgagtccaggaggaagttctggcccttatattacacattctggacattaaaaataaaaatacttatg

SEQ ID NO: 160183 - DNA, 201 bp, Homo sapiens
cctatgtaacaggaagcattacctgccaaaaatctgcccaagaaagcttgttcaggtgagacttcctgacttttttatgtttttccagcactgaaatgttrgaaagtgcacatgaacagtaaagtacatgggcagctatccaaagagaatcattgtatgtttacccagcaccatacaatgaacagtgctggatacgtgttg

SEQ ID NO: 160184 - DNA, 201 bp, Homo sapiens
gcagcaaactggagagccaagagtgtggtcatctaaatgccagaagcagcctgcctcaaagaccttcagtggagaccccaaataggaaggaccaatagtgkccaatgatgctgatggacacataaaagattgtgatttacctagcggcatttttaatttctataggcaggcaacactctatacttacataataagacagat

SEQ ID NO: 160185 - DNA, 201 bp, Homo sapiens
caaaaataaacccctaatgtcttcaagccaccattttgtcattgtggctgttgtttgttttgctttctaagatttgttactagcaaccaaacagaattcayagcttcgtaggcaaaccgaagtactataaatgaagctaagcttaaaagcatttcctatgtaacaggaagcattacctgccaaaaatctgcccaagaaagc

SEQ ID NO: 160186 - DNA, 201 bp, Homo sapiens
taccacccctttgcttagcctctgtatcagttctcttaggcaatgtagactaaaaagcataaaaccactgagtctcaagtagggcttccaaagccatgacraagcataggaagtgtgcattgaacacatttgtatacgtgtcaggtatagagaacagcagagtcaaacagagcatgccttttgaagtcctgaagttgacta

SEQ ID NO: 160187 - DNA, 201 bp, Homo sapiens
gatcagctgggatactctggagaaccagaatttgcatcctatcaagcactagggagggaaggggagaggagagtgaagaggggagtgagtgttcaaagcgrtcagataaggccaaggtaatttaacactataaactttgctttttccctcctaaaacctgctcctcctctctgttcctgccaaggaaaactcatttaattc

SEQ ID NO: 160188 - DNA, 201 bp, Homo sapiens
aatcatggtggaaggggaagcaaacacatccttcttcacatgctggcagcgaggagaagtgccaagcaaaagggtgaaagccccttataaagccatcagakctcgtgataacttactcactatcatgagaacagcatgagtgtaactgcccccatgattaaattaccccccactgggtccctcccatgacatgaggggatt

SEQ ID NO: 160189 - DNA, 201 bp, Homo sapiens
gtagcatctcagactgcagtacacttctaagaaagtcaggccaaagttgcccatcaggagtttctacgtctcgtaggaatgagtctgatgagaatccgtgstgtcctcatttcttggctatgtgcagcttatgactttagatatgctttacagtggatgtggtggtggattctgagcataacagttggggtatccaccatt

SEQ ID NO: 160190 - DNA, 201 bp, Homo sapiens
agttgtaagaatagtttaaataactttttttctagaacttcttgagaataagttgccgacatgtagctccatgatcatgacccgcacatcctttcatgtaytccttttctctgtttctttctttctttctctttctttctttttcctttctttctttctttctctttctttctctctctctttccttccttccttttttct

SEQ ID NO: 160191 - DNA, 201 bp, Homo sapiens
agaagcgtaacagaactcaagtggatcctgtctcttgccatgaaggcaatagtcagggtggcattgtgtggtggcaggctgctagtgggtccagcctggakgaacctgactagagagggttatggaggctctcggccagagtacctccctcctacttccttacattctggagtaggaaggtatgtttggatgagaaatgag

SEQ ID NO: 160192 - DNA, 201 bp, Homo sapiens
gtcttctttatttcttttatagataattcatcattagcctatataaaagctactgatttttctatgttgattttgggttctaaagatttactgaatttatktattagttctgttagttttctggtggagtctttagggttatctatgtataagagcatgccaccaccaaacagggacaatttgactttctccttcccaatt

SEQ ID NO: 160193 - DNA, 201 bp, Homo sapiens
tggtttcattatgttgcccaggctggtcttaaactcctgagttcaagtgatcctcttgcctccgcctcccgtagtgctgggattacaggcatgagccaccrctccttgcctggatcttcagagtaaatggagcatttgtttctgtttagacaggcaccttaacaagggacggcttggacctctggggagtcgtgtcctgtg

SEQ ID NO: 160194 - DNA, 201 bp, Homo sapiens
atcatcagtgacatcctgaaacccacaggggtcatccaaattcttcctggcctggcttgaaaatgttaagaaattcatgatgcagcatttggtaaagctgytgcttccagtccaaaactgggtgttatggactaactgtagttcattttcaaatggcagtgctggagctgggtgggacctgtgaggttatctcatatcata

SEQ ID NO: 160195 - DNA, 201 bp, Homo sapiens
cacgtgtcaattgccgaataaatataataagaatattgtgtgggatgatgtatgtcatgaagatgattatgaaaacaagtaaatgaagagcagagtgaagyctaaaactctcccttgtcttcctgtttttatgtctgccaacaggttctaaatccattttatatatttcaactcttcagtgtctgtttgtggtttagtgaa

SEQ ID NO: 160196 - DNA, 201 bp, Homo sapiens
attcatatatatttttctatatagtaggtccatgatacatgttgattgaatgatgacttctaataaagaataccatttgtatggtagaaaagcaaagggtraattagaaaaggataaaatcttaaataagtatgttagagttttatctttgcttttcaaacaaatgcttctttagccactgggttgctgtttattctctga

SEQ ID NO: 160197 - DNA, 201 bp, Homo sapiens
atatcataaatagagccataagaaagccagacctaaaggtaagtaaacttatggctactgctgatgtcagagagatttaatctttttcccctcaagtatawagttaaatgtagctcctctactgtgccaatcctcatttgatagtgtatatttaaaatgtgaactttggagccagacagtccaaatctcagcttgctcctt

SEQ ID NO: 160198 - DNA, 201 bp, Homo sapiens
ttgaaatcagttggccatagatgtatgggcttattgctggaccctcaattctattccattggtctacatgtatttcctcatgttagcaccgaactggtttkgttactgagtttggatttgggaagtgtgagtccttcaatgctatttttcttttcaagatttttagaaacgatttagggactcttataatttcatataaat

SEQ ID NO: 160199 - DNA, 201 bp, Homo sapiens
attcctaggtattttattctctttgaagcaattgtgaatgggagttcactcatgatttggctgtttctctgttagtggtgtataagaatgcttgtgatttktgcacattgagttctagcagttcttcatatattgtggagattaaactcttatgagacatgaaatcacaaatattttctcctatatgttatcttttcactt

SEQ ID NO: 160200 - DNA, 201 bp, Homo sapiens
atattttttcacatctctgattaacttttttagcttaggataaatttccaaaagtagaataactatgtcgaaagttatgaacatttttcagtctcttcacrtttattgccaaattgccctgcagaaggtttgcatcaatttattttcccacaagcaatatatgagagagtatatttcatccctcccttctctgtaatttaa

SEQ ID NO: 160201 - DNA, 201 bp, Homo sapiens
cggcagatcagggatggcagggcaccaggcaggagtagtccagcagccgttaagcctcaaggctggtagggggtcatgccacttgccctcagagcaggacrcattccagcagtagtttatgttccaagatgacatagtgcagtagccttgtaggccacagggggaagggcacactgttggcttctactctggggtagcaca

SEQ ID NO: 160202 - DNA, 201 bp, Homo sapiens
gaggtgtcacagaagagtttaattttttctccagaacagtccttctgtttgaaatttatttcgaacagaaaattctatttgaaagaatttggaaacagctyttatttattctgtgattgttctcttctccatagcaagtgcctttaggattttctctattttttgttaaacaacttgattcttttctgtttaacatatatt

SEQ ID NO: 160203 - DNA, 201 bp, Homo sapiens
atttttctccttggagagaaggactgctctggaggtttgggaccagggagcagggtacagctgcaattcaggaactagggctaataggatataatggcaaygaagttccctgggagatgaagcaccatccagtggtgaccttggaccctgagatgatggggcacagtggtattccatactctgtgaagctggggtacggca

SEQ ID NO: 160204 - DNA, 201 bp, Homo sapiens
acctggcagaacaatcacctcttccaaactttacacagtggctttcacttgcagatgagtcttggtatgctaattgtgaagattgtggtaactctgattcygagaagatgcagtagtatagactttgtacaagtttttcagctaagatcaatgccaataatgactgagtgcctcagtggccattttacagatgatggggag

SEQ ID NO: 160205 - DNA, 201 bp, Homo sapiens
ccatttgaggtgtcacagaagagtttaattttttctccagaacagtccttctgtttgaaatttatttcgaacagaaaattctatttgaaagaatttggaarcagctcttatttattctgtgattgttctcttctccatagcaagtgcctttaggattttctctattttttgttaaacaacttgattcttttctgtttaaca

SEQ ID NO: 160206 - DNA, 201 bp, Homo sapiens
tatagagcaccataacagtattgggatattctggatttcaccatatatttactttcatcagtgaattttatactttcatatgtttttatatttgtagtgtycttccatttctacttgaaaaactctcaagcatttcttgtaaggaaaatctagtggtgatgaattctctcaacttctgcttgtctaggactttatttctcc

SEQ ID NO: 160207 - DNA, 201 bp, Homo sapiens
aaatgaatactttccatctagtatttggatgtagaaatcaagtaaattaaatcagtgttaatctagaatacatccgtcaatatatgtgacatttttcactytgatttctcaaaataataccttgtgttcttatttcctcagatatatttgtccttgtgctgataatacagcttggtgtatgtctattcattctatttgctg

SEQ ID NO: 160208 - DNA, 201 bp, Homo sapiens
cttataattataatggactgttttacactgaaaacaactaacctcagtcacatacaaatctctagactttcatccttcccccaatttatattttagtgtcrcaatttacatctttttattttatgtacttcttaacaatgtattgtagttactattatatttgactgttttggcttttagacttcatactagagatatata

SEQ ID NO: 160209 - DNA, 201 bp, Homo sapiens
ttcctggcaatgtaatctttatcaggtgagataaagaagttgatagatttaaagttttatgttccaactcccttgttatcctaagagacaattctagcaaragcagaactgttgacactaggaattcttgtacctaactgccaataaactggtggatagaatttcaggtctatttcagagacatgtgatcaagtaatagca

SEQ ID NO: 160210 - DNA, 201 bp, Homo sapiens
gattgaccctctgcctccagtctcctcaactttgatttgccctctgtactgtgaccagattttttacctcacgattattttagttgctctcataggctccwgtataatctcaaatttctttaggatcatatataaggctttcaggtttgaactcccagtgaactttccagatgggccttaccactcctcatcctgtgcttt

SEQ ID NO: 160211 - DNA, 201 bp, Homo sapiens; identical to SEQ ID NO: 30014

SEQ ID NO: 160212 - DNA, 201 bp, Homo sapiens
tgaacatggaatagacctttttctgaataggtgaggagtcagttttaattttattatttgtgacagagtgatctgtgatttctttctataggaggttaatrtgtgggcctaatactatcgatgttgaagttacaccaatttggaaactgctcatcaaggaggtaatttctccagcattttctcttggtgttggacagaaaa

SEQ ID NO: 160213 - DNA, 201 bp, Homo sapiens
caatcataggttgattatggacacaagagtttggcaaaactcaatgaaagcatttcgtgagaaacaattaataataacatcattattatccaaagtccatmgtttacattacagttcattcctggtcttgcacattttatgggtttgaacatatgtataatgacatgtatccatcattatattatcacacagaatattttc

SEQ ID NO: 160214 - DNA, 201 bp, Homo sapiens
cacattccaacagagaaaacaagataaattgcatgaataattcaaaagtgtctgcccttcaagttgtgcagcattttcaatgcattctttttttctgtggyggaataaatctggttcacctctgagggaagagacacggaaaacacattgaggtggtctgaggatcttctcaaggggagggttcaagcatagcatcagtgg

SEQ ID NO: 160215 - DNA, 201 bp, Homo sapiens
ggtggcttatgcctgtaatctcagcactttgggaggccaaggcaggtggatcacctgaagtcaggagttcaagaccagcctggccaacatggcaaaacccygtctctactaaaaatacaaaaattagccaggtgtggtggcgtgtgcctgtaatcccagctactcaggaggctgaggcaggacaatcgcttgaacccggga

SEQ ID NO: 160216 - DNA, 201 bp, Homo sapiens
tgatacatgtatacattatgtataaatcaaattcgtatatttgcatatctgtcacctcataggtttatcacttctttgtagtgataatattcaaaatcctytcttctagctattttggaatatacaatacaatattattaaacatagtcaccctgctctgcaaaagaacaacagaatttattccttctatctaactataac

SEQ ID NO: 160217 - DNA, 201 bp, Homo sapiens
gtcaacacacacacatgctttctctttctcaagtaaatgtagaaagtaggtgttgtctctacttattaaattctcctcattcctcagccacatatcacctyctctgttaagtctttgttgattcattctttgcgccagttcagaagggagggagttaattgcctgtcctgcattagctctgtgttttcatttgtgaccgct

SEQ ID NO: 160218 - DNA, 201 bp, Homo sapiens
tttaaccatcctaataggtttggagtgatatcttattatgattttgacttgcatttctctaatgactaataatagtgaacatatagtcatgtgctcatgarccatttacatgtcttctttggagaaatgtttattcaggtcctttgaccatttcctaattgaatttttgtcttctgggttttattattattattattatac

SEQ ID NO: 160219 - DNA, 201 bp, Homo sapiens
tgggaataataataatagtgaaaatgttaagatgaccaggtcaacatctgcatctggtttcaaatcctgtgccctctctgccatgccaaacttacatcatwgaattgtgagcacctctgtcttacagctgagaaaactctccctacgcagtgatgtgcagtgtctacatgaaacacttacagtcaggaatcacgttctgaa

SEQ ID NO: 160220 - DNA, 201 bp, Homo sapiens
gtttgtcttaaaatccaaaggaaggctcattggaaacttttttttttcttcatcgtaagtgtcatgatgcagtcaacattctgagtgttagtaattatttyatgtacaaccagatgacttgataaaaaaatctccattttgggttccttacagatattgatcaatgggaccatctttgcaagaatgtctcctgggcagaag

SEQ ID NO: 160221 - DNA, 201 bp, Homo sapiens
tacacaggaaagcagaccaagaataaaggaacaccattagttttttgatagatgacctctgtactcaagagggtcaaacttaaagctttagtcgggggagktaagttttagatatatatatatagagagagagagagagatagatcgatagtttagatatatagatcaaccttttgctgttttgcagttcaaggttccatt

SEQ ID NO: 160222 - DNA, 201 bp, Homo sapiens
aagaaaatgcttctctgaggaatcagagtgacttttacagatagatcctggtctgtcttcattaacttctctcagatatgcttatggttctaaccactctrtcaaatgaaagagtctaaaataactgtgtcttgctttgtaggacaattacattaacatcagggatgaagtctctgataaaggcagagaaggaagttacca

SEQ ID NO: 160223 - DNA, 201 bp, Homo sapiens
aggataatgactttattaaaaatttgttagaaaggagaatcaggaaatagtcacttcctactccgtagtaaatgagagcaagtttgtaaatacctagcacrgtaaccagtgttcaacaatttagtcctttccctttcctcccattccaatccctaacctttgtagttatttttcctccctctttaatttactcaagactaa

SEQ ID NO: 160224 - DNA, 201 bp, Homo sapiens
tgggaaacatatatatgtgtgtatatataaatatatatagaaacatatatatgtgtgtatatataaatgtatatatacccacatatacacatacacacccrtatatatttggaagcatatttatatatagtaaacacacacacacacacacacacacatgcatatatagaaacaagtaactttactgaaaagaaatgtgta

SEQ ID NO: 160225 - DNA, 201 bp, Homo sapiens
aacaatttaagatggttttagaattctttttttcctgtttgtaacatcccattagaaatgtacagtcaaattatacattgttcattaaagtcactcaaaakagttttctgttggttatgccagcaacttgataggtttattttgctccttttgctttagattttagtgttagcttttcaaacttatatttgtattattttg

SEQ ID NO: 160226 - DNA, 201 bp, Homo sapiens
tgttcccatttcacctgaacccaattctacagttgcaaactctagaatacttttatttcctcttttgtacttctctgtcccctgttctactccccacaatmcaagaggatcttggactgtttttactttctccctttctaacaccccagtccaactttttgaagttgctgagttcatttactactggttaggatttccctt

SEQ ID NO: 160227 - DNA, 201 bp, Homo sapiens
ttttcaatgcattctttttttctgtggcggaataaatctggttcacctctgagggaagagacacggaaaacacattgaggtggtctgaggatcttctcaasgggagggttcaagcatagcatcagtgggcaaacaataaataaatctctgcaatgaaatatcctatttgtgaaataggaaatggctttttctggggacgat

SEQ ID NO: 160228 - DNA, 201 bp, Homo sapiens
cagtctggcaaaaatacactggtagatcatgaagcaacctgacgaaaagcagtaagaaccagaaaagggatcatggagtcacagaaggtcagggctgaaawagatatcagagatcatttctcttcatacctgaaataaggactgaactccctgctctggttttcaaggctctgcatgaattaattcaatcttgtcaacctc

SEQ ID NO: 160229 - DNA, 201 bp, Homo sapiens
gttgtgcagcattttcaatgcattctttttttctgtggcggaataaatctggttcacctctgagggaagagacacggaaaacacattgaggtggtctgagratcttctcaaggggagggttcaagcatagcatcagtgggcaaacaataaataaatctctgcaatgaaatatcctatttgtgaaataggaaatggcttttt

SEQ ID NO: 160230 - DNA, 201 bp, Homo sapiens
gtgtcccttgtggccgaggtaagtgtgctgatcttgggctgctgatcttgtgtgtgtgcacgcatgtgtgtagggggacttctttgggactctgaaaacarcaactttagctgacatggactcagcagtgcaggggctcccttccttcacagtataagcaatggtgccttcctctgatgagtcccaagcaggacgttagtt

SEQ ID NO: 160231 - DNA, 201 bp, Homo sapiens
ggtcatcaggtcatgggctgaaaggtggttgaaaggtgatgcagtgaactagttcttacctgcgaatgagcctcctgattctcaagctttgttatgtgtcmgtgcctcatcttcatatccagattcctcagtcagtgatgacaggtctttttccctcaaggttctagatccatcatctttcagagacaaaccgttctgtct

SEQ ID NO: 160232 - DNA, 201 bp, Homo sapiens
aaaccgttctgtctagaatattcactaacgccaaacacttacagaattatattaaaatgatgtttctcaggttgaattgtagcctgctgacctctcttaamttcttgggggttttgatgtctatctcctcaggatgaattccaaatttactcttggaaaaaggtaatatggatctacctgtcagcattaaacagcgcattt

SEQ ID NO: 160233 - DNA, 201 bp, Homo sapiens
ttccaattttgtatgatattagctgttgatttgcatggcttttattgtgttgagatgtgttccttctatatctattttgttgagtttttaacatgaaaggrtgttgaattttgtcaaatgcttttctgtatttgttcaaatgatcatatggtgtttgtgtgtcattctgttaatgtgatattttatgtttattcatttgca

SEQ ID NO: 160234 - DNA, 201 bp, Homo sapiens
tctgtgatgtgcaaagattgatccagcaaaaagaaaatgcttctctgaggaatcagagtgacttttacagatagatcctggtctgtcttcattaacttctytcagatatgcttatggttctaaccactctgtcaaatgaaagagtctaaaataactgtgtcttgctttgtaggacaattacattaacatcagggatgaagt

SEQ ID NO: 160235 - DNA, 201 bp, Homo sapiens
ctatctatggattggcaactgttgtggcttttcttgagaattgaccagattttccagatttttcatattgaatatcccgaacattttgaatattatgttaygaaactttgaatcctgttaaaatcttctggagaatgttgagagttttcttgtttgtttgttttgggctagcaatcaaccataagttctatctttcctgtt

SEQ ID NO: 160236 - DNA, 201 bp, Homo sapiens
gcccctaacagtgcttgaatgagtgaatggaaccactatgacaggggtctttttctttttgttttacttcctgtaagaaagctataatgtggctgggtgcrgtggctcacgcctgtaattccagcactttgggaagctgaggcgggtgaatcacttgaattcaggagttcaagaccagcctagccaacatggtgaaacccc

SEQ ID NO: 160237 - DNA, 201 bp, Homo sapiens
agtatgtaagtgttctcttttctttacattctcactaatatttattattttttgtctttttgataatagctgttctaactggagtgagattatatctcackgtggttttgatttgcatttccctgatattaatgatgttgaacattttttcatatatctgttggcatatggcatacctatttctatggtttttttggagaa

SEQ ID NO: 160238 - DNA, 201 bp, Homo sapiens
tccttcaaaccccagattaaatatcatcttctacagcaagccttctccaatcactccacccagaaatgagagcaccctcctctctgactccatgggactckgatttggacatctgttttaatacttttcccagtctctgctactacagtctctgcatattctctgccactttttctcagtgctgttccttgaactcagtaa

SEQ ID NO: 160239 - DNA, 201 bp, Homo sapiens
accaggaccatgagaaagattggaagacctattgtgccaaacccccatgcacttcaatagggaaggcaccaggttcaagaggctgaagaagagacccagagccagcaaaggaggcatggggttttattaggggctcacctacaggggagagagtcccgtaacagccggctggacaggagaaccaccttacatatagaaaca

SEQ ID NO: 160240 - DNA, 201 bp, Homo sapiens
taattcaaaagtgtctgcccttcaagttgtgcagcattttcaatgcattctttttttctgtggcggaataaatctggttcacctctgagggaagagacacrgaaaacacattgaggtggtctgaggatcttctcaaggggagggttcaagcatagcatcagtgggcaaacaataaataaatctctgcaatgaaatatccta

SEQ ID NO: 160241 - DNA, 201 bp, Homo sapiens
attttaaaatcaaggatatgtggggcctctggcattattctttttgctgaagagtgctttggttattcaaggtcttttgtggtccctatacattttaggatttttttttctatttctgtgaaaaatttctttggtgttttgatagagattggattgaatctgtagattgttttaggtagcagggatatttcaacaatatta

SEQ ID NO: 160242 - DNA, 201 bp, Homo sapiens
ggcccacttcatgcatatttcatcctttaaaagtcacatggattttaagaacatgagatgtaatcacagggatgacaatgctttctatatattacacttaycattctttattatttttagatacttcaggaggaggcataatatctgtgcaggaagccagaagagatagaaagccattccaagtttcagggcttaagaccc

SEQ ID NO: 160243 - DNA, 201 bp, Homo sapiens
tcttctggcccccagtttttgaaaggtcacagatgtgtctttgaatttcaggtgtgaaaatgggtgagaccttcccccttatttgttaaaatgaatattayggaaggagtggttaattcccagtagctagaagctgtatcagcatgttcctctcctttccccatccctcaaccaggtcccagtggaaggaattgcaatcct

SEQ ID NO: 160244 - DNA, 201 bp, Homo sapiens
ctctggcattattctttttgctgaagagtgctttggttattcaaggtcttttgtggtccctatacattttaggatttttttttctatttctgtgaaaaatktctttggtgttttgatagagattggattgaatctgtagattgttttaggtagcagggatatttcaacaatattaattcttccaatcaattaacatgggat

SEQ ID NO: 160245 - DNA, 201 bp, Homo sapiens
ttgtctggtttcgaagattttccagaatatggggatcagaaaacattgctttctccagtgctcaggataactcatagattcacggggactataagtcttayttctattaatttcatattgattttatttccaagactagaaagaacaaaaaggaaaaccactaaagagcttttgttgagactctaaactagatttaagagc

SEQ ID NO: 160246 - DNA, 201 bp, Homo sapiens
aatctgtagattgttttaggtagcagggatatttcaacaatattaattcttccaatcaattaacatgggatgtcttttcatgtatgtgtgttagcttccattttttttcaccagtgttttatagtttccagtatagagatttttcacctccttggttaaatttatttctaggcatcttattttttgtggtgtagctgttga

SEQ ID NO: 160247 - DNA, 201 bp, Homo sapiens
tgttagcttccattttttttcaccagtgttttatagtttccagtatagagatttttcacctccttggttaaatttatttctaggcatcttattttttgtgktgtagctgttgaaagtggcattgtcttctttatttcttttatagataattcatcattagcctatataaaagctactgatttttctatgttgattttgggt

SEQ ID NO: 160248 - DNA, 201 bp, Homo sapiens
gatcggagtgggagaaacatggacagcactttttagtctttcttcctaccagaaaagatttccctattgtttatttaatttttgcctctgttctctgtctytccatttttacttctggtagttccattgttatctatcctctcagtctatcttttttcttgtagttgtcttatttatttgtttgtttatttacttattttt

SEQ ID NO: 160249 - DNA, 201 bp, Homo sapiens
ctttttttgctttgacttatttctcctgccttcattcacccagcatttcccttgctttctgccttccagatgcactaggctttttgtttcctgaaacatastctttttttcgaacctcagaacatttcgatatgtcacctggaattgtccatttttttttcatcttcatgatttgcccttaccccttggctaaataactcc

SEQ ID NO: 160250 - DNA, 201 bp, Homo sapiens
catagatcattttaaaatttaaaaagttcttttaaaattagctgtttttttccttaacagaaagggcaatatatggctatgataaaaataaaattcaaacygaacaaaagagtgtgaataaaaattaaggctccctcccgctgggaaaacttcccagtgttcaggtcctgtttcaagatacatccactaggaccatatttt

SEQ ID NO: 160251 - DNA, 201 bp, Homo sapiens
ttcacttccaaaactccaaacattgagtgcgtacctcaccttatcaagtaagtaggcacttcctcaaacattgttttctctctcttgacttctggtgcaamtcacattgttctgcctgggaaagactagagaaactttctgtccctgggtgcggagggtgttttgtggaagaatgcagtcaagcattctacttccaaatgg

SEQ ID NO: 160252 - DNA, 201 bp, Homo sapiens
cttactcttttctgcacataaactttttaactttgaaatttagaaatgtttgcctttgtgtttcccttatttcattaacttagtctggaacatggacagcrcttttagaaaaatttttatttttattttttaccattttttgacatatttattaagtcatcataatatctgtcactttgaatgttatacatatgataaaac

SEQ ID NO: 160253 - DNA, 201 bp, Homo sapiens
accttatttatctgcactacggagtcttcgctatggggccactggatttttttttttttaaaatagggaggtggtttcattatgttgcccaggctggtctyaaactcctgagttcaagtgatcctcttgcctccgcctcccgtagtgctgggattacaggcatgagccaccgctccttgcctggatcttcagagtaaatgg

SEQ ID NO: 160254 - DNA, 201 bp, Homo sapiens
cttgttaatatgtttgtgaagtattttctcattacaaaaataccttatttatctgcactacggagtcttcgctatggggccactggatttttttttttttwaaatagggaggtggtttcattatgttgcccaggctggtcttaaactcctgagttcaagtgatcctcttgcctccgcctcccgtagtgctgggattacagg

SEQ ID NO: 160255 - DNA, 201 bp, Homo sapiens
aggaggctgaagaagagaggcatcttctgcattagcccccagaggatcaacgtatgtggacagttaaaccttgtctgctttgacaaggtatgtgtgtttcmtccttattcttatcatcatttttaccattgctgtcatcatgtatatctacttttacccccttgcaaggcaggagacatagaatgtgggtgcctgtcttca

SEQ ID NO: 160256 - DNA, 201 bp, Homo sapiens
ctttatcttcttaattgcaacgtggctctaccctagtctaccactcactaaagaaatggttctctgcattggggtgttgctaaatgcttcatttagcatgaaaaaaaagacctgattattaatgtttgcccatttcagtggcgtaaatactcctaccataaccagttgcaagctgtctgcctattgtcactgaacatgaag

SEQ ID NO: 160257 - DNA, 201 bp, Homo sapiens
tttcatccttcccccaatttatattttagtgtcgcaatttacatctttttattttatgtacttcttaacaatgtattgtagttactattatatttgactgytttggcttttagacttcatactagagatatatatgttttatagagcaccataacagtattgggatattctggatttcaccatatatttactttcatcagt

SEQ ID NO: 160258 - DNA, 201 bp, Homo sapiens
ccaggtgtggtggcgtgtgcctgtaatcccagctactcaggaggctgaggcaggacaatcgcttgaacccgggaggtggaggttgcaatgagctgagatcrcaccactgtattccagcctgggcgacaagagcaaaactccgcctcaaaaaaaaaaggcaaagagtcatatgctgttcatcagagatttgtctgtaataat

SEQ ID NO: 160259 - DNA, 201 bp, Homo sapiens
attaatgtgggaggattggagagtggctattaatgcaacaaagcatattaaattatttttttataaagatgtttgttcacctccaagatgctctgttttgkcatgaggcgatggaatggaaacccatttccttttctccttaagctttcaggaagttcacagctttgcctcaggccaggctttgccatggggcccactgtg

SEQ ID NO: 160260 - DNA, 201 bp, Homo sapiens
ggctattaatgcaacaaagcatattaaattatttttttataaagatgtttgttcacctccaagatgctctgttttggcatgaggcgatggaatggaaaccyatttccttttctccttaagctttcaggaagttcacagctttgcctcaggccaggctttgccatggggcccactgtgtgcagcgatggccagctgccactc

SEQ ID NO: 160261 - DNA, 201 bp, Homo sapiens
gagctataaacatggtcatgcctttaacccactgatatcatttcttgaaatttgacctaaagaagtaaacaaaaagaaggaaggccgggcaaggtggcttmtgcctgtaatctcagcactttgggaggccaaggcaggtggatcacctgaagtcaggagttcaagaccagcctggccaacatggcaaaaccccgtctctac

SEQ ID NO: 160262 - DNA, 201 bp, Homo sapiens
ctctaagtcccgaatcttttttttctcactgtgctggattcctttttgtagcttttgatcctttaaaattataagctttctattcctggaacttctcagctttttttttttttcctggacagtctagattataagctttttgaagacagtgattgtggtatacatttcattccccctggcacctagcacatggccacagca

SEQ ID NO: 160263 - DNA, 201 bp, Homo sapiens
tgaattttcagttgtacagggatgccatcaggttcctcctgtgccttgtaggaacagccaccattgggatgatctatactctgtgtgtctatgtgcttagyggggtaagctgtctttgctcttttattaaatgcacacacactcatctctgtatattttgtactgtgcatgttggccttaacctaggatgtggtttacaaa

SEQ ID NO: 160264 - DNA, 201 bp, Homo sapiens
ccctgacctcaagtgatccaccctcctgggcctcccaaagtgctgacattacaggcatgagccactgtgcccagcctgattctttaaatttctcaacttaytgtcctgtctgttccatttgactattctgaccagctctctttctgaaaactatcttctctataactttctaagataattctctctctccaaattcttcta

SEQ ID NO: 160265 - DNA, 201 bp, Homo sapiens
attacattggcttttaaaattgattaattaattaatattccaatttctattaaggttattttcccctcttgttggcttccttcccttcttcatctctctttctctctctctctctctctctcacacacacacacacacacacacacatgcacacagaacctgtgctaagcctggctgaagtgcagacatgcatcatacaca

SEQ ID NO: 160266 - DNA, 201 bp, Homo sapiens
ttacattggcttttaaaattgattaattaattaatattccaatttctattaaggttattttcccctcttgttggcttccttcccttcttcatctctctttctctctctctctctctctctcacacacacacacacacacacacacatgcacacagaacctgtgctaagcctggctgaagtgcagacatgcatcatacacaa

SEQ ID NO: 160267 - DNA, 201 bp, Homo sapiens
aagtctttcatctatttcaagttgagttttgtgtatggtaagatacaggggtctagcttaattcttctgcatgtggattgccaggtttctcagttttatttatttatttatttatttatttatttatttatttatttatgtattttgagacagagtcgtgccctgtctcccaggctggggtgcagtggcacgatctcggct

SEQ ID NO: 160268 - DNA, 201 bp, Homo sapiens
cagcacttatcatattaaataaaatgttttgtttctatctttgtctcttctccatctggcaatcccataatgctaatgtttgatcatttcctggtgtttcrtaagtcctatggcttgtctttgttcttttatattcattttttctttgcttcctctgactgggtaatttcaaaagacctagctccaaattcagagattctt

SEQ ID NO: 160269 - DNA, 201 bp, Homo sapiens
agtctttcatctatttcaagttgagttttgtgtatggtaagatacaggggtctagcttaattcttctgcatgtggattgccaggtttctcagttttatttatttatttatttatttatttatttatttatttatttatgtattttgagacagagtcgtgccctgtctcccaggctggggtgcagtggcacgatctcggctt

SEQ ID NO: 160270 - DNA, 201 bp, Homo sapiens
ttttttttttttttttttttttttttttttttttttttttttttgagacggagtctcgctctgtcgcccaggctggagtgcagtggcgggatctcggctcmctgcaagctctgcctcccgggttcacgccattctcctgcctcagcctcccaagtagctgggactacaggcgcccgccactacgcccggctaattttttgt

SEQ ID NO: 160271 - DNA, 201 bp, Homo sapiens
gtctttcatctatttcaagttgagttttgtgtatggtaagatacaggggtctagcttaattcttctgcatgtggattgccaggtttctcagttttatttatttatttatttatttatttatttatttatttatttatgtattttgagacagagtcgtgccctgtctcccaggctggggtgcagtggcacgatctcggctta

SEQ ID NO: 160272 - DNA, 201 bp, Homo sapiens
tctttcatctatttcaagttgagttttgtgtatggtaagatacaggggtctagcttaattcttctgcatgtggattgccaggtttctcagttttatttatttatttatttatttatttatttatttatttatttatgtattttgagacagagtcgtgccctgtctcccaggctggggtgcagtggcacgatctcggcttac

SEQ ID NO: 160273 - DNA, 201 bp, Homo sapiens
ggtaatttctccagcattttctcttggtgttggacagaaaataaggaagtttggctctagtgaaataatcaggagtgctaattgttaataagtaacttcayatagagtatattttgaaagtatgccaagcatattatcctcatatctcttgcttactctttttcttcaagtggttcttttgcacattgccttatgcaatat

SEQ ID NO: 160274 - DNA, 201 bp, Homo sapiens
gatgaatcccaaatttatatctccagccttgatgtccatccaaagctctggaaatgtagctactctgcatctaaccatgggtatttaataggaattaaacwgaactcaaacattctcaaacagaactcttaattcccccagatctgatattcaatataatcattatgtacttactgagtccctagtttgtgctacttactg

SEQ ID NO: 160275 - DNA, 201 bp, Homo sapiens
tgttcaaagggatgaggaacttaagtttttttttttaccttaaaaactactttagaccgggtgcggtggctcacgcctgtaatcccagcactttgggaggmcgaggcgggctgatcacgaggtcaggagatcgagacgatcctggctaacacggtgaaaccctgtctctaccaaaaatacaaaaaattagccgggcgtggt

SEQ ID NO: 160276 - DNA, 201 bp, Homo sapiens
aaacacttacagtcaggaatcacgttctgaatttctaaatccattgtattaactgctgaatcacacttttttcagtcaaactagactcttaggaaaattcscttaaataatgagtttgaaccctaagtaatgatggttactttgtttttttaattagagaaattagcaagataggtttgatctcatctacaattaatgtgg

SEQ ID NO: 160277 - DNA, 201 bp, Homo sapiens
gtgtgatctctgctcactttcacctccacctgccaggctcaagtgattctcgtgcttcagcctccagagtagctgggattataggcatgcaccaccacacycggctgattttgtatttttagaaaagacagggttttaccatgttgcccaggctggtcttgaactcctggctcaagcgatctgcctgtctctgcctcccaa

SEQ ID NO: 160278 - DNA, 201 bp, Homo sapiens
tgttttgggatttggagtcaaacgttttgatttcttgtcctagtactttaggtttgttacctaactttttaggacctcaatttcaccacttgtaaaatggrgcagtgtgagaatgaaggagtcaaacgttttgatttcttgtcctagtactttaggtttgttacctaactttttaggacctcaatttcaccacttgtaaaa

SEQ ID NO: 160279 - DNA, 201 bp, Homo sapiens
tggaggctggaaagttcaagatcaagacaccagcagattcagtgtctggtgagatctctcttctgggttcagagatggtaccttcctattgcatcctcacrtggtgaaagagacaaggcgtctctcctgggtctcttctataagggcactgaaattattcatgacctaatcacctttcaaaggccccttctcctaatatca

SEQ ID NO: 160280 - DNA, 201 bp, Homo sapiens
ttagcaagtacagccaaagaagaaaaatgttatctcaaaaatattattgctaaatatgttcttttcattattattattttagttctttggaagactggctyagttctgccaagatacatcaaaaatttggatcaggcttgacaagagaagaacaggagattaggtaccatgcatattattgcctatactagctcaaaagga

SEQ ID NO: 160281 - DNA, 201 bp, Homo sapiens
attgttatctatcctctcagtctatcttttttcttgtagttgtcttatttatttgtttgtttatttacttattttttagagacagagtcttgctctcttgyccaggctagagtgcagtggcaggatcatagctcacttcagccttgaactcctgggctcaagcgatcctcctgcctaagccttcttagtaactgggactgc

SEQ ID NO: 160282 - DNA, 201 bp, Homo sapiens
tatttataatactgtattatacttatcagtttacatatctgtctcctattctaaactacagacctcttagaagtaagaactatgtttatgcttgtatcccsaatacctagggttgtctctgccacatggtaggctcacaaaaaaaatgtctgttgtatgatgagtgggtgcaggcatgatttaaatgagggaagccatcct

SEQ ID NO: 160283 - DNA, 201 bp, Homo sapiens
ttctcttgtatctcactgagtttccttaagatcattataaattccttttcaggaaattcataactttccttttctttggggtcagttactggagaattatygtgtttctttgttgatatcatattgtctcgctctttcgtatttcctttttgtttctgcatcaatgtctttacacctggcagaacaatcacctcttccaaa

SEQ ID NO: 160284 - DNA, 201 bp, Homo sapiens
tggctttgatatttttgtaatatgtccccaacattctttgagcatttctttacttaatggcacaagaagatgttctagcttatattatacttttcttggckcagcctgtactcagtcctctctctaaggaaacctttttattgggagaaagggaatttagaaaccaaactttgggcactggatgtgctcattactattggt

SEQ ID NO: 160285 - DNA, 201 bp, Homo sapiens
cttttgctagaaaaatattgccaaaatttctctccataaagattgtgccagtttacatttgcaccagaaatgtgtcagtgactgattcctcgcagccttgmcaatagaatgcgctggaaattttgcacatttttctaatcataaggtgagcaatgttatctcatacatatgtctcactctcttttttagaaagtaatttaa

SEQ ID NO: 160286 - DNA, 201 bp, Homo sapiens
tttttttttttttttttttgagacggagtctcgctctgtcgcccaggctggagtgcagtggcgggatctcggctcactgcaagctctgcctcccgggttcmcgccattctcctgcctcagcctcccaagtagctgggactacaggcgcccgccactacgcccggctaattttttgtatttttagtagagacggggtttcac

SEQ ID NO: 160287 - DNA, 201 bp, Homo sapiens
cacactaaggagagaccctcggcagatcttcgtggctctcccctggacagttacctccccagcactctgctctatgaactcaagctgccaagatctccatygatgctcatctttgtgttctgaactcagtagtcatctggacttggtctggtttcccttctctgcatagtggcttggaaactctttaaagacagtaagcgt

SEQ ID NO: 160288 - DNA, 201 bp, Homo sapiens
gtagctgggactacaggcgcccgccactacgcccggctaattttttgtatttttagtagagacggggtttcaccgttttagccgggatggtctcgatctcytgaccttgtgatccgcccgccttggcctcccaaagtgctgggattacaggcgtgagccaccgcgcccggccgctaattttttgtatttttagtagagacg

SEQ ID NO: 160289 - DNA, 201 bp, Homo sapiens
gcttagctcccacttatgagtgagaacatatgatgtttagttttccattcctgagttacttcgcttagaataatagtctccaatttcatccaggttgctgmaaatgccattatttcattttttatgtctgtatggtattccatgttacatatatgccacattttctttatccactcatagattgatgggcatttgggcttg

SEQ ID NO: 160290 - DNA, 201 bp, Homo sapiens
ccactacgcccggctaattttttgtatttttagtagagacggggtttcaccgttttagccgggatggtctcgatctcctgaccttgtgatccgcccgcctyggcctcccaaagtgctgggattacaggcgtgagccaccgcgcccggccgctaattttttgtatttttagtagagacggggtttcactctgttagccagga

SEQ ID NO: 160291 - DNA, 201 bp, Homo sapiens
cgtagtgctgggattacaggcatgagccaccgctccttgcctggatcttcagagtaaatggagcatttgtttctgtttagacaggcaccttaacaagggayggcttggacctctggggagtcgtgtcctgtgataggaatgggtgagtaccttggactcttggactaaatgcattctagtgtctctttttccaaaattccg

SEQ ID NO: 160292 - DNA, 201 bp, Homo sapiens
gttttatgagatattttccataacctggggttgcttccttagagtattcctaagatgtctactgatctctctgttaaagtcatgcagtgggaacaaatgtygattttctttgccaagaaaataccatagatgaacattaaaaacagttctgtaagccaaaattcacatctgcacacacttaaaatgtagctctgttttaaa

SEQ ID NO: 160293 - DNA, 201 bp, Homo sapiens
ggggtttcaccgttttagccgggatggtctcgatctcctgaccttgtgatccgcccgccttggcctcccaaagtgctgggattacaggcgtgagccaccgygcccggccgctaattttttgtatttttagtagagacggggtttcactctgttagccaggatggtctcgatctcctgacctcgtgatccacctgcctcggc

SEQ ID NO: 160294 - DNA, 201 bp, Homo sapiens
cacgcctgtaatcccagcactttgggaggccgaggcgggctgatcacgaggtcaggagatcgagacgatcctggctaacacggtgaaaccctgtctctacyaaaaatacaaaaaattagccgggcgtggtggcgagcgcctgtagtcccagctattcaggaggctgaggcaggagaatggcatgaacccgggaggcggagc

SEQ ID NO: 160295 - DNA, 201 bp, Homo sapiens
tccaaatgttccaatactgtttgttgaaaagattatgttttctccactgaattgagttttcatcttttgtcaaaaatcaattgttcacatataggtggatstatctcttgatttcctacccaatcttattgacctatttgcttttttatagcaataccatacaaagttgctttataataagtcttgaaatagggtaatgtt

SEQ ID NO: 160296 - DNA, 201 bp, Homo sapiens
ccgttttagccgggatggtctcgatctcctgaccttgtgatccgcccgccttggcctcccaaagtgctgggattacaggcgtgagccaccgcgcccggccrctaattttttgtatttttagtagagacggggtttcactctgttagccaggatggtctcgatctcctgacctcgtgatccacctgcctcggcctcccgaag

SEQ ID NO: 160297 - DNA, 201 bp, Homo sapiens
ggaggccgaggcgggctgatcacgaggtcaggagatcgagacgatcctggctaacacggtgaaaccctgtctctaccaaaaatacaaaaaattagccgggygtggtggcgagcgcctgtagtcccagctattcaggaggctgaggcaggagaatggcatgaacccgggaggcggagcttgcagtgagccgagatcgcgcca

SEQ ID NO: 160298 - DNA, 201 bp, Homo sapiens
catatattgtcttgataaacatcttaagcaacagaaaacagggttcaagagcagagaaccagtctgacctcaaattcaccagggtggggttttttcccccmtcctaataagcctgagggtactgcaggagatcagggtgtatttcagtccttatctcaaccacataagacagacactcccagagcggccatttattgacct

SEQ ID NO: 160299 - DNA, 201 bp, Homo sapiens
ggcgggctgatcacgaggtcaggagatcgagacgatcctggctaacacggtgaaaccctgtctctaccaaaaatacaaaaaattagccgggcgtggtggcragcgcctgtagtcccagctattcaggaggctgaggcaggagaatggcatgaacccgggaggcggagcttgcagtgagccgagatcgcgccactgtactcc

SEQ ID NO: 160300 - DNA, 201 bp, Homo sapiens
aatatggctctattctgcctgaccctgtaggcagtcagcccttatggttgtcttcccttgttccctaaaattgctgttattctgttctttttcaaggtgcmctgatttcatattgttcaaacacacatgttttacaatcaatttgtacaatagtggtcctgaggtgacgtacattctcagcttacgaagataacaggatta

SEQ ID NO: 160301 - DNA, 201 bp, Homo sapiens
tgatatgctgctggattcagttagctagtattttgttgaggatttttgcatctatgttcatcagggacattggtctgtggttttctttttttgttatgtcsttccctggttttggtattagggtgatactggcttcaaaaaatgatttagggaggatttcctctttctctatcctgtggaatagtgtcaatagaattgata

SEQ ID NO: 160302 - DNA, 201 bp, Homo sapiens
ataataagaatattgtgtgggatgatgtatgtcatgaagatgattatgaaaacaagtaaatgaagagcagagtgaagcctaaaactctcccttgtcttcckgtttttatgtctgccaacaggttctaaatccattttatatatttcaactcttcagtgtctgtttgtggtttagtgaagactataaggaatatgcttttgc

SEQ ID NO: 160303 - DNA, 201 bp, Homo sapiens
cttatggttgtcttcccttgttccctaaaattgctgttattctgttctttttcaaggtgcactgatttcatattgttcaaacacacatgttttacaatcartttgtacaatagtggtcctgaggtgacgtacattctcagcttacgaagataacaggattaagagactaaagtaagacaggcataagaaattataagagta

SEQ ID NO: 160304 - DNA, 201 bp, Homo sapiens
tcagttagctagtattttgttgaggatttttgcatctatgttcatcagggacattggtctgtggttttctttttttgttatgtcgttccctggttttggtrttagggtgatactggcttcaaaaaatgatttagggaggatttcctctttctctatcctgtggaatagtgtcaatagaattgataccaatttttctttgaa

SEQ ID NO: 160305 - DNA, 201 bp, Homo sapiens
atgagaaaatgtttttctatattttctctttcaaatatgagagaattttttcctaattgcttctttttttgaagttgtttaaaactgttttgcctatagctttttttttggttatcatatatttatgtatttttttacggctttaaaaatgttttctgtgtgttcatacttaatgtctgtaaaactcactttccaagagcc

SEQ ID NO: 160306 - DNA, 201 bp, Homo sapiens
ttagctagtattttgttgaggatttttgcatctatgttcatcagggacattggtctgtggttttctttttttgttatgtcgttccctggttttggtattarggtgatactggcttcaaaaaatgatttagggaggatttcctctttctctatcctgtggaatagtgtcaatagaattgataccaatttttctttgaatgtc

SEQ ID NO: 160307 - DNA, 201 bp, Homo sapiens
ggcaggcaatcaggaagcagggaagaactttcatttctcttatcatgggtaagaatgaacagctttgcagacacttaacacaccacttgtgtttgtgtttktgtgtgtgtgtgtgtgtgaagtgacaatatctagcaattttgctatacagttatttgctggagatctgtttttaaaaggaactctttatctattaggatt

SEQ ID NO: 160308 - DNA, 201 bp, Homo sapiens
agaactgggacctaaatccagatctgttcaactccaagactggcccgtgtgaaattaaatatgcagtgatatgtcaggatatatcaaaaacatgtcatacwtgggccacatctttatatagggtcaattgtgtttagtatttagtagtaattttaatgtcattttatattaaataaaatatagatgtgctatagagtgaaa

SEQ ID NO: 160309 - DNA, 201 bp, Homo sapiens
atttattatttatttatttatttttgagatggagtttcactcttgttgcccaggctggagtgcaatggcacaatcttggctcaccacaacctctgcctccygggttcaagcgagtctcctgcctcagcctcccgagtagctgggatcacaggcatgtgccaccacacctggctgattttttgtatttttacaaaactgggg

SEQ ID NO: 160310 - DNA, 201 bp, Homo sapiens
ctctggtcacacaactggtgtttaaacctaacctgaattcttaaccataatattgcactgagagaaataccaccacctttttttttttttttttttttttyaccaaatagcaaaccatttctttcgagtctgttcacagtgccctgcaggtaaaaatttcactctattccttattttaatgacatattttaaacttctgct

SEQ ID NO: 160311 - DNA, 201 bp, Homo sapiens
gtaaatactcctaccataaccagttgcaagctgtctgcctattgtcactgaacatgaagtggggaaagatgtatagtagcatatgattctataatacttgycccatatagatacaagagtcgtaaataaccttaagggcagagatagcagtaaaatgtagaaaaatatttagaaatagctgagctttgagtatttattaac

SEQ ID NO: 160312 - DNA, 201 bp, Homo sapiens
tgtatggtagaaaagcaaagggtaaattagaaaaggataaaatcttaaataagtatgttagagttttatctttgcttttcaaacaaatgcttctttagccmctgggttgctgtttattctctgatcctcaaactagaggttttcttagtacttttcttttgcaggtgagatgcatcaaagtgcagaaaataagatatgttt

SEQ ID NO: 160313 - DNA, 201 bp, Homo sapiens
cctcatcagcatctatatcttggacgttagtagaagagaagaaacacattatgtatgggaatcaggtactcctgaacacagaccttctgccacattatcartgtgtcttgcagtgttggtgactgagcagctttgacctagagtcaacatatgcttccaaatgtctagcattcatgcttttgaacgaactcagttacattg

SEQ ID NO: 160314 - DNA, 201 bp, Homo sapiens
gacatccagttgactttaatttcttttttttttttttgagatggagtctcgctgttgcccaggctggagtgcagtggcgcaatctcggctcactgcaggcyctggcccctcggggttcacgccattctcctgcctcagcctcctgagtagctgggactacaggtgcccgccacctcgcctggctaattttttttttttttt

SEQ ID NO: 160315 - DNA, 201 bp, Homo sapiens
cactctcgtttagttattttcatcaaaatatagtgttgttttggttgtctttgtgggagagatgagtactaagggcttttagctggccatcttgctgacakccagttgactttaatttcttttttttttttttgagatggagtctcgctgttgcccaggctggagtgcagtggcgcaatctcggctcactgcaggctctgg

SEQ ID NO: 160316 - DNA, 201 bp, Homo sapiens
tcaggatatatcaaaaacatgtcatacttgggccacatctttatatagggtcaattgtgtttagtatttagtagtaattttaatgtcattttatattaaayaaaatatagatgtgctatagagtgaaacatagaatttgaatgattttaaattcaatttagatgtgagattcaaaagaaacttcatttttgaggcaagcca

SEQ ID NO: 160317 - DNA, 201 bp, Homo sapiens
ccaggtcacttagggaacagctttagagttgattcttatctagcatctcttgacttccactctaggactctgcaaaacacatcgtacagcctcattttcayggttctttgctctttccttcaaagctacattaaatactagggcttctttctccctttccttcgccagaagtttgcctctgggtgtctttcttgggatcac

SEQ ID NO: 160318 - DNA, 201 bp, Homo sapiens
tcagaaaagaatttaaatttgtatttctgattgctgctgttattcccatcttcatattcatttctccttaggcatttgttcaaagggatgaggaacttaaktttttttttttaccttaaaaactactttagaccgggtgcggtggctcacgcctgtaatcccagcactttgggaggccgaggcgggctgatcacgaggtca

SEQ ID NO: 160319 - DNA, 201 bp, Homo sapiens
gtgtaactgctgctctacctgtacgtgtaactgctgctttgacttatttctcctgccttcattcacccagcatctcccttgctttctgccttccagatgcrctaggctttttgtttcctgaaacatactctttttttgctttgacttatttctcctgccttcattcacccagcatttcccttgctttctgccttccagatg

SEQ ID NO: 160320 - DNA, 201 bp, Homo sapiens
aatgtctttcctctgcataatcaaagaaacacatctctgggttttagagacactgaatcaaaaagctgaataattatgtgtgtagagctatttttgagatyacagagcctttccactcacattaaaatacattctgaagttttccagaacttctaaataggggtaggaaagtagaaacagcatttccttatcaataaaagt

SEQ ID NO: 160321 - DNA, 201 bp, Homo sapiens
agcaagtgatattggtgatgttgagctggagctgtgcttcgttgatgcctcgtgtcatccttcctgaagactcacaggatgtgcacaaaagaaaagtgccyggcaccccacataagacttcttcatttgatgggtgaggaaatggggctagggaggtgacacaatttcccctagctcacgtgtgagtgaggggcctcacca

SEQ ID NO: 160322 - DNA, 201 bp, Homo sapiens
tgatggcctgtggagggctgtagcctcaaaacactcaacccttgcttgtaaaaagtaattattttattttgcaggaggctgttattgaaaatcgagccctrtggatgatgattaaaagatgtttcggctatcagtcaaaaagccagtatcggatatggcagagggacttggcaaatgaccctagttggcccccgctaaacc

SEQ ID NO: 160323 - DNA, 201 bp, Homo sapiens
aggagctgtcatgggctcagccttgatgacaataacagcattaccaagagggtaaccatttaggggcatttaaaggaggggtccccaatccccaggccacygattggtgccctgtccatggcctgttaggaaccaggccacacagcaggaggtgagctgctggcaagccggcgagcattacctcctgagttctgcctcctg

SEQ ID NO: 160324 - DNA, 201 bp, Homo sapiens
caaatttttcccacgtttgactttttctgttatacttcttgaatcctgaggtttgtcagtcatctgagtgggttttatgtttagtatttccctattcagayaataaccactgtcaaataggtctctaagggaccattgtggtatctgtttctcaatcctgtgcttctccctctaattttactctgtgtgaagtaatcagtg

SEQ ID NO: 160325 - DNA, 201 bp, Homo sapiens
ccctgagccagtgctaaaggcagggcttggctggggagagacgggacaccagggagaagagggcaatgctgcccagttgtgaaggtttgacatgggtaccrtcaggcctcctggggataaagccacattcctgcctcccttttgaaaacaaaacaaagcaagcaaacaaagagtgattttcctcttcttttctaattgcaa

SEQ ID NO: 160326 - DNA, 201 bp, Homo sapiens
ctttgtgtttatatgtaacacatataaactaggaaaattttaataaacaattttgtaattgtttaatataagataataatattatatatataataatagtmcagtatattctataataatagtaaaatatatacagtataagcctaaagtatattattatacttagaaaagtataataacttttttcagtgttcatgaatg

SEQ ID NO: 160327 - DNA, 201 bp, Homo sapiens
taagctgatcctggctagagagtggggtgttggatgccagatatttcctgggatgtggagtactataatagaaaccagtatgtggccatactggttttctrtgctctacagggtttctgctactcctttgatgtattctgacactctcgtttagttattttcatcaaaatatagtgttgttttggttgtctttgtgggaga

SEQ ID NO: 160328 - DNA, 201 bp, Homo sapiens
gcagaagcccaagaataaaacatgggcaaataaaatgtgagttacagtgaaatataagtaatatgacaagggagcaattattccttttctttttcttttcttttttttttttttgtgagacaggtttcatttttgttgcccaggctgaagtgcaatggtgtgatctcagctcactccacctcctggcttcaagcaattctc

SEQ ID NO: 160329 - DNA, 201 bp, Homo sapiens
tactttgtatcatacagaattatgagtattgggattgggagtaaatggggatgttaggaaatgagcttaaaggcaaatatatccaagtacctttgatttgrtaatattatgagctataagaagagataggtgtatagatgaatgtcagtttttaatacacacctagactaaggcatacagttagttggtgcactggattaa

SEQ ID NO: 160330 - DNA, 201 bp, Homo sapiens
attttcagacagacagtcgtataatgacttttgattttttttctcctgagcttagctgaacagcacagaatgactgaccttatgtcttttcattactttcrtgtctttatcatttcttttcttacacagggaaggacgtgcagctctcgttacctccttttgcatgtttaagtacatggctctgtacagcatgattcagta

SEQ ID NO: 160331 - DNA, 201 bp, Homo sapiens
atattgaatatcccgaacattttgaatattatgttatgaaactttgaatcctgttaaaatcttctggagaatgttgagagttttcttgtttgtttgttttgggctagcaatcaaccataagttctatctttcctgttgtaggtggcagtttcaatcttagctaaaatataaaatcttttgctatgatgtttgggtctgcct

SEQ ID NO: 160332 - DNA, 201 bp, Homo sapiens
gaagtggaaccaccagatactctactaaaccagaggatttgcctaaacatttgcaaagctgctaacaaatgatgaaaatagatttgaattttgctttttawttttttcccccagtctggcaaaaatacactggtagatcatgaagcaacctgacgaaaagcagtaagaaccagaaaagggatcatggagtcacagaaggtc

SEQ ID NO: 160333 - DNA, 201 bp, Homo sapiens
gcagaccaagaataaaggaacaccattagttttttgatagatgacctctgtactcaagagggtcaaacttaaagctttagtcgggggaggtaagttttagwtatatatatatagagagagagagagagatagatcgatagtttagatatatagatcaaccttttgctgttttgcagttcaaggttccattaagctcaagat

SEQ ID NO: 160334 - DNA, 201 bp, Homo sapiens
gtggcttgagctcagctcctggagggacagtgagaatttatttgtatatgccgtcatcacaatgatgatatagggatattcatatgacaagagattcatgyaacattaaaaatactaaaatacttgtgtgccaaagcatttttccaccctaaatcagaaaaatcattctcttctaacacaaagggtctccattcctagaca

SEQ ID NO: 160335 - DNA, 201 bp, Homo sapiens
aaaggaacaccattagttttttgatagatgacctctgtactcaagagggtcaaacttaaagctttagtcgggggaggtaagttttagatatatatatatakagagagagagagagatagatcgatagtttagatatatagatcaaccttttgctgttttgcagttcaaggttccattaagctcaagatttttcaggaccac

SEQ ID NO: 160336 - DNA, 201 bp, Homo sapiens
aggaacaccattagttttttgatagatgacctctgtactcaagagggtcaaacttaaagctttagtcgggggaggtaagttttagatatatatatatagakagagagagagagatagatcgatagtttagatatatagatcaaccttttgctgttttgcagttcaaggttccattaagctcaagatttttcaggaccacat

SEQ ID NO: 160337 - DNA, 201 bp, Homo sapiens
gaacaccattagttttttgatagatgacctctgtactcaagagggtcaaacttaaagctttagtcgggggaggtaagttttagatatatatatatagagakagagagagagatagatcgatagtttagatatatagatcaaccttttgctgttttgcagttcaaggttccattaagctcaagatttttcaggaccacattc

SEQ ID NO: 160338 - DNA, 201 bp, Homo sapiens
ctttatatatttaggtgctccaatgttgggtgcatacacatgagtgttaatctcttactgagttgactcctttgtcattatgcaatgatcttttttgtctytttttatagttttcatttaaagtgtatcttatctgatataactatttctactcttttctggtttccattttcatggaatgtcttcttccattctttcatt

SEQ ID NO: 160339 - DNA, 201 bp, Homo sapiens
ttttttgatagatgacctctgtactcaagagggtcaaacttaaagctttagtcgggggaggtaagttttagatatatatatatagagagagagagagagakagatcgatagtttagatatatagatcaaccttttgctgttttgcagttcaaggttccattaagctcaagatttttcaggaccacattccccgtgacagct

SEQ ID NO: 160340 - DNA, 201 bp, Homo sapiens
tgctttatatatttaggtgctccaatgttgggtgcatacacatgagtgttaatctcttactgagttgactcctttgtcattatgcaatgatcttttttgtytctttttatagttttcatttaaagtgtatcttatctgatataactatttctactcttttctggtttccattttcatggaatgtcttcttccattctttca

SEQ ID NO: 160341 - DNA, 201 bp, Homo sapiens
agtttcttaagattttcagtatgtaggctcttgtcatcagtgcatagagatggttttacttctttcttccaattggatgattttatttcctttttcttttyaaaagatacaacttatttttaattaacacatatttgtacatatttatgaggtacaatgtgatgtttcaatacatgtatacgttgtgtaatagtaaaatca

SEQ ID NO: 160342 - DNA, 201 bp, Homo sapiens
ccatggattcagtttttttcttccattcttcagactctgactgagcaggtctcagtgctccacatgaatgggagataaggaacaataaaacgtgatccctrcattccaggtagtctagaaggactagaaaaagtgattaagagcacaagagagggacacttaacatttttttggagttaacaaagtgatagttcccccccc

SEQ ID NO: 160343 - DNA, 201 bp, Homo sapiens
atgacagtcattgtccaagagatgggaggtgaccgactggcattcatgaaaggtgcaccagagagggtggccagcttttgccaacctgagacaggtctgtracttgacttggattacacctggcaaatctgtatctccagataaatatgttcccactgcatttgatctattaattcaatcgcctatgggtcatcaccaatt

SEQ ID NO: 160344 - DNA, 201 bp, Homo sapiens
gatgtttgtaaagaatttctttgccagtactgcctaagcaaataactgcgtactaaccctgtgtttctttctaaacagtacccactagttttgttagcgawcttcagatttacacgacacagggcttccgagtcatagcactggcctacaagaagctggaaaatgaccatcacgctactaccttgacgaggtaaatgggga

SEQ ID NO: 160345 - DNA, 201 bp, Homo sapiens
tggccaggattgtcttgatctcttgacctcgtgatctgtgtgcctcggcctcccaaagtgctgggactacaggtgtgagccactgcgcctggccagtgctstccttatttttaaagcaggtttcatctgtctccggcagcttcttgacttctctagtcatgtgctctggttgttcctcctgatcttttcctgtccagtgtc

SEQ ID NO: 160346 - DNA, 201 bp, Homo sapiens
gtcagcttctcaaaggaagtgagcatttctaacgtgttaattgctgcacccccagttcctgcatgtggtagcgattctgttactatgtggtggctgacagkctgaagtggatgtttctattaaagagagtggaaggacagtctcctagaggactctcttctagttgacttttactgagtgtttataagaatgcatcagccc

SEQ ID NO: 160347 - DNA, 201 bp, Homo sapiens
ctcattggttgttcagtagcaccttgtttaattaccatatatttgtatagtttctgaaggtcctcctgtcattgatttatagtttcatattattgtggttrgaaacaatacttgatatgataattgatttttaaaaaatgttttagtacttgttttgtgaactaccatatgatctaaactggagaatgttccatgcgcatt

SEQ ID NO: 160348 - DNA, 201 bp, Homo sapiens
gacagatgaggagtatatcataaatagagccataagaaagccagacctaaaggtaagtaaacttatggctactgctgatgtcagagagatttaatcttttycccctcaagtatatagttaaatgtagctcctctactgtgccaatcctcatttgatagtgtatatttaaaatgtgaactttggagccagacagtccaaatc

SEQ ID NO: 160349 - DNA, 201 bp, Homo sapiens
ttctcttctaatttcttcattgactcattggttgttcagtagcaccttgtttaattaccatatatttgtatagtttctgaaggtcctcctgtcattgattyatagtttcatattattgtggttagaaacaatacttgatatgataattgatttttaaaaaatgttttagtacttgttttgtgaactaccatatgatctaaa

SEQ ID NO: 160350 - DNA, 201 bp, Homo sapiens
cactatagcctcaaatttctgagctcaagcaattctcccacttcagcctcccgagtagctaggactgcagaagtgtgccatgatgcccagctaattttttwaaaaaaaatttttgtagagatgagggcttgctatgttgcccaggctggtctcaaactcctggcctcaagctagcctcctgccttggcctcccaacgcgct

SEQ ID NO: 160351 - DNA, 201 bp, Homo sapiens
ttagtgactttccaaagctttttttggaaagactgtactagttttcatgtgagatcgcatatgtccctgttccttcagcttttgttcagctaatgttttgmtagagatttgcttgacctctaggagtgaaaaaacaaacaaacaaacaaacaaaaccttctccagtccttacagattatttctgtgctggagtacttattc

SEQ ID NO: 160352 - DNA, 201 bp, Homo sapiens
agcatttgtttctgtttagacaggcaccttaacaagggacggcttggacctctggggagtcgtgtcctgtgataggaatgggtgagtaccttggactcttsgactaaatgcattctagtgtctctttttccaaaattccgtgttttctcttgaaattaagaatggagacatttggactttggctttggtggacaatgattg

SEQ ID NO: 160353 - DNA, 201 bp, Homo sapiens
tgagaacagcatgagtgtaactgcccccatgattaaattaccccccactgggtccctcccatgacatgaggggattatgggaactacaattcaagaggagwtttggatggggacaccgccaaaccatatcacgagatagcttgcttcattcaagtctaaaagtttatctggcatttccagggtcagaaagtacaaaaccac

SEQ ID NO: 160354 - DNA, 201 bp, Homo sapiens
ccaaatcccatccctccaaaaaaatgtatgctgagtttgctagatttccttgttttgtacacaaacataaacatagcctttgctttgttaataacctcatkgtgttgtccctccctcctctttttttttggacaacatatactgagataataattattgtgagaatttctccaaaacttagaactttatgtatattataac

SEQ ID NO: 160355 - DNA, 201 bp, Homo sapiens
tgagaactaaggatgtgatatgtgtaaagttctgaaataaagactgcttggcatgcaggcattccatgggcattagtcaactttttactacacactatatmtccagaagtttcagacgatgacccgctaatccactgctccatttcccctcagaaaacagctacaaaaatgagcaagccccaaatcccatccctccaaaaa

SEQ ID NO: 160356 - DNA, 201 bp, Homo sapiens
tgcttgtatccccaatacctagggttgtctctgccacatggtaggctcacaaaaaaaatgtctgttgtatgatgagtgggtgcaggcatgatttaaatgarggaagccatcctgcctcacaaaacaagatgcttgttttctgtaggagaaagtattccagtcaccaaaactccgttacccaagatggatagctctgtgccc

SEQ ID NO: 160357 - DNA, 201 bp, Homo sapiens
gaggtgaggggttcaacatgagaattttgaggggacacaactcaattcataacaggcaggttatttaacctctttttgcctccattttttttctgttaacyggggctgatgataatacctatctccttgtgagaactaaggatgtgatatgtgtaaagttctgaaataaagactgcttggcatgcaggcattccatgggca

SEQ ID NO: 160358 - DNA, 201 bp, Homo sapiens
tacacagtttattttcagttcttcttctcttattaaggactctgagagatttttccaaaagataagagtaattaggtttttattttataattttaaaagcrgcattctgttcattattcatctacttctgatttttaaccaatatcagtagcaatgccacgtttctatgcaaatgacatgatttatatgcattgttttgaa

SEQ ID NO: 160359 - DNA, 201 bp, Homo sapiens
tcgttccatcatcctgcctctttctttgcatccttgacagtctgtcaagcccttgtcgaatttcactgcccctccacagctaatcagagcagtctaagccrgcttcaatcttgcctttttcatcttgatttcaactttaatttttaattgcctgctcttgtgtgtcattttaaatggatctgctatgccagagactctcca

SEQ ID NO: 160360 - DNA, 201 bp, Homo sapiens
tctttaatttctttcaacaaagttttgtagttttcagtgtggaagcctttctctttcttggttaagtttatctctaggtatttcattttttggaaatagartttttttaagtttgtctttgaattgttcactgctggtgtacagaaacacgatgattgtttttgtgttgatcttatgccctgaaacattgctgtattcaat

SEQ ID NO: 160361 - DNA, 201 bp, Homo sapiens
tgtagtgagaacattcagaattctcttttttagcaattttgaaatataaagtctgctattgttaatgataatcatcctactatgcaatagaacaatagaasttattcctcctattgaactataactttgtacatactgacaaccttctctccatccccttctcctctctatctctattctttccagccttaagaaaccact

SEQ ID NO: 160362 - DNA, 201 bp, Homo sapiens
tattggcttttgctgctctcactaaaatttgctttgatgtcccccaccaccctgccgaaaatgtacttctgctccattatatttgaatgatagagatagtragcatggtggctgctcttggttattgtaactgacatgtgtttctagtttaaaaatgctataatgcctactatctcacacttcaaaacagcctggagatgc

SEQ ID NO: 160363 - DNA, 201 bp, Homo sapiens
gtaactgacatgtgtttctagtttaaaaatgctataatgcctactatctcacacttcaaaacagcctggagatgcaggaatggctatttttttaacaaacmaaacaattgaagttcagaaaatttaattgatgtgcccaagctcatacaaccatatgaggttagagattgtcttagaattaattttattcaaatgtatttt

SEQ ID NO: 160364 - DNA, 201 bp, Homo sapiens
ataataatagtgaaaatgttaagatgaccaggtcaacatctgcatctggtttcaaatcctgtgccctctctgccatgccaaacttacatcatagaattgtragcacctctgtcttacagctgagaaaactctccctacgcagtgatgtgcagtgtctacatgaaacacttacagtcaggaatcacgttctgaatttctaaa

SEQ ID NO: 160365 - DNA, 201 bp, Homo sapiens
tttacccagatcattatcatttctgtttctgtgttttcattccttaagttacaagttaacatctggtatcatttcctttcaacctgaagaaccctgtagcktttgttgttgtttattttttgagcatgtccactgtcaacaaattatcttcaattttcattcatctgataaagtctttatttctcctttattcatgaagaa

SEQ ID NO: 160366 - DNA, 201 bp, Homo sapiens
ccttctccaccctctctctttacttcctcttttctcatattgaaatttctgccgtatttctttccttgcttgtttacaaatttttttcgctgaagtattgyccttggatggaatgaaggggtgctcttagatttcttacatatgcttgaatatctttctttgctctgacacatgaatgacatcttgctcagatataagatt

SEQ ID NO: 160367 - DNA, 201 bp, Homo sapiens
cccttgacgtcatcacaattgcggttcctccggctctacctgctgctctgaccacaggcattatctatgcccagaggaggctgaagaagagaggcatcttytgcattagcccccagaggatcaacgtatgtggacagttaaaccttgtctgctttgacaaggtatgtgtgtttcatccttattcttatcatcatttttacc

SEQ ID NO: 160368 - DNA, 201 bp, Homo sapiens
aaaactccgcctcaaaaaaaaaaggcaaagagtcatatgctgttcatcagagatttgtctgtaataattaaagaatgactgtcgtccaggaacctccagargaggtggtgaggaaagcccttgacgtcatcacaattgcggttcctccggctctacctgctgctctgaccacaggcattatctatgcccagaggaggctga

SEQ ID NO: 160369 - DNA, 201 bp, Homo sapiens
caggggattctgatgagactagttcagggatcacactttgagaagcaatatgctaaaccatatggtctctaaagcaaccagattaataaaagagcattatsacgggtgtcctcagacccagtggcagaatgatggtctttgccctttagagggggatctagtgtatacatcttatccctgttcgtgatcacaggattctct

SEQ ID NO: 160370 - DNA, 201 bp, Homo sapiens
tgctgctctactgggtatgacttgggacttagcctcttggttagtgtgaactaaaacaagtagcggtgcactctcaatttacaatgcctctcaaagaaagwgtacaaataggatatctgaacaacaacagcccctccaaaaatatccttaagaatttgtaaagtaaatcacaaatagacagatttgtacaggaaaagttgc

SEQ ID NO: 160371 - DNA, 201 bp, Homo sapiens
tgaaagctgagatacactgaaagctgggactcttgcaccagttagccaggttgtgaatgcaaaggaaaagtttttgaaggaaattaaaagcgcttctccaraagtgaacacacaaatgatcaaaagcgaagcaacattactgtggatgcggagaaagttgtagtggtctgaatagaagctcaaaccagtcatatttctgta

SEQ ID NO: 160372 - DNA, 201 bp, Homo sapiens
ttgtttcactctttgttgaaggctgtaatagtccatttgtttagtgactttccaaagctttttttggaaagactgtactagttttcatgtgagatcgcatwtgtccctgttccttcagcttttgttcagctaatgttttgatagagatttgcttgacctctaggagtgaaaaaacaaacaaacaaacaaacaaaaccttct

SEQ ID NO: 160373 - DNA, 201 bp, Homo sapiens
tagagaaacacacacacatcacaagaagaaaaaaagataaaagaagaaaagcaacactcataacccccccaaatcattaggatcataagtataacctttcygtactttttctgtgcatacaagcatagaaattttttatatatataagatatatgtaatatacacacatatatattacatatgagatttataacctaggaa

SEQ ID NO: 160374 - DNA, 201 bp, Homo sapiens
tgcccaaatcaaaaccatgaaacatttttcatatgtttttgtttagcagttttatagtttcgagttttacatttaagtttttaatccactttgagttaatkttcttatttggtgagagataggggtctagttcattcttctgcatcgataaccaattttctcagcaccattcattgaggagacggtgctttccctaatgtg

SEQ ID NO: 160375 - DNA, 201 bp, Homo sapiens
tccccatttgtctatttttgcttttgttgcctatgcttttagggttttagcaaaaaaattattgcccaaatcaaaaccatgaaacatttttcatatgtttytgtttagcagttttatagtttcgagttttacatttaagtttttaatccactttgagttaattttcttatttggtgagagataggggtctagttcattctt

SEQ ID NO: 160376 - DNA, 201 bp, Homo sapiens
tgaggcaatgcataagtcagtgccagatacaatgggatgcccttggcactttttcattcattaattcacccattgattcactcattcaccatacatatatrtcaggcatgtgcctggaaggggttggggaagacacagagaaaatgggcaaagggacaggtcatgacaagcttgatttcagctccatttgctcctttggca

SEQ ID NO: 160377 - DNA, 201 bp, Homo sapiens
tatatgtcatatgtataccatgctttatatgtagtcccatattgatagacatttaagatgtttccaagtttttattacaaacaaagctgcaataaaaataytgtgcatatatcattttagccatgtacaagtatatttctcagataaattcctagaagtggatttgaatttttaactttgagaacactgtcctctatggaa

SEQ ID NO: 160378 - DNA, 201 bp, Homo sapiens
ggattctgagcataacagttggggtatccaccatttatcctcccagcagcagaagatctgagtggaaaattttcatggctgctacaacacatacattgtcstgcaccttgcttctttcatataacagcattaattgttccatatcagtacatacattttcctcattctttttaatgctaatataatattttatgtaaatgc

SEQ ID NO: 160379 - DNA, 201 bp, Homo sapiens
cgggccggctgctgccttgcgttcgccacgctgtcctccctcctccgctccctgcgccccacccctggcggccgcgctgcctggcagcccgggaagccgckgcacagctgctcggcgcctgcagctccggctcgggggctggaaccgaagcgggggcggcgggagcgcggagaccacagcccccggggagaggcggagggg

SEQ ID NO: 160380 - DNA, 201 bp, Homo sapiens
ttagttctttctatctaaaaatcttacagttcctttttaaaacatgtaatatttatggagagtagtgtgtgtgtgtgtgtgtgtgtgtgtgtgtgtgtgakagagagagagagagagagagagagagacagagagatcaagcgtgtgctcatctatgggtgggtgctgctgagggtcaagaatgcagaagaatataagaag

SEQ ID NO: 160381 - DNA, 201 bp, Homo sapiens
tttagttctttctatctaaaaatcttacagttcctttttaaaacatgtaatatttatggagagtagtgtgtgtgtgtgtgtgtgtgtgtgtgtgtgtgtgwgagagagagagagagagagagagagagacagagagatcaagcgtgtgctcatctatgggtgggtgctgctgagggtcaagaatgcagaagaatataagaa

SEQ ID NO: 160382 - DNA, 201 bp, Homo sapiens
tttcgtattcactttaacatatatctgctgtccccagcttggaccagattcagactcagaaagctaaggtggtgtatcagaatcctgaaattcctactcaygtgacttgcagtaggtgggagagggagggaagagaggattccctccgaaaagcataaccctctagtaactctctggatacctgatcaatctacatcttct

SEQ ID NO: 160383 - DNA, 201 bp, Homo sapiens
cttctgtttttagttctttctatctaaaaatcttacagttcctttttaaaacatgtaatatttatggagagtagtgtgtgtgtgtgtgtgtgtgtgtgtgwgtgtgtgagagagagagagagagagagagagagagacagagagatcaagcgtgtgctcatctatgggtgggtgctgctgagggtcaagaatgcagaagaa

SEQ ID NO: 160384 - DNA, 201 bp, Homo sapiens
caatatatatttactaaatgaatagacattactggactgtgaattttttgatgaccctcattaaatacacacacacacacacacacacacacacacacacatatatatatacacacacttaatatatatagttaatatatatgggggaagaaagagcaaaaacaaagcctgaaaaaatgtttccacttgaaaaccattttt

SEQ ID NO: 160385 - DNA, 201 bp, Homo sapiens
cagacctctaattgtgtagttcagtgaatgagaaatgggacttgctgcggaataaattctggggtgtaactaaattacacaccatttcccatactttttttctttcaaattgcccattactttaaatgaaaacatggtttagaaaagaactgtaaccactcaaaatttctcaaggaccagtctcccttctccctggtgata

SEQ ID NO: 160386 - DNA, 201 bp, Homo sapiens
tcaatatatatttactaaatgaatagacattactggactgtgaattttttgatgaccctcattaaatacacacacacacacacacacacacacacacacacatatatatatacacacacttaatatatatagttaatatatatgggggaagaaagagcaaaaacaaagcctgaaaaaatgtttccacttgaaaaccatttt

SEQ ID NO: 160387 - DNA, 201 bp, Homo sapiens
ctttttctccctgaaaacacacaaacacacatataatgtgttttattcttttatttatttatttttgagacagagtctctttctttcacccaggctagagsacagtggtgcaatcacagctcactgcagcctcaaacacttaaattcaagtgatcctcccacctcagtctcctgagtagctgaaactataggtgtgcacca

SEQ ID NO: 160388 - DNA, 201 bp, Homo sapiens
tttttgtaaagaaaaaatcttgtatcttacctgaaagtttaatttcaaaagataaatagtgctgtgtattataagatatgatttttcctctattctgaaayttatgcttaaaaatctgaatacagacatcacgatcacttgatatatacttgataatgtttattttttcgtttttttaccaaagctttatttagagttcat

SEQ ID NO: 160389 - DNA, 201 bp, Homo sapiens
aacagcctggacaacatggtaaaataccatctctactaaaaatgaattttttttaaaaagactgggcgtggtggcacacacctgtggtcccagctactgakgaggcaattcttctggaggctctagggagaaatccatttccctgtctttttcagattctagttgcccacatcccttggcttgtggctccttccatcagtg

SEQ ID NO: 160390 - DNA, 201 bp, Homo sapiens
gggggtactgaaagatgtatgaaaatgttgatttttggctttaagagctcctatatgaagtaagaaagccaactctgaatttaaagggatgtctgtggaarggaagcttgaatgtgtgtaagttgtaatgtgatgcaggctattcttttcagtagtccacttagtagggactgtgcagccagcgcagtgccagactgtagt

SEQ ID NO: 160391 - DNA, 201 bp, Homo sapiens
gcgactgataaattgaacaactccaagctggaagtggttcaggagatccaaccagggaacaccaggggaaggcttttctagggcaaacacagaaggaagtraagaaaagaaaacatttgattggttactgttatacagttgccttatttgatctatcttgctggaaagtccttagttaaataagttatttggcagcttctg

SEQ ID NO: 160392 - DNA, 201 bp, Homo sapiens
agacaggcaatttaaaaacattccttcactatgtgagtgtcttggttaagattctttaggttgtaagacacaaaaacctgtttagctttaaaaaaaaaaaaggtaaatttattgtaaacctatggagacctctcaaaaatccaagaaagaatgcatctgaaccctaggaacagtgtggaactgggtgtggaaaggtcatta

SEQ ID NO: 160393 - DNA, 201 bp, Homo sapiens
ccaaaaggttaaaaataatccttttttctgtttgaaaagatacgtaaaatacatctgcaagtaattctttttttttttttttttcttgagatggagtttcsctcttgttgcccaggctggagtgcagtggtgcaatctcggctcactgcaacctctgccttccggtttcaagcaattctcctgcctcagcctcccaagtag

SEQ ID NO: 160394 - DNA, 201 bp, Homo sapiens
agtacgactttgttttaaagaaagagtatatagtagaaaaacttaaaagttgtcattgaggctgaggtggaaagatcacatcaggccagtagtgcgagacyaacctgagaagcacaatgagaccctatctctacacaaaatgtaaaaatttagccagatgtggtggcacctatttgtagttctagctactcaggagaccaa

SEQ ID NO: 160395 - DNA, 201 bp, Homo sapiens
attacaggcgtgagccaccacacccagcctgtatgtgaaattttttttttttttttttgagacggagtctgggtctttcgcccaggctggactgcagtggygctatctcggctcactgcaagctctgcctcctgggttcacaccattctcctgcctcagcctcccgagtagctgagactacaggtgcccaccaccgcgcct

SEQ ID NO: 160396 - DNA, 201 bp, Homo sapiens
acaatatggctgaacatggaggacatgatcttaagtgaaataagccaggcacagaaagacaaacactgcatgatttcattttatgtggaatttttttttttctttttgagacagagtctcaccctgtcactcaggctggagtgcagtgatgcaatctcggctcactgcaacctctgcctcctgggttcaagctattctcat

SEQ ID NO: 160397 - DNA, 201 bp, Homo sapiens
gatcagtagcccatttacgtgctgtgttgaggcaggtgaacaatttgagttctatcagaaagagtgtcacattctgcagtaaatgcaggaaaaggacatcrgggcatgcatgctggggatctgccatcccaggcctaaaagaaacaatatcaagtggaaataagaacagcctcagagctgtacttccctaggtgctgatgc

SEQ ID NO: 160398 - DNA, 201 bp, Homo sapiens
ttcattacaataaaagaataactgggccgggcgcggtggctcatgtctgtaatcccaacactttgggaggctgaaatgggtggattgcttgaggccaggarttgaagaccagcctgggcaacatggcgaaaccccatctctaccaaaaatacaaaaaattagttgggcatggtggtgcacacctgcagtcccggctacttg

SEQ ID NO: 160399 - DNA, 201 bp, Homo sapiens
agcctaggagttagaggctgcagtgagatatgattgtgccacttcactccagcttgagaggcaagatgaggccccatttcttaaaaaaaaaaaaaaaaaaagggcaaaacaaaacaaatgtcaggggtggttccttctggaggctctaggggaaaatccatttccttgcccttttcagcttctagaggctacacactccct

SEQ ID NO: 160400 - DNA, 201 bp, Homo sapiens
agtatttgcaatatgtcatctgtagagctgggaaactgaatcatcttagtgctgcacttggccctttcctcctacagccacacaatagaatgcagctcttyagagacgctgtgataatcaaatagattcaaagcattggttgtgtatgggagatagtgtagtgcaaaggatcatggtttggaatttggaagcctgcgactg

SEQ ID NO: 160401 - DNA, 201 bp, Homo sapiens
gagcctaggagttagaggctgcagtgagatatgattgtgccacttcactccagcttgagaggcaagatgaggccccatttcttaaaaaaaaaaaaaaaaaaagggcaaaacaaaacaaatgtcaggggtggttccttctggaggctctaggggaaaatccatttccttgcccttttcagcttctagaggctacacactccc

SEQ ID NO: 160402 - DNA, 201 bp, Homo sapiens
agcctcattctagtatctggggtctgttgtcttcctctctatgcatcacttcacttttctggagcacatcctgtagtagtttccttaaaaaaaaaaaaaaagtcaatgggaggtacattttctaaaagtcttccattgcaaatggctttattctttcctcataattttctgacagtttgcctgggtttttaatccttgtgt

SEQ ID NO: 160403 - DNA, 201 bp, Homo sapiens
tctcatagaaatagaaagtaaaatgtggttaccagaggctggggtggttagtggggaggggggaatggggagatgtcagtcaaagcatatataatgacagrtagaaagaatacattcaagaaatctattgtggccgggcacggtggcttacgcctgtaatcccagcactttgggaggcctatgtgggcagatcacgaggtc

SEQ ID NO: 160404 - DNA, 201 bp, Homo sapiens; identical to SEQ ID NO: 30032

SEQ ID NO: 160405 - DNA, 201 bp, Homo sapiens
cagtgaggacataattccattaaagcactgtgcaataattggtcttcaccaaaaataaaaggtttgtttcattacaataaaagaataactgggccgggcgyggtggctcatgtctgtaatcccaacactttgggaggctgaaatgggtggattgcttgaggccaggaattgaagaccagcctgggcaacatggcgaaaccc

SEQ ID NO: 160406 - DNA, 201 bp, Homo sapiens; identical to SEQ ID NO: 30022

SEQ ID NO: 160407 - DNA, 201 bp, Homo sapiens
atttcaaaatacttttcatacaatttttttttattttgaattactaagaataagccttattcagtactgtccagggatgcaaaacattaccctgtacttayattcatgccaactaaggaaactttcttcaggttgtgaaatactgaaccacctatgtagattaagatagggttcagttgccaaaatttgagtaggctatgc

SEQ ID NO: 160408 - DNA, 201 bp, Homo sapiens
actggaatagtgactgacacaaggttttacttctccatatggcagatcggcaaccatctggcacggatggcaaacatgggagtaattggaaaagttctctragggaaaatagcactcaaaaatcacctgcatcataggcgtaacatacattttcccagtttaaccattttggtttaccctttggatagtgttcatggcaag

SEQ ID NO: 160409 - DNA, 201 bp, Homo sapiens
gcaaaatgttttcataccgattgagtatactaagtttaactgtggggtttttttgtcatcctttctgtttataaaaggaaacaacaattacagagataaarcaaaaattgatgcaaatacctgatgaagagggcattgttattgatggatttccaagagatgttgcccaggctctatcttttgaggaccaagtaagaatat

SEQ ID NO: 160410 - DNA, 201 bp, Homo sapiens
tgttcaaaaatttttttaattagctatttgctcaaataggtagaggaaaaacctgtatctctcatttaatacagttggtcaagacaattctttccttgacraagtctctacttgctttacattcaaaggcagcactgagaatgccacaaatggaactgttaaccaccctgtcttggtgacacagaatttgcatcccagatg

SEQ ID NO: 160411 - DNA, 201 bp, Homo sapiens
cccagccaggagaaaagaaaactaaacagcatgaacacttatcagcaacccacctaaacataagaaaagcaaacaaacatttgataacaacttgcccaaamaaacccattctcctaaaattactaggaaaaaaattctgttacagcgtctcaataggtaaggggttgatgagtttgtaatgtgttacataatgaagctgta

SEQ ID NO: 160412 - DNA, 201 bp, Homo sapiens
ttattagtgctatggtagccatatgtgctatgtactttcacatactgattctttcaatgtattggatttctgacaagagagaaattcccataatccagtgrtatttttaaaatctcaggaaagtggctcccacagctcctatgaaatgatgagctgagaaaagtgaacacagcttaacagtcagaagaagtgttgccaagc

SEQ ID NO: 160413 - DNA, 201 bp, Homo sapiens
acacccagccaggagaaaagaaaactaaacagcatgaacacttatcagcaacccacctaaacataagaaaagcaaacaaacatttgataacaacttgcccmaacaaacccattctcctaaaattactaggaaaaaaattctgttacagcgtctcaataggtaaggggttgatgagtttgtaatgtgttacataatgaagct

SEQ ID NO: 160414 - DNA, 201 bp, Homo sapiens
gcagataggaaatacccactctgggtctcctctccgctgagggctgcagagacattgggatgacctgcctgtggacagcagctacccactccagtctcctytccactgagggatacagaaacatcaggacaacctgcctgtggataggaactacccacttcaggtctcctgagagtggtattgttgcttaataaagcacct

SEQ ID NO: 160415 - DNA, 201 bp, Homo sapiens
ccccccaaacagaactactactaatagcctactgtcaaccagagccttatcaataacataaacagctgattaacacatattttgtatgttatatgtattayatactgattcttaccataaagtaagatagagaaaagaaaatattattaagaaagtcacaaggaaaagaaaatatatttattgttcgttaagtggaaatgc

SEQ ID NO: 160416 - DNA, 201 bp, Homo sapiens
ttctgttccactggtctatatttctgtttttatgccagtatcctactgttttgattactatagctttgtaatataatttcaaatcaggaagtgtgatgccwccaactttgtttttcctctcagaattgctttgggtattcaggatcttttgtggataaatacaaattttagaattgctttttctatttctgagaaaaatat

SEQ ID NO: 160417 - DNA, 201 bp, Homo sapiens
aagtcaagtttttgtaagttttatgaactttttaaaaaatatatgcaattttgtttatttttaaagaaaaaggtcttcttaaattgtgcaaaaaaaaaaaagctcagatgcaatgtatatgttattttttccagaatgcattcaaaactttgtgccattagatgttctattcagccagaaaaacatggatttcaccaggga

SEQ ID NO: 160418 - DNA, 201 bp, Homo sapiens
agagatccaaatagatttaatgaataaaataataatgccgcattccatggccagaacagagtttactgtggggagtctgtgtgtgtgtgtgtgtgtgtgtrtgtgtgtgtgtgtgtgtgtgtgtgtgtgttcaactgaatttccatagtgatattgagcttctaaatcaagaaaaatatttttttctaatttattttttaa

SEQ ID NO: 160419 - DNA, 201 bp, Homo sapiens
ggacttgatctctctatctctaaattggagacagtgttacctacctcataatattgttgtgtgggtgaaatgagagaatatgtataacatggtagatgatrgtaatgcagagagcgtgttttaagatgctccatgcagccgctttgcctgattcagattccagctgcaccacctaccacctgtgtgactttctgcaggtta

SEQ ID NO: 160420 - DNA, 201 bp, Homo sapiens
gatggggaaaaaaaggagaaaaaaagaagttgagagcctctacataccagcattttgttttaaccctatatttggtacaaaaaaaaaaaaaaaaaaaaaaraaaaacaagcttggggagttcaaataacgcctaagatggccattggtttaaaaacatgcatgaggaaaaaccatgtagctggctggagtcccagaaaaac

SEQ ID NO: 160421 - DNA, 201 bp, Homo sapiens
ttactcattcagtaaatatttactgaaaaccaggatactctgctaggggacaggggtgcagagctaaataaacaaagggtaaggatctttattttggcacwgacatattgcagacacctagaacagtaccttctcactatatagtaagctccaggaaatgaacagagcttgcagtgtgtggagaaagagacattaaacaat

SEQ ID NO: 160422 - DNA, 201 bp, Homo sapiens
cctctttttctccttcaagttttaaactggtacagaggttaaatattcaaacattttcattttagatagcaccaactaaattgtgtagaaaaacaaaataycccagtggccttgaattccggcaataaatttatctttttatttgtttgtctgatttacttgattagtcgatgcaggcaggaaagcattttagaaaaaggt

SEQ ID NO: 160423 - DNA, 201 bp, Homo sapiens
taccttaaaaagtggcttttggggggtacagaaccaatggaaaaaaatgtatcattttgacctgatttgcctttttaagccatcatgtttttttaaaaaaactttctttttaatttaattgatttttatgaaagaagataaattttaaccttggccaaaattctgtagtcctcaagtaaaaaagtgttttaaagtaactgt

SEQ ID NO: 160424 - DNA, 201 bp, Homo sapiens
attaaaaatataaaaattagcttggcatggtggcgtacacctgcagtcccagctactcaggaggctgaggcaggagaatcgtttgaacccggaaggcagargttgcagtgagccaagatggcgccagcactccagcctggtgacagagcaagactctgtctcaaaaaaaaaaaaaaaagaagctgcagtttagaagatggc

SEQ ID NO: 160425 - DNA, 201 bp, Homo sapiens
tagaaaacaaccgtggcttaaaatctgatgaaatcagaaaaatagagtgcaaagcataaataaataaataaataaataaataaataaataaataaataaaatttgatgaaagttcatgataaccagaaattgacaaggaaatttggttactttgcggcatacaacataataagaattctgactgatatattagatttctaa

SEQ ID NO: 160426 - DNA, 201 bp, Homo sapiens
atagaaaacaaccgtggcttaaaatctgatgaaatcagaaaaatagagtgcaaagcataaataaataaataaataaataaataaataaataaataaataaaatttgatgaaagttcatgataaccagaaattgacaaggaaatttggttactttgcggcatacaacataataagaattctgactgatatattagatttcta

SEQ ID NO: 160427 - DNA, 201 bp, Homo sapiens
gatagaaaacaaccgtggcttaaaatctgatgaaatcagaaaaatagagtgcaaagcataaataaataaataaataaataaataaataaataaataaataaaatttgatgaaagttcatgataaccagaaattgacaaggaaatttggttactttgcggcatacaacataataagaattctgactgatatattagatttct

SEQ ID NO: 160428 - DNA, 201 bp, Homo sapiens
atatgttttgtcctgcagaaattttaaattggaattggtgtatttttcattattttccctttggcttttgcatttggatcttaagaaagtgttccccatartctcataaaaatcttctatagttttctagttatttttagttttgttttaaaggtccaggtatttattctatgtgcactaattcttttgcatagtgtgagg

SEQ ID NO: 160429 - DNA, 201 bp, Homo sapiens
agatttgctgaaaagagatgaggaaggcagacatcccaaggcatgtttggaacattcgggttaaatgcagcatagcattattcagcaataaaaaggaatgmagtattgatatccactacaacataaacgaaccttgaaaacattatgccaagaaaccagtcacaaaagaccatatattgtgtgatttcattgatataaaat

SEQ ID NO: 160430 - DNA, 201 bp, Homo sapiens
cagatttgctgaaaagagatgaggaaggcagacatcccaaggcatgtttggaacattcgggttaaatgcagcatagcattattcagcaataaaaaggaatraagtattgatatccactacaacataaacgaaccttgaaaacattatgccaagaaaccagtcacaaaagaccatatattgtgtgatttcattgatataaaa

SEQ ID NO: 160431 - DNA, 201 bp, Homo sapiens
acaggggaggaaacttgagaaggggcgggaatgtgagttagcaaccccttcctttcctccctcctcccagcgtttgataaggcgagctcaggtgactgtayagtgggctgtgggcagaaacagatttgctgaaaagagatgaggaaggcagacatcccaaggcatgtttggaacattcgggttaaatgcagcatagcatta

SEQ ID NO: 160432 - DNA, 201 bp, Homo sapiens
actctccacatgggaattagatgagcaaagagaatctactttgagacttaggaagagtcgagctaacctgtagaatgaaaggagaaatttggagagtagayaaaaggttttgttcccacccaattcaactgggctctcttttgctccttaaaaatacacttcaggccaggggcagtggctcccacctgtaattccagcact

SEQ ID NO: 160433 - DNA, 201 bp, Homo sapiens
agtttcattctgtcactctgctcactgcaacctccgcctctcggggtcaagcgattctcctgccttagcctcccgagtagcaggaattacaggtacctgcyaccacacccgtctactttttgtatttttagtagagactgggtttcaccatgttggccaggctggtcttgaactcctgacctcaggtgatccgccctcctc

SEQ ID NO: 160434 - DNA, 201 bp, Homo sapiens
aggtcctgaaatgcaatggtccacattgttctggtcaccatgctgtcaggagaagccctatgaattgaggcaagaagagtgagaagtttctgcagtttctrgtattactgaggaaagtggaagcagaaggtaccataaggtcacatttcaccgcttggttgcaaaatctactgggtaattcataactgactggatccccaa

SEQ ID NO: 160435 - DNA, 201 bp, Homo sapiens
aacagattatttctgtccctgcgttatttgctactcttaactgattaaaaaaataaaaagagagcccagtgactcattaaacatgagttttgcagacagamaatcaagttccttggcaactctgcttttgtagaggagataataagcttttttcctcagcaattctgctgctgcagtgtctcaactttgtaaatagtttga

SEQ ID NO: 160436 - DNA, 201 bp, Homo sapiens
agagatagtaaatgtggctaaaatgtattgagcacctgccatgaaacatacatgctatgtattttatattatttaatcttcataataactcaaggaggtargttcctgtatctctattgacagataaggacatagaggtttagcaagattaaattatgtgcctgttgttcagctagtaagtcctggggcaaaaaaactgga

SEQ ID NO: 160437 - DNA, 201 bp, Homo sapiens
gcaatggcacgatctcagctcactgcaacctccgcttcccgggttcaagtgattctcctgtctctgtgtcctgagtagctgggactacaggcacacgccaycgcacccggctattttttttatttttagtagagacggggttttgccattttggccagactggtctcgaactcctgacctcatgatctgcctgcctcagct

SEQ ID NO: 160438 - DNA, 201 bp, Homo sapiens
caaatgtctctactaaaaatataaaaattcgctagacgtggtggtgcgcatatgtaatcccagctactgaggaggctgaggcacgagaattacttgaaccygggaggcggaggttgcggtaagccaagatcacaccactgcactctggcctggatgacaaaacgagactcggtctcaaaaaaaaagagcaaaaccgtatac

SEQ ID NO: 160439 - DNA, 201 bp, Homo sapiens
ctacaatccatgctcctaatcacctttcctagcatacgcctgtgcttacacagtggcaatgagaattgaagacgagacatctgaacaatgttttctttttmttttttttttttttttgagacagagtcttgctcttgtcacccaggctggagtgcaatggcacgatctcagctcactgcaacctccgcttcccgggttcaa

SEQ ID NO: 160440 - DNA, 201 bp, Homo sapiens
tttgtattttaatcttttttactcccagtcatatgttatttatctatttatccaggcttaaaaacagtggaaatttacttctcacagttctggaggctaaraagtgcaagatcaaggcactggcatatttggtgtctagtgagggcctgcttcctggttcatagcggtcttttctctgtgcactcacatggtgaaagggac

SEQ ID NO: 160441 - DNA, 201 bp, Homo sapiens
aatttgttgattccgcaggagaaacaatatcaataatttgaaagtttacttccatgtagacaaaagtgatgcctcagttttttgggtttttttttttttttgtaacttatttattcactcattcaatcagcacatattttttgagaacatacgctaaggaaaaggatgcaaaggatcttatgaccactgttttgtttgctg

SEQ ID NO: 160442 - DNA, 201 bp, Homo sapiens
aagaaaaaaagactgaatttgttgattccgcaggagaaacaatatcaataatttgaaagtttacttccatgtagacaaaagtgatgcctcagttttttgggtttttttttttttttgtaacttatttattcactcattcaatcagcacatattttttgagaacatacgctaaggaaaaggatgcaaaggatcttatgacca

SEQ ID NO: 160443 - DNA, 201 bp, Homo sapiens
tagaaatcagtacttttacagtggtaaaggtacaattcctgaacaagtaaaagattttagaacagttgaacttcatttactgcctcatgatttatgtactrtctttatttgtaaataccacaagatacttttactattcttttatatggttaatatttatttaggtttacctacatatttaccattttcattgcccttcgt

SEQ ID NO: 160444 - DNA, 201 bp, Homo sapiens
tttacaatttaccttctatttgttccacttgttttgtgtttctttcctcctttcttactttttttgaattaagcaatttttatttttaaatctcccccccmccatgctagttgattgtatcttatgtgacaactttttttgtgattattctagagcaggggtcagcaaactatggcccatgtgccaagtcctactggctgc

SEQ ID NO: 160445 - DNA, 201 bp, Homo sapiens
acttgctgaggcttcctttatggctcagaatatattcaacttttatgacaacttctctgtgtgtttttaaagactttatcctcaactggatggttgcagcrttataaataaatgttggtttgttaattgtgttgaaatattctgtactctgagttttttgctacttattctatcagttgctcagaaagatatattaaaatt

SEQ ID NO: 160446 - DNA, 201 bp, Homo sapiens
cactgaccccctccttcctaaactgaatgcatcaattgcctcatgttcaaatatagctcaatagccagatcctgattctatacagcaaacagtaaaaactrtctaatttgctctttgctctagtacagtgaaacttattgatggattaattgtgggagaaaatgtgtttgaggtttaccaacattttctgagcacccacta

SEQ ID NO: 160447 - DNA, 201 bp, Homo sapiens
acaataacagatggagcgcagcttttcaacaggaaatggctaaaccaccaaaataaagattcatatactagttgtctccctcagtgaaaaaaaaaaaaaaagcttttttttttcattttcatggttaatcatattgatacactttggatttttattgttgttattattttacttttaaataccctacaacttcactgaggt

SEQ ID NO: 160448 - DNA, 201 bp, Homo sapiens
tctccacttcagtgttacactttatcagatgccttccctgaccaccctatagaaagtaacacctctagcattctgtacctctttgtcctgctttaattttrtacctatcagttatcttcgctgactcttcattatatatttatttgttcatctatggtctgtcttcttcattagaatataaacttcatgaggacttcattc

SEQ ID NO: 160449 - DNA, 201 bp, Homo sapiens
atggttacgtttcaccgaattacacattaactctgttggcatggaatctattattgttattttgatcattgttttttatattccacagatttttctttgaytacagagggaaaaatgttagattttacatagaaaaaagtcaagatttctttcaactacactgttcaaaaatttttttaattagctatttgctcaaatagg

SEQ ID NO: 160450 - DNA, 201 bp, Homo sapiens
agcccggactgcagagcagcgtgagcttcagccttcaggactcccagagagtctcagggaggctgcttcatcccactgcccctgcccagggccatcccctrcccacacagctgcaaagatgaacagtcctccctacacacctagcatagaaacagtgtgtgctgggcccaggaagctgagatttgtctgcaggtacccgtg

SEQ ID NO: 160451 - DNA, 201 bp, Homo sapiens
actctatttcaaaaaaattaattaattaaattaaattaaattaaagaaaaaacaaaggtgggtttaaaagatattttatttgtacatattttgttatattycagagccttttgaatggactgatgtgttctaagcccgaagatccagtagaatacttggaaagttgtttacaaaaagtaaaggaactgggtggctgtgaca

SEQ ID NO: 160452 - DNA, 201 bp, Homo sapiens
gctattattattattttcagacataaaatcctatgacatactattatgaaagggatatggcagatactcagaattgataatagctaaggaaaaaaataagrtaataaaacatattgagggacattctacaaaataactattcataatcttcaaatgtgtcaaggaaacccacagaaactgttctatactgaaggaaagcag

SEQ ID NO: 160453 - DNA, 201 bp, Homo sapiens
ctaaagtcttttaagtcagtagatgtcaaattttataaaatatttactggaaaaaaagttaacagtaagatacctttttttttttttgagacacagtctcrctcgtcacccaggctggagggctgtggcaggatcttgacttgctgcagtttccacctcccgagttcaagcgattctcctgcctcaacctcctgagtagct

SEQ ID NO: 160454 - DNA, 201 bp, Homo sapiens
tcctaatcttaggttcaagtgaccttgatccttcgatgatattggacactggagagatcattgatacaggatctgattatgaagatcaggtaattaaaatytgaaaatagttctctatttaaatgtttttaagttgaacctttgtaaatgttttatgaaaatttgaattataaaaactcattttgtgaaatatatacagat

SEQ ID NO: 160455 - DNA, 201 bp, Homo sapiens
ctgagccaaagagtttgagactgcagtgagctatgattgtgccactgcattccagcctgggcaacagagcaagatcctgtctcaaaaaaaaaaaaaaaaaacacatacacacaaagaagtttgctaaatggtgacattaacaacatgctgaagaaaatctctgcagtgatttttcctggctgagtctggcaacatcggcca

SEQ ID NO: 160456 - DNA, 201 bp, Homo sapiens
tttgcaccaacctgatagttctaaaatgtctattatcttataatgggaaaaatacatatatagattttttttttatttctgatacttactgcctcacaacrtaagtgcaaactgaccttcaaactgggctttacgacggctgagtattttggccccaaaatacaccttacaaaattatttatttgaaaaaaataccaaaag

SEQ ID NO: 160457 - DNA, 201 bp, Homo sapiens
cctgagccaaagagtttgagactgcagtgagctatgattgtgccactgcattccagcctgggcaacagagcaagatcctgtctcaaaaaaaaaaaaaaaaaacacatacacacaaagaagtttgctaaatggtgacattaacaacatgctgaagaaaatctctgcagtgatttttcctggctgagtctggcaacatcggcc

SEQ ID NO: 160458 - DNA, 201 bp, Homo sapiens
gtttacaagcctcccatggctcacttggcctcatgtgcccccttggcctcggttgcttcttgaatggagagctctgtctgctactgccctgactgtcaccrcatatcctaaccttggtgatggccccagccagcctcttcaaggttgagggctggacctcatcattctcaccattgtgggatctcctgcagagccagtacc

SEQ ID NO: 160459 - DNA, 201 bp, Homo sapiens
aaataatattttatgtgtctgcttctacaatggattgggagaaccttgtggggagggactatatcttgcccattttgcatctctttcatctagtgtggtakttggctcatagcaaatgcttagtaaatgtttgttgaactgaagtggacacctatcagtgcatttccaggtggttttagaaccatacttgtcagaaaatgt

SEQ ID NO: 160460 - DNA, 201 bp, Homo sapiens
ctaatgtccacagcttaagggtaagtctatgtgtggtttctgttaccttcctatcttctattccccaagctggttttatccctgttgaattacaacctatrccttcagtttacagaatgattactgggggaggggctgtgtatatgtacatgtatgtaatgcatgtatgcatgtagatgtgtgtaatgaggcagaaggaat

SEQ ID NO: 160461 - DNA, 201 bp, Homo sapiens
gccaggtgcggtggctcatgcctgtaatctcaccactttgggaggctgaggcaggtgggtcacctgaggtcaggagtttgggaccagcctggtcaatatgrtgaaaccccatctctactaaaaatacaaaaattagccaggtatggtggtgcatgcctgtaataccagctactcaggaagctgagacaggagaattgcttg

SEQ ID NO: 160462 - DNA, 201 bp, Homo sapiens
ttcttgtgtaatttaagaatatccccttttctatcttttttcttctaaagtcaccatccatctctaagaagctgaatggtagggatatcaagaaatattcrtccctgccacactgggtcccatgataggctctgtaatgagggccgtatgatacagtctctgttagcaacagagctgtctgatttctctataaccagctgc

SEQ ID NO: 160463 - DNA, 201 bp, Homo sapiens
cacaaagatgaatgaataatgtacccttacggtaaaatacgtgtacatataatcatgcataatagagtataaatacatacaatgattagcatatggtctcycatttttttaaactttaatttcaaatagacaacacatttaggtagctgaatattttaaggatataaaattacatacactggaaactctctcttattcttg

SEQ ID NO: 160464 - DNA, 201 bp, Homo sapiens
tcacttgaagccaggaggcggaggttgcagtgaggcaagattgcatcaccacactccagcctgggtgacagagcgagtctgtctaaaaaaaaaaaaaaaaacaaaaagtcccttaagcaatctggttcattcacatcaccacggatgcaatcagcacagacaaccacagagctgaggtgttcttaaatatgcatcttggtt

SEQ ID NO: 160465 - DNA, 201 bp, Homo sapiens
ttctatcaactctgccttctaagaattggttcctaaagcaatctaaggctggacatggtggctcatgcctgttatcccagcactttgggaggccgaggcakgtggatgacttgaggtcaggagttcaagaccaggctggccaatatggcaaaaccctgtctctactaaaaatacaaaaatcagccaggcgtggtggcacat

SEQ ID NO: 160466 - DNA, 201 bp, Homo sapiens
tctgtttatatatttctgcaccaatatcatggttctagttgaagaaatctaaattatatcctgatatccaaagaacaatcccaccccttctgtttttttgktttttatttttttttcttttgagacagagtcttactcagtagcccaggctggagtgcagtgatgcgatctcggctcactgcaagctccgccttctgggtt

SEQ ID NO: 160467 - DNA, 201 bp, Homo sapiens
gtcctccttctttctatggctttgataacgaggagaactgtgtggcctgactggatatgtgaactggatgacccccatgagcagtcttttacataaccccracttttgaaaactgcatttgatgattttccccagatcatgcccaggttctgcacactgaggtctaccttgctgagccgctgctgttatcctctggcagtg

SEQ ID NO: 160468 - DNA, 201 bp, Homo sapiens
gggcttaatacctaggtgatgagttgacaggtgtgcaaagtactgtggcacacttttacctatgtacctgtgtaacaaacctgcacatcctgcacgtgtcstggaacttaaaataaaaataaaaattgaaaaaaagaaagaaaatgaaggagggaagtctatagcaaatctataaacacacacgaacactcaaattgatca

SEQ ID NO: 160469 - DNA, 201 bp, Homo sapiens
cttttgaaaactgcatttgatgattttccccagatcatgcccaggttctgcacactgaggtctaccttgctgagccgctgctgttatcctctggcagtgarggatccctgtggtgtgaggctgtgtcttgtttaacaggggacaagattagaaaaggaaggtgctggcacacagaccgtgatcctaaaccatgctgtaaca

SEQ ID NO: 160470 - DNA, 201 bp, Homo sapiens
tgtcaccgagattgatgcgtccgatgcattggaccatcagttcctttaaaaattcagttagttaggctgacacttttgcatacctgtagctgagttctccragatacaaggtcctttgaggatttccttggacactgcatatgacatcgctaaaaatcaaatgcaaactaatgtccacagcttaagggtaagtctatgtgt

SEQ ID NO: 160471 - DNA, 201 bp, Homo sapiens
ccaaattaaccacatattaacagaagtcatattaacaaaagtcatattaatggaagtcatattaacagaagtcatattaatggaagtcatattaacagaartcatattaatggaagtcatattaacagaagtcatattaatagaagtagaatgcatgggtttgctcttggcttttccctcccaaaagactcttagctgaaa

SEQ ID NO: 160472 - DNA, 201 bp, Homo sapiens
attaacaaaagtcatattaatggaagtcatattaacagaagtcatattaatggaagtcatattaacagaaatcatattaatggaagtcatattaacagaartcatattaatagaagtagaatgcatgggtttgctcttggcttttccctcccaaaagactcttagctgaaattctgcctttagccagaatatgtacataac

SEQ ID NO: 160473 - DNA, 201 bp, Homo sapiens
tgttgttgtcagcctttctcacccaggctgaagtgcagtggtgcaatcatggctcactgcaaccccgacttcccaagttcaggtgatcctcccacctcggsccccggagtagctgagactacaggcacgcaccaccacgcccggcttatttggtagagtattttgtattttcaccatgttgcccaggctggttttgaactc

SEQ ID NO: 160474 - DNA, 201 bp, Homo sapiens
aggaataatcaaagttatcttaagttaaccttctctgctaggtttctatagcagaataaatcaaagtcactattacagtgttaagcttcatgttcaaggaraagtttttcataaaacagttcataaatatcacaacaattttctctagtatctctttattgtgttgactttttccccacaaagttctctgggtgctgccta

SEQ ID NO: 160475 - DNA, 201 bp, Homo sapiens
gtatagtagtttctccaggagatggagcttgcagtgagctgagatagcgccacggcactccagcctgggcgacagcgagactctgtctcaaaaaaaaaaamaaaaaaaaactttttctcatcttttggcctgattgtttaaaggttagtgaggggaaaggaatcaagatgggcaagcatgggaagtctaagatcttttcac

SEQ ID NO: 160476 - DNA, 201 bp, Homo sapiens
atcccagagataaatctcacttggttatgatgaatgatctttctaatgcattgttgaattcaatttgctagggttttttttttgtttttttttttttttttgaggatttttgcatcagtattcatcagagacattggctcttagttttcttttttttgatacgtctttctctggttttggtatcaaggtaatactggcttc

SEQ ID NO: 160477 - DNA, 201 bp, Homo sapiens
aagactcagctattgttacaggcgcatactcctaagttaggttttcaatcttgtctacctattaagctaggttgcagtttgtccacaaggactcaaatatagaggtacagagtccttctcaggccatatttagttcactttaacactagttaattcaataaaagtgtattaagcatctactgaatgcaatgtattaatcta

SEQ ID NO: 160478 - DNA, 201 bp, Homo sapiens
catcccagagataaatctcacttggttatgatgaatgatctttctaatgcattgttgaattcaatttgctagggttttttttttgtttttttttttttttttgaggatttttgcatcagtattcatcagagacattggctcttagttttcttttttttgatacgtctttctctggttttggtatcaaggtaatactggctt

SEQ ID NO: 160479 - DNA, 201 bp, Homo sapiens
caagactcagctattgttacaggcgcatactcctaagttaggttttcaatcttgtctacctattaagctaggttgcagtttgtccacaaggactcaaatatagaggtacagagtccttctcaggccatatttagttcactttaacactagttaattcaataaaagtgtattaagcatctactgaatgcaatgtattaatct

SEQ ID NO: 160480 - DNA, 201 bp, Homo sapiens
gcatcccagagataaatctcacttggttatgatgaatgatctttctaatgcattgttgaattcaatttgctagggttttttttttgtttttttttttttttttgaggatttttgcatcagtattcatcagagacattggctcttagttttcttttttttgatacgtctttctctggttttggtatcaaggtaatactggct

SEQ ID NO: 160481 - DNA, 201 bp, Homo sapiens
ccaagactcagctattgttacaggcgcatactcctaagttaggttttcaatcttgtctacctattaagctaggttgcagtttgtccacaaggactcaaatatagaggtacagagtccttctcaggccatatttagttcactttaacactagttaattcaataaaagtgtattaagcatctactgaatgcaatgtattaatc

SEQ ID NO: 160482 - DNA, 201 bp, Homo sapiens
tgcatcccagagataaatctcacttggttatgatgaatgatctttctaatgcattgttgaattcaatttgctagggttttttttttgtttttttttttttttttgaggatttttgcatcagtattcatcagagacattggctcttagttttcttttttttgatacgtctttctctggttttggtatcaaggtaatactggc

SEQ ID NO: 160483 - DNA, 201 bp, Homo sapiens
gccaagactcagctattgttacaggcgcatactcctaagttaggttttcaatcttgtctacctattaagctaggttgcagtttgtccacaaggactcaaatatagaggtacagagtccttctcaggccatatttagttcactttaacactagttaattcaataaaagtgtattaagcatctactgaatgcaatgtattaat

SEQ ID NO: 160484 - DNA, 201 bp, Homo sapiens
tgatttatgtatgttgaaccatctttgcatcccagagataaatctcacttggttatgatgaatgatctttctaatgcattgttgaattcaatttgctagggttttttttttgtttttttttttttttttgaggatttttgcatcagtattcatcagagacattggctcttagttttcttttttttgatacgtctttctctg

SEQ ID NO: 160485 - DNA, 201 bp, Homo sapiens; identical to SEQ ID NO: 30027

SEQ ID NO: 160486 - DNA, 201 bp, Homo sapiens
atgtcattggtattttgttagggattagattgaatctatagattgcttgggtagtatggatattttgacaatattgattcttccaatccatgaaaatggawttttttttcattttttggtgtcttcagtttctttcatcagtgttttatagttttcattacagagattgtttggttaattcctaggtatttaattttatgt

SEQ ID NO: 160487 - DNA, 201 bp, Homo sapiens
aaagcttttaaatttgatgtgatcccatttgtccatcttttctttggttgcctgtgcttatgggatattgctcaagacatttttgcccagaccaatgtccwggagatttcccccagtgttttcttttagtagtttcatagtttgaggtcttggatttaagtctttaatccatttttattttatttttgtatatggtgagag

SEQ ID NO: 160488 - DNA, 201 bp, Homo sapiens
ctttgtccccaacccaattcatcatgccccatgctctctctttctctggtagagttggggcttcactcagctgattgtgaattcctacaaaatgtggtatygtgcatataaatgaactaccccaatttcactaaaaaatgtttcctgtcagaataatgatctaactttcaaaagtagttatctacagaaaatatgaactgc

SEQ ID NO: 160489 - DNA, 201 bp, Homo sapiens
ccattctgtgggttgtctttttactttgttgcttgtatcctttgctgtgcaaaagcttttaaatttgatgtgatcccatttgtccatcttttctttggttkcctgtgcttatgggatattgctcaagacatttttgcccagaccaatgtcctggagatttcccccagtgttttcttttagtagtttcatagtttgaggtct

SEQ ID NO: 160490 - DNA, 201 bp, Homo sapiens
ttttttctatagagttgtttgcgctccttgtatattctggttattaatccattgtcagaggggtagtttgcaaattttttttgcaacccaccattctgtgrgttgtctttttactttgttgcttgtatcctttgctgtgcaaaagcttttaaatttgatgtgatcccatttgtccatcttttctttggttgcctgtgctta

SEQ ID NO: 160491 - DNA, 201 bp, Homo sapiens
aaatgttattctggacactcaggtgagaggggagaagcccattttagctcagagttgatgatgctaacaacttactcttacacaaaaggacaagcccagaycacttgtaatgagtgaatgaaaaaaaggcaataggaataaacatggaaccagggagatcatcaaaatcaccaatctgttttaaaaagtagaaaggatttt

SEQ ID NO: 160492 - DNA, 201 bp, Homo sapiens
tacaggcgtgagccactgcacctggccggcaagagattcttgaattgagatctgtaagattggtcataggtaaccaagtatgtatgagaacaggaaagaaytggggagaagagaaagggatgttcaaaaagaggaaatagcaggatgaagcaggaagaagcatggcatccaaaagaagaccaggatagctggagtgcagat

SEQ ID NO: 160493 - DNA, 201 bp, Homo sapiens
ttcaaagtgccttaacatatccaagtagaaaatttcagtgagcaattaaatatataggtctggtgttcagaggaaatatctgagctggaaatacaaatttrtgagcctttttaatatagataggacttgaatttgtgagtggagatgagatagagaaagaaaacaaaattgagagaagaggctctatagctgaacaccgag

SEQ ID NO: 160494 - DNA, 201 bp, Homo sapiens
tcatattaatggaagtcatattaacagaagtcatattaatggaagtcatattaacagaaatcatattaatggaagtcatattaacagaagtcatattaatrgaagtagaatgcatgggtttgctcttggcttttccctcccaaaagactcttagctgaaattctgcctttagccagaatatgtacataactctcgtggagg

SEQ ID NO: 160495 - DNA, 201 bp, Homo sapiens
ttgtaggctgtcttcagtcttttgtctttttcattctttttttttctctaactgtataatttataatggcctatattcaagttcagaggctcttttttttkttgttgttttgttttttgagacagtctcactctgtcacccaggctggagtgcaatggcatgcaatctcagctcactgcaacctccacctcccaggtttaa

SEQ ID NO: 160496 - DNA, 201 bp, Homo sapiens
aaaggtcatttgctgccggctcctgctcagtgacatataatctctgtttgtacctgtgtccctgaattatctttcctgtccccacaaatggcctgaaaatraccccacaattggaaaaatcgcctggctgtctcatgcaaccctaacccaaagttgtttcagggagaacattaagccgcctcccaagctcgccctctgctg

SEQ ID NO: 160497 - DNA, 201 bp, Homo sapiens
ctttgggaggccaaggcaggtggatcgcttgagctcaggagttcgagaacagcctggacaacatggtaaaataccatctctactaaaaatgaatttttttwaaaaagactgggcgtggtggcacacacctgtggtcccagctactgatgaggcaattcttctggaggctctagggagaaatccatttccctgtctttttca

SEQ ID NO: 160498 - DNA, 201 bp, Homo sapiens
tggaggaggatgcaaagtaagcatgtcccagagacaaaagaacatttaagagaaggatatggagatggggagactcataacacagatcataccaccatcaytcattcattaaaacatttcttcatcacctactgtgtgcaagacttgggactaggagcagagaattcttaatccctgcacacggggaacctaagcctcata

SEQ ID NO: 160499 - DNA, 201 bp, Homo sapiens
ctttgttctcatcccaccccacacactttctacagtggtggcaagccttcatttactcacagctcgaatgtggcaaggtcagggggagtaatggtttcctytgatccagggttggaggaggatgcaaagtaagcatgtcccagagacaaaagaacatttaagagaaggatatggagatggggagactcataacacagatca

SEQ ID NO: 160500 - DNA, 201 bp, Homo sapiens
atgcatctgcataaatgcatgtaaagtttatactagtgataaaagaaaaacttcagccaagttaaatctaaaggagtttaagtgagcaatgaacaattcaygaattgggcaacccccagaaacacagcagattcacagagaagccagcgcagccacgtggtggaagaagatttatagacaaaaaaagggaaatgatgtata

SEQ ID NO: 160501 - DNA, 201 bp, Homo sapiens
ctgtaccaggcattcatctataattatttataattgcattatttgtcatggtttacaaaacacagatgcaaaagtttttactagagcacatatttcactaygtgaaaattatttccctagactactgcatatatgttggatggcctcattactcagtatcagtaaacagttaactgataaaaatgttattctggacactca

SEQ ID NO: 160502 - DNA, 201 bp, Homo sapiens
gggtctcagctggacattcaaggtctattttaaccctgtaattctgtgatttggtgaaggatcaccagttatgaaggataattagccattcagtaagagayctgcagaatattaagaaattcattctgttcatttctgacattcctacccaggtaaaatcagttatgtttagtttctttaaaaagccacataagcacagtt

SEQ ID NO: 160503 - DNA, 201 bp, Homo sapiens
tgttttgttgttgttgttgttgttgtttttgcattaagcattcctcatgtatgggaaactatgataattcagaatgaaaaacgtgggagaaatacctttawaatgttatcagctacataaagcctgacatttaagaaaactattatgctctactgaaaacaatgtgggaagcataagctctatggaaaaaaaaaaaaaaga

SEQ ID NO: 160504 - DNA, 201 bp, Homo sapiens
tatgctgagaaaaccaaaaattcctctcatctgcaagagagaggtatggccctgattttgataaggcaataaggatttttattaaccatcataataattawtcattcatgatagaaccattatcttagcattattacgttgtaaatataaaaagaaaaatcaacaaagacttcctgcagtgacattggagagttcacagca

SEQ ID NO: 160505 - DNA, 201 bp, Homo sapiens
tactatattttgaaaaaagaagctgtcttcttatattcatcatttacaaatctttacttagcatgtctctgttagtcatttgggtgcaaaaagataaaagrcagccccatctttgagaaggattttggaaaaacgaattctgcacatatgtagttaagtagcaatacaattaaatgagatcatctacgtaaagagcttagt

SEQ ID NO: 160506 - DNA, 201 bp, Homo sapiens
ccttattagccgaaacattaccagtctcatggcaaagggaaaagacctggcataccatgtgctgggcgtaaaaacctctgctccaaaccagtacacatccrcctctgcccacatttcattgaccaaaacaagtcccttggaactcttaacttcaagaagtttggggcaggctgggcacggtggctctcacctgtaatacca

SEQ ID NO: 160507 - DNA, 201 bp, Homo sapiens
tcagaggtttaagagcacaatttcagaacaactgccctgggacattgtagacatctgcatgttgaaagctaggtcactgccatggccacgttccagctgaytggaaggggaagagagtgcagaggatctatgctcaaattcttttttaaactttttttattttaacttttgtgggtacatagtaggtatatatatttaagg

SEQ ID NO: 160508 - DNA, 201 bp, Homo sapiens
taaattacacaccatttcccatactttttttctttcaaattgcccattactttaaatgaaaacatggtttagaaaagaactgtaaccactcaaaatttctsaaggaccagtctcccttctccctggtgataaaatgtacttatgtttgtatttttcaacattctcctgctgaagttccaagggatttcaaaacttcattca

SEQ ID NO: 160509 - DNA, 201 bp, Homo sapiens
cctcatttaaaattcaataattcaaggaaatggaaatgactagacatgaatatcttaaggtggtgatgataggcaccctgatcctaaaggaaagcacatayataccccaattagccactcttcatacaaatgatagtaccagaacccagccttgcaaaagtagtttttttttttttgcatatacacctacacagggaaata

SEQ ID NO: 160510 - DNA, 201 bp, Homo sapiens
ttgctggaaagtagtttgggtcaaggtaattgtaactggtgccctgagacacacagtagtctctgtctaagaatgtctctgacctataaataggttctaaytggtgatcttccttgtgaatatctgtttcatgtagactgtaaagaaaaaaagacacacatcattacatggtagtggatgcattttagtctgtgtattaca

SEQ ID NO: 160511 - DNA, 201 bp, Homo sapiens
atcttgtctcttttttttcctagcctggctaaaagctgcaaatattttctttgtcaatttcattttacttttcaaaaaaccaaatttttgtttccttaacyttttattgttttttcatttcagtttcatttatttctgctctgatctttatttcttttcttctactaattttttttgtttgatttgcttttgcttttttaa

SEQ ID NO: 160512 - DNA, 201 bp, Homo sapiens
tgttccccatagtctcataaaaatcttctatagttttctagttatttttagttttgttttaaaggtccaggtatttattctatgtgcactaattcttttgyatagtgtgaggtagcaatataactttattgcatgttttgaatggaaatgaaaaatgtattcagtggtccaaagaacgtttgttgacttgcgcatcttttc

SEQ ID NO: 160513 - DNA, 201 bp, Homo sapiens
catggactacagtgggaatggctgctcctggccttgggtagagcagcagccctggaaatacactgtcaaaaacatagagggccaaatatatggcagcctcyacagaacaaaaggaaatgaatgcagctgcccacacatgcattagttggtatgttgaatgcctctctatttgttgatgctctccacagatctgtacccccg

SEQ ID NO: 160514 - DNA, 201 bp, Homo sapiens
agtgtgtactggagttgatgtgttgataaagtgtccattaaagacaaaagaaggcaaggcacggtggctcactcctgtaatcccagcactttaggaggccraggcaggcagatcacctgaggtcaggagttcgagatcagcctgagtgagcaacatggtgaaaccccgtctctactaaaaatattaaaaaattagccaggt

SEQ ID NO: 160515 - DNA, 201 bp, Homo sapiens
ctttggtgaaccagtattgtttaaggacgctggaaatgtatattttcagaaaagagtcattgagagtgttcacccatttcaggcaatagtagggataaaaagagggcattttgcagagggcacagagaatctcatgttttcttttatctcatatcacgtttctgcaacaggtacagagaagaacatatgggttttggaatt

SEQ ID NO: 160516 - DNA, 201 bp, Homo sapiens
ttactcacacataggacttaatggtaaaaaatatagcatatcattaatacagtgaaaaaataatgtgttccgtgtagctaagcagcacagtagcatcaccrgaatccctgtacgggttgagccttcctaatctgagtatctgaaatctgaaatgtcaagtgtggaattttccacttgtggcatcatggcagcactcaaaaa

SEQ ID NO: 160517 - DNA, 201 bp, Homo sapiens
cagttttatagttatagcaattctctttaaaacatgccatatagactatacacagtgatttcattttttgagtttataaatgcctgaagtcattggatcaygattaatttttctctgctactaattctaatcacttccataaaaagacaaacaaaattacctaccattgtccaacaattcactagaggcttaatgaaattt

SEQ ID NO: 160518 - DNA, 201 bp, Homo sapiens
aaggcatggtggtgcacacctgtaatcccagctactcaggaggctgaggcaggagaattgcttgaacccaggacgatgaggtttcagtgagccaagtttgygtcattgcactcttggcgacagagtgagactacgtctcaaaaaaaaaaaaaaaagtcttgcaaaaagtaaaaattccacccataactagctatgcatgta

SEQ ID NO: 160519 - DNA, 201 bp, Homo sapiens
cacttccaacactggcggtcacatttcaacatgggatttggagggaacaaattccaaaccatactagcatcctcatgaaaaatcatttgaccatatatatrtgagagtttatttttggactgtctattctattggtctatatatctgtctttatgcttgtaccacattcttttgattactgtagcttagtaataagttttg

SEQ ID NO: 160520 - DNA, 201 bp, Homo sapiens
aataaccaggaccattttcctagattgcaaataggctcagagttcctcagcttcgtaaatgtaaactcacaggctagagaacctgagatgaccatctggtyccacatgttaggaacaccagtgtatctgcctttaatagaaaactccaaacaatgtaaggtgtttcctgtcaccatgggttattctgtaaagagactggat

SEQ ID NO: 160521 - DNA, 201 bp, Homo sapiens
ggctctttcagcacttctagattcaggggctgtgctgctccctgagccctggcttcccagtggctgctcagagaggctgggcagtgcaaccaagaagtggrgggatccaactccccctaggaaaacttggagcagtgaaagacaggagactggaggaaccagcagctgaagtcccctcactccctccccctaccagactgg

SEQ ID NO: 160522 - DNA, 201 bp, Homo sapiens
attcccacttactccacaaaaccttcttaatcctccttccctctctgggaccagttaatccttctttctcttttgatctcctactgtagttctctatacasctctgtgacagcccttattttgcattaatgttagggttaagtaaaagtctccctcattggattgtggactctttaaaggcaagagtcctattttactgaa

SEQ ID NO: 160523 - DNA, 201 bp, Homo sapiens
atgagcacaacccatttccctcatcccttcctcccctacagctcctgaagcaaaaaagaaataataattcgttattttcggccagaagggatgataatccwgagttccaaaataagtccatggtagcagaagtaatatttaggaagtacgtgccaagtgccaggcacctagctgtggtttaaatacatgattataattcac

SEQ ID NO: 160524 - DNA, 201 bp, Homo sapiens
acagctctgcccattattcctgcaactctcaaattaaaacaataacaaaacactacctactactatctgaacttcagggccttttaaagccatgggggctrtttccttggagctgaaaaatgcaaaacaaacacatcttctgctcaagccgaaaaatcttcttaactcaaaaatctcaaaaaatgtttgccctagaaaaat

SEQ ID NO: 160525 - DNA, 201 bp, Homo sapiens
gtttgtgaaattaatccatgttgttgaagatagctgtggttctttttcttttaattactatagtattccattatatgactatgtcacaatttatccatctrttgctaatggacatacaggatttttccagttggggaacgacaaacagtgcttccgttaatattgttgtatccattttctccactatctgaacatgcagca

SEQ ID NO: 160526 - DNA, 201 bp, Homo sapiens
tggtacatagtaagtgctaaataaatatttgttgagcgaaacatagatttaaaccaacaccctaatcacaacctggatttggaaacataaagagaagaatmtagaaaaaatgaacaggaccagacaagtgaaagcaactcttgtctatcaaaggacaaaaacagggctggtgattaaaaactcagaagtcaggggcaaaca

SEQ ID NO: 160527 - DNA, 201 bp, Homo sapiens
atgttttataaaaaattatattcaaaggagtttttgttatccactttacagatcagaaagctcaagttcagggaggctaaataacctttctaaaatcagamagtcagtgataaagccaggcttcaaaccaagatctgtctaattccaaagcctgtgctctccccagtccacaagctcaaaattattgagaagagtatacat

SEQ ID NO: 160528 - DNA, 201 bp, Homo sapiens
atgcttttttttttttttttttaagaaccaagagaaggaagcccaaaggtcaggtttagtaataccccttccaaatatgttttatattcctgggtctcttyttctataagtacgactttgttttaaagaaagagtatatagtagaaaaacttaaaagttgtcattgaggctgaggtggaaagatcacatcaggccagtagt

SEQ ID NO: 160529 - DNA, 201 bp, Homo sapiens
ctttcttgacctttgctgcatttgacaccgtaaactagggatcaccacactttttctgtaaaggaccaggcagtgtaaatattttaggctttgtgggcccrtatgttatctgttgcaactactcaaactctgccatcattgagcaaaacagccataacaatatgtaaacaatgaatgtggctttgttgcagtaaaacatca

SEQ ID NO: 160530 - DNA, 201 bp, Homo sapiens
cccccgttttataggtttttttttttttttttgagatggagtcttgctctgtcccacaggctggagtgcaatggcgtgatctcagctcactgcaacctccrcctcctgggctcaagtgattctcctgcctcagcagcggggattacaggtgcccaccaccacgtccagctaatttttatatttttagtagagatggggttt

SEQ ID NO: 160531 - DNA, 201 bp, Homo sapiens
agaaactttcaaatctgaatatgacccctacatttttctccaaactcatccattgccacttatcaaaacacactgactgctccagccacacaaagccattstcaggtccctcaaatgggtcatgtttgcacagtccctttcctctatatggaagtttcctcaaccctattgcttctgtcccgtgtgacctctactcatgca

SEQ ID NO: 160532 - DNA, 201 bp, Homo sapiens
cataggaatagtaattattttttgagtacttacaatgcgccagaaactgaacttgatgctttacacatttcatttgattaatttttacagtcctacttaayaggtgttaggacccccgttttataggtttttttttttttttttgagatggagtcttgctctgtcccacaggctggagtgcaatggcgtgatctcagctca

SEQ ID NO: 160533 - DNA, 201 bp, Homo sapiens
gtcaattgggacaattcagttgaaatttgtaggggtccaaggatatcattatgatggaggatatgcttgtttccttgtttgtaggaaatgacactaaaagrttctggagtaaagaggcatccaattagcaacttattcccaagtgtttctgaaagttctttgtcctcacaacccttctgtaagttggtgattgctgaaaat

SEQ ID NO: 160534 - DNA, 201 bp, Homo sapiens
ttacttgtattataaagaaatagtattttactttagaggtaaccattgctttctaaaggtaggaaacatttgagtagtttcaaaaagtgttttgacaaaarcattaaggataaatttgtcataaattattaaaggaaaacaaacaagttttagagttaagagtgtagtcatgcccttccacaaaacgcactttaatgccgc

SEQ ID NO: 160535 - DNA, 201 bp, Homo sapiens
agttgtccaaagttaaacaactttgtcagagccgggaattgaattaataggccaagggacgaaccttgagttagctggagctgagagatagattggtaagrgaccaagtagagtttaccaatactcagaagaagatgaagaataacacaggaaaagaggtcaaatgaagcagtcagcacaaagagagggaaatggattttc

SEQ ID NO: 160536 - DNA, 201 bp, Homo sapiens
tttgtccaagttcacacagcaagtgagtgatagatccagaatttgtttcatccctgccaagatgcaaagcccatgcctggtctctctaccacaccattctrcctctaccccaggaataagggttgcaaagctttattttcacagtgagcaccaaagtgtatggtatcaagttattcatactcagctgccttatttttgaca

SEQ ID NO: 160537 - DNA, 201 bp, Homo sapiens
tccagtcatgggaccccacacttctgtaagttttacctccaggagctttgccaggtcctcacagtgaatatctggaaaaattcccctcagtcttctggccrtgggaggagaaaaaaaaaacactttgaaatatgctaaagcattctgctccttaacaaggcctgccctcagaagaaactactttaccagggcataacattc

SEQ ID NO: 160538 - DNA, 201 bp, Homo sapiens
ggctaattttattttttgtgtagatgagtcatgctgtgttgcccaggctgggaattttttaaaactatgattaatatgccaaggactttaatgataataartagacaacatgcaagaacaaatggataatgtaagcagagaaggaaattctaacacagaagcaaaaagaaattctagagatcaaaaacactgtaatagagg

SEQ ID NO: 160539 - DNA, 201 bp, Homo sapiens
aattttgcagagcaaattatgagcaagtgatagtgttctttcattattaaacatgatttacagatatttcagactaactctctttttttccttttaaatayagataaatgcagagggaacaccagaggacgtttttcttcaactctgcacagctattgactctattttctgaaggcaaaaatgcatgtttgttagaatgga

SEQ ID NO: 160540 - DNA, 201 bp, Homo sapiens
taaactggttggtcctgtaataatacaattctgtttcatgaaatgctttcttcatttgtgctttgaaggttttagctataatgtgtggaatagtttattayattcaacaaaattgctaactgcccagtatcttaaagcatactgattatttctagaaatgatttttgaaaaaatattgccatagctatgttaatgtgttat

SEQ ID NO: 160541 - DNA, 201 bp, Homo sapiens
agtaatttttaacatctattaagcacttattacatgcaaaacgttgtgccgagtttcttatattaactcagcaattcttcacaacatctctaggaagtaaraattattatctctatatcacagacaaaaaaaaaaggactagaagagtaatttacccaaggttacataaatagtttcacaataaggatgtgaacttagggc

SEQ ID NO: 160542 - DNA, 201 bp, Homo sapiens
gctcctcagcaatggctaaaagccaagtgaacatgttcttgggggaggctttgttcccatctttaactaatattcatcacaaataaagcaaacagatctgrccagtgtccatgtgtaatggctggctgtatatttcatatacatattcaggagctattttcttgagtataaagttctttccttatagcacaaagcaaggag

SEQ ID NO: 160543 - DNA, 201 bp, Homo sapiens
gtgctcctcagcaatggctaaaagccaagtgaacatgttcttgggggaggctttgttcccatctttaactaatattcatcacaaataaagcaaacagatcwgaccagtgtccatgtgtaatggctggctgtatatttcatatacatattcaggagctattttcttgagtataaagttctttccttatagcacaaagcaagg

SEQ ID NO: 160544 - DNA, 201 bp, Homo sapiens
tcatgcctgtaatcccagcattttggaaggccgaggcgggtggatcacttgaggtcaggagtcgagaccagcctggccaacatggtgaaaccctgcctctrctaaaaatacaaaaattagccaggcatggtggcaggagcttgtaatcccagctactcgggaggctgaggcagaacaatcgcttgaacccgggaggtggag

SEQ ID NO: 160545 - DNA, 201 bp, Homo sapiens
ggtagtgagtgaatatgtgaattaacatatgattgaggccagctgcgattgctcatgcctgtaatcccagcattttggaaggccgaggcgggtggatcacytgaggtcaggagtcgagaccagcctggccaacatggtgaaaccctgcctctgctaaaaatacaaaaattagccaggcatggtggcaggagcttgtaatcc

SEQ ID NO: 160546 - DNA, 201 bp, Homo sapiens
aataactcaagaagtaagctctgttaatccctaatttgaagccaaggaaattgaagctcacaaaagttaactgacttcccaagaccataaagctagcaagytgtagagtcagaaatcaaactttgatttgcctggcaccaaaatctattctccactttccccactccaataaagccattaacaagctcactagtaatcttt

SEQ ID NO: 160547 - DNA, 201 bp, Homo sapiens
tgatgggtacatttaatagactgcacatggctggggagagaatctctgagcttgagtatatgacaatagaaactttcaaggctgaaaaacaaagggaaagrctgaaaaaacagaactgaatatctgagaaacataggacagctacaaaagatgtaacatatgcataatgggaataccagaaggaaaagaaagagagtaatg

SEQ ID NO: 160548 - DNA, 201 bp, Homo sapiens
agaatttcccctagattaatgaacaacaccaaaccacagatccaggaatctcagaaaatatcaagcaagataaacgccccaaaacaaaaggcctttatatwcaaacttcagaaaatcaaaaatagagaaacaaatcttgaaagaagccagattttaaaaatgccttacctgtagtagagcgaagatcaaaatcatttttac

SEQ ID NO: 160549 - DNA, 201 bp, Homo sapiens
actttctgagatcaacaaaaattgggggaatttgttgccagcagacctgcctggcaagaaatgttaaaagaacttctttaaagaagaaaaaatgacatagrgccaggcatggtggctcacgcctgtaatcccagcactttgggaggccaaggcaggtggattgcttgaggtcaggagtttgagaccagcttggccaacatg

SEQ ID NO: 160550 - DNA, 201 bp, Homo sapiens
caagactagtcagatgtgactttatggccaacattaactttacatgaaattaaaatgggaactttgccccttcctttaaaccaccagcctgacaaagctcytcttaacaatggtgctacatttggcatctgaagacaagatcaaagtgtttcataatcttctagcagagagttgagttgaacacgtatttgagatgatgaa

SEQ ID NO: 160551 - DNA, 201 bp, Homo sapiens
tattatctctatatcacagacaaaaaaaaaaggactagaagagtaatttacccaaggttacataaatagtttcacaataaggatgtgaacttagggcacawtctctagcatacccaagactgggcaatttacaaaagaaagaggttgtgctgcctctgccacaatgtactgcctcccatcctaacctccaaagacaggtca

SEQ ID NO: 160552 - DNA, 201 bp, Homo sapiens
tttaggatttcagaaaacaaatgtacctagtgagaattgcctaccattctgaggaaattacacaggaaataattgaaaataaaatactgtatttaaacagmtgtcagcccttcaaagggtgttttgtatactaacaatgtatattggtaagaataatcctttatgcattttccatgaaatactctaaaggaaaatattttg

SEQ ID NO: 160553 - DNA, 201 bp, Homo sapiens
tgtatattatacacaccataaacttttagcattacaacttccacacaagaaagtgatcaagccaaggaaccctctcactgccttgatccagcgaggctggrcctggcatgttgtagatgcttaacaaatatttgttggatagatggatggatggatggatggatggatggatggatggataggtgaataggcagatgaatg

SEQ ID NO: 160554 - DNA, 201 bp, Homo sapiens
gcctacttcctagtttttttctgagatcagatgagattgcacatgctgaaaacactctaagtactactgaaataatagttccagtaatcattttctaaaaytgtttaatgtgtgaggtgttttgctgtttttttaaaaaaaaaaaacaggtataaggaaagtgcaaaaaaattcattttcaggtaaaaagatgaggaaata

SEQ ID NO: 160555 - DNA, 201 bp, Homo sapiens
taatcattttctaaaattgtttaatgtgtgaggtgttttgctgtttttttaaaaaaaaaaaacaggtataaggaaagtgcaaaaaaattcattttcaggtraaaagatgaggaaatagcctgatctatttttgattgttctttttagtgtgtgtgtgtgtgtgtgtgtgtgtgcgtgtgtgtgtttctgagacagggtctc

SEQ ID NO: 160556 - DNA, 201 bp, Homo sapiens
acccactgggaggaacaaacaactccggacgtgccacccttaagagctgtaacgctcactgcgaaggtctgcggcttcactcctgaagtccccgagaccaygaacccaccgggaggaacaaacaactctggatgtgccacctttaagagctgtaacactcactgcaaaggtctgcgtcttcactcctgaagtcaagcaaga

SEQ ID NO: 160557 - DNA, 201 bp, Homo sapiens
accacgaacccactgggaggaacaaacaactccggacgtgccacccttaagagctgtaacgctcactgcgaaggtctgcggcttcactcctgaagtccccragaccatgaacccaccgggaggaacaaacaactctggatgtgccacctttaagagctgtaacactcactgcaaaggtctgcgtcttcactcctgaagtca

SEQ ID NO: 160558 - DNA, 201 bp, Homo sapiens
ctagtagaatagcaaggagaaataagtgaattcactattatagctggagacttcaacactcctctatcagaaatggacagatccaaccagaagaaaatcartaaggttgtagttgaactcaataataccaccaaacaccaccagtcaactggatataactggcatctatagactgctttatccaacaacaacagaatacac

SEQ ID NO: 160559 - DNA, 201 bp, Homo sapiens
ttatagtagaactagacaagaatagaatagtcagagaaataaagttaaaactgtgaagtacttgggagaataagtgcatggtgctgtgtgtagatgtggtyggtgaggtgaggaaagtcttctccaggatggtctagatctcctgacctcgtgatccgcccgcctcggcctccaaaagtgttgggattacaggcgtgagcc

SEQ ID NO: 160560 - DNA, 201 bp, Homo sapiens
gtgctgtgtgtagatgtggtcggtgaggtgaggaaagtcttctccaggatggtctagatctcctgacctcgtgatccgcccgcctcggcctccaaaagtgytgggattacaggcgtgagccactgcacctggccggcaagagattcttgaattgagatctgtaagattggtcataggtaaccaagtatgtatgagaacagg

SEQ ID NO: 160561 - DNA, 201 bp, Homo sapiens
cattgagagtgttcacccatttcaggcaatagtagggataaaaagagggcattttgcagagggcacagagaatctcatgttttcttttatctcatatcacrtttctgcaacaggtacagagaagaacatatgggttttggaattggaaacattgaattgaaatcctgggcctaggagtttctagttgagtaaactagagcc

SEQ ID NO: 160562 - DNA, 201 bp, Homo sapiens
acaccaaactgagatagttaggatgatttaaaagtaatttttaaaaatagctttctttgtgattcatgctattaaatgacgtaaatttttgccaccaaaakttgatcgtgcatgttaaaataaaaatacattaccggggtgggggaataagactgaaataagcagggcacggtggctcacacctgtaatcccaggactttg

SEQ ID NO: 160563 - DNA, 201 bp, Homo sapiens
ccttattcagtactgtccagggatgcaaaacattaccctgtacttacattcatgccaactaaggaaactttcttcaggttgtgaaatactgaaccacctaygtagattaagatagggttcagttgccaaaatttgagtaggctatgcctgctcaacccccaatacatctgttttaaaggaaaataaatcaattaaaatatt

SEQ ID NO: 160564 - DNA, 201 bp, Homo sapiens
tttctccaggagatggagcttgcagtgagctgagatagcgccacggcactccagcctgggcgacagcgagactctgtctcaaaaaaaaaaaaaaaaaaaawctttttctcatcttttggcctgattgtttaaaggttagtgaggggaaaggaatcaagatgggcaagcatgggaagtctaagatcttttcactgccaacta

SEQ ID NO: 160565 - DNA, 201 bp, Homo sapiens
ggggataataaagtcacacagggctgagaatgcactgggtatgcaaataaatatatgacacagaggcttttatttattaatgaggctaatactggcttggygtatgggaagaatgtgagaagctcaactgcaatgtgtgtgtatatgggacagattttgacaaacaaactgaattggatgcccgggtaattttttctgctc

SEQ ID NO: 160566 - DNA, 201 bp, Homo sapiens
acctttgctgcatttgacaccgtaaactagggatcaccacactttttctgtaaaggaccaggcagtgtaaatattttaggctttgtgggcccatatgttawctgttgcaactactcaaactctgccatcattgagcaaaacagccataacaatatgtaaacaatgaatgtggctttgttgcagtaaaacatcatatgtgga

SEQ ID NO: 160567 - DNA, 201 bp, Homo sapiens
accaccattctccagctgcccaagccagacacaagggcgtcttcctagcctccttcctttctctctcttcctacatcagtttgatcaagaagctactcagwtctcctgtgcaggaattgcttctcccactccactgcccatgctttggttcacaccctcagccttcctccctgggaccatagggccagcctcctaaccagt

SEQ ID NO: 160568 - DNA, 201 bp, Homo sapiens
gaaactctgaatctaccaagacatttattagatctttatagggaaaaaaaaaaaacctctaccctcctcctggaagtagggttgtagttaaaggggcatgrggcgagatggggaaattgttgaacagagactgttcctgattgtctgaaggagacttgatttcatgtattctgcagatcgtttcattgggtagtctctcgg

SEQ ID NO: 160569 - DNA, 201 bp, Homo sapiens
tccacctcatcctcctgagtagctggaattacaggtgtgccactgtgcctggccatatgaatttgcatttctaacaggcttctagaggatgcctgaacaakggcaactagtgcaaggactaccttttcagaaacaaaaccattcctttgctgtgaaactttgttatcaaatccaaggggagtcccaaaatgctatctgaac

SEQ ID NO: 160570 - DNA, 201 bp, Homo sapiens
attgcttttcagcattatacatagaagcccaagctaatgcaataagacaagaaaataaaaagcatatagattaagaaggaataaataaaagtgtccttgtycacagatgaacacataaaatgggaactcacttattaccacaaggacagaaccaagctattcatgaaggatctgcctccatgacccaaacacctctcatag

SEQ ID NO: 160571 - DNA, 201 bp, Homo sapiens
aagtcttttaccgcactgtgggtaaaaagtgagtgccagactccaaccccagcccagtccagctgggcaaacctgccaagcagtgccaggccagcagcttrggaaccagattctgggatcctccatcccagctgcacatagcttccagacaggccagggcctcctgaatcattcaagtgctcctgaagttattctggctgt

SEQ ID NO: 160572 - DNA, 201 bp, Homo sapiens
tcttaatacatttaacttacagtgtcaaaatatcaatgtttcctaatgagcttctaaaccttgtgttttctttgatcaagaagaagtatctaccaaatcaytttggatatataaggactcaaaattactcatgcaaaaagtagtattgggtaaaagagactgggaagtcttgtagtcacctgaatgtcacaattttcaaac

SEQ ID NO: 160573 - DNA, 201 bp, Homo sapiens
ttacttataagcatgaagctttcttttaaacaaaggtattttcattctaccattgctgatgatagttttctaattatcttgctccgttttcaagtattaaygtgtaatatccgttaactgagttgtttaagagcctttcacattgtcgtttttgaaaacaacggaaagaacactttgtaattaaataaaataagtaggaca

SEQ ID NO: 160574 - DNA, 201 bp, Homo sapiens
ccagaataagcttgtaaccgtttatactcccaccagttgtgtaggaagttcccacttcataacatccttgccagcatgggcactctcatttaaaaaaaaawattttacatttgaggcatagacttcaaagatgagagtcttagatgccatttagtgtaaccttttattcaataatttgtcctcccaatgctctaaccgtaa

SEQ ID NO: 160575 - DNA, 201 bp, Homo sapiens
caaaggatcatggtttggaatttggaagcctgcgactgactcttcaccctgccacttgctacatgtgtaacctaatgactgaacatctgaacccctgtttyctcatctgtgggaataaataaatcatgttaatatttatttccctaggccgctgtgatgcttaactgagagaatgaaggtacaaatgtattgtaaactatc

SEQ ID NO: 160576 - DNA, 201 bp, Homo sapiens
gaatgaaggtacaaatgtattgtaaactatcaagacctcgttattagagattggtgtagtagctaatgctgatatttttaaaatgtttaacagtttcttaygcaaaatacagcagtaaaatttatactgcagtgtcgaacacattcagcacagcttcagactcctggctgtgcgtgaaaactccaagaggataccactggt

SEQ ID NO: 160577 - DNA, 201 bp, Homo sapiens
gtacagaacaaatgctgcataaatgtgagttccctaccttccctctttcaaatatgactgaacttttcaagatagccttctatagctgacagaggccaccwcttcttcaactaagtgaatgccagttgtctgagcacttctgattcctggactggcatgtgaggcacttagaagttgctgctctatcctaacaaccagtaa

SEQ ID NO: 160578 - DNA, 201 bp, Homo sapiens
atccttttacctttagctttttcacatctttaaagtgtactctgtatcaaacacctctgaggccccacctcataacctctgagtccaccttttacttagcygtttttgctgtgactagctttgtgccggtgtggcacacatgcacaggagaacccagcctaagacactcttatgaacagcaagtacttgagttttgttttt

SEQ ID NO: 160579 - DNA, 201 bp, Homo sapiens
aatgtgggtcatcagaccaggaacattttattttattttttagagacagacttttgctgtgttgcccaggttgaagtgcagtggcatgatcatagctcacygcagccttgagctcctcagctcaagcaatcctcttgcctcagcctcttgagtagctaggactacagatgtacaccaccatgcctggctaattttattttt

SEQ ID NO: 160580 - DNA, 201 bp, Homo sapiens
agaaatggaagactccacaccccccaagaactagaaagaacagaaaaatctgaaagaaatcataatataaggatattcaaaatattgaaagggaagattaraagccatgaaacaaatacatgaacaaatggaaaagaagaatgaaaaagggaagaaacaggcattgtaggcacacacaaaaatatcgtcaattgaaacaga

SEQ ID NO: 160581 - DNA, 201 bp, Homo sapiens
aaaacaaaaggcctttatattcaaacttcagaaaatcaaaaatagagaaacaaatcttgaaagaagccagattttaaaaatgccttacctgtagtagagcraagatcaaaatcatttttactttcttttcagaaactttgcatgcaggaagaaaatggagtaaaatatttaaagtgttgaaagaggggaataaagcaccaa

SEQ ID NO: 160582 - DNA, 201 bp, Homo sapiens
gcccactttttgatggggttgtttttttcttgtaaattcaatgtgccagactctatatgaggtgctggggatacattggtgggcaaaagatggcacagttyctgctatcatagagcttatagtagaactagacaagaatagaatagtcagagaaataaagttaaaactgtgaagtacttgggagaataagtgcatggtgct

SEQ ID NO: 160583 - DNA, 201 bp, Homo sapiens
aaagtcttctccaggatggtctagatctcctgacctcgtgatccgcccgcctcggcctccaaaagtgttgggattacaggcgtgagccactgcacctggcsggcaagagattcttgaattgagatctgtaagattggtcataggtaaccaagtatgtatgagaacaggaaagaattggggagaagagaaagggatgttcaa

SEQ ID NO: 160584 - DNA, 201 bp, Homo sapiens
cctttgaggatttccttggacactgcatatgacatcgctaaaaatcaaatgcaaactaatgtccacagcttaagggtaagtctatgtgtggtttctgttaycttcctatcttctattccccaagctggttttatccctgttgaattacaacctataccttcagtttacagaatgattactgggggaggggctgtgtatatg

SEQ ID NO: 160585 - DNA, 201 bp, Homo sapiens
tagtgctttcttattatctcttgggtaaaatgaggatctcttagcatgacacttagggctactctatcatgttatcttctgactgtatagaaatactaatsgttccttaagcgggtgatatagttccatacttctgtgctttaagagatgttcctttacatgccttgtttctttttttatttaatttttcttgttatcctg

SEQ ID NO: 160586 - DNA, 201 bp, Homo sapiens
tacaatctctaggctgaggggagttttagataggcaggacagcaaactgccgtcagtctgaatagaaaagaggtaaaataaacagtattggaagtgggttrttattccagctgttatgtttgagatgggcctgctttcatagtcttggaggtctgggcagaaacacaccacagcaggcacaagagacaacatgctgggttg

SEQ ID NO: 160587 - DNA, 201 bp, Homo sapiens
gctggagtttagagtgaggtaggactttgaagaagtgactctgaaaatcctaactccacttttcattttaatactgttaatgctttaagcttgagggtctstcggagcattaattctctctttcttaagcaaaagattcattttagcacatgctatagattgaatgtttgtgttcccccccgaatttgtacattggaacct

SEQ ID NO: 160588 - DNA, 201 bp, Homo sapiens
tttgtggcctccaaaagcatttttaaaaaccaaaacggtttaaggaaggacggtgggcatatctgaatacatgattgtcatctccaagagcagtaagaggmtgctgctgaggaagcagaggttagtgtcagagagctgacttcaaagttcagctcacctcttgtgccatgggaagcccaggcacatccccatcctgtgctc

SEQ ID NO: 160589 - DNA, 201 bp, Homo sapiens
tgctttaagcttgagggtctctcggagcattaattctctctttcttaagcaaaagattcattttagcacatgctatagattgaatgtttgtgttccccccygaatttgtacattggaacctagcatgtaatggaattaggaagttgcttccacatcaacaacctttggaaggggctagagagacctttgggaggtgatcag

SEQ ID NO: 160590 - DNA, 201 bp, Homo sapiens
tacacctacacagggaaataaggttgaatgtgggttccttttgccctcctaatgggtcttgattgactggaagatgagggatagagaccaaagcaagtctstaatccaaatctgcagttttccatagccagtaatcccactttgaaattttaaatgtgtcccttcaatagaattctagatttctcctcatcaattaccaac

SEQ ID NO: 160591 - DNA, 201 bp, Homo sapiens
gcattaattctctctttcttaagcaaaagattcattttagcacatgctatagattgaatgtttgtgttcccccccgaatttgtacattggaacctagcatrtaatggaattaggaagttgcttccacatcaacaacctttggaaggggctagagagacctttgggaggtgatcaggtaatacccagatggctcactttacc

SEQ ID NO: 160592 - DNA, 201 bp, Homo sapiens
ctattctcctactattacccactagagcattcagagttctctattttgtatattcagctaaattatagagacacttatttaaaagtaactaacatcttacyaggtgaaataaattccacattgacatggaagcaaccctaataaggatgctagatagcattaaaataaacaaagtagtagattaatgagaaaaaacttaaa

SEQ ID NO: 160593 - DNA, 201 bp, Homo sapiens
ggcatggccatgggcccttcgcatgacctctctgaacatcagtttcctcatctgtaaaatggaagagtgggtggcaggattggattaggtgatccctaaaytccaagctctgaattgcggtaatttcaacaagggaagtggtggagaggcttgttgaggaataattgatgttttttctattcacagaagagaattcattaa

SEQ ID NO: 160594 - DNA, 201 bp, Homo sapiens
ccaaaatttgttgattaatatattgctattaagtgggtgagatgctcaggacagggcagttttcttcatgtatcagtgacattttgggtagtctgacttcrtgaaggtaaattgagactttacaaagtgtttttttgtttttgttttgttttgttttgttttggagacagagtctcgctctgtcgcccaggctggagtgca

SEQ ID NO: 160595 - DNA, 201 bp, Homo sapiens
aattttttgtatttttagtagagagggggtttcaccgtgctggccaggatggtctcgatctcctgatctcatgatccacccaccttggcctcccaaagtgstgggattacaggcttgagccactgcgcccggccagactttacaaagtttttaagtgtgtgtttctgtttctgtcttctccctcttctctgcacccctctc

SEQ ID NO: 160596 - DNA, 201 bp, Homo sapiens
tatagactatacacagtgatttcattttttgagtttataaatgcctgaagtcattggatcacgattaatttttctctgctactaattctaatcacttccayaaaaagacaaacaaaattacctaccattgtccaacaattcactagaggcttaatgaaattttttattactgactttattattttgcaaaataaattacat

SEQ ID NO: 160597 - DNA, 201 bp, Homo sapiens
cattataatcaatcagagctttgaccagcatgagttaaccactattactactaagttgacaaggccaagcaaagaaactcaaggttttagcttacatttaragcatcttcgtgacataaatacaattcccattaggcattctgaaatgcaaaatattttttaaagtaacttgtggatgcttatcactgctttcctaaaccc

SEQ ID NO: 160598 - DNA, 201 bp, Homo sapiens
tcaatttttattatattcaaataaaccttatgctggtgaaatgttgcaaggaactcaatgataaatattacattaagcaaaatgtagtttggtatggtgakccaagggctgactttgaagtcacaaagacaagggtttgaattctggcaagtctcttaatctctctaagatgaaatgtcctcatctgtaaaatgggaatga

SEQ ID NO: 160599 - DNA, 201 bp, Homo sapiens
ccttcagaagctatttgataagctcttgtgttgattttttctctcttcttctgtcttcttccgatttggcttccactgtctattgatttttttcccttctstctctttgagcatggtctcagtagacaccaaggacattgggtaggactgccaatttcatattttgttcatgcctatgttattcacaaaccttctcaattt

SEQ ID NO: 160600 - DNA, 201 bp, Homo sapiens
gtggtgttccaaaagccagagaaaacagtatttcaggaggcagggagtgccaaatgtggctgagaagataaggaagagagagactggaaaataatcattgwatatagaaacacggaggaaattgagaactttacaaagcgctataaagtgaagacacttaagcatgttttaactcacaggaaaggtctacttgtttgtgaa

SEQ ID NO: 160601 - DNA, 201 bp, Homo sapiens
atctgaattacatcattatcttgccaaagaaaaaggtaagcataagaaaggaaaaattaagaggggcaagagtctcattttgatggagtgtcttgggaaaygctgcctatagcatgaagccatcaacttctcttggcttgcagtttgaattctctgctatggtatcaggtggattggtgaactttctgtgtggcacaagac

SEQ ID NO: 160602 - DNA, 201 bp, Homo sapiens
taggttgattccatgtatttgctattgtgaataatgctgcaatgaagattcacgtgtatgtgtctttatgggagaatggtttatactccgccaggtatatrcccagtaatggggttgctgggtcaaatggtagttctgcttttactcttcgaggaattgccgtactgctttccacaatggtcaaactaatttacactccca

SEQ ID NO: 160603 - DNA, 201 bp, Homo sapiens
tttttctccttcaagttttaaactggtacagaggttaaatattcaaacattttcattttagatagcaccaactaaattgtgtagaaaaacaaaatatcccrgtggccttgaattccggcaataaatttatctttttatttgtttgtctgatttacttgattagtcgatgcaggcaggaaagcattttagaaaaaggtattt

SEQ ID NO: 160604 - DNA, 201 bp, Homo sapiens
gatttcctggccagtctgcaggaaggttcttctgccaacaaccacagccacccagcaaggtacatgcatcatgcagagaaacagaatcacctactaaggtycccaaatggggaagaagataaagaatatttcagtatattgcatctggacctggcttggcacagtttctgaggattcttgggggtccatcctaagactact

SEQ ID NO: 160605 - DNA, 201 bp, Homo sapiens
acaaagaggattgctgggcagtagccagtttccctgtagctttaagctaccaacccacacagacccataggagttgggaagtcatctgcctcttgcagtcractttgcctgcccttgctccttctgatttcctggccagtctgcaggaaggttcttctgccaacaaccacagccacccagcaaggtacatgcatcatgcag

SEQ ID NO: 160606 - DNA, 201 bp, Homo sapiens
cttttctctcaaccacaacctcctgcatggcctgaaaccgagcctctcccttcttattgttagtggtctggctttgaatcgactgtctcctaattagacarccagatcaaggggctctgggaaaggagtctggaatgctttctctcagtcaaaggggatagggggccaaagccctggttgggctgtgagggaggggcagct

SEQ ID NO: 160607 - DNA, 201 bp, Homo sapiens
ttcacagaagagaattcattaatgtaaatgtgtccctgaatgaccactctgttaatagctcttctcttacctggaatagcactgaatgcacaggcaactcyaagaagatgagcagtaaaatttccctgaaggcatatattctaaacaggacagcaagaatctgtctttaaataaagtgttttgagggcggtttacctcaag

SEQ ID NO: 160608 - DNA, 201 bp, Homo sapiens
ttaatagctcttctcttacctggaatagcactgaatgcacaggcaactctaagaagatgagcagtaaaatttccctgaaggcatatattctaaacaggacrgcaagaatctgtctttaaataaagtgttttgagggcggtttacctcaagggagtgttaatacaaccagacaacctcatttaactgactcaggcatcaaag

SEQ ID NO: 160609 - DNA, 201 bp, Homo sapiens
cttacagaggtgctggctctttcagcacttctagattcaggggctgtgctgctccctgagccctggcttcccagtggctgctcagagaggctgggcagtgyaaccaagaagtggggggatccaactccccctaggaaaacttggagcagtgaaagacaggagactggaggaaccagcagctgaagtcccctcactccctcc

SEQ ID NO: 160610 - DNA, 201 bp, Homo sapiens
cactgtcctctgtcagtaagttattttcagcattcaggtagtctttgccactaaatctttaacatctgagaaacccaaagccatgtaaaagaacctggtcrttcttttggttgttttgttgttgttgttgttgttgtttttgcattaagcattcctcatgtatgggaaactatgataattcagaatgaaaaacgtgggaga

SEQ ID NO: 160611 - DNA, 201 bp, Homo sapiens
tgagtttagctctacaataacaaagtgcattaaaaaggtaagaggttgtcatgtattaaaatctaacacacatcttttcagtttaaacactgaccccctcyttcctaaactgaatgcatcaattgcctcatgttcaaatatagctcaatagccagatcctgattctatacagcaaacagtaaaaactatctaatttgctct

SEQ ID NO: 160612 - DNA, 201 bp, Homo sapiens
ttaaggggtctgatcacagtcattcaattaactggtatcagggagaggaccagggtctctgactgtagttcctcactccaggcttctccctcctctgccaytcagttgtgttggttgttaacctgaacgcaagctgtctcacacattcagccatctgacacatgcttattgactgttggacccctgctgggcagtgaggag

SEQ ID NO: 160613 - DNA, 201 bp, Homo sapiens
aagacacctgtcattgagcgaagggaaaagcagaagggaggaaaaggagtcagacacaaataaatgggttcaggagaagtccagcctcagcctggttgcaygggcaggtaggatgattatggaaacagccccaggggttgagtcctgctcccagacagcacccattagctaagagcagtcctctagagaagggtgcagaag

SEQ ID NO: 160614 - DNA, 201 bp, Homo sapiens
aagctcaggagcaaggagagccagtccgagtcgcaaaactgaagaacttggagtttgagggtaggaagcatccagcatgggggaaacatgcaggctgagasggtaggccagtctctccttttcacatgtttctgcctgctttatatttgctggcagctgattagattgtgcccaccagattaagagtggatctgccttcct

SEQ ID NO: 160615 - DNA, 201 bp, Homo sapiens
attaggctatacatgattctgaacttgctgagttcatagttcattgatatgtggctaaaaaattatttttctgtatgatccacaattcagaaaataaaatrtaggtatggatggcaggtaatctctttttctacatgttgcttcctgtcaaagccaattcttctgccattttagtggaagaataagaagagtaactaccca

SEQ ID NO: 160616 - DNA, 201 bp, Homo sapiens
ggatcaatactttgtatccttcaatccaatcaagtccacactcagtattaaccatcacagagccctttattatcacatagaaatctgtgtttttaataatrtggtccaaagaagcttccaaaaataatacagtatgttttgtggtggttgttactgtcttggcagtaatattacttcagatttatccattgtttaacactc

SEQ ID NO: 160617 - DNA, 201 bp, Homo sapiens
tcacataaagtcttagcatcaaaagcatttataaggatttttaaatctatttgcatattttcttcctctgcccatggaggtaaatgtcaattccattattrtaaatctgatttccagtctcataattttctttgtctctcctgcttcatttatacttttcctaaaacttggggaaaaattgttcaattacacaaagagccc

SEQ ID NO: 160618 - DNA, 201 bp, Homo sapiens
actgtcttggcagtaatattacttcagatttatccattgtttaacactcacagttgaactgtgaaatgcgttgtcaaatgccacttccttctctctaggcrtaactaaagacctcacctgttactaagtcctgtgcccttcaaaaggtcaaacagcacagtagaagatctttggaattagacaaagctcgaaacctccaag

SEQ ID NO: 160619 - DNA, 201 bp, Homo sapiens
ccattctaaaactagcagcactgggtgcttcctctagggttctgtatttcagcgcatacctttctctgtcatctatagaaataatatttttaaatctggaragaaattgaaaaattcaaaacggggaaaatgaaagctacactatcactttttcgtaacatcctaatttttctgtcttttttgagtaacaatatcattgca

SEQ ID NO: 160620 - DNA, 201 bp, Homo sapiens
catctatagaaataatatttttaaatctggaaagaaattgaaaaattcaaaacggggaaaatgaaagctacactatcactttttcgtaacatcctaatttwtctgtcttttttgagtaacaatatcattgcagttgttttatgtgttaaattatccaacgaaagaaggcagtaatgtgtacatttgtctatattttccctc

SEQ ID NO: 160621 - DNA, 201 bp, Homo sapiens
gggaggctttgttcccatctttaactaatattcatcacaaataaagcaaacagatctgaccagtgtccatgtgtaatggctggctgtatatttcatatacrtattcaggagctattttcttgagtataaagttctttccttatagcacaaagcaaggagatgatgttggcaagtgctataatagctacacatgtttatagt

SEQ ID NO: 160622 - DNA, 201 bp, Homo sapiens
ccactccaataaagccattaacaagctcactagtaatcttttgccaattccagttaaccctttttagttatctttcttgacctttgctgcatttgacaccrtaaactagggatcaccacactttttctgtaaaggaccaggcagtgtaaatattttaggctttgtgggcccatatgttatctgttgcaactactcaaactc

SEQ ID NO: 160623 - DNA, 201 bp, Homo sapiens
actctcgctttgctccagggcatcgttttggagctcctgaaggaggccatggtggccagcctcggggacaccaggggcttcctgattgacggctatcctcrggaggtgaagcaaggggaagagttcggacgcagggtgagtggttgttacgggcatccttccagaagaaaaataggggacatccttgaggttgggtgataa

SEQ ID NO: 160624 - DNA, 201 bp, Homo sapiens
tgttaaacaaatactgacttgagaacttaaaagaaattcatatttatagagatatctcttcagactagttttgaaacatttttcatatacagttttctcgkttttttttaataacctttttagatagataggggaagtattgtcctcatgttaaaggtgatgagtgaagcccagaaagggttaatgacttccccatggcca

SEQ ID NO: 160625 - DNA, 201 bp, Homo sapiens
tgtgaccaaacaccacctgttccccgaaaacctattgaaataaaaataagaagactggaaaaaatgtaatggaaattaaatcataataataattatagctrctattgataaagggtatcagagactttatgcacaagggctaggtcttctatgcccattatgaaagagacagaaaaaaacaagttttatagtcaggtccta

SEQ ID NO: 160626 - DNA, 201 bp, Homo sapiens
ggataggtaattccacagttgtactgctccacttcatattctgtgaaatgatagccctactttaaaattgtaagagaagagacaaaacataggaaacttcmgttatctcaaattttcctctgttacttgtagttgttcaaaatggcattctctgcagctaaggacttttccctctccctgcagtcctgatcaacctcatca

SEQ ID NO: 160627 - DNA, 201 bp, Homo sapiens
atggcagaggcccctgacgcttttctataatcacatcttccatgaacttagagaatgagaactcagtcattaccacgaggatagcaccaagctgttcatgwgcaatctgcccccatgacccaaacacctccaactggccccacttccaacactggcggtcacatttcaacatgggatttggagggaacaaattccaaacca

SEQ ID NO: 160628 - DNA, 201 bp, Homo sapiens
agattgcacatgctgaaaacactctaagtactactgaaataatagttccagtaatcattttctaaaattgtttaatgtgtgaggtgttttgctgttttttwaaaaaaaaaaaacaggtataaggaaagtgcaaaaaaattcattttcaggtaaaaagatgaggaaatagcctgatctatttttgattgttctttttagtgt

SEQ ID NO: 160629 - DNA, 201 bp, Homo sapiens
tggtggctaatgggttgagtcttctcaagtgatgcctcattgaagaggaagctccaaggcgactgagcataaacacctgatcagacgtctcctgaataagsctacagcctttggttccttgtccaagtgacattctgaaattaatgcctttcatgcagaacacacccaacatttgaaaagtaacaagatttagtgcttaca

SEQ ID NO: 160630 - DNA, 201 bp, Homo sapiens
tgtcctaatgatatcctgttttttcccccttgcttttagacagaagggctgtgtcaacacttactggagtagaatggctgcctttgtcttactataatgaycatatgccacctggtaagatggaaagtgtcagtcatcccaagttcaaatcttagctcttctgcatgcacatgaggaaattgcctgatgctgaggaaaaaa

SEQ ID NO: 160631 - DNA, 201 bp, Homo sapiens
gcattattagggagccctctgaggagaagcaggatagggcaggggtaagagctaagcaaagatgtggtcctggctccatcctaacttcagcctgagaccayggtgagctctggggctcagcttgcaccatggattcatcccagcttgaggcagggagccagactgtagtgggcccttagcagcagttcggtggctgggtgc

SEQ ID NO: 160632 - DNA, 201 bp, Homo sapiens
tgtctaaccattgtccatccaggcttagggcaccgacgagcatggaagggaggctgacagggggcttagggctgctcagctgaggcctacaggtccccctygacatgaacagcctgggcactgtggacagcgggttgatggcagtaggaaaaagacatgcccttgggtggaaaggggcgggtcctggtgaagccccacctt

SEQ ID NO: 160633 - DNA, 201 bp, Homo sapiens
ggctaattgattctgtaagaagaaagacaagttccacttttaaacctcataaattcatatggataaattttcaccattcttgactaaaaagtcagaaatgyccttcatagcttcagtataaatattaaacagtgtcagtatatcacttaggttgccaattctgagcaaggaattcaatagatttccactctgaagacataa

SEQ ID NO: 160634 - DNA, 201 bp, Homo sapiens
tctagtaaaagagatttcagcttgctgtttgggccatagaaggtacaaagccactgtgatacaagggaaaacgactgctcttcttctactgtacatactgractctgagaattaaggccttagttctaaatatgtccttgacaggtggcagaatggtattttgggactgctttattgtaagtcaatttaaccttatgaaaa

SEQ ID NO: 160635 - DNA, 201 bp, Homo sapiens
ttttgtccacagaaaggtccagacttcttagactggccttctggtctttcccatttcccgccacactcccatgtcaatctttggctccagccacacctgcrtccttattatcgcttgagcttgtcgcactttgccagccctttcacttgaaatgtcttctcccctattaatcatgccccaaggtcagggttaagttctagc

SEQ ID NO: 160636 - DNA, 201 bp, Homo sapiens
gacttcttagactggccttctggtctttcccatttcccgccacactcccatgtcaatctttggctccagccacacctgcatccttattatcgcttgagctkgtcgcactttgccagccctttcacttgaaatgtcttctcccctattaatcatgccccaaggtcagggttaagttctagctccctgagaactccgctgtaa

SEQ ID NO: 160637 - DNA, 201 bp, Homo sapiens
attcttatgtaacattggcattttctttcttttctctgttttttactgtgagtacatggtaatgaagcacacaactagtacagcaggactaataacactgytgccgtgcaccacaggtttacaaccattgcttctgcaccacctccgaaatgctaataacctcttagtgttataatgaatataggggacctctaatgtctg

SEQ ID NO: 160638 - DNA, 201 bp, Homo sapiens
ctgttcttcctatttctgtgaatgataccaccattctccagctgcccaagccagacacaagggcgtcttcctagcctccttcctttctctctcttcctacrtcagtttgatcaagaagctactcagttctcctgtgcaggaattgcttctcccactccactgcccatgctttggttcacaccctcagccttcctccctggg

SEQ ID NO: 160639 - DNA, 201 bp, Homo sapiens
ggtaatgaagcacacaactagtacagcaggactaataacactgctgccgtgcaccacaggtttacaaccattgcttctgcaccacctccgaaatgctaatracctcttagtgttataatgaatataggggacctctaatgtctgtggaccacactttgagaaccaccaccatggggttacttgggggttggggtgggtgtg

SEQ ID NO: 160640 - DNA, 201 bp, Homo sapiens
agctctaccacgctaacgctaatcaaaagaaagcaggagttgctatattaatttcagacagagcagaatttagaggaaggaaagttatcagagattttttraagcattacataatgataaagaggttaattctccaagaggacataataattcttaatgtgtatgtgcctaacaactaagcatcaaaacacgtaaggcaaa

SEQ ID NO: 160641 - DNA, 201 bp, Homo sapiens
ctgaactttgaactggactatcaaggttatcagaaatcactggattggactaagaaaacccagactggatttgattgtgtttccactctgaagtgaaatcrggcagctcatgagctaggggcaggtgtgatggttaattttaggtgtcaacttgactgggttaagggatacacagctagctggtagagcattatttctggc

SEQ ID NO: 160642 - DNA, 201 bp, Homo sapiens
gtgggaggctgcagtggtccaaacaagagttgatggtgacactggagtaaaaaaggggacagagagaaagaggtgtatttgagaagaacttgtgacgaaartcaacaggacttcatgttggaatggatatgggagccaacagggggtgagctgttgaagatgacttctgggttttcaactggtacagctgggtagacagtg

SEQ ID NO: 160643 - DNA, 201 bp, Homo sapiens
tgtgatggttaattttaggtgtcaacttgactgggttaagggatacacagctagctggtagagcattatttctggctgtgtctgtgaaagtatttccagamgagattggcatttgaatcagtggactgagtaaggaagatccaccctcaccagtgtgggtgggcaccatccaatctgttctggctcagctagaacaaaaag

SEQ ID NO: 160644 - DNA, 201 bp, Homo sapiens
atggatatgggagccaacagggggtgagctgttgaagatgacttctgggttttcaactggtacagctgggtagacagtggtggcattcactgagaaaagamgagttctgtaaagatagggcatgagtgtaattttagacatgctgagttcaaagtgccttaacatatccaagtagaaaatttcagtgagcaattaaatata

SEQ ID NO: 160645 - DNA, 201 bp, Homo sapiens
tacaaaccttttcactgcaaaagggttccaagtaatgttgaactagaatgcaatgcattcttcatttaatcaaagcaaattaataagcctttatcaagggyttattatggtcaaagaaccgtgaaattcaaaaagacataaaacagtccttgcaacactgcatgacatggcaggaatttaggactcatctagaagggcaaa

SEQ ID NO: 160646 - DNA, 201 bp, Homo sapiens
gagatttcagggtttcaagagagtagaagcctgaactgttgtgaaatctagcaggcaatgtgctaaggaaacacaacaggattaccaagcatttcatttgrtattagtgaattgagagcccatttgacattagtgactagaaatttattttgacgaatcaatcattttcatttttttcattcctttagcaaatgtttattg

SEQ ID NO: 160647 - DNA, 201 bp, Homo sapiens
aatatcctgacctcgtgatctgcctgcctcggcctcctgaaatgctgggattacaggtgtgagccaccgcacccggcccccatatgcagtatcttatttartcctcacaccagtcatcagcactcatattcttccccattttacagggaagaaatggaagaaatcaaggctcaaaaaggttaaataactttcccaaggtta

SEQ ID NO: 160648 - DNA, 201 bp, Homo sapiens
aaggaaaccaaaatgtaggtgaagttgtgggaatatagtgggtgagagacgtttgccataattatttgaataagtactgcaattttctgttttactttgckcctatgtatctagccattggtgtctgaaaacaaaggtcaaatacgatagcaagtgaatattaatgacaaagacctctgtctaccccagccatgtttctct

SEQ ID NO: 160649 - DNA, 201 bp, Homo sapiens
gatcttggaacattcatatcaataacatactcataaatgtaactgaaaaaagatctagcatcacttatcgtttgacaatgcttcccatacaatttactaartaaacctaatcatttaatatctctataagttgagagatacagtctttgaggctctccagggcccaactggaaaaatcacaaaattagttttaggtcagaa

SEQ ID NO: 160650 - DNA, 201 bp, Homo sapiens
gtttacttatcaaacatttacccaagtcaggtgaacttaaaaactttgaggtggctattatgtttttgataacatacttgattgaagtgcttaatttttcyctttaattaattaattaattagctctttgatatattttggtagaaaaatacatacatgcaacataaaaacatacagacaacatgaatacatcgaagcaga

SEQ ID NO: 160651 - DNA, 201 bp, Homo sapiens
aaactttgaggtggctattatgtttttgataacatacttgattgaagtgcttaatttttccctttaattaattaattaattagctctttgatatattttgrtagaaaaatacatacatgcaacataaaaacatacagacaacatgaatacatcgaagcagattctttagctttcattttgaaatgttaatcatgagacagc

SEQ ID NO: 160652 - DNA, 201 bp, Homo sapiens
tctcattgcatttcagttcagtccttttatgccaattgaggtaatgcttttttttttttttttttaagaaccaagagaaggaagcccaaaggtcaggtttagtaataccccttccaaatatgttttatattcctgggtctctttttctataagtacgactttgttttaaagaaagagtatatagtagaaaaacttaaaagt

SEQ ID NO: 160653 - DNA, 201 bp, Homo sapiens
ataaatacataaagacataaaagcaaaactacatgctatggaaaatttgaaaaaaaatacaaaaagtataaagaagaaaattaacattgacattatgaagyatttccttgattgatagacatttaataatgttataatcagattttgcatttaataatatagaatttcccatgtcatcaaataatttttgtaaacacattt

SEQ ID NO: 160654 - DNA, 201 bp, Homo sapiens
gaaagtttaatttcaaaagataaatagtgctgtgtattataagatatgatttttcctctattctgaaacttatgcttaaaaatctgaatacagacatcacratcacttgatatatacttgataatgtttattttttcgtttttttaccaaagctttatttagagttcatatgttcatgacaaatgaattctagcagaagcc

SEQ ID NO: 160655 - DNA, 201 bp, Homo sapiens
agggaaggagtagggaataaaataaattttatctaaaccattctaatttcttgttgctctctccctgctcaacaaccccactgaggaatttaatttagctyagtataaaataatctacaaatatattcattcatcaatttctttttaggcaattattctgagatttctagctaatgggggggtactgaaagatgtatgaaa

SEQ ID NO: 160656 - DNA, 201 bp, Homo sapiens
cctgggtttgggcaatgttatactttgtttcatcttgaaggaaatatagcaaattattaactctggtgttctgtaggtcagcagtccccaacctctttggsacaagggaccagttttgtggaaaacaatttttccatggggttgggggattgtttcaggatgaaactgttccacctcagatggtcaggcattagttagatt

SEQ ID NO: 160657 - DNA, 201 bp, Homo sapiens
ggagtaaattgcacctgcctttccatgataactctggtgggactggatgaacttgacactctggaacagagattattccatgcattcaagaagaaatgagrcatctgaaatttctaagtggagttacagccattaccaagttcaggattggaaatgggagtaagtggtgggaaagacagaatcaagagataagcagccagg

SEQ ID NO: 160658 - DNA, 201 bp, Homo sapiens
gatcagggtaattgggttttctgtcatttcaaacattaatcatttctttgtgttgggaacattaactatcttccttctagctatttgaaattgtatgataygctattgttaactatagtcatcctatagtagtatgtaactctagaacttattctttctatctagctgtaattttgtagcccttaacaaatctctgtatca

SEQ ID NO: 160659 - DNA, 201 bp, Homo sapiens
atttgctataacaaattaccacaaacttagtgacttaacacaaatttatcatcttatagttctggagactggaagtcctaaagtcaagatgtcaacagaarccaggcatggtgcccagcccctgtggtcccagctactcaagaggctgaggcaagaggatcactggagcctaggagttagaggctgcagtgagatatgatt

SEQ ID NO: 160660 - DNA, 201 bp, Homo sapiens
gtgcatggtacgtggaaagtgttcaataaatatttgttgaatgagttaataaatttacaagagcaaaaaaaggaaataaagtccaacaatagaattgtcarttatatcatggtacattcaaacaatgatatgttaatggacattaagaattagttttcagagacttttaataccatagaaatgtatggaattaaagattat

SEQ ID NO: 160661 - DNA, 201 bp, Homo sapiens
atcgttacctaatatcagttagctagacattagacttcatgaggagagggaccatgtttgttaatctgccattgcacccccagcctgggcacaatacctgrcagatcaggacagatcacgccctcaaagctgaataaagacctcattgatgttaacaagagtccaaagcagaatttgacccaaacctagtgacttagccca

SEQ ID NO: 160662 - DNA, 201 bp, Homo sapiens
actattactctcctgatttttcaagtaagacattagggagttcagttattagatactaagtggtggatctggaggttgaaagcatggatttttgcaaaaawcactgcctgttgtttttgttttttcttgaagtgacaggctttatttattttcaagaaaatttctgccagattctcaagtctgaaaaaaaccacagttcgt

SEQ ID NO: 160663 - DNA, 201 bp, Homo sapiens
aggtagtctttgccactaaatctttaacatctgagaaacccaaagccatgtaaaagaacctggtcgttcttttggttgttttgttgttgttgttgttgttktttttgcattaagcattcctcatgtatgggaaactatgataattcagaatgaaaaacgtgggagaaatacctttaaaatgttatcagctacataaagcct

SEQ ID NO: 160664 - DNA, 201 bp, Homo sapiens
cacacaaacacatatttttagctggttattctccaggagacactctgtgatcagaacaataatgttgacaataatgtcaacaaatattccagacttcagakttaggtcttcatttgaaatgttttactaagacttactgagaacatgtgtaagaaaataatacttttggtaatgtccctagactaaatttttttcatgttt

SEQ ID NO: 160665 - DNA, 201 bp, Homo sapiens
gaggaagccaacaaatagcacagcttggcacacgcaatggcagaggcacaggcaatggggagcaagactgaagtagggatcagagttgagagaggaagtcrgagctgagtccaaaagaagaaaaggaattggccaagtgctaactgggaagaaagtgggggtgagcctaaggcaaggactgagggaatggtgtgtgcagga

SEQ ID NO: 160666 - DNA, 201 bp, Homo sapiens
cactacatgagttcgaatgtcggctcctacatgtacagctgtgtgaccttgggcatcatccttccactcactgttcctcagtttcttcacctgtcatgtgraagtattgattgtatctaggtcatggggttgatgggagagtgaaatgagttagcacatgcagcagggctcctagtgaatacaaacattacctgtcactgt

SEQ ID NO: 160667 - DNA, 201 bp, Homo sapiens
accataggagatcattttttgccttgaagaatgaagcagagtaacaagccagtgattaaggagtcagtgactattttggccctccaaatgtaacactcacraagtatttcctttccaacttgctccaggctcctctgaaccaggagtctgagtgttttcttagctgcaaatgaaaacatatttaaaccaaccttcaggtgg

SEQ ID NO: 160668 - DNA, 201 bp, Homo sapiens
ctcagtggctcacgcctgtaatcccaacacttcgggaggctgaggcggatggatggcttgagcccaggagttccagaccagcctgggcaatatgacgaaamcccatctctacaaaaaaaaaaaaccacacacacacacacacaaaattaaccaggtatagtggcgcacacctataggcccagctactcaggaggctaagag

SEQ ID NO: 160669 - DNA, 201 bp, Homo sapiens
tttgattcttttctttctctttggtgtatctattccaccagtgagttttatactttcatgttttttcgtaatgatgatgatgatctttttgcttccaggtktagggctcccttgagcatttcttgtgaagccagtctagtgctttcaaattttctcagtttttggttgtctgggaaagactttatttctccctcatttctg

SEQ ID NO: 160670 - DNA, 201 bp, Homo sapiens
aggctgtagagtttaatggtaccaggacacagttggcccttggcatggtttcttcatcttgttataggattacaaacagcacctgtttcaaatagctgttktaagaattaaataattacaagtagaacacataaaacagatatttattagataaaatatcaagccaaaagtattgtgacttttatctgagtagtctgcaat

SEQ ID NO: 160671 - DNA, 201 bp, Homo sapiens
taccagcactttgggaggctgaggtgggtggatcacctgaggtcaggagttcgagaccagcctggccaacgtggcaaaaccccgtctctactaaaaatacraaaaacagccaggtgtggtggtgggtgcctgtaatcccagctactcgagaggctgaggcaggagaatcacttgaaccctggtggcggaggttgcagtgaa

SEQ ID NO: 160672 - DNA, 201 bp, Homo sapiens
tcattttttggtgtcttcagtttctttcatcagtgttttatagttttcattacagagattgtttggttaattcctaggtatttaattttatgtgtagctaktgctctagctaggacttctagtactatgttgaataatgatggtgacagtaggcatccttgtcatgtttccaatcttagaggaaaggcttcagtttttccc

SEQ ID NO: 160673 - DNA, 201 bp, Homo sapiens
tggtggttattatttgcattttcctcattattagggatgttgagtaccttttcatgtacctgttggccatttttaatatcatctttggagaaatgtctatycaagtcctttgcccattttgtaatcagcttatatattttcctgctaccagagtgtatgagttctttacaaatcttgaatattaaccacttatctgacata

SEQ ID NO: 160674 - DNA, 201 bp, Homo sapiens
tggtgtctagtgagggcctgcttcctggttcatagcggtcttttctctgtgcactcacatggtgaaagggacagggaatctctggtttctatcttatgagrgcaccaatctcattcatgctttttatttatttgtgtattcattgtatgttttttggtttgaggttaccatgaggcttgcacatactatcttataaccctt

SEQ ID NO: 160675 - DNA, 201 bp, Homo sapiens
gaatgtcggctcctacatgtacagctgtgtgaccttgggcatcatccttccactcactgttcctcagtttcttcacctgtcatgtggaagtattgattgtrtctaggtcatggggttgatgggagagtgaaatgagttagcacatgcagcagggctcctagtgaatacaaacattacctgtcactgtaggtactctatgca

SEQ ID NO: 160676 - DNA, 201 bp, Homo sapiens
tgctggccccaaaggctgttttgtgatcattctgttgttcattcatcaaaatgctttctccaggcacttgtcatttgacaggcatctctatgcagctgtamtctcttcatttctgttttttagaaaagaataaatgggaaaattaattatattggtacattacattgagaagttttaaaagtaatttttgctaggtaatag

SEQ ID NO: 160677 - DNA, 201 bp, Homo sapiens
tgtagaattaactgaaaaagaaccattcggtgaaggttaccaggggtaagaggacaaagaaaccacaatggttggagtctcttcctagaaaagctgagaaycgaggggagtctcaaagaatggatgggattccctaagtttgagagagggctgaggagagagggattgcaagcagggagattccaagttaggagcaaatca

SEQ ID NO: 160678 - DNA, 201 bp, Homo sapiens
tgccatctttcccacactttccttgtgctggcaaaggtgattaattacccttccccttcctaaggagtcccagccagtgcttctgcgatggtgtttacagsccccactcatagaacctatcacactgctgtgatgatggttcccctgtccatcctccccactagattgtgacctctctgatggaaaagacccagttctggg

SEQ ID NO: 160679 - DNA, 201 bp, Homo sapiens
ccagctactcaggaggctgaggcaggagaatcgcttgaacccaggaggcggatgttgcagtgagccaaaatcgtgccactgtactccagccagggcggtaragcaagactccatctcaaaaaaagaaaaaaaattatttagtgccttgtgtgtgccaggtgtttctatttagattatctcatttcaggtaaagatagggac

SEQ ID NO: 160680 - DNA, 201 bp, Homo sapiens
cactttgggaggccaaggtgggcggattgcctgaggtcaggagttcaagaccagcctagccaacatggtaaaatcctgtctctactaaaaatacaaaaatwaggcaggcatggtgttccatgcctgtaatcccagctactcaggaggctgaggcaggagaatcgcttgaacccaggaggcggatgttgcagtgagccaaaa

SEQ ID NO: 160681 - DNA, 201 bp, Homo sapiens
ctacttgagaggctgaggcaggagaatcacttgaagccaggaggcggaggttgcagtgaggcaagattgcatcaccacactccagcctgggtgacagagcragtctgtctaaaaaaaaaaaaaaaaacaaaaagtcccttaagcaatctggttcattcacatcaccacggatgcaatcagcacagacaaccacagagctga

SEQ ID NO: 160682 - DNA, 201 bp, Homo sapiens
tcccaggaggccttctgtatgatgtagtatcctgttctctctatgaccttatcagctcctgctttcctctttgtttatcccacttctctcactgtcccccyactgttgttagaggccccatgcacaattccacctcagggccttttgctgtttccctctgcttccatgctgtgccctgatagtcacatggcttgcttctta

SEQ ID NO: 160683 - DNA, 201 bp, Homo sapiens
cccataaaccccctctccctccctcattgactggcacctgtatctcattggtcagaagtggagcatgtgtttcccctaccttcaggggaggctgcaaaacrgagtttttagctttacaacctctgatgtagaagaagacaaaggagaaaggagctggaataaatgagtgagccaacctacaataaccaccaaaaggttaaa

SEQ ID NO: 160684 - DNA, 201 bp, Homo sapiens
atcccacagtgctgccttcttccctgtcctaattaggcttgtatattcacttccatgtgattttcatgtgaggagtggtttcgtgtccccagctgcctttyaagaacctatgcagaccttccttcataatgatgctggctagttctcttccaaatgtgtaccaaaaaaattatttctgtgaccccaaatgttgcaaagatc

SEQ ID NO: 160685 - DNA, 201 bp, Homo sapiens
tgactctcaaatttatatttccaagcttgacctcttccttgaactctggagtcctatatgcaactgcccattgacacctccacttggatgtctaataggcrtctcaggtgtaacacatacagactgaccccctgccttctcagcccccaacacatacaaccctatgctactaccagtcttctccatttctgttggtggcac

SEQ ID NO: 160686 - DNA, 201 bp, Homo sapiens
acaaacaaaattacctaccattgtccaacaattcactagaggcttaatgaaattttttattactgactttattattttgcaaaataaattacattagcaarccatacatacattttccttaaaattgcaaacaagatttctccaaataaatgaatagaatacgggtataattgatagttattacatagcagttcagcattt

SEQ ID NO: 160687 - DNA, 201 bp, Homo sapiens
ttggtgttacagagtcaaaggtatcaaagactagaagcaagccaaaaagtaatatgacaaatatgcaatcactgttgaactataaaagagcaatttcagartgtgatgaggtatgagatagtttccaagaggatagggagtcaataaatgaagaagaaatggaaacaggcagttttccgctgctaaaaaaaagaaaaagaa

SEQ ID NO: 160688 - DNA, 201 bp, Homo sapiens
ttggaaccaagccaaatgtccaacaatgatagactggattaagaaaatgtggcacatatacaccatggaatactatgcagccataaaaaatgatgagttcrtgtcctttgtagggatatggatgaagctggagacttttcaaatgtagacttgacagagcttggcaactgatcaggtatgggagatgaggagggagaccct

SEQ ID NO: 160689 - DNA, 201 bp, Homo sapiens
ttaaaaagagctgtgttaattaacttcatgcttaattccaggtaacatcctggagttagtaagatgcaataaaatgtcaacaaaagtcattttaggccagscccagtgactcacacctgtaattccagcacttcgggaggccgaggtgggcggatcacttgaggtcaggagttcgagaccagcctggtcaacgtggtgaaa

SEQ ID NO: 160690 - DNA, 201 bp, Homo sapiens
gggacttgctgcggaataaattctggggtgtaactaaattacacaccatttcccatactttttttctttcaaattgcccattactttaaatgaaaacatgstttagaaaagaactgtaaccactcaaaatttctcaaggaccagtctcccttctccctggtgataaaatgtacttatgtttgtatttttcaacattctcct

SEQ ID NO: 160691 - DNA, 201 bp, Homo sapiens
cttttgggtctcttatccattttgagttgagttttgtatctggtataaaataagagtccaatttcactcttttgcaagtggaaatctagcttccctagcaycatttattgcagagactatcctttccccattgtgtctttttggtgcccttgctgaaaattggttgaccatatatgtttgcaattatttctggactctatt

SEQ ID NO: 160692 - DNA, 201 bp, Homo sapiens
ggtacactaaaaatgagtgagatgacagtaaatgtgacagctcctgtctgtcatcagtcgtcttgccaccagaggacacagcccactcattctgagatgcrgttcctcaaaatatcttttgccgggtaacaaattatcctggagggatatcaaggccccattgtttttttatttaaaagtcataagttaagacctcaaaga

SEQ ID NO: 160693 - DNA, 201 bp, Homo sapiens
aagacctcaaagatatgtcggtggcagtatatgaaaatttatgtttctaccagcagtttttgtgctttcactgcagtgataaaatcactttgtttttcagyttggagccaagggaagaatcaagctattgtgtagattacttaaaattccacagtgcctgcgccatttggccaaagaatgctaaaaatttgcagctgttgc

SEQ ID NO: 160694 - DNA, 201 bp, Homo sapiens
taacccataatctggtatgtcttggagccttaaaagacaggaaactgttgttaatgagaaaccaaataacctcctgggattattgtgtatttacaaaaggrttgggtagtatgcaaaaacctggaaacccagtctaaaagcaaacataggcttataggcttatgcaaacttaaatgtgggtggtaggagagagatgtgatg

SEQ ID NO: 160695 - DNA, 201 bp, Homo sapiens
aggcaatggatttaacttctctgtgcctctgcttcctcgtctgtaaaatgggaataataacagtgcatgcctcttaaggttattttatataaccttgtacrtaatacctaaaatgtttagaataatggctggtacagtaagcgcttgataaaggtcagctattattattattttcagacataaaatcctatgacatactat

SEQ ID NO: 160696 - DNA, 201 bp, Homo sapiens
tgatcaataaggtagttctccaaaatgccagtcacctatgcggccaggctagattaaacggtgccacaacaacatgcattagagcctctcatgcttttccrtggaacaagttcactccacattcagtccttcattcagccaagcatagatagaacaaacaagtttcactgggcctggctgtctgctagtgcttccatgagc

SEQ ID NO: 160697 - DNA, 201 bp, Homo sapiens
cctatcagttatcttcgctgactcttcattatatatttatttgttcatctatggtctgtcttcttcattagaatataaacttcatgaggacttcattcacrattatctagggatagattctaaccacacttgcaatggccgcattccccaagcccctgccaaaagccagagagcccacgaaaagggaattcctccactggc

SEQ ID NO: 160698 - DNA, 201 bp, Homo sapiens
tgactcttgcctctactatatttcttcctcttccaaatctctaggtgaatgggaagttgggaaatcagctcagccctctgggcatcagcttcctcacaaasaagatgaggccagttggtcagccaatcttttaatgggtttatgtatcttcgactttattattagcaacaacggtataagtagttaggaaaggactaattt

SEQ ID NO: 160699 - DNA, 201 bp, Homo sapiens
accacacttgcaatggccgcattccccaagcccctgccaaaagccagagagcccacgaaaagggaattcctccactggcagctgattgcgtttttcctctrccaatttccagactctggtgtatttctcctacttcatttaccatagcacttgctaaatacaaattttcaacaaagaaagtgatgttacttgaaaatgcta

SEQ ID NO: 160700 - DNA, 201 bp, Homo sapiens
taatctgaatgattgttttcccccacaattcacctgttgaaacctaatcaccaatatgaccgtgttgggaagtaaggcctttgggaggtgattaggtcgtkagggcagagccatcatgaagacatgagtgccttataaaagaggccccagcttgccccagcaagctgccttgcccatcccaccatgagaaggaattccacc

SEQ ID NO: 160701 - DNA, 201 bp, Homo sapiens
cctcaatataagttttgagatttaatagtgagggcacagccagaaggcatcatctatgaacaaaaaaacaggccctcaccagacactgaatctgccagagmcttgaacttctacttcccagcatccagaacggtgagctataaatttccattgcttgtaactcacctagtctatgatgttttattatagcagcccaaacag

SEQ ID NO: 160702 - DNA, 201 bp, Homo sapiens
agccagaaggcatcatctatgaacaaaaaaacaggccctcaccagacactgaatctgccagagccttgaacttctacttcccagcatccagaacggtgagstataaatttccattgcttgtaactcacctagtctatgatgttttattatagcagcccaaacagatgaaggcaaaaactactgctctgtacccaatagtca

SEQ ID NO: 160703 - DNA, 201 bp, Homo sapiens
tgaacaaaaaaacaggccctcaccagacactgaatctgccagagccttgaacttctacttcccagcatccagaacggtgagctataaatttccattgcttrtaactcacctagtctatgatgttttattatagcagcccaaacagatgaaggcaaaaactactgctctgtacccaatagtcattaccctagctgcacatta

SEQ ID NO: 160704 - DNA, 201 bp, Homo sapiens
ttatctgaattatggagtctagaccttctaacacttcttcataaagaatagggcagtcaaaagtactgacagttaagaacaaggagcattaaaatgagctmactttgcagtctgacacaatgaatatgtctttgcttatacaaaggcagtcacaggttcttttaacagaacagtcattcaagtaaaggctttaaaaatgga

SEQ ID NO: 160705 - DNA, 201 bp, Homo sapiens
acactatctattgctttattctttttcctcaagattggcttgaagatcaccttggttattcttgatcttctgcatttccaaataaatttgaatcagctttycaatttctgtatccctccccagaaaacctgttggaatttagggattacatttaatctacagatcaatttgggaaaaaatgacatattttatgatattaag

SEQ ID NO: 160706 - DNA, 201 bp, Homo sapiens
actactatctctttcttacctatctccttcttgctcagtcctacaaatcgaacgtaaaactgaggcttcagttctgggacaggcaaagcactgtccttgtytcccttaagtcttacgttccatttccccattatgatagtccttttatagtcattcattcaaaccattttattgagggcctatgtattcatggcacccttt

SEQ ID NO: 160707 - DNA, 201 bp, Homo sapiens
atactacaaatggccaattgttggaccttgtatttttgtttatctatactactatctctttcttacctatctccttcttgctcagtcctacaaatcgaacrtaaaactgaggcttcagttctgggacaggcaaagcactgtccttgtctcccttaagtcttacgttccatttccccattatgatagtccttttatagtcat

SEQ ID NO: 160708 - DNA, 201 bp, Homo sapiens
gagagaaaatgagaattgggatatcatagatgctaaatttaaaatgttccagggagagaaatgtcaactgtccaaagttgcttctctgagaagtcaagcargatgaggacagtaaaagcctgttcatttcaacagctggcaggaagtttgtgagttttatcatctattgcttgtttggtggattgacagagacagaaacca

SEQ ID NO: 160709 - DNA, 201 bp, Homo sapiens
tgccataagggaaagtgcatgcataacttattcgaactttttataaatcctctccctatgtaattcgctagctttacttcacattatttatttggtttcayagtatgtcaaacagctgtcaaatacaatggcagtgttttttcctgccttcatgaagtctaccaggaatataaaatatcagaagttgtccaaagttaaaca

SEQ ID NO: 160710 - DNA, 201 bp, Homo sapiens
gcagtatgcctggtccagccacagcagagagctggcaacaagaattgaggtttgggaacctccgcctatatttcagaggatatatggaaatgcctggatgyccagggagaagtttgctgcaggggcgggctctcatagagaacctctgctagggaagtacaaaagggaaatgtggggtcagagcccctacacagagtccct

SEQ ID NO: 160711 - DNA, 201 bp, Homo sapiens
gtgtctctgggggtttactttgacctccttctgagcctgtttcatttaatttccttagtgtcaaaatacttcaaggtcaattgctcatcttcccctacacytcctacatgaaaccagagtcaaagaaaacatgtctaggtctagttggcatgggtggaccctggacccattctggctgtccctcgactccagagcttccat

SEQ ID NO: 160712 - DNA, 201 bp, Homo sapiens
atttttgttaaagccattcaacaagtctctaggaagttccaaactttcccacattttcctgtcttcttctgagccctccaaactattccaacctctgcctsttacccagttccaaagtcgcttccatattttcaggtatctcttcagcaatgccccactctactggtaccaaattactgtattagtctgttttcacactgc

SEQ ID NO: 160713 - DNA, 201 bp, Homo sapiens
agtcgttattgtcgttagaccatattaaagataaacactccatagatttataaggagaagagccaactcttccctttcttttgtcagagctttttccccctgatactgaatccattactcattgtcagaggctttgaaggcagaagaaccaggttccttctagggactgtttttcaaattggttgatgaaacccttagagg

SEQ ID NO: 160714 - DNA, 201 bp, Homo sapiens
caccatcttgagaactctttttatctgctaaactgaaactctacctactatttattttatttatttttatttttggagacaaggttttgccctgttgcccyggctggagtgcagtggtgcaatcatagctcactgcatcctcaacctcaaggcccaagcaatcctctcacctcagcctcctgagcaactgggactgcacca

SEQ ID NO: 160715 - DNA, 201 bp, Homo sapiens
ataacttttttattatttataaaagcaaaactaagctggtgcagtggttcacacctgtaatcccagcacttttggaggtcgaagcaggagtatcatttgarcccaggagttcaagaccagcctgggcaacatagtgagccctcatctctaaaaaactttttttaattagccaggcatgatggtatgtgcctgtagccctag

SEQ ID NO: 160716 - DNA, 201 bp, Homo sapiens
tatctgctaaactgaaactctacctactatttattttatttatttttatttttggagacaaggttttgccctgttgccccggctggagtgcagtggtgcawtcatagctcactgcatcctcaacctcaaggcccaagcaatcctctcacctcagcctcctgagcaactgggactgcaccaccacacccagctaaacttttt

SEQ ID NO: 160717 - DNA, 201 bp, Homo sapiens
attgcagaacgcctgtttttcctttcatcttttcactgttataaataatgctgccctggcacatcatggcacataaacttttcctaaatctctgaatattrctctaggagtaaataaggaccaaagcgtataacggatagcattttcaaaccctctgaatctcaatttgcacatgtaagtacttgggtacataggagctgc

SEQ ID NO: 160718 - DNA, 201 bp, Homo sapiens
gtaatacagtaatatttgctgaggtagtgagtgaatatgtgaattaacatatgattgaggccagctgcgattgctcatgcctgtaatcccagcattttggraggccgaggcgggtggatcacttgaggtcaggagtcgagaccagcctggccaacatggtgaaaccctgcctctgctaaaaatacaaaaattagccaggca

SEQ ID NO: 160719 - DNA, 201 bp, Homo sapiens
tcagattattttgcatacggatatctagttttcccaatgccatttgttggaagaatattttctcctacagaatgatcttgacatttatgttagtccgttcrcattgctatgaggaatacctgaggctgggtaatttataaagaaaagaggttattttggctcatggttctgcagcctgtacaggaagcatggcattgacat

SEQ ID NO: 160720 - DNA, 201 bp, Homo sapiens
ttttgcatacggatatctagttttcccaatgccatttgttggaagaatattttctcctacagaatgatcttgacatttatgttagtccgttcgcattgctrtgaggaatacctgaggctgggtaatttataaagaaaagaggttattttggctcatggttctgcagcctgtacaggaagcatggcattgacatctgcttct

SEQ ID NO: 160721 - DNA, 201 bp, Homo sapiens
catgggaagacccacccccaggattcaattatctcccaccaggtcccaccatatgggaattatgggagctacaagatgagatttgagtggggacacagagmcaaaccacatcataaagtaacatattcacagcttctggggattaatacatgaacttctctgggaaggggagtggcattatttagcttaccacaggcaggg

SEQ ID NO: 160722 - DNA, 201 bp, Homo sapiens
gaaaggcttcacattagaggaaacaccccctcacacatacatactcctttcttctcagtgcagaagaagacagacagtggctgcagtgggtggcatatackcgtctgcatcacgtgaggtggcctaaaagctgagggcaagagacagctctgaggcagtgtgtagaagggaactgacctggaaggggggagctatggagtc

SEQ ID NO: 160723 - DNA, 201 bp, Homo sapiens
aaccatactagcatcctcatgaaaaatcatttgaccatatatatgtgagagtttatttttggactgtctattctattggtctatatatctgtctttatgcytgtaccacattcttttgattactgtagcttagtaataagttttgaaatcaggaagtgtgagacctccagctttgttgttctttttggtgattgttttggc

SEQ ID NO: 160724 - DNA, 201 bp, Homo sapiens
tctcattttcagcctctggattccctcagaggtcctgggacctggggcctttgtcttccacatgtatcctatgtggaaaatgtccacatcacacttccacrcttttctccgaaggactcagacatcttatttttaaatagatctaaatttattgctgtcttccttaaaacccttttaatggcttctcactgcccttaagat

SEQ ID NO: 160725 - DNA, 201 bp, Homo sapiens
ttttctttatagaaagataaatagtagtctttagaaaaacatttctgactttatgctttctaaaaagatttcctattttttcacaagctcttatcctactsgaaattcatacacaggagagccaatggtgtatattatacacaccataaacttttagcattacaacttccacacaagaaagtgatcaagccaaggaaccct

SEQ ID NO: 160726 - DNA, 201 bp, Homo sapiens
tataatccttattcttctttggggaattttaaaattgagtctgaaggcaaaccccagaacttaacgcctatggggttccacatcattttgagcaatgacarccctggaccttcccaaggtggaatcattaaaagcatgtcactcgtgtactctggagtcagaaaatctaggttttcacctgtcatttattatggagataat

SEQ ID NO: 160727 - DNA, 201 bp, Homo sapiens
tgcataaaagtaggaaaaatacaataatttgggtattttctgggcttcctaagcctcaatttcaaaattataatcaataaatatggtggtactgttccctrtactttaaaacaataaaaccgagtttgttgaaaataccattgagatagctaagaagacaattattactgataacttgaaccctgctttactggagaaaat

SEQ ID NO: 160728 - DNA, 201 bp, Homo sapiens
atgaggtgttctatgacatcagcatggcagttgacaacaagttatttccaaacaaagaggctgcagcaggtaagtcactgtgtcctttagacaacagtacrccgtgatcacctgccaaatgtctggggctttgtattaatggttgaagttcaacaaactgctgcaagttttgaaggatgacaaagtcttatactttctggt

SEQ ID NO: 160729 - DNA, 201 bp, Homo sapiens
tcattgacagaaccagtgtttctgtttataagtgtattctaatcttcagaatgagctcttaacacacacacacgtgcacatatgcacacatacacaaagtytgagtctggccaagggaatgtccagttggtgtgttctagttgtttagaattgtggggagccctggaggccacataggatttttcacttgagatgtttctg

SEQ ID NO: 160730 - DNA, 201 bp, Homo sapiens
actatgtgagtgtcttggttaagattctttaggttgtaagacacaaaaacctgtttagctttaaaaaaaaaaaaggtaaatttattgtaaacctatggagwcctctcaaaaatccaagaaagaatgcatctgaaccctaggaacagtgtggaactgggtgtggaaaggtcattaagaatttccctccgttgtgtgtctgtt

SEQ ID NO: 160731 - DNA, 201 bp, Homo sapiens
ctccgttgtgtgtctgtttccctctatttttcccttattataggcctgtttcttcccttagttacatagtaaaagcatctaccaactggtacagcccccakcagggaggccagtctctttcagtctgaattcctagagaaggatgctcattgtccaagcttggttcaggtacactcctcatccaatcacctgtggtcaggc

SEQ ID NO: 160732 - DNA, 201 bp, Homo sapiens
gcagattgaatgccaggttccacacaggaagaggaggggccaggctccttcctgctgcaaagggtgccaacttccccgaggctccaccccagtgcgcaggycggttggagtttttccggagacctcctcccacctggctgtttcagtacgatgtgatgtgcacagttacagagatgtaacatgctcagtgaacacattgga

SEQ ID NO: 160733 - DNA, 201 bp, Homo sapiens
taagagttaactctcatgcttgcttttctgtcctgagcctctttcatttctgcttttggcagttttcttttttctataccacattatatatgatggacttycagaagtagaaaagagcaggccggtttccttggctcttccatctatttgtgtttggtacttggttgaatgtgtgcttttccagatgatgtcaccatgtct

SEQ ID NO: 160734 - DNA, 201 bp, Homo sapiens
aagtttcttataatataaagaagaggttaaaacacactttcatgggtcccatttccagagattctggttcaataaagcagaatggagcccataaatttgcwttttttaaatggggtgtttctgtgttgcccaggctggtctcaaactcctgggctgaactgatcattccacctcatcctcctgagtagctggaattacagg

SEQ ID NO: 160735 - DNA, 201 bp, Homo sapiens
acttttaaataccctacaacttcactgaggtcccatcttgaccactcatttctgtgtagaaagtttcttataatataaagaagaggttaaaacacactttmatgggtcccatttccagagattctggttcaataaagcagaatggagcccataaatttgcattttttaaatggggtgtttctgtgttgcccaggctggtct

SEQ ID NO: 160736 - DNA, 201 bp, Homo sapiens
actcctccatccattaataacttaatagccttatgaatttctttggagacagtctttgtgtttgagtggtaagaaataaatgtggataagtgtgaaatagractatattaagcatgaatcttcttttgaagtgttagcttctttcagctacgtaaatcaaagtaacttattcctaaaaaaaagataccagtttgcctttgg

SEQ ID NO: 160737 - DNA, 201 bp, Homo sapiens
tgaactaccaaatattctaataaatatcattctttagtcagtgtgtgtttatgtatgtgtatgtgtgtgcatacatacacgtgtgtgtagatagatataayacacacacagagaaagaaatagaggagagaaatatttggaaagggtttccagttcagattagtttctgtccaaatcactcatacatttccaaaaataagg

SEQ ID NO: 160738 - DNA, 201 bp, Homo sapiens
agcctccataattgctgttttcctattacatccagcccatccctgactccctgacaatactatgaggggtctgacctcctccccatttggcttagagcagytgtatagatgagcagaagatagaaaactcagacctttcctggattttctggcaaggcaaagaagggggaaggaggggcccttctattagaaagggtcaac

SEQ ID NO: 160739 - DNA, 201 bp, Homo sapiens
ttttgtattttaatcttttttactcccagtcatatgttatttatctatttatccaggcttaaaaacagtggaaatttacttctcacagttctggaggctargaagtgcaagatcaaggcactggcatatttggtgtctagtgagggcctgcttcctggttcatagcggtcttttctctgtgcactcacatggtgaaaggga

SEQ ID NO: 160740 - DNA, 201 bp, Homo sapiens
gattatttataaggattggtttaaattaaaaccagtgtttttactgaggaaaaaaaatcttgaactaaaacaaaaaaaaaagaagaagaaaaggaaaagamtaaaagaattacaggcggtgcatggtggctcacacctgtaatcccagcactttgagaggctgaggcgggcggatcacgaggtcaggagatcgagaccatc

SEQ ID NO: 160741 - DNA, 201 bp, Homo sapiens
atctgcttcaggcctgtcactcactagtccctagtgaccttgggaaggttaacctctgagggcctccatttcctcatccttaaagtgggaataatcatacytcccggcaagagcgccagagggcttatgggatggctgtttgtaaagcccttagcacagtgaagcatagccagctgctgaaatgttgctgatggcatctca

SEQ ID NO: 160742 - DNA, 201 bp, Homo sapiens
ttagggttgtgtattcaggaatgctggaatgacccagatattcctcctctagtgaggttcccccaaggggacatacctcaaggtgagagcaaatgagaaayaggcatgccactttcttttcagccagggccctttcctgccagcacagggagactctggtaaacatgctgtagcatgcgacttaggctaaaagcctgagtg

SEQ ID NO: 160743 - DNA, 201 bp, Homo sapiens
ggaagtctatagcaaatctataaacacacacgaacactcaaattgatcatgattaacaatatattcaactatctggtcccaactaattttccagttttatrtacctgtctacacgttcgacatgctgtaccacttcctgtttttcacagtgatctgctcctgctctttcctcagtgctatttatataattctataacttgc

SEQ ID NO: 160744 - DNA, 201 bp, Homo sapiens
gtcagtcatgggtctctacagagctgttatcatggaagaaaggaaaacaggttttgatagacaactaggagtctaccacaagccgcttgcagtgcatagcrccatttttccttacttctcagcccaagagctggactctcccagtccccaggcctgtcattttaaaagaagaggaggagataagactgtacttatctgcca

SEQ ID NO: 160745 - DNA, 201 bp, Homo sapiens
cacatgtatacatatgtaacaaacctgcatgttgtgcacatgtaccctaaaacttaaagtataataaaaaaaaaattctgattccaagaactgttactgayaggtctatctacaaatactctagttaaggtctgtgctatttctatgggactgtcttcaacaatagcttgtctttttaatttttttaaagcaaaagaaaac

SEQ ID NO: 160746 - DNA, 201 bp, Homo sapiens
ataaatgtttatggattggagtggaaaaatgagtgattcttccttaatgtttcttatatgtaggatgtgcaagaaaaatttgagaacaagatgcactaaakatatattatcaaattatggctggactttaggtgttacttaatgcctcaaatattggctgatgatatgtttaaattattttttcattaccaatatgaaaga

SEQ ID NO: 160747 - DNA, 201 bp, Homo sapiens
gaatagtgagctagtttaacctgttaaaggtacatattaaacaattaataaatgtttatggattggagtggaaaaatgagtgattcttccttaatgtttcytatatgtaggatgtgcaagaaaaatttgagaacaagatgcactaaagatatattatcaaattatggctggactttaggtgttacttaatgcctcaaatat

SEQ ID NO: 160748 - DNA, 201 bp, Homo sapiens
accctgtgctggtctccattttgggactatattccaatatagtgaaacttccatacaattccactgtattgaaataatattttatgtgtctgcttctacartggattgggagaaccttgtggggagggactatatcttgcccattttgcatctctttcatctagtgtggtagttggctcatagcaaatgcttagtaaatgt

SEQ ID NO: 160749 - DNA, 201 bp, Homo sapiens
tatcttgtcagtacttctttcagcaatatgaagttaaaaccaggtactgttagtgctcacctggttttcagttttcatgaaggtgttttttctatatagayagtcgtcaacttggtgtctttacaagagggacgatggtggagctgtctattctgacatcttgctctgcctcaggtgatgctcaatttcttaagtcccaga

SEQ ID NO: 160750 - DNA, 201 bp, Homo sapiens
ccaggaaaggcagaggctgaaaaaaggttaaaatcaggattatttattgttcaccaataccaggtttcctgggaagtggtcaaggaatgtgggaagggctrcactgctatttagcaaggctgtatagaccaatgtttccctaattttagtacttactagaccagaaaaaatattttttaagtaggggtgagatgacttttt

SEQ ID NO: 160751 - DNA, 201 bp, Homo sapiens
ctacactgctatttagcaaggctgtatagaccaatgtttccctaattttagtacttactagaccagaaaaaatattttttaagtaggggtgagatgacttyttaattttacgaagtgaaggcattagaaaaaaactcccaatacttgccttatttttctaattttgctgtggattgggaaacactcatcacaaaccagcat

SEQ ID NO: 160752 - DNA, 201 bp, Homo sapiens
tcccatgcaactgaaaatccatgtataactttgagtccccccaaacagaactactactaatagcctactgtcaaccagagccttatcaataacataaacakctgattaacacatattttgtatgttatatgtattatatactgattcttaccataaagtaagatagagaaaagaaaatattattaagaaagtcacaaggaa

SEQ ID NO: 160753 - DNA, 201 bp, Homo sapiens
agagttctgaaaatttttatttagtacataatttttatttattttattatctaataactttgatcttaaagttattagaaacttatatttaagactacttyttagagtcttttccatgaatctgattgagtatgtctttagaaaagaactcaaaccagtaaccgtggatgacaaaaagatagaaaacaaccgtggcttaaa

SEQ ID NO: 160754 - DNA, 201 bp, Homo sapiens
cttagatgaaatgctctgtaaatatctattagatacatttggtccataggtgcagattaagtatgaagtttctttgttgattttctgtctggaagatcttkccaatgctgaaagtgaggtgttgaagtctccaatgcttcttctgtgttctccctcccctggcacccagagaggctctcagaactacaccgccacttccag

SEQ ID NO: 160755 - DNA, 201 bp, Homo sapiens
gaagccatctggtcccaggctttttcttaactgggagattttttattgcagttttgatcttgttacttgttactggtctgttcaggtttgggatttcttcytgataagtggcatgcatctcagaatttgttcatttcttctagatttcccaatttattggcgtatagctgctcatatcagccactaatgatccttgaattt

SEQ ID NO: 160756 - DNA, 201 bp, Homo sapiens
ggtgatccgcccacctcggcctcccaaagtgttgggattacaggcataagccaatgcacctgaccaccactttttaaatacaaaatgcaactattatattkctggtagtagtagaataaaatctcactaatgactgatagaaaggtaatttgattatatcatcagggtttctcacagacccatttttgcctgccaggacac

SEQ ID NO: 160757 - DNA, 201 bp, Homo sapiens
aaagcaacaggatatactctagggttagaaaacatatgaaggactgatcagtagagactgttttcttttaaaaaaaaccctgttattcttgtcagacaggwattataattaatttcgtggcttctctaacatcttattaaccagatgaccttgaatgccaagtaattctgaaggcaagatgaaatcatttgtgataacaca

SEQ ID NO: 160758 - DNA, 201 bp, Homo sapiens
ggtagatgatggtaatgcagagagcgtgttttaagatgctccatgcagccgctttgcctgattcagattccagctgcaccacctaccacctgtgtgacttyctgcaggttacttatctgctctgcaactcgtatgccttacctgtaaaataggtataataatcaatcctacctcagtgtgattatgaggagtaaatggatg

SEQ ID NO: 160759 - DNA, 201 bp, Homo sapiens
ttttttgaggatttttgcatcagtattcatcagagacattggctcttagttttcttttttttgatacgtctttctctggttttggtatcaaggtaatactrgcttcataaaatgactttggaattatttcctcctcctctattttttggaatggtttgaatatgattggtagtagttcttctttaaatgtttggtagaatt

SEQ ID NO: 160760 - DNA, 201 bp, Homo sapiens
caatgtgccaatgaaagatgacactgaatcattagtttgtacagtttttagaatctagaacattagaggtgaaggttcagctaaatttatgataatcacarcatcagattccagcattaaagcgtagaggagacaaagaggataatgggtcatctgaagaaagcactttatgcaagaggacactaaaaccacagcagctgc

SEQ ID NO: 160761 - DNA, 201 bp, Homo sapiens
ttcaatttgctagggttttttttttgtttttttttttttttttgaggatttttgcatcagtattcatcagagacattggctcttagttttcttttttttgrtacgtctttctctggttttggtatcaaggtaatactggcttcataaaatgactttggaattatttcctcctcctctattttttggaatggtttgaatatg

SEQ ID NO: 160762 - DNA, 201 bp, Homo sapiens
caaaaggtccccattgattaagcagctgcagaaccctctgcagatcactctgaggatctagaaaagaccaagacaactattggtctgagagtttacagaaygatcccagagataaagccaaaacatgaaaacattaaggaaaaaagtagaggcttaaactctccttttgacacaagtagaattttgtcttaattacttaaa

SEQ ID NO: 160763 - DNA, 201 bp, Homo sapiens
caggccatatttagttcactttaacactagttaattcaataaaagtgtattaagcatctactgaatgcaatgtattaatctaacacattaatctaatctargcatttgggtgctataaaggaagttggagaagtaaacttgtttaaattttaggagttgtttagaactaaaaaccgcagttcattagagaagatttgtggt

SEQ ID NO: 160764 - DNA, 201 bp, Homo sapiens
tggatgaaggtacacatttgagagggagagactgacttttaatctgtgactgtaagcagccttgttgaaaagtctagaatagatcaaaaccagcaattcarctaacttcaacgaatatgtgttattcttatgggccagggatcaaacatgaacaagataaactccctgccttttagaagctatagtttggggaaaacttgc

SEQ ID NO: 160765 - DNA, 201 bp, Homo sapiens
tttaatactttaaaaccgccattatctgtccaagcatatattaattaaatgacctggtcatttaaatatatgtcatttaatgtcacaactcatgagccacyggaaggatcactatggtatcaactaatctttcttcatagcctatacttccttattgtataccaaaaaacccaaaagattataaataattaagactcataa

SEQ ID NO: 160766 - DNA, 201 bp, Homo sapiens
cttaaatgtaaaataacattatttgctctaagtgaaactattttttaaaatattatttcccagatactctacttgtgttttaaccatctgtatataaaggwagcttagcaaatgttttaaatgtgaaataacaccaaactgagatagttaggatgatttaaaagtaatttttaaaaatagctttctttgtgattcatgcta

SEQ ID NO: 160767 - DNA, 201 bp, Homo sapiens
cttgctgagtcacaggtaacattcagatgtaaatagagctgtcacatagacatttgaaaacatagaactgggtactattgaaagtcagtgctgacagtgtrgatttgaactttatcagcaaaaggtagtggttgaaaccaaaacagtggaagggcactgaaagagtgagaacctggagagggaagagtatgatctaagcct

SEQ ID NO: 160768 - DNA, 201 bp, Homo sapiens
ggaatactgacccctgaggtaaagaagagggagccataaactatatatcgacaacaggttgagaccatctccctggtttggacttgccagccctgtcttcyggtccttttgagtatgtcatttgaatttctgactcagagtctttgtactgttcccaccaactgtgttatatttcctgcatttcatcacctgtgcttgtct

SEQ ID NO: 160769 - DNA, 201 bp, Homo sapiens
atgtgattcttgattattggtagaagtgtgataggcagggaggcaggcattgccacccaaacctggttctcccacccacatattgaatgtgctaaacttgrtaggtacaagcagatgaagctacttgatttttttttaattgctttttaaacatgctatgttgaatatctttcttttttgttgaattataactcaggaaga

SEQ ID NO: 160770 - DNA, 201 bp, Homo sapiens
gatttctaccataacggaaagattaaaatgggattttcattatgtgggtagaaataagcatacttcatttttacaagagacactttttaaacaattaaaaygcagattgaaagtaaaggattaaaaaggtataaccaagccaggtgcggtggctcatgcctgtaatctcaccactttgggaggctgaggcaggtgggtcac

SEQ ID NO: 160771 - DNA, 201 bp, Homo sapiens
gggtgctatggcagccattccatgtgattcttgattattggtagaagtgtgataggcagggaggcaggcattgccacccaaacctggttctcccacccacrtattgaatgtgctaaacttgataggtacaagcagatgaagctacttgatttttttttaattgctttttaaacatgctatgttgaatatctttcttttttg

SEQ ID NO: 160772 - DNA, 201 bp, Homo sapiens
cccatgattcaattaccttgcatctggtccctaccttgacacgtggagattttgggaactacaattcaagatgagatttgggtggggactcagccaaaccrtattggaaggatttctaccataacggaaagattaaaatgggattttcattatgtgggtagaaataagcatacttcatttttacaagagacactttttaaa

SEQ ID NO: 160773 - DNA, 201 bp, Homo sapiens
ctttttaagccatcatgtttttttaaaaaaactttctttttaatttaattgatttttatgaaagaagataaattttaaccttggccaaaattctgtagtcstcaagtaaaaaagtgttttaaagtaactgtctgggtgattgtaagcaatatttgtccagtctctccactcttttgtctgtctttggaagcctaacaaaat

SEQ ID NO: 160774 - DNA, 201 bp, Homo sapiens
ggaaggatgcaaatatagaaaaaggtttacatttaaagtagggctcaggtcaaacaaaattagagcccttgtcttctagtcttctccaaagaagaaagaawcctgaactaaaatatcagccccagcactgcacaacatcactagatagtgtaaaatcagagactgtgcctatttcactcactcctgtttggcaggaggagc

SEQ ID NO: 160775 - DNA, 201 bp, Homo sapiens
agaaaaaggtttacatttaaagtagggctcaggtcaaacaaaattagagcccttgtcttctagtcttctccaaagaagaaagaatcctgaactaaaatatyagccccagcactgcacaacatcactagatagtgtaaaatcagagactgtgcctatttcactcactcctgtttggcaggaggagcacagagctcaaagaga

SEQ ID NO: 160776 - DNA, 201 bp, Homo sapiens
aaaatgtgtaccaaaactattagttaaatttagcaaggtcatggaatacaaggtcaatttactaatcaattgtatttctatatattagcagcaaatttttrtgtactatgaaaacagggtgagccgtgtctagcttattatttaactttccatgatgattatttcctaaaatattgactgagaagaataatatctttattt

SEQ ID NO: 160777 - DNA, 201 bp, Homo sapiens
actatcctattaataatagatgactaataacaattgccccacttggaactttgaatcagttaggattttgtttggctgaaagtttttaaaaaaataactgmagttaaacaaggtagaaatttattttatgtaaattttaggtacaagcagtcatagcagtggtatgacatgctatggcctcagagactcaggttccctata

SEQ ID NO: 160778 - DNA, 201 bp, Homo sapiens
aacatgcagctttttctgttgtaaattgcaggttcctcaagagcagagtgctatcttcttgtctctgtgtccccagtccttacactgcctagcgcatgtgkattcctcacattttcttgtggaatgaatgaataaattctacttttattatttccccctaagtcatgtctctttagacacatgcagcccaaatctctccta

SEQ ID NO: 160779 - DNA, 201 bp, Homo sapiens
catgtctctttagacacatgcagcccaaatctctcctaaaacagattggcgagaacatttttaaatttaaggatttcttttctttttacaaaaaataatayatcttcattctagaaaacgtgtatcaacaataacaaaatcacaaacagcccaatacctgggaatgaatactattagtattttgatttatattcctcttag

SEQ ID NO: 160780 - DNA, 201 bp, Homo sapiens
taccagtacagacatagaaaatctaaagaacaatagacatgtctagaacactgtatcaaacaactgaataatgcacagtgattttgagtgtgtatggtacwttcaccaagataaaccatttactaagccattaatacaagtctcggccgggcgtggtggctcactcctataatcccagcattttgggaggctgaggtgggc

SEQ ID NO: 160781 - DNA, 201 bp, Homo sapiens
atgttggaagtccaagatactattctcagatcctactgatttagtctcactgactataagcacattgcattctgtgaagaatgattatgtgtacaagtgtkccccacgttatgagaaaaatgttagagatgctgaatttctaaaatgaataaacagggtaattgtttattctacagaaggtgtattagtccattctcatgc

SEQ ID NO: 160782 - DNA, 201 bp, Homo sapiens
ctccccgctcaagtaaaccccagtgtctgttgtttccttctttgtgttcataagttcttatcgtttagctcccacttacaagtaaggacatgtggtatttrgttttctgttcctgcattagttttgtaaggacaatgacctccagttccatctgtgttcccacagaagacatgacttcattcttttttatggctgcatagt

SEQ ID NO: 160783 - DNA, 201 bp, Homo sapiens
ttatatagaaaagaagtttaagtggctcacagttccacaggctgtacaggaagcatggcagcatctgcttggtgtcaatcatggcggaatcttaaaggggwagatggcacttcacatggctggagcaggaggaagaaagagaggcggggagatgctacacacttgtaaacaactagatcttgtgagaacttactcattata

SEQ ID NO: 160784 - DNA, 201 bp, Homo sapiens
tgcacggctctcaaagcccaaaatattgactatctgaccctttacaataaagcctgctgaccacttagggagacttcttccagttaagaaaaaaacaaacscatttaattttaaaattgcttttactaactgtttaagtgtgaagagtgttttattatggtgttttttccttttcaaagttatcttactcttttgcagtaa

SEQ ID NO: 160785 - DNA, 201 bp, Homo sapiens
ttgcaatttgctgtgatgctacaaaagaccattaaagttaaaaggctgatgagatatttataattgccttatgccaagtggagagtcaatatccaaacttkgtgtaaagataaaattagagtcatctttgattttgccatgtatatcaaggcatggttgctgcataacgaatcaacccaaaaacttactggcttaaaacaa

SEQ ID NO: 160786 - DNA, 201 bp, Homo sapiens
agtaagacgttctttttattactaattcaacaaatatttattggacactgaccatctgccaagcacagttctagatcccagggatacagagctccagaccrtaggtaaggcccctgctctcatgaaacttataatccaataggagaagacaaacaatgaatgaatggataaatgaaaaaactctcagatggtgaagtagat

SEQ ID NO: 160787 - DNA, 201 bp, Homo sapiens
aaaaggctgcccagtggtaacattttgtattttctgcaccaagattcactcaaacataaactattgtatttccttaatttccaggcccaatttccttaatktctttaatagaaaagaccagtttcttgagaaaatgcagagacagttataatttggatatcttaagtaattgccaaaaatataaattcaaattaaactggc

SEQ ID NO: 160788 - DNA, 201 bp, Homo sapiens
gccgcaggtttcgccagtgctcgacaacccacctggagatagcgggtcggggagggagctgcgaggggggcggactcctgttgctcagtcttcagaccgcrgcacagcatcatctgcaccgggacccgggaatggggggacacttggagactgagagagaggaggctcgaggaatgaaccttggtctgttctaagccacaa

SEQ ID NO: 160789 - DNA, 201 bp, Homo sapiens
ctagaattatgtttattttggtaaaaactgtttctttccaaatttggtagatttcctcccaaaaagaggaaaaagcaaaaagcttccagtccgtgctagtwactatatcataagtccttttccagagatagttattaagctgctttcttttttatcttcccgtttttcctttttctgttcatttttatagattgagggtac

SEQ ID NO: 160790 - DNA, 201 bp, Homo sapiens
cattccattgtatgtatatgccacattatttttattcattcacctatcgatagagactggggttgctttcactttctggctattgtgaataatgttgccaygactacatgtgtacaatatctgttcaagttcctgcattagttcttttgggtatatacccacaagtggaattgctagatcatatggtaattctatttttaa

SEQ ID NO: 160791 - DNA, 201 bp, Homo sapiens
tcaaagtattaaaaaaccacataaatttcaagctgtcgctagtgtttcaaaagccaatacctgtagtaaaagacaaaatatagtgatgattgtaattgttktagtaatcccacataggtagaaggctatccatggccttactgtgtcaagcaaagagaagcacttacattaacagactaaaataaacacaaaatgtattaa

SEQ ID NO: 160792 - DNA, 201 bp, Homo sapiens
cacactacagctacagtattataatattctgtggttttttttgtgtgtgtgtacttactattgccagtgagttttctaccttcatatgatttcttattgckcattaactaacttttctttctggttgaagtactccctttagcatttcttgtaggacaggtctggtgttgatgaaatctctcagcttttgtttgtctggga

SEQ ID NO: 160793 - DNA, 201 bp, Homo sapiens
cgccattctcctgcctcagcctcccaagtagctgggactacaggcgcccgccaccacacctggctaattttttgtatttttagtagagatggggtttcacygtgttagccaggatggtcttgatctcctgacctcgtgatctgccctctcagcctcccaaagtgctgggattacaggcttgagccacctcgcctggccaag

SEQ ID NO: 160794 - DNA, 201 bp, Homo sapiens
ctggttcatagcggtcttttctctgtgcactcacatggtgaaagggacagggaatctctggtttctatcttatgagggcaccaatctcattcatgcttttyatttatttgtgtattcattgtatgttttttggtttgaggttaccatgaggcttgcacatactatcttataacccttttttttttttttttgagatggagt

SEQ ID NO: 160795 - DNA, 201 bp, Homo sapiens
tttttttttgacatggagtttcattcttgttgcccaggctggaatgcaatggcacaatctcggctcaccgcagcctctgtctcctgggttcaagcgattcycctgcctcagcctcctgaatagctcagtttacaggcatgcaccaccacgcccaactaattttgtatttttagtagacacggggtttctccatgttggtca

SEQ ID NO: 160796 - DNA, 201 bp, Homo sapiens
cttctcagcccccaacacatacaaccctatgctactaccagtcttctccatttctgttggtggcacctctatccttctataggagtctgagccaaaagctytgtggtctttttcaataagtcctactggttcttccttcagaacatatccagaattccactgcttcccacagcctctaccactaccactcttgtccaagcc

SEQ ID NO: 160797 - DNA, 201 bp, Homo sapiens
ttagaacatctactgtttagaactatatattttcatgtttttcaaattagaaaaatgaagtcagaaagccacaagataaatttcagttagtttttccaaaygtgctccataaattaagaaaatattacacttttttttaaccataagtgactgtacatttattccctaatactcttctctgttcgataggaggtctgggct

SEQ ID NO: 160798 - DNA, 201 bp, Homo sapiens
catatattgagaatttgctatgtgccattgttctgaacccatatatgttaatatattgatgttaatcctcaaaacaatcttatgatatgaattgaagagtygttctaattttatatgtgaggagatggaggctacgttttcaaggaggctggagaatctgctccaagtcacatgtatcaagaggcagaggtggtatttgaa

SEQ ID NO: 160799 - DNA, 201 bp, Homo sapiens
gaccccaaatgttgcaaagatccagacttcttctttctattgtatttatagacactgattgatgttaaactgatctggtttttccaccatttctgtatttwttttctgtttttggtacaagcaaagtatattgtttctacaatagtatttatatttgaatgtatacattttattcctgatttttatcatgttatcacttta

SEQ ID NO: 160800 - DNA, 201 bp, Homo sapiens
aatctacttacctagtttctaactaaattaaatacattaagacctcatacattctgattttgctgactcagaattgcagatctttcggagaaaggtcacgrtgaaacttacttttgactgttcatgataaaagagggttactataaattaatattataataattgattatagaggaaacacaccctatattgcaggacgta

SEQ ID NO: 160801 - DNA, 201 bp, Homo sapiens
cacctgccaaatgtctggggctttgtattaatggttgaagttcaacaaactgctgcaagttttgaaggatgacaaagtcttatactttctggtataaaaayaaaagtataaaacaaagtagagaggaaaggctataaatctgttccttatagttgctgcttttcttccagtcattgcacatgtaaattaccaggtagtcac

SEQ ID NO: 160802 - DNA, 201 bp, Homo sapiens; identical to SEQ ID NO: 30024

SEQ ID NO: 160803 - DNA, 201 bp, Homo sapiens
ataatccagagttccaaaataagtccatggtagcagaagtaatatttaggaagtacgtgccaagtgccaggcacctagctgtggtttaaatacatgattayaattcacgtcaattctatgaggaagttgttgacaatcccgtctctaaattagcattgggtggtctcacttcttctaggtacatggatatgggttgagttg

SEQ ID NO: 160804 - DNA, 201 bp, Homo sapiens; identical to SEQ ID NO: 30025

SEQ ID NO: 160805 - DNA, 201 bp, Homo sapiens
tatttttgtttcctttggattttgtttattgggacctctttcctttatatttaaaagttttctcctaagttttgagattcctggctgcccatttgtattcrtgtgtgcctgggggccactggagtaggaggctcagccagtggtgggctttagtccagcatatttaggccgtctattagcttcctatttgctataacaaat

SEQ ID NO: 160806 - DNA, 201 bp, Homo sapiens; identical to SEQ ID NO: 30026

SEQ ID NO: 160807 - DNA, 201 bp, Homo sapiens
taagtaaactttattgtatatgtgtaaggtatacaacatgatgttaagagatacatctatatagtaaaataattattatagtggaacagattgacacataygtcatctcacatagttaccttttgtcctccccacccacccaagacatgagcagctataagatacttatttagaaaaaatcctgactgcagtacactatta

SEQ ID NO: 160808 - DNA, 201 bp, Homo sapiens; identical to SEQ ID NO: 30028

SEQ ID NO: 160809 - DNA, 201 bp, Homo sapiens
ttttttggctagaattatgtttattttggtaaaaactgtttctttccaaatttggtagatttcctcccaaaaagaggaaaaagcaaaaagcttccagtccrtgctagtaactatatcataagtccttttccagagatagttattaagctgctttcttttttatcttcccgtttttcctttttctgttcatttttatagatt

SEQ ID NO: 160810 - DNA, 201 bp, Homo sapiens
tcttactggaagcccgtttaaataacctggaagtctaacctgatgaaaaactacttgaatttaatcagacacaagaagagtgggtccagtggtatgagttkacatcatatcatagaagaagtaaacaagaaaactagtaccttgagcagaggaatacatggctctttaaaaaagtgaaaacatgaaattgcctggttagat

SEQ ID NO: 160811 - DNA, 201 bp, Homo sapiens
caaaagaaggcaaacagaaatagcttttcctcagaaacatctctaaagaaaagagtccttcaccattcatgcagaagtcaatgatatgactctgaccaaayttcccactgctgctgagaagtaatgagatgtctgaaactgctatttaaaactaattttagaaactttcaaatgttataacggaccaaaaaacagagaaat

SEQ ID NO: 160812 - DNA, 201 bp, Homo sapiens; identical to SEQ ID NO: 30029

SEQ ID NO: 160813 - DNA, 201 bp, Homo sapiens
gtgatggtcagaccactgtaacaaaagggcctaacacttaaatggcttttaggatgaagaagtgtatttttcttcttttggaatagtctccatatgaacartccagcttgactgggcagcttttttccttgagatcatttagggaccatggttcctcccaggtttttctgccatctcctaggacactgtcactggccgcgt

SEQ ID NO: 160814 - DNA, 201 bp, Homo sapiens; identical to SEQ ID NO: 30031

SEQ ID NO: 160815 - DNA, 201 bp, Homo sapiens
catgaggaaaaaatggaaaggtatgtgtgggacaaacaacaaaagatagttcaatactacagggctgctggaagtgggttctgtttccatcccaaggcctrtaggttcaaggaggaggagtagttacttcaacctagaaaaagacagatgtatgaagaaaggttccttataggggccttgacctttagtagagagaggtag

SEQ ID NO: 160816 - DNA, 201 bp, Homo sapiens
tggttgctgcataacgaatcaacccaaaaacttactggcttaaaacaacaatatttataatttcacgtgctttatatgggtcaggaaatcaagaactgctsagctgattggtttcaactcagcatcgcttttgaggttgcatttaaatggtgattggggttgcagtaatctcaaagtcttctcaatctgtatacctcatgc

SEQ ID NO: 160817 - DNA, 201 bp, Homo sapiens
aattaagctcatccaacaaattaatggcagagaatatctctgtcaattgtgccaatcatattttttgttgtctactattgcctccattagttgacaaaaawttttttttcttgaaagtacaataacattctcaatgtgtctgaattttttaaattaatggagtgtataatctcttagtttggtggttgtgattaagtgtgg

SEQ ID NO: 160818 - DNA, 201 bp, Homo sapiens
caacatgtagtcattgttttcacattccagttagaatcacctttcacagagatgaccaaaagcaaaactctggcatgaaatattcaaagctgttctagccrgttgcattaacagagtgtcaaatttatggagaccccatgcaaggaagtagtgcttcagaggacatagcaatgttgacaactaggacaaaagcatgcaaat

SEQ ID NO: 160819 - DNA, 201 bp, Homo sapiens
aagagacctgtgaacatgcaacatgtagtcattgttttcacattccagttagaatcacctttcacagagatgaccaaaagcaaaactctggcatgaaataytcaaagctgttctagccggttgcattaacagagtgtcaaatttatggagaccccatgcaaggaagtagtgcttcagaggacatagcaatgttgacaacta

SEQ ID NO: 160820 - DNA, 201 bp, Homo sapiens
aagatagaaaacaaccgtggcttaaaatctgatgaaatcagaaaaatagagtgcaaagcataaataaataaataaataaataaataaataaataaataaataaaatttgatgaaagttcatgataaccagaaattgacaaggaaatttggttactttgcggcatacaacataataagaattctgactgatatattagattt

SEQ ID NO: 160821 - DNA, 201 bp, Homo sapiens
aagacaaaaagttttcttcaatctggaaaacaaaacattgaggaaaagaaccagcaatgtttcaaataaataggctataaaattttttatcagttcatttaatttcatgtaattaattcttttcctgcttgagcttgattattagtttcataaatttattagtttcttcattagagttctgaaaatttttatttagtacat

SEQ ID NO: 160822 - DNA, 201 bp, Homo sapiens
ttttctcaacaaagaacatatttttatccctttcttataacttctcctcccaaaacacattttacatttattggtatgctttgtatacagaattatatatrttaattaaaattcaaactcttagtaacattaatttctaatgaaagtgtaggaagcaagaaattttgaactgttccatatcagtattttatatataagaat

SEQ ID NO: 160823 - DNA, 201 bp, Homo sapiens
taagacaaaaagttttcttcaatctggaaaacaaaacattgaggaaaagaaccagcaatgtttcaaataaataggctataaaattttttatcagttcatttaatttcatgtaattaattcttttcctgcttgagcttgattattagtttcataaatttattagtttcttcattagagttctgaaaatttttatttagtaca

SEQ ID NO: 160824 - DNA, 201 bp, Homo sapiens
gcccgccccccacatgactcatgtagatcaccaaccctctaccttttttttttccttttttcgtttgttagcatttagttaagctccctccttgtggcttsaagccaccagaacacagcctccctacctccccccacatatacacccttaatcttctcccagctctcctgccgaagaacttggccttcgtgacagcaggct

SEQ ID NO: 160825 - DNA, 201 bp, Homo sapiens
aaaaccaacaaagtttattgggcacttactatgtgccaagcatttaatatgcactgtacaaatatgaaattatttaattcttaaaaaactctatgaggtawttattattacccccattttctaaaagaagaaactgaggtttagagacataaagggtgggtaggagtgagataaataatgaccaggggcattttcacatgc

SEQ ID NO: 160826 - DNA, 201 bp, Homo sapiens
ttaagacaaaaagttttcttcaatctggaaaacaaaacattgaggaaaagaaccagcaatgtttcaaataaataggctataaaattttttatcagttcatttaatttcatgtaattaattcttttcctgcttgagcttgattattagtttcataaatttattagtttcttcattagagttctgaaaatttttatttagtac

SEQ ID NO: 160827 - DNA, 201 bp, Homo sapiens
cttaagacaaaaagttttcttcaatctggaaaacaaaacattgaggaaaagaaccagcaatgtttcaaataaataggctataaaattttttatcagttcatttaatttcatgtaattaattcttttcctgcttgagcttgattattagtttcataaatttattagtttcttcattagagttctgaaaatttttatttagta

SEQ ID NO: 160828 - DNA, 201 bp, Homo sapiens
gcctgggagacaagagcgaaactccatctcaaaacaaaacaaaacaaaaatgcattcagaaatccaggcctttcccaacacacacacacacacacacacaccttctataagacaacagaaattgcctcactgactttattctcagaacttggcatcttggtcctaaggaggatcccagataacttcacagagttttctagt

SEQ ID NO: 160829 - DNA, 201 bp, Homo sapiens
ggcttaagacaaaaagttttcttcaatctggaaaacaaaacattgaggaaaagaaccagcaatgtttcaaataaataggctataaaattttttatcagttcatttaatttcatgtaattaattcttttcctgcttgagcttgattattagtttcataaatttattagtttcttcattagagttctgaaaatttttatttag

SEQ ID NO: 160830 - DNA, 201 bp, Homo sapiens
agcctgggagacaagagcgaaactccatctcaaaacaaaacaaaacaaaaatgcattcagaaatccaggcctttcccaacacacacacacacacacacacaccttctataagacaacagaaattgcctcactgactttattctcagaacttggcatcttggtcctaaggaggatcccagataacttcacagagttttctag

SEQ ID NO: 160831 - DNA, 201 bp, Homo sapiens
gtggaacttaaaataaaaataaaaattgaaaaaaagaaagaaaatgaaggagggaagtctatagcaaatctataaacacacacgaacactcaaattgatcrtgattaacaatatattcaactatctggtcccaactaattttccagttttatatacctgtctacacgttcgacatgctgtaccacttcctgtttttcacag

SEQ ID NO: 160832 - DNA, 201 bp, Homo sapiens
aaaagagtctcgtgtgggttaagacagaaggaacattgataggataggaggatgggtttgtatatttaatggtgggaagtcaaagagttcctgtaagatgwcttccagaggcaaagccatctgttgagatttcagggtttcaagagagtagaagcctgaactgttgtgaaatctagcaggcaatgtgctaaggaaacacaa

SEQ ID NO: 160833 - DNA, 201 bp, Homo sapiens
tcactgactgctctacttttccttcaagaagtcaggtaaaagctcagaaatttactatttcctgttcacttgcttttagctttttttttttttttttttttgagactgagtttcattctgtcactctgctcactgcaacctccgcctctcggggtcaagcgattctcctgccttagcctcccgagtagcaggaattacagg

SEQ ID NO: 160834 - DNA, 201 bp, Homo sapiens
ggtagagaacaattaggagccaacgcccaaaagcactagaagcatatttgacttctttaaaaatataaccctatgtcactcttttaaatcaagagtgctayctcttggtttaaaagaatatttgatcctagcaaattgtgtcattctaaataacagagagggaaattctctaacagaaaatgatatttattcagaaatggg

SEQ ID NO: 160835 - DNA, 201 bp, Homo sapiens
cagcactggggccaaaaggcccagcacagtggctcatgcctgtaatcccaacactgtgggaagtcaaggcgggtgtattgcttgagcccaggagttcaagrccagcctaagcaacatagtgagacccctgcctctgcaaaaaattagctgggtatggtggcacatgcctataatcccagctactcaagaggctgacgtggg

SEQ ID NO: 160836 - DNA, 201 bp, Homo sapiens
ttcagttttcatgaaggtgttttttctatatagatagtcgtcaacttggtgtctttacaagagggacgatggtggagctgtctattctgacatcttgctcygcctcaggtgatgctcaatttcttaagtcccagacacatcatttctcatgctccattgatgagaatttaagtcacatggctttatctcgactgtaaagga

SEQ ID NO: 160837 - DNA, 201 bp, Homo sapiens
ttggggtttctgaggagggaggagagtgtgttgacataattatatttgtgtttattttttaaaacatttttctggctgcaatgtggaaaacacattggagraaagcaatctatggagttcaaaaaaaaaaaacaaaaaaacaaggcatctatggagtccagagtgggaggctgcagtggtccaaacaagagttgatggtga

SEQ ID NO: 160838 - DNA, 201 bp, Homo sapiens
tgatcacatcactgcactccagcctaggctgcagagcaagactctgtcaccaaaaaaaaaaaaaaaaaaaaaaaaaacagattctgcttcagcaggtcgcrtgttgtgcctgagagtctatatttctaacaagcttccaaatgacatgctgctggtccgtgggccacactttgggaatcagtgtggaagaaaaagctacct

SEQ ID NO: 160839 - DNA, 201 bp, Homo sapiens
gtgaacccgggaggtggagcttacagtgggccaagatagcaccactgcactcctgcctgggcaacagagcaagactccgtctaaaaaaaaaaaaaaaaaamaaagaagaactactgttgtcagaggtagggagtgcagggtaccttgtacagaacaaatgctgcataaatgtgagttccctaccttccctctttcaaatat

SEQ ID NO: 160840 - DNA, 201 bp, Homo sapiens
ctggagtgcagatgagcctggaaagtagggctttgtagagcaggttaggggttttgactttatcctaagagcaatggggaaccttgaagagttggggtttytgaggagggaggagagtgtgttgacataattatatttgtgtttattttttaaaacatttttctggctgcaatgtggaaaacacattggagaaaagcaatc

SEQ ID NO: 160841 - DNA, 201 bp, Homo sapiens
cggccatccggccggccggccggccgctccgagtgcggggctcgcggaatccacgcccacctggagctctgcgcacgcgcctgcaagcgctgcgcacagtyccggttcccgcctgcgcctctccctccacacctccctgcaagctaaggaagccggctccggccttgggcagcccagaaaggggctcccacagtgcagcgg

SEQ ID NO: 160842 - DNA, 201 bp, Homo sapiens
accttgtctctactaaaaatacaaaaacaaaaaattagccgggcgtggtggtgggcacctgtagtcccagctacttgggaggctgaggcaggagaatggcrtgaacccgggaggtggagcttacagtgggccaagatagcaccactgcactcctgcctgggcaacagagcaagactccgtctaaaaaaaaaaaaaaaaaaa

SEQ ID NO: 160843 - DNA, 201 bp, Homo sapiens
ggctgcgctcgtcggggaggctggtgccgcgcaggagaccagggggaggtgggggggaaggctcaggcatggcgggggctgcaggtcccgagccctgcccsgcggggaggcagctaaggcccggcgagaaatcgagcacagcagctgctggcccaggtgctaagcccctcactgcctgcggccatccggccggccggccgg

SEQ ID NO: 160844 - DNA, 201 bp, Homo sapiens
cctctgaggggttgatcccacagtgctgccttcttccctgtcctaattaggcttgtatattcacttccatgtgattttcatgtgaggagtggtttcgtgtycccagctgccttttaagaacctatgcagaccttccttcataatgatgctggctagttctcttccaaatgtgtaccaaaaaaattatttctgtgaccccaa

SEQ ID NO: 160845 - DNA, 201 bp, Homo sapiens
tgttttttttgtttgtttttattttcaaaaagtaaatatggaaattaagaggcgaaggtttttctcacaaagattactactgagatatatttcatttctaygcttctaaaagaatcattaaaaacatctgtaggaggaccacgtgattgcaaaaattcctacatagtacatctttttttctttgtaaatgtgggtactgtt

SEQ ID NO: 160846 - DNA, 201 bp, Homo sapiens
gaagctgcagaccttcgcagtgttacagctcataaaggcagtgtggacccaaagagtgagcagtagcaagatttaccgcaaagagcaaaagaacaaagctwccacagtgtggacggggaccccagcgggttgccactgcaggctaggatctggccccacccacatcctgctgattggtccattttacagagagctgattgg

SEQ ID NO: 160847 - DNA, 201 bp, Homo sapiens
ggcggaggttgcagtgaggcaagattgcatcaccacactccagcctgggtgacagagcgagtctgtctaaaaaaaaaaaaaaaaacaaaaagtcccttaarcaatctggttcattcacatcaccacggatgcaatcagcacagacaaccacagagctgaggtgttcttaaatatgcatcttggttttatatatttagtgta

SEQ ID NO: 160848 - DNA, 201 bp, Homo sapiens
ggggtgcaaggatgagtgtggtcctgtgtccggaaatggtgggttcttggtctcactgacttaaagaatgaagccgtggaccctcgcggtgagtgttaccrttcttaaaggcagcgtgtccggagtttgttccttctgatgttcggatgtgttcggagtttattccttctggtgggttcgtggtctcgctggctcaggagt

SEQ ID NO: 160849 - DNA, 201 bp, Homo sapiens
gtggactccatgagttgaggagatggaactgagagtccaagaaatcaaggtggctagagttgcaggacaaaagtatcagagatgagagagatacacagttractctggaaatatgcagagggcctaatcagatattcagtggccaccttgtatctgtcctaatgatatcctgttttttcccccttgcttttagacagaagg

SEQ ID NO: 160850 - DNA, 201 bp, Homo sapiens
gtcactgtattgaatactgtgggaattgtaagacaatggtaaccatttgtgtatctaaacatatcaaaatatggcaaagatacagtaagaatacagaataraaaatttcagtggtaaacttgctgtatagagtgtttaccatgaatccagctttcaggactggaaggtgctctggatgagtcactgagtgaatgtgaaggc

SEQ ID NO: 160851 - DNA, 201 bp, Homo sapiens
aggagtgctccaacctgtatatcttgtcttgttatttatctgtccctctattcatccatcagtacatctctttttcctgtccacttccaagtaaattgcakatgtctgtacactttccctggggaattttctaaaactataagttcccaagcctcagcccagagatgtacagatctgctaattcaggaatttttccaaaca

SEQ ID NO: 160852 - DNA, 201 bp, Homo sapiens
cagaaattaggaaggtgaaataaatggggtgaaacaaatattgataactacttatcctgagtcatttatagcttcatagagtggctttgttttccttttaraagatagaattaacagctgcattttcctcgttctacaacaaatggacaggtacgtagactccaacatactccttgaataaaaatgagaaattctagaatc

SEQ ID NO: 160853 - DNA, 201 bp, Homo sapiens
tatgtgcaaatagttggataatgacaagcaatagaaacaaaagctcaagggacaataaatggaaatattcttagtataagtttcaataaaatagaaattgytataattatataatctaatgcctattgcattttcatagattcccaataaaaggtcatagaaattctctataatgaatcgaaagtaataccttcaagattt

SEQ ID NO: 160854 - DNA, 201 bp, Homo sapiens
tctactaaaaatacgaaaaacagccaggtgtggtggtgggtgcctgtaatcccagctactcgagaggctgaggcaggagaatcacttgaaccctggtggcrgaggttgcagtgaaccaagatcatgccattgcactccagccttggcggcagagcgagactccatctcaaaaaaaaaaaaaagaagaaggtggggatgagt

SEQ ID NO: 160855 - DNA, 201 bp, Homo sapiens
ataaatgaagttttattggaacacaggcacactcgtttgtttattatgttgtttatgaccactttcatactaccatggccaagttgaatagaaactgcacrgctctcaaagcccaaaatattgactatctgaccctttacaataaagcctgctgaccacttagggagacttcttccagttaagaaaaaaacaaacccattt

SEQ ID NO: 160856 - DNA, 201 bp, Homo sapiens
tttcaccatgttagccaggatggtctcaatatcctgacctcgtgatctgcctgcctcggcctcctgaaatgctgggattacaggtgtgagccaccgcaccyggcccccatatgcagtatcttatttaatcctcacaccagtcatcagcactcatattcttccccattttacagggaagaaatggaagaaatcaaggctcaa

SEQ ID NO: 160857 - DNA, 201 bp, Homo sapiens
catctccctggtttggacttgccagccctgtcttccggtccttttgagtatgtcatttgaatttctgactcagagtctttgtactgttcccaccaactgtrttatatttcctgcatttcatcacctgtgcttgtctttcaaagttcaggtcctgcctcctttgcaagtcctttcttaccactgcagcccaaatgtaattca

SEQ ID NO: 160858 - DNA, 201 bp, Homo sapiens
attcctcatccctggcctctcctgtctgtcatgaatgtcctgctgccatggagatcttcacagaatgcagctctaatcatcctgcctttctgaaaaaaaaacaaaacaaaaccttcaatgactcctgcaggctggccacgagtacccttagcacagaagaaagccccaaatcctttgctttcctgcagtggtcctgttact

SEQ ID NO: 160859 - DNA, 201 bp, Homo sapiens
ctttacagtttttttaataatgtgtattttttctgactatagaaataaaaattatatagtatgaaacaatacacaaaaatataaaacaaagaataactaaccacccagtgataatacctattaatatttaatgtatgttctccccaagctttgttctgcctgtttttgcttagttaaaatcatacagaacataggaatagt

SEQ ID NO: 160860 - DNA, 201 bp, Homo sapiens
taatagttatattttctgcttctctgcctcctcctactctccccgctcaagtaaaccccagtgtctgttgtttccttctttgtgttcataagttcttatcrtttagctcccacttacaagtaaggacatgtggtatttggttttctgttcctgcattagttttgtaaggacaatgacctccagttccatctgtgttcccac

SEQ ID NO: 160861 - DNA, 201 bp, Homo sapiens
tctttacagtttttttaataatgtgtattttttctgactatagaaataaaaattatatagtatgaaacaatacacaaaaatataaaacaaagaataactaaccacccagtgataatacctattaatatttaatgtatgttctccccaagctttgttctgcctgtttttgcttagttaaaatcatacagaacataggaatag

SEQ ID NO: 160862 - DNA, 201 bp, Homo sapiens
tcatcacccaggtattaagcccggtatctaatagttatattttctgcttctctgcctcctcctactctccccgctcaagtaaaccccagtgtctgttgttyccttctttgtgttcataagttcttatcgtttagctcccacttacaagtaaggacatgtggtatttggttttctgttcctgcattagttttgtaaggacaa

SEQ ID NO: 160863 - DNA, 201 bp, Homo sapiens
gtctttacagtttttttaataatgtgtattttttctgactatagaaataaaaattatatagtatgaaacaatacacaaaaatataaaacaaagaataactaaccacccagtgataatacctattaatatttaatgtatgttctccccaagctttgttctgcctgtttttgcttagttaaaatcatacagaacataggaata

SEQ ID NO: 160864 - DNA, 201 bp, Homo sapiens
gtcattggggtttgttatacatattatttcatcacccaggtattaagcccggtatctaatagttatattttctgcttctctgcctcctcctactctccccrctcaagtaaaccccagtgtctgttgtttccttctttgtgttcataagttcttatcgtttagctcccacttacaagtaaggacatgtggtatttggttttc

SEQ ID NO: 160865 - DNA, 201 bp, Homo sapiens
agtggcatctgcaatttaggactgttttttctatcttgtcagtacttctttcagcaatatgaagttaaaaccaggtactgttagtgctcacctggttttcrgttttcatgaaggtgttttttctatatagatagtcgtcaacttggtgtctttacaagagggacgatggtggagctgtctattctgacatcttgctctgcc

SEQ ID NO: 160866 - DNA, 201 bp, Homo sapiens
tcttgaattgagatctgtaagattggtcataggtaaccaagtatgtatgagaacaggaaagaattggggagaagagaaagggatgttcaaaaagaggaaayagcaggatgaagcaggaagaagcatggcatccaaaagaagaccaggatagctggagtgcagatgagcctggaaagtagggctttgtagagcaggttaggg

SEQ ID NO: 160867 - DNA, 201 bp, Homo sapiens
agtctttacagtttttttaataatgtgtattttttctgactatagaaataaaaattatatagtatgaaacaatacacaaaaatataaaacaaagaataactaaccacccagtgataatacctattaatatttaatgtatgttctccccaagctttgttctgcctgtttttgcttagttaaaatcatacagaacataggaat

SEQ ID NO: 160868 - DNA, 201 bp, Homo sapiens
taatcccagctactcgagaggctgaggcaggagaatcacttgaaccctggtggcggaggttgcagtgaaccaagatcatgccattgcactccagccttggyggcagagcgagactccatctcaaaaaaaaaaaaaagaagaaggtggggatgagtaatccttccacaggcatggggagaagcactatggaaggaaagctgg

SEQ ID NO: 160869 - DNA, 201 bp, Homo sapiens
atttttggtttgggggcacatgtaaaggtttgttacataggtaaacatatgtcattggggtttgttatacatattatttcatcacccaggtattaagcccrgtatctaatagttatattttctgcttctctgcctcctcctactctccccgctcaagtaaaccccagtgtctgttgtttccttctttgtgttcataagttc

SEQ ID NO: 160870 - DNA, 201 bp, Homo sapiens
gggacattgtagacatctgcatgttgaaagctaggtcactgccatggccacgttccagctgattggaaggggaagagagtgcagaggatctatgctcaaawtcttttttaaactttttttattttaacttttgtgggtacatagtaggtatatatatttaaggggcacatgagatatttggatacaggtgtgcagtgtgaa

SEQ ID NO: 160871 - DNA, 201 bp, Homo sapiens
actttagaagattctagtatcaattaagcaggtgtgcaagagaacacatccagccctccagaatgagctcctgctttaaacctgaccagatggccgggcayggtggctcacgcctgtaatcccagcactttgggaggccgaggcgggcagatcacctgaggtcaggagtttgagacaagccagactaacatggcgaaaccc

SEQ ID NO: 160872 - DNA, 201 bp, Homo sapiens
cttgttgaattgtttaagtttcttataaattctggatattagacctttgttggatgtgtagtttatgaatattttctctcattctgtaggttgtgtgtttrctctgttggtagtttcttttgctgtgcaaaagctctttggtttaattaggtcccacttgtcaatttttaaaacttataatctgcatactttaaatatgtg

SEQ ID NO: 160873 - DNA, 201 bp, Homo sapiens
tctcttaatctctctaagatgaaatgtcctcatctgtaaaatgggaatgaaggtaagtgacttgcaagattaattaaggattatagataatatatataaavctctcatatcacatgagtgttgaaataaattatatctgtggttattagtgtaatctataatagcatatactccaaaacataaatgatctaatcaaaatat

SEQ ID NO: 160874 - DNA, 201 bp, Homo sapiens
ccgttttcaggtcatctgaagtcaagatttccaggtaaaccactcactgaactcaagcgtggtatgtgaagcccaaatctagcaaatgtgttactcctgcstgaaaataattaggtggtgttgcataaggacaggtcttgagaatatgtgggaatcttaagagttgttttttttgtttgtttttattttcaaaaagtaaat

SEQ ID NO: 160875 - DNA, 201 bp, Homo sapiens
gatgcacaaaagcttttcattttggtgtagtccaatttatctatttttacttctgttgcctgtgctttttgtcctgtacaagaagttattacctaatccccatgaagccttccctccgtattttcttctaaaagctttgtagttttagcgcttatatatttaggtattttgatccagtttgtttgtttgtttctttgtttg

SEQ ID NO: 160876 - DNA, 201 bp, Homo sapiens
ttttgcccactttttaatagggttatttgttttttgcttgttgaattgtttaagtttcttataaattctggatattagacctttgttggatgtgtagtttrtgaatattttctctcattctgtaggttgtgtgtttactctgttggtagtttcttttgctgtgcaaaagctctttggtttaattaggtcccacttgtcaat

SEQ ID NO: 160877 - DNA, 201 bp, Homo sapiens
tggtgatccaagggctgactttgaagtcacaaagacaagggtttgaattctggcaagtctcttaatctctctaagatgaaatgtcctcatctgtaaaatgrgaatgaaggtaagtgacttgcaagattaattaaggattatagataatatatataaagctctcatatcacatgagtgttgaaataaattatatctgtggtt

SEQ ID NO: 160878 - DNA, 201 bp, Homo sapiens
ctttcttcaggttgtgaaatactgaaccacctatgtagattaagatagggttcagttgccaaaatttgagtaggctatgcctgctcaacccccaatacatytgttttaaaggaaaataaatcaattaaaatattttatatatctatttaagctttgaaaagcttatgttaattgatttttcattaaaaaaaattaaggctg

SEQ ID NO: 160879 - DNA, 201 bp, Homo sapiens
aacaaaagtcattttaggccaggcccagtgactcacacctgtaattccagcacttcgggaggccgaggtgggcggatcacttgaggtcaggagttcgagaycagcctggtcaacgtggtgaaaccttgcccctactaaaaatacaaaaattagccaggagtggtggcactcgcctgtagtcccagctactcgggaggctga

SEQ ID NO: 160880 - DNA, 201 bp, Homo sapiens
ttgtctctttaataatagccttctgactggtgtgagatggtatctcattgtagttttgatttgcatttctctgatgattaatgatgttgagcattttttcwtgttttttggccacttgtaagtctttttttgagaagtgtttatgtcttttgcccactttttaatagggttatttgttttttgcttgttgaattgtttaag

SEQ ID NO: 160881 - DNA, 201 bp, Homo sapiens
attgccaagataattacaactggagaattggccccacaggtactgctgtataattatcttttattctgcaaaatgttttcataccgattgagtatactaartttaactgtggggtttttttgtcatcctttctgtttataaaaggaaacaacaattacagagataaaacaaaaattgatgcaaatacctgatgaagagggc

SEQ ID NO: 160882 - DNA, 201 bp, Homo sapiens
aagcagtcagtgcttttcagaactaataaagatgttgtctttgaggataaagatctatttatctcaattgttttcggtccaagagtgtcagttcccagcarcagcctgctgaagcttggcacagtgatgcagctcttcccagatggagaaggtttcaactgacccatgggcccagaatggttgaggatcattcttagggca

SEQ ID NO: 160883 - DNA, 201 bp, Homo sapiens
aaaggtccaggtatttattctatgtgcactaattcttttgcatagtgtgaggtagcaatataactttattgcatgttttgaatggaaatgaaaaatgtatycagtggtccaaagaacgtttgttgacttgcgcatcttttccttcattgaaatgacttattcctgtatagacactggtctgtatatggtttctctattcag

SEQ ID NO: 160884 - DNA, 201 bp, Homo sapiens
tagataaacagtgacatggcctttagtctaagtctcatgcaggatttgactgggtgtcctgtattttatctggccacctgacggggccatgatgaaagcccagctcccagtgaccattccagtcaactgcaggctgtgcagtgcatttcccaaaggaggtctgtctgatttccagaaagacaggccagaagtgccccacat

SEQ ID NO: 160885 - DNA, 201 bp, Homo sapiens
attggaattggtgtatttttcattattttccctttggcttttgcatttggatcttaagaaagtgttccccatagtctcataaaaatcttctatagttttcyagttatttttagttttgttttaaaggtccaggtatttattctatgtgcactaattcttttgcatagtgtgaggtagcaatataactttattgcatgtttt

SEQ ID NO: 160886 - DNA, 201 bp, Homo sapiens
cgggcacggtggctcacacctgtaatcctagcattctgggaggctgaagcgggcagatcacttgaggccaggagttcgaaaccagcctggccaagatggcraaaccccatccctactaaaaatacaaaaattagttgggcgtggtggcacaagcctgtaatcccagctattctggatgctgagtcaggagaatcgcttgaa

SEQ ID NO: 160887 - DNA, 201 bp, Homo sapiens
tttaccatggtaaaggattcagggacctccatattgaaccacgctctacccacccattttatcttctgagttttctctatgggaaactatttcagtaagaygttctttttattactaattcaacaaatatttattggacactgaccatctgccaagcacagttctagatcccagggatacagagctccagaccgtaggtaa

SEQ ID NO: 160888 - DNA, 201 bp, Homo sapiens
tagccagttgctgctgcagcacaccacttaatacattactgctttagtgaataaatgatatttttgtgggcttgaacagttcatacacatccccagcataygggaagcttacttcccagggtgtcgtcatacttaatgtctggctccctgttaaatacataccccatacttttgttacatcaaggggggtaaatatgggga

SEQ ID NO: 160889 - DNA, 201 bp, Homo sapiens
ttgtattcccaccaatagtaaaaacatttccttttctctgcagcctctgcagcatccatctttttttgtctctttaataatagccttctgactggtgtgaratggtatctcattgtagttttgatttgcatttctctgatgattaatgatgttgagcattttttcatgttttttggccacttgtaagtctttttttgagaa

SEQ ID NO: 160890 - DNA, 201 bp, Homo sapiens
agccatagtgtgctaattttcaaggaacacaagcaaaagaaggcaaacagaaatagcttttcctcagaaacatctctaaagaaaagagtccttcaccattsatgcagaagtcaatgatatgactctgaccaaatttcccactgctgctgagaagtaatgagatgtctgaaactgctatttaaaactaattttagaaacttt

SEQ ID NO: 160891 - DNA, 201 bp, Homo sapiens
tggctgaactaatttgtattcccaccaatagtaaaaacatttccttttctctgcagcctctgcagcatccatctttttttgtctctttaataatagccttmtgactggtgtgagatggtatctcattgtagttttgatttgcatttctctgatgattaatgatgttgagcattttttcatgttttttggccacttgtaagt

SEQ ID NO: 160892 - DNA, 201 bp, Homo sapiens
atgagtgcatttgtctttttagtagaatgatttattttctttggatatatacccagtaatggaattcctgggtcaaatggtcaaagaacctgttttaagtkctttgagaaatctccaaactgcattccacagtggctgaactaatttgtattcccaccaatagtaaaaacatttccttttctctgcagcctctgcagcatc

SEQ ID NO: 160893 - DNA, 201 bp, Homo sapiens
catgacagtaatttgatttaaagtctgcagccacagagttcaggctccatccctctctccatcattctccctgagtgcaaatccagagggagggcaagtargtcgaagcagactctgatggtgtttacttacttgccagagattagagaaagtgtgcccactaggtctacagtagtgcaaaaccaagccaaaaagtgagca

SEQ ID NO: 160894 - DNA, 201 bp, Homo sapiens
ataaattaccttaggcagtatggccattttcatgatattgattcttcctacccatgagcatggaatgttcttccatttgttttgtatcctcttttatttcsttgagcagtggtttgtagttctccttgaagaggtccttcacatccctcgtaagttggattcctaggtattttattctctttgaagcaattgtgaatggga

SEQ ID NO: 160895 - DNA, 201 bp, Homo sapiens
ggaggttgcagtgagccgagattgtgccactgtactccagcctgggtgacaagagactgtctcaaaaaaaaaaagaaaaaaaaatggggttgaaaaaaatktttcactgtttagtctagtcctgccatacagagaaaattagctttctctccaccctgccgattcaaatatttgaagacatatacacttttcttgtgattt

SEQ ID NO: 160896 - DNA, 201 bp, Homo sapiens
gcactcaatgccaaaaaaaaaaaaaaaaacaaaaaaaaaaaacatgtcttactttttttgtcattactgacttcatgagtagtgcatgtaactatttctaygggtcttctctttgattttttttctctttgattttcaaaaagaaccattaacattttaatgttatatttactgagaggttgcatgatatcagccaaagta

SEQ ID NO: 160897 - DNA, 201 bp, Homo sapiens
catgctgttttggtgactgtagccttgtagtatagtttgaagtcaggtagcgtgatgcctccagctttgttcttttggcttaggattgacttggcaatgcrggctcttttttgattccatatgaactttaaagtagctttttccaattctgtgaagaaagtcattggtagcttgatggggatggcattgaatctataaatt

SEQ ID NO: 160898 - DNA, 201 bp, Homo sapiens
gacggatcacctgaggtcaggagttcgagaccagcctagccaacatggtgaaaccctgtctctactaaatataccaaaaaaatgagccaggtgtggtggcrggcgcctgcaatcccagctactcagaaggctgaggcaggagaattgcttgaacccaggaggtggaggttgcagtgagccgagattgtgccactgtactcc

SEQ ID NO: 160899 - DNA, 201 bp, Homo sapiens
ccaaagtgctggaattaaaggtgtgagccaccatgcccggcccatttgcaagtagttctatgaaaaatggttaaaatagaaaatgtgcttaataatattarctacttttcagtaagcactttcaatataccagactccttattcatcttatatctaattcttccaacagtgttttaaaattaatgaaagaaacagaggccc

SEQ ID NO: 160900 - DNA, 201 bp, Homo sapiens
tatatccagtgaaataaagattctgtacagaaggcttagaaaataagtgttttactcagatatacacagccttcaagtgttctgtactcatccctttgcawaccaatcatgtctgtttttagatctgtcttctttcatgatttgtccttctttcattctgttaaaaaaaaaaaaaaaaaaaaaaaaagtatgttccgccaa

SEQ ID NO: 160901 - DNA, 201 bp, Homo sapiens
tttagtaaaagattataagaagatacgggaatgtacatttttgcctagtttagagggctaaaggattgttttaaattagatatgataaacctaaatgtttgagcaagttttggaaggtttgtgaaaaattaattgtaaaagagattctgtgtatgaacatattggctaaatttaaaggggtattattcagttttttccatg

SEQ ID NO: 160902 - DNA, 201 bp, Homo sapiens
tcttgacgatcctcagaggtttaagagcacaatttcagaacaactgccctgggacattgtagacatctgcatgttgaaagctaggtcactgccatggccasgttccagctgattggaaggggaagagagtgcagaggatctatgctcaaattcttttttaaactttttttattttaacttttgtgggtacatagtaggtat

SEQ ID NO: 160903 - DNA, 201 bp, Homo sapiens
caaactaattggaattaatcaatatcttttaaagagacctggcactatagttaaattaaatgtcccccctccaaaaaaaagaagacaaaataaaagaaaamgaataagcatttaaggcttgcccgtcaggaaaatacaacaaaatattatgaatagatggtgccttaggaaacaatagctaacaattcctgaatgcttaat

SEQ ID NO: 160904 - DNA, 201 bp, Homo sapiens
ttttagtaaaagattataagaagatacgggaatgtacatttttgcctagtttagagggctaaaggattgttttaaattagatatgataaacctaaatgtttgagcaagttttggaaggtttgtgaaaaattaattgtaaaagagattctgtgtatgaacatattggctaaatttaaaggggtattattcagttttttccat

SEQ ID NO: 160905 - DNA, 201 bp, Homo sapiens
gttgtattctcatatctgcttttgtattcaaactgctgtgacatcacacttcctgtcgccactgcgaaactccactgtacctttgtgagaaagtgagagtwaaaaaggcacataatgtcatagtgttagtaggaaaatagttttgacctatgaccttctggaaggggtcttgacgatcctcagaggtttaagagcacaatt

SEQ ID NO: 160906 - DNA, 201 bp, Homo sapiens
ggttaattatcaccaactccacttagcatcactgcacatatggtggaaatggaaagaaaaataacccaaaggagaaaagaatttttttgtgggggataggrtctggctgtgttgcccaggctgaagtgcagtggcgtgacctcagctcactgcaacctctgcctcccaggttcaagccatcctcccacctttgcctcccaa

SEQ ID NO: 160907 - DNA, 201 bp, Homo sapiens
cttttagtaaaagattataagaagatacgggaatgtacatttttgcctagtttagagggctaaaggattgttttaaattagatatgataaacctaaatgtttgagcaagttttggaaggtttgtgaaaaattaattgtaaaagagattctgtgtatgaacatattggctaaatttaaaggggtattattcagttttttcca

SEQ ID NO: 160908 - DNA, 201 bp, Homo sapiens
ctttcatttatatgtgctatatctattgatattcaccatatgagaaatcaaagcaaattttaaaatatttgttaagtccttcaaaataacaataaatccayacaagttaacttgaataacatatttttagaaaagtaatcatattttccaaaacttaaaaagtgttgagagagatattgctttatatatttgcaaatctct

SEQ ID NO: 160909 - DNA, 201 bp, Homo sapiens
aaaatgattaaaatatttcaataaactaagatcttcggagaatatgtaaatactcaaatctctcccacttcacatttctttctattcagtgaaatcaactkgtttcccaaagttatgattcttgttataggcttacatgctgtgttgtaacattttatatattacaagaatgatgaagaaccaataagtgtaaataatttc

SEQ ID NO: 160910 - DNA, 201 bp, Homo sapiens
gcttttagtaaaagattataagaagatacgggaatgtacatttttgcctagtttagagggctaaaggattgttttaaattagatatgataaacctaaatgtttgagcaagttttggaaggtttgtgaaaaattaattgtaaaagagattctgtgtatgaacatattggctaaatttaaaggggtattattcagttttttcc

SEQ ID NO: 160911 - DNA, 201 bp, Homo sapiens
tgatagaactacagatgaaaaataatcgggaagtatctcatcattttatgatgagatttgtacgtggacagaacacattctttctattttgttgttcttgytgctagtaataaagtattggtcattattaacaggatgaacaaatggaagctcgattgttcatgaaaatggtttgatagcaaattaatcttgtataaaaga

SEQ ID NO: 160912 - DNA, 201 bp, Homo sapiens
gcaggcaaggaaacaccaggaggacaactgccctccacgaattctcccatatacagtcatgcatcacttaacaacaggggtgcattctgaggaatgcctcrtcaggcaatttccttgttatgagagcatcctagtgtgtactcacacaaacctagacagtgtagcctactatgcgcctaggctacatggtatagcctattg

SEQ ID NO: 160913 - DNA, 201 bp, Homo sapiens
atgatagaactacagatgaaaaataatcgggaagtatctcatcattttatgatgagatttgtacgtggacagaacacattctttctattttgttgttcttkctgctagtaataaagtattggtcattattaacaggatgaacaaatggaagctcgattgttcatgaaaatggtttgatagcaaattaatcttgtataaaag

SEQ ID NO: 160914 - DNA, 201 bp, Homo sapiens
aaacaacaacaacagcaacaaaaaaacaagcaaaggctgaattatccatcgttgtgataagtacagtgaagttcgttttttgttttgttttgtttttttttatgttcctacccatcccagaacctataatctgttcagtgaagccagaattcatgcttatgaaaacttcagagcccatacagcgcagtgtagaattaactg

SEQ ID NO: 160915 - DNA, 201 bp, Homo sapiens
tcacaaacaacaacaacagcaacaaaaaaacaagcaaaggctgaattatccatcgttgtgataagtacagtgaagttcgttttttgttttgttttgttttkttttatgttcctacccatcccagaacctataatctgttcagtgaagccagaattcatgcttatgaaaacttcagagcccatacagcgcagtgtagaatta

SEQ ID NO: 160916 - DNA, 201 bp, Homo sapiens
gtgatagccagttgattggaaggtgacctttactaaatctcctagatgacagagaccatgccctttttcctttttttttttttttttttttttttttttttggtttgcttctgcagcacctatcaggatgcctggcatttagtaggcattcagtatatgtctttagaatgaatgaatggaaaatgatgaaagctcagatta

SEQ ID NO: 160917 - DNA, 201 bp, Homo sapiens
atcctgagtcatttatagcttcatagagtggctttgttttccttttaaaagatagaattaacagctgcattttcctcgttctacaacaaatggacaggtaygtagactccaacatactccttgaataaaaatgagaaattctagaatccttggatcatgcagagtacttgaaacatccagaagattctcagtatttttgtc

SEQ ID NO: 160918 - DNA, 201 bp, Homo sapiens
atgttgaacactttttcacatgcccgtttgccatttgtatattgtcttttgagaatgtctattcaaatcttttgcctgtcttttgattagatttttttctrtagagttgtttgcgctccttgtatattctggttattaatccattgtcagaggggtagtttgcaaattttttttgcaacccaccattctgtgggttgtctt

SEQ ID NO: 160919 - DNA, 201 bp, Homo sapiens
tcttttttttttttgacatggagtttcattcttgttgcccaggctggaatgcaatggcacaatctcggctcaccgcagcctctgtctcctgggttcaagcrattctcctgcctcagcctcctgaatagctcagtttacaggcatgcaccaccacgcccaactaattttgtatttttagtagacacggggtttctccatgtt

SEQ ID NO: 160920 - DNA, 201 bp, Homo sapiens
gtaccatattttcttttcttttcttttttttttttgacatggagtttcattcttgttgcccaggctggaatgcaatggcacaatctcggctcaccgcagcstctgtctcctgggttcaagcgattctcctgcctcagcctcctgaatagctcagtttacaggcatgcaccaccacgcccaactaattttgtatttttagta

SEQ ID NO: 160921 - DNA, 201 bp, Homo sapiens
ttctcattccaaattcatcactttgcccaccatgtcccattttgcccttccaaccaggacatagtagtgggatttcctttaaaatattttatttatttatktagatttatatttttgagacagggtcttgctctgtcacccaggctggagtgcggtgatgtgatcacagctcactgcagtctcgaccttctgggctcaatc

SEQ ID NO: 160922 - DNA, 201 bp, Homo sapiens
ttcattttttgagtttataaatgcctgaagtcattggatcacgattaatttttctctgctactaattctaatcacttccataaaaagacaaacaaaattayctaccattgtccaacaattcactagaggcttaatgaaattttttattactgactttattattttgcaaaataaattacattagcaagccatacatacatt

SEQ ID NO: 160923 - DNA, 201 bp, Homo sapiens
ccatgttgttgcgtatgacaggatctcattcttttttatggccaaacagtactccgttgtatatatgtaccatattttcttttcttttcttttttttttttgacatggagtttcattcttgttgcccaggctggaatgcaatggcacaatctcggctcaccgcagcctctgtctcctgggttcaagcgattctcctgcctc

SEQ ID NO: 160924 - DNA, 201 bp, Homo sapiens
gctgaggcataggcacatcaccctggtatacatttatttgtctgtctcagtactttatgcaaaaaaaaaaatatatatatatatacacacacatatatatrtatatatatacatatatacatatatgtgtgtgtgtatatatatacacacatgtgtgtgtgtgtgtgtgtgtgtgtgtgtatatatatatatatatatata

SEQ ID NO: 160925 - DNA, 201 bp, Homo sapiens
gtaggtcttattcattctttctaacattttttgtacccattaaccatctctgcctccaccccccgacacatccgcaaccccttattaccgacccttcctgrcctctgataaccatccttttactgtctatctccatgacttcaattgttttgatttttagatcccacaaataagtgagaacatgtgatgtttgtctttcta

SEQ ID NO: 160926 - DNA, 201 bp, Homo sapiens
taaaatgttatcagctacataaagcctgacatttaagaaaactattatgctctactgaaaacaatgtgggaagcataagctctatggaaaaaaaaaaaaaagattaattacagccttgaactttctccacttggccaaaaggagaataagagaatgtgaagtgtgaaagctcttttgacgtggtgactggaagggctgctg

SEQ ID NO: 160927 - DNA, 201 bp, Homo sapiens
tcagaaaagagtcattgagagtgttcacccatttcaggcaatagtagggataaaaagagggcattttgcagagggcacagagaatctcatgttttcttttrtctcatatcacgtttctgcaacaggtacagagaagaacatatgggttttggaattggaaacattgaattgaaatcctgggcctaggagtttctagttgag

SEQ ID NO: 160928 - DNA, 201 bp, Homo sapiens
tccaagtagttatcatgaaatcctcccaaatagaatttccttcagattgaagttctcattgcatttcagttcagtccttttatgccaattgaggtaatgcttttttttttttttttttaagaaccaagagaaggaagcccaaaggtcaggtttagtaataccccttccaaatatgttttatattcctgggtctctttttct

SEQ ID NO: 160929 - DNA, 201 bp, Homo sapiens
agtgatagccagttgattggaaggtgacctttactaaatctcctagatgacagagaccatgccctttttcctttttttttttttttttttttttttttttttggtttgcttctgcagcacctatcaggatgcctggcatttagtaggcattcagtatatgtctttagaatgaatgaatggaaaatgatgaaagctcagatt

SEQ ID NO: 160930 - DNA, 201 bp, Homo sapiens
agggaggcaggcattgccacccaaacctggttctcccacccacatattgaatgtgctaaacttgataggtacaagcagatgaagctacttgatttttttttaattgctttttaaacatgctatgttgaatatctttcttttttgttgaattataactcaggaagagtccctggcttttctggtgacttaaaaaacattaac

SEQ ID NO: 160931 - DNA, 201 bp, Homo sapiens
ggaagtcttgtagtcacctgaatgtcacaattttcaaacattttggtgttctttctaaataaaatgtgtgtgtgtgtgcgtgtgtgtgtgtgtgtgtgtgkacatgtgagatgaaagcatcttgtatatatgagttagtgccaaatatttgttcttagaattttaatgtgagcattgaccagtgacaaatcccacataaac

SEQ ID NO: 160932 - DNA, 201 bp, Homo sapiens
cagtgatagccagttgattggaaggtgacctttactaaatctcctagatgacagagaccatgccctttttcctttttttttttttttttttttttttttttttggtttgcttctgcagcacctatcaggatgcctggcatttagtaggcattcagtatatgtctttagaatgaatgaatggaaaatgatgaaagctcagat

SEQ ID NO: 160933 - DNA, 201 bp, Homo sapiens
cacaggacctctttacactttttaaaaattgttaaggacctcaaaaagctttcatttatatgtgctatatctattgatattcaccatatgagaaatcaaarcaaattttaaaatatttgttaagtccttcaaaataacaataaatccatacaagttaacttgaataacatatttttagaaaagtaatcatattttccaaaa

SEQ ID NO: 160934 - DNA, 201 bp, Homo sapiens
ccaagttatatcaatgttgaatgacagtatctttttctacagaccctttccaaccagatacgattcatgtttaaaatttttgcaaacctgatgagtaaatrgcattttgtgttttaaatttgcatttcatgggttactattaaggttaagtatattttcatacactcattggccatgtgtatttcttccttatgtgaattg

SEQ ID NO: 160935 - DNA, 201 bp, Homo sapiens
tttttgtattgcttcttggatctgggacttgatggcttttgtcagtttggaaaattcttaggtattatattttcaaatattgcttcttcattttctctccktttctagagccttctaaccatgtctcaggtgtctcttttgctcctttccatattttttctacctttttcttcttttgcttcattctggattattttcttc

SEQ ID NO: 160936 - DNA, 201 bp, Homo sapiens
gtattgggtaaaagagactgggaagtcttgtagtcacctgaatgtcacaattttcaaacattttggtgttctttctaaataaaatgtgtgtgtgtgtgcgtgtgtgtgtgtgtgtgtgtgtacatgtgagatgaaagcatcttgtatatatgagttagtgccaaatatttgttcttagaattttaatgtgagcattgacca

SEQ ID NO: 160937 - DNA, 201 bp, Homo sapiens
ccagtgatagccagttgattggaaggtgacctttactaaatctcctagatgacagagaccatgccctttttcctttttttttttttttttttttttttttttttggtttgcttctgcagcacctatcaggatgcctggcatttagtaggcattcagtatatgtctttagaatgaatgaatggaaaatgatgaaagctcaga

SEQ ID NO: 160938 - DNA, 201 bp, Homo sapiens
acccactttctggtttgataaccaagatgagtcccaggtataaagttcacgctttgtaaatcagcaggatttctggttcactgagaacagcctggtacacragtagcaaatgagcagaattggagtttaggactccaaactgtgcagacacagcttagatgtgccctctttgtgggcagcaggtactcatggttgtatctt

SEQ ID NO: 160939 - DNA, 201 bp, Homo sapiens
cccaggtgctataatagaaagacacaatgacacagtagcataatacagaaacttatttcccttttatataatggatggcctcactgtgaatgaggggaggrcagttttagtcctcacattcatgcagagatgcggggttttttccagctcattgtctttccaactctagagcaacagctctaaaatttttggtcacaggac

SEQ ID NO: 160940 - DNA, 201 bp, Homo sapiens
atggcttgagcccaggagttccagaccagcctgggcaatatgacgaaaccccatctctacaaaaaaaaaaaaccacacacacacacacacaaaattaaccrggtatagtggcgcacacctataggcccagctactcaggaggctaagagagactgagaggcaggagaatcacctgagcccaggacatcaaggctgcagtga

SEQ ID NO: 160941 - DNA, 201 bp, Homo sapiens
agggaatgaggttggttatacgtgtggcaaacatctcctgtgtagctgacattttcttactcttaatggagtattttaataataagtgtgtttttctctaktttaaagcaatctattttatcaaacttttcttttatggttagagttttctaggttctgtttgagaaatccttaccaaccctaagatatagaaactatttt

SEQ ID NO: 160942 - DNA, 201 bp, Homo sapiens
agtattgggtaaaagagactgggaagtcttgtagtcacctgaatgtcacaattttcaaacattttggtgttctttctaaataaaatgtgtgtgtgtgtgcgtgtgtgtgtgtgtgtgtgtgtacatgtgagatgaaagcatcttgtatatatgagttagtgccaaatatttgttcttagaattttaatgtgagcattgacc

SEQ ID NO: 160943 - DNA, 201 bp, Homo sapiens
gccagtgatagccagttgattggaaggtgacctttactaaatctcctagatgacagagaccatgccctttttcctttttttttttttttttttttttttttttttggtttgcttctgcagcacctatcaggatgcctggcatttagtaggcattcagtatatgtctttagaatgaatgaatggaaaatgatgaaagctcag

SEQ ID NO: 160944 - DNA, 201 bp, Homo sapiens
gctgagacctattttaagttaaaaaaaaatgcctttttttggctagaattatgtttattttggtaaaaactgtttctttccaaatttggtagatttcctcycaaaaagaggaaaaagcaaaaagcttccagtccgtgctagtaactatatcataagtccttttccagagatagttattaagctgctttcttttttatcttc

SEQ ID NO: 160945 - DNA, 201 bp, Homo sapiens
ccaacacttcgggaggctgaggcggatggatggcttgagcccaggagttccagaccagcctgggcaatatgacgaaaccccatctctacaaaaaaaaaaaaccacacacacacacacacaaaattaaccaggtatagtggcgcacacctataggcccagctactcaggaggctaagagagactgagaggcaggagaatcac

SEQ ID NO: 160946 - DNA, 201 bp, Homo sapiens
gtggtgagtagcccttgattataggatttaatctgtttgtagtccttttctttttttcttctttttttttctgtgagtcatggcctaaagaaattctttcycttcattctttaactaatggtctccatgagtacattgattcatagaagagtaactcaagcacaaattttaccggctactttatctggcttcaggtgactg

SEQ ID NO: 160947 - DNA, 201 bp, Homo sapiens
gtagtattgggtaaaagagactgggaagtcttgtagtcacctgaatgtcacaattttcaaacattttggtgttctttctaaataaaatgtgtgtgtgtgtgcgtgtgtgtgtgtgtgtgtgtgtacatgtgagatgaaagcatcttgtatatatgagttagtgccaaatatttgttcttagaattttaatgtgagcattga

SEQ ID NO: 160948 - DNA, 201 bp, Homo sapiens
ctcttcagaggacgatttgctagaaggccagtgatagccagttgattggaaggtgacctttactaaatctcctagatgacagagaccatgccctttttccwttttttttttttttttttttttttttttttggtttgcttctgcagcacctatcaggatgcctggcatttagtaggcattcagtatatgtctttagaatga

SEQ ID NO: 160949 - DNA, 201 bp, Homo sapiens
agtagtattgggtaaaagagactgggaagtcttgtagtcacctgaatgtcacaattttcaaacattttggtgttctttctaaataaaatgtgtgtgtgtgtgcgtgtgtgtgtgtgtgtgtgtgtacatgtgagatgaaagcatcttgtatatatgagttagtgccaaatatttgttcttagaattttaatgtgagcattg

SEQ ID NO: 160950 - DNA, 201 bp, Homo sapiens
tttggactattgtagtcaatgcagggaaagctggtggggaagagccacaagcagaacaccctggtttttttggaagtcctcagcatggtctgggtggagcygttgaggcaagcactgagactgcctctcattccaacatctgctgttgagaaaggaagagaatgttcagcagtgagaaacctggccgaggccagccatcag

SEQ ID NO: 160951 - DNA, 201 bp, Homo sapiens
tctattctctatgcaagaggacgaaggggctcaatattataattttccctgaagccaggagatctccaggtggaaagagtactttacagcactggaggtgstatttggaaagggggtttcaacccaatgacactatcagtcctgctggtaagtccttccctatcttgagtaccttaatctggttaatttttttttctcatg

SEQ ID NO: 160952 - DNA, 201 bp, Homo sapiens
gttgtcagcctttctcacccaggctgaagtgcagtggtgcaatcatggctcactgcaaccccgacttcccaagttcaggtgatcctcccacctcggcccccggagtagctgagactacaggcacgcaccaccacgcccggcttatttggtagagtattttgtattttcaccatgttgcccaggctggttttgaactcttgg

SEQ ID NO: 160953 - DNA, 201 bp, Homo sapiens
catgaacccaccgggaggaacaaacaactctggatgtgccacctttaagagctgtaacactcactgcaaaggtctgcgtcttcactcctgaagtcaagcargaccacaaacccaccggaaggaagaaactccggacacatccgaacatgtgaaggaacaaactccggacacaccatcttcatgaactgtaacagtcaccac

SEQ ID NO: 160954 - DNA, 201 bp, Homo sapiens
cagccagcagcagcaacccactggggtccccttccatgctgtggaagctttgttctttcgcttttcacaataaatcttgctgctgctgatcactttttgggtctgcactgcctttatgagctgtaacactcactggtggcttcactcctgaaggcagcaagaccacgaacccactgggaggaacaaacaactccggacgtg

SEQ ID NO: 160955 - DNA, 201 bp, Homo sapiens
ttgtgtctagctaaaggattgtaaatgcaccaatcagcactctgtgtctagctaaaggattgtaaacgcaccaatcagcactctgtaaaaatgcaccaatsggcattctgtaaaatggaccaatcagcactctgtaaaatggaccaatcagcactctgtaaaatggactaattggcacgctgtaaaatggaccaatcggca

SEQ ID NO: 160956 - DNA, 201 bp, Homo sapiens
ttgaaccaaggaggtagaagttgcagtgagccaagattgtgccactgcactccagcctgggcagcagagtgagactctatttcaaaaaaattaattaattwaattaaattaaattaaagaaaaaacaaaggtgggtttaaaagatattttatttgtacatattttgttatatttcagagccttttgaatggactgatgtgt

SEQ ID NO: 160957 - DNA, 201 bp, Homo sapiens
acttcttttcaaggtggtcctggctctggcaaaggcacacagtgtgaaaagctggtggaaaaatatggatttacacatctctcaactggcgagctcctgcrtgaggaactggcatcagaatctgaaagaagcaaattgatcagagacattatggaacgtggagacctggtgccctcagtaagcaacatggcctgacccaca

SEQ ID NO: 160958 - DNA, 201 bp, Homo sapiens
atatctatttaagctttgaaaagcttatgttaattgatttttcattaaaaaaaattaaggctggactcagtggctcacgcctgtaatcccaacacttcggraggctgaggcggatggatggcttgagcccaggagttccagaccagcctgggcaatatgacgaaaccccatctctacaaaaaaaaaaaaccacacacacac

SEQ ID NO: 160959 - DNA, 201 bp, Homo sapiens
tgcaaaaagcaaaacccaacctatcaagtgccacctccccggtgacaggcccccagccttgctctgcgctttcgctgaatgaactcctgagcacgtttttyccgttgcctaggaagggttgggccgcaggtttcgccagtgctcgacaacccacctggagatagcgggtcggggagggagctgcgaggggggcggactcct

SEQ ID NO: 160960 - DNA, 201 bp, Homo sapiens
gaaacacttaaataaatgatagaactacagatgaaaaataatcgggaagtatctcatcattttatgatgagatttgtacgtggacagaacacattctttctattttgttgttcttgctgctagtaataaagtattggtcattattaacaggatgaacaaatggaagctcgattgttcatgaaaatggtttgatagcaaatt

SEQ ID NO: 160961 - DNA, 201 bp, Homo sapiens
ggaaacacttaaataaatgatagaactacagatgaaaaataatcgggaagtatctcatcattttatgatgagatttgtacgtggacagaacacattctttctattttgttgttcttgctgctagtaataaagtattggtcattattaacaggatgaacaaatggaagctcgattgttcatgaaaatggtttgatagcaaat

SEQ ID NO: 160962 - DNA, 201 bp, Homo sapiens
aggctctgattcatggtaatgtgcttttattcctaaccacagttctcacatgaccaggaccccttcttggcaccatttagcatcttccaaggatatatttrtatgggttatttaaaggagcagtcccacgctgtccaggagctggttatctagtctgtctattctctatgcaagaggacgaaggggctcaatattataatt

SEQ ID NO: 160963 - DNA, 201 bp, Homo sapiens
aggaaacacttaaataaatgatagaactacagatgaaaaataatcgggaagtatctcatcattttatgatgagatttgtacgtggacagaacacattctttctattttgttgttcttgctgctagtaataaagtattggtcattattaacaggatgaacaaatggaagctcgattgttcatgaaaatggtttgatagcaaa

SEQ ID NO: 160964 - DNA, 201 bp, Homo sapiens
  misc_feature (1)...(201): n = A,T,C or G
aatgctggtaaattactcagtgacttaaaattcgcttttaacttatatataccttaagcagaagacttagtattttttccatctttaaaataaaggttttnatattagccttcacccatcattgttaaatgtcaacggtctacctgtgaatagtatcatcttcacttcagaaatgccaaggctctgaagctattttctgtt

SEQ ID NO: 160965 - DNA, 201 bp, Homo sapiens
aaggaaacacttaaataaatgatagaactacagatgaaaaataatcgggaagtatctcatcattttatgatgagatttgtacgtggacagaacacattctttctattttgttgttcttgctgctagtaataaagtattggtcattattaacaggatgaacaaatggaagctcgattgttcatgaaaatggtttgatagcaa

SEQ ID NO: 160966 - DNA, 201 bp, Homo sapiens
tttctaaatatgcacattgcttttataatcagagttttctttcaaaagctatataattcatgtttcttttcaaaaaaacatgtaatggcactgcttgggcratgggtgcaccagaatctcagaaatcaccactaaagaacttatccatgtgaccaaacaccacctgttccccgaaaacctattgaaataaaaataagaaga

SEQ ID NO: 160967 - DNA, 201 bp, Homo sapiens
aaatgtttgttggattttttttctttactgccattatgttatcacagtaaaggatagtttacttaaaatgtttgcaactcaccctcaagcaatattgacaktcttattttcagatcatttcacttcagtgagcacaatgttttaatttttaaaaacgtttttgcattcttttgatttttctcttacgtggtttaaaaagtg

SEQ ID NO: 160968 - DNA, 201 bp, Homo sapiens
agggggaaaatcctacacaagcagatatatagacttaaaggggggtgcttaaactccccacatgataaagatattctctctctgctatagtacattcatcygttaggtatatatggctttgggtgaattttgttagttcatttgacacatttattgagtttctactatatatcagcaaaatggcagcctaaggatacaaag

SEQ ID NO: 160969 - DNA, 201 bp, Homo sapiens
caggggctccctgtgttacccaggctggtttcaaactcctggcctcaagtgatcatcctctctcagcctcctaagtgctgggattacaggtgtgagccacygcaactggctgagacctattttaagttaaaaaaaaatgcctttttttggctagaattatgtttattttggtaaaaactgtttctttccaaatttggtaga

SEQ ID NO: 160970 - DNA, 201 bp, Homo sapiens
tccatattgaaccacgctctacccacccattttatcttctgagttttctctatgggaaactatttcagtaagacgttctttttattactaattcaacaaayatttattggacactgaccatctgccaagcacagttctagatcccagggatacagagctccagaccgtaggtaaggcccctgctctcatgaaacttataat

SEQ ID NO: 160971 - DNA, 201 bp, Homo sapiens
gctggagtgcagtggctctatctgaactcactacaagctccgcctcccaggttcacgccattctcctgcctcagcctcccgggtagctgggactacaggtrcccgtcaccacgctcggctaatttttttgtatttttaatagagacggggtttcaccatgttagccaggatggtctcaatatcctgacctcgtgatctgcc

SEQ ID NO: 160972 - DNA, 201 bp, Homo sapiens
agtggaggagcaagcccaggacaatgaaataaaggctcctattcaaaaaaggaaagtttgagaatatacacagtactcactgaaccacagtgaatcctgtwaggcagggattgcaaaggtccttgccctggcagttcctctgagaagttcttccttgtccattatctgcatgacacattgaagtagtatattggagactaa

SEQ ID NO: 160973 - DNA, 201 bp, Homo sapiens
gtaagtcagttgggcaataaattaaccatttattgagtactactatgtgtcagacattcttttaggactgaaaatacaaccaccaggaaagaacagacatkgcaccttcctttggggaccttacagtccagcagtgaaatcaagcagtagaaatataagcaggagcacaatggcactataggaaaatcataggttaaggaa

SEQ ID NO: 160974 - DNA, 201 bp, Homo sapiens
aatggcgtgaacctgggaggcagagcttacagtgagccgagattacgccactgcactccagcctggcgacagagcgagactctgtctcaaaaaaaaaaaaagaattataaaagagaacccattaagattctattaatttatgttatagaaaaaattaaaactatttgttttcaccacaagcatataaagaatattttttca

SEQ ID NO: 160975 - DNA, 201 bp, Homo sapiens
taaggtggtgtatcagaatcctgaaattcctactcacgtgacttgcagtaggtgggagagggagggaagagaggattccctccgaaaagcataaccctctrgtaactctctggatacctgatcaatctacatcttctcttatatagcctagtcacgggtaacagtaccgatttggggtctgttagcaaattctataggatg

SEQ ID NO: 160976 - DNA, 201 bp, Homo sapiens
aggaaaagaataaaagaattacaggcggtgcatggtggctcacacctgtaatcccagcactttgagaggctgaggcgggcggatcacgaggtcaggagatygagaccatcctggctaacgcggtgaaaccccgtctctattaaaaatacaaaaacttagccgggcatagtggtgggtgcctgtagtcccagctactcagga

SEQ ID NO: 160977 - DNA, 201 bp, Homo sapiens
ttctagagggttctgatcccaccctgctggtcctcacctgctcactcctgtcccaagccacgggtacacagcttttgttttcacacttcacctccagctcygtggagaactccagcagtgagcttggctgccctaacacttttccccgtaagtcactgaaaagctcaaatctcaaagctgaaaggaagcaactaacagaca

SEQ ID NO: 160978 - DNA, 201 bp, Homo sapiens
tatgcactgtacaaatatgaaattatttaattcttaaaaaactctatgaggtatttattattacccccattttctaaaagaagaaactgaggtttagagayataaagggtgggtaggagtgagataaataatgaccaggggcattttcacatgctgcattttatctcactgtgatgaagtgaatggctcttccattttaaa

SEQ ID NO: 160979 - DNA, 201 bp, Homo sapiens
ttgtcctgtggttttatttatttaatcttgatcacagataactgagccaattgaagttttctgagagctgaatgtggtggtagtcccagctagtaggcagsctgagccaggaggatcccttgaacccaggagtccagcctgggcaacctagtgagactctatttctagaagaaaaaaagaaagttttctaaacatgatgtg

SEQ ID NO: 160980 - DNA, 201 bp, Homo sapiens
tctttctatctaaaaatcttacagttcctttttaaaacatgtaatatttatggagagtagtgtgtgtgtgtgtgtgtgtgtgtgtgtgtgtgtgagagagwgagagagagagagagagagagacagagagatcaagcgtgtgctcatctatgggtgggtgctgctgagggtcaagaatgcagaagaatataagaagaaagt

SEQ ID NO: 160981 - DNA, 201 bp, Homo sapiens
gtagggaggaacttttccccgcagctcctgttctgtccttgcagaataagtccaaagtggcaggagctgcctgctgtgagcctgggagtagagactagacrggtgtcttctagagggttctgatcccaccctgctggtcctcacctgctcactcctgtcccaagccacgggtacacagcttttgttttcacacttcacctc

SEQ ID NO: 160982 - DNA, 201 bp, Homo sapiens
taatgcctgaaaactcaaactttccatatcggcggtatgaccggctccctccaatccatcaattctccatagaaagtgacacggatctctctgagactgcrgagttgattgaggagtatgaggtttttgatcctaccagacctcgaccaaaaatcattcttgttataggtatgaggacagaaagcaaaaattctcataccg

SEQ ID NO: 160983 - DNA, 201 bp, Homo sapiens
gttctttctatctaaaaatcttacagttcctttttaaaacatgtaatatttatggagagtagtgtgtgtgtgtgtgtgtgtgtgtgtgtgtgtgtgagagwgagagagagagagagagagagagacagagagatcaagcgtgtgctcatctatgggtgggtgctgctgagggtcaagaatgcagaagaatataagaagaaa

SEQ ID NO: 160984 - DNA, 201 bp, Homo sapiens
caagattatgaagctaatgagtgtgtgagggccagatttccagttttcctcatggaaataaagggaactagttgtgcagtagttaaaaatgcataaaaaaaggacaaatattatcctttcaaaacttagtactttttcctctaatcattcaagtgcctcaaaaaattagtacacctacctgtacattttccagaaaatgtc

SEQ ID NO: 160985 - DNA, 201 bp, Homo sapiens
tagttctttctatctaaaaatcttacagttcctttttaaaacatgtaatatttatggagagtagtgtgtgtgtgtgtgtgtgtgtgtgtgtgtgtgtgagwgagagagagagagagagagagagagacagagagatcaagcgtgtgctcatctatgggtgggtgctgctgagggtcaagaatgcagaagaatataagaaga

SEQ ID NO: 160986 - DNA, 201 bp, Homo sapiens
tgaaaccccatctctagtaaaaatacaaaaaaaaattagccgggcatggtggcgggcgcctgtagtcccagctactcgggaggctgaggcaggagaatggygtgaacccgggaggcagagcttgcagtgagccgagatcgcgccactgcactccacctgggtgacagagcaagactctgtcaaaaaaaaaaaaaaaggaat

SEQ ID NO: 160987 - DNA, 201 bp, Homo sapiens
gacataaagtgccaaggaaaagagggttaagagatggagatggagaggcaagcaaggactagatcaagatggatcatatgtaggagcaaataattgtcctstgagtgatgggaactaccaaaggggcaggaataatcaggatttcaatctagaaagctcaatccatcatccttatggggaatggatgcaagaaggtaaggc

SEQ ID NO: 160988 - DNA, 201 bp, Homo sapiens
tttagtgcttacaggggctgtttggtatctttttcaccaaaaccagaagtgtttcccattcaccccgagtgtgtgtgtgtgtgtgtgtgtgtgtgtgtgtgtataagatgccagattaattttgtttacaaaatattcacattggaaccatgaggtttattgagagtccctggttacaccctccaatcaaacatctcattc

SEQ ID NO: 160989 - DNA, 201 bp, Homo sapiens
gatttagtgcttacaggggctgtttggtatctttttcaccaaaaccagaagtgtttcccattcaccccgagtgtgtgtgtgtgtgtgtgtgtgtgtgtgtrtgtataagatgccagattaattttgtttacaaaatattcacattggaaccatgaggtttattgagagtccctggttacaccctccaatcaaacatctcat

SEQ ID NO: 160990 - DNA, 201 bp, Homo sapiens
acagacactcagagtggtggctaatgggttgagtcttctcaagtgatgcctcattgaagaggaagctccaaggcgactgagcataaacacctgatcagacrtctcctgaataaggctacagcctttggttccttgtccaagtgacattctgaaattaatgcctttcatgcagaacacacccaacatttgaaaagtaacaag

SEQ ID NO: 160991 - DNA, 201 bp, Homo sapiens
tgcagacagtgtccagagtctctgcattttgaatctccagcaaaacattgtacctggcagatgagaacagtctagaaatgtttgtgaatttaatgtgatayaggaaaatatggaaacctagtgagagactgtttgctttagaaacatacatagacaacctccatccacttatcttttctttcctaatcttaggttcaagtg

SEQ ID NO: 160992 - DNA, 201 bp, Homo sapiens
gcgagaccgtgtcttaaaaaaaaaaaaaaaaaaattgccttgtgggttaaaactgttttaacttaaacaatgatggtctgagaacacaaattcttcttaawaaagtaaagcaaatgtatttatgtatattttgcttcagccttttgtacttactctgatttaactaggtttcaaccaaagaaaatgtccttttgatggttc

SEQ ID NO: 160993 - DNA, 201 bp, Homo sapiens
accttgtgcccttcagccagtgggcagaaggatgtctccgtggacagggacagcccatgcgtggatggaaggacatctccgtggacggggacagctcccgygtgatggaaggacatctctgtggacggggacagcccatgcgtgatggaaggacatctccgtggacagggacagtccatgcgtggatggaggacaactccg

SEQ ID NO: 160994 - DNA, 201 bp, Homo sapiens
gagaagtgaaaagccactttttccatttgaataatgcttgacgttgccttctgatgcacctagatgagttctcttgtgtcctgagtatcatattgttcgayctgagaattgatttactttttaaatgattttctttcgttccttggtttggcagcagccacaattgatgctacctttcagataacaaatgatgaatagtat

SEQ ID NO: 160995 - DNA, 201 bp, Homo sapiens
gtggagccctgcaggggacacgtgtctcctcaacaaatcctccccagtagtgtcatcagtagaagacatcagacaagtcgaaatcaagggcattccaaaargacatgtccggagctttgaggagcagccaggtcattaaggacggggagacagaggcgctggccagatcacagagcccaggagacatcacggccagagcag

SEQ ID NO: 160996 - DNA, 201 bp, Homo sapiens
aagatctttagataaagaaagctctggctctaacagtttttaacactgtatcttctatataaaatgtcttctgctactttgttaataaataattggtaacyggataggctatgtaggtgagaaatcaatctatgaggactttgatttttcagtcttatttaaaaatcttcccttcatccactcttttctcgtgtgcgtgtc

SEQ ID NO: 160997 - DNA, 201 bp, Homo sapiens
gtagaaggaaatagtggcctcaacttccctttcctttagtgtcttttatgttcctaggctggccattgggcatttccttggatagatacgcaggggatggrcgtgatggtggtgacatcttttgggtgttgagaatcgtacacatgtgttacttattcagagaaacagatttggaagtgtgttgtaaaacagcttggacag

SEQ ID NO: 160998 - DNA, 201 bp, Homo sapiens
gggtgttgagaatcgtacacatgtgttacttattcagagaaacagatttggaagtgtgttgtaaaacagcttggacagtctaatagtccttgcctgtgacmaggatcttgtttcctcttaagagtgtttaactcctgttttcaggacttaggacctaaccctctttattctgtcttctctaatactacttcatttgaagtg

SEQ ID NO: 160999 - DNA, 201 bp, Homo sapiens
tgctaactctagttcaataaaatgatgaatttatattcaagttcttctttgtctctaacaggctttttgataaccacttttatttcattgctgctttgtcrtaacttgttaccagctttgaagaaactggccatcattccctattgtatattcttcactctattatggagacgtttatcataatataaaaatttcttctgt

SEQ ID NO: 161000 - DNA, 201 bp, Homo sapiens
atatttgccaattaaaaagtacatacatgctcgtgtgtgtagaatctttcaaatcagtaaaaccagatattcacaaatgaatatctgtttttaattttcahttaggcacataaaagtgtttttctttcttctattttctctctgtacctcacatggacttcattagccttcaggtcagaagctctatttgaaaattgtcca

SEQ ID NO: 161001 - DNA, 201 bp, Homo sapiens
accacttttatttcattgctgctttgtcataacttgttaccagctttgaagaaactggccatcattccctattgtatattcttcactctattatggagacrtttatcataatataaaaatttcttctgttcttaaaattttgtacttcacacagctgacatcactcttaatcataaaagactgaatgtgttccccttaaac

SEQ ID NO: 161002 - DNA, 201 bp, Homo sapiens
ttgaggagcagtttggcagttcctcaaaatactacacacacaattaccatgtcacccagaataggcaaactcatagagacagaaagtggatgagtcattgycagggcctaggagtgggagggaatgggtatggtgcttcattttgggatgatggaaatcttctaaaattagatgatggtgatggttgtacaactctgtgaa

SEQ ID NO: 161003 - DNA, 201 bp, Homo sapiens
gggtatggtgcttcattttgggatgatggaaatcttctaaaattagatgatggtgatggttgtacaactctgtgaaggtactaaaaaacgaattgtatacwtttatagtgttaattttatggcatgtgaattatatatcaacaaagctattatctaaaaaaagaatacagtgtgtgctaaaggacctaagtgaggtcttac

SEQ ID NO: 161004 - DNA, 201 bp, Homo sapiens
aaactagattgatttcatctccattcatggaagtttctgaaatagcttctgatggtaaaaatgaaaaacgtgatgatggataaggttttatttcatctcasttttcttgcttcgcaggtgatggaggaaatgatgtcagcatgattcaggcagcagactgtgggattgggattgagggaaaggtaggttcgcccttttatc

SEQ ID NO: 161005 - DNA, 201 bp, Homo sapiens; identical to SEQ ID NO: 30086

SEQ ID NO: 161006 - DNA, 201 bp, Homo sapiens
ggagtgtcgccctgggtgggctggagggcgccatggccccgggtgagctggacggcgccgtggccccgggtgagctggagggcgccatggggctgtctgcrctgcttctgcagcttccctgcaagtctaaagtgatttcaaggcaaaatgattagaaaacggagtcagagccaagaaagtcttcaattttcctaggataga

SEQ ID NO: 161007 - DNA, 201 bp, Homo sapiens
gcgaagcctgcagtgagccaaggtcgcaccactgcactccagcctgggcgacagagcaagagtccgtctcaaaaaaaaaaaaaaaaaaaaaatcagagaamgtatactgaggaggtaggctgggagaataaattataatagagataaaagtggttacagactcaggacaggagtcctggcattttggagtggctggtccca

SEQ ID NO: 161008 - DNA, 201 bp, Homo sapiens
actcgggaggctgaggcaggagaatcgcttgaacctgggaggcggaggttgcagtgagctgagatcgtgccactgcactctagcctgggcaacagagcaasactccatctcaaaaaaatgaaaataaattttaaaaatttgcttgattttattttttacaatttttggtatgatagaaatatactttctgaatccgtaata

SEQ ID NO: 161009 - DNA, 201 bp, Homo sapiens
ctgtgaaggtactaaaaaacgaattgtatacatttatagtgttaattttatggcatgtgaattatatatcaacaaagctattatctaaaaaaagaatacastgtgtgctaaaggacctaagtgaggtcttactctgctcatcagctggtgtcttcagtggaaaccatggcaaatacatggcacatgccgtgccatgcctgc

SEQ ID NO: 161010 - DNA, 201 bp, Homo sapiens
ttaaacatttgtctcacacaaacgaagcctattgtttttgtcagaatatatatttattaatcactaaatatctttttaaaaagaactactgtaattttttwaatttataacagcacaccagcatggcacatgtatacgtatgtaactaacctgcacaatgtgcacatgtaccctaaaactttaagtataataataaaaaat

SEQ ID NO: 161011 - DNA, 201 bp, Homo sapiens
tgtgtgctaaaggacctaagtgaggtcttactctgctcatcagctggtgtcttcagtggaaaccatggcaaatacatggcacatgccgtgccatgcctgcyttctttgcagatggggcacatcacaaattgttcatggcttctttttccttgagtccaagagtggctttaggatacttctcaaaacagtgcttccaacaac

SEQ ID NO: 161012 - DNA, 201 bp, Homo sapiens
gaagccaagggatggggaattggaaagagggcctggtgaacaattggaatgcacagaggaatgggaagtttcgtgagatggtctgccttacttgagaatarttttagtcaagtggtggaaggaaattgtggcaagtggagaagtatactggatatgaaaaggtttccgatggtgcagagtgcagactaagggaggagaaga

SEQ ID NO: 161013 - DNA, 201 bp, Homo sapiens
cagggagagatggttgtagggccgagggaggctcatgattagggggagagcacacagtatggctgaagagagatggcagaggggctgaaaaggagtgagaracacaggctgtcaggttgattttgaatgggaaagagactagaagaatccatgtttaagtcatgactgttgaaggggttttcaaataggacacttgagaaa

SEQ ID NO: 161014 - DNA, 201 bp, Homo sapiens
gggagagatggttgtagggccgagggaggctcatgattagggggagagcacacagtatggctgaagagagatggcagaggggctgaaaaggagtgagagasacaggctgtcaggttgattttgaatgggaaagagactagaagaatccatgtttaagtcatgactgttgaaggggttttcaaataggacacttgagaaaaa

SEQ ID NO: 161015 - DNA, 201 bp, Homo sapiens
ttaatttggcctattggttatacagaaaacaaaaaactgaaataaaaaagattattgtgctttcagtggacatacatccagtgttctgttatttacagttktgactgaagcaaggtcatcattaataatagagattgacttgaagaatattcctgtaacatgtcagaaaatatatatgcagcctttaaaaatgatgggcat

SEQ ID NO: 161016 - DNA, 201 bp, Homo sapiens
gttatgaaatactacaaacaccttgatgctcataaatagaagaaatggacaaattcttctgaaaccataaagtataagaactcagtcaaaatgaaatagayaatatcaatagtcctgtagccaataaagaagctgaattagtaatttaaagctctaggaaggaaatacctaggtccaggagaattccttaaaaccattaca

SEQ ID NO: 161017 - DNA, 201 bp, Homo sapiens
agctacaagaggtcggcggcactcggccagttcgtcatgcacaggggccttatcatctccaccatgcaggtactaagccttctgtgctggcacccatggarggcagggtccaggaagggcagggtccgggaagggcagggtccgggagtgggggtgctgagtgctgccggaagtacctgggctgtgcttaggagttagcga

SEQ ID NO: 161018 - DNA, 201 bp, Homo sapiens
cctcacgctggtcagcagggacctcacctccatgcagctgaagacccccagtggccaggtcctcagcttctgcattctgcagctgtttcccttcacctccsagagcaagcggatgggcgtcatcgtcagggtgaggctgcggggagggtgccacgcgatggcttcagacattttgttttcacaccttttaaacacagattt

SEQ ID NO: 161019 - DNA, 201 bp, Homo sapiens
ttgattagccaagcaggcagttcagaagatttgaatagcataattgtcagtttagatcttatggacatatatagagttacttatctaacaactagaaacasatgtgcttatcagacatgtatgagaaagttacacaaatttgatacatactaggccgtgagtcaaatttcaataaattttaaagagtggatatttctgatc

SEQ ID NO: 161020 - DNA, 201 bp, Homo sapiens
cggctttgaatgtttccatccaatacgtggcattttttgaaaggaaactttgtattcatttctgaatgtttttgtcctggcttttacagttcctcactgctatgttgcaggggaaagtgtgaggtggtggttatgcattttgcaagacagtgattctttattttattacaaaaaaagaccaactctggaaggccagattaa

SEQ ID NO: 161021 - DNA, 201 bp, Homo sapiens
aatctaagttggaaattaaagttttaattataaaattagtgatcttgtttactaataatcatttaaccattctcttttctaaaattttataagagaaatargcaggtggaaagtagtctccccactaccccccctccgccccctctattctccgcagtttctttaaaaacacagttttcatggccatgttccaggcaggct

SEQ ID NO: 161022 - DNA, 201 bp, Homo sapiens
cccagacgatgggcggccgggcagagacgctcctcacttcctagacgggatgacggccaggaagaggcgctcctcacttcccagactgggcggcggggcayaggagctcctcccatcccagatgatgggccgccaggcggagacgctcctcacttcctagatggggtggcggccgggaagaggcgcttctcacttcccaga

SEQ ID NO: 161023 - DNA, 201 bp, Homo sapiens
aaaaatcatatatgttaataattccatgttaactagatagttctctttgctctatctttaattatgtgacgtttcatattctaaagatgcagtctcaagckggtggaaacaatactggttcaactccactaagaaaagcccaatcttcagctcccaaagttaggaaaagtgtcagtagtcgaatccatgaagccgtgaaag

SEQ ID NO: 161024 - DNA, 201 bp, Homo sapiens
tcttcagctcccaaagttaggaaaagtgtcagtagtcgaatccatgaagccgtgaaagccatcgtgctgtgtcacaacgtgacccccgtgtatgagtctcrggccggcgttactgaggagactgagttcgcagaggctgaccaagacttcagtgatgagaatcgcacctaccaggcttccagcccggatgaggtcagtcaa

SEQ ID NO: 161025 - DNA, 201 bp, Homo sapiens
atagttttagtgaggttagtgttaccattggatagaaaactaagcttttctaaccttgaaaagctcctgcttatcctccttgcggcctttagccggctccygtttgcctggtcagctttgttactagcacttaacataatcactgcccgcttggttctgggggacttgccgcttgtctttgccattcctttcttcttagcc

SEQ ID NO: 161026 - DNA, 201 bp, Homo sapiens
attgactctgcttttagaagtcatgaataaataggagttaaggacatagcaaattagtgccattgttgaagtgaatacagtaaaaataaattgtcagattyttaagtagtatagtgaatattttggtgtatttgacaacctggatatatcgaagtgcttcatagtactaggcttaaaaaaataactcattaatcagtgctt

SEQ ID NO: 161027 - DNA, 201 bp, Homo sapiens
caaatagcatgcttccatgtttagggtgtatctctgcctttgttccagcggcacagcatgtgtaagctgtgtgtctgtgcatgcctgatgcaccgtatgcrtgtatgtatgatgtgcctggtgcacatctgcactccggagccttccctgaatcctgcacggatacgctcctgtccctgagctctctccactgaatcctgc

SEQ ID NO: 161028 - DNA, 201 bp, Homo sapiens
ccccatcgacggagctgaagctttacaagttctgcagagagaatttcggtctttgtaacatttaggctgagttctaaaactcacttttggagtctgatttycagcgtccgccatgtttgaaaaggccccgtgtgcttttctctcaggagggtaaacaggcctcgctggcggccgacttctccatcacgcagttccggcaca

SEQ ID NO: 161029 - DNA, 201 bp, Homo sapiens
ataaaaattacttttggtcataatgatgtgcaattaattgtaaaatacttctttaatttatttagctttatgaggccaaatcaataaatgttttgcaacasacagatgatgtcagaatgtttttcacaaagataactttattaaaaattctatgtacatttattttttcaacattatattttctttccttggataaattgt

SEQ ID NO: 161030 - DNA, 201 bp, Homo sapiens
tcgcatgtgggttgcggtgaggacacaaacccctttgtgaggacactgagacttgagcccggggctgcggggccgtggacaacagcacctcacatcccagwgggagctctgcacttgcagctgactccacacccagggcctgtcacagccgcccagcaaacatactgagcaaggactggatggaaaatgagatgctatttc

SEQ ID NO: 161031 - DNA, 201 bp, Homo sapiens
gactcttggactaagaaacaaattccacctcccatccttggaataggatttcctatttgtacagattcaagaaaaatagctcttattattatgaatagaaraaactcatcttgctgtctcgcccaggctagagtgcagtggtgtgatcatagctcattgcaacctcaaactcctaggctcacacagtcctcctgcctcagc

SEQ ID NO: 161032 - DNA, 201 bp, Homo sapiens
tgtcactgagctagctgccgtcagtctccataactgtgtctgttgttggaagataaaccccagtcttgcttggacagcttgattctgaagttgggagttgwaatgacaggttgtctttactggatctgcatatggaccatctggttggctggccatgcagaactcccacccccctccagccctcgttgcttgtagaaccct

SEQ ID NO: 161033 - DNA, 201 bp, Homo sapiens
aggaaccctcacccagaatgaaatgatatttaagcggctgcacctgggcaccgtgtcctatggcgccgacacgatggatgagatccagagccatgtcaggractcctactcacaggtaagtgggttcctcctgcacggggtctgcttccacacacatcccgcgccatgagtccagctgagcctcgtgtgttcccatctgta

SEQ ID NO: 161034 - DNA, 201 bp, Homo sapiens
gtttgcaaatattttctctcattctgtgggttttctcttcactttgttgattgttttctttgctgtgcagtggctttttagcccaatgtgatcctgtttgwccatttttgctttggttgcctgtgcttttgaggtcttattcaagaagtctttgcccagaccaaagtgccctggagtgtgccagcctattaggcacatttt

SEQ ID NO: 161035 - DNA, 201 bp, Homo sapiens
ttattgatatttcttagttctaaaaattctggttggtttctttatcacattgattatttcatttttaaagttgcctattccacacaaacatttaaaaaaawtttttatgtatccgtttgttttataatctgtatcaatatcagatacctttgtcaatctttttatgttgtattttggtcttctggctcttgcttctggtgt

SEQ ID NO: 161036 - DNA, 201 bp, Homo sapiens
attcttgcttggccatccttcttggaaaatagtttcattgggtatagaattctaggctgtcacctttcttttttgtcttctgttactgcttttaagacttyacttctttgggtccttccatctcttccagccgcttttctatcctctcctcattggtggcattgtacgctctaccctacataatgtgttgaggtacgatgt

SEQ ID NO: 161037 - DNA, 201 bp, Homo sapiens
ggatattgaattctggcttgacaagtctgccttccacaccctccacccctcactttaaatattttgttccattgtcttctgactccattatttataatgaraaatcagtggtattttgatagttcttctcttgtgtataatgtgttatttttctttaggtatttttgagattttttttatttttggtttttagcaatttga

SEQ ID NO: 161038 - DNA, 201 bp, Homo sapiens
cacggcctcccaaagtgctgggattacaggcatgagccaccgtgcctggcccattttatttatattttaaaggaattaagattaaaaacaggatttggggkttttttttaaatatttacttagatatttactacttttgttccttaccattccttcttgaagatatgagtttctgcctgatattgtttccctctgctgata

SEQ ID NO: 161039 - DNA, 201 bp, Homo sapiens
tcagtagtcgaatccatgaagccgtgaaagccatcgtgctgtgtcacaacgtgacccccgtgtatgagtctcgggccggcgttactgaggagactgagttygcagaggctgaccaagacttcagtgatgagaatcgcacctaccaggcttccagcccggatgaggtcagtcaaagcacaaaaccgtgggagcttgtccgtt

SEQ ID NO: 161040 - DNA, 201 bp, Homo sapiens
ctcaatgtactttttaatatgtagtatatctacacatatcataaactgttccagccctttttatttatacacacacacacacacacacacacacacacacmtatacatatatttttggcacagagttttgctctgtcacccaggctggagtgcagtggtgcgatctcggctcactgcaacctctgcctcccgggttcaacc

SEQ ID NO: 161041 - DNA, 201 bp, Homo sapiens
gctcaatgtactttttaatatgtagtatatctacacatatcataaactgttccagccctttttatttatacacacacacacacacacacacacacacacacatatacatatatttttggcacagagttttgctctgtcacccaggctggagtgcagtggtgcgatctcggctcactgcaacctctgcctcccgggttcaac

SEQ ID NO: 161042 - DNA, 201 bp, Homo sapiens
tgcccagtgataaatttttatttcttatttggctgtgtgctcctctcctttgcgactttgtattgatatttgccaattaaaaagtacatacatgctcgtgwgtgtagaatctttcaaatcagtaaaaccagatattcacaaatgaatatctgtttttaattttcacttaggcacataaaagtgtttttctttcttctattt

SEQ ID NO: 161043 - DNA, 201 bp, Homo sapiens
tgtgatgtcttagcacataatcagttttaggtaattgtgaattttctttgacacttaggttttctttctccttctgctcaccttcctgcccttcctccctstccttgcccccttccccctcttccgcctcctcctcctcttaatgtccttttcctttttcaatttattttattttttaagtgataggttgtcactctgttg

SEQ ID NO: 161044 - DNA, 201 bp, Homo sapiens
gattacaggcgtagccaccgtgcccgcctagagactttttctgcttagcacaacaccctggagatccatccaagttgttgtatatgtcaatagtttgttcmttttttactgctaactaggatttcatggatggatgtaccacagcatattttaaaccattcatcattgttggttgaagttttttgttgtttacaggttttt

SEQ ID NO: 161045 - DNA, 201 bp, Homo sapiens
gaagcaattcactcgtgaaatatgaatatttttatactagtatagttgagttatatagatacatattaataggaaagatagattgcagttctattagcaamctaaattgagagctttaatttgctatttaaaacttattcctagagtgaacaacaccttttttaaaaatacattttatattgacataattaatgactcctg

SEQ ID NO: 161046 - DNA, 201 bp, Homo sapiens
tatggtaaaaccccatctctaataaaaatataaaaatcatccgggcgtggtggtgtgcacctgtaatcccagctattcaggagactgaggccagagaatcrcttgaacctgggaggcggaggttgcagtgagccgagatcttgccgctgcactccagcctgggcgacagagcgagactccatcaaaaaaaaaagataattt

SEQ ID NO: 161047 - DNA, 201 bp, Homo sapiens
acttctcggatacttcaaagtctccgaaacttgttcttgtagccctgtgaattgtgaaggtgacggatgtaacttttaattgctttgttaaaaacacactycttattgaaatgacttctcttcgacatttcgatatctttgctaggcacactttttgtttaaacatatatatacaaagtgctttttgtcgacaagtaattt

SEQ ID NO: 161048 - DNA, 201 bp, Homo sapiens
tgtctggaggcacagttttcaggcgttgtagacatttgggaaatatgtttctggcttttgtgatcaaacaaatttattaacaaccacaaggccacagtaaytttcaataaatcatgacatgctgatttatttcaaaagatccgtatagcagtaaacaataccatttacatttaattagttttattgaacgaaaggcaattt

SEQ ID NO: 161049 - DNA, 201 bp, Homo sapiens
tactggaatgttataacgctgatttgagtgtttacccactagcgatttactctcgggtaacttatttaaactcaagccatggtttcctcatctgtaaaatkctggataatattttttcttacgggattattggagattacagtagaacatgtgtaaggtgcccttttttcagtgcttggttggaagtgggttctggtgtta

SEQ ID NO: 161050 - DNA, 201 bp, Homo sapiens
tgcgggctgcatgtcgggggagctggcggtgtgcacagtgactgaaggtgcaagctgcatgtcgggggagccggcggtgtgcagagtgactgaaggtgcasgctgcatgtcgggggagccggcggtgtggagagtgactgaaggtgcaggctgcatgtcgggggagctggcggtgtggagagtgactgaaggtgcaggctg

SEQ ID NO: 161051 - DNA, 201 bp, Homo sapiens
ccgtggttagcgtgctctctctggttagcgtgctctccgtggttagcgtgctctctgtggttagcgtgctctctgtggttagcgtgctctccgtggatagygtgctctctgtggttagcgtgctctccgtggttagtgtgctctctgtggttagtgtgttctccgtggttagcatgttccccatggttagtgtgcctttag

SEQ ID NO: 161052 - DNA, 201 bp, Homo sapiens
agtaggaagtgtgtcatgatcgtagtaggaagtatgtcatgatcacagtaggaagtgtgtcatgatcgcagtaggaagtgtgtcatgagactatcatatcygtctgagatcgcagtaggaagtgtgcatgattgcagtaggaagtatgtcatcgcagtaggaagtatgtcatcgcagtaggaagtatgtcatgatcacagt

SEQ ID NO: 161053 - DNA, 201 bp, Homo sapiens
aaactttaagtataataataaaaaataaataaataaataattaattaaaaagcatgttaaaatagatatttttagccacatacattaatcatgatcaaagstgctttttgacggaatgaacaagctctaagttcagaagtattttttgcttatactattagtattatttgctattttaaaagaggcatactgcaattattt

SEQ ID NO: 161054 - DNA, 201 bp, Homo sapiens
taaagttaaaaaaaaaaaaagaaaaacagtaagttgcaccagtaccattcactgaagaacttttttgttagatttttatttttgcacaaatttaatattgwccccatatgtttatacaattctaatttctcaacatcagggtatcagcgtatctgtttctccataactttacccagtacacattgcaaatatattctccaa

SEQ ID NO: 161055 - DNA, 201 bp, Homo sapiens
ctcccctccttccttagggacatctgcagctggtgcacacacaaatccccacgccacccctactccagaccttcctctctacacctcttccctctctggayaccccagcctttctaaagaggagtcctggtcccagccctggcgatgtcaaactgccacatgccatttcccagggatggttatgcaccccccacaggacgc

SEQ ID NO: 161056 - DNA, 201 bp, Homo sapiens
catgttaggaattgtgtatccttgcaagtgttttattagctgcatagtttctgacaaattatagcttccatagctgacctgatattggtaaatttaaaagwtatcattttgaaattctagatttaaaaaaaagcatatttcaagaattttgattatttggccaaaatgcttttcagaagactatgcaacttatctactgtg

SEQ ID NO: 161057 - DNA, 201 bp, Homo sapiens
attgaatcatgggagtggttacccccatgctgttgtgatagtgggtgagttctcacgagatctgatggttttataaggggcttttctccctttgctcggcmcttctcattgctgccaccatgtgaagaaggacgtgtttgctttcccttcaccattattgattgtaagttttccaaggcctccccagttatgctgacctgt

SEQ ID NO: 161058 - DNA, 201 bp, Homo sapiens
ttttgctgtgatgtttcacaattgaaaagccttttttttttttaaggcgtagtactaattcttaagacagtgtttatctaattgtccagtcccaggattcrttggaatcagagacattttcttagggggtctataagaatttcctttaaaaggcatccgtaggctgcgtgcagtggctcacgcctgtaatcccagcacttt

SEQ ID NO: 161059 - DNA, 201 bp, Homo sapiens
ccctttatcctaggaaccctcacccagaatgaaatgatatttaagcggctgcacctgggcaccgtgtcctatggcgccgacacgatggatgagatccagarccatgtcagggactcctactcacaggtaagtgggttcctcctgcacggggtctgcttccacacacatcccgcgccatgagtccagctgagcctcgtgtgt

SEQ ID NO: 161060 - DNA, 201 bp, Homo sapiens
acacacacacacacaaaacaaaacaaaaaaatggctagcctagatcgtccaaacaaatcccacaggttaggtgagctggtgtctcttccctaagcaccacaactagtacttcagtgccttcacaaattctgccacagagtgttgtccacccattcagtggtgtttggtgacattagtcatctgcaaccatttttttttttt

SEQ ID NO: 161061 - DNA, 201 bp, Homo sapiens
cggcggtgtgcagagtgactgaaggtgcacgctgcatgtcgggggagccggcggtgtggagagtgactgaaggtgcaggctgcatgtcgggggagctggcrgtgtggagagtgactgaaggtgcaggctgcatgtcgggggagctggcggtgtggagagtgactgaaggtgcaggctgcatgtcgggggagctggcggtgt

SEQ ID NO: 161062 - DNA, 201 bp, Homo sapiens
gtgctggaacctctgtggggtggaaagcaagtgggcatgtggatggtggttatgtagttgctgaagatggagaagggagagtcggtatcaccttccccagkaggatttctgtgggctgccagactagggagggtctggggttcatggacatgccctgtctcatgcaaatggattccctttgtggctaccatacatcaaaaa

SEQ ID NO: 161063 - DNA, 201 bp, Homo sapiens
aacacgccaggggggtccccctctcccccagtgtacaccaggagccctccctggcaccaggcgctcccctcgcccgtccccagcaccgccgtgtgcacccwccatgccctccctggcaccaggtgctcccctcgcccgtccccagcaccgccgtgtgcacccaccatgccctccctggcaccaggcgctcccctcgcccgt

SEQ ID NO: 161064 - DNA, 201 bp, Homo sapiens
tgtggttggatgtgtgtagcgtgacctcgttgaagcctgtgttgccgacacaccatttagttgtggttggatgtgtgtagcgtgacctcgttgaagcctgygttgccgacacaccatttagttgtggttgtatgtgtgtagcgtgacctcgttgaagcctgtgttgccgacacaccatttagttgtggttggatgtgtgta

SEQ ID NO: 161065 - DNA, 201 bp, Homo sapiens
atttaaacattggcaaaagatttgaacagctacatcaccaaaagagatatgaatattgactgtaaaataccataaaagtagtgatttgtggggtctaatayagaaaaaatattaagatacatgatgataatagccaaaagtcaagaggcgattgatgtcaatgggagtaaattactctaaggtccttagagtacaggtaaa

SEQ ID NO: 161066 - DNA, 201 bp, Homo sapiens
tggagctgggcccctgtaaatgcacagtgatgtttccgtggcaagcttagaccgtctggtggcctggccaggtctgtggctgtggccatgagggcccaggrcttcttggtcagctcttacctttttctctgtttcctgccaacagatgttgcctttatcaccaccgtgaccttcctgtggaaagtgtcggcgatcaccgtg

SEQ ID NO: 161067 - DNA, 201 bp, Homo sapiens
gtgcccccatattggtccttttttttttctttggtgctggtggtgtgggtggtatgtatttaattagataatacatgacctttcaaaggaatcaatgcagsctgtatgtaagcaaggaaataaacaaacccaccatcctatttacaaactagaaaattagctgggtacaatggtgcatgcctatcatcctggctactcctt

SEQ ID NO: 161068 - DNA, 201 bp, Homo sapiens
aggagttcgagaccagcctggccgtcatggcgaaatcctgtctctactaaaaatacaaaaattagccgggcatggtggcgggcacctgtaatcccagctamttatgaggctgaggcaggagaatcgcttgaacccaggaggcagaggttgcagtgagccaagattgcgccactgcactccagcctgaatgacagagtgaga

SEQ ID NO: 161069 - DNA, 201 bp, Homo sapiens
tggggtctaatacagaaaaaatattaagatacatgatgataatagccaaaagtcaagaggcgattgatgtcaatgggagtaaattactctaaggtccttaragtacaggtaaaggtgctgatttacttagactttggtaagttcaggattatgctggcagcagtgggatgactgccaaagagcagtaaaagagcatgtacc

SEQ ID NO: 161070 - DNA, 201 bp, Homo sapiens
tacatgatgataatagccaaaagtcaagaggcgattgatgtcaatgggagtaaattactctaaggtccttagagtacaggtaaaggtgctgatttacttaractttggtaagttcaggattatgctggcagcagtgggatgactgccaaagagcagtaaaagagcatgtacctctccggggtggtggaaacatggccattg

SEQ ID NO: 161071 - DNA, 201 bp, Homo sapiens
tacagttttgtgtacactttgtccctttaaggtccttgaggtagttctgtaaagtaatcaagccaaccacagaagcactataaaccaactagtgtcttccratactttgtaaaactgtgtcatatacataaataattggtgggggcagggcgtaccttcagtgaaaacaaaaagaaaaaaatcagatctaatgttttaaag

SEQ ID NO: 161072 - DNA, 201 bp, Homo sapiens
gaacacatccaatccaaaaaataaggtaggctagattgaggagcaactgctttaatgaacttatttttcctttcagtaagaaagtctgcatagttctgaayagctcattcttttggcttaacatatatcttaaagtagactttcaaaaatgttggtgacttacaatatgaattctccgtatttatataacaacattctcat

SEQ ID NO: 161073 - DNA, 201 bp, Homo sapiens
ccttccgtctccagtcttcaggtcctctctgtcctctggcctccacacatgatgtccccttggcctagaccactgccagatgtccccattgtccttgcttycctgggaggccccgcacccccccccccaccatgcaccttcacacccccaggctgcgcagttgtattaccagttagcgtcctattctcctgcgtgctctac

SEQ ID NO: 161074 - DNA, 201 bp, Homo sapiens
accaagggtggcaagcaacttttactttaaaattgcctgaaagcaggagtctcttgtctaggcttctagaagcagaagaattctaccactttatggctcakgaacaaccagtaatgtcattcatctttttttccttgagagttggctgtgaccgtgtcctgacaaggcacaaacttccaggatcatgggactagatctcgt

SEQ ID NO: 161075 - DNA, 201 bp, Homo sapiens
tcctcacttcccagactgggcggcggggcagaggagctcctcccatcccagatgatgggccgccaggcggagacgctcctcacttcctagatggggtggcrgccgggaagaggcgcttctcacttcccagactgggaggccgggcagacgggctcctcacatcccagacaatgggtggccaggcagagacgctcctcactt

SEQ ID NO: 161076 - DNA, 201 bp, Homo sapiens
ctcctcccatcccagatgatgggccgccaggcggagacgctcctcacttcctagatggggtggcggccgggaagaggcgcttctcacttcccagactgggmggccgggcagacgggctcctcacatcccagacaatgggtggccaggcagagacgctcctcacttcctagatggggtggcagctgggcagaggctgcaatc

SEQ ID NO: 161077 - DNA, 201 bp, Homo sapiens
cagacaatgggtggccaggcagagacgctcctcacttcctagatggggtggcagctgggcagaggctgcaatctcagcactttgggaggccaaggcaggcrgctgggaagtggaggttgtagcgagccgagatcaccccactgcactccagcctgggcaacattgagcactgagtgagcgagactccgtctgcaatcccag

SEQ ID NO: 161078 - DNA, 201 bp, Homo sapiens
aggcgggcagaccactcgaagtcaggagccggagaccagcctggccaacacggagaaaccccgtctccaccaaaaaatacaaaaaccagtcaggcgtggcrgcgcgcgcctgcaatcccaggcactcggcaggctgaggcaggagaatcaggcagggaggttgcagtgagccaagattgcggcagtacagtccagcctcgg

SEQ ID NO: 161079 - DNA, 201 bp, Homo sapiens
gtcctttttttttttttaactgatgcatgccacctaaaaactgacttagtttttaattaaatgttaatccagaaagattttaacaagcacttaccacattrtataccctgcacaatggctttctttcatagagtgataaaaagactttgagaaatctgagttatgtaaggagaagccattagctgccctttgtttagtgtt

SEQ ID NO: 161080 - DNA, 201 bp, Homo sapiens
catcccctgacggtactgggttttctcagcgctattgattgaaaacacaattatttcctcactgattggcagtttcatctttctcatagtgtccctatatrtgtggacctatttttggacatctagctttgtattggtataatcgtctatcttggtgtaatctcatcttttcttaactactctagtttaatctagttttat

SEQ ID NO: 161081 - DNA, 201 bp, Homo sapiens
gtggtgggtagagtcaaccaggcagctattaaatagtgaagttatatgtcagggagcagcacctcctcacctgaggatggggctggggtgtgtgtgcatgyggcagttcctggatcacacagtgtggctttcaaaggagctgccaaactgttttccagagtggctgtgccattccctgtcctcaccagcaccggatgagtg

SEQ ID NO: 161082 - DNA, 201 bp, Homo sapiens
tctaatccactttatctaggttatctaatctgcggccgtgcagttgtttttaggatttccttacagtcctttttatttctgtcaggttggtagtaatgtarcctcctttgttcctgattttagtaattgaactcttctctctttttttcttggtcagtctagcttaaaggtttgtcaatcttgttgatcttttaaaataac

SEQ ID NO: 161083 - DNA, 201 bp, Homo sapiens
caaggctacagtaaccaaaacagcatggtacttgtaccaaaacagagatatagatcaatggaacagaacagagccctcagaaataacgccacatacctacaactatctgatctttgacaaacctgagaaaaacaagcaatggggaaaggattccctatttaataaatggtgctgggaaaactggctagccatatgtagaaa

SEQ ID NO: 161084 - DNA, 201 bp, Homo sapiens
tcatgcaaaatgtctttgtggcctgtgctgacccagagccataaggggaaggatttgccaagcagctgaagcttagctatgttaatacatacaaatccatyaccaaaggaaggaaactattagagcaataactttaaaaaatgtcccaggactgaaggacactagtgtcttatcagaaggggcccaccaaatgccaagtaa

SEQ ID NO: 161085 - DNA, 201 bp, Homo sapiens
cccctcgcccgtccccagcaccgccgtgtgcaccctccatgccctccctggcaccaggtgctcccctcgcccgtccccagcaccgccgtgtgcacccaccrtgccctccctggcaccaggcgctcccctcgcccgtccccagcaccgccgtgtgcaccctctgtgccctccctggcaccaggcgctcccctcgcctgtccc

SEQ ID NO: 161086 - DNA, 201 bp, Homo sapiens
aatacagaaaattagccaggcgaggcatggtggcacatacctgtaatcccagctacttgggaggctgaggcaggagaattgtttgaaaccgggaggcagargttgcagtgagccaagatcggactccgtctccaaaaaaaaaaaaaaaaaaaaaaagcccagtggcacacacttgtcatcccaactatttggggtgggggg

SEQ ID NO: 161087 - DNA, 201 bp, Homo sapiens
gaggtgaacacagccgcgtgtgcacttgtcctcgtctcagtgcctgagtgtccatgcagtggtgaacctgtacgtaggaaaatgtgaaatgttcctgttcwtacataaaagaactctcagaaaatacccgtggctcataagaaatggttattttcaagttataatgtgctagttatttttcttttgaaaattggctcttag

SEQ ID NO: 161088 - DNA, 201 bp, Homo sapiens
aaggagaggagagagagcagggcttgcaacagtgctgacagtggccatctctgggcaaaagaaatgtggacagttttcatttcaatttttttacttcctcraagtttaaaaagctctataatgaacatatattactcttgggcaagaagggattttttttttccagaaaaacactaacaagtgctttctttgtctttcctc

SEQ ID NO: 161089 - DNA, 201 bp, Homo sapiens
aaacccagccccacttccggcccagctccacttccaggacggtgggaggtgaggtagatgggttcctccctgctccttctgctaagttcagctggaaacaraaggctctgagtggagagcgaggtgaacagagggggcaaggggcgaggcggcaggagctccccgggttttccagcagctggagctgaaggagccggcagc

SEQ ID NO: 161090 - DNA, 201 bp, Homo sapiens
tgcaagctgcatgtcgggggagccggcggtgtgcagagtgactgaaggtgcacgctgcatgtcgggggagccggcggtgtggagagtgactgaaggtgcargctgcatgtcgggggagctggcggtgtggagagtgactgaaggtgcaggctgcatgtcgggggagctggcggtgtggagagtgactgaaggtgcaggctg

SEQ ID NO: 161091 - DNA, 201 bp, Homo sapiens
tgtggagagtgactgaaggtgcaggctgcatgtcgggggagctggcggtgtggagagtgactgaaggtgcaggctgcatgtcgggggagctggcggtgtgsagagtgactgaaggtgcaggctgcatgtcgggggagctggcggtgtgcacagtgactgaaggtgcaagctgcatgtcgggggagctggcggtgtgcagag

SEQ ID NO: 161092 - DNA, 201 bp, Homo sapiens
aggtgcaggctgcatgtcgggggagctggcggtgtggagagtgactgaaggtgcaggctgcatgtcgggggagctggcggtgtggagagtgactgaaggtscaggctgcatgtcgggggagctggcggtgtgcacagtgactgaaggtgcaagctgcatgtcgggggagctggcggtgtgcagagtgactgaaggtccatg

SEQ ID NO: 161093 - DNA, 201 bp, Homo sapiens
tggaatgagaggcgtaaacagatgttcctgggttgggaggcgtaaacagatgttcctggattgagcctcaattagatgttcatggattgagagcctcagtrttgcttcacattgacaagctcactctagaatttatatggcaaggcaagggaactcgaattgccaaaataatttagaaaataacagagttgggccgggcgc

SEQ ID NO: 161094 - DNA, 201 bp, Homo sapiens
ctccagcctgggccacagagtgagaccgtgtctcaaaaaaaaaaaaaaaaaaaaaaaaaaacccagccccacttccggcccagctccacttccaggacggkgggaggtgaggtagatgggttcctccctgctccttctgctaagttcagctggaaacagaaggctctgagtggagagcgaggtgaacagagggggcaaggg

SEQ ID NO: 161095 - DNA, 201 bp, Homo sapiens
ttgagtttagggcaaccttttcgtcattatgcagcatgcctgtttttatcagctaatatgtgtaattacatttagaataagtgcactctaagtgctttaayggtattctgatattagtgttgtgacctagcagttgtcttctgctggctgaataattagtttgtttctaagagctttagagtttgatagtcgccaaacaca

SEQ ID NO: 161096 - DNA, 201 bp, Homo sapiens
tctactaacagttttaatactattttattgctttttagtttcagtttgaaaaaatctgataatacactgtttattataattacaatattttaaatcttagrtatgatggaagtcctaagtgttaatatatgcagcatatcccagcttgaacactggcagctgggtgcttgtcagtacagcatggtgggttgctcatggcat

SEQ ID NO: 161097 - DNA, 201 bp, Homo sapiens
gtctctaaaatctctaaaattaacctcaattgtttagttatttacctttaggaatagttgttttaatatttttatattttattttcatattttattttatacacacacacacacacacacacacacacacacacacacacagggggagacagagacagacagacagacagagacagaaaaggtctcgcactgtcccaggct

SEQ ID NO: 161098 - DNA, 201 bp, Homo sapiens
tctctaaaatctctaaaattaacctcaattgtttagttatttacctttaggaatagttgttttaatatttttatattttattttcatattttattttatacacacacacacacacacacacacacacacacacacacacagggggagacagagacagacagacagacagagacagaaaaggtctcgcactgtcccaggcta

SEQ ID NO: 161099 - DNA, 201 bp, Homo sapiens
ctctaaaatctctaaaattaacctcaattgtttagttatttacctttaggaatagttgttttaatatttttatattttattttcatattttattttatacacacacacacacacacacacacacacacacacacacacagggggagacagagacagacagacagacagagacagaaaaggtctcgcactgtcccaggctag

SEQ ID NO: 161100 - DNA, 201 bp, Homo sapiens
gtagaaagcaaatcgccacccatggcccttctctgcctccggctccccgaccacaggttgcagagaaggatggggtgcatctgtgcccaggtgtgtgcgaygcctcaccacatggaaggacagccagctggaggcacaggacatgcctgaactgtgctgcaaactagaagacacaaaatatctgggtttttattccagaaa

SEQ ID NO: 161101 - DNA, 201 bp, Homo sapiens
tctaaaatctctaaaattaacctcaattgtttagttatttacctttaggaatagttgttttaatatttttatattttattttcatattttattttatacacacacacacacacacacacacacacacacacacacacagggggagacagagacagacagacagacagagacagaaaaggtctcgcactgtcccaggctaga

SEQ ID NO: 161102 - DNA, 201 bp, Homo sapiens
attagcatttctgatatgtatgtagaagtgtttttttttttttttatgaagttctgggatacatgtgcagaacgtgcaagtttgttacataggtatacacrtgccatggtggtttgctgcacccatcaacccgtcgtctacattaggtatttcttctgttgctatccctcccctaaacccagagtgagcaggcaacctaca

SEQ ID NO: 161103 - DNA, 201 bp, Homo sapiens
aacctctgagctggccaaatgatgcatggtcctctgtccccaaggtgagtcctacaatgctgagcttacacatgacatcacaggcctccctgtcagcctgraagatggtttttgcccaagatgatggtctcaggagtcaatggagaagacctccaagccacccatccctgactgaacacgggcaaagtcgtgaaatccctg

SEQ ID NO: 161104 - DNA, 201 bp, Homo sapiens
taaggacataaagagtctgaatatgacatttttaaaaatacttttaaaggccgggcatgatgattcatacctgtaatcccagcactttgggaggccaaggygagaggatcacataaaactaggaatttgagacgagcctggacaacatagaccaaaatttaaagaattagccaggcacagtggcatacatctgctgtccta

SEQ ID NO: 161105 - DNA, 201 bp, Homo sapiens
gagttaagaagtgttctttcttctatgttttggaagagtttgtgaagaattattattaattctttgttaagcgtttgatagaattcgcccatgaaaccctstgggactggactttactctgatttttaaaaaattactaattcagtttctttacttgttacaggattattcagattatctatttctttccaagtcagtttt

SEQ ID NO: 161106 - DNA, 201 bp, Homo sapiens
gcttagggaggaggattgcttgggcccgggaattcaaggctgcagtgagccatgatcattgttgaaacgtattaaagagaccaaagtaaatgtaagacagytcatgcccatggttagaagtatgttattcaaaaggcagtgttccctaaattgatctgtagattcagtgttacccctctcaaaatcccagttgatgtcttt

SEQ ID NO: 161107 - DNA, 201 bp, Homo sapiens
ttccacgcagaccagcagcaggactctcaccgcttcagctgtgatctccacagactgggaaaacaccaacggccatccaccagggggtggaagagctgcaytgtgtccatagtgtgagacgctggcctgcagcacagagaaagcagaggacacgctcggcaaggtgggcgagtcctgacaccgctggcccgaagagaccca

SEQ ID NO: 161108 - DNA, 201 bp, Homo sapiens
ttttatgaaattaaaaatttgctgccccatgccccagcaacctccctcctcagtgttcacccaggaaaaaggaaaacactcatgcttccacgcaaaccgayacagggactctcaccgcttcagctgtgatctccacagactgggagcttccacgcagaccagcagcaggactctcaccgcttcagctgtgatctccacaga

SEQ ID NO: 161109 - DNA, 201 bp, Homo sapiens
gctggcagtttttatgaaattaaaaatttgctgccccatgccccagcaacctccctcctcagtgttcacccaggaaaaaggaaaacactcatgcttccacrcaaaccgacacagggactctcaccgcttcagctgtgatctccacagactgggagcttccacgcagaccagcagcaggactctcaccgcttcagctgtgat

SEQ ID NO: 161110 - DNA, 201 bp, Homo sapiens
atatctttttctttgaatttaaagtgttttttaatgtaataaaagtaggtactgctttttttattctgagaattgctgcatttttattgtgtacatttacrgtaatcgttaatgtggttgagcggaagtcagtcatttgactctgtaggttctacttatcccatttgtttcttttcttcatcttttggtgttgtgttatat

SEQ ID NO: 161111 - DNA, 201 bp, Homo sapiens
tgtgcacagtgactgaaggtgcaagctgcatgtcgggggagccggcggtgtgcagagtgactgaaggtgcacgctgcatgtcgggggagccggcggtgtgsagagtgactgaaggtgcaggctgcatgtcgggggagctggcggtgtggagagtgactgaaggtgcaggctgcatgtcgggggagctggcggtgtggagag

SEQ ID NO: 161112 - DNA, 201 bp, Homo sapiens
agtctgaactggccagaggtgtctgtctccccagagattctggcagctgccggcgaggacctcacacacagcgccacatcatagcagccattcctgggtgygggtcttcttttacccttgctagtgactcagatggatagcctgtgagtgctctcgttaaagtcagattgaaccttaattgagcaccaagaaggtgcatga

SEQ ID NO: 161113 - DNA, 201 bp, Homo sapiens
cattttggtttatccacgtttcggttcgtaatgtcttcttgcatcttagagtagagtaatttgccttctgttagaaatgtgttcgctttttgtgcttttgrtgctggtctgttctgaactctcaattcttgcttggccatccttcttggaaaatagtttcattgggtatagaattctaggctgtcacctttcttttttgtc

SEQ ID NO: 161114 - DNA, 201 bp, Homo sapiens
ggcttccttgtggaaggttgatggctcccagtgacccttcgctgccatctggcacagattcaagggctgctgtcatctgctgctaattgctgtcacctgcrctttggagtccctcagcactgggatgctgctgcctttagagcgggcccctccttgggcccacctgtgtgtgcaggagagggagcaccgccgtgggcctgt

SEQ ID NO: 161115 - DNA, 201 bp, Homo sapiens
taaattctgagtatagaataggcaaaatgttaaatttcttggtaggcaaacatgtaggttatgaaataattctttcagaatagactttaaattgtctattrtgtaaatacaggttttgatttttaagaactaaggtgataaattgtaacattaagaattgttgtgctgatacttatttagggaattcttaaagcacagatt

SEQ ID NO: 161116 - DNA, 201 bp, Homo sapiens
atctgtaatcccagctactggggtggctgaggcaggagaattgcttgaacccaggaggcagaggttgcagtgagccaagatagtgccactgcacgactccrtctcaaaaaacaaacaaacaaatgtatgaagcacaaatgtataaagcacttgtagaacttcatgatggtagtcagagactgaattgttgctaactgcatt

SEQ ID NO: 161117 - DNA, 201 bp, Homo sapiens
accccacacccacactgtggagccttcttagctccaaagtgctcagtgcccccatattggtccttttttttttctttggtgctggtggtgtgggtggtatrtatttaattagataatacatgacctttcaaaggaatcaatgcagcctgtatgtaagcaaggaaataaacaaacccaccatcctatttacaaactagaaaa

SEQ ID NO: 161118 - DNA, 201 bp, Homo sapiens
ctgcaatatttgcccttctgtgtctagcttattgcacagcataatgtttccaaaatgtattgatttcagggtgtaaagactatggccccagtttcacttcrgcttttgagagttcatgcaaaatgtctttgtggcctgtgctgacccagagccataaggggaaggatttgccaagcagctgaagcttagctatgttaatac

SEQ ID NO: 161119 - DNA, 201 bp, Homo sapiens
tgccattcttttcttagcacttgaaaaatcttgtgctgcttccttcttgtgtccatggtttctgattaggatgctgctgtcactcagattgatgttccccygtagataatgtgtcatttctctctggctgctttcaagtttttactttgtctttagttttcagaagtttaattatgatgtgtcttatcatggatttctttg

SEQ ID NO: 161120 - DNA, 201 bp, Homo sapiens
agttcatgcaaaatgtctttgtggcctgtgctgacccagagccataaggggaaggatttgccaagcagctgaagcttagctatgttaatacatacaaatcyatcaccaaaggaaggaaactattagagcaataactttaaaaaatgtcccaggactgaaggacactagtgtcttatcagaaggggcccaccaaatgccaag

SEQ ID NO: 161121 - DNA, 201 bp, Homo sapiens
agattttttgtcatctcggtggattgttcctttcattgttaatgttcctctgtctctggtaattttctttgctctaaaatctttattagatattgatgtcrccatttatgcttttttttggattaatgtttgcatggtattagctttcaacttacctatgttgaatttgaagtgagtttcttgttggatcttatatttttt

SEQ ID NO: 161122 - DNA, 201 bp, Homo sapiens
  misc_feature (1)...(201): n = A,T,C or G
tctctcctcccaccctgggacctcagagatggtctgtccgtgcagcctccacaccccagtgttcgcaacggtagtggcaatatgaatcaatatctccttcngggtggtttgatttaatcagggacatgaataaattaaactccctgaagacctagtaaaatgccataaaaattacttttggtcataatgatgtgcaattaa

SEQ ID NO: 161123 - DNA, 201 bp, Homo sapiens
accagatttgtgctaatgttactgttggtgctgatgtgaaatataatgcttttttagtacaatactgttgataactcacactagcatgttatgtagaattmtgtaattactaaaactgcaccctgggcactctcccaccccaacaaaaagcaaatcaaatataacggtaccacataaggttcattaacctgtggaaatgag

SEQ ID NO: 161124 - DNA, 201 bp, Homo sapiens
caggaaatgtgaacctgacttcagctccacaagcaggctcactggcctgcgcctgctggccctgccttccctgaggcgcatccttgcctccatagttttastgaggttagtgttaccattggatagaaaactaagcttttctaaccttgaaaagctcctgcttatcctccttgcggcctttagccggctcccgtttgcctg

SEQ ID NO: 161125 - DNA, 201 bp, Homo sapiens
atcagaaactcctgttcactcttggtgggaacttaagttagcgttagcgcatcacttggtaaaacacattttggcatcatcagtcaagttgaatatgcacrtgttctactctccagccgttttgctcctgcttctgttccctacagaaatgtttgcacatctacaccagaagacatgcataagagtattcacagcattcta

SEQ ID NO: 161126 - DNA, 201 bp, Homo sapiens
ctctgagtaactccgtgtgcctgccgccttccctccagtcattcccatgcacagcgttgagaccggtctgctcacgcgccttcgccgaggtgccttcacaraggtgccttcgcggaggtgctggtcttggcttccctgcttgggttcaaccagtgccccatccaaatgctcttccggccacatcagtaattcatgatggtg

SEQ ID NO: 161127 - DNA, 201 bp, Homo sapiens
aaatgctttgggaaaagctagtctgaactggccagaggtgtctgtctccccagagattctggcagctgccggcgaggacctcacacacagcgccacatcayagcagccattcctgggtgtgggtcttcttttacccttgctagtgactcagatggatagcctgtgagtgctctcgttaaagtcagattgaaccttaattga

SEQ ID NO: 161128 - DNA, 201 bp, Homo sapiens
gtcctagctactcaggaggctgaggtgagaggatcagctgagcccaggaggtcaaggctgcagtgagtcatgattgcaccattgtactccagcctgggccmcagagtgagaccgtgtctcaaaaaaaaaaaaaaaaaaaaaaaaaaacccagccccacttccggcccagctccacttccaggacggtgggaggtgaggtag

SEQ ID NO: 161129 - DNA, 201 bp, Homo sapiens
tctctttgagttaaacttcaaaaggggaaaaacatctcagggaaaaaaatttctcaaatgtttgcaataaagctctaatatcatacatacaattagaattrtaaaagatattctaaccatttgtggaacttttgtgaagtgagctcaccaaatgtcagagaagatctcactgtgtaatttctgtagaaaggctcccccgga

SEQ ID NO: 161130 - DNA, 201 bp, Homo sapiens
gtccctttgtatcagggcttcctcatggtggggtaagttacactcagaacctgccagctcatccaggggaggacttctattttgaaaaaaaaaaaaaaaamaaaaaacgtatatagaagattcttgatacagtcatcatttagaatgaataatactgatgtaaaaacaacattttacttgggtgaacttcaagacagcacc

SEQ ID NO: 161131 - DNA, 201 bp, Homo sapiens
tgcccaggcatgtgtgtgcactgtgttgagaaagcaggacagcaacacattgaactgcccattctctagtttttaaaaatggtttcctttcatgagggttraaaatctcatatttgttcactttgtatacattagccaaagctcatagtgtgataagacaaaaacattaggcatttgataaatgctgattaactgaacaca

SEQ ID NO: 161132 - DNA, 201 bp, Homo sapiens
aactgccagctgccctctgttgcccccagcccctcataaagtcagctctaccttagaaacacacacacacacacacacacacacacacacacacacacacmaaacaaaacaaaaaaatggctagcctagatcgtccaaacaaatcccacaggttaggtgagctggtgtctcttccctaagcaccacaactagtacttcagt

SEQ ID NO: 161133 - DNA, 201 bp, Homo sapiens
tgaaaatgagcccgaattatttcactattactgtaaagggttcatcttactctggcattctgagaattagactgaaagtttaatttctgcagttccctcayattcagattctttctttgatgttataacacaaagtcattcctactcaaatgtaataaaattgaggctccacggaggcccgtgtccacatcagctgcagct

SEQ ID NO: 161134 - DNA, 201 bp, Homo sapiens
agttcaaagcatgaaaaagaaaggaagcagctcttcacacccagacactggaaaatcatgctagaggtattctgtggtcagacgtgtggggaattgcttasaaaatctgattttaaaggtagttcctggtctgcccacgagtgcatgtctggagggctcctgtgagaaagctgagggtagagccctggcatcctcctggtg

SEQ ID NO: 161135 - DNA, 201 bp, Homo sapiens
gcagtccagctctgtggagtacacacacagcacgtacacgtgtgcacatagtcacctccccctctgtccccacagcccatgcagtccagctctgtggagtmcacacacagcacgtacacgtgtgcacacaggcgcctccccctctgtccccagagccgatacactcaagccaagctgagcatgcacgacaggtccctcaag

SEQ ID NO: 161136 - DNA, 201 bp, Homo sapiens
tgtccctaaatgaaacacactgtaaagaagactgcttggcctatctcagcactccatttttaccctaactaggtaccagctggaggatgagtctgcgcatytggatgaaatgccactaatgatgtctgaagaaggctttgagaatgaggaaagtgattaccacaccttaccacgagccaggataatgcaaaggaaaagagg

SEQ ID NO: 161137 - DNA, 201 bp, Homo sapiens
tcccttaaaggttttattcattttctgttttttaaattggatcttaaactttattctaggaattttcactgcatgaagctatagtgtaatggactgctgcrtcaccatcgtcccctggaagactgctcattaaatggccagtcttgcttcatccgtatgtctcatttggatgaaatcctgtgtataatttgattgcattaa

SEQ ID NO: 161138 - DNA, 201 bp, Homo sapiens
ttcaaagaaacagcactccagctgtgttgtaaacaattcccagcatcatagccttcattctcccaaaggctcagacgctaaggtcagtcttcaggtcaggyggtcgccttcttgtgaagggacgtggtggaaggttcatgatccccagggccctgagagtctgaccctgagctgcacctgcattgcaggacacttcctaac

SEQ ID NO: 161139 - DNA, 201 bp, Homo sapiens
agggccctgagagtctgaccctgagctgcacctgcattgcaggacacttcctaactactgggcttgctattttgggcatacaaggcaactggaggccaaaygccttcctcaaattgaatgtaattgaaaatactttagttactaaataattgccatattaggggaaatattttggaaactgttaggattggtttagattct

SEQ ID NO: 161140 - DNA, 201 bp, Homo sapiens
aaaacactaaagactcatccaaaaagctcctagaactagtgaatgaattcagcaaagtttcaggatacaaaattaatgtacacaaatcagtagccctgctrtataccaaacagtgaccaagctgagaatcaaatcacaaactcaaccccttttataaaagctgcaaataaataaataaataatacttaggaatgtacttaa

SEQ ID NO: 161141 - DNA, 201 bp, Homo sapiens
ctctccttttccagtgcggaaacatggctcgcgaaggactgcggaccctcgtggttgcaaagaaggcgttgacagaggagcagtaccaggactttgaggtragccgactcccagccatcccatcctcctacgacgtttccttccttacgctgaaattagttcttcctgtctttgtatgaaattagagctgggatcgctata

SEQ ID NO: 161142 - DNA, 201 bp, Homo sapiens
tgaggtgcgtcctccccatgctgatgagcagcccccacagcctagcccggccgtcagcaatctatgctctctctctctctctctttctttttattctggaygtttcatataaatggaatcacacaatatgcagtctatagaaggatgaagagggactttacccagaaacgtgggagttcccaggaggctcctgaaggcagt

SEQ ID NO: 161143 - DNA, 201 bp, Homo sapiens
gtggcggacacctgaccgtgcctctctcagagcccgctggacggcaccagcatggagctaagggaggaggaatgcagacagcggcccatgaaccgcagaascacactgtgggctgggaagaaaggagctcttttcagtggccttgggaaaggcgtttgactgtggttcactgtaaggctgaagacaaaaagaactgcaaac

SEQ ID NO: 161144 - DNA, 201 bp, Homo sapiens
attctcctgtctccacctccccggtagctgggattacaggtgtccaccaccacgcccggctaatgttttgttgtcttttttgtagagatgaggttttcctrtgttggccaggatggtctcgaactcctgacttcaagtgatccgtctgccttggcctcccaaaagtgctgggattataggcatgagccactgcgcccggcc

SEQ ID NO: 161145 - DNA, 201 bp, Homo sapiens
cccggtagctgggattacaggtgtccaccaccacgcccggctaatgttttgttgtcttttttgtagagatgaggttttcctatgttggccaggatggtctygaactcctgacttcaagtgatccgtctgccttggcctcccaaaagtgctgggattataggcatgagccactgcgcccggcctgcaatctataatgctttg

SEQ ID NO: 161146 - DNA, 201 bp, Homo sapiens
aagtattttcttattgttgcttctgaatacattgtgttaagttgtggatcatggtaaaacccatatcagaaagtgcctgctcttactgtccctgcaccacrgatgaaggcgctgagccccgtcggtcactggctggccggtcccctgacaggaggcgctgagccccgtcggtcactggctggccggtcccctgacaggagg

SEQ ID NO: 161147 - DNA, 201 bp, Homo sapiens
tgaatacattgtgttaagttgtggatcatggtaaaacccatatcagaaagtgcctgctcttactgtccctgcaccacggatgaaggcgctgagccccgtcrgtcactggctggccggtcccctgacaggaggcgctgagccccgtcggtcactggctggccggtcccctgacaggaggcgctgagccccgtcggtcactgg

SEQ ID NO: 161148 - DNA, 201 bp, Homo sapiens
gttaaggatatagcctcttaattgaccttcagtgatagaaccaccattttagtagacagtagtgaaaggccattgtcattatctctattgtcagtgaaaasaatattagtacgtttcctaatgttatatgtgggtacatttgtattgcttaacaaatcatttgactttttcaaagtccatttttaaagttgagattagatt

SEQ ID NO: 161149 - DNA, 201 bp, Homo sapiens
caggcaggaaacagcttgatagagctactggctgcaagcatgtgctccctttcagaaagaggaagaatgaccccaaggtcaaaattggcatgagcagtgcrgaggccatggagctgccagcctaagggcagagcactgagacacagttcttctattattctcagctctcgaaacttaacagtttgccttgctgaatttcaa

SEQ ID NO: 161150 - DNA, 201 bp, Homo sapiens
gtccaggtggcgttttgctctttgaagagatagattaggggcaggtgttagtccgttctcaccctgctgtgaagatactatactagactgggtaattgatraacaaaggaggttgaattgactcacagttctgcatggctaaggaggccccaggaaacttgcaatcatggcggaaggggaagtagtcaccttcacaagtca

SEQ ID NO: 161151 - DNA, 201 bp, Homo sapiens
acccgaactcccaaggagaagatgaggactggaggaggccctggaggcgacgtgcgcgccccgcggtggggccgtctctgtgcggtgaggctcccgcctgyatctcgcagcgggaggtcatcgggcaagtgcgttgctgcgctgctgaagagaacgctggaagaggcgggaatcgtgccacgccggggggcgccatctttg

SEQ ID NO: 161152 - DNA, 201 bp, Homo sapiens
ttcaaccagtgccccatccaaatgctcttccggccacatcagtaattcatgatggtgggtacatgtggattgggtggtgccttctatggactggcataaasggatcatttactttttcctaaatgcagttatattactgtgtgaaatttctgtagtcactccgttacttttataattattcagagcattttgttcagcaag

SEQ ID NO: 161153 - DNA, 201 bp, Homo sapiens
ctttattactgttttggaacaggtataggcagagtgtcttttggagctttcttaggtaggtaaagttatcatttctttcaaaagtgtagaaatttagccaracaatattgataaagatacttaactaataagaaaaacaaaccttcctctaattcagtgttcctcaggaactctctgatgtcacgtaaactggtggccatg

SEQ ID NO: 161154 - DNA, 201 bp, Homo sapiens
ttcaagaactaagagaaacataaaaaatttaataaggtttatttatataaagataaaagccatgaaagattaaaccattgaatatttagaggaaaataaargatcaagctgtaaataaaagaaacattaaaaaaagcatgtagaccaatatgaatcagaaggaaactggtatatctaccttgattaatattaagcaaaata

SEQ ID NO: 161155 - DNA, 201 bp, Homo sapiens; identical to SEQ ID NO: 30080

SEQ ID NO: 161156 - DNA, 201 bp, Homo sapiens
agagaaacataaaaaatttaataaggtttatttatataaagataaaagccatgaaagattaaaccattgaatatttagaggaaaataaaggatcaagctgyaaataaaagaaacattaaaaaaagcatgtagaccaatatgaatcagaaggaaactggtatatctaccttgattaatattaagcaaaataaaccttaaaat

SEQ ID NO: 161157 - DNA, 201 bp, Homo sapiens
gaaacataaaaaatttaataaggtttatttatataaagataaaagccatgaaagattaaaccattgaatatttagaggaaaataaaggatcaagctgtaartaaaagaaacattaaaaaaagcatgtagaccaatatgaatcagaaggaaactggtatatctaccttgattaatattaagcaaaataaaccttaaaatgaa

SEQ ID NO: 161158 - DNA, 201 bp, Homo sapiens
tttgtatgatggtgtggtagagtttaggggtgaggccaattcacaattcaggaatatgtggtccgaaacctctgcagctgtgtctcagaaactgtctactyggctcagtcatggatcacatctgttgccactctgagaatgatgcctgcaggactttttccctagaaattaatttcctctttgcctgctttgttcattata

SEQ ID NO: 161159 - DNA, 201 bp, Homo sapiens
aaagttgtagaaatcatcagtgtttgaaatcatggagagcatttgaggtaagatttgaaaaataattttgtattacagactctacattatctactactgcmtaagaggtgaaggaaagtctgaaattagcaagttatgaaattaaaaaatcatcgagatttaaaaaatatttttgggcttcatcttcatatgtgaagaaag

SEQ ID NO: 161160 - DNA, 201 bp, Homo sapiens
cctgaaggaatgtctgcataagtattgcagtttctttaacccaacaaggtgtgattgcatttattcacatggacagaataacaaacccaaaaactttatcrttcgttgatgagaagtgttagtcatttatttgaatgtcagttttaagctactgataacatgattgattagcaacggaaacattttagaagataccacgca

SEQ ID NO: 161161 - DNA, 201 bp, Homo sapiens
cacatctcgtgtctagaacacaagatattcatattttcagacaggtaagtatgtatcttaatcactttgaatttttaaacatttgtctcacacaaacgaakcctattgtttttgtcagaatatatatttattaatcactaaatatctttttaaaaagaactactgtaatttttttaatttataacagcacaccagcatggc

SEQ ID NO: 161162 - DNA, 201 bp, Homo sapiens
cacgcccagccagttcttaatttttttttttttgtagagatgggggtcttgctatgttgcccaggctggtcttgaactcctggtctcaagcagtcctctcwccttggtctttcaaagtgctgggattacaggtttgagccaccatgcccagtgataaatttttatttcttatttggctgtgtgctcctctcctttgcgact

SEQ ID NO: 161163 - DNA, 201 bp, Homo sapiens
aggctggtcttgaactcctggtctcaagcagtcctctctccttggtctttcaaagtgctgggattacaggtttgagccaccatgcccagtgataaattttkatttcttatttggctgtgtgctcctctcctttgcgactttgtattgatatttgccaattaaaaagtacatacatgctcgtgtgtgtagaatctttcaaat

SEQ ID NO: 161164 - DNA, 201 bp, Homo sapiens
gcatccatgaatgcaagcacacacatacacagacacagacacacacacacacagcaaggttgatgccccatataccatgagggatttctagtgtgtattcygcatgttgaaatggtattattaccaggaaagtggaaattttgactattagacacccaaaatcaacatttcactgttcaaatcaactgccctactaaagca

SEQ ID NO: 161165 - DNA, 201 bp, Homo sapiens
gatgcacctcagtgtttcttacagtgtcgtactctgcacataatagaaattcaaaaatattctttgatggacttgttccaaacatccaggaaacgactccyctgctgcttttggctgaggctgccagggcacacgcacaggttgtcttgcagaagggcagggtgtctagttgaagacggggtgtcggatgagtgcattagg

SEQ ID NO: 161166 - DNA, 201 bp, Homo sapiens
gtcatcgtcagggtgaggctgcggggagggtgccacgcgatggcttcagacattttgttttcacaccttttaaacacagattttcccaaaagaaagttaarcatttactcaggtgctttatgctgttacagttttgtttgttttttttttttaatgaaatctaagctaataatctatatctgggaacctactgtgtctcta

SEQ ID NO: 161167 - DNA, 201 bp, Homo sapiens
ctgaaggtgaagggtgtttgtgtggcttagggacagggtttcctctcatttaccaagggtctagcctccaacccagtgagcgtggggatgcttgcctgtgmgcttccagagcagacggaccagggaccccaagtgctctgtgcagtcagcacacccccagatggaagaccaaaagtgtcaggcagcacaggcacagcagtc

SEQ ID NO: 161168 - DNA, 201 bp, Homo sapiens
cccacttcaacacaaggctctaccatgtttctctcactcaggatgcagttacacagggtgcacgcagggatgagaaccgttgatgtcaaaagcacaggacrctgatttgggaaattaaagttcacattttattaaagccaagtttgttttccttttgcaaattttccgtaaaatatgaataatgatacattctagtatttg

SEQ ID NO: 161169 - DNA, 201 bp, Homo sapiens
gtgtcctgggtctggaggtgtccgtgtgagggaccctgtgtgagggatgctctgggtctggaggtgtctgtgtgaggggtgccctgggtctggaggtgtcygtgtgagggaccctgtgtgaggggtgctctgggtctggaggtgtctgtgtgaggggtgtcctgggtctggaggtgtccgtgtgagggaccctgtgtgagg

SEQ ID NO: 161170 - DNA, 201 bp, Homo sapiens
aggggtgccctgggtctggaggtgtctgtgtgagggaccctgtgtgaggggtgctctgggtctggaggtgtccgtgtgagggaccctgtgtgaggggtgcyctgggtctggaggtgtctgtgtgaggggtgtcctgggtctggaggtgtccgtgtgagggaccctgtgtgagggatgctctgggtctggaggtgtctgtgt

SEQ ID NO: 161171 - DNA, 201 bp, Homo sapiens
ggaggtgtctgtgtgaggggtgccctgggtctggaggtgtccgtgtgagggaccctgtgtgaggggtgccctgggtctggaggtgtctgtgtgaggggtgycctgggtctggaggtgtccgtgtgagggaccctatgtgagggatgctctgggtctggaggtgtctgtgtgaggggtgccctgggtctggaggtgtccgtg

SEQ ID NO: 161172 - DNA, 201 bp, Homo sapiens
attaaaattttttccttgaaggaattttgttaattttctcttttcctttttaggttttgtatgaacaattcaagtttttcttgaatctctattttctagtratatcctgctcacagtttgtaccagcattgaaaataggctatctctacacctactgggctcctctggtaagaaaagactttaaaaattaagttaaattat

SEQ ID NO: 161173 - DNA, 201 bp, Homo sapiens
cacaggttttttgtcttttctcaaattttatgccttctttctcattgacagtggatggttggttttcagagatgaatttgtcaggtaagaaattttctgargctttttgagattaagttcataacattgctgaaagtaatgtttgaaatcactgtttgcccttccagttgacatagaaagcaaatcaccacccgtggccct

SEQ ID NO: 161174 - DNA, 201 bp, Homo sapiens
tgtgagggaccctgtgtgaggggtgccctgggtctggaggtgtctgtgtgaggggtgccctgggtctggaggtgtccgtgtgagggaccctatgtgagggrtgctctgggtctggaggtgtctgtgtgaggggtgccctgggtctggaggtgtccgtgtgagggaccctgtgtgaggggtgctctgggtctggaggtgtct

SEQ ID NO: 161175 - DNA, 201 bp, Homo sapiens
gaaggattgcttgagcccgagaggtagaggccgcagtgagccatgattgtaccactgcactccagcctgggcaacagagcaagaccctgtctcaaaaaataataaataaataaataaataaataaagcagaacacctaagcaagagaatcagagtctgcctttaaaaaaatttatactagctgactgggcgcggtggctca

SEQ ID NO: 161176 - DNA, 201 bp, Homo sapiens
gaggggtgccctgggtctggaggtgtctgtgtgaggggtgccctgggtctggaggtgtccgtgtgagggaccctatgtgagggatgctctgggtctggagrtgtctgtgtgaggggtgccctgggtctggaggtgtccgtgtgagggaccctgtgtgaggggtgctctgggtctggaggtgtctgtgtgaggggtgccctg

SEQ ID NO: 161177 - DNA, 201 bp, Homo sapiens
ttttttaagtataaaaagttttaaattaaaaaaaaaattgtggctgggcttcgtggcccacacctgtaatcccagcactttgggaggccgaggaggatggrtcgcctgagctcacgagtctgagaccagcctgggcaacatggtgaatcccccatctctacaaaaaatacaaaaatgagccaggtgtggtggtgcttgcct

SEQ ID NO: 161178 - DNA, 201 bp, Homo sapiens
gtgccctgggtctggaggtgtccgtgtgagggaccctgtgtgaggggtgctctgggtctggaggtgtctgtgtgaggggtgccctgggtctggaggtgtcygtgtgagggaccctgtgtgaggggtgccctgggtctggaggtgtctgtgtgaggggtgccctgggtctggaggtgtccgtgtgagggaccctgtgtgagg

SEQ ID NO: 161179 - DNA, 201 bp, Homo sapiens
gtgtcctgggtctggaggtgtccgtgtgagggaccctgtgtgaggggtgctctgggtctggaggtgtctgtgtgaggggtgccctgggtctggaggtgtcygtgtgagggactctgtgtgaggggtgctgtgggtctggaggtgtctgtgtgagggaccctgtgtgaggggtgctctgggtctggaggtgtccgtgtggat

SEQ ID NO: 161180 - DNA, 201 bp, Homo sapiens
gttaaacttcaaaaggggaaaaacatctcagggaaaaaaatttctcaaatgtttgcaataaagctctaatatcatacatacaattagaattgtaaaagatrttctaaccatttgtggaacttttgtgaagtgagctcaccaaatgtcagagaagatctcactgtgtaatttctgtagaaaggctcccccggacagcgtcac

SEQ ID NO: 161181 - DNA, 201 bp, Homo sapiens
acaaatcatggtaactctggtattttccacaaagctagctgttttgaatcaacattgaaaacaaaatccactaaccgcaattaaatttagatttacaatcrataaatgacaggtgtctgaaattatcaactcagatttttaaagcagtagctgtatggtaaagaaagaattagattaggcattaaaaaagaaagctaatga

SEQ ID NO: 161182 - DNA, 201 bp, Homo sapiens
ctgtaatcccagctacttgggaggctgaggcaggagaattgtttgaaaccgggaggcagaggttgcagtgagccaagatcggactccgtctccaaaaaaaaaaaaaaaaaaaaaaagcccagtggcacacacttgtcatcccaactatttggggtggggggaagattgctaatcatgccactgcaccctggcttgggtgag

SEQ ID NO: 161183 - DNA, 201 bp, Homo sapiens
agtgttataatcaagacaaataaagctagttcaccagtatcacatgaaatataaataccaagcgttattatcatggtggcatcatcgtgactactgggaarcatcgtcccaggtcacacctactataactagaagcaagaccgcttaagtatcttaaactgatgaaaccattgtgataaagtacagcagagtaaggagcaa

SEQ ID NO: 161184 - DNA, 201 bp, Homo sapiens
tgtaatcccagctacttgggaggctgaggcaggagaattgtttgaaaccgggaggcagaggttgcagtgagccaagatcggactccgtctccaaaaaaaaaaaaaaaaaaaaaaagcccagtggcacacacttgtcatcccaactatttggggtggggggaagattgctaatcatgccactgcaccctggcttgggtgaga

SEQ ID NO: 161185 - DNA, 201 bp, Homo sapiens
ctggggtacagaggtgtgatcttgcctcagtgtaacctcaacctcctgggcccaggtgatcctcccacctcagcctcctgagtagctgggaccacaggccygtgccaccaagcccagctaattttttgtatgtttgcagagacagggtttcactatgctgcccaggctggtctcagattcctgagcccaagcaacctgcct

SEQ ID NO: 161186 - DNA, 201 bp, Homo sapiens
agcctcctgagtagctgggaccacaggcccgtgccaccaagcccagctaattttttgtatgtttgcagagacagggtttcactatgctgcccaggctggtytcagattcctgagcccaagcaacctgcctgtctcggtctcccaaagtgctgggattacaggcatgaaccactgtgcttggcctaaagtataattttcaaa

SEQ ID NO: 161187 - DNA, 201 bp, Homo sapiens
gacataactgttgaataacttaatgaaaaagatcaaaagtctcatttagggtattatattacaatatatttatgtggtggtttgaatttattcacattttrtataaatactcattttctagttgactgttttaaaagaagtgatctcatacagagaagaaaaaaatgacattttaagggaaaatattattaatgttttagt

SEQ ID NO: 161188 - DNA, 201 bp, Homo sapiens
cccagacgatgggcggccgggcagagacgctcctcacttcctagacgggatgacggccaggaagaggcgctcctcacttcccagactgggcggcggggcasaggagctcctcccatcccagatgatgggccgccaggcggagacgctcctcacttcctagatggggtggcggccgggaagaggcgcttctcacttcccaga

SEQ ID NO: 161189 - DNA, 201 bp, Homo sapiens
aactgtgatgcacagggtcctggagcggagacggctcacacagaggtcagtggtgccgcaccgcatttccagcagacccttgcacgcactccccgcagcarcagcaggaggggctgcgacacgattccgggagcacagtgtgtactgcacttagttctgtgcagttagggtttgatactgcatcttcaggatcattagcaa

SEQ ID NO: 161190 - DNA, 201 bp, Homo sapiens
  misc_feature (1)...(201): n = A,T,C or G
cgggtgtcaggaaaaggcgcccgaaatgctggtagaccaggtggctggggtggcatggatggggcttatggacctgggtctttcagaagtgacccatagcncactcctggaaggcgtgagtcaagcaggtggttctgcgcactaacgacgctcttccactgtttccctagggaagatccttgtccttcaaaaccttcctca

SEQ ID NO: 161191 - DNA, 201 bp, Homo sapiens
acatgaaatataaataccaagcgttattatcatggtggcatcatcgtgactactgggaaacatcgtcccaggtcacacctactataactagaagcaagacygcttaagtatcttaaactgatgaaaccattgtgataaagtacagcagagtaaggagcaaagatccaaaaacttcgggaagctagtgtgaataatgatcat

SEQ ID NO: 161192 - DNA, 201 bp, Homo sapiens
tctagtaacaagaggttcatagggccacaggtgtctgacggagcagctaattatccgtaactgtggccatggaatccgtaagttctgtgttactggtgccrttgaaccctgttcacttctgattgtgttggatctcattaagggtattaaatttccgttttcgttaaggtgagcaacaatttagaatgttttagtatccta

SEQ ID NO: 161193 - DNA, 201 bp, Homo sapiens
tttttaaatctactacacttcaaattctttgaaaagaaaatagcactaaagtactgagccactaaagttaatttagttattttttcttattgaagctaaakaactattttgaagctttctgttccttctgaacagttcgccaaggtagcgcagactgcagcactctgcgttgttgtctgatgatcggggcagctggagact

SEQ ID NO: 161194 - DNA, 201 bp, Homo sapiens
gagagctctgtaagcagagctgcccaccagctcccctccttccttagggacatctgcagctggtgcacacacaaatccccacgccacccctactccagacyttcctctctacacctcttccctctctggataccccagcctttctaaagaggagtcctggtcccagccctggcgatgtcaaactgccacatgccatttccc

SEQ ID NO: 161195 - DNA, 201 bp, Homo sapiens
agctttctgttccttctgaacagttcgccaaggtagcgcagactgcagcactctgcgttgttgtctgatgatcggggcagctggagactggatgtgccaaygcagtttatccacaccggtcagtgtcagtggacaccaagtccccagtccgtcggctcaagctcctgcgatgtaggacaacatagccctgctctcaacaag

SEQ ID NO: 161196 - DNA, 201 bp, Homo sapiens
cccgctttacccggtgcgtagcgcagcggcggccgcagccaaccgcaaacgcgcggcctactacagcgccgcggggcccaggccgggagccgaccggcacrgcaggtaaccgaggcggcactggccccgttccccgccgacgctccccggggcccccagcccaccgcaggaacccggagccgggcgggtctggggtcgcta

SEQ ID NO: 161197 - DNA, 201 bp, Homo sapiens
aacgcagtttatccacaccggtcagtgtcagtggacaccaagtccccagtccgtcggctcaagctcctgcgatgtaggacaacatagccctgctctcaacragtctgtattctagtcaggatgagaaagcagtgaatcagtggcatagagcaacagcataaagggccgcggcctgcagtgtgagtaacaacagcataaagg

SEQ ID NO: 161198 - DNA, 201 bp, Homo sapiens
agtttttactttgtctttagttttcagaagtttaattatgatgtgtcttatcatggatttctttggatttcatgtttggttttgttttttttttttttttkgttttcgaataaatttagggagtttttagccattatttcttcaactactctttgttgttgttgaaataatggagagttgctcccactctcttctctccat

SEQ ID NO: 161199 - DNA, 201 bp, Homo sapiens
taaggcacgcattataaatctcacttattgtcctaatgagttagccaacctcaagtataaacatttgtcccctgctgtgtctcgatggcctgagccacacrtcgacacagtatctgttaagtaagtatttgataaacaaatgaggcagtgaatgaatcagttaaaccaagagtcaggatttccttcgctttcctaaaacta

SEQ ID NO: 161200 - DNA, 201 bp, Homo sapiens
attaatatgaaaatttaattttgccctatgtaaacttgctcagctgtaaacaaacaagccatcatggagactagatcaaataataagctcgttgactccaygctagagtaaacaaggacatcagagtaagtcatagccctacagatgttagacaaaaggaaggatttttacgtctttattgatgtaaattacatactgtag

SEQ ID NO: 161201 - DNA, 201 bp, Homo sapiens
tatatttgtatacttatattcttttcaaaataatagtgaataagacaataaaaggaaatttaaaacattgagattaggaaggaggaaataaaaatatctctgtttgtggatgctataattttctatgtagaaaattccaaggaatccacacacatacaacctcctatacttgtaaacttcataaagtttcaggatacaagg

SEQ ID NO: 161202 - DNA, 201 bp, Homo sapiens
taataggttaatatcttcacagagttatgtagccatcaccatgacttcattttagagcatttccttcaccccagaaagaaacaccacaccggccaggtgcrgtggctgacgccttaatcccagcactgtgggaggccgaggcaggtagatcacgaagtcaggagatagagaccatcctggctaacatggtgaaaccccgtc

SEQ ID NO: 161203 - DNA, 201 bp, Homo sapiens
atatttgtatacttatattcttttcaaaataatagtgaataagacaataaaaggaaatttaaaacattgagattaggaaggaggaaataaaaatatctctgtttgtggatgctataattttctatgtagaaaattccaaggaatccacacacatacaacctcctatacttgtaaacttcataaagtttcaggatacaagga

SEQ ID NO: 161204 - DNA, 201 bp, Homo sapiens
tatttgtatacttatattcttttcaaaataatagtgaataagacaataaaaggaaatttaaaacattgagattaggaaggaggaaataaaaatatctctgtttgtggatgctataattttctatgtagaaaattccaaggaatccacacacatacaacctcctatacttgtaaacttcataaagtttcaggatacaaggaa

SEQ ID NO: 161205 - DNA, 201 bp, Homo sapiens
gtataaaacataaaaaatcatacaggacacaaatttacagtgtgtaaattaatctttagcttactggaacttttttactttgtaatttttttaatttttaraaacttattgacttttttgtaataacgcttagtttaaaacatgaagatattgttgcacaaaaatattttctttttttatattctaattctatatgctttt

SEQ ID NO: 161206 - DNA, 201 bp, Homo sapiens
atttgtatacttatattcttttcaaaataatagtgaataagacaataaaaggaaatttaaaacattgagattaggaaggaggaaataaaaatatctctgtttgtggatgctataattttctatgtagaaaattccaaggaatccacacacatacaacctcctatacttgtaaacttcataaagtttcaggatacaaggaat

SEQ ID NO: 161207 - DNA, 201 bp, Homo sapiens
taaaacatgaagatattgttgcacaaaaatattttctttttttatattctaattctatatgcttttttcttttttaaaaaaatttatttttacttaaacttttttttttttttttttttggttaaaaacggaaacaaaaacacacatattagtctaggcctatacagggtcaggatcatcaatatcactatcttccacctc

SEQ ID NO: 161208 - DNA, 201 bp, Homo sapiens
cacaaaaatattttctttttttatattctaattctatatgcttttttcttttttaaaaaaatttatttttacttaaacttttttttttttttttttttggktaaaaacggaaacaaaaacacacatattagtctaggcctatacagggtcaggatcatcaatatcactatcttccacctccgcattatgtcactgggaagg

SEQ ID NO: 161209 - DNA, 201 bp, Homo sapiens
ctcctgaaggacctgtctgaggctgttttacagttagctttttaaaaaataaatagaaaatgtctgatctaaaataataatgatacagtatagtaaatacrtaaaccaatagcatagtcattagttatgattgtcaggtattaggtactgtacataagtgtatatgctcgacttttatatgaatgactggtagcacaatag

SEQ ID NO: 161210 - DNA, 201 bp, Homo sapiens
tttctttagaattttaacctaatgctaatttgtgcataaggttcacctaaaattagaacataagatacaaataataagcaatcccatatttcattaaattytcctgaagtaaataggatttgtaggtagcctcatgagatgattttatcgttaagcttatgtataaatcagtagttggatttccaagtaaaatggagactg

SEQ ID NO: 161211 - DNA, 201 bp, Homo sapiens
aaacagaccaagatgatagtgactactgcacatctagcctatatggtatagcctattgctcctaggctacaaacttgtgcagcatgttactgtactgaatrcagcaggcagatgtgacacaattgtgtatctgtgtatctaagcatactgaacatagtaaaatacagtataaaacataaaaaatcatacaggacacaaatt

SEQ ID NO: 161212 - DNA, 201 bp, Homo sapiens
agcagcagcaggaggggctgcgacacgattccgggagcacagtgtgtactgcacttagttctgtgcagttagggtttgatactgcatcttcaggatcattwgcaagtcactcggctgcagatggtgtcatgacctgtgtgtttaggttttattttaactttttgtaatagatttgtgtatattttattgtagtaagtgata

SEQ ID NO: 161213 - DNA, 201 bp, Homo sapiens
acattttatgttctcatgttatacctaactttaaacatttaaaaaaaaattctagggtatgtggtgtatcttcaaggtttttcaaattatcaacaaatctycaaaagttttctaacagatttattgaagaaaattcatgtataagtggacctgcacagttccaacccatgttgctcaggagctcaatgtactttttaatat

SEQ ID NO: 161214 - DNA, 201 bp, Homo sapiens
atgtacaattagtttgaacttttttaaaaagcaaaaaaaaatacacaatacgtatcttttgttgcatacagttgctgtggttggctgataaatatttgtcraagaaagaaagaactgaaagctcgcacagtatggcttggatgtcctgaaaagtgtgaagaaaaacatcccaggaattctataaaaaatcaaaaatacaat

SEQ ID NO: 161215 - DNA, 201 bp, Homo sapiens
gcacacatatcttcacctccaccgtgtgtacgcagagaaagtgcctcctcaaccagagagcacacatatcttcacctccaccgtgtgtacgcagagaaagygcctcctcaaccagagagcacacatatcttcacctgcactgtgtgtacgcagagaaagtgcctcctcaaccagagagcacacatatcttcacctccaccg

SEQ ID NO: 161216 - DNA, 201 bp, Homo sapiens
gaaagtgcctcctcaaccagagagcacacatatcttcacctccaccgtgtgtacgcagagaaagtgcctcctcaaccagagagcacacatatcttcacctscactgtgtgtacgcagagaaagtgcctcctcaaccagagagcacacagatatcttcacctccaccatgtgtacgcagagaaagcgcctcctcaaccagag

SEQ ID NO: 161217 - DNA, 201 bp, Homo sapiens
tgtaagcagagctgcccaccagctcccctccttccttagggacatctgcagctggtgcacacacaaatccccacgccacccctactccagaccttcctctytacacctcttccctctctggataccccagcctttctaaagaggagtcctggtcccagccctggcgatgtcaaactgccacatgccatttcccagggatgg

SEQ ID NO: 161218 - DNA, 201 bp, Homo sapiens
gtgcctcctcaaccagagagcacacatatcttcacctccaccgtgtgtacgcagagaaagtgcctcctcaaccagagagcacacatatcttcacctgcacygtgtgtacgcagagaaagtgcctcctcaaccagagagcacacagatatcttcacctccaccatgtgtacgcagagaaagcgcctcctcaaccagaggatt

SEQ ID NO: 161219 - DNA, 201 bp, Homo sapiens
actgagaatgatggtttcgaatttcatccatgtccctacaaaggacatgaactcatcattttttatggctgcatagtattccatggtgtatatgtgccacrttttcttaatccagtctatcattgttggacatttgggttggttccaagtctttgctattgtgaatagtgccgcaataaacatacgtgtgcatgtgtcttt

SEQ ID NO: 161220 - DNA, 201 bp, Homo sapiens
ttagggacatctgcagctggtgcacacacaaatccccacgccacccctactccagaccttcctctctacacctcttccctctctggataccccagcctttytaaagaggagtcctggtcccagccctggcgatgtcaaactgccacatgccatttcccagggatggttatgcaccccccacaggacgcatggagccagtgc

SEQ ID NO: 161221 - DNA, 201 bp, Homo sapiens
ggcgaaatttgttgttgttgttgttctagtaagaatcagattgggaggccgaggcgggcgggtcacgaggtcaggagatcgagaccatcctggccaacacsgtaaaaccccgtctctactaaaaatacaaaaaaaatgagccgggcgtggtggctcacgcctgtaatcccagcactttgggaggccgaggcgggcgggtca

SEQ ID NO: 161222 - DNA, 201 bp, Homo sapiens
atacgtgtgcatgtgtctttatagcagcatgatttatagtcatttgggtatatacccagtaatgggatggctgggtcaaatggtatttctagttctagatmcctgaggaatcgccacactgacttccacaatggttgaactagtttacagtcccaccaacaaggctacagtaaccaaaacagcatggtacttgtaccaaaa

SEQ ID NO: 161223 - DNA, 201 bp, Homo sapiens
gatcgagaccagcctggctcacacggtgaaaccccgtctctactaaaatacaaaaaaattagctgggtgtggtggcgggcgcctgtagtcccagctactcrggaggctgaggtaggagaatggcgtgaacccgggaggcgaagcctgcagtgagccaaggtcgcaccactgcactccagcctgggcgacagagcaagagtc

SEQ ID NO: 161224 - DNA, 201 bp, Homo sapiens
  misc_feature (1)...(201): n = A,T,C or G
gagatggtctgtccgtgcagcctccacaccccagtgttcgcaacggtagtggcaatatgaatcaatatctccttcggggtggtttgatttaatcagggacntgaataaattaaactccctgaagacctagtaaaatgccataaaaattacttttggtcataatgatgtgcaattaattgtaaaatacttctttaatttatt

SEQ ID NO: 161225 - DNA, 201 bp, Homo sapiens
aaggctacagtaaccaaaacagcatggtacttgtaccaaaacagagatatagatcaatggaacagaacagagccctcagaaataacgccacatacctacaactatctgatctttgacaaacctgagaaaaacaagcaatggggaaaggattccctatttaataaatggtgctgggaaaactggctagccatatgtagaaag

SEQ ID NO: 161226 - DNA, 201 bp, Homo sapiens
acctgggaggcggaggttgcagtgagctgagatcgtgccactgcactctagcctgggcaacagagcaagactccatctcaaaaaaatgaaaataaattttraaaatttgcttgattttattttttacaatttttggtatgatagaaatatactttctgaatccgtaatatttaatggtaaatataacagtagcattcagtg

SEQ ID NO: 161227 - DNA, 201 bp, Homo sapiens
aggctacagtaaccaaaacagcatggtacttgtaccaaaacagagatatagatcaatggaacagaacagagccctcagaaataacgccacatacctacaactatctgatctttgacaaacctgagaaaaacaagcaatggggaaaggattccctatttaataaatggtgctgggaaaactggctagccatatgtagaaagc

SEQ ID NO: 161228 - DNA, 201 bp, Homo sapiens
tgggcggatcatgaggtcaagagatcaagaccatcctggccaacatggtgaaaccccctctctactgaaaatgcaaaaattatctgggcatggtggcaggsgcctatagtcccagctacttgggaggctgaggcaggagaattgcttgaacctgggaggcagaagttgcaatgagccaagatcgtgccattgcactccagc

SEQ ID NO: 161229 - DNA, 201 bp, Homo sapiens
acaaggctacagtaaccaaaacagcatggtacttgtaccaaaacagagatatagatcaatggaacagaacagagccctcagaaataacgccacatacctacaactatctgatctttgacaaacctgagaaaaacaagcaatggggaaaggattccctatttaataaatggtgctgggaaaactggctagccatatgtagaa

SEQ ID NO: 161230 - DNA, 201 bp, Homo sapiens
gcagcctctcctggcttcaagcgactcccctaccttagcctcccaagtagctggcactacaggcacgtgccaccatgcccggctaattttttttgttttartagagacagggtttcaccatgttggccaggatggtcttgatctccggacttcatgatccacccgcctcggcctcccaaattgctgggattacaggcgtga

SEQ ID NO: 161231 - DNA, 201 bp, Homo sapiens
ctactgaaaatgcaaaaattatctgggcatggtggcaggcgcctatagtcccagctacttgggaggctgaggcaggagaattgcttgaacctgggaggcaraagttgcaatgagccaagatcgtgccattgcactccagcctggtgaaagagcaagactccgtcttaaaaaaaaaaaaaaaaaaaaaaaaaaacagtagtg

SEQ ID NO: 161232 - DNA, 201 bp, Homo sapiens
cccggctaattttttttgttttagtagagacagggtttcaccatgttggccaggatggtcttgatctccggacttcatgatccacccgcctcggcctcccmaattgctgggattacaggcgtgagccactgcgcctggctcagtttttttttttggaatattcatagataaatgtaactcaccaaagtcagtgtttgaaca

SEQ ID NO: 161233 - DNA, 201 bp, Homo sapiens
cccagctacttgggaggctgaggcaggagaattgcttgaacctgggaggcagaagttgcaatgagccaagatcgtgccattgcactccagcctggtgaaaragcaagactccgtcttaaaaaaaaaaaaaaaaaaaaaaaaaaacagtagtgcttcttcgtcacagtgaatttgaatcttccttttcatattcacgtgtga

SEQ ID NO: 161234 - DNA, 201 bp, Homo sapiens
ctttgctataggatggagcctgttgagactctgacttaggtattgagttgtgtcacatccaaatcagtgtccttttgcttttgaaccatctgtgttcccartaatcgctaaataattcatatgtatttttaatggctacatcatagagttcagctcaagaaaatgtacaatttgattattgccttcagttcttgataaaca

SEQ ID NO: 161235 - DNA, 201 bp, Homo sapiens
ccaaaccttttgaatgagatgtttttcgtcatgacctcaccctacatcccctttctctgtgaaatttaaatggtgtttctcaggattctgtcctaagcacrcctacatttgtgatgtacatgttcttcctgggaaactgtaacttcattcatggctttatatcatctgattatacaccagagcctgatgggaggtaggtgg

SEQ ID NO: 161236 - DNA, 201 bp, Homo sapiens
cctccagcaagaacctgaggaaatcacggaacttctcgagtctcctcgtctgtaaatggaaacgacgtctgctctgtgtaactgagaaaatagatgcgaakgtgtcaaacaaaggcctcacataaagacagggcctctcaacacgtgtcactttcgacagctctttagcaccaacaagtcagggcgattgttaatgactca

SEQ ID NO: 161237 - DNA, 201 bp, Homo sapiens
gccttcaaccagcttttgggagtcctactctaaaatgtgagcagacagcaaagacaggcagatgcagggaggagccctctgccacgcagagagaggccacrgtgaacaaactgctcaaacagctctgaggacatggaggctcctcggaaggtaacaactgaaaaccatcactagtatctggagacatgagagagaaaagtg

SEQ ID NO: 161238 - DNA, 201 bp, Homo sapiens
tggggtcgggggaggggggagggatagcattgggagatatacctaatgctagatgacacgttagtgggtgcagcgcaccagcatggcacatgtatacatawgtaactaacctgcacaatgtgcacatgtaccctaaaacttagagtataataaaaaaaaaaaaaaaattaaaaaaaaaaaaaaaagaaataatgattgatc

SEQ ID NO: 161239 - DNA, 201 bp, Homo sapiens
cacgccaggggggtccccctctcccccagtgtacaccaggagccctccctggcaccaggcgctcccctcgcccgtccccagcaccgccgtgtgcaccctcyatgccctccctggcaccaggtgctcccctcgcccgtccccagcaccgccgtgtgcacccaccatgccctccctggcaccaggcgctcccctcgcccgtcc

SEQ ID NO: 161240 - DNA, 201 bp, Homo sapiens
gaaccaaaatgctttcggaaataagaccatgttaggaaaacctcgaaagactctgcagtgcaggaggaagtgaatgggaggacagaggaaatgctggcgaycaagagcttacaaataccaagcttggtggaaggcgcattacagcattctcttgacttttgcacatgtttaaataaatcgtttatttcccataatataaaa

SEQ ID NO: 161241 - DNA, 201 bp, Homo sapiens
cacagccaggcatgctggctgtggcagggcaggcagctccaggtgccggctctgtgtgaggctgtggccaaatcaggcgttccataagcgacttccactgygggcaccaggaaacgtggccctaggaggcttggagacgctaggaaccgcagatccccaaagaggatgtcacagccctggctcggtgagctgttaagtctg

SEQ ID NO: 161242 - DNA, 201 bp, Homo sapiens
gcacatgtatacatatgtaactaacctgcacaatgtgcacatgtaccctaaaacttagagtataataaaaaaaaaaaaaaaattaaaaaaaaaaaaaaaagaaataatgattgatcacaaagtctaaagaatgtccattataaatattttaaaaagtcgaatgtctaacaatagattattcaaactgccatatcctgtgta

SEQ ID NO: 161243 - DNA, 201 bp, Homo sapiens
catggctcagccacccagggagggttaggtgaacaggtacagacaagagcaaacatggctgaaacccacgaggggaccctatgaagacagcccgactctcrgcacaaaccggaacccaagtctatctctcaccgcctccaagtcaatgctgtgggaactccttctccacagacccacaatgcacttggatcaggattccaa

SEQ ID NO: 161244 - DNA, 201 bp, Homo sapiens
ctggattgagcctcaattagatgttcatggattgagagcctcagtgttgcttcacattgacaagctcactctagaatttatatggcaaggcaagggaactygaattgccaaaataatttagaaaataacagagttgggccgggcgcggtggctcacgcctgtaatcccagcactttgggaggccgagacgggcggatcacg

SEQ ID NO: 161245 - DNA, 201 bp, Homo sapiens
tccccaaagaggatgtcacagccctggctcggtgagctgttaagtctgggctctctgaagagccacagatcttctctccttctcattgcttgcaataaggygaatggcagggcgtgtttctgccctgtttgtgctacagctctttcattcccaccattgagctggtctcaagttcttgtccggcatccaggaagaacaagg

SEQ ID NO: 161246 - DNA, 201 bp, Homo sapiens
aaaaagtcgaatgtctaacaatagattattcaaactgccatatcctgtgtacttgttggaatactgtgtagctttaaaaatggtgtttaggaaaagtgttkaataacataaaagttatgtatgtattagaataaattttaaaaggtggctcaaaatatgtatagaaggaaatccacagttcttttgatcaatcaatattga

SEQ ID NO: 161247 - DNA, 201 bp, Homo sapiens
tggccaattccaacccagaccacatagggaagggaactcagggaagtttctcccctactgaatcaagctggttaggtacaaggtcagcacagccgctcctsttggccatgcactccacaccccttgaaccacacttaactttcagggaaaggtagtaacaaaatcacgctttcatccagtatggcttgtagtaatcacctg

SEQ ID NO: 161248 - DNA, 201 bp, Homo sapiens
gggagaccttggggtactttacctctgagcctaaaatagggacagtttttccttctgtctcacaggacatcagatattgcagataggccatgactggcacytcataagtagatgcttagtaaatgtcagtaaccttcccctttttgggggagaaagaagtgacttcccagtagacatgtataactccatacattttttgaa

SEQ ID NO: 161249 - DNA, 201 bp, Homo sapiens
atctttcgagatgtttgttctctttctgactgagtcagccctctgataccctaaaacttaaacactgagacagcaggataactaccactgacacatcttayatcatggaagaggagaggaagaaaacgttatgtccgtaactattcctgcctttgtttcagtgaccgttggagctggcattcatgaccgcattctcttgcc

SEQ ID NO: 161250 - DNA, 201 bp, Homo sapiens
atccatcgctaaccctctgctctcagcaagtaccctgcagtttatgttccttgcctggtggggtgacccaaacctttattccggaagggtctgagccattygcattcctgcctgtattctagaatattcttccctgccctcattgtttagaagcaacctaatttcccctggatagttggggctaagcattccagccagtac

SEQ ID NO: 161251 - DNA, 201 bp, Homo sapiens
gggaggctgaggcaggtggatcacaaggtcaggagttcaagaccagtctgaccaatatggtaaaaccccatctctaataaaaatataaaaatcatccgggygtggtggtgtgcacctgtaatcccagctattcaggagactgaggccagagaatcgcttgaacctgggaggcggaggttgcagtgagccgagatcttgccg

SEQ ID NO: 161252 - DNA, 201 bp, Homo sapiens
acgactcagcacatgctgggccactgtacactcagcacctacttggtcagtgcacgtcagcatgtgcttagcgtacgctcggtcagcaaacactcagcacrtgcttggtcaacacacatcagcacgtgctcagcgcacagtcagcacacactcggtacacgctcggtcggcgcacgtcagcacatgctcagcgcacagcac

SEQ ID NO: 161253 - DNA, 201 bp, Homo sapiens
attagcaataaaatgagcttaaaatatagctggtattgattactttataatctatttctataattctcaaaatactaggtttaatatatattgaggggggktgacatattatgttacagtatagtactttacagctgagtagagatccaggttttaaaattctataaaattagaacattactaaaaattacacataatgca

SEQ ID NO: 161254 - DNA, 201 bp, Homo sapiens
gggcttgtggtttctgtgagataaataaatagatgaagaaataaacacggacatgtgtgagcatgacttagtaaacacacacagtcctaggccatacaccragtggctagaatcaggaaccaggcggtagtgagcaagctcagtgttgcagattatgcggacgagaccctgtgccgtcccccaccacgcagagccctagag

SEQ ID NO: 161255 - DNA, 201 bp, Homo sapiens
gaacctgaggaaatcacggaacttctcgagtctcctcgtctgtaaatggaaacgacgtctgctctgtgtaactgagaaaatagatgcgaaggtgtcaaacraaggcctcacataaagacagggcctctcaacacgtgtcactttcgacagctctttagcaccaacaagtcagggcgattgttaatgactcagcctctcttc

SEQ ID NO: 161256 - DNA, 201 bp, Homo sapiens
ctgacaaactcttttccagagttacagttttgttttacattcccaccagcaatgcctgggacatctagttttgccacatttggccgatgtttgatggaagyggtgcttcctcgtggtttgcgtgtgccgttccgttatggctggcgacgttgagcacgttcttgctgcatgtttgccatcctcaggactctagtaaagtgt

SEQ ID NO: 161257 - DNA, 201 bp, Homo sapiens
tcgtctgtaaatggaaacgacgtctgctctgtgtaactgagaaaatagatgcgaaggtgtcaaacaaaggcctcacataaagacagggcctctcaacacgygtcactttcgacagctctttagcaccaacaagtcagggcgattgttaatgactcagcctctcttcttggactctaaattaatcttcagggatgcagtggg

SEQ ID NO: 161258 - DNA, 201 bp, Homo sapiens
attaaattccaacagcttaaaatgccatcagcagttaaatactcccttctgtttatcttgtaaatcaatattccagcaacatgggtcctttttttttttttaactgatgcatgccacctaaaaactgacttagtttttaattaaatgttaatccagaaagattttaacaagcacttaccacattgtataccctgcacaatg

SEQ ID NO: 161259 - DNA, 201 bp, Homo sapiens
gttgatttttttcattttctaataaaagcagtatagcattatagaaactttagaacacagagaaaaatacttgctcattttaaaacacaatcatattgaaygttttttttttttttttttttttttttttttttgagacagagtcttggtctgtcgcccaggctggagtgcagtggcgcgatctcggctcactgcaagctc

SEQ ID NO: 161260 - DNA, 201 bp, Homo sapiens
cacacacacacacaaaacaaaacaaaaaaatggctagcctagatcgtccaaacaaatcccacaggttaggtgagctggtgtctcttccctaagcaccacaactagtacttcagtgccttcacaaattctgccacagagtgttgtccacccattcagtggtgtttggtgacattagtcatctgcaaccattttttttttttt

SEQ ID NO: 161261 - DNA, 201 bp, Homo sapiens; identical to SEQ ID NO: 30076

SEQ ID NO: 161262 - DNA, 201 bp, Homo sapiens
tttttcattttctaataaaagcagtatagcattatagaaactttagaacacagagaaaaatacttgctcattttaaaacacaatcatattgaatgtttttkttttttttttttttttttttttttttgagacagagtcttggtctgtcgcccaggctggagtgcagtggcgcgatctcggctcactgcaagctccgcctcc

SEQ ID NO: 161263 - DNA, 201 bp, Homo sapiens
gagtataatcatcgtgtgataccacgccatgcatttctttatttggaaattaatacagaccttttcactttatctgtcaatctgagcaactttttacacarttctcaactcttgggattgcttacaagccattaagtatgaaatggctcataaagtgtctctgaagacataaagtaacacaaaaattttagatggtttaaa

SEQ ID NO: 161264 - DNA, 201 bp, Homo sapiens
gaaagtggatgagtcattgccagggcctaggagtgggagggaatgggtatggtgcttcattttgggatgatggaaatcttctaaaattagatgatggtgayggttgtacaactctgtgaaggtactaaaaaacgaattgtatacatttatagtgttaattttatggcatgtgaattatatatcaacaaagctattatctaa

SEQ ID NO: 161265 - DNA, 201 bp, Homo sapiens
ctggtgtttattaagcggcaggctgcatggtgaggccaccgtggaagacctggggaaaatgtcttggcagagaaagcacattgtcccagcacagcagagayggcctgtggctggcacaagtgcactccagctcagcctccccagcctccagcacagggcgcctgctcccatctctgtccagcaaacacatctttttctagg

SEQ ID NO: 161266 - DNA, 201 bp, Homo sapiens
gcttcaagtgattcttttgcctcagcctcctgagtagctggaattacaggcatgcgccaccatgcccggctattttttgtattttgtagagatggggtttygccatgttggccaggctggtctcaaactcctgacctcaggtgatccacttgccttggcctcccaaagtgctgggattacaggtgtgagccactgcacccg

SEQ ID NO: 161267 - DNA, 201 bp, Homo sapiens
attccagccagtacagtgacccccttctttgctggttcaagctcccctgacaggaagtgctcagagtgctaatggggttgactccactgccagcccagtgraccagtcctgtgggggtatgtcctgagatgggagcatcccgccagggagctaagacctcagatcagcagatcctaaagtttcagggacaggaagaacatg

SEQ ID NO: 161268 - DNA, 201 bp, Homo sapiens
gcctcctgagtagctggaattacaggcatgcgccaccatgcccggctattttttgtattttgtagagatggggtttcgccatgttggccaggctggtctcraactcctgacctcaggtgatccacttgccttggcctcccaaagtgctgggattacaggtgtgagccactgcacccggcgtatgtccagttttctacaaaa

SEQ ID NO: 161269 - DNA, 201 bp, Homo sapiens
ttttttagatttggaatatttgcattatccttactggttgaacacctctaatcgcttatctgaacatccctttgagcatcaatggcgttcaaaaagcttcragttttagaacatttccaattttagatttttggatcagggatactcaacctgtatttgcttttaaaacaggatttagcctagaggctgtaccacttgcca

SEQ ID NO: 161270 - DNA, 201 bp, Homo sapiens
tcagtagcagagctcagggagaaatcatgggagaagtcattctaattccagcccatgaaccctggttgtggaaaaatagaaccacacactggccaccgagyggagcatttgcaccctgcctcctggggagtaagattcccacccagcaaggcgcttgtgtcttcaaaaggccatttcaccctttcatcaagccagctcctt

SEQ ID NO: 161271 - DNA, 201 bp, Homo sapiens
cactcccagaagaaggtaatagtaactgcccctgaggaaagccagacatcagacttaggagacaaaaagtttaaatcagctgtcttaaatgtgccagggcrctcaaggaaaccatggggatgttgcttaaaagatatcagaatgatgtagaagcaagtagagaattatctaaaggaagcaaacaaattctggcactgaaaa

SEQ ID NO: 161272 - DNA, 201 bp, Homo sapiens
gggtttggtttccagaactctcagccttgtggctacaggggtgagggtttctttattattaatctttatctttagagacaggacctcactctgccacccaygctggagtgcagtggcataatcacagctcactgcagcctccaactcctgggctcaaaggatccctctgcctcaggaggacctgtagctgggactacaggc

SEQ ID NO: 161273 - DNA, 201 bp, Homo sapiens
aggagactttttgtatttacagtaatttgtttcaaacttgattttcgcagagactagactaaatgacactttcccattgctgcgtttctactcttgacaastccagagtagcattcagtggtcagcattgtattcagttttttgaaaaccttctctttcttgtatacttgctaccagtctggcataagctttactgtcggc

SEQ ID NO: 161274 - DNA, 201 bp, Homo sapiens
caggggctggggaagctgtggtccaggtcatgcccaccccacacccacactgtggagccttcttagctccaaagtgctcagtgcccccatattggtccttytttttttctttggtgctggtggtgtgggtggtatgtatttaattagataatacatgacctttcaaaggaatcaatgcagcctgtatgtaagcaaggaaat

SEQ ID NO: 161275 - DNA, 201 bp, Homo sapiens
tatttcatgaacaccttccattttttattattagttctctgtggctggaccaaggtagatatactcagatgtggccatatagactcaggagtggttataaacacacacacacacacacacacacacactcactctcaagtgggtagatacactcaggtgtggccatatagatccaggagtggttataaacatacatacaca

SEQ ID NO: 161276 - DNA, 201 bp, Homo sapiens
agttgttttgaggcacaaataaatcatatactgtaagaacttttcttgagcaagaaaaagtttggcaatgatgtctaaggacacaaaaaaagcagaagttytgaaaaaaatgataaattgaatatcagagtaaaacttatttttttcaaaagacatttattaagaaaataaagacaaattaggatttcaacataaatttga

SEQ ID NO: 161277 - DNA, 201 bp, Homo sapiens
cctaaaataattttgggaaagtatgtatcccttcacacattatatgtggacaactaaacattttcgttataggtatagttatcaatcatgtatttttggcmtatcataaagtattgacatttaaaaataaaacatcgtcttttcaaacatgttaaatgacattgaaattccacaataatgtgatacttgctcttatccata

SEQ ID NO: 161278 - DNA, 201 bp, Homo sapiens
atttcatgaacaccttccattttttattattagttctctgtggctggaccaaggtagatatactcagatgtggccatatagactcaggagtggttataaamacacacacacacacacacacacacactcactctcaagtgggtagatacactcaggtgtggccatatagatccaggagtggttataaacatacatacacac

SEQ ID NO: 161279 - DNA, 201 bp, Homo sapiens
tgcttcgcgttagtaatcctccgtttatcgttgcttcgcgttagtaatcctccgtttatcgttgcttcgcgttagtaatcctccgtttatcgttgcttcgygttagtaatcctccgtttatcgttgcttcgcgttagtaatcctccgtttatcgttgcttcgtgttagtaatcctctgtttatcgttgcttcgcgttagta

SEQ ID NO: 161280 - DNA, 201 bp, Homo sapiens
taatgcaatctgacaatctgactttttattgaggtatttagtctgtttacatttaatatacataaactgaccttcgggtttgtctctaccatcttctttgyttcctgcttattccatctgttcttttttctttaaacttctttcacagcttccttgaagtaataaagtatttttattattcctcttcctccctccattaac

SEQ ID NO: 161281 - DNA, 201 bp, Homo sapiens
acaatcttaacgctactttgtattatacagttgggcatcccagctgcttcagcccatgaatgtgcagcatgcctgcatggtaggaaagctgggtgttcccrcaggcctcctgcattaatgtgtttgctgttgtcccctttatcctaggaaccctcacccagaatgaaatgatatttaagcggctgcacctgggcaccgtgt

SEQ ID NO: 161282 - DNA, 201 bp, Homo sapiens
tcacaatagggttcttgctcctgtgagaatctaatgctgctgctgatctgacaggaggcggagctcaggaggtcatgctcgcttgccctcccctcccctcytgctgtgcagcgccattcttgaaaggcccggggttagggacctctgctttaaatcatctctagttgatttatagtacttaatacaatgcaaatgctatct

SEQ ID NO: 161283 - DNA, 201 bp, Homo sapiens
agctacagatggagaaaatatttgtaaaccatatattcaacaaagatttctgtctagaatatataaaaactcctaaaacttaacagtaaaaaaaaaaaaawtttgaaattagaaaatgagcaaaagatttcaagagacattttgacaaagatttacagatagaaaataaacacatgggccaggcacagtggctcacacctg

SEQ ID NO: 161284 - DNA, 201 bp, Homo sapiens
aatgaaaaagtaatacatgcagatgggggaagatcacctgaaccttgagaggtggaagatgtagtgagccgtgatcaaaacattacactccagcctgggtracagagaccccatctccaaaaaacagaaaagaaaagcatttataagttcatgttgaacagtgtttcaaacacatagacaaaatttatatgtcatgaaaat

SEQ ID NO: 161285 - DNA, 201 bp, Homo sapiens
ggcttccagctgcagcgggtgatggaggtggaagggagctgtcctcgggacaggaaatgaaacaaacccaaccaaagccgtgtattcgtttattcaatatsgttttgctttcttgtgtagactgagggtgtaaacctcgtttctgacagtcgcctataggacttttcagcaggctgtgggcctagaggtgggggatgtgga

SEQ ID NO: 161286 - DNA, 201 bp, Homo sapiens
agcacaccagcatggcacatgtatacgtatgtaactaacctgcacaatgtgcacatgtaccctaaaactttaagtataataataaaaaataaataaataawtaattaattaaaaagcatgttaaaatagatatttttagccacatacattaatcatgatcaaagctgctttttgacggaatgaacaagctctaagttcaga

SEQ ID NO: 161287 - DNA, 201 bp, Homo sapiens
atatctgtgtgcttggataccgttatctgtatatgaaataatgaaacagaaggttttagagttttgaccaagtcacataacaaatatctaaaccgaagagktgcaccaggtttccaacccaaatttcagtgtgcaatttaaagtaataacagaggctgggtgtggtggctcacacctgtaatcccagagctttgggaggcc

SEQ ID NO: 161288 - DNA, 201 bp, Homo sapiens
gttcgcagaggctgaccaagacttcagtgatgagaatcgcacctaccaggcttccagcccggatgaggtcagtcaaagcacaaaaccgtgggagcttgtcygttccatttggactccagagtcatgaggattcattctttctgggatggggaatatagaggagcagtttatcgtagctttaatgtatgttttagctgtatg

SEQ ID NO: 161289 - DNA, 201 bp, Homo sapiens
gtgtagcctactacacacctaggttatatggtgtagcctgttgctcctgtacttcaaacttgtacaacatgttactgtgtttaataatgtgggcagttgtmacacaatgataagtatctgtgtatctaaccatagaaaaggtacagtaaaaaatgctgtataaaagattaagaaatgatacacctgtatagagtactaacg

SEQ ID NO: 161290 - DNA, 201 bp, Homo sapiens
tagagttacattctgagaagtaagttagaccatttcgtcattgtgcaaacatgatggagtgcacttacacaaacctagatcgtgtagcctactacacacctaggttatatggtgtagcctgttgctcctgtacttcaaacttgtacaacatgttactgtgtttaataatgtgggcagttgtcacacaatgataagtatctg

SEQ ID NO: 161291 - DNA, 201 bp, Homo sapiens
aatcctccgtttatcgttgcttcgcgttagtaatcctccgtttatcgttgcttcgcgttagtaatcctccgtttatcgttgcttcgcgttagtaatcctcygtttatcgttgcttcgcgttagtaatcctccgtttatcgttgcttcgtgttagtaatcctctgtttatcgttgcttcgcgttagtaatattgcagttcca

SEQ ID NO: 161292 - DNA, 201 bp, Homo sapiens
cctccccctctgtccccagagccgatacactcaagccaagctgagcatgcacgacaggtccctcaaggtggccgcggtagtcgagagcctggagagggagwtggaactgctgtgcctcaccggcgtggaggaccagctgcaggcagacgtgcggcccacgctggagatgctgcgcaacgccgggatcaaggtactgcaggc

SEQ ID NO: 161293 - DNA, 201 bp, Homo sapiens
tccataagtccaactcttttttaagctcccacatgtgagtgagaacatgtgatatttatctttctgtacttggcttattttacttaaaataatgtcctttygttccattgatgttgatgtaaatgactggatcttattcttttttactgttgaatggtactccattgtgtatatgtaccacattttctttatccattcatc

SEQ ID NO: 161294 - DNA, 201 bp, Homo sapiens
tgcagctctgctgactcctgtgacacctatggtctgtcagagccgagctctcctgaagcacttgtgagagcctgggctggtgctgggggctcttcctgccyctgtgtctgagaccataggacctgtccccatcgacggagctgaagctttacaagttctgcagagagaatttcggtctttgtaacatttaggctgagttct

SEQ ID NO: 161295 - DNA, 201 bp, Homo sapiens
tcttgtcttcacgctttatttcattaaattgatcttcaatctctgatataatttcttccacttgatttggctattgatacttgtgtatgcttcatgaagtycttgtgctgtgtttttcggctccatcaggtaatttatgttcttctctaaactggttattctagttaacaattcctctaaccttttttcaaggttcttagc

SEQ ID NO: 161296 - DNA, 201 bp, Homo sapiens
gctatctcgtttgtccatgtttgctttagttgcctgtgcttgaggggtattgccgaagaagtctttgtccagaccattgtcctggagatttcccccaataktttcttgtaatagtttcatagtttgaggtcttagatttaagcttttaatgtgttttaatttgatttttgtagacagtgagagataggagtctattttcat

SEQ ID NO: 161297 - DNA, 201 bp, Homo sapiens
agagacttctgatctcatgagcccacaactcatgttccacgaaaatgctttgggaaaagctagtctgaactggccagaggtgtctgtctccccagagattytggcagctgccggcgaggacctcacacacagcgccacatcatagcagccattcctgggtgtgggtcttcttttacccttgctagtgactcagatggatag

SEQ ID NO: 161298 - DNA, 201 bp, Homo sapiens
catctatagtgtgcggtcagcctgcatgtactacacacacttaaggcttagtagttcatatccaaaaaagaataataaacttcagaaggaaaaagactatgtagcatcactttttaaaaactaatacttttaatttaaacttcgtaatggaaaagttgttgctctaaaatttagtacttagatttagtgcatgagtttcat

SEQ ID NO: 161299 - DNA, 201 bp, Homo sapiens
tttgaagttaggtaatgtgattcctccagttttgttctttttgcttaggatagctgtaactattctgggtcttttgtagtttcatataaattttcagattrttttttctatttctgtgaagaatgtcattggtatttcgatagggattgcattgaatctgtagattgctttgggtagtatggacattttaacaatattgat

SEQ ID NO: 161300 - DNA, 201 bp, Homo sapiens
gggcatggtggtacacacccgcggtcctagctactcaggaggctgaggtgagaggatcagctgagcccaggaggtcaaggctgcagtgagtcatgattgcmccattgtactccagcctgggccacagagtgagaccgtgtctcaaaaaaaaaaaaaaaaaaaaaaaaaaacccagccccacttccggcccagctccacttc

SEQ ID NO: 161301 - DNA, 201 bp, Homo sapiens
cttcagaaggaaaaagactatgtagcatcactttttaaaaactaatacttttaatttaaacttcgtaatggaaaagttgttgctctaaaatttagtacttagatttagtgcatgagtttcatttatttgaaatgcagaaacacaaatgaaggtctgaaaattacttatttttttcttgtctcttaagattctactagcagt

SEQ ID NO: 161302 - DNA, 201 bp, Homo sapiens
cctgtctcagaacaaacaaacaaaactccacctatcctcccagagttaagttgatgtatgttaggtatttaactagttttattaattgcattataaaggctttttttttttttaaacttctagttctcctcagctaacatccccaaacttctttggccaatttttttttttttttgcctttattttggccaattttgttct

SEQ ID NO: 161303 - DNA, 201 bp, Homo sapiens
tgcgaatgttctggctcttggtttgacagatggttttcgattgtctcttgggtattttgtatattaggagaatttgggttctatttatatcttttattttrgcgtgcagccaccctgtttagattcagcacataggtcctgggctacatttgtgggctgtggttctaaatgacattttaattctcagagcctttgtgctgt

SEQ ID NO: 161304 - DNA, 201 bp, Homo sapiens
catggtggtacacacccgcggtcctagctactcaggaggctgaggtgagaggatcagctgagcccaggaggtcaaggctgcagtgagtcatgattgcaccmttgtactccagcctgggccacagagtgagaccgtgtctcaaaaaaaaaaaaaaaaaaaaaaaaaaacccagccccacttccggcccagctccacttccag

SEQ ID NO: 161305 - DNA, 201 bp, Homo sapiens
tttaaaaatatatatttttttacatgaagttattctataaatatccattagattgatctttaatttttaatatcatgtatgtgctttactgtctttttttwaaaaaactccttaactttttagttactgagagtgtgcaaatctgtcaccataataatgaatttgtctattttcccatgccattttgtgaattctagctag

SEQ ID NO: 161306 - DNA, 201 bp, Homo sapiens
gtgatctttggtctgcttggtttatgtggtatcactggggctcttcctggtctctgttggtgctgcgtgagagggaaaggtggattttcctaggcctggcrtctcttactaaaagatggaagtgtcagacccatggggatgaagaggcttctttggctgggccctggctgtggctgtatcccatccatatggacccagtgg

SEQ ID NO: 161307 - DNA, 201 bp, Homo sapiens
ttaggtatttaactagttttattaattgcattataaaggctttttttttttttaaacttctagttctcctcagctaacatccccaaacttctttggccaatttttttttttttttgcctttattttggccaattttgttcttttttagctgctttaaaaaaaaaaaaagaaagaaaaacttatgaaaaattttaaacatac

SEQ ID NO: 161308 - DNA, 201 bp, Homo sapiens
ctagctactcaggaggctgaggtgagaggatcagctgagcccaggaggtcaaggctgcagtgagtcatgattgcaccattgtactccagcctgggccacaragtgagaccgtgtctcaaaaaaaaaaaaaaaaaaaaaaaaaaacccagccccacttccggcccagctccacttccaggacggtgggaggtgaggtagatg

SEQ ID NO: 161309 - DNA, 201 bp, Homo sapiens
aaaaactccttaactttttagttactgagagtgtgcaaatctgtcaccataataatgaatttgtctattttcccatgccattttgtgaattctagctagcwatatatatatatatatatatatatatacatacatagtgaggctatgttattagttgcctataggtttagaatagctcttattattctggtgaatgaaaat

SEQ ID NO: 161310 - DNA, 201 bp, Homo sapiens
gctaggtgccacaatcaaactaaattaaaaacagaccagtttcctcaaaaacaagaggttcacagcaaccaatcataagggggccaaactgagccagcatragagagtcctctctactttaccctgtaaggaaagtaactttgaaatgcccaatctgtattttgttcctcgtatctgctttctgcagccctctctggctgt

SEQ ID NO: 161311 - DNA, 201 bp, Homo sapiens
acttctagttctcctcagctaacatccccaaacttctttggccaatttttttttttttttgcctttattttggccaattttgttcttttttagctgctttaaaaaaaaaaaaagaaagaaaaacttatgaaaaattttaaacatacagaaaactaaggagaaaagcataactcatatccctagaccctgagttcaacagac

SEQ ID NO: 161312 - DNA, 201 bp, Homo sapiens
actttttctgtataaatctcttattagttatagcatgaattatgtgccagtttttatattggcttagaaaatatatttttgcacaattcatttcatttctyttgaaataatcactgtcttggctttaaaaaaattatagttaacaaatttattttaatctatcaaaaaagttattacttcttgttgcacaagctacttcag

SEQ ID NO: 161313 - DNA, 201 bp, Homo sapiens
tgttggccaggatggtcttgatctccggacttcatgatccacccgcctcggcctcccaaattgctgggattacaggcgtgagccactgcgcctggctcagtttttttttttggaatattcatagataaatgtaactcaccaaagtcagtgtttgaacatgttcatcatgtccaaaagaaagtttgtaccccgttgggtacc

SEQ ID NO: 161314 - DNA, 201 bp, Homo sapiens
aagtgggcatgtggatggtggttatgtagttgctgaagatggagaagggagagtcggtatcaccttccccaggaggatttctgtgggctgccagactaggkagggtctggggttcatggacatgccctgtctcatgcaaatggattccctttgtggctaccatacatcaaaaacaggtcacgtgtgtgctgtgtgttcaga

SEQ ID NO: 161315 - DNA, 201 bp, Homo sapiens
cttccaggacggtgggaggtgaggtagatgggttcctccctgctccttctgctaagttcagctggaaacagaaggctctgagtggagagcgaggtgaacaragggggcaaggggcgaggcggcaggagctccccgggttttccagcagctggagctgaaggagccggcagcctggaaacgcccatgggtgcagaaatttaa

SEQ ID NO: 161316 - DNA, 201 bp, Homo sapiens
agtctatacacaattttctatgaatcataaaactttgataattatgatagtctaatattttactagttgtaaaaatgaaacttattttgctgtgatgtttyacaattgaaaagccttttttttttttaaggcgtagtactaattcttaagacagtgtttatctaattgtccagtcccaggattcattggaatcagagacat

SEQ ID NO: 161317 - DNA, 201 bp, Homo sapiens
cccgtctctactaaaaatacaaaaaaaatagacagggtggtggcaggcgcctgtagtcctagctgctggggaggctgaggcaggagaatggcatgaacccrggaggcagagcttgcagtgagccgagatcgtgccactgcactccagcctgggtgacagagcaagactctgtctcaaaaagaaaaaaaaaagttagaaact

SEQ ID NO: 161318 - DNA, 201 bp, Homo sapiens
ttgtttaaacatatatatacaaagtgctttttgtcgacaagtaattttgcttttacgaaagggaaatggggtattgagaacggttaacttgtttagtgggstcacaggttagcagtagaattagtgtacagacctttcatactcgagattgcatttagctcatatttaacatttctcattcaaagaaaagaaaattttaaa

SEQ ID NO: 161319 - DNA, 201 bp, Homo sapiens
gtctatacacaattttctatgaatcataaaactttgataattatgatagtctaatattttactagttgtaaaaatgaaacttattttgctgtgatgtttcrcaattgaaaagccttttttttttttaaggcgtagtactaattcttaagacagtgtttatctaattgtccagtcccaggattcattggaatcagagacatt

SEQ ID NO: 161320 - DNA, 201 bp, Homo sapiens
ggaggctgaggcaggagaatggcatgaacccgggaggcagagcttgcagtgagccgagatcgtgccactgcactccagcctgggtgacagagcaagactcygtctcaaaaagaaaaaaaaaagttagaaactgctagattcaaaaattgatagtttggacagttatacagcttagtgttcattactttggtttttttaatg

SEQ ID NO: 161321 - DNA, 201 bp, Homo sapiens
tgcagagtgactgaaggtgcgggctgcatgtcgggggagctggcggtgtgcagagtgactgaaggtgcgggctgcatgtcgggggagctggcggtgtgcasagtgactgaaggtgcaagctgcatgtcgggggagccggcggtgtgcagagtgactgaaggtgcacgctgcatgtcgggggagccggcggtgtggagagtg

SEQ ID NO: 161322 - DNA, 201 bp, Homo sapiens
catttctttatagcacttagttttttgctttgtttttctactttattaacatgcaggcaaagtgggagtgtttatttttaaagaagctttgagcattagayatgttttaaatctatttcttcgtttaatatcagttggcttctaagaagtgtttctcatcaaaatggaaacaataaggcttagatatttaagataaaatgt

SEQ ID NO: 161323 - DNA, 201 bp, Homo sapiens
caggcaacaaagacacttaagattctgcgcttttcctgtctctgaaaaaaatccattattcatcatcttattgtttttaaatactgaggtaaaattttcartacaataggaaaattgccttggaaatggaataaattgcttgccagttcaaaggctccatttctggagttgaggttacaaaacatgatgttgcttatattc

SEQ ID NO: 161324 - DNA, 201 bp, Homo sapiens
gtctcttcttgtttgaatttgcatattttaaaagtcctttgtgatggcataagaatgatgcagtggactttggcgatgcagggggaaaggttgggaagggrgtgagggataaaagactacaaattgggttcattgtatactgctcgggagatgggtgcagcacagtctcacaaattaccactaaagaacttatgtaactaa

SEQ ID NO: 161325 - DNA, 201 bp, Homo sapiens
agacttccaggggtttttttttgtttcctttttaaaaatacttatctttttatatatgcacgctagcacccccattacagaaatgctgggctggggccagkcatggtgggtcatgcctgtcatcccagcactttgggaggctaagctgagcggatcacctgaggtcaggagtttgaggccagcctggccaacatggcgaaa

SEQ ID NO: 161326 - DNA, 201 bp, Homo sapiens
tctgtgggtttatcagagagggtcttgagaacttctgcttccagccgtgataaacagatttatcttccaagcctaattaaatgcaaaacacaagaaaacaygtgaaacaaatgttttcagacattggataagaagctggggacagggatgcctcagagaagagaaacaactctcccacatctagaacgaacagccagacgg

SEQ ID NO: 161327 - DNA, 201 bp, Homo sapiens
ccagtttttttacagtgagcagcagtgctgctattaacatttcatgatgtgtactccacacgttagcaccctggtataagatatctaagagcaggccgggygcgttggctcacgcctgtaatcccagcactttgggaggccgaggcgggtggatcacgaggtcaggagatcgagaccatcctggctaacacggtgaaaccc

SEQ ID NO: 161328 - DNA, 201 bp, Homo sapiens
ggtgaacagagggggcaaggggcgaggcggcaggagctccccgggttttccagcagctggagctgaaggagccggcagcctggaaacgcccatgggtgcaraaatttaaaatttgaaagtcccagcgaggtcccagcctctccaaccgtgggtccacgaaaggggcaccaggaagacagatggctttcagatgatcgtcac

SEQ ID NO: 161329 - DNA, 201 bp, Homo sapiens
atcccagcactttgggaggccgaggcgggtggatcacgaggtcaggagatcgagaccatcctggctaacacggtgaaaccctgtctctactaaaaaatacraaaaattagccgggcgtggtagcgggtgcctgtagtcccagctgctcgggaggctgaggcaggagaatggcgtcaacccggaaggcggaggttgcagtga

SEQ ID NO: 161330 - DNA, 201 bp, Homo sapiens
ttggaagtaattatcttcatctacctgaagtggtagagacataaatgaaactttaacaacagaatatacttcctttaggagctgtatgaagagattttccrtttctgtcattgttgagactgtggttgtgccaagaaagaaattcttaagcattaagtttaaggaggtgagaccttgtcagccacacagtgggcaatacag

SEQ ID NO: 161331 - DNA, 201 bp, Homo sapiens
taaaatttgccactgcttgactttatccaatacatatttaaaccttgatttcaaatatcaaagtcaagaaccaaacaataacgtgtgactcctcttaaatwtgaggattttaatcttcatttattctttttttctcctttgtacttcctagtatttgatcatttaatctgtacctgcaaaccctaattttatagttatttc

SEQ ID NO: 161332 - DNA, 201 bp, Homo sapiens
ctcgggacaggaaatgaaacaaacccaaccaaagccgtgtattcgtttattcaatatcgttttgctttcttgtgtagactgagggtgtaaacctcgtttcygacagtcgcctataggacttttcagcaggctgtgggcctagaggtgggggatgtggaatcaagctaaagacccagaaccagagaaagaaggaagcagcag

SEQ ID NO: 161333 - DNA, 201 bp, Homo sapiens
tcccccagtgtacaccaggagccctccctggcaccaggcgctcccctcgcccgtccccagcaccgccgtgtgcaccctccatgccctccctggcaccaggygctcccctcgcccgtccccagcaccgccgtgtgcacccaccatgccctccctggcaccaggcgctcccctcgcccgtccccagcaccgccgtgtgcaccc

SEQ ID NO: 161334 - DNA, 201 bp, Homo sapiens
tgatttataatcctttgggtatatacccagtaatgggatggctgggtcaaatggtatttctagttctagatccctgaggaatcaccacactgacttccacratggttgaactagtttacagtcccaccaacagtgtaaaagtgttcctatttctccacatcctctccagcacctgttgtttcctgactttctaatgattgc

SEQ ID NO: 161335 - DNA, 201 bp, Homo sapiens
tgtgagtcatattgatagttctctgatctgggttaatgtctttctcacgagatttacatttcacttgttatcaaaaatcactttgtccttaggaaagtggwgccagtgaatggcatttccataagaggggaggggaggtatcaaatgctgggattattcctagttctaatgtcctcaactaatcggcagacgttgagggca

SEQ ID NO: 161336 - DNA, 201 bp, Homo sapiens
taggaagtgtgtcatggtcgcagtaggaaatacgtcatgaggctgtatcatatccatctgagatcacagtaggaagtgtgtcatgatcatagtaggaagtrtgtcatgatcacagtaggaagtgtgtcatgatcgtagtaggaagtatgtcatgatcacagtaggaagtgtgtcatgatcgcagtaggaagtgtgtcatga

SEQ ID NO: 161337 - DNA, 201 bp, Homo sapiens
tctgtgttactggtgccgttgaaccctgttcacttctgattgtgttggatctcattaagggtattaaatttccgttttcgttaaggtgagcaacaatttaraatgttttagtatcctaaagtcaggtcaccatccctacattttttttttttttggtcaagaatgcagtcactcattttctctaagcttcttttcttcaac

SEQ ID NO: 161338 - DNA, 201 bp, Homo sapiens
gaagatgactgaactgcggcaacctcaggatgaaactcgaacagatgaggagttgcctcttacggatgagcaaagaaagtagtttcttgaaatggaatccrctcctggagaagatgctatgaatgttgttgaagtgacaaccaaggatttagaagattccataagctaagttgataaagcagggtctgagagcatcgactt

SEQ ID NO: 161339 - DNA, 201 bp, Homo sapiens
tgtgcagagtgactgaaggtgcgggctgcatgtcgggggagctggcggtgtgcagagtgactgaaggtgcgggctgcatgtcgggggagctggcggtgtgsacagtgactgaaggtgcaagctgcatgtcgggggagccggcggtgtgcagagtgactgaaggtgcacgctgcatgtcgggggagccggcggtgtggagag

SEQ ID NO: 161340 - DNA, 201 bp, Homo sapiens
gaggctgtatcatatccatctgagatcacagtaggaagtgtgtcatgatcatagtaggaagtatgtcatgatcacagtaggaagtgtgtcatgatcgtagkaggaagtatgtcatgatcacagtaggaagtgtgtcatgatcgcagtaggaagtgtgtcatgagactatcatatctgtctgagatcgcagtaggaagtgtg

SEQ ID NO: 161341 - DNA, 201 bp, Homo sapiens
gtattaaatttccgttttcgttaaggtgagcaacaatttagaatgttttagtatcctaaagtcaggtcaccatccctacattttttttttttttggtcaaraatgcagtcactcattttctctaagcttcttttcttcaacatcttatctgcattgtaacttttttttaaatctactacacttcaaattctttgaaaagaa

SEQ ID NO: 161342 - DNA, 201 bp, Homo sapiens
gtctttgctattgtgaataatgccgcaataaacatacgtgtgcatgtgtctttatagcagcatgatttatagtcctttgggtatatacccagtaatgggayggctgggtcaaatggtatttctagttctagatccctgaggaatcaccacactgacttccacaatggttgaactagtttacagtcccaccaacagtgtaaa

SEQ ID NO: 161343 - DNA, 201 bp, Homo sapiens
gagctggcggtgtgcacagtgactgaaggtgcaagctgcatgtcgggggagccggcggtgtgcagagtgactgaaggtgcacgctgcatgtcgggggagcyggcggtgtggagagtgactgaaggtgcaggctgcatgtcgggggagctggcggtgtggagagtgactgaaggtgcaggctgcatgtcgggggagctggcg

SEQ ID NO: 161344 - DNA, 201 bp, Homo sapiens
ccatttagttgtggttggatgtgtgtagcgtgacctcgtcgaagtctgtgttgccgacacaccatttagttgtggttggatgtgtgtagcgtgacctcgtygaagcctgtgttgccgacacaccatttagttgtggttggatgtgtgtagcgtgacctcgttgaagcctgtgttgccgacacaccatttagttgtggttgg

SEQ ID NO: 161345 - DNA, 201 bp, Homo sapiens
aattgggatatccgtcacctccagcatttatcatttctttgtgttaggaactttgcaattttattcttttagttatttgaaatacacaataagttactctwaattatagttgccttgttgtgctactgaacactggatcttattctttgtatctaactgtatttttatacccattacccatccattctttgtcccccactc

SEQ ID NO: 161346 - DNA, 201 bp, Homo sapiens
actgagccactaaagttaatttagttattttttcttattgaagctaaagaactattttgaagctttctgttccttctgaacagttcgccaaggtagcgcaractgcagcactctgcgttgttgtctgatgatcggggcagctggagactggatgtgccaacgcagtttatccacaccggtcagtgtcagtggacaccaagt

SEQ ID NO: 161347 - DNA, 201 bp, Homo sapiens
tgacttccacaatggttgaactagtttacagtcccaccaacagtgtaaaagtgttcctatttctccacatcctctccagcacctgttgtttcctgactttytaatgattgccattctaactggtgtgagatggtatctcattgtggttttgatttgcatttctctgatgaccagtgatgatgagcattttttcatgtgtct

SEQ ID NO: 161348 - DNA, 201 bp, Homo sapiens
gatttgatttacaccagcatcaccacaaagatgtgagtaatgcattatactgtgaacgttattatggctgtgatgtcactaggtgttaggaatttttcagyttccttattatgggaccactgttttatatgcaatccattgttgactggtatgtcattatgcagcgattaactgtttatttttccattttttttactttta

SEQ ID NO: 161349 - DNA, 201 bp, Homo sapiens
tagttgtggttggatgtgtgtagcgtgacctcgtcgaagtctgtgttgccgacacaccatttagttgtggttggatgtgtgtagcgtgacctcgttgaagyctgtgttgccgacacaccatttagttgtggttggatgtgtgtagcgtgacctcgttgaagcctgtgttgccgacacaccatttagttgtggttggatgtg

SEQ ID NO: 161350 - DNA, 201 bp, Homo sapiens
cagcataaagggccgcggcctgcagtgtgagtaacaacagcataaagggccgcggactgaaatgtgagtggctgaccggcgagtgccggtccagtcagttytgagtcacatatctcaggtcaccgtaaatttataaaataccttcagaggcgagccagggaggcaaggcatgcattccctgcacacaggagaagactcaat

SEQ ID NO: 161351 - DNA, 201 bp, Homo sapiens
gagcattttttcatgtgtctcttggctgcataaatgtcttcttttgagaagtgcctgttcatgtccttcgcccacttgttgatggggttgtttttttcttrtaaatttatttgagttcattgtagattctggatattagccctttgtcagatgagtaggttgtgaaaattttctcccattttgtaggttgcctgttcactc

SEQ ID NO: 161352 - DNA, 201 bp, Homo sapiens
gggacgtccacatcctgtttggactccaggagcccatcttcctgtttcccttgctctcatagaaggtgactacagtgtagccctaatagggctaggagaamcaaaaaggaaaaaagaaaaaaacgttctgctttgcaagagccccctttgctggggctgtggctagaaagggtgggtttcttctggagtttgcattctgca

SEQ ID NO: 161353 - DNA, 201 bp, Homo sapiens
gtgtagcgtgacctcgtcgaagtctgtgttgccgacacaccatttagttgtggttggatgtgtgtagcgtgacctcgttgaagcctgtgttgccgacacaycatttagttgtggttggatgtgtgtagcgtgacctcgttgaagcctgtgttgccgacacaccatttagttgtggttggatgtgtgtagcgtgacctcgtt

SEQ ID NO: 161354 - DNA, 201 bp, Homo sapiens
gggccgcggactgaaatgtgagtggctgaccggcgagtgccggtccagtcagttctgagtcacatatctcaggtcaccgtaaatttataaaataccttcasaggcgagccagggaggcaaggcatgcattccctgcacacaggagaagactcaattggaaagaaaatctcctcttttttatgtgtatttgataaccagtct

SEQ ID NO: 161355 - DNA, 201 bp, Homo sapiens
gggctctgttatgttccattgatctatatctctgttttggtaccagtaccatgctgttttggttactgtagccttgtagtgtagtttgaagtcaggtagcrtgatgcctccagctttgttcttttggcttaggattgacttggcgatgcgggctcttttttggttccatatgaactttaaagtagttttttccaattctgt

SEQ ID NO: 161356 - DNA, 201 bp, Homo sapiens
acatactgtcgaaagtcacttctagaatgttggttgatgacttaaagttgtgtaacatagagtgtttagatgttgcttggagtgaacattctttgctatastcatgtttcagaagattggttttttctgactggattaagtgcagtgaggagctgttgagcagcattggttgtgctgtcaggctgcccatccgcaccacag

SEQ ID NO: 161357 - DNA, 201 bp, Homo sapiens
tgaagcctgtgttgccgacacaccatttagttgtggttggatgtgtgtagcgtgacctcgttgaagcctgtgttgccgacacaccatttagttgtggttgkatgtgtgtagcgtgacctcgttgaagcctgtgttgccgacacaccatttagttgtggttgtatgtgtgtagcgtgacctcgttgaagcctgtgttgccga

SEQ ID NO: 161358 - DNA, 201 bp, Homo sapiens
gtatcctcttttatttcattgagcagtggtttgtagttctccttgaagaagtccttcacgtcccttgtaagttggattcctaggtattttattctctttgwagcaattgtgaatgggagttcactcatgatttggctctctgtttgtctgttattggtgtataagaatgcttgtgatttttgtacattgattttgtatcct

SEQ ID NO: 161359 - DNA, 201 bp, Homo sapiens
ggttggatgtgtgtagcgtgacctcgttgaagcctgtgttgccgacacaccatttagttgtggttggatgtgtgtagcgtgacctcgttgaagcctgtgtkgccgacacaccatttagttgtggttgtatgtgtgtagcgtgacctcgttgaagcctgtgttgccgacacaccatttagttgtggttggatgtgtgtagcg

SEQ ID NO: 161360 - DNA, 201 bp, Homo sapiens
accctcacgagaggtggggcttaggtgtgtcgttacagatgttgatgaacaggaggaatagggtacaaggaaatacagttgaccaatgagcagcagagggkttagaagtgctgacccctgtgcagtcaacaatccacgcataagttttgactctccccaaatttaactactaatcacctactgttgactggaagccttacc

SEQ ID NO: 161361 - DNA, 201 bp, Homo sapiens
ttaactcgcttttctttttctagcttcataagatgaatgctcaggtctccaatattcttcctttttcctttctaaaaataggtgcatttaagttttgacasgtattatcattaagttcaaaatctatttcttttttcttttcttttcttttttctttcttttcttttcttgagacggagtcttgctttgttgccaggctgg

SEQ ID NO: 161362 - DNA, 201 bp, Homo sapiens
tactaaaagtacaaaaattagctgggcatggtggtgtgcacctgtagccccagctatgcgggaggctgaggcacaggagaatcacttgaacccaggaggcrgcggttgcagtgagccgagatcatgccactgcactccagcctggcaacagagtgagactctgtctcaaaaaataaaataaaaatttcagtgtttgtaatg

SEQ ID NO: 161363 - DNA, 201 bp, Homo sapiens
agtatccatcctctttggcatgaggaaaactaggggaggaagaatgaaatagtggtggtgactgtgacttctattctcaattgggaacatcaggtcaattragtaaggatatgattaggattcagacgagggctgaaaaaaatgggaaaatttggtcacgctttggtagagatcatcaataatcagcaaaggaaaatcaat

SEQ ID NO: 161364 - DNA, 201 bp, Homo sapiens
agataggctcttgatgtgttaatatgctttgtttaatgttatgatttgattatagaggcattttgtgaaaagctactaatcctaaaacattttaagaaaamgtataacttgtacactgctggatatagtttcagctggacttgatgatgtaaggcaatttaaatataagggggaaagtgttcctgaataatcaataattta

SEQ ID NO: 161365 - DNA, 201 bp, Homo sapiens
gcatgaggaaaactaggggaggaagaatgaaatagtggtggtgactgtgacttctattctcaattgggaacatcaggtcaattgagtaaggatatgattargattcagacgagggctgaaaaaaatgggaaaatttggtcacgctttggtagagatcatcaataatcagcaaaggaaaatcaataataatttgtattgaac

SEQ ID NO: 161366 - DNA, 201 bp, Homo sapiens
taagaaaaagtataacttgtacactgctggatatagtttcagctggacttgatgatgtaaggcaatttaaatataagggggaaagtgttcctgaataatcrataatttagaaactatttcgcgtacatagaaatgctattgagtaaagctcctagttactgtctcccaaggacttctgtttgcttctccctcgttgtgcaa

SEQ ID NO: 161367 - DNA, 201 bp, Homo sapiens
aattgggaacatcaggtcaattgagtaaggatatgattaggattcagacgagggctgaaaaaaatgggaaaatttggtcacgctttggtagagatcatcartaatcagcaaaggaaaatcaataataatttgtattgaacttggcataaatttatggtgatgagtccatcagggaagagcctgggtgatgacagagctggc

SEQ ID NO: 161368 - DNA, 201 bp, Homo sapiens
ctcttttctgcatcatcctttgaagggagaagtcaaaaagagcagctgatcaagagttagcccaacagacctcaggtgccgaggggagcagctgcagccgwccctgcgtccagatgagagagagccaggggtaaattgccgggtaggcagactatttggcctcttttacttcaatagtgagaggcagccatctcctcctcc

SEQ ID NO: 161369 - DNA, 201 bp, Homo sapiens
tggctcctctgctgtaggctggagctgggcccgttaactatcaaggttttccttttgctttcatctggaagatctggaaggcacatatgtttttttttttycctttccaatttttattttaggttcgggggtacatgggcaggtttgttatgtgggtaaattgtgtgttgcaggggcttggtgtacggactatttcatcac

SEQ ID NO: 161370 - DNA, 201 bp, Homo sapiens
aagcaagaagagtcaaaatggaaaaataaaaagaacaaaacatccagaactgtgggacaatttcagaagataaaaatatgtggccgggcacggtggctcaygcctataatctcagcactttgggagttcaaggtgggcagattgcttgagcccacgagatcaagaccagcctgggcagcgtggtgaaaccccatctctact

SEQ ID NO: 161371 - DNA, 201 bp, Homo sapiens
aatatttaacgtttttttcagacataaagctttttttttttttttgaaacagggtctccctctgcttgccaggctgaagtgcagtggcatgaacatggctyactgctgccttgaccctcctggctcaagccatcctcagccctcagcctccctagtagctgagaccacaggcatgccaccacactggctgctttttaaact

SEQ ID NO: 161372 - DNA, 201 bp, Homo sapiens
caccttccccaggaggatttctgtgggctgccagactagggagggtctggggttcatggacatgccctgtctcatgcaaatggattccctttgtggctacyatacatcaaaaacaggtcacgtgtgtgctgtgtgttcagaagccaacttcaccagggacaccttcaagccagcagccagctagcagggcaggtcccttgg

SEQ ID NO: 161373 - DNA, 201 bp, Homo sapiens
ttgtagaggtggagctttgccatgttgcctcgtctggtctcaaactcctgtcctcaagtgatcctcccgtgttggccttccaaagtactgggattacaggkgtgagccaccatggctggctgacatgcagctttttttttttttttttttgagatggagtctcgctctgtcacccaggctggagtgcagtggcacaatctc

SEQ ID NO: 161374 - DNA, 201 bp, Homo sapiens
ttggctgctgccttaactctctttcttgtttctgtgacgcctggttgtccccacactctaggtgaagtggtgtgtagagggtggccccacgtaggcaacawcagcagcagagctacctgtattgatcccaccccctggaatgggacctgaggacgcaacttcctggttctcctccctggactttcaaaaaatgcagcatgt

SEQ ID NO: 161375 - DNA, 201 bp, Homo sapiens
cttcccccttcctttgccccatgctgctcacccgcagtagatgggggacagcctacacaagaagccaggaggatctgaagaggactcaaatgaaaataacrcacagtttgtgtgggggaggtggacttatctttaataaaaatggaaagtttgcagtgctctacgggataagtgctctggtagcgtagagactgtagcagg

SEQ ID NO: 161376 - DNA, 201 bp, Homo sapiens
ggtgccctgcacagggtccatgctcagtgaacactggtgagcacatgagtcaagccatgataaccgtttgcttaggtgcctcatcttccacgagacttccsacgccctggaggcaggagctgtgccttcccccttcctttgccccatgctgctcacccgcagtagatgggggacagcctacacaagaagccaggaggatct

SEQ ID NO: 161377 - DNA, 201 bp, Homo sapiens
cagtgatgagaatcgcacctaccaggcttccagcccggatgaggtcagtcaaagcacaaaaccgtgggagcttgtccgttccatttggactccagagtcawgaggattcattctttctgggatggggaatatagaggagcagtttatcgtagctttaatgtatgttttagctgtatgtggaaaactgcccaacctattcca

SEQ ID NO: 161378 - DNA, 201 bp, Homo sapiens
tgtagaatcaacaggaaagagaaagcccggtgcaaatgtaaaagcccagcccagaggaagtaggtgttccaggaacagaaaagaataaattcagatgtctratgtacttgaagaaatatgagaggatgttactaacaacctaaataaaacaagctatgaaaaaggatcatgtggaaaataagagctcttagaaatatatat

SEQ ID NO: 161379 - DNA, 201 bp, Homo sapiens
tgctgtgattacaggcctagccaccgtgccccgcccttgcgatccgccttggcctcccaaggtgctgtgattacaggcgtagccaccgtgccccgcccttscgatccgccttggcctcccaaggtgctgtgattacaggcgtagccaccgtgccccgcccttccgatccgccttggcctcccaaggtgctgtgattacagg

SEQ ID NO: 161380 - DNA, 201 bp, Homo sapiens
tattggtgtataagaatgcttgtgatttttgtacattgattttgtatcctgagactttgctgaagttgcttatcagtttaaggagattttgggctgagacratggggttttctagatatacaatcatgtcatctgcaaacagggacagtttgacttcctctttccctaattgaataccctttatttccttctcctgcctaa

SEQ ID NO: 161381 - DNA, 201 bp, Homo sapiens
cccattctgttgtgtttgcttttattaatctataatatcatctgcttcaatatggaacaccccacaggtgcaggtctgaggtgctccctgttggcagctcytaaagagaggcagcacagacaccacttcgtcttccacatagacaccaatcattgacctacatgaataaaactgaatacatttcagcaaatcaggccacag

SEQ ID NO: 161382 - DNA, 201 bp, Homo sapiens
ggagattttgggctgagacgatggggttttctagatatacaatcatgtcatctgcaaacagggacagtttgacttcctctttccctaattgaatacccttkatttccttctcctgcctaattgccctggccagaacttccaacactatgttgaataggagtggtgagagagggcatccctgtcttgtgccagttttcaaag

SEQ ID NO: 161383 - DNA, 201 bp, Homo sapiens
gcacagacaccacttcgtcttccacatagacaccaatcattgacctacatgaataaaactgaatacatttcagcaaatcaggccacagaataagccttttytttcttatgtcaaaataattaaatttccttttacagtttttgaataaaatgagccacatacttaattacagatgaatttcgtgaccaaagaccaaacacc

SEQ ID NO: 161384 - DNA, 201 bp, Homo sapiens
gagttctagtttgattgcattgtggtctgagagacagttcgttataatttctgttcttttacatttgctgaggagagctttacttccaactatgtggtcarttttggaataggtgtggtgtggtgctgaaaaatatgtatattctgttgatttggggtggagagttctgtagatgtctattaggtccgcttggtgcagagc

SEQ ID NO: 161385 - DNA, 201 bp, Homo sapiens
gaccaaacacctaccattacccagggagagaaatgtccttgggaaatacgtaccaagagaacttatttggagtatataaatggtttaacttcaaagttttytgctttttaaaaatcagtggtgcttggctgggtgcggtggctcacacctgtaatcccagcactttgggaggccgaggtgggcggatcatgaggtcaagag

SEQ ID NO: 161386 - DNA, 201 bp, Homo sapiens
ttattatgatgttagctggttattttgctcgttagttgatgcagtttcttcgtagacttgatggtctttacaatttggcatgattttgcagcggctggtaycagttgttcctttccatgtttagtgcatccttcaggagctcttttagggcaggcctggtggtgacaaaatctctcagcatttgcttgtctgtaaagtatt

SEQ ID NO: 161387 - DNA, 201 bp, Homo sapiens
ttacccgatgtgtggcgatgatgtgtggcgatgaggagctcggcctccctgggctctggtgctctgttgggtgcaagcctcgttctgcagagccgtgtccrtaacgctgcgagtcagtgactctcagcagcgctgctccccacgccagcctaccctggcctgttgctctgttaaataatcacctcgtgggaattacaagaa

SEQ ID NO: 161388 - DNA, 201 bp, Homo sapiens
tacaccaatcagacggagatttagtcttttcacacagtctcatgtttcttggaggctttgttcatttctttttattcttttttctctaaacttcccttctyacttcatttcattcatttcatcttccatcactgataccctttcttccagttgatcacatcggctcctgaggcttctgcattcttcatgtagttctcgaga

SEQ ID NO: 161389 - DNA, 201 bp, Homo sapiens
cgtccctttgtatcagggcttcctcatggtggggtaagttacactcagaacctgccagctcatccaggggaggacttctattttgaaaaaaaaaaaaaaamcaaaaaacgtatatagaagattcttgatacagtcatcatttagaatgaataatactgatgtaaaaacaacattttacttgggtgaacttcaagacagcac

SEQ ID NO: 161390 - DNA, 201 bp, Homo sapiens
ctcagagtagtttgatcgtctgaagccttctctcaactcgtcaaagtcattctccgtccagctttgttctgttgctggtgcggaactgtgttcctttggargaggagaggcgctctgctttttagagtttgcagtttttctgctctgttttttccccatctttgtggttttgtctacttttggtctttgatgatggtgatg

SEQ ID NO: 161391 - DNA, 201 bp, Homo sapiens
actaaggaatgtcctactgccatatgggatgagaagcgacctgaggtattgtcatgctgttcttattcaggagatacctgctacactgagaaatcattatrgaaattaaaccctgcacgttagagaaccaaactatacatttagcaagtagattggtcttctttgtttcttataaattttcagttgtgaatgtttgctact

SEQ ID NO: 161392 - DNA, 201 bp, Homo sapiens
tgcgtgtgttaggtttttgttaaacatgtgaggtcctcttaagtcacctttttcctgagttagaatcactgagaggcgcccccgtcatcctgagctgtccraggagcatgcacagagctggcacttgggtctctgccttccttccgtctccagtcttcaggtcctctctgtcctctggcctccacacatgatgtccccttg

SEQ ID NO: 161393 - DNA, 201 bp, Homo sapiens
tattcctttatttttcaataatgtcttatgattgttctctgtagaggttggtataccttttgttggatttatttctaagtatttgactttttttttttttkgggggggtgggggaagacaaggtcttactgtgtcacctgggctggatttcagtggcatgatcactgctcactgcagcctcaacctcctgggccaaagcca

SEQ ID NO: 161394 - DNA, 201 bp, Homo sapiens
tactaacattatttggtggctcaaagaatagatttatacagttagtttaactgcaggaggaaaatgtttggaatcttgcaatacaggtagattgtaactaktattaatgagttgtaaatatttaagtgtatttctatttgtagatcctgtaagtagtaaggatcattttaaaattattattaaaagactgagcgagtaggc

SEQ ID NO: 161395 - DNA, 201 bp, Homo sapiens
tcaggtcctctctgtcctctggcctccacacatgatgtccccttggcctagaccactgccagatgtccccattgtccttgcttccctgggaggccccgcacccccccccccaccatgcaccttcacacccccaggctgcgcagttgtattaccagttagcgtcctattctcctgcgtgctctacaaggacaaggcacaagg

SEQ ID NO: 161396 - DNA, 201 bp, Homo sapiens
attcctttatttttcaataatgtcttatgattgttctctgtagaggttggtataccttttgttggatttatttctaagtatttgactttttttttttttggggggggtgggggaagacaaggtcttactgtgtcacctgggctggatttcagtggcatgatcactgctcactgcagcctcaacctcctgggccaaagccat

SEQ ID NO: 161397 - DNA, 201 bp, Homo sapiens
agccactgtgcctggctttgacattttttgatgctatttcaattattatcttttagaaaattttatattctgtttgctgctatttaaaaataaaaaaaaawttttggtgatgtatttttatttttaaaagtaggaaagcattttatttccaaattgattgcctacaataaaaatgttgagttcatatactctgcattttaa

SEQ ID NO: 161398 - DNA, 201 bp, Homo sapiens
tgattattgccttcagttcttgataaacatcatatttatattattttagaaatatagacataatgaagtaaaagtaaataaaattaacagaaaacaagttrtacgttttgtttgtctgggaactagtttggagaaaacagtaaatgtaatgtttaaaccctgccaagagatttcgcaaagaaaatgaaacaattttttata

SEQ ID NO: 161399 - DNA, 201 bp, Homo sapiens
gatggggaacggattcatggtggccagggattagggaggaggcagcagagggaagtggttgcagctgcagagcagccgcaggagggaccctgtgtgagggrtgctctgggtctggaggtgtctgtgtgagggatgctctgggtctggaggtgtccgtgtgagggaccctgtgtgagggatgctctgggtctggaggtgtct

SEQ ID NO: 161400 - DNA, 201 bp, Homo sapiens
aacctcctgggccaaagccatcctcacacctccgcttcctgagtaactgggagggactacaggcacatgccatcatgcctggctaattttttatttttttgtagagactgggcctcctgtattccctaggctggtctcagagtcctggcctcaagtgatcctccagccatggcttctcaaagtattggaattacagatgtg

SEQ ID NO: 161401 - DNA, 201 bp, Homo sapiens
ttgctgctatttaaaaataaaaaaaaatttttggtgatgtatttttatttttaaaagtaggaaagcattttatttccaaattgattgcctacaataaaaaygttgagttcatatactctgcattttaagtacagatcctaatcagatgttgagtactgtcatgttgaaatttaccatgactggataagtgatccttttttt

SEQ ID NO: 161402 - DNA, 201 bp, Homo sapiens
cttcttgaaaactggtctgcaattacaacttcttatattttatcatttttaatgttttgagggaagtaaatacccacaagagattaaggcagtctatctcrtgaagttacacctgttcacgtttggcttgttcattcagtctttgtaaagctacctggatgtccgtgttaaaaaaaaaaagtggctatttatttgtttttt

SEQ ID NO: 161403 - DNA, 201 bp, Homo sapiens
gtggttgcagctgcagagcagccgcaggagggaccctgtgtgaggggtgctctgggtctggaggtgtctgtgtgagggatgctctgggtctggaggtgtcygtgtgagggaccctgtgtgagggatgctctgggtctggaggtgtctgtgtgaggggtgtcctgggtctggaggtgtccgtgtgagggaccctgtgtgagg

SEQ ID NO: 161404 - DNA, 201 bp, Homo sapiens
agtagaatgtttttaacttagcacatttgttaaataatttttcagagagctgcttacttgggcacacataatagaggcaaacttggtacttaccctaataygaattaatgtaaggtttcattatcttttaactgttggcagtgatagaactaccatttttcatctcacatttttgctatttaaagcactcataggccaggg

SEQ ID NO: 161405 - DNA, 201 bp, Homo sapiens
ttttatcatttttaatgttttgagggaagtaaatacccacaagagattaaggcagtctatctcgtgaagttacacctgttcacgtttggcttgttcattcwgtctttgtaaagctacctggatgtccgtgttaaaaaaaaaaagtggctatttatttgttttttaccatttcataaatataaggttaatatgacttttcca

SEQ ID NO: 161406 - DNA, 201 bp, Homo sapiens
tcaacaaattgaaaagaattgaaatcacacagagtgtgttctctcactgtaatagaattgttaaaaatcagtaaccaaggcagcaggaaaactctaaaacrtgtggaaagtgaacagcacactttgaattaatttataggataggtagtctcaaggaaacaatacatacagctgaataaaagtgaaaattctgcattctgg

SEQ ID NO: 161407 - DNA, 201 bp, Homo sapiens
caggagggaccctgtgtgaggggtgctctgggtctggaggtgtctgtgtgagggatgctctgggtctggaggtgtccgtgtgagggaccctgtgtgagggrtgctctgggtctggaggtgtctgtgtgaggggtgtcctgggtctggaggtgtccgtgtgagggaccctgtgtgagggatgctctgggtctggaggtgtct

SEQ ID NO: 161408 - DNA, 201 bp, Homo sapiens
acagtagtgcttcttcgtcacagtgaatttgaatcttccttttcatattcacgtgtgagggctcaagctccgtcagcatcttcacacactgactcttgcarcctaggaaaacacttaacatatgtcaccacacttgtcttttataattaaactacaactagaattataattcataaatctgccactggtggcctcctgcag

SEQ ID NO: 161409 - DNA, 201 bp, Homo sapiens
ttgatttgctcccttttgggcagatgacccgaggaatctaggtaggaaacacagagagtgaaagggttccttcagtgaaagaagagtgcagtcctcggggktccacatgagttgtggccttccacatggcgagccgagcagtctgctcccgaggggtctgtcctggcctgggtaggctccgtctccctaaccagagaactc

SEQ ID NO: 161410 - DNA, 201 bp, Homo sapiens
agggaccctgtgtgaggggtgctctgggtctggaggtgtctgtgtgagggatgctctgggtctggaggtgtccgtgtgagggaccctgtgtgagggatgcyctgggtctggaggtgtctgtgtgaggggtgtcctgggtctggaggtgtccgtgtgagggaccctgtgtgagggatgctctgggtctggaggtgtctgtgt

SEQ ID NO: 161411 - DNA, 201 bp, Homo sapiens
tgtgagggaccctgtgtgagggatgctctgggtctggaggtgtctgtgtgaggggtgtcctgggtctggaggtgtccgtgtgagggaccctgtgtgagggrtgctctgggtctggaggtgtctgtgtgaggggtgccctgggtctggaggtgtctgtgtgagggaccctgtgtgaggggtgctctgggtctggaggtgtct

SEQ ID NO: 161412 - DNA, 201 bp, Homo sapiens
gtctggtctcaaactcctgtcctcaagtgatcctcccgtgttggccttccaaagtactgggattacaggggtgagccaccatggctggctgacatgcagctttttttttttttttttttgagatggagtctcgctctgtcacccaggctggagtgcagtggcacaatctccactcactacaagctctgcctcccgggttca

SEQ ID NO: 161413 - DNA, 201 bp, Homo sapiens
tgtagctttaaaaatggtgtttaggaaaagtgtttaataacataaaagttatgtatgtattagaataaattttaaaaggtggctcaaaatatgtatagaakgaaatccacagttcttttgatcaatcaatattgagctccttcatgtccagccatagtctaggtaatgttgatacaacagtgaacaagacaaaccaaatcc

SEQ ID NO: 161414 - DNA, 201 bp, Homo sapiens
caacaaattgaaaagaattgaaatcacacagagtgtgttctctcactgtaatagaattgttaaaaatcagtaaccaaggcagcaggaaaactctaaaacatgtggaaagtgaacagcacactttgaattaatttataggataggtagtctcaaggaaacaatacatacagctgaataaaagtgaaaattctgcattctgga

SEQ ID NO: 161415 - DNA, 201 bp, Homo sapiens
aaacatcccaggaattctataaaaaatcaaaaatacaatgtgtttacctttatacctggggtaagactattgcattcttggagatgggttgtgtgtcagarattgctggcttcctttgctataggatggagcctgttgagactctgacttaggtattgagttgtgtcacatccaaatcagtgtccttttgcttttgaacca

SEQ ID NO: 161416 - DNA, 201 bp, Homo sapiens
ctcactacaagctctgcctcccgggttcacgccattctcctgcctcagcctgtagctgggactacaggtgcctgccaccacgcccagctaattttttgcatttttttttttttagtagagacaaggtttcaccatgtcagccagaatggtctcgatctcatgacctcatgatccgcctgcctcggcctcccaaggtgctgg

SEQ ID NO: 161417 - DNA, 201 bp, Homo sapiens
acgccaggggggtccccctctcccccagtgtacaccaggagccctccctggcaccaggcgctcccctcgcccgtccccagcaccgccgtgtgcaccctccrtgccctccctggcaccaggtgctcccctcgcccgtccccagcaccgccgtgtgcacccaccatgccctccctggcaccaggcgctcccctcgcccgtccc

SEQ ID NO: 161418 - DNA, 201 bp, Homo sapiens
actgttagatttcagagttgttgatttaatttttctgtatttataaacaacatacttttagaagggacatttttgtcaaagaagaaacatgttttctctcyttttttttttttttttttttttttttttgagatggagtctcgctctgtcgcccaggctggagtgcagtggtgcgatctccgctcactgcaagctccgcct

SEQ ID NO: 161419 - DNA, 201 bp, Homo sapiens
agtgggcaatacagaagagcctcatccatcccaaccccaaccaaccatagccagaccccaaagagtgagattttagtccagtttatttattctttaccaayctttgaaacttccatgacaagctattaattacgtttttttctcttgtgacagtaatttaaacatctgtggttcattacaaagcagtaattgagggaatgt

SEQ ID NO: 161420 - DNA, 201 bp, Homo sapiens
ccactctagagaacagtctaagcgttcctgaaaaaattgaacatggaattaccatatgccccgcccgagagacatgagaacaaagacccgtatgttaatgwtcacagcagtgttagagccgggaagtggaggcagtccaaatgtctatcagctatcaaacaagaaataaaatgtagtctgttcgcacacatggagcatcat

SEQ ID NO: 161421 - DNA, 201 bp, Homo sapiens
ttaccacattgtataccctgcacaatggctttctttcatagagtgataaaaagactttgagaaatctgagttatgtaaggagaagccattagctgcccttkgtttagtgttcagataaatgggagattgttgcaagtataactaacagatcagatatattaattacatgcaacacataattatttacactaattgaagtag

SEQ ID NO: 161422 - DNA, 201 bp, Homo sapiens
gagtgatccccagcaggtagaaggtcaggggtggtggagtgatccccagcaggtagaaggtcaggggctgaggagtgatccccagcaggtagaaggtcagrggctgaggagtgatccccagcaggtagaaggtcaggggctgaggagtgatccccagcaggtagaaggtcaggggctgaggagtgatccccagcaggtaga

SEQ ID NO: 161423 - DNA, 201 bp, Homo sapiens
ttgccatttctaactgatgtagctaggatcccatcttattttgtccataatccagagtttaagtgacttgttcatcagcatgaagcatgggcatggccatwatccgcctttttttttttttttttagacagagtctcgctctgtcacccaggctggagtgcagtggtgtggtctcagttcactgcaacctccgtctcctgg

SEQ ID NO: 161424 - DNA, 201 bp, Homo sapiens
ctctgtaccctccctcccctcacatggtgttagggtgtcatctctgtaccctccctcccctcacatggtgttagggtgtcatctctgtaccctccctcccstcatatagtgttagggtgtcacctctgtaccctccctcccctcacatggtgttagggtgtcacctctgtaccctccctcccctcacatggtgttagggtg

SEQ ID NO: 161425 - DNA, 201 bp, Homo sapiens
gtgccacagtgagctcacaaaacgacaaagacatgcatcacgggcgtgggcaggactcaccacgactttgagcctcagcttttgcatctgcaaactggagrcggtatcacttcccattaggggcgggtctgaagatcagtagtaacacgcttacatacatgtgaatgaatgtgcagagctcctttcacacctgcagaacat

SEQ ID NO: 161426 - DNA, 201 bp, Homo sapiens
ccctccctcccctcacatggtgttagggtgtcatctctgtaccctccctcccctcacatggtgttagggtgtcatctctgtaccctccctcccgtcatatrgtgttagggtgtcacctctgtaccctccctcccctcacatggtgttagggtgtcacctctgtaccctccctcccctcacatggtgttagggtgtcacctc

SEQ ID NO: 161427 - DNA, 201 bp, Homo sapiens
gctcgcctgcgtgcggctttcctgaggcagcggtggcctcagttgttgctggtctcccgtaggtcgctctggtgcagtggacagagagtgtgggcctcacrctggtcagcagggacctcacctccatgcagctgaagacccccagtggccaggtcctcagcttctgcattctgcagctgtttcccttcacctccgagagca

SEQ ID NO: 161428 - DNA, 201 bp, Homo sapiens
catggtgttagggtgtcatctctgtaccctccctcccctcacatggtgttagggtgtcatctctgtaccctccctcccgtcatatagtgttagggtgtcayctctgtaccctccctcccctcacatggtgttagggtgtcacctctgtaccctccctcccctcacatggtgttagggtgtcacctctgtaccctccctccc

SEQ ID NO: 161429 - DNA, 201 bp, Homo sapiens
tatagtgttagggtgtcacctctgtaccctccctcccctcacatggtgttagggtgtcacctctgtaccctccctcccctcacatggtgttagggtgtcayctctgtaccctccctcccctcacatggtgttagggtgtcatctctgtaccctccctcccctcacatggtgttagggtgtcatctctgtaccctccctccc

SEQ ID NO: 161430 - DNA, 201 bp, Homo sapiens
ttttgtatgctttaacattttttataaaggttatcttaatctgtgtggcctattgcaacatacttttttggcttaacatttgtttataaaattgatccatatcaacacatatatctacttcatttttcacttcactaaagtgtttcattgtataaatataccacaactgattcatcccttcctttgggaaaggagactttg

SEQ ID NO: 161431 - DNA, 201 bp, Homo sapiens
gtcacctctgtaccctccctcccctcacatggtgttagggtgtcacctctgtaccctccctcccctcacatggtgttagggtgtcatctctgtaccctccstcccctcacatggtgttagggtgtcatctctgtaccctccctcccctcacatggtgttagggtgtcatctctgtaccctccctcccctcacatggtgtta

SEQ ID NO: 161432 - DNA, 201 bp, Homo sapiens
gtgtcatctctgtaccctccctcccctcacatggtgttagggtgtcatctctgtaccctccctcccctcacatggtgttagggtgtcatctctgcacactycctcccctcacatggtgttagggtgtcatctctataccctccctcccctcacatggtgttagggtgtcatctctgtaccctccctcccctcacatggtgt

SEQ ID NO: 161433 - DNA, 201 bp, Homo sapiens
catggtgttagggtgtcatctctgtaccctccctcccctcacatggtgttagggtgtcatctctgcacactccctcccctcacatggtgttagggtgtcayctctataccctccctcccctcacatggtgttagggtgtcatctctgtaccctccctcccctcacatggtgttagggtgtcatccctgcacactccttccc

SEQ ID NO: 161434 - DNA, 201 bp, Homo sapiens
catggtgttagggtgtcatctctgcacactccctcccctcacatggtgttagggtgtcatctctataccctccctcccctcacatggtgttagggtgtcayctctgtaccctccctcccctcacatggtgttagggtgtcatccctgcacactccttcccctcacatggtgttagggtgtcatctctataccctccctccc

SEQ ID NO: 161435 - DNA, 201 bp, Homo sapiens
gattatgatttctggtataaactagaaatgtttaaataaaggagagtatatttttctacaaaatttgaccttgttagcattctttgtcttgctttgcaacwtggaagttgtttgcttaaaatacaactgtagtcaattagaaggtggtataattttgcatgaaattttctatatagcctgtagcaaggaaggcacatagta

SEQ ID NO: 161436 - DNA, 201 bp, Homo sapiens
aaaaaaaaaaattgccttgtgggttaaaactgttttaacttaaacaatgatggtctgagaacacaaattcttcttaataaagtaaagcaaatgtatttatrtatattttgcttcagccttttgtacttactctgatttaactaggtttcaaccaaagaaaatgtccttttgatggttctttctgaagaactttatttgatt

SEQ ID NO: 161437 - DNA, 201 bp, Homo sapiens
atcttgattttacactgaaaatatgggttaaagttttggaattcttctgtttaagtatttcattgagtgagaaatctttgtgacatttatatttgtcacaytcagtctcctgttatcttatacgacacaaaatgagtttatcatactttgttgccctctcatgtctcatttcgcaatccacagttaatccctttcctctgt

SEQ ID NO: 161438 - DNA, 201 bp, Homo sapiens
cttaggaacaagggtgtttgctcccaccagttctgttcaacattgtatagggcagttagttaagaaaatgaagtaaaaggcatctagatggaaagaaagargactgtctatctctagtcacagatggcatgatcttgtttataggaaaacctagggaatctacacacaaaaacattgtaactaaacaaaatgaattagcag

SEQ ID NO: 161439 - DNA, 201 bp, Homo sapiens
gtttttatactatttaatttgatgttacagtattaagccagttttatttatttccatgtcagaagaagcatattgaagccaaagattagttttaaagaccrcttgattatatcctgaattgattatatttctaaaattgttatttatgcatccaacatgtgtgtaaaatcataacaaaaagtctgaatcctcagtagttgc

SEQ ID NO: 161440 - DNA, 201 bp, Homo sapiens
ttttagtcaagtggtggaaggaaattgtggcaagtggagaagtatactggatatgaaaaggtttccgatggtgcagagtgcagactaagggaggagaagasttgatgtgctcagggagagatggttgtagggccgagggaggctcatgattagggggagagcacacagtatggctgaagagagatggcagaggggctgaaa

SEQ ID NO: 161441 - DNA, 201 bp, Homo sapiens
tagttgcaccaagtaattttgtcattggaagtaatggcaaaaaccacagttacttttgcaccaacctgtatttctgctatgtaatgatatttcatgaacaycttccattttttattattagttctctgtggctggaccaaggtagatatactcagatgtggccatatagactcaggagtggttataaacacacacacacac

SEQ ID NO: 161442 - DNA, 201 bp, Homo sapiens
catagaatggacttgcatgtagcgtgccttactgggagaacacacaatgtaagatctgtgcaaattaaaaaggttttattttaagctagctaactattgctttttttttttttttttctgtaagacaagttctttcagagagactgctggtagatcggaaagacatacatactgtcctgttcttgggaactctccatcttg

SEQ ID NO: 161443 - DNA, 201 bp, Homo sapiens
tgcacgctgcatgtcgggggagccggcggtgtggagagtgactgaaggtgcaggctgcatgtcgggggagctggcggtgtggagagtgactgaaggtgcargctgcatgtcgggggagctggcggtgtggagagtgactgaaggtgcaggctgcatgtcgggggagctggcggtgtgcacagtgactgaaggtgcaagctg

SEQ ID NO: 161444 - DNA, 201 bp, Homo sapiens
gctcccctcgcccgtccccagcaccgccgtgtgcaccctccatgccctccctggcaccaggtgctcccctcgcccgtccccagcaccgccgtgtgcacccwccatgccctccctggcaccaggcgctcccctcgcccgtccccagcaccgccgtgtgcaccctctgtgccctccctggcaccaggcgctcccctcgcctgt

SEQ ID NO: 161445 - DNA, 201 bp, Homo sapiens
ggatgtgtgtagcgtgacctcgttgaagcctgtgttgccgacacaccatttagttgtggttggatgtgtgtagcgtgacctcgttgaagcctgtgttgccracacaccatttagttgtggttgtatgtgtgtagcgtgacctcgttgaagcctgtgttgccgacacaccatttagttgtggttggatgtgtgtagcgtgac

SEQ ID NO: 161446 - DNA, 201 bp, Homo sapiens
tggtgttagggtgtcatctctataccctccctcccctcacatggtgttagggtgtcatctctgtaccctccctcccctcacatggtgttagggtgtcatcyctgcacactccttcccctcacatggtgttagggtgtcatctctataccctccctcccctcacatggtgttagtgtgtcatctctgcacactctctccctg

SEQ ID NO: 161447 - DNA, 201 bp, Homo sapiens
tgaagcctgtgttgccgacacaccatttagttgtggttggatgtgtgtagcgtgacctcgttgaagcctgtgttgccgacacaccatttagttgtggttgkatgtgtgtagcgtgacctcgttgaagcctgtgttgccgacacaccatttagttgtggttggatgtgtgtagcgtgacctgttgaagcctgcgttgccaac

SEQ ID NO: 161448 - DNA, 201 bp, Homo sapiens
gtcatctctataccctccctcccctcacatggtgttagggtgtcatctctgtaccctccctcccctcacatggtgttagggtgtcatccctgcacactccytcccctcacatggtgttagggtgtcatctctataccctccctcccctcacatggtgttagtgtgtcatctctgcacactctctccctgcacatggtgtta

SEQ ID NO: 161449 - DNA, 201 bp, Homo sapiens
atcgacacagtatctgttaagtaagtatttgataaacaaatgaggcagtgaatgaatcagttaaaccaagagtcaggatttccttcgctttcctaaaactrtgtagcttttattctttacagaaaatggtatatttgcaacactattttgttattcttttgaagctcaaattctgctttgaattattaaactttactcacg

SEQ ID NO: 161450 - DNA, 201 bp, Homo sapiens
cgtggttagcgtgctctccgtggttagtgtgctctctccatggttagcgtgctctccgtggttagcgtgctctccgtggttagcgtgctctccgtggttarcgtgctctccgtggttaacgtgccctccgtggttagcgtgccctccctggttagtgtgccctccctggttagcatgctctccgtgtttagcgtgctctcc

SEQ ID NO: 161451 - DNA, 201 bp, Homo sapiens
aacactcttaaaaggcttttcaaatttaagaaagttaagctgttttataaaaattcctctgtatgaagtaaaatattttgagctacttgatacaatttacmttgtaaatttcagaggaaaatattatagtatttaacgttgacttttgtaattctaaaattcatatatgttccctaaatcctgtgcatctctcataagaaa

SEQ ID NO: 161452 - DNA, 201 bp, Homo sapiens
attagtcttttcatctaaaatgtagtattttagaaacatttggtaattacccagtaggagttctatgtcatttttaccacgaatggcaatttctaagttgytaatagatataatttatgctgagattttaaagaaatcactaaggaaaaagcactttatttcctgctgagattaatttatgaaataattcaaaacattctt

SEQ ID NO: 161453 - DNA, 201 bp, Homo sapiens
ccgtggttagcgtgctctccgtggttagcgtgctctccgtggttaacgtgctctccgtggttaacgtgccctccgtggttagcgtgccctccctggttagygtgccctccctggttagcatgctctccgtgtttagcgtgctctccgtggttagcgtgctctccgtggttagtgtgctctctccatggttagcgtgctcgc

SEQ ID NO: 161454 - DNA, 201 bp, Homo sapiens
atttttagtattttatgttttgtggctttgatattggatgcatacaaatttaaattgttgtctatattcctactggattaagcagtttctcattataaagkgactttctttatctctactaaagctttttgcattaaattctactttgttttgtgttaatgtagcaatgccagctgtctttaatttctttggcatatcttt

SEQ ID NO: 161455 - DNA, 201 bp, Homo sapiens
ggttagcgtgctcgccgtggttagcgtgctctccgtggttagcgtgctctctgtggttaacgtgctctccgtggttagcgtgctctccgtggttagcgtgytctccgtggttagtgtgttctccgtggttagcgtgctctccatggttagcgtgctctccatggatagtgtgctctccgtggttagcgtgctctccgtggg

SEQ ID NO: 161456 - DNA, 201 bp, Homo sapiens
ccgtggttagcgtgctctccgtggttagcgtgttctccgtggttagtgtgttctccgtggttagcgtgctctccatggttagcgtgctctccatggatagygtgctctccgtggttagcgtgctctccgtgggtagcgtgctctctctggttagcgtgctctccgtggttagcgtgctctccgtggttagcgtgctctctc

SEQ ID NO: 161457 - DNA, 201 bp, Homo sapiens
tgtggggagtataggaactacaattcaagatgagagttgggtggagacacagccaaaccatatcatactttaatttcatttgttgtattttttatctcaascattgtttttgtgtctggaagtttgatttgggtcttttttgtatccttcatgtctctcactttctggtctgggaatacagttttcatagctgttttcatg

SEQ ID NO: 161458 - DNA, 201 bp, Homo sapiens
tccgtggttagcgtgttctccgtggttagtgtgttctccgtggttagcgtgctctccatggttagcgtgctctccatggatagtgtgctctccgtggttarcgtgctctccgtgggtagcgtgctctctctggttagcgtgctctccgtggttagcgtgctctccgtggttagcgtgctctctctggttagcgtgctctcc

SEQ ID NO: 161459 - DNA, 201 bp, Homo sapiens
attttatctttttgggtggtggatatttttatattcctgcaaatattgttgagtattgtttgggatgctgttcagctacttggataggccttgctttgttrcatcattggacagatctggggcatgctccatggggttggttattccccagcgtgaggccagacgtgctctgtgggtcatgggcttctccagtctggctcg

SEQ ID NO: 161460 - DNA, 201 bp, Homo sapiens
ccgtggttagcgtgctctccgtgggtagcgtgctctctctggttagcgtgctctccgtggttagcgtgctctccgtggttagcgtgctctctctggttagygtgctctccgtggttagcgtgctctccgtggttagcgtgctctccgtggttagcgtgctctctctggttagcgtgctctccgtggttagcgtgctctctg

SEQ ID NO: 161461 - DNA, 201 bp, Homo sapiens
tgatatttaagtatatatgaaactttgtcaacgactattctacattagatgtttcgtagataagaatttattcacatagagaaatcacttttagtaataargttttagatataactttttcactcttctcctgtgttggtaaagctattgatagagggtgattttacatataatttgctttatttcttttttggtcagtta

SEQ ID NO: 161462 - DNA, 201 bp, Homo sapiens
taaatttcatttacagaagaataaccttaatgattatgtttgaagtaagacttggaaaatacagtgcgtattattcacattcaatcctattgctttttatyttggccgggcgcaggggctcacgcctgtaatcctagtactttcggaggctgaggcaggtggatcacctgaggtcaggagtttgggactagcctggccatc

SEQ ID NO: 161463 - DNA, 201 bp, Homo sapiens
gaaagtaacttagagcaaagaaagtgttattaagaaaatcatgggctgggtacggtggcttacgcctgtaatgccagcactttgggaggccaaggcgggcrgatcacgaggtcaggagattgagaccctcctggctaacacggtgaaaccccatctctactaaaaatacaaaaaattagccgggtgtggtggcgggcgcct

SEQ ID NO: 161464 - DNA, 201 bp, Homo sapiens
tgctttatttcttttttggtcagttatgtgctaattaatgccatttatgatattaacttaaggatttttacatctctgtgttaagttttaatgctgagatmatttagtaatatttctgatcattgttgacttggaactgaaacaattacaaaacatgggaataatcttctgagtgtagtccccttttaaattactacgaag

SEQ ID NO: 161465 - DNA, 201 bp, Homo sapiens
aaaagaacaaaactctgtctcaaaaaaagaaagaaacaatacaaggcagcaaggtaagtgttgtcagtaaatagtcaaagctgatgcaccggcccctgctkacacagagcaaatgggcaggccatccagtgcccttggcctcttcttaattggaggggataggcataagcatttaaacgaaacagttacatagtggtaaac

SEQ ID NO: 161466 - DNA, 201 bp, Homo sapiens
cttccttgcattgggttagaacatgcttctttagctcggaggagtttgttattacccaccttctgaagtctacttttgtcaatttgtcaaactccttctcygtccagttttgttctcttgcaggtgaggagttgtgatcctttggaggagaagaggcgttctggttttaggaattatcagcctttttgtgctggtttttcc

SEQ ID NO: 161467 - DNA, 201 bp, Homo sapiens
aggcaagtccagttacaagtggttacttcagcaccacccttcaggcattggataaaagtaggggatagacgctccgcagtgatgtggaagatttgcatagkcagcaggagttgcctagcatgcatagaccaccgtacctgtcagtaggagagaacacatttatttcaagtgtctatagaacattcaccaagataagccatt

SEQ ID NO: 161468 - DNA, 201 bp, Homo sapiens
gagccaagatcacaccactgcactccagcctgggcgacaaagcgagactccgtctaaaaaaaaaaaaaaaaatagaaaggtgccaaaaacaaaaaaaaatwatttcgattaattataaagagccaaaagagcaacaaacaagaaaaggaaggttaaaatgttgtctttactgaaaattcatttttcgttattgacaattca

SEQ ID NO: 161469 - DNA, 201 bp, Homo sapiens
gctcggaggagtttgttattacccaccttctgaagtctacttttgtcaatttgtcaaactccttctctgtccagttttgttctcttgcaggtgaggagttrtgatcctttggaggagaagaggcgttctggttttaggaattatcagcctttttgtgctggtttttccttatcttcgtggatttatctacctttggtcttt

SEQ ID NO: 161470 - DNA, 201 bp, Homo sapiens
ggcagcatggcctccgctgagtcaggcacggtgagggcacagacccagggaggggccagacgggactcacaattaggcccacagccagcaagccacggacrggactcacatccaggtgtctacagtagtcaaactgttggaggctgaaagtagagtggtgatcaccagctgtgggagggggactgggagtgttgcccgaca

SEQ ID NO: 161471 - DNA, 201 bp, Homo sapiens
aacaggcgataaactcgagacagctacctgcattgccaaaagttcacatctcgtgtctagaacacaagatattcatattttcagacaggtaagtatgtatyttaatcactttgaatttttaaacatttgtctcacacaaacgaagcctattgtttttgtcagaatatatatttattaatcactaaatatctttttaaaaag

SEQ ID NO: 161472 - DNA, 201 bp, Homo sapiens
tcttctaaataagttaataaaattgatagacctttagcaaggaagactgatcaaaataaaaagtgatgtcacaaatcaccagtattagtaatgaaataggkgctttcactatagatcctgcagccattaaaaagacagttatgaaatactacaaacaccttgatgctcataaatagaagaaatggacaaattcttctgaaa

SEQ ID NO: 161473 - DNA, 201 bp, Homo sapiens
tctaaccttgaaaagctcctgcttatcctccttgcggcctttagccggctcccgtttgcctggtcagctttgttactagcacttaacataatcactgccckcttggttctgggggacttgccgcttgtctttgccattcctttcttcttagccttttggagacattttgttttaaggtgtagctcttaaattgcataaatc

SEQ ID NO: 161474 - DNA, 201 bp, Homo sapiens
atactacaaacaccttgatgctcataaatagaagaaatggacaaattcttctgaaaccataaagtataagaactcagtcaaaatgaaatagacaatatcartagtcctgtagccaataaagaagctgaattagtaatttaaagctctaggaaggaaatacctaggtccaggagaattccttaaaaccattacagaagactt

SEQ ID NO: 161475 - DNA, 201 bp, Homo sapiens
gtagcgggtgcctgtagtcccagctgctcgggaggctgaggcaggagaatggcgtcaacccggaaggcggaggttgcagtgagccgagatcgcgccactgyactccagcccaggcgacagtgtaagactctgtctcaaaaaaaagaaaaggaaaaaaaaacatatctaggagcagcactacttggctgtgttatttgccaa

SEQ ID NO: 161476 - DNA, 201 bp, Homo sapiens
ttagaaatatagacataatgaagtaaaagtaaataaaattaacagaaaacaagttatacgttttgtttgtctgggaactagtttggagaaaacagtaaatrtaatgtttaaaccctgccaagagatttcgcaaagaaaatgaaacaattttttatactgaaatgatacagtaacaaagtatctgtaatatgcatatttata

SEQ ID NO: 161477 - DNA, 201 bp, Homo sapiens
ttgcgctagggtggcattgaccaatggagccttctgccgtgagacagccattctgtgcctgtctttccctcttacaccacccactctttcctgtagaatarggatgtgcaaacgttctctctaaaggaccagatggtaaatattttaggctttacaggttatatggtctcggtagcatcttcttaactctaccatcatagc

SEQ ID NO: 161478 - DNA, 201 bp, Homo sapiens
actgaaatgtttgcttgtatacatcactcctggcttagtagagccaacaagacggcaggtcaaacagaagacaacatgaacgtctaacctcaggcaccagyggacacgtgtgggacccaggcagcttcttcaggattcgggtgtcaggaaaaggcgcccgaaatgctggtagaccaggtggctggggtggcatggatgggg

SEQ ID NO: 161479 - DNA, 201 bp, Homo sapiens
tccatacacatgaatgagccctaatctccattgttgtattgtccagtgtcgtgtgagaagataggttagccatcaagtgaaggaggagataagacatttcwcctgcttttcttagtttctgccagctggaatgcctgtctcaggcaaagcaggctgcagtgactgactcagatggaggagctgcttctgctcctagagctg

SEQ ID NO: 161480 - DNA, 201 bp, Homo sapiens
ctgttaactaagtagacgctcaggtacactcaccattttcagcaagataaaaatggccaagcgcgggtcccgcagctgctaagcctgttctgtgtcccgasctcctgagagagtccccaggctttgccttcccggcttcccggggttgaccccaaattcatgtgttcctggcgctggccccgtctgttaactccagctacg

SEQ ID NO: 161481 - DNA, 201 bp, Homo sapiens
cgacgtgcgcgccccgcggtggggccgtctctgtgcggtgaggctcccgcctgtatctcgcagcgggaggtcatcgggcaagtgcgttgctgcgctgctgragagaacgctggaagaggcgggaatcgtgccacgccggggggcgccatctttgtaagaggtcaggaccaaagtgggtcagaactccgttcctacagtgta

SEQ ID NO: 161482 - DNA, 201 bp, Homo sapiens
gactgcatgagtcactgccaccgctgctgtttgtggcaccctgccatgtgaccgtgatcttctgtgtcacatgacacaggttttttgtcttttctcaaatkttatgccttctttctcattgacagtggatggttggttttcagagatgaatttgtcaggtaagaaattttctgaggctttttgagattaagttcataacat

SEQ ID NO: 161483 - DNA, 201 bp, Homo sapiens
cgcagtcctcagttgtgttgccttgctgcatttcctcagagcccagggcgaggccactccagacgcagctctgctcagcacagctcccgagtctctgacgytggccctggaaacgaggacacgtcagccacgaggacctggctctgtctgtccagctccaggtagtttaattgccggagcaaaagccctcacttgagattt

SEQ ID NO: 161484 - DNA, 201 bp, Homo sapiens
ttttcaattcgtaatcaagtatttaaattttcagttttatttacaacagtttgttcatattttcctgttatccctgacatacataggatctgtgatatgarcctttttaattcttcatacttgttatttctgccctttttgctttcttttttttcctgaccactcttccaataggtttgccagctttcatttcttatggaa

SEQ ID NO: 161485 - DNA, 201 bp, Homo sapiens
ttgctatgttgtccaggctggcctcaaactcctggcttcaagtgagcctccagcctcagcctccaaaagtgctgggattccaggcatgagctaccacgctyggccacaattccacagtatagcacattttagtattttcatcactgcacccaactttagaacattgcaccactccaaaaggaaactcatgccctttagctg

SEQ ID NO: 161486 - DNA, 201 bp, Homo sapiens
agctatcatgaatagtgtggctatgaacattcgtacacaagcttttggcaaattttcatttcttggaagttacatggaatgcatggagctgctgggtgagrtggctgcttcctgcttcatctcttgagaaattgctgcctggttttccacagcggctgcaccatttccctccgttctcttgtaaagcagcttcttgtggtc

SEQ ID NO: 161487 - DNA, 201 bp, Homo sapiens
taatgcagcagtgatagctatactctgccaacttagtgtttgaaatctgagcatcatggagatttttaacgttaaagaggaaattgctgtattaacaatcaaagtacatgtgaatcacatgcatataagctgtctactctgtatgtagtattaaatgctcccgatgtgttgttatatactccttatgtggtattaaatacc

SEQ ID NO: 161488 - DNA, 201 bp, Homo sapiens
attcgtacacaagcttttggcaaattttcatttcttggaagttacatggaatgcatggagctgctgggtgagatggctgcttcctgcttcatctcttgagraattgctgcctggttttccacagcggctgcaccatttccctccgttctcttgtaaagcagcttcttgtggtctcttttaccagcactgtagaaatgtcca

SEQ ID NO: 161489 - DNA, 201 bp, Homo sapiens
agatgcattaataaccccatcataagttgaggagtctctgttttggaagtcatactattatctcaaaagtagaaattcagtattctttgtgtcagctctcwtgatgaatttgtaactttagtgtaattgaaagttcagttgttggatttgtgtttgagttccattagactttgtcttgtgagaggttgaggaacttggcca

SEQ ID NO: 161490 - DNA, 201 bp, Homo sapiens
tcatatagtagctcaatttttagttttttaggaactttcaaactgttctccacagtgattgtactaatttacattcccaccaacagtgtacaagggttccsttttgtctacatccttgccagcatttgttactggttgtcctttgggtataagccattttaacttgggtgagatgatctctgtttgtagttgtgatttgca

SEQ ID NO: 161491 - DNA, 201 bp, Homo sapiens
agtggctcatgccagtaatcccagcactttgggaggccaaggcaggcggatcaccggaggtcgggagttcaagaccagcctgaccaacatggtgaaaccckgtctctactaatggatctactgatagatctggccaaatcaaattgaacaccttctggaaaggattcacgattccagttgccattaagaacatacgtggta

SEQ ID NO: 161492 - DNA, 201 bp, Homo sapiens
ttttttttaagaaaatcagaccagcagacccctctccagcaaccggacattagactctagggacgccccttgcgtgtaggtaggtgcatggcctgcactgygtgcacgttcacatgctgggttcttcccccaaagggaacctaaagggcagagttggagaacccgtccctatcctgctttcatcgggggatgcagacgttg

SEQ ID NO: 161493 - DNA, 201 bp, Homo sapiens
aatcccagcactttgggaggccaaggcaggcggatcaccggaggtcgggagttcaagaccagcctgaccaacatggtgaaaccctgtctctactaatggayctactgatagatctggccaaatcaaattgaacaccttctggaaaggattcacgattccagttgccattaagaacatacgtggtacctgggaggaggtcag

SEQ ID NO: 161494 - DNA, 201 bp, Homo sapiens
aatagattattcaaactgccatatcctgtgtacttgttggaatactgtgtagctttaaaaatggtgtttaggaaaagtgtttaataacataaaagttatgyatgtattagaataaattttaaaaggtggctcaaaatatgtatagaaggaaatccacagttcttttgatcaatcaatattgagctccttcatgtccagcca

SEQ ID NO: 161495 - DNA, 201 bp, Homo sapiens
tgttgatacaacagtgaacaagacaaaccaaatcctgttctaatagaactaaaattctgggagaaaaggcagtatataaactcctaatgccacgtagccawccatcaggctatgaagaagaaaatataaagcaggaaaaatgagtagaggatgaaagggttattctatatgggatggtcaaggaaggcctctcctgtgagg

SEQ ID NO: 161496 - DNA, 201 bp, Homo sapiens
aaaccagaatttcacaaaattagttttgttttttgctgatagacttttaaatgtccagtgccctttgatctgtgtggaatcactggcattttaaagttctrtttaatatatctaatatctgtcaagttagataaaatattaaggctgtgttttagtagggactatcatttcagaatgttaacctatattataactacagat

SEQ ID NO: 161497 - DNA, 201 bp, Homo sapiens
atgaaggggcagtccagttaggaaaaggacagaaggcgcagagacggccaccctgtgtgtgaggggacgcacagaccacaagcaagccggtgaaatgatgmgcgcatcgtcagccacagagaccaggttagaccacaggatgctccgcctcacgcctgccagaattgtgaggaagagtcacagaaactggatagctcttac

SEQ ID NO: 161498 - DNA, 201 bp, Homo sapiens
ctttcaatacggtgttcaagaaatcacatgggatattctttgtgttagctgattttgcccaactgtcaggtaacgtaagggttctgacacagttaaggtakacagggctaggccatggtattcggaaggtgagatgcattaataaccccatcataagttgaggagtctctgttttggaagtcatactattatctcaaaagt

SEQ ID NO: 161499 - DNA, 201 bp, Homo sapiens
gctggaagaggaggtatgtgagtgactctagcgtggttcacagtgtttctatggaagaggaggtatgtgagtgactctcagcctggttcacagtgtttctrtgaactttattgatagatgacaggaaaaggatatcctttccccagcttgcagacactggtatcattggatgaattgagctgtcaaaatgtcaaaccagat

SEQ ID NO: 161500 - DNA, 201 bp, Homo sapiens
tcatgtattatgtgtttttctttcaggttggtttgttggaccttgaactcaatcggctgacgaaagcgctatttttggctttagttgctctttccattgtwatggtaaccttacaaggatttgtgggtccatggtaccgcaatctttttcggttccttctcctcttttcttacatcattcccataaggtaagtttaaaaat

SEQ ID NO: 161501 - DNA, 201 bp, Homo sapiens
agccctgaatggcagtcaggccagaagttaccatggctcagccacccagggagggttaggtgaacaggtacagacaagagcaaacatggctgaaacccacraggggaccctatgaagacagcccgactctcagcacaaaccggaacccaagtctatctctcaccgcctccaagtcaatgctgtgggaactccttctccaca

SEQ ID NO: 161502 - DNA, 201 bp, Homo sapiens
gtgtagcgtgacctcgttgaagcctgtgttgccgacacaccatttagttgtggttggatgtgtgtagcgtgacctcgttgaagcctgtgttgccgacacaycatttagttgtggttggatgtgtgtagcgtgacctcgttgaagcctgtgttgccgacacaccatttagttgtggttgtatgtgtgtagcgtgacctcgtt

SEQ ID NO: 161503 - DNA, 201 bp, Homo sapiens
atgcaggatcgtcacattctgagatccttaactgcatgtgtacagttctgttttccacataaggtcacattcaaggttccaggggttaggacatgaacatrtgtttcagatgccatcattcaactcacttcactcagcaaattccatgggtataatccagggagactgtataaaatcagtctcttggatagaagcaatgct

SEQ ID NO: 161504 - DNA, 201 bp, Homo sapiens
agcaggggtgggttatgggagtagaccttgcacaactgtgggggctgggggccactgtggtcctgaatgcggtggtcaggagatggctggctgtggactcrgcaggacaagctggtcaggagacggctggctgtggactcagcaggacaaattgagatctggtgcccacagggcaaaggagagcctgtgccttgtcaggcc

SEQ ID NO: 161505 - DNA, 201 bp, Homo sapiens
ctcaggaaactgctaggggagaaaacaagggagtagactgccaagagggaaaaggtttcaggaccaggaagaaggtcagcaggagagcagccactgcatckccatatggcggttgggccggggtccccaggaccacctcaggcttgatggttcacgagaaggactcccaggactcagcacatgatctaactcccgcccacc

SEQ ID NO: 161506 - DNA, 201 bp, Homo sapiens
gcctcgggcatggagaggcactgtcaggttgctgggagccctcctgaaatccgagtccccagaggccagcccagggtcagcctggtaagcagaccctatakaggatggcagtcaggcctgcttgttaactcttttctgcatcatcctttgaagggagaagtcaaaaagagcagctgatcaagagttagcccaacagacctc

SEQ ID NO: 161507 - DNA, 201 bp, Homo sapiens
cagggtcagcctggtaagcagaccctatagaggatggcagtcaggcctgcttgttaactcttttctgcatcatcctttgaagggagaagtcaaaaagagcrgctgatcaagagttagcccaacagacctcaggtgccgaggggagcagctgcagccgaccctgcgtccagatgagagagagccaggggtaaattgccgggt

SEQ ID NO: 161508 - DNA, 201 bp, Homo sapiens
ttttaggttcgggggtacatgggcaggtttgttatgtgggtaaattgtgtgttgcaggggcttggtgtacggactatttcatcacccaggtaagcagcacrgtatgggatcctcatcttcatcccacccccaccctcaggtaggccccagggtctactgtctcctccgtgtgtccatgtgtactcagtgtttgccttccag

SEQ ID NO: 161509 - DNA, 201 bp, Homo sapiens
aatggaaatgcaatttttacaaaataaattcttatttccatttttccaaaataaactattttacatatctcaacataaaattatcatatggtagtacttgktattacaccttctctttggaattttcaagataatttttgcattactattaaaaacatcctgcatgatatcttctgggcttccactaagaatttggaagta

SEQ ID NO: 161510 - DNA, 201 bp, Homo sapiens
gaagagattttccgtttctgtcattgttgagactgtggttgtgccaagaaagaaattcttaagcattaagtttaaggaggtgagaccttgtcagccacacrgtgggcaatacagaagagcctcatccatcccaaccccaaccaaccatagccagaccccaaagagtgagattttagtccagtttatttattctttaccaac

SEQ ID NO: 161511 - DNA, 201 bp, Homo sapiens
aattattaacttgctataattaatatgaaagcattgtgtggtaaattgaataaaaatctcagtattgtggctgcattttcctccttttattactgatcaargcatcatcaaccttgaaggggcacttaatcgtcctcttctgaagacacatctatgcagtgggtgaaatatgatgttggacatcctgtgttttggtctatg

SEQ ID NO: 161512 - DNA, 201 bp, Homo sapiens
  misc_feature (1)...(201): n = A,T,C or G
aggtggctggggtggcatggatggggcttatggacctgggtctttcagaagtgacccatagctcactcctggaaggcgtgagtcaagcaggtggttctgcncactaacgacgctcttccactgtttccctagggaagatccttgtccttcaaaaccttcctcatctgggttttaataagtatttaccaaggtaagacgaga

SEQ ID NO: 161513 - DNA, 201 bp, Homo sapiens
tttccattgtatgttttattagactagcagttatttgccccgagcaatgcagcctaaatgtgcctctgtttatttttgttctttgataggatgaatccacrgcagaaatcacattctacatgaagggcgctgacgtggccatgtctcctatcgtgcagtataatgactggctggaagaggaggtatgtgagtgactctagc

SEQ ID NO: 161514 - DNA, 201 bp, Homo sapiens
cttgacgttgccttctgatgcacctagatgagttctcttgtgtcctgagtatcatattgttcgatctgagaattgatttactttttaaatgattttctttmgttccttggtttggcagcagccacaattgatgctacctttcagataacaaatgatgaatagtatgctttctctgtttatatgcatcttaacctttgattg

SEQ ID NO: 161515 - DNA, 201 bp, Homo sapiens
ccaccatttctccagcttgctggggaaggagggttacagaagcaaagaagtgccagtttccttagaattgtgcttgataactcctcaatgatcacagtccwgccgagctgagtacacatagagtatgtgcacataggcgcctccccctctgtccccagagcccatgctgtccagctctgtggagtacacacacggagcacg

SEQ ID NO: 161516 - DNA, 201 bp, Homo sapiens
aatctatttcttttttcttttcttttcttttttctttcttttcttttcttgagacggagtcttgctttgttgccaggctggagtgcagtggtgtgatgtcrgctcacctcaacctccgccttctgggttcaagcgattctccttcctcagcctcctgagtagctgggactacagatgtgcaccagcatccccggctaattt

SEQ ID NO: 161517 - DNA, 201 bp, Homo sapiens
gtcaccgtcaccttgttctttcccaggtgggagctgacagtattgcagcattaagcagatatggactgtgggttttttaaagatattacttaactaaaccmaataactatttgtagttttttttttttttttttaagaaatctatcttgtattaagaaacaaaacaaagcattggcaggagaagtggtctaatacatagtt

SEQ ID NO: 161518 - DNA, 201 bp, Homo sapiens
tgcctgctgtaatcactcagggaataacccccatgatcgtaagcattgcagactctctttttgtggcccacaaggaaagcgccgtcatcggccctgggctytcctggccgctgaggctccctcagccccagtatgaggtagcacaggacagcactgtgcgtccatggtgtcaacttgaaccttatttcatgactctacgtg

SEQ ID NO: 161519 - DNA, 201 bp, Homo sapiens
aatgcacacacaaccacacaagcatgtacatgtattactaataatcatgtaatgtgttctattggtatatacgtattttctgagaggcataatgtcacttyatctaaaatctatcttggtattttaaacacactcataaaggtcaaatgtctataccatggcattaacctattcttaagtacagaggcctttgaacaacag

SEQ ID NO: 161520 - DNA, 201 bp, Homo sapiens
aggtggggactgtcggggtcagagcagaggtggaggtgggaacgttggggtcagagcagaggtggaggtgggaacgttggggtcagagcagaggtggaggyggggactgtcggggtcagagcagaggtggaggtgggaacgttggggtcagagcagaagtagtggtggaattgttttcatcagaatagacttgggtggggc

SEQ ID NO: 161521 - DNA, 201 bp, Homo sapiens
aggtggggactgtcggggtcagagcagaggtggaggtgggaacgttggggtcagagcagaggtggaggtgggaacgttggggtcagagcagaggtggaggrggggactgtcggggtcagagcagaggtggaggtgggaacgttggggtcagagcagaagtagtggtggaattgttttcatcagaatagacttgggtggggc

SEQ ID NO: 161522 - DNA, 201 bp, Homo sapiens; identical to SEQ ID NO: 161520

SEQ ID NO: 161523 - DNA, 201 bp, Homo sapiens; identical to SEQ ID NO: 161521

SEQ ID NO: 161524 - DNA, 201 bp, Homo sapiens; identical to SEQ ID NO: 161521

SEQ ID NO: 161525 - DNA, 201 bp, Homo sapiens
tgttcactaactccacatcttccatcccctgactactgcgagagagaatgcatttctctccagggagaatcccatgagagcaaagtgaggaaagcatcggyaggaaataacgaacgctgaaatcagccttttacaaatgtatttaaagacagctcttacaaggttcctctttcatggtagtgtttgatttttaagtgtgca

SEQ ID NO: 161526 - DNA, 201 bp, Homo sapiens
ttagggcatccctcgtccagctttctccactgtctggtttatcccatgtctccaatttccagggttgttttttctcagctttatgctttctgaaagtcagsgttttctctcagagttttagctgttcgtgttgttgtgaaggtccacctgactgggacagttctcagggaaaagttgtgtgaaaagagagaactaccaggg

SEQ ID NO: 161527 - DNA, 201 bp, Homo sapiens
gacaactaaacattttcgttataggtatagttatcaatcatgtatttttggcatatcataaagtattgacatttaaaaataaaacatcgtcttttcaaacrtgttaaatgacattgaaattccacaataatgtgatacttgctcttatccataaagaatacttaaaaagctcctctttaacatgtgaaaacttatgtcttt

SEQ ID NO: 161528 - DNA, 201 bp, Homo sapiens
ggtgtgagccactgcacccggcgtatgtccagttttctacaaaaaacattacaaagcatgcaacaaaacaaaatgtggcccactcccagaagaaggtaatrgtaactgcccctgaggaaagccagacatcagacttaggagacaaaaagtttaaatcagctgtcttaaatgtgccagggcgctcaaggaaaccatggggat

SEQ ID NO: 161529 - DNA, 201 bp, Homo sapiens
acttaggagacaaaaagtttaaatcagctgtcttaaatgtgccagggcgctcaaggaaaccatggggatgttgcttaaaagatatcagaatgatgtagaarcaagtagagaattatctaaaggaagcaaacaaattctggcactgaaaagtatagtaagtgaaaagaacactcactggagggattcagtagcagaattgag

SEQ ID NO: 161530 - DNA, 201 bp, Homo sapiens
catgcaagattttattcaacttattaatcaatgaaggaagatataatgagtaagatgtagaactggttcaaagagtattttaggacctagagatattgagrcaattttctaaaggaatattaagataagattgtttggttagaaacaaaactggttgatctcctaaaggacaataagctatatcctttgaagtatattttc

SEQ ID NO: 161531 - DNA, 201 bp, Homo sapiens
ctccctgtctctggcctcactctatggtaagcagggcaagggcacagtggcctggaatgcaagagcttatccaaccaatcgaggtggctggcgggattggyggcttgcatgtgaaacgtgtgcttgcaggtgagtcatctgctatctctaagaatggatgagccgtaggcaggacgggctctccccttttagccagagcat

SEQ ID NO: 161532 - DNA, 201 bp, Homo sapiens
ggcaacttgaggttagaggttaagggtatggcctttggcacctgggttgaagcctgactctgcagctgtgagcactgtgacctcgggcagattgcctaacycctctgtgctccaggctcctcatctggggaaaggtgaaggatactcacagagcttacctcacagggaggctactataatcaatggttgcatggcgtatat

SEQ ID NO: 161533 - DNA, 201 bp, Homo sapiens
tgccatgttgcccaggctggtctcaaactcccagcctctagccatctgcccgcctcagcctccccaagtgttgggattacaggtgtaagccaccgcacccrgttgggttttatttttaatgcaatctgacaatctgactttttattgaggtatttagtctgtttacatttaatatacataaactgaccttcgggtttgtct

SEQ ID NO: 161534 - DNA, 201 bp, Homo sapiens
ttacatttaatatacataaactgaccttcgggtttgtctctaccatcttctttgtttcctgcttattccatctgttcttttttctttaaacttctttcacrgcttccttgaagtaataaagtatttttattattcctcttcctccctccattaacttgtcagttaaacattctgttgttattcttttcatgattgcgctag

SEQ ID NO: 161535 - DNA, 201 bp, Homo sapiens
ttgttgttgttgaaataatggagagttgctcccactctcttctctccatttggatttccagtgttaagaaagttggatcttatgttggtgtttcataattyccttaggctctttccctgtttcttttctctgtgttgttcagattgtgtaaattctattaatctcttctcaagttccctaattctttttttttttaatttt

SEQ ID NO: 161536 - DNA, 201 bp, Homo sapiens
aacccattgaaagcagccagtgaggagacggggtacgttggggatgactggaaaccctgcaggcagagggactcaagtgccggagaaaggcctcatgggcrcggcacactgcagccagtgacggccgcttccggaaaggaaagggggtgttggcaagactcgtgtccagcagtgcttaaagattctccaagctcagccatg

SEQ ID NO: 161537 - DNA, 201 bp, Homo sapiens
tggtcccagctgcccgggctggagaatcacttgagcctggaaggtcgaggctgcggtgagctgtgatcgcaccactgcaccccatccctcggcaacagatyaggaccctgtctctacaaaaacaggactgtgtttgcaaagctgcagtcttatccttcaaagtgtggagttcaaaaccagcccatgtctgcgcctggccct

SEQ ID NO: 161538 - DNA, 201 bp, Homo sapiens
attggacaatgttcattgcctattctgtgctaggtgctaggaaggtaatacccataaaatatgggattagaaacatgtcaattgctctgatacaataaaawtctgaatttatggtagataaaaattttattgcttcaagttttaaaatgataaatagggaattcagtatttggcttcttaatgccaactgaatgctcaatt

SEQ ID NO: 161539 - DNA, 201 bp, Homo sapiens
tcgagaccagcctggctcacacggtgaaaccccgtctctactaaaatacaaaaaaattagctgggtgtggtggcgggcgcctgtagtcccagctactcggkaggctgaggtaggagaatggcgtgaacccgggaggcgaagcctgcagtgagccaaggtcgcaccactgcactccagcctgggcgacagagcaagagtccg

SEQ ID NO: 161540 - DNA, 201 bp, Homo sapiens
tactgagcaaggactggatggaaaatgagatgctatttctttctttagggttctttgcatacttgcacagtcatttaaaatcctaaagaagtaattgttcrctcttggtaggagctatacaggtgttcattataatattcttttaactttacatatgaaattgttcataataaaaaagttgggttaaaaaagtggcattaa

SEQ ID NO: 161541 - DNA, 201 bp, Homo sapiens
acgcttcttggtggtcttaacatcctgctacttcagtcgtctgttcgaatatacgaatcaggaaatcgtctttgatgagcatttgtacatgagtgaaatcrtagaaggcatagtgtgctgaagtcatttattcatatcacattttactagtgagttatttgtaaaaaattattcagtaaacattgtagttgaagaatgttc

SEQ ID NO: 161542 - DNA, 201 bp, Homo sapiens
tatttattaatagaagaaaaatcttaaaaggagaaggaatacagtttctcccaggaatctatttctgcgttgaaatagtaccagatgagctctgctttttwaaaaaaaaaaattatctatgaatgtaattttaatagcttcaaataagttattaggaaaaaattaaaagcagaaaagatgaagcatcattatataaacaca

SEQ ID NO: 161543 - DNA, 201 bp, Homo sapiens
tacaagtctttccatccttccttttcacttgagatgtgtgtgctacctctaggtctcaccagtgcttctaaccagggagatacttcttagtcactaaagcsgactgaggtctgccccccgcagcctttgaacagcccttagctgggcctggctgatgggactttactggcggccctgcagctcctggcctggctccagctc

SEQ ID NO: 161544 - DNA, 201 bp, Homo sapiens
gtccactgccgtgcaacacagatcttttataacctgattgtatttccccactggaggcatttggtgatagagggcataatctttcatggaatttgtgtgarattaaattgtacaagcatcactaaacatcacgtagtttggaaggagggagccagctgagtttgctgtctcgcagcagcgtgagcaggcgcagatgggctg

SEQ ID NO: 161545 - DNA, 201 bp, Homo sapiens
atgctgctgctgatctgacaggaggcggagctcaggaggtcatgctcgcttgccctcccctcccctcctgctgtgcagcgccattcttgaaaggcccgggkttagggacctctgctttaaatcatctctagttgatttatagtacttaatacaatgcaaatgctatctaaatagttatactgtctttttttatttttgttt

SEQ ID NO: 161546 - DNA, 201 bp, Homo sapiens
tccatgaagccgtgaaagccatcgtgctgtgtcacaacgtgacccccgtgtatgagtctcgggccggcgttactgaggagactgagttcgcagaggctgaycaagacttcagtgatgagaatcgcacctaccaggcttccagcccggatgaggtcagtcaaagcacaaaaccgtgggagcttgtccgttccatttggactc

SEQ ID NO: 161547 - DNA, 201 bp, Homo sapiens
gccagcctggccaacatggcgaaaccccgtctctaccaaaaatataaaaaattagccaggtgtggtggcaggctcctgtaatcccagctacttggaagackgagacaggagaattgcttgaacccaggaggcggaggttgcagtgagccaggatcacgccactgcactccagcctgggcgacagagcaagactcagtctca

SEQ ID NO: 161548 - DNA, 201 bp, Homo sapiens
ctgtggctgtatcccatccatatggacccagtggctgccctggtgtgtctgggttggagaagaggagtcttagcaccaccatggtaaaagggttcctgtgrcagaatccctattgctggtgccacctcgatgctctgatgtcttggagcaaggtcttaggttatggataaaaaggttttctggactgggccccttatgtgg

SEQ ID NO: 161549 - DNA, 201 bp, Homo sapiens
gcgaagaggcgtagttccacaatcataagcaaatatgggcatttagactgacaagacgatgagttgagacttgtaagatttatcagttgctgtcttcttarcattctagtgtgggctgtgagacaaacacaggtcatgagcaaccgctctgtaagaggaagcaagcccccatattcctatcaagaaggggtcgaacacatt

SEQ ID NO: 161550 - DNA, 201 bp, Homo sapiens
agcagcttgtagtggcaagttccccttactgctactgcccagatgccccggtatcccctgatgggagaggggagcctcaggccccagtatcccttggtggragaggggagtctcaggaagtcactgctgccttcttaccttcttccagaactctcctttgattggctcttgcttaattactaggatttatagttggactta

SEQ ID NO: 161551 - DNA, 201 bp, Homo sapiens
aagagtgtataataaacaagtaggcttaaatgtttataagagaatatgaaatacagctcaaatgcttatgttttcaaagacagtaaaataagtgttttctrgagaaatataaatttcaaaattgactccatataaatctgagtagacgagaaaagaaatttagaaaaatcacccaaaatggcttttgaccagttttatagg

SEQ ID NO: 161552 - DNA, 201 bp, Homo sapiens
atcccctgatgggagaggggagcctcaggccccagtatcccttggtgggagaggggagtctcaggaagtcactgctgccttcttaccttcttccagaactytcctttgattggctcttgcttaattactaggatttatagttggacttaactggggaggagcagagaaatgggtctgtggcattttgtctggaccagaagt

SEQ ID NO: 161553 - DNA, 201 bp, Homo sapiens
ctttagtttttagtcgtttgactgttctgggtcttggtatggatttcttcaggattaccctgtttagggtttgcttagtatcctaattctataagtttgtrtcttttgtcaaatctgagaagtttgcagccattctttgagtgctttttgagctctactctccgtcccttcttttaccctggtgacaccttgtgaaatctt

SEQ ID NO: 161554 - DNA, 201 bp, Homo sapiens
gggtttgcttagtatcctaattctataagtttgtatcttttgtcaaatctgagaagtttgcagccattctttgagtgctttttgagctctactctccgtcycttcttttaccctggtgacaccttgtgaaatcttttcttgtaccatagggtcctgagtttctgctcattttttctaagtccatttcctgttcatattggg

SEQ ID NO: 161555 - DNA, 201 bp, Homo sapiens
ctggtgacaccttgtgaaatcttttcttgtaccatagggtcctgagtttctgctcattttttctaagtccatttcctgttcatattgggcagtttctgttrttttctcttaaagttcactgattttttcttcctcgtttttttagttttactgttgagcccatccattaagatttttagtttcaaaatttccagttgattc

SEQ ID NO: 161556 - DNA, 201 bp, Homo sapiens
gacaccttgtgaaatcttttcttgtaccatagggtcctgagtttctgctcattttttctaagtccatttcctgttcatattgggcagtttctgttgttttstcttaaagttcactgattttttcttcctcgtttttttagttttactgttgagcccatccattaagatttttagtttcaaaatttccagttgattcttcct

SEQ ID NO: 161557 - DNA, 201 bp, Homo sapiens
gttcaatgtaggtgaggctatttgctttttctgtcgtctttggatgggatatagcaattactatcaaaaatttttcgttccactaggctgcccttttcctrgtcctttggctggagagaccagacttttcttggggacttttttggtctgtgtctattacttttctggttgctaactctctagtacacaacatgggcatga

SEQ ID NO: 161558 - DNA, 201 bp, Homo sapiens
gaaaactaaatagttattagaaaaacagctttcatatgagctttacatcgctttgtgagcattgaaagcttccttccttgaccatttgaaaatgacatttkgctcttatgtataaataattgtacttattgtattttaaaagttctcaggttttccttgaagtggaattatttttatttcattataatcatactactttag

SEQ ID NO: 161559 - DNA, 201 bp, Homo sapiens
attgaaagcttccttccttgaccatttgaaaatgacattttgctcttatgtataaataattgtacttattgtattttaaaagttctcaggttttccttgamgtggaattatttttatttcattataatcatactactttaggacacagtgtatttaaaagataacgttggttagttgttaaaacttgtataaaaattttca

SEQ ID NO: 161560 - DNA, 201 bp, Homo sapiens
gcatggtgatttgtgaaactcctgtggggtcatggatgtgagagagctctgtaagcagagctgcccaccagctcccctccttccttagggacatctgcagytggtgcacacacaaatccccacgccacccctactccagaccttcctctctacacctcttccctctctggataccccagcctttctaaagaggagtcctgg

SEQ ID NO: 161561 - DNA, 201 bp, Homo sapiens
tgggctctcctggccgctgaggctccctcagccccagtatgaggtagcacaggacagcactgtgcgtccatggtgtcaacttgaaccttatttcatgactytacgtgaccaaagaatgtcccagcaacctaccaactcatagcccatacagttgatggaaatggtggtaggatttgtgctaatattctcagctttccgtga

SEQ ID NO: 161562 - DNA, 201 bp, Homo sapiens
ccggcgtggaggaccagctgcaggcagacgtgcggcccacgctggagatgctgcgcaacgccgggatcaaggtactgcaggctcacctctgctggcgcgcrctgcttttgctgaagcaaacagtgcttttccttgggcatggtgatttgtgaaactcctgtggggtcatggatgtgagagagctctgtaagcagagctgcc

SEQ ID NO: 161563 - DNA, 201 bp, Homo sapiens
ctcaccggcgtggaggaccagctgcaggcagacgtgcggcccacgctggagatgctgcgcaacgccgggatcaaggtactgcaggctcacctctgctggcrcgcgctgcttttgctgaagcaaacagtgcttttccttgggcatggtgatttgtgaaactcctgtggggtcatggatgtgagagagctctgtaagcagagc

SEQ ID NO: 161564 - DNA, 201 bp, Homo sapiens
ctagcgtggttcacagtgtttctatggaagaggaggtatgtgagtgactctcagcctggttcacagtgtttctatgaactttattgatagatgacaggaaraggatatcctttccccagcttgcagacactggtatcattggatgaattgagctgtcaaaatgtcaaaccagatgctgatgggaaccacataggttgtcaa

SEQ ID NO: 161565 - DNA, 201 bp, Homo sapiens
agtctacatcggtgagcacagtgcacctggacctgtgtggggaactgaggttctgggagggaaggagcccggacctgggagtgttggtccctagaacgcakcggaggcgcagtgcgagtacgtcctctgccaggggaaggggaggggcacacagcactctgatcaggtggtcagcagggccttttggagacctggggttga

SEQ ID NO: 161566 - DNA, 201 bp, Homo sapiens
gtgagcacagtgcacctggacctgtgtggggaactgaggttctgggagggaaggagcccggacctgggagtgttggtccctagaacgcagcggaggcgcaktgcgagtacgtcctctgccaggggaaggggaggggcacacagcactctgatcaggtggtcagcagggccttttggagacctggggttgagccgaaagtaa

SEQ ID NO: 161567 - DNA, 201 bp, Homo sapiens
cactggagatggtgatgcacaggtgccacctccctccccttcgatgggtggtagtcctggctgacccccacgtgccttttttggtaatgtggagtgtatcrctgatgccctgaattacaggactgcgtcatccctagcacaattttagactctcggtgtacttagtaacatgcaggaaagtcggagagggagagttctaat

SEQ ID NO: 161568 - DNA, 201 bp, Homo sapiens
gtcctggctgacccccacgtgccttttttggtaatgtggagtgtatcgctgatgccctgaattacaggactgcgtcatccctagcacaattttagactctyggtgtacttagtaacatgcaggaaagtcggagagggagagttctaattcaagccccgtgggtgacaccctactgaacgtttaacacaggcatggaattcc

SEQ ID NO: 161569 - DNA, 201 bp, Homo sapiens
tgcccagaccaaagtgccctggagtgtgccagcctattaggcacattttcaaatttgattagtggttttagataccaagcagatattacccatataagggygtcttttaatttttcagtccacccacagatacagatgtcaagcagaaaagggttgaggtctgtctgactcactcttggggtgtagttcttcagccagcgc

SEQ ID NO: 161570 - DNA, 201 bp, Homo sapiens
agttaattagtcaccaatttgtctcttattttagaaaaataattaccataaacatgagattcaaactatttcccctttcatggtgtccatggaactggggrgggagaaaccttgaaaagtcgtataacttgctccctgtccccagactgatggggtgagctgcgttctcaattttaaaaccatctggctctagggagcaat

SEQ ID NO: 161571 - DNA, 201 bp, Homo sapiens
caccatgcctgactaatttttttgtatttttagtagagacagggtttcaccatgttagccaggatggtctctatctcctgacctcgtgatccgcccgtgtsggcctcccaaagtgctggcattatatgcatgagccaccatgcccagccaataatttactttctgtgtaaataacaatcatttttgttttgtgtgtgagtg

SEQ ID NO: 161572 - DNA, 201 bp, Homo sapiens
ctactttattaacatgcaggcaaagtgggagtgtttatttttaaagaagctttgagcattagacatgttttaaatctatttcttcgtttaatatcagttgkcttctaagaagtgtttctcatcaaaatggaaacaataaggcttagatatttaagataaaatgtaagttttaagctagttattgtaatgatttacttagta

SEQ ID NO: 161573 - DNA, 201 bp, Homo sapiens
gtctctatctcctgacctcgtgatccgcccgtgtcggcctcccaaagtgctggcattatatgcatgagccaccatgcccagccaataatttactttctgtrtaaataacaatcatttttgttttgtgtgtgagtgcgtgtcaatctatacaagtaggtccttacaaagaatattttgtttataatagaaatagaaggcatt

SEQ ID NO: 161574 - DNA, 201 bp, Homo sapiens
tagggtattatattacaatatatttatgtggtggtttgaatttattcacattttgtataaatactcattttctagttgactgttttaaaagaagtgatctyatacagagaagaaaaaaatgacattttaagggaaaatattattaatgttttagtctgttacttcatagatcatgtaattttttgcctaaattataatgaa

SEQ ID NO: 161575 - DNA, 201 bp, Homo sapiens
tctgtgtaaataacaatcatttttgttttgtgtgtgagtgcgtgtcaatctatacaagtaggtccttacaaagaatattttgtttataatagaaatagaargcattatcaatcattcactattctgaaataatactttatatgtaatcaaagttatattttaatgtatctcttttgtaacataaatatttgcaagattttc

SEQ ID NO: 161576 - DNA, 201 bp, Homo sapiens
ggaggctgaggcaggcggatcacctgagggcaggagttcgagaccagtctgaccaacatggacaaaccccgtctctactaaaaatacaaaattagctgggygtggtggtgcatgcctgtaatcccagctactccagaggctgaggcaggagaatcgcttgaacctgggaggtggaggttgcggtgaagccgagatcgtgcc

SEQ ID NO: 161577 - DNA, 201 bp, Homo sapiens
cttccagtactatgtcgagtaacagtggtgacagtgggctgagagttttgaagtcttcagttgctattgtggatttgtctatttttctttccacttgtatyggttttgctgtatgtgttttgaagctctggtggtaggtgcatacatatttaggacttttagatcttagtggtgatttgatccttttattattgcgttatg

SEQ ID NO: 161578 - DNA, 201 bp, Homo sapiens
cagattttcatactgttatctataactttgagtaatgctctttgccatgattataggaagtgacattttattatcttcaatattataaggatactttctttatttttattagtgacagatatatacacatataaattcaaaaatatgtacagaattaaaataaataattcgtacaatgcaactttaacattttcgtggcca

SEQ ID NO: 161579 - DNA, 201 bp, Homo sapiens
taaagtaaggttgacagagtctcttagttttctttcatctgagaacatctttgttttgccttcattcctgaaggacattgttgctggatgtagacttctgstttcacagttcttttcttttagcacttcaaacatcaagttccactgtgctttggcctccgtttttctccatgagaaatctacaggcatttgaatcgatgt

SEQ ID NO: 161580 - DNA, 201 bp, Homo sapiens
acagattttcatactgttatctataactttgagtaatgctctttgccatgattataggaagtgacattttattatcttcaatattataaggatactttctttatttttattagtgacagatatatacacatataaattcaaaaatatgtacagaattaaaataaataattcgtacaatgcaactttaacattttcgtggcc

SEQ ID NO: 161581 - DNA, 201 bp, Homo sapiens
cttatttcatgactctacgtgaccaaagaatgtcccagcaacctaccaactcatagcccatacagttgatggaaatggtggtaggatttgtgctaatattytcagctttccgtgaattccagtagtgtttcctatagtacttcaaacaaaggtgaaaaatcctaaaggtacaataagtgctaactctttttaaataagttt

SEQ ID NO: 161582 - DNA, 201 bp, Homo sapiens
agtaattcccagagcctgtcctgtgcttatttgggtttgggcacatttttgcagctcgggggtgagcctgggacttctgttgattcatatacagaattagrgcatccctcgtccagctttctccactgtctggtttatcccatgtctccaatttccagggttgttttttctcagctttatgctttctgaaagtcagggttt

SEQ ID NO: 161583 - DNA, 201 bp, Homo sapiens
tacagattttcatactgttatctataactttgagtaatgctctttgccatgattataggaagtgacattttattatcttcaatattataaggatactttctttatttttattagtgacagatatatacacatataaattcaaaaatatgtacagaattaaaataaataattcgtacaatgcaactttaacattttcgtggc

SEQ ID NO: 161584 - DNA, 201 bp, Homo sapiens
ataatattagggacattgtggttagcttgttcatgtattatgtgtttttctttcaggttggtttgttggaccttgaactcaatcggctgacgaaagcgctrtttttggctttagttgctctttccattgttatggtaaccttacaaggatttgtgggtccatggtaccgcaatctttttcggttccttctcctcttttctt

SEQ ID NO: 161585 - DNA, 201 bp, Homo sapiens
ttacagattttcatactgttatctataactttgagtaatgctctttgccatgattataggaagtgacattttattatcttcaatattataaggatactttctttatttttattagtgacagatatatacacatataaattcaaaaatatgtacagaattaaaataaataattcgtacaatgcaactttaacattttcgtgg

SEQ ID NO: 161586 - DNA, 201 bp, Homo sapiens
tgcctggctgtgatccagactggactctggacctggctttgttggtttggaatacttacttttctccttatgtgtcaattaaggatggtactatctctgtyccttatttatgttttaatagtgggttttggttagttttagctgtcttctatatggaatttagagaatgttaaaaaagatttcaatataaatgactgcctt

SEQ ID NO: 161587 - DNA, 201 bp, Homo sapiens
ctagagtttgcaatatgcctttaactaaaagtgtattgtgaaaagtaaaaattgtaccatttcacataaaatacaagaattttgtccttgaggccaggcamggtggatcacgcctgtaatcccagcactttgggaggctgaggcaggtggatcacaaggtcaggagttcaagaccagtctgaccaatatggtaaaacccca

SEQ ID NO: 161588 - DNA, 201 bp, Homo sapiens
cttctcaagtcttcctttagatctttcttcaattttactgtaattgaatatttttagaatactattttatctcttggctttttagcattttttttttttttagtttgcagtattctgttaactaaaatatgcctttaactagagttttttaactagttacagtatgcctttaactagagtttgcaatatgcctttaactaa

SEQ ID NO: 161589 - DNA, 201 bp, Homo sapiens
tgcatgcattttatagctttacatttgaatatttaaaaaaatttttttggtgaggtgagaggtttaggttgaagttcattttttagccagtgcgtatccaratattctaataccacttgattgtacatgagcggagctgtctgtggccttggttctgttctcttctccatctcatcagtgtgtcagttcctgccagtacca

SEQ ID NO: 161590 - DNA, 201 bp, Homo sapiens
acagagtgagaccgtgtctcaaaaaaaaaaaaaaaaaaaaaaaaaaacccagccccacttccggcccagctccacttccaggacggtgggaggtgaggtaratgggttcctccctgctccttctgctaagttcagctggaaacagaaggctctgagtggagagcgaggtgaacagagggggcaaggggcgaggcggcagga

SEQ ID NO: 161591 - DNA, 201 bp, Homo sapiens
ccggcccagctccacttccaggacggtgggaggtgaggtagatgggttcctccctgctccttctgctaagttcagctggaaacagaaggctctgagtggaragcgaggtgaacagagggggcaaggggcgaggcggcaggagctccccgggttttccagcagctggagctgaaggagccggcagcctggaaacgcccatgg

SEQ ID NO: 161592 - DNA, 201 bp, Homo sapiens
atcattaggaagagtttaaagggaatacaattgtgtgaatttctacttgggtggtgaagtcacgatgggcatcttcaggcaggagaaccgggaggagcagrtgcctgatgcctcatacaggtggaaggcttagagtaacagcaggcaggaggccctggaggagcaggtacctgatgcatcatggaggcagtaggacgtgga

SEQ ID NO: 161593 - DNA, 201 bp, Homo sapiens
attcgagtgtttatcttggatgggagaggttaggcatcctgaccatccttcttggtggcttcccccagatgctgtgtggcggggcacacgctccctgcccrccgacctgctctctggctttttcacttactgatgtgtcctcttcctgcacaggggaaattggcacttatggtgtaagttttatttttcaggagctttcct

SEQ ID NO: 161594 - DNA, 201 bp, Homo sapiens
gtatgcaatttttaaatgtaaaagtgctactatttgacatgttttatttgacataaacaacttttggtttgactatgggccatttacccattgaacctccrtttccaactaaaaaactagcaaactgcagtgaaggtcttcatgagcctcccagcctggcaaaccctgactgtgtgccgccttggcagtcctgtgtgcttg

SEQ ID NO: 161595 - DNA, 201 bp, Homo sapiens
ggggagtacaattcgagatgagattcgggtggggacacagagccagaccatttcaggggctgactaaaggatctactcagcaactctgcagaaaccaggartagagatgggttatccaagaaggatctgtgttggagtctgttttctgatagtgtggactctcaggatatgcacaggagacccatcatgttttatcagcag

SEQ ID NO: 161596 - DNA, 201 bp, Homo sapiens
aaaaaaatttttttggtgaggtgagaggtttaggttgaagttcattttttagccagtgcgtatccaaatattctaataccacttgattgtacatgagcggrgctgtctgtggccttggttctgttctcttctccatctcatcagtgtgtcagttcctgccagtaccacacagtgtgctgtactgtggctttatagaaaatc

SEQ ID NO: 161597 - DNA, 201 bp, Homo sapiens
tgtctttgaagtggaatagctctgtggcaaatgcctggtctccccatcctagaggtacatcaccatggagatcattgggttgagaaggttgaggatctgtktccaggccgttaggtgattttttgtgtgtgtggaaaatcactgggtattgggggagactgcaggatgttcatagaggaagtgggaactgggcactgatgg

SEQ ID NO: 161598 - DNA, 201 bp, Homo sapiens
tgtcttccgacagggcgggcccacactcagatcacaagggagtccttcaacagggctggcccggactctgcagctctgctgactcctgtgacacctatggyctgtcagagccgagctctcctgaagcacttgtgagagcctgggctggtgctgggggctcttcctgcccctgtgtctgagaccataggacctgtccccatc

SEQ ID NO: 161599 - DNA, 201 bp, Homo sapiens
ctcaagcaattctttcaccacagcctcccaagtagctgggactacagtcatgtgccaccacacccggctaatttttttatttttatagaggcagggtcttyctatgttgtctaggctgaaagtctttattttaataaattgtgatcatgtggaaaaagctagctgagccatcttggcaggctgtaatcagtctatattggc

SEQ ID NO: 161600 - DNA, 201 bp, Homo sapiens
ttggcactaaggaatgtcctactgccatatgggatgagaagcgacctgaggtattgtcatgctgttcttattcaggagatacctgctacactgagaaatcrttatggaaattaaaccctgcacgttagagaaccaaactatacatttagcaagtagattggtcttctttgtttcttataaattttcagttgtgaatgtttg

SEQ ID NO: 161601 - DNA, 201 bp, Homo sapiens
tgaataatcaataatttagaaactatttcgcgtacatagaaatgctattgagtaaagctcctagttactgtctcccaaggacttctgtttgcttctccctygttgtgcaatatttgccagtatgctttcctcacatttttgtcctcaaaaattccccatatttcattttcctttttagctctactactcagtgaggcttaa

SEQ ID NO: 161602 - DNA, 201 bp, Homo sapiens
catggaagtcgcctgactcccctgtatagtggtttctggctgcatgatccaggggcagttctggtgcacctgcaggcctttcacacctcatgcctgttgcragtgtattcattcagttttgtatagtagcacatgatatgatagtggcgtcttaaccactactttattctgtctgtacacaataaaattattagtagcaca

SEQ ID NO: 161603 - DNA, 201 bp, Homo sapiens
ctactttattctgtctgtacacaataaaattattagtagcacagtgatacaaataacataatttatatcatcaaagtctaggcatcttagatttactggtrcagggttatagaggaaaaaactgagtaaaatgttgaatatttatgtttttagcagtgggcattgaatttagagtttctcgagtgagagtgatgtcagtga

SEQ ID NO: 161604 - DNA, 201 bp, Homo sapiens
ttatattttctaaattttatatgtatcttttcaaatacttagatcttaatatttgatttttcattttgaatttgtctgacttttgtatactagaacatcakagtagataattatgtgtcttagagcaaaaattcatatctgagtccgttcctgaagaattttgctctatttgaaatgctgaagagaaatgtgctcatatga

SEQ ID NO: 161605 - DNA, 201 bp, Homo sapiens
atacttagatcttaatatttgatttttcattttgaatttgtctgacttttgtatactagaacatcagagtagataattatgtgtcttagagcaaaaattcrtatctgagtccgttcctgaagaattttgctctatttgaaatgctgaagagaaatgtgctcatatgaagcctgtcttgcacctgtggcccagcttgcaatg

SEQ ID NO: 161606 - DNA, 201 bp, Homo sapiens
tgctcatggtgcacgggcggaacagctacaagaggtcggcggcactcggccagttcgtcatgcacaggggccttatcatctccaccatgcaggtactaagycttctgtgctggcacccatggagggcagggtccaggaagggcagggtccgggaagggcagggtccgggagtgggggtgctgagtgctgccggaagtacct

SEQ ID NO: 161607 - DNA, 201 bp, Homo sapiens
gtgagaccagcctgggaaacatggtgagaccctatctctacaggagaacattagctgggcatggtggtacacacccgcggtcctagctactcaggaggctkaggtgagaggatcagctgagcccaggaggtcaaggctgcagtgagtcatgattgcaccattgtactccagcctgggccacagagtgagaccgtgtctcaa

SEQ ID NO: 161608 - DNA, 201 bp, Homo sapiens
tacaggagaacattagctgggcatggtggtacacacccgcggtcctagctactcaggaggctgaggtgagaggatcagctgagcccaggaggtcaaggctscagtgagtcatgattgcaccattgtactccagcctgggccacagagtgagaccgtgtctcaaaaaaaaaaaaaaaaaaaaaaaaaaacccagccccactt

SEQ ID NO: 161609 - DNA, 201 bp, Homo sapiens
aaccactgcagtgggttttatctggcagtttgggtatgaacttggacatgggtctggatcacactaaccactgcagtgggttttatctggcagtttgggtrtgaacttggacatggctctggatcacactaaccactgcaatgggttttatttggcagtttgcgtgtgaacttggacatgggcaaagcggtgtatggatgg

SEQ ID NO: 161610 - DNA, 201 bp, Homo sapiens
gaatctctattttctagtaatatcctgctcacagtttgtaccagcattgaaaataggctatctctacacctactgggctcctctggtaagaaaagactttraaaattaagttaaattatgaaatatttagaatatagttttaagagttgagatggttaaaagttaaattgaccagatttttaaaacatggtgttgtagtgt

SEQ ID NO: 161611 - DNA, 201 bp, Homo sapiens
tctggccaaagagggagagccaaaagtctgtatgccacatctagccctgcgcctaacctctcctgcaggcacctgctcatctcttccgccttgctggttasatggccatgactagggcagtcttggaaactgcttgttaaagatgccaaagcttccgtcagcctggtgtcctgaatgaatgtatggaacagagcccctccc

SEQ ID NO: 161612 - DNA, 201 bp, Homo sapiens
tggtgtggcatgcttcgaagcaaacactgttggtctctcctgggcaggaatggaatctcattttcaaagatagcagcaccagggctgggcgcggtggctcrcgcctgtaatcccagcactttgggaggctgaagtgggcgtgggtggatcacctgaggtcaggagttcgagaccagcctggctaacatggcgaaaccctgt

SEQ ID NO: 161613 - DNA, 201 bp, Homo sapiens
aacacaagaaaacacgtgaaacaaatgttttcagacattggataagaagctggggacagggatgcctcagagaagagaaacaactctcccacatctagaaygaacagccagacggcctcaaaacctctgtttcaacagccacatggcctcgaaacctctgtgtttcaacagccagagggcctcgaaacctctgtgtttcaa

SEQ ID NO: 161614 - DNA, 201 bp, Homo sapiens
gagaataaactgacatgatggacttcataaaaattaagtttttgctcttctaaacatagtactaatcaagtaaaaaggcagacaagagtaaaatactttcmgtacatatcttcaactcaacgatcagacagacaactcagttttgtttttaagatgaaagatttgaacattcatcacaaaagaagacataagaatggtcag

SEQ ID NO: 161615 - DNA, 201 bp, Homo sapiens
tgaatggaaaaaagacagtcaatagaagccagccctgagatggcagagatgctagaattctctgacaaagactgggaaacagtcattaccaacatactggragcaaatggcaaaatagaacagcccagcagacaagatacagagcagaaccaaatggaaatcttagagatgagaaataacccagacaaaaaaaaatgccgt

SEQ ID NO: 161616 - DNA, 201 bp, Homo sapiens
catctgggatgtccattatggtagccactagccagggtgcccactgagctcttgagatgtggctgatgtgactgaggaactggatggtaagttttatttarttttaattaattgaaatgaaagttgccacatggggccgatggatgctcatttggacggtccaggcctgggtactctttgtgcccaagctactgttgggag

SEQ ID NO: 161617 - DNA, 201 bp, Homo sapiens
agcagaaccaaatggaaatcttagagatgagaaataacccagacaaaaaaaaatgccgtgactgggctcagcagcaaaatagaagggacagagggaggacrcagtgaactggaagacagaaaaacagaaagtcctcaatctgaacaagagagaaaactgactgaaaaaaaatggatcagagcctcagggacagcaagatgg

SEQ ID NO: 161618 - DNA, 201 bp, Homo sapiens
ccatagggtcacttgctggtgattgtctccaaaacatgactttaaaatccatgtttttccattgtgttttgttgcctgctcacaagtgattcatttttttyccatcatctcttgaatggctgtggtgccatgcctgggctgaggaaaggcggtgcatgaacttgagcaagagctggcctctgcctgttgtcagctcagtga

SEQ ID NO: 161619 - DNA, 201 bp, Homo sapiens
cagtgctaagatgttccactcttgcaaagctcagtctttgtgtgctgcggtagaagttctagaataagggtggggggagctggcttgcttggctatccccrtggcagagcatcagccccgtgagcgagcactgcttaagggagcagtgcttggcagtccttcacgtgctggaacagtccctgttagggatgggcagcctcc

SEQ ID NO: 161620 - DNA, 201 bp, Homo sapiens
ttgaatacaattagaaggtgagatttaacaacttcctttagtaagccattctgagtctttctctacattttgaaaatttaaattaaaccaaaattttaatmctgaagtttaaattcatgattattttgtgcttaaaagagatgaatttgataccttttcatcattttctgaggtatttttagaaactctatactgtctacc

SEQ ID NO: 161621 - DNA, 201 bp, Homo sapiens
  misc_feature (1)...(201): n = A,T,C or G
gtggtgaatacagaaacaatcaatattgactctaaatatgtacaattagtttgaacttttttaaaaagcaaaaaaaaatacacaatacgtatcttttgttncatacagttgctgtggttggctgataaatatttgtcgaagaaagaaagaactgaaagctcgcacagtatggcttggatgtcctgaaaagtgtgaagaaaa

SEQ ID NO: 161622 - DNA, 201 bp, Homo sapiens
ttgaacttttttaaaaagcaaaaaaaaatacacaatacgtatcttttgttgcatacagttgctgtggttggctgataaatatttgtcgaagaaagaaagarctgaaagctcgcacagtatggcttggatgtcctgaaaagtgtgaagaaaaacatcccaggaattctataaaaaatcaaaaatacaatgtgtttaccttta

SEQ ID NO: 161623 - DNA, 201 bp, Homo sapiens
aagcaaaaaaaaatacacaatacgtatcttttgttgcatacagttgctgtggttggctgataaatatttgtcgaagaaagaaagaactgaaagctcgcacmgtatggcttggatgtcctgaaaagtgtgaagaaaaacatcccaggaattctataaaaaatcaaaaatacaatgtgtttacctttatacctggggtaagac

SEQ ID NO: 161624 - DNA, 201 bp, Homo sapiens
gagaaacccgtaggctgacattgatgggcaaagtttgttccatctctaaaactagattgatttcatctccattcatggaagtttctgaaatagcttctgayggtaaaaatgaaaaacgtgatgatggataaggttttatttcatctcacttttcttgcttcgcaggtgatggaggaaatgatgtcagcatgattcaggcag

SEQ ID NO: 161625 - DNA, 201 bp, Homo sapiens
tttttttttttttttatgaagttctgggatacatgtgcagaacgtgcaagtttgttacataggtatacacatgccatggtggtttgctgcacccatcaacycgtcgtctacattaggtatttcttctgttgctatccctcccctaaacccagagtgagcaggcaacctacagaatgggagaaaatttttgcaatctgtcca

SEQ ID NO: 161626 - DNA, 201 bp, Homo sapiens
attgattttactcccacccccacctcatccccatccacctagtgattggcaaatacttgatatctaatgcacttctttattaaaacccacaaaactaatgrcttcataattaaaagacagaccttttgtcaggataataaaatgtaaactgtcttacaggcagataaatattcgcatctttattgaatgaagccactgttt

SEQ ID NO: 161627 - DNA, 201 bp, Homo sapiens
tcagtcagtagactgtagagtattgattgcagtcgtttaaagccagcagtgcagcttaactttgatcagtgtaagtccacacagcctgcccagattggccrcatgctgaaaatacctgtggatgtgactgtatgatgattaccatgtgtatgagttttttatcttagatcgtctctgaaattagtcttttcatctaaaatg

SEQ ID NO: 161628 - DNA, 201 bp, Homo sapiens
agctggcagcagaggggttttccttggtcattctgcacctgtgttaaggttgcaggtcatcagcagctccctcctgtttgatgcagctgttgggaatgggkgctggggctgtgggtctgttctgttactctcttcacaccctgaccatggtgagcattctgaagtatccaagtgcagtacgtatgatttctggttgatatc

SEQ ID NO: 161629 - DNA, 201 bp, Homo sapiens
ccacctacacatctacagctccgaagttctatttttcaaaggaaatgggaagaaatatggaaggtggtctctgccgagccatttcttcattttgtttcccrttgagtgtctgattccccctgtgctgctgctgaatggagtgcacaaaaccattccagcagttctcagaggactgtgctgccctgagaacaggatgctccc

SEQ ID NO: 161630 - DNA, 201 bp, Homo sapiens
tttaccaaggtaagacgagatccttagtttactggactaaagatttttttattttggtctttttgttagcaatattgtttttacttgcagattaaattccmacagcttaaaatgccatcagcagttaaatactcccttctgtttatcttgtaaatcaatattccagcaacatgggtcctttttttttttttaactgatgca

SEQ ID NO: 161631 - DNA, 201 bp, Homo sapiens
caaaacagattttcaccctcacagtagcccaggtgggtggtcaaagggtgatagggcaactttgtcatctctgatacgtgggttccagtgactgccccacytccacactgtcccacaggggaggttcggaaggaaaggcctggtgagtacttggactcaaaggggcacatgtcctttcgcatgctctgctggccagaatca

SEQ ID NO: 161632 - DNA, 201 bp, Homo sapiens
tgctgtgggttttatgcggggagggagcttacatactttaggaaagtgtgtatattttaatctctcaaacatctttaggaagataatagactcaaacttaycaatcctttacaattttcttttaatttctacatctactgtccctagatgtaagttatttctaagagccttctaaaaagaacaccatgactatatttcaga

SEQ ID NO: 161633 - DNA, 201 bp, Homo sapiens
tggaggttacagtgagccgagatcgagccactgcactccatcctgggcaatggagtaagactctgtctcaaaaaaaaaaaaaaaagctagagaaaattagygactttatagctaatgcatgatagaattaataatggttgctctatcaacatttataaatggtttttctttttcttcccaaaagatagatatgggcctata

SEQ ID NO: 161634 - DNA, 201 bp, Homo sapiens
tcttcaattttcctaggatagatgaacagaattgggcatggcgccaggtgcctgtggtcccagctgcccgggctggagaatcacttgagcctggaaggtcraggctgcggtgagctgtgatcgcaccactgcaccccatccctcggcaacagatcaggaccctgtctctacaaaaacaggactgtgtttgcaaagctgcag

SEQ ID NO: 161635 - DNA, 201 bp, Homo sapiens
cccggtatgcaggtcaaacaattctgcagtcaagaaaacctgagatttggagctgggcccctgtaaatgcacagtgatgtttccgtggcaagcttagaccrtctggtggcctggccaggtctgtggctgtggccatgagggcccagggcttcttggtcagctcttacctttttctctgtttcctgccaacagatgttgcct

SEQ ID NO: 161636 - DNA, 201 bp, Homo sapiens
tttcttacaaaggtaaacatgtatttaccccatgacccagtagtcctgttcctaggtatttctccaagagaaatgaaaacttagattcatactaaatcctrtatatgaatgttcacagcagcactgtcataactgccagaagctggaaacaaccttgtgcccttcagccagtgggcagaaggatgtctccgtggacaggga

SEQ ID NO: 161637 - DNA, 201 bp, Homo sapiens
gatttctctttcacatagacttcatagtagggtggatttgaggaatgagtaactttatatgtaatataaacacgaaattactagataaatgaatacatttktaacttattaaattagtaagattgaaagagacattggagctgagcatgggtaaaactgtaacactgtggcgctcatcccattaatatagatgccgtgagc

SEQ ID NO: 161638 - DNA, 201 bp, Homo sapiens
caaaaatctttaacgtcaacatttgaagagctctgacttagcactctaaagatgaggcatgcacaccctgtcaccacttccctgaccctgagtgcctgtcscagcagcttatagagctccaggatgggggggcctgccttgctcttggcaggacaagatgctggttcccaaccctagcttggactccagtgctcagcattt

SEQ ID NO: 161639 - DNA, 201 bp, Homo sapiens
aaagttactctgtaaagccacttttgtgcatgaagcttccaccacaatatgtatttcttttttcttttcttttttttttttttttttgagatggagtctcrctctgttgcccaggttggaatgcagtggcgcaatctcggctcactgcaacctccacctcctgggttcaaacgtttctcctgcctcagcctcctgagtagc

SEQ ID NO: 161640 - DNA, 201 bp, Homo sapiens
acccacatcgttgccccatgcaggagatctttggttctgagtgtaggtgttgcccatttccatttgtcctggatctgtcgctccaccattgtattgttatyccagtggctgcgactagttggccctttccagttcccttctagtctgtctcactctacttttttttttttctctaacctaggccatgttctgtctctgacc

SEQ ID NO: 161641 - DNA, 201 bp, Homo sapiens
aaagtcttttttttccatctattaagtattgaaattcatgtttagtctcatttgtctactaagaggtcaactttcatgatgtaaagggagcggctaacagygtaacttggtcaactcagttaagccaagttgttgcttagttactgtgttgtttgccaaaagctatatgacacatctgtcacttaaatgactgctatcagt

SEQ ID NO: 161642 - DNA, 201 bp, Homo sapiens
ctaagttttatccaatcctggtggctgctctacatgttaagctgggttcagtctaccatctatgccagaatggttgtgataaatattctcagatggacttmagtcaactttcctaactttattttcattgtcatgggtaaatgttagagaaatgacatggggaggaatgtctctgctatctttaatgaaaagtgtgtccaa

SEQ ID NO: 161643 - DNA, 201 bp, Homo sapiens
ggccaatatttgagactctttatttggccattgtgtttctcggtggccgctctgatgggcgctgggttctagctttaggatgctgctggtggccactgccrggtgggaagattatcacttgacgctctggggattagaaaaacaccatagtactgtagatcaagtgcattgtgtccagcattcgtgattgctgtttatttt

SEQ ID NO: 161644 - DNA, 201 bp, Homo sapiens
aatccatcttgagatgagttttgtatatgatgtagtttcagtcttctacatatggctaaccagttattccagcattatttatcgaatagggactcctttcytcattgcttgtttttgtcagctttgtcgaagatcagatggttgtaggtgtgcagtcttatttctgggttctctattctgttccattggtctatgtgtgtt

SEQ ID NO: 161645 - DNA, 201 bp, Homo sapiens
ttgttgacttccaagtgaatacaattagcaaaagaaaaaactctcttaatttccccaggtaccaaattgaatcccccttgaacttattaagtgaatttccyggtggaatttatccctgtggttggtgaaccactctcctatatattttcattttaactaagccttaatacgaaggccttcagtctgaacttagtagatttc

SEQ ID NO: 161646 - DNA, 201 bp, Homo sapiens
cagctttgtcgaagatcagatggttgtaggtgtgcagtcttatttctgggttctctattctgttccattggtctatgtgtgttctcctactagtaccatgytattgtggttactgtagccctgtagtatagtttgaagttgggtagcataattgatacctccagctttgttctttttgcttagaattgccttggctatttg

SEQ ID NO: 161647 - DNA, 201 bp, Homo sapiens
tattttcattttaactaagccttaatacgaaggccttcagtctgaacttagtagatttctttataggtcagatatttttccatatgttcagctaaaattgrccttttaaacaaaaattcattgaagcaaataaatcaccattgttactgtttgtttcatgtgtttttggtctgctcagtaccagatgacacggtagccacc

SEQ ID NO: 161648 - DNA, 201 bp, Homo sapiens
gaagagggaaacaaaagaaaccaagattgtgaagggcactgggaaggaaagttaggctcagaaggtaggaagccttacatgccattttaaggagtttagaytttattgtgtcagctgtagaaagccctagaaaatttttaaagcaagaagagacaagatttgtgttttaaatttgttttataaagagatgtctctgttggc

SEQ ID NO: 161649 - DNA, 201 bp, Homo sapiens
acaaatcagggcttttaatttatttcactatgaaactgtgtcagatttcattgtctagggcaccctcacatctcacttttttatgactgcacgtttatgayataggcctgtttttttatcaagggtttttatcaagggtttcctcaatattaatgaaaaagattgccataaagctgctagtctctaatttctcaaagattg

SEQ ID NO: 161650 - DNA, 201 bp, Homo sapiens
atatagaaaatggtggaatgatagtaaacctagattgcatgattcatagacaggctctaactaccatactgttctgcccttactgtggaatatagtagtcygtattgaatacttttcagaaaaatcgaattaaatggtataggaataacaggaaattagtgcctacatatagttcatcaaacagtgacttattgaagtacg

SEQ ID NO: 161651 - DNA, 201 bp, Homo sapiens
tcaatttaattttaaaaagatagccaaattgagtgttttttagataaaaatttttatttaccaattagaaaaaccttggctttcaaggttaaatatgtacrtgatattttaaaatgtgtaactttgtatatgtaatttttggcatattacataagttacatgaaaatgtgaataacgtaattctcataagtgaaaaatgta

SEQ ID NO: 161652 - DNA, 201 bp, Homo sapiens
aatcacctgagaaacaggtgacttatagtctagtcccaaccctgctaggaacagatgtgtgacttcaatcaagtaactaactttttctgataacaattgtscaggctcctgaggggctagtaagaatcaaatgactgaaagtatgtgaaagcaatttgaaacataaaaagcactaaaaataactaaatgtagttgccaaat

SEQ ID NO: 161653 - DNA, 201 bp, Homo sapiens
agctcccttcttaacaacagaaggcagtcacgtgtgtataaaacttcacacattatatgggtgcttagataatactgcctttgacttggcccttgtggcartttagaggttttatgtaagtacattgtggcatcttttgtagcctgttttgtttccaattttttaatctcttataaaatatatttgataaataaaacaccc

SEQ ID NO: 161654 - DNA, 201 bp, Homo sapiens
acgtccattgtttctttgttgactttctgtcttgatgacctatctagtgctgtcactggagtatttgaagtcccccactattattgtgctgctgtctatcycctttcataagtctagtactaattgttttataaatttgggagctccagtgttaagtgcatatatatttaggattgtgatatttcctgttggattagtcct

SEQ ID NO: 161655 - DNA, 201 bp, Homo sapiens
aatttagaggttttatgtaagtacattgtggcatcttttgtagcctgttttgtttccaattttttaatctcttataaaatatatttgataaataaaacacyctgccatgtcttcctattcatttttatttaaatgttagcatgagatgtgaagtagataaaactcttaagtagtattcttttatgtacaatatcaccatca

SEQ ID NO: 161656 - DNA, 201 bp, Homo sapiens
tgactttctgtcttgatgacctatctagtgctgtcactggagtatttgaagtcccccactattattgtgctgctgtctatcccctttcataagtctagtastaattgttttataaatttgggagctccagtgttaagtgcatatatatttaggattgtgatatttcctgttggattagtccttttgtcattatataatgtc

SEQ ID NO: 161657 - DNA, 201 bp, Homo sapiens
ttgctggtattgttgccttgttgttcctattatgtttcaaaacttagatctttgttacatacaagcatccctctctatccagatctgtttttgtttccgtrtttggtgagtagcaagagttcagatgatgaaaaatttgtctaaaaattatcagaatatttagtttctgtctggatagcaagggatttctataatccgttt

SEQ ID NO: 161658 - DNA, 201 bp, Homo sapiens
aatttaaataattttcattttactcatattttaatcatgaattagtagtcagaacatatggcactgttactctttaaagaatgtgactttcaaatggtttyaggtttaaaaactataaactagtcctattttaaattaagaaaaattgtttttaatattttagaggttgtttatcatcatttccttggacaggtttatttg

SEQ ID NO: 161659 - DNA, 201 bp, Homo sapiens
attatgtttcaaaacttagatctttgttacatacaagcatccctctctatccagatctgtttttgtttccgtgtttggtgagtagcaagagttcagatgaygaaaaatttgtctaaaaattatcagaatatttagtttctgtctggatagcaagggatttctataatccgttttatgtgtcaaacataacatcattttaaa

SEQ ID NO: 161660 - DNA, 201 bp, Homo sapiens
atactttttttttcaagaccctatcacaaccctaaaaaataattttcattattattttcttccttttttggtacaagtggacatacagtagatggcatgargttgagaaatttgagaaagaaaaatctagactataatgtagttctctataaaatatgctttaatttgataagcttatgagtaaacttttaaaaattaagt

SEQ ID NO: 161661 - DNA, 201 bp, Homo sapiens
gtagttctaagtgctttgatatgttttaacttcttcctattcacctggttcaaattataatttgactttgccatgttaaaaagctgtacaagggccgggcrcggtggctcacgcctgtaatcccagcactttgagaggctgaggcaggtgaatcacaaggtcaggagatcgagaccatcctggctaacacggtgaaaccct

SEQ ID NO: 161662 - DNA, 201 bp, Homo sapiens
tttggggtttacagtgattacccaaagctcttggagaccctttggaatgagtatactttgttgcttttaaggatgagggtcatagtctaatgccagaagcyttggaacaccagctatgatgaaaactaactaattcttcttgagtccttgtaattgaaaagtggtatgttttgcttttgaagagtttgtgtctaattccgg

SEQ ID NO: 161663 - DNA, 201 bp, Homo sapiens
tttctcttattaaaatgaagacttggtagtagtaatccatgacccattaaaatttatgtattacattttcctcaagaactctagtattgtggtggctttgytccttcttatgtccctgtgtgagttgtatcacccagtaacctaccatagtgggtagccttgtgaaaaatccacaaaaataccaactgggaccttattcat

SEQ ID NO: 161664 - DNA, 201 bp, Homo sapiens
tattgtggttactgtagccctgtagtatagtttgaagttgggtagcataattgatacctccagctttgttctttttgcttagaattgccttggctatttgrgctgtctttttggttccatatgaatttttaaatagttaaattttaaactattcattgacattctgtaaagaatggtagtttaatgggaatagcattgaat

SEQ ID NO: 161665 - DNA, 201 bp, Homo sapiens
tatgcatgaactctcaagaattttgtgtatgggtctatggcagcatttactaactattatagtgattattacaagttgtccatgtcatgataagtgatctrcattaaaacatttgtcttgtaattttaatgcaatagtcaactttttaaatttctatcttttaataaaattttttagaaatttgaatcaaatgaccatttt

SEQ ID NO: 161666 - DNA, 201 bp, Homo sapiens
ggctatttttgccatcagctttaattcttgcattgatcttcacacctgcctacagttgctccgtccctgtgttataccatcaatattcaatagtcagatgsgtgtggaaaacagttttaagaaactaaatgaaaatctgctctcagagctaatacctttgtaccttgtacaggcatgaaggtattatcaataggcaagcga

SEQ ID NO: 161667 - DNA, 201 bp, Homo sapiens
actgcaacctccgcctcccgcctcccgggttcaagcgattctcctgactcagcttcccgaatagctggcattacaggcgcctgccaccacgcctggccagwttttgtattttcagtagagacggggtttcaccaggctggtctcaaactcctgaccttaggcgatccacccgcctcggcctcccaaagtgctgggattaca

SEQ ID NO: 161668 - DNA, 201 bp, Homo sapiens
cagttaatttttgtctctgtaggttttaaaattatattgtatgtcttaaagcaaagtatttttaaatgaggttttaaattaataagatttgaccaggtatmtgttggttttactactttttgagcaagaatggttcatttctatctgctgatgtattgtggactctgcttccaacttaccacttttattatttcatgtagt

SEQ ID NO: 161669 - DNA, 201 bp, Homo sapiens
agcccactgactcaaatgttaatctcctttggtaacaccctcacagacacacccaggatcaatactttgtatccttcaatccaatcaagttgacactcagkattaaccttcacaatgtttattcatttttcatgtgtaggcatggctagccgacccattttcattttaaaaacatactatacatgtaatgcagaaggccac

SEQ ID NO: 161670 - DNA, 201 bp, Homo sapiens
cctgtctcatacaacttacttaataacatcatagtattttaaaattttgtttctcctaatgaaaaaaattttttttactaatactgtcctcatttttctgygacttttaagtttttaaataggacaataatgaagattaaaataaaacgaattatgtttttaattatcttcactattctgggaactatattcctagagaat

SEQ ID NO: 161671 - DNA, 201 bp, Homo sapiens
gatagtcgatgtgaagttcccatacatcagtggtagcattgccagcagagaggactctagcattctactgatatatttctaccttgccataaaaatatagrtattaatattgtggattttagcttttaagatactctagagtatctttgctgtaaaaatatagatgttaaagttgtggatttctccagttttcggggtact

SEQ ID NO: 161672 - DNA, 201 bp, Homo sapiens
gggatagtttgtgtatgtggaaggttagggctcatgatttggtcagatttatttttttactgtgaatatcaaaatatgtgaggcatgacaaacacatacawgcatatccttggtatgatgacacattatgcaaaacctctttctttcagtgctaggaaaagaatgtcagtgattgttcgcactccatctggaaagttacga

SEQ ID NO: 161673 - DNA, 201 bp, Homo sapiens
gaagcccttcaggggttttacagactcactgaaactccttggagaggtagacgtagggaaaaaagcttgttctaagactcatggagatttatggatacagytgaaatcaagcactatcccagggagtaactgtactaaataagtaattcttagtctcagggaccagtgctttatgccccctggtcctacagtctgtataat

SEQ ID NO: 161674 - DNA, 201 bp, Homo sapiens
ggagttggacatggggatgtctacggtgatcagacaagatggagccaggtgcaaagatgggatgctcacaagcattctacatcaggagttgcaaactccakttcaagggctaaatccacccactgcctatttgtaaataaagctttactggaacacagctacatccatttgtttacatgttgtctgtaactgttttcatgc

SEQ ID NO: 161675 - DNA, 201 bp, Homo sapiens
acatagtcagtgtttagtaaatatttattgagtgaaagaatggcttggataggaatgagagggagacaaaggtattagaatgaatttcctggtttgggtaratggatggcatgtgtttccatgtctgagacaagtaccaggtcttggagattaaggtccctggttgccttgtgaacagtttgagatgcctttgagattgcc

SEQ ID NO: 161676 - DNA, 201 bp, Homo sapiens
tctatttttacgtagaccataatattggacttagcatgtcattattggacttagcatgtcagacagtgaatctttaaactgtgagggtcgttttcacatcttttattttttaagaacagaattttccaagcaaacattgcctgaatcataatatatataattgacgaaagcaggactgctttggctggagtaagagtagag

SEQ ID NO: 161677 - DNA, 201 bp, Homo sapiens
ttctgggaactggtttgattctgaccgtttttaagaagttacagaccttggagaacacaatgttgaaagaagctaagatttcccagaagctgctatacaartgtgctttcatacatagaaaaggatccttgctcagttccattcctcaaagtgataggtgtatgaatttgcctgccaatttgctctgtgaaacttaattta

SEQ ID NO: 161678 - DNA, 201 bp, Homo sapiens
gggtgtggaaaacagttttaagaaactaaatgaaaatctgctctcagagctaatacctttgtaccttgtacaggcatgaaggtattatcaataggcaagckagattgctgttagtgattccaccactagccattttataaattctataaatcttcatttcatattcattctgacatttaattttctgttctatggattttt

SEQ ID NO: 161679 - DNA, 201 bp, Homo sapiens
aggtgcagaactttcccccaaaacaatgctttcttagccaggtcccaaggccagaggtcccaggagcagcagcagcagcagcagtgggtcccccaggagarcctctaaggtcacacagggtgcccactgcagacaggctatagtgcatggtgcctcctccctgacaaccacctccacttcacaccagccacagcaaggaac

SEQ ID NO: 161680 - DNA, 201 bp, Homo sapiens
gatacttcactttgtatctcgagcaattcattaggaaaagaagcaagactcaaaaaaaaaaaacagatattctaatctgaataagaaagaagaaataaacytaaactgttaaaatagctattaaatttagtttcaactcaggactttctattaaaaacttacgtaactattaaaattgttattcaatttattacaactcaa

SEQ ID NO: 161681 - DNA, 201 bp, Homo sapiens
tgtattaaagtttgttcttctgtgagcactggtcccataaacatgctctaaaccctaaaaagttctgtgattcaacgagtttggggcacatagcatgtagscccttcgagatccactgtgcacactggcattttaaagtccccgaggattattccagcaagacaagctctgttgctttgctcagtccagtgtttgccaaac

SEQ ID NO: 161682 - DNA, 201 bp, Homo sapiens
gacagaaaatatacaaaatatttgtttatatgtttctaatgaatgtgttcgtatcttggctcccacattatctagttaccccagtgttttgggaaacataytgcaaaaaaatatttttgcaggaaattttgagggcttgtattaataagctgtccccatgatcactaaaaaaaaaaaccttatgccttgggtaaaatgctt

SEQ ID NO: 161683 - DNA, 201 bp, Homo sapiens
cagtgttggaatccactaccttttccagccttttgattcatttttatcagcttattttgggtgttctataaatttgatgtggcaaggactgttcattttgsgtggtaaaggggatgggacgttttcttaaaatgctaattttcatagtaaaagtatcaactctgaaccttagaatgcaagaagttaaatcttgtgcttctc

SEQ ID NO: 161684 - DNA, 201 bp, Homo sapiens
tgggtgtggaaaacagttttaagaaactaaatgaaaatctgctctcagagctaatacctttgtaccttgtacaggcatgaaggtattatcaataggcaagygagattgctgttagtgattccaccactagccattttataaattctataaatcttcatttcatattcattctgacatttaattttctgttctatggatttt

SEQ ID NO: 161685 - DNA, 201 bp, Homo sapiens
ttgataaagctttcaaatgcttctctctattcatgcccatttcccattctagatcatttattggtgagcattcctttttgacatttactaaatgtcaactrtagtccaggtttaaacattggcctacagccagtggacttaccagtttatattagcctggtaagaaaaattaaataaaatgtgaaaatgaaatgaaaattg

SEQ ID NO: 161686 - DNA, 201 bp, Homo sapiens
tttgggaatcctaaaatttcagaatccttaaaaacataatgagcactctatagtggtataaaatgttcactaagtatagtcatttattatatatatcaacraaaactattccttaaaaatatttttaacataggtggttaactatatggtaaagaaagtagattgaccatgtgtggatataacaaaacatatatatttaaa

SEQ ID NO: 161687 - DNA, 201 bp, Homo sapiens
ggttcttgtttgccgataaccatttttactgtgtattctatgctttttacaatgggttgtatatttgtaactatctttcaatgcagataattaaccaattmccagttttctttcaggtaaatgttggagatatagttataataaaaggcaaagagtatatacctgctgacactgtacttctctcatcaaggtagagatgcc

SEQ ID NO: 161688 - DNA, 201 bp, Homo sapiens
tgccctcagtcattataaaatcatctttagatattttcatagtacatatcattgttttaacatctttacatattctctggagaaattaattttaatatacyctgtgtttggatacaggacactcctgcaaactgttgaagaagaacatgggaatgattgttataaatgaaggctctcttgatgtaagtaaaattatgtatt

SEQ ID NO: 161689 - DNA, 201 bp, Homo sapiens
gaatattgttaaatattagaaaaatgttggacatctactttctaaatgtttttaaatgtcttagttttatttttattaaagttaaaattaatgaatttatstaaattaaatctgtgggcctaatctgccagaaaatttaatttttcttttattttgagaaactttgtgttatttttgatgtttctttctttttcaatcatt

SEQ ID NO: 161690 - DNA, 201 bp, Homo sapiens
ttttttttagtagagacggggtttcaccgtgttagccaggatggtctcgatttcctgacctcgtgatccgcccatcttggcctcccaaagtgctgggattrtaggcgtgacatttttatcttttgagaagtgcattttgtttttctttcttggcccagaaagtaaaaccagatagaatctcttgggtactttttccagggg

SEQ ID NO: 161691 - DNA, 201 bp, Homo sapiens
tttaattaggatatgaaatacatgcttaattagtgctaacagtttggtacatttgggagttcttattaggggagggtatggggttgtttggttttttttartctgaaaagcagctgttataattttaggacacatgtatatttcgcgtttctagtttagcattgttttcatttgggatgacatgaggtgggtgctctgccc

SEQ ID NO: 161692 - DNA, 201 bp, Homo sapiens
tactttctagtatacttttctcaatacagtcacaccacataatctgttcattggcagttctttccttacgacatcccttttgaagccctccattctcttgyctggacaggttatattctaagaactcttcggtgacactttttggttttccttttggttttctcctgttttggattttctgtttcctgtaactcaatttac

SEQ ID NO: 161693 - DNA, 201 bp, Homo sapiens
atttgggagttcttattaggggagggtatggggttgtttggttttttttagtctgaaaagcagctgttataattttaggacacatgtatatttcgcgtttytagtttagcattgttttcatttgggatgacatgaggtgggtgctctgcccaatggtattttcagtgtttagtgttgctgaaagtctctctcttgccctgg

SEQ ID NO: 161694 - DNA, 201 bp, Homo sapiens
gacttgaccacatgtttacagcagggaaaataacactgttacttaattacagccagtctccatggttagatgtgaaggggtgagagagagtaattactgtytagcacttttctgtgtagatttcctctgggcactcttggattatgggaatccagatgggggaaatgacctggctttgctatcttattttccccagagcag

SEQ ID NO: 161695 - DNA, 201 bp, Homo sapiens
tcaacaagtctctagggagttccatactttcccacattttcctgctttctgggccctccaaacttttttcaacctctgcctgttacccagttccaaagtcrtttccacattttcagtatcttttcagcagcaccccactcttctggtaccaatgtactgtattagtctgttttcatgctcctgatgaagacgtaccgagac

SEQ ID NO: 161696 - DNA, 201 bp, Homo sapiens
ccccagtggaagaaagcaaggtgtttatgcccctagggaggtggcaaaaccagagagtaacacaaaatttcatatcctgacaaaagcctttggtgttacargtgcagagctgattttgcctcagtgttgccaaaacatcaggtacagctcagtttcaccccagatagggttcaagtgagttctgttgtgtcttatcagaag

SEQ ID NO: 161697 - DNA, 201 bp, Homo sapiens
cagtaaggagcacccagttggtgttgtatatcatgtatttgctagtctctatggccgggtaacttttcttcagcaacatctacctactttgatgtaacacmaaagagagttctcattcacccaatatttggaggtttcaccaggaaaagagaagagcaaggacattgatgagtttgggaccacattatcaaagctggagta

SEQ ID NO: 161698 - DNA, 201 bp, Homo sapiens
tccatctggttgatgaactgaccagtcatgatgtgcatatactatttccatcttcagctgtccttagctgcctttgtctctgcccagaagttcttttcagrgcatcagatagcttttccccttttgcttccgctcattctgcatgcctgaagtgaccagaaagctattcctcaaatatctcagagtttagtgcagacttgg

SEQ ID NO: 161699 - DNA, 201 bp, Homo sapiens
actcctgtctgttccttttccatttcttctctcatcttttctttccccttccctgtggcttttctcccagacttatcaactttaatttaatgcccttctagcatcagtgccacccatcgaagtacttagttccatctggttgatgaactgaccagtcatgatgtgcatatactatttccatcttcagctgtccttagctgc

SEQ ID NO: 161700 - DNA, 201 bp, Homo sapiens
aacccaggtcattcttttcaatcccattggtttctgctagcatcctgaggaattcagtaccttctttttggggcccattgctgttccgtactctcaggtgwtaactctttttgtcttgtagccatcctccttgcattcagtccatctgccatttccccgcttttcccagggccctgaacaatttctataagctagccagat

SEQ ID NO: 161701 - DNA, 201 bp, Homo sapiens
tagtataatagctatcaatgattgctataaagaaaactaaaatgggagggaaacacagggcattgcacagagggattcagttttaaatagcacagtcaggwagaacttattgagaaggtgacatctgaggaacaacctaaaagaggagagggagcttgtcgcatgatgattagagaaaagctgtcttctgttacagagaga

SEQ ID NO: 161702 - DNA, 201 bp, Homo sapiens
ttgtgtttgccatgaacatcaggagagagtgcttgtcggtaactcacatgatcctcacaccaaatgggttgccatgatcaccactttacagatgtggaaaytgaggcacagagaagttaggaaccttatctgacatcactatctgactcatagtggcagagataaggtttcaacttcgatgtctgatccccaggtctgcta

SEQ ID NO: 161703 - DNA, 201 bp, Homo sapiens
gtgtggttctaaagggacgttgactgaatagaggagctctataaaaaggcaaccaagatctgggaagaataacaccaataatacctcatgaatattgaacrcttactttatcccaggtagttctgtaaggactatatatatattttttttcaatcaatcaatccaacagctattgagattcttctgtgtgtctgacgctat

SEQ ID NO: 161704 - DNA, 201 bp, Homo sapiens
catcagtgtgatggaccagtgtgatatcttgtggaagtgaaaagcaatcaaggtctcactgaataagatcatgacacaaagcaggagagttgatatgcccytggggtaggacagtaaaggtatgttgaaggcaaattgcttggtgggccttataggcaggagtggagaaaaaggaatttgccaagtcggtggttgcatacc

SEQ ID NO: 161705 - DNA, 201 bp, Homo sapiens
tggaatccactaccttttccagccttttgattcatttttatcagcttattttgggtgttctataaatttgatgtggcaaggactgttcattttgggtggtraaggggatgggacgttttcttaaaatgctaattttcatagtaaaagtatcaactctgaaccttagaatgcaagaagttaaatcttgtgcttctctttgta

SEQ ID NO: 161706 - DNA, 201 bp, Homo sapiens
gattcatttttatcagcttattttgggtgttctataaatttgatgtggcaaggactgttcattttgggtggtaaaggggatgggacgttttcttaaaatgytaattttcatagtaaaagtatcaactctgaaccttagaatgcaagaagttaaatcttgtgcttctctttgtatttaaattagttgtagtcagaaaaagtt

SEQ ID NO: 161707 - DNA, 201 bp, Homo sapiens
agtcggccaagatagtaaaatcagtgaggcatattttagaaggcactgagactgttttcttgaatctattataaattttctagttctcattggatttctcttttttttttttttccaaacagcaaatacctgatgtgtcaccaacaggtcgttatacaacactggttcctctcttatttattttagctgtggcagctatca

SEQ ID NO: 161708 - DNA, 201 bp, Homo sapiens
cttcatgttggtcaggctggtctcgaactcccgacctcaggcaatccacctgccacgtcctcccaaagtgctgggattacaggcgtgagccactgcacccrgcccttttcccactttttaatggggttgttttcttcttgtaaatttaagttccttgtagatgccggatattagacctttgtcagatgcatagtttgcaag

SEQ ID NO: 161709 - DNA, 201 bp, Homo sapiens
tcacagaattaccccaaatcattcctgcaaaggcacattcttctgtacatggcaacttggacacatttttgtggccaggaaaagggtatagcgggtagtawattgttttaatgtgggagcatcattcctcgtatcttttattgttgaaaaaagtcttttcattatctgtagagcccaggagttcagacaagtcatcagatc

SEQ ID NO: 161710 - DNA, 201 bp, Homo sapiens
aagcactattattcctaacaaactaatgcaggaacagaaaactaaataccacatgttctcacttataagcgggagctaaatgatgacaacacatggacacrtagaggggagcaacacacactggggcccaccggagggtggaaggtgggagaagagagaggatcagggaaaatatctaagctcaatacctgggtgaggaaa

SEQ ID NO: 161711 - DNA, 201 bp, Homo sapiens
ccactgcacccagcccttttcccactttttaatggggttgttttcttcttgtaaatttaagttccttgtagatgccggatattagacctttgtcagatgcrtagtttgcaagtgttttcccccattctgtaagttgtctgtttactctgttgtttttttttcttttttgctgtgcaaaagctctttaattagatccaattt

SEQ ID NO: 161712 - DNA, 201 bp, Homo sapiens
attacctatggtgagcattcacaaatgatggcaagccacaatcagactatggcctctggttcccctgaaaaagtgatctgagagctggggaagttccaggyctactggttggtatactaacaataattctcaccaaccaacctcagccacaggcctcgtctaccatagtgtgggctccatggtactgtctctgaatttagc

SEQ ID NO: 161713 - DNA, 201 bp, Homo sapiens
cctaacaaactaatgcaggaacagaaaactaaataccacatgttctcacttataagcgggagctaaatgatgacaacacatggacacgtagaggggagcarcacacactggggcccaccggagggtggaaggtgggagaagagagaggatcagggaaaatatctaagctcaatacctgggtgaggaaataatctgcatgtc

SEQ ID NO: 161714 - DNA, 201 bp, Homo sapiens
gtgtatgctgccagctcttatctattcctcttgggtgttgccatgtcctggagtgctaatccacacttctagatttttctcttgcagtgttttcatatgcrcactgtgattctgaaaactgtattttttctcaaatggaaaacttaggaactcatttgttttacatttgttccaacccatattatagtcaggtacgcacaa

SEQ ID NO: 161715 - DNA, 201 bp, Homo sapiens
tgaaataaagagtgttttaatgagtgaaatagtttaagtgaaaattttttaatatcatttaaattcttaaactaaggttccatttaattatagaaatgcargtaacttttactttaatgtacctgttgaagtaaccatcatctcgtggtagccaaagttacttctaaaatgtatttgacaaattttattagtgtgataatt

SEQ ID NO: 161716 - DNA, 201 bp, Homo sapiens
tcatttaaattcttaaactaaggttccatttaattatagaaatgcaggtaacttttactttaatgtacctgttgaagtaaccatcatctcgtggtagccaragttacttctaaaatgtatttgacaaattttattagtgtgataatttgtttcaagatattagcatgtttgttaccttgaaacactttattctgattatat

SEQ ID NO: 161717 - DNA, 201 bp, Homo sapiens
aaagtagatatttcttgaaatctattgaatattcctgatttttgatggagaaacatgtagtttatagattaggtttgccagagttttacattgtttatctrtaataaagtctaatgatcaattccagagtgtgggctttggactacctcaggtttcagctacagctcctgaagccgtcaggtttttctagctcagtactgc

SEQ ID NO: 161718 - DNA, 201 bp, Homo sapiens
tatgaagtgaacgtttttaaaatctgcaccaaatgttagaaaactatgctaccaagcactagagttaactttagtatatttaattttggcatcattaaagwtagcgttttatgggtttaatttcactattttatgagttttttgttggttttaccttaaaattcctcccctttgtgaatttatattttcatcttggatagt

SEQ ID NO: 161719 - DNA, 201 bp, Homo sapiens
ataaatccaaaatctgaaagggcattccaatatggctgttcagcagcttcagtttcatgtaaagttcattgaattccatgtataaaacccatgagcttatrtgtattttactgcccgacttgaaccagtattcacaaaaatgccaaattaaaaaaacataattacctcttagatatatgtagattacatatttacatttag

SEQ ID NO: 161720 - DNA, 201 bp, Homo sapiens
tctctttttaaggttatgagaagacagatgatgtttcagagaagacctcactggctgaccaggaggaagtaaggactattttcatcaaccagccccagctracaaaattctgcaataaccatgtcaggtaagaactaccaaagaatgccatgagaccagccagcagagcagagctggttaggtcaaaatgaaaatgcttgc

SEQ ID NO: 161721 - DNA, 201 bp, Homo sapiens
tacattagaagttgtgaaatttacccaggcatacttcataaattgggtaaatatgaattatgattgttatcaccctacaaaataattttgtccttaggatrttttgatatctcaggagaaaaaaggttttaattatatctaccgtttcttgaccacagtatcagatttttgaacctaatttgttgcaaagttcctcatctc

SEQ ID NO: 161722 - DNA, 201 bp, Homo sapiens
ttttggattttctgtttcctgtaactcaatttacgtaaaagttagtaagctcccttccatatttcagcagggaaaatttttttgtgttggcattttttacrgtaaaattttatggctaggatttatttcctagaagcttaagacttttccaactgtatgtaattatatattccttttcttcttagctggggcaggaagaaa

SEQ ID NO: 161723 - DNA, 201 bp, Homo sapiens
aaattttaaatgcagtgctctgtagctttctactgaaggcctccccaaagctttacaaaatcagtcatcagtacatcagcactctcctctgttcttcagtraaatacaaatctgcctaatggattgcttacggttctctgacagttctgatttgctaagaacatgatgtgtggaacctatggcatttctctgacctgtcag

SEQ ID NO: 161724 - DNA, 201 bp, Homo sapiens
actacaatcctgatattttaaaagggaattgaagctgtaaaaatttaatggcatataaatatattctctgaaagtaccgttaagaaaaacaagattatttmtcatttttaaatcgtgattgcctgttcatatatttcttttttgattcagcaagcaggaccaattctgacataaataacaaataccctatgaaagcatctc

SEQ ID NO: 161725 - DNA, 201 bp, Homo sapiens
gtaatctcattgctggaccagcctttgtactctcccagatccatttgatatttgatttttaattatacttcaggtctgctttttaaaaacaataacgtagktactattgtttactaattgtcactttaatttttcttatgttttaaacatgctagagaaaaatttgtccatattgtcccttaattttgtttccaaagttaa

SEQ ID NO: 161726 - DNA, 201 bp, Homo sapiens
atttgtgcttatgtaatctcattgctggaccagcctttgtactctcccagatccatttgatatttgatttttaattatacttcaggtctgctttttaaaarcaataacgtaggtactattgtttactaattgtcactttaatttttcttatgttttaaacatgctagagaaaaatttgtccatattgtcccttaattttgt

SEQ ID NO: 161727 - DNA, 201 bp, Homo sapiens
agggcaaattatcaaaaattttccataaatatgtgtagcaaagcaagtaagaatttcagatttgactctgatttctctgcttttgttgtggttaatatgtrttacagctctaacacaatttggacttatttttaatgtgctattgctactttgttttcttttccatctcataaagcagacattagtttttatacatgctca

SEQ ID NO: 161728 - DNA, 201 bp, Homo sapiens
cttgagtctccaaaaaaattacaaattagccaggtgtggtggcatacacctatggtcctgagacaggaggatcacttgagcccaggaggtcaaggctacartgagccatgttggcaccactgcagtccagcctggcgacagagtgagaccttgttccaaaaaataaaagaatgctgtgtctgaatccacactgcttgggat

SEQ ID NO: 161729 - DNA, 201 bp, Homo sapiens
aggtgtgcagtcttatttctgggttctctattctgttccattggtctatgtgtgttctcctactagtaccatgttattgtggttactgtagccctgtagtrtagtttgaagttgggtagcataattgatacctccagctttgttctttttgcttagaattgccttggctatttgggctgtctttttggttccatatgaatt

SEQ ID NO: 161730 - DNA, 201 bp, Homo sapiens
cccgatcatcctgtccaaaagagcagccaccacctgcccccactgctcctaggctctattcccttgtcagcctgtatgtcttcatggtacttgtcaatcargttttgatatgtttgtttcttttgtatgatctttctcaaaactcttttaaaattgaagcttcagatgggcaggtaattagtagtttcgttgcattcacag

SEQ ID NO: 161731 - DNA, 201 bp, Homo sapiens
gctaaggcaggagaatcacttgaacccaggaggcagaggttgtggtgagctgagattgtgccactgtcctccagcctgggcaacagagtgagactccaccycaaaaaaaaaaaaaaaaaagtttgtcagccatggagaattatgtttaaattctagctaaaaatgttatgttgctttgataagaagtgttgaattagagtt

SEQ ID NO: 161732 - DNA, 201 bp, Homo sapiens
gaccaagctcaggtagctcggcggcactgggggatacatctaaggaatttgattccagagtgtgggaagcaaataggtttttctagccttcatctactacmtttgtaaaacaagaataatgaaaatgtccatctcatttaggggtggagttgtgaggattaaatacaacaatacctgttaagtacttagaaacaatgctgg

SEQ ID NO: 161733 - DNA, 201 bp, Homo sapiens
tatgtgccagtacgcctggtgtatctgtaatctgtgctcctttagagctggtggtgtttgtctcagttccagatagagactttgagttcccatgtctagcragtgctggaatcttaaatgtgaaccttgattgcttgaagtcccaaactgtttttgtttgattttggttttaaataaccgtaccttctccagtggcagcag

SEQ ID NO: 161734 - DNA, 201 bp, Homo sapiens
ctcagggtgagaagtggggctcatcagcctgtttgagactcagctacttagtgaggcagcctctatgtactctatgtactgtattccattttccttgaaarcaagatggaaatatgtttttcatgattttccctcaactggccgttagaatcttcttatttaaagtacttaagatttccttagatctctaatcacatgctc

SEQ ID NO: 161735 - DNA, 201 bp, Homo sapiens
cacctcggcttcccaaagtgctgggattacaggcgtgagccactgctcctggccaaatttctctttcttgtaacatttccatttatttggttccactacctttttttttttttaactgtgaatttactagccatttttgtttacaatggaaactctgggaattcaaaattaacatcctcgcctgtgagctgcttatagaca

SEQ ID NO: 161736 - DNA, 201 bp, Homo sapiens
gaagtagaggggaaagccttcctataacagataatgagtctccatgttagttccatcatcaggattgcatcagccactttcttcccagatactatcagcayacagggcagaatgaggcagattttagtgtttgcctcattgacacagttataaagatgagtgttgtccctccagagtcttcagctgaattgaaagaaacag

SEQ ID NO: 161737 - DNA, 201 bp, Homo sapiens
tcaaatttaaactattttccaatctactgcttgtcattccacacacatgcagataattcagaatctgatcttcctctgcagtcttctctttagccctaggkggagtggaagtagaggggaaagccttcctataacagataatgagtctccatgttagttccatcatcaggattgcatcagccactttcttcccagatacta

SEQ ID NO: 161738 - DNA, 201 bp, Homo sapiens
gcttctacaagaatatagtgctctatattatcgaggtaatagcaggttaaattttaaatccttgtcatttgcatacatatttaaagaaattttctttatgragacgttttctcatggttttaattaatattttatttgccaactctttataaattctaaatgtattaaaacaaaaaggtggcctgtaatcccagcactctg

SEQ ID NO: 161739 - DNA, 201 bp, Homo sapiens
taaggcaggagaatcacttgaacccaggaggcagaggttgtggtgagctgagattgtgccactgtcctccagcctgggcaacagagtgagactccaccccaaaaaaaaaaaaaaaaaagtttgtcagccatggagaattatgtttaaattctagctaaaaatgttatgttgctttgataagaagtgttgaattagagttgc

SEQ ID NO: 161740 - DNA, 201 bp, Homo sapiens
ttatgaataatgtttcagtgaacattcatatacaagttttgtgtgaacatatgttttccgtttgcttgggtatacacctagtagtagaatttctgggtctrtggtaactgtgcttaactttttgagaaactgccaaagtattttcctatacaactatttattaaatgtcatgtttatgttatttttaacatgagccctact

SEQ ID NO: 161741 - DNA, 201 bp, Homo sapiens
taaatgggcagaaaatagttccttagtaatattcattgtgcccctgcaatgttaataaaaagcatgaggggtttctctgtaaaagagtggcataaagactktcaaaatattaatgagaaattttaaacttttttaggttaaatacatattttctgacaaaactggtactctgacatgcaatgtaatgcagtttaagaagtg

SEQ ID NO: 161742 - DNA, 201 bp, Homo sapiens
taggtagtggagttgtatcttcagtaaatctataactgttgcaatggttttatatgatcctatgacagataagaatattagtggatccagcattccacccmgttagtacttactgagcaccagtgtgtgctgtgtgataacactggaatggtaacagtgagtataatagggaaggtttctcttgtcatggatcttataatc

SEQ ID NO: 161743 - DNA, 201 bp, Homo sapiens
tcaagttcaaagttccacagatctctagggaaggggcaaaatgctgccagtctctttgctaaaacataccaagagtcgcctttgctccagttaccagcaarttcttcatctccatctgaaaccacctcagcctggatcttattgtccatagcattatcagcattttggtcaaagccattcaacaagtctctagggagttcc

SEQ ID NO: 161744 - DNA, 201 bp, Homo sapiens
ggtagtggagttgtatcttcagtaaatctataactgttgcaatggttttatatgatcctatgacagataagaatattagtggatccagcattccacccagytagtacttactgagcaccagtgtgtgctgtgtgataacactggaatggtaacagtgagtataatagggaaggtttctcttgtcatggatcttataatctg

SEQ ID NO: 161745 - DNA, 201 bp, Homo sapiens
atcatgcagaaaagagaacatgttgaagtaccctgaattatacaaaacatctcagaatgccctggacttcaacaccaaggtaggacacagtgccctggctgggacatgtttggtgggtctgtgtttactgccctcattatatggggtatgtggttttcaaaggccaaggatacactagcctgagacaactccagggtaccg

SEQ ID NO: 161746 - DNA, 201 bp, Homo sapiens
atgagaatgagtgatttacccaaattattcaaatgctgaacatgccttgccctgatactgcttggtgatttacatacagaacttcattgtcacttcaaaamcccctcaggttaaatagcttcactccttttagctaaacagagttccatagggattgattataaataacccaaaatgacacaactgttaatagtaatagaa

SEQ ID NO: 161747 - DNA, 201 bp, Homo sapiens
ttagggctcatgatttggtcagatttatttttttactgtgaatatcaaaatatgtgaggcatgacaaacacatacatgcatatccttggtatgatgacacrttatgcaaaacctctttctttcagtgctaggaaaagaatgtcagtgattgttcgcactccatctggaaagttacgactctactgcaaaggagctgtaagt

SEQ ID NO: 161748 - DNA, 201 bp, Homo sapiens
cacacacaattaggtagaaactcctatagataatatttttatggatataataaaaagttaataagggaatttgagagagtttcattagtatttgtgtactyggtctacataaaacttttttgactcagatttccttgctctacagttcagccacatagcgatatgggggagcatcgcactctgggtggtgttttttggaat

SEQ ID NO: 161749 - DNA, 201 bp, Homo sapiens
aaaactgcagttttgcgttaaagataaagtagtattttcagctccctgaaaaaccattcctgctgaaactgctgtagaaattgtgaagctgcatgagtggrgagtattgaatctgtggttatagtagttttctcaggtttgtttatcttgatgtttgatgcactgtgttttatagttattaaaattgagtaatattatttc

SEQ ID NO: 161750 - DNA, 201 bp, Homo sapiens
cctaaaacatttagagcagtttgctacagaaggtaagtgtaatttggcaataaagcatgattaaaatacaaagaaatcatatacttctgataccttgcagkatccttattattattagacttagagattcctaaagtaagatatcagctgttggcaatttagattttactatatgctgttcccagcctgtgtttttatttt

SEQ ID NO: 161751 - DNA, 201 bp, Homo sapiens
ttcgaagttccacaaatctctagggcaggggcaaaatgctgccagtctctttgttaaacataacaagagtcaccttttctccagttcccaacaagttcctygtctgcatctgagactacctcagcctggaccttattgtccacatcactatcaggctttagtcaaagtccttcaagtctctaggaagttccaaactttccc

SEQ ID NO: 161752 - DNA, 201 bp, Homo sapiens
taaaatcagctgggattagggttcagaagttgtgatttactgccattaaaaccactctagtgaggcaagtttcagcgtgtcagaccacagattcttccagmatgttaccctggctttaaattgagcaaatacagtcctagggttcatccattgtcttcttccttacctgctttaactgagacatgctgtttatgcaatcta

SEQ ID NO: 161753 - DNA, 201 bp, Homo sapiens
ctatgcagaactatacagataataaaagagaaatgccacatcagtttataactttccaattattttcagttaagaattctatcaggttggagacagaaatkaagagagaaaatcagtggttagttatataaatatttgtcctcctaccatgtaccaagagctatatgtcacatgagactagataatgccatctttcctaga

SEQ ID NO: 161754 - DNA, 201 bp, Homo sapiens
tcccgggttcaagcgattctcctgactcagcttcccgaatagctggcattacaggcgcctgccaccacgcctggccagtttttgtattttcagtagagacrgggtttcaccaggctggtctcaaactcctgaccttaggcgatccacccgcctcggcctcccaaagtgctgggattacaggtgtgagctaccatgtctggc

SEQ ID NO: 161755 - DNA, 201 bp, Homo sapiens
tgttccattttagatacgttagttttgcggtgtacccccgtccagtagagaccccggaaacaaaaagacattaaagtttcatgtcgctgggaaagattgcyacaaggcgtttggatttaacagccatcagcttacatataatattctcacaagggtctgacatgtttcggtgagagcatgcagaccaagagtaaggcaggc

SEQ ID NO: 161756 - DNA, 201 bp, Homo sapiens
gtacccccgtccagtagagaccccggaaacaaaaagacattaaagtttcatgtcgctgggaaagattgccacaaggcgtttggatttaacagccatcagcwtacatataatattctcacaagggtctgacatgtttcggtgagagcatgcagaccaagagtaaggcaggcttccaaatgttcaggggtaaaaaaggtaagc

SEQ ID NO: 161757 - DNA, 201 bp, Homo sapiens
agaatggtgtaacaagtaaatatattgaacactgagatatcataccctgtctcatacaacttacttaataacatcatagtattttaaaattttgtttctcytaatgaaaaaaattttttttactaatactgtcctcatttttctgcgacttttaagtttttaaataggacaataatgaagattaaaataaaacgaattatg

SEQ ID NO: 161758 - DNA, 201 bp, Homo sapiens
catgtttagttctcagtatgcattgatatatagtcaaaaaattttttataaaaattaacttctagtttatccaggtcccaactagctcttcctcctttccytctaaacaccttttttaatcgttttttttttttttattactctcttgccagagaacagagatgcaaagtttctttcttgtatcatatggctagattgagt

SEQ ID NO: 161759 - DNA, 201 bp, Homo sapiens
tctgggtgttctgccctgtctagtttcgtggagaaagtaaccatcccatgtaagagcccaattcagttcaattaaactgagatttatggagtgcctatgtstcaggacctataccgggttcagtggatcaaaagtttcaaaaagagtccattctgaagagctagtttgtcatggagtagtcccacagacaattaggatgta

SEQ ID NO: 161760 - DNA, 201 bp, Homo sapiens
tgttctgccctgtctagtttcgtggagaaagtaaccatcccatgtaagagcccaattcagttcaattaaactgagatttatggagtgcctatgtctcaggrcctataccgggttcagtggatcaaaagtttcaaaaagagtccattctgaagagctagtttgtcatggagtagtcccacagacaattaggatgtaagacgc

SEQ ID NO: 161761 - DNA, 201 bp, Homo sapiens
aagagtccattctgaagagctagtttgtcatggagtagtcccacagacaattaggatgtaagacgctagctgttatgctcataatgcacagggactaacagagaagagagcgctggacgcccaagctgttgtttggaaaagtgtcttggtactactgttccccaagctgtccaggaaggtgggtgtgaaaagagttttcca

SEQ ID NO: 161762 - DNA, 201 bp, Homo sapiens
atacagtattccagagagtaccagaagccatagaataaagatttgagtcagaggaagtgataaatgctattgataaactaggaagtcatgaagataattayattttgatgtgaatatatataccatataattgaaatttgcaagaatttttttcagctaaaatgaaagacagtaaagttagttcttaatgataaggcccag

SEQ ID NO: 161763 - DNA, 201 bp, Homo sapiens
cccagaacagagaatttggcatttgcactcctttgtctgtaggctttctcagagggaagtgttgagccagactacccaagatgtgcagctactgaaggatkcagtgggacttctcttcatgccaaggttcatatgaacttagaatttgtctctggttaaagtacaaggtggcaaattcaccacttactgctcatccaggga

SEQ ID NO: 161764 - DNA, 201 bp, Homo sapiens
atttctccagttttcggggtactctagagtaaccctggagtctcaggtttcatgaataagatcttccagtccactgagattgggtgactgagaaaaggaastggaggagaaaagagcctattatgggtaactgagattgggtgagatgagactgaaatgggaatacagcaacacaaaatgcaccttctccgaagagatacc

SEQ ID NO: 161765 - DNA, 201 bp, Homo sapiens
ttcaagaccctatcacaaccctaaaaaataattttcattattattttcttccttttttggtacaagtggacatacagtagatggcatgaggttgagaaatktgagaaagaaaaatctagactataatgtagttctctataaaatatgctttaatttgataagcttatgagtaaacttttaaaaattaagttttcacactaa

SEQ ID NO: 161766 - DNA, 201 bp, Homo sapiens
tgtttctttgaacacgtggaagttctacgttttcgtaaatcagttctttaaagcatcctttcatagttttttttcactgtttttaagctttggaagccttytatataaagctttgtccagacacttaataaataatcacttcttggttttttgttgttgttcccagcgttaacgcaactactctggaagttattcatttct

SEQ ID NO: 161767 - DNA, 201 bp, Homo sapiens
tttagttatgtttctttgaacacgtggaagttctacgttttcgtaaatcagttctttaaagcatcctttcatagttttttttcactgtttttaagctttgraagccttttatataaagctttgtccagacacttaataaataatcacttcttggttttttgttgttgttcccagcgttaacgcaactactctggaagttat

SEQ ID NO: 161768 - DNA, 201 bp, Homo sapiens
cgattttgttggaaacataaggcttgatggacatgggtatgtaaaatccgtctttataaaaacacagaatccactgtgtcatagagtattgctgtgtcttytaagtctggatacatattatcttcttgtgtgctaagtttgagtcctcaaaaccctttttaaagcatttttattctgccctgagtccttctgtgaagatgt

SEQ ID NO: 161769 - DNA, 201 bp, Homo sapiens
taggatttatttcctagaagcttaagacttttccaactgtatgtaattatatattccttttcttcttagctggggcaggaagaaagatatgaattgctcartgtcttggagtttaccaggtaaaacatctgctcagtgatttgtatggataagataaatttatatccatttttattttttcccttttgaataactagaaag

SEQ ID NO: 161770 - DNA, 201 bp, Homo sapiens
actcttctggtaccaatgtactgtattagtctgttttcatgctcctgatgaagacgtaccgagactgggcaatttacaaaagaaagaggtttaatggacttacatggctggggaggtctcacaatcatggcagaaggcaaggaggagcaagtcagatcttacatggatggcagcaggcagagagagcttgtgcaggggaac

SEQ ID NO: 161771 - DNA, 201 bp, Homo sapiens
atgtatatataaagccatttatatttccttccttgtgaattgtgtgtttatatcctttgctcattgttgtactacattgttgatctttttgtaaattgatktctggtaattctttttattccatggaaattagcctttataagttggaaatattttttcccagtttgtcatttagcttttgacttttcttgcagaagttgg

SEQ ID NO: 161772 - DNA, 201 bp, Homo sapiens
tgaactctttttaattaatggtgatatttggaggataaatatatgctatctttttcttagatttttttccttccatcttcaaaattagagaaataatgatratgatgatgatgacgtgttcactttggcccccaagggtattttgatcattctaaactactacctgctaataaagatgtattttcttacgatttggagact

SEQ ID NO: 161773 - DNA, 201 bp, Homo sapiens
ttttctctttccagttttgagaaatggtgcttgggaaattgtccactgggaaaaggtatgcactgatttttattttgttccaggagaagaaatacatagcrgtgtactctagtatatataattttttgtataatatgagcaaatgtgaagaattttactaatataaaagctatttagtaatataaacatgcatggcatctt

SEQ ID NO: 161774 - DNA, 201 bp, Homo sapiens
ggccctcttctcacagctccactaggtggtgccccagggggaactctgtgtgggggctctgacctcacattttccttctccactgccctaacagtggttcrccatgagagccctgcccctgcagcaaacttatgcctgggcatccaggcatttccatacatcttcagaaatctaggcagaggttcccaaaccccagttctt

SEQ ID NO: 161775 - DNA, 201 bp, Homo sapiens
tttgaagtatacttgagccaatgttttggatgaggtttttaatatgtttttatgttcatcttggagtgttagcttttactctgctcattttgagggaagtkattttattctctcggtttggagaaagaggatcatggtgcatttcctatacacataaaagtcattaaatagctactttagaaaagagatccctgtgattct

SEQ ID NO: 161776 - DNA, 201 bp, Homo sapiens
gttgcttgcttgtttggctttgacatataattcacataccataaaagttaactcttttaaagtgtacaattcagtagttttttagtatattcactgaattwtgcagatgtcaccactatctgatgcccgacattcatatcatccaatagagaagccccatatccattggcaatcactccctgtttctccacaccttcccta

SEQ ID NO: 161777 - DNA, 201 bp, Homo sapiens
attcaaatgctgaacatgccttgccctgatactgcttggtgatttacatacagaacttcattgtcacttcaaaaccccctcaggttaaatagcttcactcsttttagctaaacagagttccatagggattgattataaataacccaaaatgacacaactgttaatagtaatagaactaaacttcagtgtctccaaagctca

SEQ ID NO: 161778 - DNA, 201 bp, Homo sapiens
ttaaatagcttcactccttttagctaaacagagttccatagggattgattataaataacccaaaatgacacaactgttaatagtaatagaactaaacttcrgtgtctccaaagctcaccagtaccactctctgtgtttcatcccatactttattctaatacagtttgcccttacatatttgactctgaataaacgttgaat

SEQ ID NO: 161779 - DNA, 201 bp, Homo sapiens
ctataatcccacacccccagtgtataacagctatgtttttatggggttttgtttgtttatcttgtttgttttgttttgttttgagacggagtctcactctmttgtcctggctagagtacaatgttgcaatctcagctcactgcaacctccgcctcccgcctcccgggttcaagcgattctcctgactcagcttcccgaata

SEQ ID NO: 161780 - DNA, 201 bp, Homo sapiens
gcactcattcccatcccccttcttcctcaacagctctactatggagcctggaaaagctaaatacaaatagttggggttagccatgtaaaactatctggccragtatttggaaatatgctgagggcttttcaaaacactttgcttttcatgtaagagatagatacagttggtatttttgtcttctatatggcctttataatt

SEQ ID NO: 161781 - DNA, 201 bp, Homo sapiens
ttcggtcttccccacaacgccaagcttcacatggcagggaccatgtctgtttagtccactgttctagcttgaacacagttttttcaaataatgttctgatrtatctccctagtcacttcacattattattttttttttgcccaagagcatagagaaatgtttttcctttattaaattgaatgacatttctctttattgaga

SEQ ID NO: 161782 - DNA, 201 bp, Homo sapiens
tcatcagctcaaatattacattatcttgagaataaccacagactcgctcaagtcacattacatgatatttgcatattcccttctttacagtgcttgtcttsctataagtaaacaatacgtgtatatttatttgtgttcggtcttccccacaacgccaagcttcacatggcagggaccatgtctgtttagtccactgttcta

SEQ ID NO: 161783 - DNA, 201 bp, Homo sapiens
ttgaactcatgattgttaccctcaaatatgcatcttctctagcacaggtggacttgtcacttttgcccaagtggggccctatcagtatgttgctaggggtrtttttgtatctctcttttctgcgcgagccttcaacaaaatattaacttcaggatctacaaagcctagccctagaccacctcttccctcttggattctcag

SEQ ID NO: 161784 - DNA, 201 bp, Homo sapiens
aattcaatttcttgtttaatgtgagtgaggaggaaaaaatttaatattacaacaatcaagttaggtgtcattttgaaactaacatttgtatattagtgttrtgaaagcaacaaataaaatacactttcacagaattgtttttgtttaatatagtgcatgtttattagcatgttactgataattagatgtaaccttaactca

SEQ ID NO: 161785 - DNA, 201 bp, Homo sapiens
ctgttgtttgaacagcttaaaactattaatacatgccagttttatttagcataagttttgtttgcaagaagcacttttaaatgacaaaactacaactgttyagaggggccataagaattctaaacagtttttctataacttaatctttcacatccatgttacaaagaaagtaccagtgacgcttgctctcttgttcttaaa

SEQ ID NO: 161786 - DNA, 201 bp, Homo sapiens
tgaggcaggaaaatcgcttgaacctaggaggtggaggttgcagtgagccaagatcatgccactgcactccagcctgggcgacagaacaagactccatctcaaaaaaaaaaaaaaaaaaaaaaacgcaaagtacaaagtagactgatggattttaatgcaataaagtacagaaagttcattgatatagtttcagattccaca

SEQ ID NO: 161787 - DNA, 201 bp, Homo sapiens
gtccaggctcctgaggggctagtaagaatcaaatgactgaaagtatgtgaaagcaatttgaaacataaaaagcactaaaaataactaaatgtagttgccaratatccttaaggcatcctagtagaacaaatgggagtaaatgttgatggcatttttgcttgtttaatattccagggaacaagggaaactctcagtcgtcac

SEQ ID NO: 161788 - DNA, 201 bp, Homo sapiens
ctcttctggtaccaatgtactgtattagtctgttttcatgctcctgatgaagacgtaccgagactgggcaatttacaaaagaaagaggtttaatggacttacatggctggggaggtctcacaatcatggcagaaggcaaggaggagcaagtcagatcttacatggatggcagcaggcagagagagcttgtgcaggggaact

SEQ ID NO: 161789 - DNA, 201 bp, Homo sapiens
gaggcaggaaaatcgcttgaacctaggaggtggaggttgcagtgagccaagatcatgccactgcactccagcctgggcgacagaacaagactccatctcaaaaaaaaaaaaaaaaaaaaaaacgcaaagtacaaagtagactgatggattttaatgcaataaagtacagaaagttcattgatatagtttcagattccacac

SEQ ID NO: 161790 - DNA, 201 bp, Homo sapiens
tcttctggtaccaatgtactgtattagtctgttttcatgctcctgatgaagacgtaccgagactgggcaatttacaaaagaaagaggtttaatggacttacatggctggggaggtctcacaatcatggcagaaggcaaggaggagcaagtcagatcttacatggatggcagcaggcagagagagcttgtgcaggggaactt

SEQ ID NO: 161791 - DNA, 201 bp, Homo sapiens
aggcaggaaaatcgcttgaacctaggaggtggaggttgcagtgagccaagatcatgccactgcactccagcctgggcgacagaacaagactccatctcaaaaaaaaaaaaaaaaaaaaaaacgcaaagtacaaagtagactgatggattttaatgcaataaagtacagaaagttcattgatatagtttcagattccacact

SEQ ID NO: 161792 - DNA, 201 bp, Homo sapiens
cttctggtaccaatgtactgtattagtctgttttcatgctcctgatgaagacgtaccgagactgggcaatttacaaaagaaagaggtttaatggacttacatggctggggaggtctcacaatcatggcagaaggcaaggaggagcaagtcagatcttacatggatggcagcaggcagagagagcttgtgcaggggaacttc

SEQ ID NO: 161793 - DNA, 201 bp, Homo sapiens
gaatgaccctttcccctgagattagttgattccagtttattatagcttcagcatgtgcttgggactgtggtgaagacaaataatgactctgtggggctggygttgtggctcattgcctgctctgcccacacttttctttcctaggaaatatttctttcctaaaaaatatagtcctacctttcctaaggaatattctccttt

SEQ ID NO: 161794 - DNA, 201 bp, Homo sapiens
ggcaggaaaatcgcttgaacctaggaggtggaggttgcagtgagccaagatcatgccactgcactccagcctgggcgacagaacaagactccatctcaaaaaaaaaaaaaaaaaaaaaaacgcaaagtacaaagtagactgatggattttaatgcaataaagtacagaaagttcattgatatagtttcagattccacactg

SEQ ID NO: 161795 - DNA, 201 bp, Homo sapiens
tctggtaccaatgtactgtattagtctgttttcatgctcctgatgaagacgtaccgagactgggcaatttacaaaagaaagaggtttaatggacttacatggctggggaggtctcacaatcatggcagaaggcaaggaggagcaagtcagatcttacatggatggcagcaggcagagagagcttgtgcaggggaacttcca

SEQ ID NO: 161796 - DNA, 201 bp, Homo sapiens
gcaggaaaatcgcttgaacctaggaggtggaggttgcagtgagccaagatcatgccactgcactccagcctgggcgacagaacaagactccatctcaaaaaaaaaaaaaaaaaaaaaaacgcaaagtacaaagtagactgatggattttaatgcaataaagtacagaaagttcattgatatagtttcagattccacactgg

SEQ ID NO: 161797 - DNA, 201 bp, Homo sapiens
cacactgctactgaagtcaatggggttaactatcctacaagcatttgtagtaactaatttaataatactcttttccatgtacaaaatgcggaaaacttgcrccctgcactgtatcagtggttctctcaataagcttatagttgtcttaaaaaaaaaaaagaaatttaaaaggatagaatccttggattctagagttggaag

SEQ ID NO: 161798 - DNA, 201 bp, Homo sapiens
gaggtggaggttgcagtgagccaagatcatgccactgcactccagcctgggcgacagaacaagactccatctcaaaaaaaaaaaaaaaaaaaaaaacgcamagtacaaagtagactgatggattttaatgcaataaagtacagaaagttcattgatatagtttcagattccacactggcaaccaacctttaagaaactacc

SEQ ID NO: 161799 - DNA, 201 bp, Homo sapiens
ctgtaagcttttcatgtgcttccaggagctgctgcacctgcttaagaagcttacatacatacatacatgtgtatatatatatatatatatatatatatatrtgtgtgtgtgtgtgtgtgtgtgtgtgtatatatatgtatatatgtgtgtatgtatatattcttaagcttctgtatcaaaacaatatatacaaatacatat

SEQ ID NO: 161800 - DNA, 201 bp, Homo sapiens
ttgctgagaagcctttggggttagacattactttgtatagatcttcactcttttcacaattttggatcaaggtttggccagtctggcaatctccttgccartgtatttcagtttctggatctctgaggatatggaacatgcccctacacacacgcacacattacatacatgacatgtgtgctttgagttaataactataat

SEQ ID NO: 161801 - DNA, 201 bp, Homo sapiens
tccaggagctgctgcacctgcttaagaagcttacatacatacatacatgtgtatatatatatatatatatatatatatatgtgtgtgtgtgtgtgtgtgtrtgtgtgtatatatatgtatatatgtgtgtatgtatatattcttaagcttctgtatcaaaacaatatatacaaatacatatgtgtgcatatatatattcag

SEQ ID NO: 161802 - DNA, 201 bp, Homo sapiens
tgcatggtatctaaggattagggttgtttggctgtaaagagaattctattcattaagtggttaattatttgttgtatttacaatcctacaataaagtaatrggcaaaattaatttgaacaatacatgtaacccaacacatccaaaatattgtaaatttagcatgtgatcaaaataaaacattatgggtcagatttttaaaa

SEQ ID NO: 161803 - DNA, 201 bp, Homo sapiens
cagattatttcatcacccaggcattaaaccgagcatctattagttacttttagttatttttcctgatcctctccctcctcccaccctccaccctccaatgygcctcagtatgtggtgttcccctctgtgtccgtgtgttctcatcatttactcccatttacaagtgagaacacacggtatttggttttctgttcctgtgtt

SEQ ID NO: 161804 - DNA, 201 bp, Homo sapiens
aaagctctttaattagatccaatttgtcaatttttgcttttgttgcaattgcttctggcatctttgtcatgaaatctttgcccatgcctatgtcctgaatrgtagtgcctaggttttcttccagggtttttatagtttggggttttatatttaagtctttttttgtgtttgttttttttgtttttgagatggattatcact

SEQ ID NO: 161805 - DNA, 201 bp, Homo sapiens
gttggggttagccatgtaaaactatctggccgagtatttggaaatatgctgagggcttttcaaaacactttgcttttcatgtaagagatagatacagttgrtatttttgtcttctatatggcctttataattataccttgggacattgggagaggtcaggagaatgagttgaggtatggtcgagctacaaatttaatgtcc

SEQ ID NO: 161806 - DNA, 201 bp, Homo sapiens
cgagtatttggaaatatgctgagggcttttcaaaacactttgcttttcatgtaagagatagatacagttggtatttttgtcttctatatggcctttataaytataccttgggacattgggagaggtcaggagaatgagttgaggtatggtcgagctacaaatttaatgtccacaactgcccagttcagtactacgtaagtg

SEQ ID NO: 161807 - DNA, 201 bp, Homo sapiens
aagagctttcagtgcagtcagttaatatttgagagctccctgttggcagtgtgaataggctgtttccccatcttctctcccatagagaaatattcataagratctggaaatagcgaggagcagaaagaataagcacccatcctctgccgatgctgcatagatattgaataatgaaagctgcttatgtgtaaatgcctctgt

SEQ ID NO: 161808 - DNA, 201 bp, Homo sapiens
ttagacttcaattttggtgaacaataaggaaaagtagaaaatggctttctttgttatcaccaattctggcttactttcccttgcattcattcccttgcatmcattctgccctcacctatattttaaatggaaaaaaaatgaaggcaagagaggagaaaatgattgagaagaaagataaatgctgacgaggatcatgctgga

SEQ ID NO: 161809 - DNA, 201 bp, Homo sapiens
tgaacaataaggaaaagtagaaaatggctttctttgttatcaccaattctggcttactttcccttgcattcattcccttgcatccattctgccctcacctrtattttaaatggaaaaaaaatgaaggcaagagaggagaaaatgattgagaagaaagataaatgctgacgaggatcatgctggaggttgaaacagggcaag

SEQ ID NO: 161810 - DNA, 201 bp, Homo sapiens
atctagtctaggaaaataattataaatgcagagaaagagattagagtctgactgaaaatagaggcattattatactattttgagtgcttctcatatcagtraaaattaaagttttttcctctttaaattttataataaaaatttttcaataacttagtaacttagtcgttaaatcaataatatatttcaacaaatatatgt

SEQ ID NO: 161811 - DNA, 201 bp, Homo sapiens
taaatgacctcagaccatggcagataggttttaaaaagagaaatgtgagaggtgtatatgtttcgggggatcatggtacaaatcatctctgaagagttatrctaccaggatgtttcagaggggtcagagccagaaagaaccattgacttcttggatttggcaaaatcctaggaaatacataatggatttgccacttttgga

SEQ ID NO: 161812 - DNA, 201 bp, Homo sapiens
gaaattccctcccgaaatccttgttctggatgctcacaagtcacatggacctctgggcttctccaggcaccaggtccctagaagggaatcacaccctgccrtgcacgtgcggctcagctctgaaactgagcttataaagatgtgtgtggccccttcctccctcggttctgttttatgcatgtttcaagaccatgaggtccc

SEQ ID NO: 161813 - DNA, 201 bp, Homo sapiens
ctaagcattgaagatttttattgatgatgatttcacgaagaagatgcttcctgagaagaccaaaagagttaactgagacctaggaggagacaagagaaackaaatgacctcagaccatggcagataggttttaaaaagagaaatgtgagaggtgtatatgtttcgggggatcatggtacaaatcatctctgaagagttatg

SEQ ID NO: 161814 - DNA, 201 bp, Homo sapiens
aatgacttgatctaagttcttgatttataaacgtcaatgaaagtaatccagagtttacaaaagttaggttacttactaatgtgttcactcaagacttgagkttcacaaactgggatggaatttgttagttttaaaaagtgagtcctaacaatcattaacaagtatttttcctcatttgaatcgacaggtttcttgccatta

SEQ ID NO: 161815 - DNA, 201 bp, Homo sapiens
gctaagcattgaagatttttattgatgatgatttcacgaagaagatgcttcctgagaagaccaaaagagttaactgagacctaggaggagacaagagaaaytaaatgacctcagaccatggcagataggttttaaaaagagaaatgtgagaggtgtatatgtttcgggggatcatggtacaaatcatctctgaagagttat

SEQ ID NO: 161816 - DNA, 201 bp, Homo sapiens
gtttgaatgacaggccagaaatactcatgaaagaaagtatgaaagtcgttgtgccatctgtttcaataaagctcataactggagatagtttgttttttttkttttgtttttttttttttttttttttttgagatgaagtctcgctcttgtcccccaggctggagtacaatggcgtgatctcagctcactgcaacctccact

SEQ ID NO: 161817 - DNA, 201 bp, Homo sapiens
aatgacaggccagaaatactcatgaaagaaagtatgaaagtcgttgtgccatctgtttcaataaagctcataactggagatagtttgtttttttttttttgtttttttttttttttttttttttgagatgaagtctcgctcttgtcccccaggctggagtacaatggcgtgatctcagctcactgcaacctccacttcctg

SEQ ID NO: 161818 - DNA, 201 bp, Homo sapiens
cagaaatactcatgaaagaaagtatgaaagtcgttgtgccatctgtttcaataaagctcataactggagatagtttgtttttttttttttgtttttttttktttttttttttttgagatgaagtctcgctcttgtcccccaggctggagtacaatggcgtgatctcagctcactgcaacctccacttcctgggttcaagct

SEQ ID NO: 161819 - DNA, 201 bp, Homo sapiens
gaaatactcatgaaagaaagtatgaaagtcgttgtgccatctgtttcaataaagctcataactggagatagtttgtttttttttttttgtttttttttttktttttttttttgagatgaagtctcgctcttgtcccccaggctggagtacaatggcgtgatctcagctcactgcaacctccacttcctgggttcaagctat

SEQ ID NO: 161820 - DNA, 201 bp, Homo sapiens
attatcactctgttgcccaggctggagtgcagtggcgcaatcttggctcactgcaacctctgcctcctgggttcaagcgattctcccacctcagcctcccragtagctgggattacaggctcccaccaccattcccggctaattttttttttttttttcctagtagagacagggttttgccatgttggccaggctggtctt

SEQ ID NO: 161821 - DNA, 201 bp, Homo sapiens
ctcgctcttgtcccccaggctggagtacaatggcgtgatctcagctcactgcaacctccacttcctgggttcaagctattgtcctgcctcagcctcctgaktagctgggattacaggtgcccgccaccacgcccagccaatttttgtatttttagtagagatgggtttttgccgtgttggccaggctggtctcgaactcct

SEQ ID NO: 161822 - DNA, 201 bp, Homo sapiens
gagctgtcaaagcaccataccactagccattctgacaatcctgtcgtaacttattcctactccccttcaccaggcttctttaatcatctcctctaggctcttaacgctttccatatattggaggaatgtcatcttcctaaatgaaggtagggaggaacacagtcacctccttgttgaaatctaatccagttacattgtgac

SEQ ID NO: 161823 - DNA, 201 bp, Homo sapiens
ttgatatatagtcaaaaaattttttataaaaattaacttctagtttatccaggtcccaactagctcttcctcctttccttctaaacaccttttttaatcgttttttttttttttattactctcttgccagagaacagagatgcaaagtttctttcttgtatcatatggctagattgagtattggttcttagcccccacgag

SEQ ID NO: 161824 - DNA, 201 bp, Homo sapiens
tgatatatagtcaaaaaattttttataaaaattaacttctagtttatccaggtcccaactagctcttcctcctttccttctaaacaccttttttaatcgttttttttttttttattactctcttgccagagaacagagatgcaaagtttctttcttgtatcatatggctagattgagtattggttcttagcccccacgaga

SEQ ID NO: 161825 - DNA, 201 bp, Homo sapiens
agctgtcaaagcaccataccactagccattctgacaatcctgtcgtaacttattcctactccccttcaccaggcttctttaatcatctcctctaggctcttaacgctttccatatattggaggaatgtcatcttcctaaatgaaggtagggaggaacacagtcacctccttgttgaaatctaatccagttacattgtgact

SEQ ID NO: 161826 - DNA, 201 bp, Homo sapiens
cccctttttcagctcctcatcaccccagagaaatgtccaaaggaaagaagcacataaatgctgtgagctggtatctaatttgcatattttctaagatttgkgtttgtttgtttgtttgtttgtttgtttgggataacccaagccaagagttttctttgtctctgagtaatcaaaagctgctgagaataattgtaaacatat

SEQ ID NO: 161827 - DNA, 201 bp, Homo sapiens
tgtgactggtttcttgaacacattctaaatgtacaaaattacattggccttggctgtgtaatgtgaggtttacctaattctctactgaaatgaatacattaaaaaaaaaaaaaaacctgtagaatcagaatagcatctctgttacttttggctcaacaaccctaaatgctcatcacaggctgggcattgtttcttgctttc

SEQ ID NO: 161828 - DNA, 201 bp, Homo sapiens
ctctaatacagcaatttggtatttattacaaagaaattattaaagttatttttaatacacttttatttggcttttacatacaagatatttggtttgacttyagcaataacaggtatgcaccaataccagttatataaatcattgaacaaaaattaagattattactacctaatgttagccaaaaataatcaaattgttgtt

SEQ ID NO: 161829 - DNA, 201 bp, Homo sapiens
caagtacaagtaataaaaaaaaaatggctaagacataatgtatgtgttcagggaatttagaaacacagataatattttaatttaaataatttatattgtgaaacactgagttcaaaacatttttgtttttaattaatattaaatttgctgtttaacattttggggattattattgtgatcgctttagagggttcaggcttc

SEQ ID NO: 161830 - DNA, 201 bp, Homo sapiens
aagtacaagtaataaaaaaaaaatggctaagacataatgtatgtgttcagggaatttagaaacacagataatattttaatttaaataatttatattgtgaaacactgagttcaaaacatttttgtttttaattaatattaaatttgctgtttaacattttggggattattattgtgatcgctttagagggttcaggcttca

SEQ ID NO: 161831 - DNA, 201 bp, Homo sapiens
tgctccatcaggaaaatgaatgtgaagctttagctgccacgcctctactgggaggtggaatttagaaaataatgccaggagaagcaggtctgaaatttctwtgctaataaaggaatagtcttgaacactatgtgttttatagatttaaaactacaaacactgcttttctccttgctatattgcttaggaaagtcactatct

SEQ ID NO: 161832 - DNA, 201 bp, Homo sapiens
acatcacaggaaaaaaaaattatactggataaccctactgatgtgaagcagtagcgaaaccctaagaaatacctaccccccatcataatttaatagtagcctcttcttctgccttttttttttcttttcagaaaaccaaatatagaaaatttggatttttagggccaggcgcggtggctcacgcctgtaatccaagcactt

SEQ ID NO: 161833 - DNA, 201 bp, Homo sapiens
ctgtgtttcatcccatactttattctaatacagtttgcccttacatatttgactctgaataaacgttgaatatgtgcatgcatcactgtattatatatacygtggatttttaatttttcaatggtatcaatgatttaattattcagctcttgcttattttcacttgattttatcagtactagaaatttttgtgcatcagct

SEQ ID NO: 161834 - DNA, 201 bp, Homo sapiens
taaaacatttctaccactaatttttttcagaatcttcagctacttggagcaacagccattgaggataaattacaagatcaagtgcctgaaaccatagaaaygctaatgaaagcagacatcaaaatctggatccttacaggggacaagcaagaaactgccattaacatcggtaattcacctagttcacattttacatgttgg

SEQ ID NO: 161835 - DNA, 201 bp, Homo sapiens
gattggagctagaaccagaaagttgagcaaagaccaggtcacaaaaagttacctgaatgtcattaacatcattactgtaagtcatggcagacatcttttcrttacagaatatacagtattccagagagtaccagaagccatagaataaagatttgagtcagaggaagtgataaatgctattgataaactaggaagtcatga

SEQ ID NO: 161836 - DNA, 201 bp, Homo sapiens
tagtaactaatttaataatactcttttccatgtacaaaatgcggaaaacttgcaccctgcactgtatcagtggttctctcaataagcttatagttgtcttwaaaaaaaaaaagaaatttaaaaggatagaatccttggattctagagttggaagggaacttagaagtcatttaatgcaacacagtaactgatatggcttga

SEQ ID NO: 161837 - DNA, 201 bp, Homo sapiens
gatttatctggataatttttaatatcctataattttacaaaagtaattttcatttgccagaaatagtaaatttagtttctaattatgatttattttacacyatatcttataagagaatttaatccagagtatattttaaatttgctcaaagatttattttgatattctaagttaatttcataagttcgaattcagagttgt

SEQ ID NO: 161838 - DNA, 201 bp, Homo sapiens
tatgttgaatccatgcaaatgacgtgtaggcattgtgttaggtattataagtaatcgagagatgatttaaaatatacaagaggatgtgtgtaggttatttraaatactacatcactttatataagataattgagcatctgcagatttggtaaggggtcttggaaccaatcccccatgcatactgaacgatgactaaattgt

SEQ ID NO: 161839 - DNA, 201 bp, Homo sapiens
ttaaataaatggcagttacaaacattattgtattattaaactgcaagagaagaaaaagacttttagcttgaaatagtatccataataaaatgtatgtaatyggccaggcgtggtggctcacacttgtaatcccagcactttaggaggccgaggcgggcagataacaaggtcaggagttcgagaccagcctgaccaacattg

SEQ ID NO: 161840 - DNA, 201 bp, Homo sapiens
atctgatccagcaagtagggcctgttggggaaggttccaggtagcctgcttattcttaagcaggaaaattgcactgtggttccaggtcatcattccatgtygatcagaaaagccagctagcggttgaggtacagggaacagggcttagcttcttgtagaaggctagccagtctgggtagggcatcactgcccacctacatt

SEQ ID NO: 161841 - DNA, 201 bp, Homo sapiens
gggcagataacaaggtcaggagttcgagaccagcctgaccaacattgtgaaattccatctctactaagaatacaaaaactagccaggcatggtgacgggcrcttgtaatcccagctactcaggaggctgaggcaagagaatagcttgaacctgggaggcagaggttgtagtgagccgaaatcaagccactgcactccagcc

SEQ ID NO: 161842 - DNA, 201 bp, Homo sapiens
aattccatcttagtagtacctaactttaatcacacctaagttctgcagttgtgcttgtaaagtctctgtctagtttccctgttaatattcttttattagaytctttgactgttgcaagcatgactgcttgtttaatgaccccaacctaagtcaagaaacttgagcagctaatatggtccctttaatgcctaatattggaaa

SEQ ID NO: 161843 - DNA, 201 bp, Homo sapiens
agtagttgtcagaactcagtgagaccttggcttccagctctcttgctctcattatgctgaaggaacacatcacacaccagtgtgtgccacttttttgaaartaatagcactgacctttgttgagcgctcacttcgtgccaggtgcttcccttgcattttacgtgtactatctcactgaatcccagtaacaaccctatacag

SEQ ID NO: 161844 - DNA, 201 bp, Homo sapiens
tattgtaaatttagcatgtgatcaaaataaaacattatgggtcagatttttaaaaatcctacatttctttcatgtcttgggcttttgcgtggagtagcacmaggcagtagtactatggagcatcatgcaatcatgaagaggttatatggctcatgccagctctgcctccagagtataatgtatgcatccacttcctttcat

SEQ ID NO: 161845 - DNA, 201 bp, Homo sapiens
catcacaggaaaaaaaaattatactggataaccctactgatgtgaagcagtagcgaaaccctaagaaatacctaccccccatcataatttaatagtagcctcttcttctgccttttttttttcttttcagaaaaccaaatatagaaaatttggatttttagggccaggcgcggtggctcacgcctgtaatccaagcacttt

SEQ ID NO: 161846 - DNA, 201 bp, Homo sapiens
aactagtgtggaggtagacagggttggctgtgcctgctacacaaagtcataagggatgttggctccttgtgcctttctgcttcactgtcctgagagtttgwcttccataaagtcacagcatggttgctggggtgccagccatcatgtacaatagttttagccaggagaaaatggaagggtgaaaggcaaacaggtttttca

SEQ ID NO: 161847 - DNA, 201 bp, Homo sapiens
aggaaactgaagcctagtgaaagtaagtaactatctaaggtcatgttttattcttggctttgccatttaccaaatactgttcattcgactatacttaatayggagttcaaacccattgcatggtgggcttcagagttcagtctgaacccagagaaaatgggtggggcactgagtggatctcagaagcagtctgttgaatgt

SEQ ID NO: 161848 - DNA, 201 bp, Homo sapiens
tttgctgtttgttcaaaaatataatagagctgcaaaaaacagcctactactaacttgacaaagtacttaatctctgactcagcatcccagtgtacaggatrggaatgataatacctactttcagggttgtgtcctcctccctccacctttttcttcatctaaaaatttgtatcacaggattcctcataggaaagtacctgc

SEQ ID NO: 161849 - DNA, 201 bp, Homo sapiens
tctgtatgcccatcacaccttgcatggcagtggtcacggtataccagcaggtctagggagctaatttcatgattctaattagtagtagtagcatcttgagrtaaaatgttgcattaggaggtacttactgcatggagtgatttttatttatggcattagaaggttcttgaagcatttgtttcatccaccctcgcatcgttt

SEQ ID NO: 161850 - DNA, 201 bp, Homo sapiens
gcatggtgggcttcagagttcagtctgaacccagagaaaatgggtggggcactgagtggatctcagaagcagtctgttgaatgtcttgaagtccatttccrttaaataggtgagtattgtatgtcctctttgcacaagattgtgctaggaaaagctgagagagataccaaagagcatgattaagatgcgtttctttctctc

SEQ ID NO: 161851 - DNA, 201 bp, Homo sapiens
gggcacctctgacctatcacagtcccgtcggctgcccagctaatttacctgtctctttgctggttggatatacaaagcaagcagcagtctcctagtcccayagttacattcagagatctctgttctttataaatccttcagtcatttgatgaactttcatgtttatgaggtaaaataacattttccccttctgttttagtt

SEQ ID NO: 161852 - DNA, 201 bp, Homo sapiens
atctctgactcagcatcccagtgtacaggataggaatgataatacctactttcagggttgtgtcctcctccctccacctttttcttcatctaaaaatttgyatcacaggattcctcataggaaagtacctgcagtttgtcagtaaattcagctagtaaattaattatgtcagttctctttctctagcgataaaaagaatac

SEQ ID NO: 161853 - DNA, 201 bp, Homo sapiens
ctcatctgaccagtcttagtgggttcttcagtactgcccacagtgcttgtggtagatgagccatcccagagccacacccattctcagagtctcgttagggygtgctggagttcttggatgctcttttgtgggtttcctctttttctagctttgtttaatggatttgttggatatttggcaaacctggttgtggcattgtgt

SEQ ID NO: 161854 - DNA, 201 bp, Homo sapiens
attctggtagggggaacctgactcaggcagcaacaaaaccttctggtaagtgttttgctgaagagtggggaggttcagagggctgtggaaacccaaagacrttttacctaacttgaacatcatagaacacttcagaagaaaccacatgtcagcaggtcttatgggaggagttggcattggctaggcagaaaagagaagaaa

SEQ ID NO: 161855 - DNA, 201 bp, Homo sapiens
ttttttttaaaggattcctccaaccctggtctcactcctagataattttcttccattttgtgaagataagtggttcttgtttgccgataaccatttttactgtgtattctatgctttttacaatgggttgtatatttgtaactatctttcaatgcagataattaaccaattcccagttttctttcaggtaaatgttggaga

SEQ ID NO: 161856 - DNA, 201 bp, Homo sapiens
ctggccaggcgcggtggctcacacctgtaatcccagcactttgggaggccgaggcgggcagatcacgaggtcaggagatcgagaccatcctggctaacacrgtgaaaacccgtctctactaacaatacaaaaaattagccaggcgtggtggcgggcgcctgtagtcccagctactcgggaggctgaggcaggagaatggcg

SEQ ID NO: 161857 - DNA, 201 bp, Homo sapiens
gtatcctgttgtttcaatgattatgagatgacttgaagtgctcttgagaaatttaaagttcgtttgtgaacatgaattctaactggagaaaaaaataggtkatgatagtgagttggatcattgttgcagttctctatttaaaccttactatttatcttttcttctgtcttcatctgggaaaaaacccagaaaagtattaaa

SEQ ID NO: 161858 - DNA, 201 bp, Homo sapiens
tttttttaaaggattcctccaaccctggtctcactcctagataattttcttccattttgtgaagataagtggttcttgtttgccgataaccatttttactgtgtattctatgctttttacaatgggttgtatatttgtaactatctttcaatgcagataattaaccaattcccagttttctttcaggtaaatgttggagat

SEQ ID NO: 161859 - DNA, 201 bp, Homo sapiens
ttagggaaaggccactgttaatactgttactatccttagtagtaaatttccagatttgtaagtatgttaataaaatcacattaagcccttccacgtgatayttagtttgtctttttgttgtctaccaatgacttcaattcataaatcaggccagtgtaatgacccccaggtcctaaacattcagtgagtctgtaatatatg

SEQ ID NO: 161860 - DNA, 201 bp, Homo sapiens
ttggatcattgttgcagttctctatttaaaccttactatttatcttttcttctgtcttcatctgggaaaaaacccagaaaagtattaaatgcatatgcttwaatttttgactatattttaaattaccttgttagttttacctaaaactgtaatttaaaccagtttaaaattaaggtttacttctgggcatctttttatata

SEQ ID NO: 161861 - DNA, 201 bp, Homo sapiens
aattggcattagatgtttttattaacatgtattattttctataataatttcgaactttctgtctcttttgtccatttgtttgttttttttcctctgttcatttttttttttggccattttaattattttatactgggacgtgtaggtggcagtaggggagatagtgaaagtgaccaatggggaacatctcccagcagatct

SEQ ID NO: 161862 - DNA, 201 bp, Homo sapiens
tgggtaaatatgaattatgattgttatcaccctacaaaataattttgtccttaggatattttgatatctcaggagaaaaaaggttttaattatatctaccrtttcttgaccacagtatcagatttttgaacctaatttgttgcaaagttcctcatctcagaatcacacaagtttacaggccagacattgtagggaaaatgg

SEQ ID NO: 161863 - DNA, 201 bp, Homo sapiens
actctaaggttaaagaattgttggattgattttaccccctggattattttaggaatcttggagaatgacattgatttcagatttcaaaaaaagttagcagtttttttttgtttgtttgtttgtttttttttgagacggagtcttgcactgtcacccgggctggagtgcaatggcacaatctcggctcactgcaacctctgc

SEQ ID NO: 161864 - DNA, 201 bp, Homo sapiens
ggattgattttaccccctggattattttaggaatcttggagaatgacattgatttcagatttcaaaaaaagttagcagtttttttttgtttgtttgtttgtttttttttgagacggagtcttgcactgtcacccgggctggagtgcaatggcacaatctcggctcactgcaacctctgcctcccagattcacaccattctc

SEQ ID NO: 161865 - DNA, 201 bp, Homo sapiens
caggtgaatcacaaggtcaggagatcgagaccatcctggctaacacggtgaaaccctgtctctactaaaaaagtacaaaaaattagccgggcatggtggcrggcgcctgtagtaccagctactcgggaggctgaggcaggagaagggcgtgaacccgggaggcggagcttgcagtgagccaagaatgcgccactgcactcc

SEQ ID NO: 161866 - DNA, 201 bp, Homo sapiens
tgaggcaggagaagggcgtgaacccgggaggcggagcttgcagtgagccaagaatgcgccactgcactccagcctgggcgacagagcgagactctgtctcaaaaaaaaaaaaagctgtacaaggatgggcacagtggctcacacatgtaatcacactttgggaggccgaggcaggtggatcacgaggtcaggagttcaaga

SEQ ID NO: 161867 - DNA, 201 bp, Homo sapiens
tgaggcaggagaatggcgtgaatccaggaggcggagcttgcagtgagccgagatcgcgccactgtactccagcctgggcaacagagcaagactccgtctcaaaaaaaaaataaaaaaagaatggctaactgcacacgggaatactggaaggttcaccagggattatgcatgaactctcaagaattttgtgtatgggtctat

SEQ ID NO: 161868 - DNA, 201 bp, Homo sapiens
tggatataacaaaacatatatatttaaatatatattgtatgtatttataaatatataaaatattttaaatatatttaaataatataaatatttaaatatatttatcttaaataaaatatactttgtttatattttatttaaataaaagtaccaaaaagtggtttatatggtttaaaaatgtttaaacccaatgtattttca

SEQ ID NO: 161869 - DNA, 201 bp, Homo sapiens
accacgcctggccagtttttgtattttcagtagagacggggtttcaccaggctggtctcaaactcctgaccttaggcgatccacccgcctcggcctcccamagtgctgggattacaggtgtgagctaccatgtctggccaacaactatgttcttaatagacatgaagtaatattactgtcagtgtcaaaatgttcacatga

SEQ ID NO: 161870 - DNA, 201 bp, Homo sapiens
  misc_feature (1)...(201): n = A,T,C or G
gtggaaggtaagtgaggtagaatatgagatatgaacatgggaataactacagttttattcagaaagaggaaagatgaagatgcaagactagagacttattnatgtcactagcaaaatagtattattagacaaaaatatcttgttctttaaaacgaatgccaaaagagattggtggttgttacactgatttcctactgctat

SEQ ID NO: 161871 - DNA, 201 bp, Homo sapiens
atccgtgagttgtcatgcatgggttctgcctcacagcatcttgctgttagaatgaaaatcatcaagaagctaagtaactattactttgtctagaacgaaargctttagtgagtctgagcatttaaataagttattattatgcttttcttcccgcactaaatctttgtgcttctcaactccaaactacagtgagccccaagc

SEQ ID NO: 161872 - DNA, 201 bp, Homo sapiens
tgagtgaaattagtcatagagatagtgaaagtagaatggtaatagttggtggtgttcttttaaataatagcaattgatgggtcctatattgtgggaaatarggggaagagaaaaagtctgagagcactgcaaaacctgtggcatgtgaggggattacagggctgcagtattgttcttgattggcttgtgtattttccaaag

SEQ ID NO: 161873 - DNA, 201 bp, Homo sapiens
ctttctaataggcctctccttttcgtacaggtactgcatttggaaatgggaaaacctcggattatctgctactgggaaactttgtgtacactgtgagtgcrggatgtcggtctcgtttgcgtgtaaaatcaaaacctttcatctgtcctcattttatttttaaatttaaacgtgatatgagtgtttctggatttaagggtt

SEQ ID NO: 161874 - DNA, 201 bp, Homo sapiens
attacatttgtcatgggtttcacataattttcacgtatccacccacatctagatactgagttgtgactttgtcatcctcaacagaatactaagtatagatkgctaaatcattggtgtacattttttattactcatcttgtttctttttacagaattcaacaagtccaccacttaagctctcaaatgtggaacggattacaa

SEQ ID NO: 161875 - DNA, 201 bp, Homo sapiens
ccacgtgatacttagtttgtctttttgttgtctaccaatgacttcaattcataaatcaggccagtgtaatgacccccaggtcctaaacattcagtgagtcygtaatatatgtagctccttctgttaaataaaataagccagagagcccaaaaaggaaagaagtgaattccagcataaatgaccaccaacttctccatagga

SEQ ID NO: 161876 - DNA, 201 bp, Homo sapiens
atttgggggttttgggttttttttcctagatctggtttgcctttgttaatggcttttctggacagatcctctttgaaagatggtgtataggtctctataaygtggtaagtttaggacatttgataattcctgtttcattgaatacttgggagataaaggttcaccctgcatttggctgcttgacataatgaccagtttgtg

SEQ ID NO: 161877 - DNA, 201 bp, Homo sapiens
ggtttatccatatgttattatgggagccataactcactctttaagaacgtgctaacattgtccatacttgatatggtcataatgtattattaagaatgttyctagaatgttccgttaattcataattttaaagtgtgaacatttggagagtgtaagagtagagacagaatgaaacatgatttgaccataaatttgtaaata

SEQ ID NO: 161878 - DNA, 201 bp, Homo sapiens
  misc_feature (1)...(201): n = A,T,C or G
ttatgtgtggaattaaaaagttagatttggtgtggtatctgccatatatgataactgcagatgaatggacagcttttaattttccactatttgaataatanatttgttagtgcatgatgaacaattctcatttttaataaatcagtttttaaaaacactgtctcaaggagattttgctctcaaggtaaagcactccaagag

SEQ ID NO: 161879 - DNA, 201 bp, Homo sapiens
tttgtttggtgatgatctctgttctagttgattttttataataaattctcagcatcttgggggtaaaggtgggagggcccagcatttgttgagtgcttcctaagtgtcagtcattgtgctgacagctccctgcatcctcacagtctgcctgagagttaagtactgccctcctgatatataggagatgacagagaaaagctt

SEQ ID NO: 161880 - DNA, 201 bp, Homo sapiens
ctgaaaagcagctgttataattttaggacacatgtatatttcgcgtttctagtttagcattgttttcatttgggatgacatgaggtgggtgctctgcccartggtattttcagtgtttagtgttgctgaaagtctctctcttgccctggtaataaggaacaaatatatttccttttacactactataaactggagtatagc

SEQ ID NO: 161881 - DNA, 201 bp, Homo sapiens
ttgtttggtgatgatctctgttctagttgattttttataataaattctcagcatcttgggggtaaaggtgggagggcccagcatttgttgagtgcttcctaagtgtcagtcattgtgctgacagctccctgcatcctcacagtctgcctgagagttaagtactgccctcctgatatataggagatgacagagaaaagcttg

SEQ ID NO: 161882 - DNA, 201 bp, Homo sapiens
tgtttggtgatgatctctgttctagttgattttttataataaattctcagcatcttgggggtaaaggtgggagggcccagcatttgttgagtgcttcctaagtgtcagtcattgtgctgacagctccctgcatcctcacagtctgcctgagagttaagtactgccctcctgatatataggagatgacagagaaaagcttgc

SEQ ID NO: 161883 - DNA, 201 bp, Homo sapiens
tttattctaaaatagttgtttgccagtctgagaggacaatctgttaatccttaggaaagtaagatggtaaagccaggaaatggtgagaaatttagaacgcyccaatttaaagttatacaaacattaacactttttctatagaggatcaaattgggatctcattaagatggcatttgccatgttaggaatgggtcaattgaa

SEQ ID NO: 161884 - DNA, 201 bp, Homo sapiens
tggtgagggggaagtctctgtacgtctgctccttcacttcctaactttggcatgcatgtggcttcagagtgccatgatgctccctccagcccacctgtccrtgatgttccttacttggtgctgagttgactgaccacaaatccacattctctaaaagggatctgactggcctggctggtcaggtgctccatgttgaccctg

SEQ ID NO: 161885 - DNA, 201 bp, Homo sapiens
cctcacttcggccagctgagctgacttttcagccaggtggaagctgttttctttgctccacctggggccagctcttgaatggccatggttgtcaacactgwgcaacagatgctccggggtagaagcaagtaagctttccgagggcccagactcttcatcgtctccgaggagccctcaacatcctgcctgccatgtggcagg

SEQ ID NO: 161886 - DNA, 201 bp, Homo sapiens
tgccaaactgtaaagtgatagaaagtttgaaagaatactctctaaaatgggggacaaatcaaataacaatttagatagttggacaaagagctgtctttatyagtgagaataatgaatacatcttttcattcatccattcagcaagaacatttgaagaactcttgagctgccaggcattcattaggatatgtatgaggatgt

SEQ ID NO: 161887 - DNA, 201 bp, Homo sapiens
tacttgaatacccggaataggtaagcagtttctctgttcaggggccacaaatctcaatagagtgaagattctgggatacagtcctaagtgccatctttgtaaaaaaaaaaaaaaaaaatttagaccttttagaataagttggatgaggcttaacaagatacagtctataaaaagaaattctgttaagcaaacaaaatgctt

SEQ ID NO: 161888 - DNA, 201 bp, Homo sapiens
ggatgtacttgagaattaggatagattatcagcaaagtgttcctcccaaattatcaaataagctgcgtagtatggaaaacttgtattatgctaatttgggktcaatgcaaataaaatataaaactgtaaatgacgttcttcctgcctctcccaacagatggtggcgctagtaattttggactgaatttcttgaccttcatc

SEQ ID NO: 161889 - DNA, 201 bp, Homo sapiens
gtttggtgatgatctctgttctagttgattttttataataaattctcagcatcttgggggtaaaggtgggagggcccagcatttgttgagtgcttcctaagtgtcagtcattgtgctgacagctccctgcatcctcacagtctgcctgagagttaagtactgccctcctgatatataggagatgacagagaaaagcttgcc

SEQ ID NO: 161890 - DNA, 201 bp, Homo sapiens
gtaggcattgtgttaggtattataagtaatcgagagatgatttaaaatatacaagaggatgtgtgtaggttatttgaaatactacatcactttatataagrtaattgagcatctgcagatttggtaaggggtcttggaaccaatcccccatgcatactgaacgatgactaaattgtcttcatcttttagttcctctctcat

SEQ ID NO: 161891 - DNA, 201 bp, Homo sapiens
tactctctaaaatgggggacaaatcaaataacaatttagatagttggacaaagagctgtctttatcagtgagaataatgaatacatcttttcattcatccrttcagcaagaacatttgaagaactcttgagctgccaggcattcattaggatatgtatgaggatgtgttaaacttttgctgtgctggtaatcatgtctcat

SEQ ID NO: 161892 - DNA, 201 bp, Homo sapiens
aattaaggaacacatgtcataccatattagtggtagtgaacttctagttaaaaagtctatgaaatgtcttctttgtgtaatgttagttaatatttactttratatttttaactaaaaaatagtttataccaaaacgtgccaaatgtgaaaaaaatagtaataactaattttttattctaaaaattgccatgcttagaatat

SEQ ID NO: 161893 - DNA, 201 bp, Homo sapiens
taggaattcatttagagcagttaggtgctgatttttctttttttccctcttaaaataatcccctaccttgtcttttggtttagttcttcgaactaatgttyattctaacctttccagtcttaagatgattatccttgatagacgattgaagcaaagtagatgttggagctgagaagttctgccttttattatctgttaaca

SEQ ID NO: 161894 - DNA, 201 bp, Homo sapiens
gatatgtatgaggatgtgttaaacttttgctgtgctggtaatcatgtctcatatgtcagtggcttaatatataagtttatttttcacttactcaaagacasgtgatggtgggcatcagggattcagcctgaatcaagattctgctttgtggaatataggtggttattgtagcaagggtggggagaggggatggaatctcag

SEQ ID NO: 161895 - DNA, 201 bp, Homo sapiens
agctctatggaactttctgcctcattgatccctataaaaggtttgcattttattgttttgtaagacacatttcactctcttttatataaatatatatatawaaataaaatattgctgagcagttagggtaacaatgctgtaaagtagatatttcttgaaatctattgaatattcctgatttttgatggagaaacatgtagt

SEQ ID NO: 161896 - DNA, 201 bp, Homo sapiens
cttcatcagggtcctcccacacgtccccattccaagttgcggggtcccattcttttccaatcaatgtcctccctttaacagtagacacctgttgaggctaygcatgcacctttccttgcgggtcagccattcgcatgataacagcttgtgtctgtttttccacaatttcagctctttccctgcaggagataagactctcac

SEQ ID NO: 161897 - DNA, 201 bp, Homo sapiens
gagtacaaggtgatgttttgatgtacagttggccctttctatcagtgggttccacatctgtggattcagcccgctgtgagtcaagtatattcaagggggaraaaaaaattcacaaaattcctaaaagcaaaacttgaacttgccatggacgaaatactacattgaatccactagaatgaactgatgtgagggcattgtatt

SEQ ID NO: 161898 - DNA, 201 bp, Homo sapiens
atggatggcatgtgtttccatgtctgagacaagtaccaggtcttggagattaaggtccctggttgccttgtgaacagtttgagatgcctttgagattgccrgagagatgttaaagaggcaaccagatataatcgtggagctcagatgagagttttgactggtatatatttatgtactggttataattgaaactgcaggtat

SEQ ID NO: 161899 - DNA, 201 bp, Homo sapiens
tgctcagtaccataggctaaatatacaatagaaactctggcttctgccacccaatgtgaaaatcctgcttatgaagttactgactgtattagggttctctrgggggggcagaactaataggatagatagatagatagatagatagatagatagatagatagatagatagataagatagatagatagatagatagatagata

SEQ ID NO: 161900 - DNA, 201 bp, Homo sapiens
atgtctgtgtgggaagaatcattctcaacaattctttcgcagaggcattttgaatgttttgtttgcattttgtgcagttcagtagctgattgtttccacaractgagtgtatgctgccagctcttatctattcctcttgggtgttgccatgtcctggagtgctaatccacacttctagatttttctcttgcagtgttttca

SEQ ID NO: 161901 - DNA, 201 bp, Homo sapiens
tcataatatatataattgacgaaagcaggactgctttggctggagtaagagtagagaggagatccaaactggctttcccctcagcctccaccttgccctcrtgggtgctccaggcagggcttgttgtgactctgaggatccactaagcacagtttgaaaaccatgtattacatttgtatgtggacttttagaaaacaaatt

SEQ ID NO: 161902 - DNA, 201 bp, Homo sapiens
cttacagagttgtctaattgaggtaaacttacacctgagccagcaattgtgctcatagttatatagcagaaatggaagtttctgtttctaaaaagacttgkaacaaaatgctcctatcagctttattcagagtagccaaaaactagaaaccaaaccaaatgcccatcaatagaagaatggataaacaaattgtgatacagt

SEQ ID NO: 161903 - DNA, 201 bp, Homo sapiens
caacaattctttcgcagaggcattttgaatgttttgtttgcattttgtgcagttcagtagctgattgtttccacagactgagtgtatgctgccagctcttrtctattcctcttgggtgttgccatgtcctggagtgctaatccacacttctagatttttctcttgcagtgttttcatatgcacactgtgattctgaaaact

SEQ ID NO: 161904 - DNA, 201 bp, Homo sapiens
tttagaaaacaaattcctcaaaagatcagtacatcattgtgcccgtatgcaagatgtttctgaacatatttgaattgatatgtcattgccacattaatggyagtattatattcacaacattcaaaatgtaaaagatttgtaaagtttttcctaaaataataatttagtacaaaataagaggaaatgttataataggattaa

SEQ ID NO: 161905 - DNA, 201 bp, Homo sapiens
ttggaacaaaatgctcctatcagctttattcagagtagccaaaaactagaaaccaaaccaaatgcccatcaatagaagaatggataaacaaattgtgatayagtctcacaatggaacatctaaacaataaaaaagaatgagttattgattcatcaacagcatggatgaaaaatgaatcaaaacatgaatcaaaaacattat

SEQ ID NO: 161906 - DNA, 201 bp, Homo sapiens
taatatatcaggagccagggtgatatcacttctttttggtctgagcttctattctttgttaaaatttgtttacttttattctaacttatttctaagacacrtaaattatgttttgtctcatattcatactatgctactagattcctttgaaaattaatagtatagaagtctctggtctttcttccttattttataattaaa

SEQ ID NO: 161907 - DNA, 201 bp, Homo sapiens
catcactgattaaagcagtatttccctggtgataagatttttatttttctcttattatgatgcgtggattgggaaacttttttttttaatggaaacttatycaatgcttttatctgttcaagtttttctaaaataggttatgggttagaggatcatttctgagcttaagagtaaactcagaacactgtaactctgctgtca

SEQ ID NO: 161908 - DNA, 201 bp, Homo sapiens
accttcccaacttggaacattcctattttgaatagagtcaacaaccttgctttgtctcatagaaactcggaaattgaacttaagaagctcaagcctattayttaaattcattttgagaatgttaaatgccttggtttaaagacaatgaaatgcaatttttgaatgccttgattttaaagcattttggtagaattatttcat

SEQ ID NO: 161909 - DNA, 201 bp, Homo sapiens
tcatttgtgctaaaaatgaaatgaaaatttacatgatgtatgggtgatttcgtggtttaaaattccagtagtttcctgttctatttgcttaagaacatttrtagttagctcatttaattagacctgccactttctgagcatttactaagctccgcaattttcactctttaccctgattatttagttggagggcctctaaag

SEQ ID NO: 161910 - DNA, 201 bp, Homo sapiens
agtattatatatagtttgaggtcaggttatgtgatgcctccagatttgttgtttttgcttagtcttgctttggctttgcaggctcttttgtggttccatasaaaatttaggattattttttctaattgtgaagaatggtggtggtattttgatggaaattgcattgaatttgtagattgcttttagcaggatgtcattttt

SEQ ID NO: 161911 - DNA, 201 bp, Homo sapiens
ttttttttcctagatctggtttgcctttgttaatggcttttctggacagatcctctttgaaagatggtgtataggtctctataacgtggtaagtttaggayatttgataattcctgtttcattgaatacttgggagataaaggttcaccctgcatttggctgcttgacataatgaccagtttgtgcgctttagatgtttac

SEQ ID NO: 161912 - DNA, 201 bp, Homo sapiens
cacagcactattaagaattgcttcagtaactgctgtcctaagtgattgttgagaatgttctgaatttcgatgcttattttattaccccaacttcaaatagwacttagccatttgaacttcctaacttcctagccatttaaagacctagataagttactttatgcaaaaaaaaaagtagaattagaatattattctaattgt

SEQ ID NO: 161913 - DNA, 201 bp, Homo sapiens
acagcactattaagaattgcttcagtaactgctgtcctaagtgattgttgagaatgttctgaatttcgatgcttattttattaccccaacttcaaatagawcttagccatttgaacttcctaacttcctagccatttaaagacctagataagttactttatgcaaaaaaaaaagtagaattagaatattattctaattgtc

SEQ ID NO: 161914 - DNA, 201 bp, Homo sapiens
gttcttggataagcatgttctttaaatgttttaagtatcaagcagagaatagtaatctcaagaaagagaagtgaaatatcaaaaatattcattgtgttgtrccagtgtattgttaagacactggcatttattttcatttttgaggtttctaagatggtaactcaaaattaataaacacttcaaaggtacttggactgcctg

SEQ ID NO: 161915 - DNA, 201 bp, Homo sapiens
ttctgttttaacataatgtactctgttttgagtcacattgatgtaaattgattcaagctttacatctgtgacagctaaaagaaattgcaaaatgatttgcrtaatattgtgagacagaaaagttgttttacaaaagcattatgtcaagaggttgctgagtgactgcaacttgctcatatccaagtattctgtatgttaaac

SEQ ID NO: 161916 - DNA, 201 bp, Homo sapiens
atatttaccactaaaaatgttccctctttgctataaacttgttaatttaaatactaggagactccattcgttataaaacagttattcaaagcctacaatgygtaggaaccaaatactgagactatgttagtgagtaaaactagccgtgatggagcttatatccaatagaagagatcgacactaatcaagtaatcatactgg

SEQ ID NO: 161917 - DNA, 201 bp, Homo sapiens
tgaagagtttgtgtctaattccggtcaatccacaccaccactgctgaggtgacagttgccatattataccccattggctgggtaaggaacagttgtcacaygtgtgtcccagagcatagtgcagcttcccaagaagttattggaaacccactttaggcccaaggcccctttcaactctgaaatgcacccttaatcttgaga

SEQ ID NO: 161918 - DNA, 201 bp, Homo sapiens
agagctccctgagacctagaattgcagataaatgctttctaactagtctgcccccttgccattctcccccacaagtttgttgacatttctgagaggcgcaygccatgcctcgtgccctctttgcatctctgccaccaataccttctgatgagtcagcacacgcataaaatgacagtttttaggaaacctactatgtgccag

SEQ ID NO: 161919 - DNA, 201 bp, Homo sapiens
ggggaaatgtgaaaagttagagacaaaactggtttcttcagagtgagggggagctttcttatacagaaaggaaggaaatacctctgtgggattttattttyccccccctcttcatccaaaaaatacaaagagactctctgtctttaatgcgaatgtcggctttaaatcttttaggtttggattaactctgcaaaagaaaaa

SEQ ID NO: 161920 - DNA, 201 bp, Homo sapiens
caaatggaaaacttaggaactcatttgttttacatttgttccaacccatattatagtcaggtacgcacaactatattcaacttcaggctttgtatgatacratctttgagcgaacagagttagttacactcaccgctcttctgcagtgttaatggagtctgatgagttacactcgatgctgtaaatttagatggaagccat

SEQ ID NO: 161921 - DNA, 201 bp, Homo sapiens
tagtcaggtacgcacaactatattcaacttcaggctttgtatgatacaatctttgagcgaacagagttagttacactcaccgctcttctgcagtgttaatrgagtctgatgagttacactcgatgctgtaaatttagatggaagccatggaaaacctctaggtgaaccggagagaaaatagctttcctgggcactcagatt

SEQ ID NO: 161922 - DNA, 201 bp, Homo sapiens
tggaagccatggaaaacctctaggtgaaccggagagaaaatagctttcctgggcactcagattctcacctttcctctgaccttctgtttcttcttcttacscactgctataaaaccttggcttatgcaactcttcaaacctacctagacttagactaactcacttgcttattgtgtaattttgtaggtgctcttgggagga

SEQ ID NO: 161923 - DNA, 201 bp, Homo sapiens
gaacaggggagactgtatgccagtggtagacatcgttggttcaagtcattggccgacatcagcatatcattaaattatagaggatgtgctcagcttaattyggtaacaaatttcgtaagctgaaaatatttcaatactattattaaacagtagttattatagataattctctcaggcaatctcctttttgaagtgagttat

SEQ ID NO: 161924 - DNA, 201 bp, Homo sapiens
gactgtggtgaagacaaataatgactctgtggggctggcgttgtggctcattgcctgctctgcccacacttttctttcctaggaaatatttctttcctaaraaatatagtcctacctttcctaaggaatattctcctttgagagaggccctgctgcctagagggccttgttctgaactgcagcctttttggcctcagctga

SEQ ID NO: 161925 - DNA, 201 bp, Homo sapiens
gagaggtgcctaccagctccactggctgagagcctcactccctgctttcagtgcagatctcccttcctcagtatcacacctggtcagggcacaacagagcsaagcgttctgcatacattcagcttcatgtacaatatctttccaaagcttttctgtaatgcctgggtaaagaaagcctatgttgtctgtgaaatcctgtgc

SEQ ID NO: 161926 - DNA, 201 bp, Homo sapiens
gtcattggccgacatcagcatatcattaaattatagaggatgtgctcagcttaattcggtaacaaatttcgtaagctgaaaatatttcaatactattattraacagtagttattatagataattctctcaggcaatctcctttttgaagtgagttattaaagcaaaatactaaatcaacctttcatacttttctagtacat

SEQ ID NO: 161927 - DNA, 201 bp, Homo sapiens
taaggatacaatgtgcctctcaccctgtgcccctcctacttggaaagctttcagtggttggctgccaagcagagcgcagggtcctctgggacctggcctgygtgcttcctcagcgtggtttctcgtccgccttctgtctgtgctccagcagcactgccctgtttgctctcccctgcacacatgacaccgtttctcacaccc

SEQ ID NO: 161928 - DNA, 201 bp, Homo sapiens
aggatgtcatttttacaacattgattgtacccatccatgagcatgggatgtgtttgcctttgtttgtgtcgtctgtgatttctttcagcagtgttttgtarttttccttgtagaggtctttcacctccttggtcaggtatattcctaagtatttttatttttttgcagctattgtaaaaggggttgagttcttgattctca

SEQ ID NO: 161929 - DNA, 201 bp, Homo sapiens
tcagcttaattcggtaacaaatttcgtaagctgaaaatatttcaatactattattaaacagtagttattatagataattctctcaggcaatctcctttttraagtgagttattaaagcaaaatactaaatcaacctttcatacttttctagtacattaaaattttaatcctacctatgtgccgaggtaagatccttgtgag

SEQ ID NO: 161930 - DNA, 201 bp, Homo sapiens
tttaaccttttcactctttttcatttaggttaatgaccctttgcaatattctcccaatttgaaacagccggcaaatgttccttatctaactttttatatgktagtaacagaactttgtaagtgtgggtgctaattatggagaagttttatgctacttttcatttttgttttctagcactgcaaaatacaacataatcacat

SEQ ID NO: 161931 - DNA, 201 bp, Homo sapiens
aagagaaggcacagtggtaggagtggagaccatgggcatttgaggcacttcctcacataacttacttgtgccttcaggacctgctcaagcctgatcacgtrtataccacttcaatttgatgatgcagtgctgctggtgcatgacccacttgatggctagatgggtcagaaagtacccagttcatgatacgcagttcaggtc

SEQ ID NO: 161932 - DNA, 201 bp, Homo sapiens
atgtatactttaacattgacatgaatgagaaatgataaaaaccttgagaaacataagctaaatcttttttggtatgagtgctctcttgttttagtaatctyattcacattttcacagttgttctttttgcttttaaactttagaaacgacataaagctgataatgcagtgaacaagaaacaaacgcaaggtaggaatttta

SEQ ID NO: 161933 - DNA, 201 bp, Homo sapiens
atgtgtaggcatggctagccgacccattttcattttaaaaacatactatacatgtaatgcagaaggccacatctttcttctgctttttctcaacactataaagaaggtagaaaattaatttttctcattctaaacgtcagtgtcttccgctagaatgtttggatacagtaccgaatttaatccttttagctatattactta

SEQ ID NO: 161934 - DNA, 201 bp, Homo sapiens
gttgttctttttgcttttaaactttagaaacgacataaagctgataatgcagtgaacaagaaacaaacgcaaggtaggaattttacatgcttttttctcatatttgtcaaacctacttgtagtatatacaaacacttcaattacatataattcaattgcaaatagtgtgcatctcaagtttttgttttggggtagattgat

SEQ ID NO: 161935 - DNA, 201 bp, Homo sapiens
tgtgtaggcatggctagccgacccattttcattttaaaaacatactatacatgtaatgcagaaggccacatctttcttctgctttttctcaacactataaagaaggtagaaaattaatttttctcattctaaacgtcagtgtcttccgctagaatgtttggatacagtaccgaatttaatccttttagctatattacttat

SEQ ID NO: 161936 - DNA, 201 bp, Homo sapiens
tgcttttttctcatatttgtcaaacctacttgtagtatatacaaacacttcaattacatataattcaattgcaaatagtgtgcatctcaagtttttgtttyggggtagattgatttttgctttgtggcatttgttaggatgacacttaaactcactttaaagtgatttatagtgataatacttttgaaagccaacatttta

SEQ ID NO: 161937 - DNA, 201 bp, Homo sapiens
gtgtaggcatggctagccgacccattttcattttaaaaacatactatacatgtaatgcagaaggccacatctttcttctgctttttctcaacactataaagaaggtagaaaattaatttttctcattctaaacgtcagtgtcttccgctagaatgtttggatacagtaccgaatttaatccttttagctatattacttatc

SEQ ID NO: 161938 - DNA, 201 bp, Homo sapiens
aacatgtaaaagtacaaagagatgatctgtgtggaagatgaaggatttggactacatgatctcaattatcttcggatttttgtggcaaatcatagtttctrtgtcaagtgctataaaaattggtaaggagagaaaactgtggtgtatcttgagctagaccttgaattttaggaggacattggatgaacagagaggaatgga

SEQ ID NO: 161939 - DNA, 201 bp, Homo sapiens
actttctgagcatttactaagctccgcaattttcactctttaccctgattatttagttggagggcctctaaagtgagacacaacgtgatccattggggtargcaagaaaatattagaacttctatttgttttatttcatcttttttagtttttgcattttataatgtgaataatttattaattttaacaatgttttacaaa

SEQ ID NO: 161940 - DNA, 201 bp, Homo sapiens
atcagagtatactcatctatattccaagaagacactagcctcaagtttgtgtatttcctttcttcatttctgtattctggttttgtatttcaagaacacartaaatgggggatggggtagaagtacgtcctcatttctagggagcctaccagcactgcagatgcagcaggcccatgcagcaagtgttgaacagcaaggttc

SEQ ID NO: 161941 - DNA, 201 bp, Homo sapiens
gaattctgaaaagacctcatatttaattttgctaatacaactgtacataagatgttattgactgtgtgtgtgtgtatatatatgtacgtatatatgtgtgkgggggggtatatgtgcatatatgtgtatgtgtatatatgtgcgtatatatatgtgtgtatatgtgtgtatatatctatataaaataatggaaattgtgtg

SEQ ID NO: 161942 - DNA, 201 bp, Homo sapiens
gaaaagacctcatatttaattttgctaatacaactgtacataagatgttattgactgtgtgtgtgtgtatatatatgtacgtatatatgtgtgggggggggtatatgtgcatatatgtgtatgtgtatatatgtgcgtatatatatgtgtgtatatgtgtgtatatatctatataaaataatggaaattgtgtgcgtttgg

SEQ ID NO: 161943 - DNA, 201 bp, Homo sapiens
gttcattaaatccctgttttcccctagtgcctttacctgagctctcctcttgttagaggcagctgcactctgatggaattccccgtgtgaggtggcattcrggggtctgtcagcacagccatattactggcacctgtccctgcctggctctgtgccttcaggttgaccaaaagatctggctttcctgttccaaggcatgcg

SEQ ID NO: 161944 - DNA, 201 bp, Homo sapiens
atcagagggtaagccaggggtcccagagtcactagctgacctcaggccttttcccagagggatgtctggagggctgcctacctttgagccattggcatgtmcacctcagtgtgagtggccccacattacaactctttctggaaaaggttattgaccctggaccttgtgatgaactttgaaatggaattgaggagaccataa

SEQ ID NO: 161945 - DNA, 201 bp, Homo sapiens
tgagaccaagctcacaacagggtagagctgaaaggggaagcactctaggccttcttgaatagaagtgcttcccagttgagagcacaccagtcccattggcmaggctccctaaatagagaggtggcatggcgttgatccatgcaggaaaaatttctgtctcttcagagcaggtgtacagagagggactcctatcatataggc

SEQ ID NO: 161946 - DNA, 201 bp, Homo sapiens
cagtcccattggcaaggctccctaaatagagaggtggcatggcgttgatccatgcaggaaaaatttctgtctcttcagagcaggtgtacagagagggactmctatcatataggctgtcaatatttaactcccgggacagtacctcaataaaagtccttaaattaataactcttgggggcagaagaaagatcctgagatctg

SEQ ID NO: 161947 - DNA, 201 bp, Homo sapiens
atgacacctggaggcacattcccaactctacactcttttccaagtccaattccaacttttcagtcagcatgcttaaatgagtctgccagagtatcccactrctatctaaacttctgagtatctagaacttccctgatacttttccgctgtcaatattcttcttgccttttccatttacgtttagaccctcattctcccagt

SEQ ID NO: 161948 - DNA, 201 bp, Homo sapiens
aaacttctgagtatctagaacttccctgatacttttccgctgtcaatattcttcttgccttttccatttacgtttagaccctcattctcccagtaacccaratttgaaacctcagggtcatttttgaaaccacttttatttggggccctctgtgtttttattttcattttcattgtccttttcctagatcatattcagata

SEQ ID NO: 161949 - DNA, 201 bp, Homo sapiens
tgaaggatttggactacatgatctcaattatcttcggatttttgtggcaaatcatagtttctatgtcaagtgctataaaaattggtaaggagagaaaactstggtgtatcttgagctagaccttgaattttaggaggacattggatgaacagagaggaatggagaagatatttttatgtgtgggttgagtgggaaaggagg

SEQ ID NO: 161950 - DNA, 201 bp, Homo sapiens
gtttcagccttgctttccatgttgttctcctatgctttgtccaaatgaacctttatgagccggctgtcatccagtttcacacagattctcttgcccacaayttcacttgggaagatcaagtcctcaagaattgtgtcatatacagctcctaggatgtttttgcttattttttgtatggctttttcaagctggcttaggcag

SEQ ID NO: 161951 - DNA, 201 bp, Homo sapiens
gatatttttatgtgtgggttgagtgggaaaggaggaagaggggtttttcaggaaaataagactgtaggactcctttgctgaaccattattagactgccagrcgcagaaaggagattcacatcagagggaaacaaaatcatgatttaaaaggtaggctgaggttgaattgtatagggtcttgaaggctaagccaaggggatt

SEQ ID NO: 161952 - DNA, 201 bp, Homo sapiens
tgatattttctgaagagaaaatgaacagcaatattgtagataaactaagctttcttgtgtgaacaccataataaatatctatactaggcggagttctcttyttagtgcctttcataggtctatttgctaattagtgcacacatgcacatacatgcataatcaaatacacaccatcaatagaaacggtccctatttaaacta

SEQ ID NO: 161953 - DNA, 201 bp, Homo sapiens
tcctccatcaatgtatactttaacattgacatgaatgagaaatgataaaaaccttgagaaacataagctaaatcttttttggtatgagtgctctcttgttktagtaatcttattcacattttcacagttgttctttttgcttttaaactttagaaacgacataaagctgataatgcagtgaacaagaaacaaacgcaaggt

SEQ ID NO: 161954 - DNA, 201 bp, Homo sapiens
ctgcaccagtttatttaagggacttgagcatccatggatttgtatccatgggaggtcctggaactaatccctcatggatattgaggggggactgtactttstttcagatcttataagtcccatatccaagaaattatggcttttatgttggtagttgaatttgtttcctaagagaatagtatatttttgttttcccctttg

SEQ ID NO: 161955 - DNA, 201 bp, Homo sapiens
ttgaggggggactgtactttctttcagatcttataagtcccatatccaagaaattatggcttttatgttggtagttgaatttgtttcctaagagaatagtrtatttttgttttcccctttgctgcctttgagtattggtcttcttggtttggcagttgataggagataacaaaaatgttcgagtaggatactgtttgctgt

SEQ ID NO: 161956 - DNA, 201 bp, Homo sapiens
tcctgtgaagtcttgtgtgtccacctaattatccaacccgttgtaattgacacatctgtgccatggagtattttccaaaaatgagttaaatatctctgctwttcattaaagtatttatggcatgttgagtggaaaaccaagtggcagagaaattttaaaagggaaagaaaaaacaagaatgtccatgtttgtctagagaaa

SEQ ID NO: 161957 - DNA, 201 bp, Homo sapiens
ttttaagacttgctatgtaagctgctgttttcattccaagtaacaagttgatggtgagcttctagaggagttaacaatattttgtagtttttgtacatcakgtttttttttgctgtatcttaattttttctcaatgtgaaattttataaatgaacctgccaaattttagttcagaaggattcaagtaagatcttctagttt

SEQ ID NO: 161958 - DNA, 201 bp, Homo sapiens
tatatttttgttttcccctttgctgcctttgagtattggtcttcttggtttggcagttgataggagataacaaaaatgttcgagtaggatactgtttgctstcagataattcagattgcttaacatgaaagccatctgttattaggccagaatgaaattcaatttgcttttctgaattgaggcagaagtgggtgtatagga

SEQ ID NO: 161959 - DNA, 201 bp, Homo sapiens
aaagtatttatggcatgttgagtggaaaaccaagtggcagagaaattttaaaagggaaagaaaaaacaagaatgtccatgtttgtctagagaaaggtgtgygaggattcatcagttagtactccttactgtgagaaactggccttgagaagaggaatgtcagcttttaccttgtatacatacctgtcttgctggaaacatg

SEQ ID NO: 161960 - DNA, 201 bp, Homo sapiens
tggtctttgatcctttttctgatttagcttctcattgctatattttcacttttacaagtcactaagtttcaatatttaaaaatttcccccttcagtagccaaaaaaacaaaacaacagctaatatagtaataaatttatccttagctacaggagataagcttcaatgcaatgcagccataaagtatggctcctggacttag

SEQ ID NO: 161961 - DNA, 201 bp, Homo sapiens
tatattatcatttaacccttgcttcaccttctgtcaatacaatagtttgtctactgatccctttcattactcaaagcactgccctgttcagaatgcgctcrttttccttgtatctaaccttactttcatttcctctgatctcttccctcagtatttgaactcacattttggcacagcctcctccatgtgtctacacacaca

SEQ ID NO: 161962 - DNA, 201 bp, Homo sapiens
ttctgagaaacatgacattaggcaattttgtcattgtatgaacatcatagagggtacttgcacaaacctagatggcatagcctattccagactcaggctayacaagatagcctattgctcctaggctacaagcccttatagcctgttattgtactgaatactgtaggcggttgtaacacagtggtatttgtatatctaaac

SEQ ID NO: 161963 - DNA, 201 bp, Homo sapiens
tctcttccctcagtatttgaactcacattttggcacagcctcctccatgtgtctacacacacaagaggccatctctcattgttttctctgagatgagttgktctgccaaatatatctttgcagaaatttataaattacaaatttataattgttattctaatatgcacattgaagccagtccccatatgaatttattgtggt

SEQ ID NO: 161964 - DNA, 201 bp, Homo sapiens
agagggtacttgcacaaacctagatggcatagcctattccagactcaggctacacaagatagcctattgctcctaggctacaagcccttatagcctgttaytgtactgaatactgtaggcggttgtaacacagtggtatttgtatatctaaacacagaaaaggcacagtaaaaatatggtctcacaatcttatgggcccac

SEQ ID NO: 161965 - DNA, 201 bp, Homo sapiens
attataaatataaattgtctttggcccaatatatccaaaatattatttcaatattttgttataaaaatttatgagtggtagtttacattttttgtgctacrttttctaaatctggtgggcattttatagtgcatctcaatttgtactatttcatgtgctcagtagctacatgtgactagtggccactgtattgaacagcat

SEQ ID NO: 161966 - DNA, 201 bp, Homo sapiens
taaaaatatgctgtcgttttttatgaaatgccatgatggctagcttgtcaatatttcaagtggaatgacaacttcatctaaaatcacaacatgggggcctrggaaaggatggatggagttcaggtgcaaactaaggtatttgggaaaatttgtaaatgcttcctaatgagtaaatttgctttttaaagccccaggtgtatt

SEQ ID NO: 161967 - DNA, 201 bp, Homo sapiens
aagatgtgtgtggccccttcctccctcggttctgttttatgcatgtttcaagaccatgaggtccctacgcagacactgagttttatttccagttttaaggtttttttttttttttttcttaagtcacatatctttcctcagcttttttcttctaactaccttcatactctctcttttcccataaggactgtggttcagctt

SEQ ID NO: 161968 - DNA, 201 bp, Homo sapiens
gaattttaaaaaaaggagtcaaaaatgactaaagttttgggccctgagcccaaaacagtggtgccatttaccgaaatagaaaacactgggatgaaggaatraaaaccagcttgcatcttagaaaggagtgagaaagtcccatgtgtcaaaaatacatatgtttgtagacatttattttattctcttagagtattgcattca

SEQ ID NO: 161969 - DNA, 201 bp, Homo sapiens
aacatgggggcctgggaaaggatggatggagttcaggtgcaaactaaggtatttgggaaaatttgtaaatgcttcctaatgagtaaatttgctttttaaarccccaggtgtattccctggacgatggtctgtatacattctgcatatgagaatgtgtgggagatagagctgcgatccttagcagcccattgatcaactggt

SEQ ID NO: 161970 - DNA, 201 bp, Homo sapiens
ccaaatatggttgagttctgtgtctcttcctttaaaacacaaactttttatactgcttggtgatggacatttcacagatgttttaaagggatttttgaatrctatgttgactgatgcttgtccttcagctgggcaaattgaactcctgttgttatcaataggagtctaagaggcatgacagtaaaggtagattttaatttc

SEQ ID NO: 161971 - DNA, 201 bp, Homo sapiens
ctgctctgttcggtagacctgaacatatattctgccacgtgtatgttggcttacctataaatggtttttagaaagtagtgtttcagtgatcctagggactkaaaattaagcatatttatggcctaagtaatttcagacatctataagctttataatattttcagattgtcacaaagatctgagtattatgcaaatactaaa

SEQ ID NO: 161972 - DNA, 201 bp, Homo sapiens
aactcgtggatggagggtcaggctgtgcaggtgagggagaggcaaggaagccggaagtgcagtgctgccctgggcacctctgacctatcacagtcccgtcrgctgcccagctaatttacctgtctctttgctggttggatatacaaagcaagcagcagtctcctagtcccatagttacattcagagatctctgttctttat

SEQ ID NO: 161973 - DNA, 201 bp, Homo sapiens
tcattcatttagaaggctcattaggaaacaaaagtatcctaagatgacattgcagactctcccaaatctggcacctttagtctccatacatggattcccartgaaaaacctttactgtagtcaagtcagtctctttgttcctgccaaatatatatgctcctctatcactccactgaccttaaacattcattaaacaatgac

SEQ ID NO: 161974 - DNA, 201 bp, Homo sapiens
acatgctagcaaaagaatgaggaagatttgcaagctagccatctccctagagtcttgaactaaagcaagtggctctttgattttttatgtggttttttttktgtgtgtgtattccccttatccccagtcccattctatttcaccttagaaaaaatattctcaagtgtttcatatgttcccatccatttgctgtactttagt

SEQ ID NO: 161975 - DNA, 201 bp, Homo sapiens
cacccagctaagtttttgtattttcagtagagatggggttttatcatgttgcccaggctggtctcaaactcctgagctcaagggatccacctgcctcagtstcccaaagggctgggattacaggcatgagccgcccgccaaaaaaattttttacctttatttttctacatgtttttgagacatatccatgtcactatatgt

SEQ ID NO: 161976 - DNA, 201 bp, Homo sapiens
gctggagtgcagcctgatcttagctcaccgaagcttcgacctccaaggctcaagctgtcctctcacatcagcctcctgagtagctgggataacaggcctgygccactactcccagctaatttttaaacttttttttttttttttttagagacagggtctgcctttgttgcccaggctgttctcaaactcctgggctcaagt

SEQ ID NO: 161977 - DNA, 201 bp, Homo sapiens
ccaggctggtctcaaactcctgaccttaggcgatccacccgcctcggcctcccaaagtgctgggattacaggtgtgagctaccatgtctggccaacaactrtgttcttaatagacatgaagtaatattactgtcagtgtcaaaatgttcacatgagaagggcttaaattatgtgtttatttttcacagccaactgcaccta

SEQ ID NO: 161978 - DNA, 201 bp, Homo sapiens
cagggcagtaaaaccttaaagctccaaaatgatctcctttgactccacgtctcacatccaggtcaagcatgcaagaggtagggtcccatggtcttgggccrctctgccccgtggctttacaggatacagcctccctcccagctgccttcacaggctggcatcaggtgcacaatgcagtcagtggatctaccattctgaggt

SEQ ID NO: 161979 - DNA, 201 bp, Homo sapiens
tttattttacaccatatcttataagagaatttaatccagagtatattttaaatttgctcaaagatttattttgatattctaagttaatttcataagttcgrattcagagttgtatactctcttacagaatgatattcttaaaattgtttcacttaaaaatacataaaaactaaacacaaatcatgtattttttggttttaa

SEQ ID NO: 161980 - DNA, 201 bp, Homo sapiens
ccatgttattttatatcttccagtctttgcatttgctgttcccctgtttgggagccccttcttacagactaggcactccaattcccagctttccaaacccratgtagattcaattttttcagctgtttgcattcacaatatttaattcctagcctactatctctgtactattatactctgtttatactctgtataaacttc

SEQ ID NO: 161981 - DNA, 201 bp, Homo sapiens
atggaatcagttggtctgttctatagggatagggaccaagcattaatattttatctcctaggtaattctcatgtgcagtggtattgaaaacactggtatasaaccttgaatttacttgctggcagagaggatgggaataaattgtatacaactatataggttgcgagccaagaaaccaagagtattagctagccaagtgat

SEQ ID NO: 161982 - DNA, 201 bp, Homo sapiens
aaaaataaagcagggttgggagtttctgttctttcaggactcaatgatgaaggtgggtttaagaatgaacatgagaaaagtgaatatgatgctgttaaatmgtccctatgaaagacattagtggtttagactaggatgatggtagtgaaaataaaaggaagttaatagaatccgtgtaccttgtagaggaatatctgagag

SEQ ID NO: 161983 - DNA, 201 bp, Homo sapiens
attccaggtaaaagatgactaaggtttttgttcctttaaaaaccacttattatgcaccagctgtgtgccagctaaatgggtggtgggacaaaaggctgtgktcgatgaaggaggtcccaaaggaaacatggagatgagtatggagatgagttcagttttacctgaagtggcactgtgtgagaaggtgtgtatgagtatagc

SEQ ID NO: 161984 - DNA, 201 bp, Homo sapiens
gcaattctgcaccaagaattccttctggttatatagtctttaagtattggtttttgatagttgtgaagtttagtatggtgtggaggaatggagggctgtgygaattacttcactgcactgttgtgttttcattccaacaataatgtaaaaagtatctgtgtaagcactggccacttatgcggcttctgggaccacataaac

SEQ ID NO: 161985 - DNA, 201 bp, Homo sapiens
cctggatcttagggaagttgtccttaaataaccctcttccttctaagtctatcagcagtatagtcatatgacctaaaagattttaaatgatcttgctgacwtctgaattctactacagattccgtgacaaagtcatgtggctggaaccggagttccctgccaggggctggcacattgcacttctcacacaatagaaggtga

SEQ ID NO: 161986 - DNA, 201 bp, Homo sapiens
tctcaatgtgaaattttataaatgaacctgccaaattttagttcagaaggattcaagtaagatcttctagtttacgtttttctctccttttgtaatttctrtaaatagtcaacaaaatatgagtcagttggaaatacactgatattcacaggagaaatcttaggaagtttgttgcaaagaaaagcacagcagatcccctca

SEQ ID NO: 161987 - DNA, 201 bp, Homo sapiens
cttccacgtgatacttagtttgtctttttgttgtctaccaatgacttcaattcataaatcaggccagtgtaatgacccccaggtcctaaacattcagtgaktctgtaatatatgtagctccttctgttaaataaaataagccagagagcccaaaaaggaaagaagtgaattccagcataaatgaccaccaacttctccata

SEQ ID NO: 161988 - DNA, 201 bp, Homo sapiens
caaaagaccaggactgagacacccactaaatccagcatttaaaagaagtagccgttgttcatttttcttaactagagagtagtcgtggagctctgaaaacygaagccagatcgcaaggagttgtggaatgactgatgggtgaggcagtggagggagatttttctttcaaggaatttctcaattaagcagaggaaaaagtga

SEQ ID NO: 161989 - DNA, 201 bp, Homo sapiens
ggaatgactgatgggtgaggcagtggagggagatttttctttcaaggaatttctcaattaagcagaggaaaaagtgagggactcatgactgtgagcaggaraaagggaaagcatttcgagaatagggtattgctggtctttgtgctccgatcacatcgtgccacttatattgatgtttaataagccattggttctcaaatt

SEQ ID NO: 161990 - DNA, 201 bp, Homo sapiens
gtgctccgatcacatcgtgccacttatattgatgtttaataagccattggttctcaaatttggcatcagaatcccctggagcatttgttaaaacacagatwgctgggactcacacctagagtttctgtaggcctggagtggggccccagagtttcagttttaacctctcagtgacactgctggtgagggggtcgtgctttt

SEQ ID NO: 161991 - DNA, 201 bp, Homo sapiens
aatttggcatcagaatcccctggagcatttgttaaaacacagattgctgggactcacacctagagtttctgtaggcctggagtggggccccagagtttcarttttaacctctcagtgacactgctggtgagggggtcgtgcttttaggacaactcatttaaaggttgtataaatgagttgatagaagtagtatcaaccaat

SEQ ID NO: 161992 - DNA, 201 bp, Homo sapiens
aggtggaggttacagtgagccgagatcgtgccactgcactccaacctgggtgacaaagcgagactctgtctccaaaaaaaaaaaaatgatattattgcccrgggagggcaccccggtgacactttcagcagtggccccagtggtagaccattctgattggggtggggtgggtgggaggcgtgcttctctcagagaagctga

SEQ ID NO: 161993 - DNA, 201 bp, Homo sapiens
caatgtatattttgtggaggataaaacctggatcttagggaagttgtccttaaataaccctcttccttctaagtctatcagcagtatagtcatatgacctraaagattttaaatgatcttgctgacatctgaattctactacagattccgtgacaaagtcatgtggctggaaccggagttccctgccaggggctggcacat

SEQ ID NO: 161994 - DNA, 201 bp, Homo sapiens
ttcctccagggcctttgaggaatcccgaatgttctctaacagaatgttttcattcaaaaaagaaacctattacaacaaagctgttaccttgtatcctgctraataaaaacaagttacatttgaggtaattgtttagtctgagctctcccatggcaggactgtcagactaattaagctgttagaaaactataacaggtgtgt

SEQ ID NO: 161995 - DNA, 201 bp, Homo sapiens
cgaagcttcgacctccaaggctcaagctgtcctctcacatcagcctcctgagtagctgggataacaggcctgcgccactactcccagctaatttttaaacttttttttttttttttttagagacagggtctgcctttgttgcccaggctgttctcaaactcctgggctcaagtgatcctcccacctagacctcccaaagtg

SEQ ID NO: 161996 - DNA, 201 bp, Homo sapiens
ttaaataaccctcttccttctaagtctatcagcagtatagtcatatgacctaaaagattttaaatgatcttgctgacatctgaattctactacagattccrtgacaaagtcatgtggctggaaccggagttccctgccaggggctggcacattgcacttctcacacaatagaaggtgagacgatctgagagccttaaaatc

SEQ ID NO: 161997 - DNA, 201 bp, Homo sapiens
caaaaaagaaacctattacaacaaagctgttaccttgtatcctgctgaataaaaacaagttacatttgaggtaattgtttagtctgagctctcccatggcrggactgtcagactaattaagctgttagaaaactataacaggtgtgtttggttggaactggtagaggagttttgcatttaaaacaatgagctgtcaaagca

SEQ ID NO: 161998 - DNA, 201 bp, Homo sapiens
tgaggctacagtgagccaagattgtgccactgcattccagcctgggcgacagagcaagacctcatctcaaaaaattaatttatcaatttaattaaataaawaaaaaaactttatcccttccttacctccccagagtcataggaaaagagatcacagggcatgtgtgctccagtcagacactgggaatgggaagggaatgga

SEQ ID NO: 161999 - DNA, 201 bp, Homo sapiens
tatcctgctgaataaaaacaagttacatttgaggtaattgtttagtctgagctctcccatggcaggactgtcagactaattaagctgttagaaaactatarcaggtgtgtttggttggaactggtagaggagttttgcatttaaaacaatgagctgtcaaagcaccataccactagccattctgacaatcctgtcgtaact

SEQ ID NO: 162000 - DNA, 201 bp, Homo sapiens
atagtcttcagttccatccaggttgctatgaatgccattcattcattccttttatggttgagtagtattccatctcattcatatatgtgtatgtgtgtgtstgtgtgtgtgtgtgtgtgtgtgtataaaatatataaaatatgtatatataaaatatatacacacacatacatatatatacacacataccacagtttcttt

SEQ ID NO: 162001 - DNA, 201 bp, Homo sapiens
tctgagctctcccatggcaggactgtcagactaattaagctgttagaaaactataacaggtgtgtttggttggaactggtagaggagttttgcatttaaarcaatgagctgtcaaagcaccataccactagccattctgacaatcctgtcgtaacttattcctactccccttcaccaggcttctttaatcatctcctctag

SEQ ID NO: 162002 - DNA, 201 bp, Homo sapiens
tcttcagttccatccaggttgctatgaatgccattcattcattccttttatggttgagtagtattccatctcattcatatatgtgtatgtgtgtgtctgtstgtgtgtgtgtgtgtgtgtataaaatatataaaatatgtatatataaaatatatacacacacatacatatatatacacacataccacagtttctttatcc

SEQ ID NO: 162003 - DNA, 201 bp, Homo sapiens
tgtttattcctttttttttttttttttttttttttttgagacggagtcttgctctgtcgcccaggctggagtgcagtggcacgatctcggctcactgcaasctccgcctcctgggttcactccattctcctgcctcagcctcccaagtagctgggactacaggcgcccgccaccacgcccggctaattttttgtattttta

SEQ ID NO: 162004 - DNA, 201 bp, Homo sapiens
agccccgaggcgtgctttgcaccgcagtgtgaccattaggtcccagtcactgagctcactcgccctgcccacctccctccccaccagttcgatttccactyagcagatccccagcccgccgcccctgcctccggcgcccaccgttttgcaaccccctatctgagctcccagcgaagcgagtttgcttttccccggctgcag

SEQ ID NO: 162005 - DNA, 201 bp, Homo sapiens
gggtttcaccgtgttagccaggatggtctcaatctcctgacctcgtgatccacctgccttggcctcccaaagtgctgggattacaggcatgagccacctcrcccggccagtcctagtgtttatttcttaaatggctttagaaagtctgtgaaaagtaactccaaatctaataccagatatgattttaatagagatactggt

SEQ ID NO: 162006 - DNA, 201 bp, Homo sapiens
tcgccctgcccacctccctccccaccagttcgatttccactcagcagatccccagcccgccgcccctgcctccggcgcccaccgttttgcaaccccctatstgagctcccagcgaagcgagtttgcttttccccggctgcaggatcctttgatccgtagtcccttggctctcgaagcgcggggagccttcatcggggtcgg

SEQ ID NO: 162007 - DNA, 201 bp, Homo sapiens
gacccttagtggctttggaagaaaatgaagcccatgaactataatcagatacttggcattttccatggtgtctgagaattaatttaagtagagttttaagygtatagtacattatctaagatcagattgcagaagctcaaaacttttactttccagctactatgtaggatttagttagtgtttggcagcatttatgacatt

SEQ ID NO: 162008 - DNA, 201 bp, Homo sapiens
ggacagctattgcatgctatacattaaacattccatgaatggatagttacgtactttttggagatttattttaatgagtcaacctaaatagcttatcaacycaatatgtagacaaatgcaaatttattcctcttcaagtttcccactgaaaattccttaagacaacacgttccaacacattccagaaccatgaattggttt

SEQ ID NO: 162009 - DNA, 201 bp, Homo sapiens
tgcctccggcgcccaccgttttgcaaccccctatctgagctcccagcgaagcgagtttgcttttccccggctgcaggatcctttgatccgtagtcccttgsctctcgaagcgcggggagccttcatcggggtcgggtgccgagtgggttccctgcattacagcttctgcaattctgcctcctgcagcggagtcccaccggc

SEQ ID NO: 162010 - DNA, 201 bp, Homo sapiens
gggaactctgtgtgggggctctgacctcacattttccttctccactgccctaacagtggttcgccatgagagccctgcccctgcagcaaacttatgcctgrgcatccaggcatttccatacatcttcagaaatctaggcagaggttcccaaaccccagttcttgacttttgtgcactctcaggctcaacaccacatggaag

SEQ ID NO: 162011 - DNA, 201 bp, Homo sapiens
tagtatttgaaatattattttaaacatgttatctttatattcacctccaccaaatgtttaaattgcaacattttagtgggtttggaaataaggtaacaatrtttagtagtagttgtgtgattgcattaaacaaactcaaaatttacatagcttggtatgtaaatgaaagactataagagactacgtaaaactgctagtcaa

SEQ ID NO: 162012 - DNA, 201 bp, Homo sapiens
ccacaacacatgggaattcaagatgagatttggctggggacacagccaaaccatatcacttgccaacagaaatacaatgcaagccacattagcaaaaagcaaaaaaaaaaaaaaaaagaaaaaattgatctcagtatattttatctagctcaatgtattcaaaagattatcattgtcacctgtaatcactgtcaaaaatta

SEQ ID NO: 162013 - DNA, 201 bp, Homo sapiens
aagcaagaagttcaaaatagctaaggaaaaacaaaacaacaaaaatctagtcattttcttagtaaagaggtagaatgagaacattataaactaaaacccaygtgcagcaacacacatctcaccttgcgcttatgttgactagaaaccaaggcatcaaaaatactccttacaaagtaccttttgtttggtgatgatctctgt

SEQ ID NO: 162014 - DNA, 201 bp, Homo sapiens
ctctaaaattaaaaatacaagataaaatatccaacagtttatctaaaatcacattctgggtgtgatccaatagtatttatcccagacacacacacacacayacctcattttctatatagtttactttcctgcaagtatatattctaaagtgtttccattggtatttgttaataattcaatttcttgtttaatgtgagtgag

SEQ ID NO: 162015 - DNA, 201 bp, Homo sapiens
aatagctaaggaaaaacaaaacaacaaaaatctagtcattttcttagtaaagaggtagaatgagaacattataaactaaaacccatgtgcagcaacacacrtctcaccttgcgcttatgttgactagaaaccaaggcatcaaaaatactccttacaaagtaccttttgtttggtgatgatctctgttctagttgatttttt

SEQ ID NO: 162016 - DNA, 201 bp, Homo sapiens
ctttaatatcaaaacaattttataaaacaatgaagaaatggcatgatttggaagatggatgatgtctataagtacatttcagaattattactcaacttcaygtattcaacaaatatttgagtttctactgtgtgagacactgttttatgggaagttgggggagaagatgccttattttttacaatgtgcttttagaagtta

SEQ ID NO: 162017 - DNA, 201 bp, Homo sapiens
atgtagtcagtttttaaaagtgaataacactactgttgttttgtatttttttattttaattgtgttatactggctctgtgttgccatttgacttaaatatractgagtggggggtggtgaggagatcctactttttactgggagaaggattattggggaccaaactccttagggagaaaatggcctcaaaagtctgtctaa

SEQ ID NO: 162018 - DNA, 201 bp, Homo sapiens
ggagtacaaggtgatgttttgatgtacagttggccctttctatcagtgggttccacatctgtggattcagcccgctgtgagtcaagtatattcaagggggraaaaaaaattcacaaaattcctaaaagcaaaacttgaacttgccatggacgaaatactacattgaatccactagaatgaactgatgtgagggcattgtat

SEQ ID NO: 162019 - DNA, 201 bp, Homo sapiens
taatttttgtgtaagtttacatattcttgctatcataattagaattttaacctataaaaattgctactagttattttgactgaagctattcgtttaaaatkattatttcatcagaaatggccttttcatagtaaaacatgttgtttaaaatgtcaccttttctctttccagttttgagaaatggtgcttgggaaattgtcc

SEQ ID NO: 162020 - DNA, 201 bp, Homo sapiens
tttttaaaccttccttaactggaaaaaagtcacatggttttaccaggattgaaataaacagtcaatgtgacttttaacatgtgtttttttgaaataaaggrcacgtactcttcaattaaaaagttccttatagggactctggcaaatgctaacacagttgctttacaatgtttacaattcagacaatacgacttataatag

SEQ ID NO: 162021 - DNA, 201 bp, Homo sapiens
tggagagtgcagtggcgcgatctcagctcactgcaacccccacctcctgggttcaagcgattcttgtgcctcagcctcccgagtagctggaattacaggcrtgtaccaccatgcccagctaattttttgtatttttagtagagcctggcttttgccacgttgcccaggttgatctcaaactcctgagttcaggcagtccac

SEQ ID NO: 162022 - DNA, 201 bp, Homo sapiens
atgagaccagccagcagagcagagctggttaggtcaaaatgaaaatgcttgcaaagagctttcagtgcagtcagttaatatttgagagctccctgttggcmgtgtgaataggctgtttccccatcttctctcccatagagaaatattcataagaatctggaaatagcgaggagcagaaagaataagcacccatcctctgcc

SEQ ID NO: 162023 - DNA, 201 bp, Homo sapiens
aaagtgttcctcccaaattatcaaataagctgcgtagtatggaaaacttgtattatgctaatttggggtcaatgcaaataaaatataaaactgtaaatgaygttcttcctgcctctcccaacagatggtggcgctagtaattttggactgaatttcttgaccttcatcatccttttcaacaatctcattcctatcagctta

SEQ ID NO: 162024 - DNA, 201 bp, Homo sapiens
gagaaattttaaacttttttaggttaaatacatattttctgacaaaactggtactctgacatgcaatgtaatgcagtttaagaagtgcaccatagcgggarttgcttatgggtgagttttttcctttaattaggatatgaaatacatgcttaattagtgctaacagtttggtacatttgggagttcttattaggggagggt

SEQ ID NO: 162025 - DNA, 201 bp, Homo sapiens
gaaagatatgaattgctcaatgtcttggagtttaccaggtaaaacatctgctcagtgatttgtatggataagataaatttatatccatttttattttttcycttttgaataactagaaagtatgttttgtttttatttaactaaatttgtttagacaaaatattaaatcaaaatctttagtacattttttattctcattat

SEQ ID NO: 162026 - DNA, 201 bp, Homo sapiens
ttcacatggcggaggctctcggacctcttttgtaagggcatgaattccattcccaaagtccccaccttctgatacaccgctttgggaattcagtttcaacrtgtgaattttggggagacacaaactttcagaccatagcaccttgtgagcttactttcttgcagtaaggtaatggcaaacatacaaacaataagatgataa

SEQ ID NO: 162027 - DNA, 201 bp, Homo sapiens
tggcagtgtgaataggctgtttccccatcttctctcccatagagaaatattcataagaatctggaaatagcgaggagcagaaagaataagcacccatcctstgccgatgctgcatagatattgaataatgaaagctgcttatgtgtaaatgcctctgtcctaaacctgttaatagagcgatgcgttactggttttggttag

SEQ ID NO: 162028 - DNA, 201 bp, Homo sapiens
aaaatctgtggtattcatgctttaccatttatttaaccttttcactctttttcatttaggttaatgaccctttgcaatattctcccaatttgaaacagccrgcaaatgttccttatctaactttttatatggtagtaacagaactttgtaagtgtgggtgctaattatggagaagttttatgctacttttcatttttgttt

SEQ ID NO: 162029 - DNA, 201 bp, Homo sapiens
cttacctgccacaatgcaaaagctatttttgcaaagggaatgtaatttcgttctcttctttcttatagtttacttcctagaaaaaggcctgggtggtgtastggccttgaaaaaaaggtggttaaccattggcaccttattacatttgtcatgggtttcacataattttcacgtatccacccacatctagatactgagttg

SEQ ID NO: 162030 - DNA, 201 bp, Homo sapiens
tgataaatgctttgggaaaacaaatagcacagaataaggaagattgggtgtctttggaagggaacaactttttgttagggtggtcacagttagcctcattraaaaggtaacatttgagcaatgatgagtgggaggtgaggacatttgccttttgaatatctggagggagataattccagatggaaggagtagtcagtgtaa

SEQ ID NO: 162031 - DNA, 201 bp, Homo sapiens
cactagccattctgacaatcctgtcgtaacttattcctactccccttcaccaggcttctttaatcatctcctctaggctcttaacgctttccatatattgraggaatgtcatcttcctaaatgaaggtagggaggaacacagtcacctccttgttgaaatctaatccagttacattgtgactggtttcttgaacacattct

SEQ ID NO: 162032 - DNA, 201 bp, Homo sapiens
gtacttgagaattaggatagattatcagcaaagtgttcctcccaaattatcaaataagctgcgtagtatggaaaacttgtattatgctaatttggggtcartgcaaataaaatataaaactgtaaatgacgttcttcctgcctctcccaacagatggtggcgctagtaattttggactgaatttcttgaccttcatcatcc

SEQ ID NO: 162033 - DNA, 201 bp, Homo sapiens
gtgtgaataggctgtttccccatcttctctcccatagagaaatattcataagaatctggaaatagcgaggagcagaaagaataagcacccatcctctgccratgctgcatagatattgaataatgaaagctgcttatgtgtaaatgcctctgtcctaaacctgttaatagagcgatgcgttactggttttggttagcaagt

SEQ ID NO: 162034 - DNA, 201 bp, Homo sapiens
acatttaaattaagcttcttaggaatttgtgactaacagtgagacttgacatttcggaaatgtaactctgagttctgtatgtgtctccaacacttaagatkattatcctcatttctttggaattgtcatgtaattttaaaataattggattaataacatgagccagaataaaaagaactttaattaaacagaaaattatat

SEQ ID NO: 162035 - DNA, 201 bp, Homo sapiens
taaatgcctctgtcctaaacctgttaatagagcgatgcgttactggttttggttagcaagttttaacattttagaagaggtctttgcaattctgcaccaakaattccttctggttatatagtctttaagtattggtttttgatagttgtgaagtttagtatggtgtggaggaatggagggctgtgcgaattacttcactgc

SEQ ID NO: 162036 - DNA, 201 bp, Homo sapiens
ctatttagttaggattccaacccagtgtagggatgtaaaggtaatttatactttcattaatccagaccactacagccttcagaataaatatcaaatactcrtcagactgacaaaattcaaggaatggataagtttgtgcttgtctcagtttatagtcagtggaaatttatacattgctggtaaaagtatggagtgctgtag

SEQ ID NO: 162037 - DNA, 201 bp, Homo sapiens
gaagcgcggggagccttcatcggggtcgggtgccgagtgggttccctgcattacagcttctgcaattctgcctcctgcagcggagtcccaccggctcgcgyctgaggtttcgtttttgtgtttcccttttgcccgaaaccctcacttcggccagctgagctgacttttcagccaggtggaagctgttttctttgctccacc

SEQ ID NO: 162038 - DNA, 201 bp, Homo sapiens
agaaaaaaatagaagtcagaatttgcaccagggggagaatagttgaatgctttatgatgcagctgttgtggaaaattgagttgtctcacacagggcaaggrcagctctgtgcctatctctaggacacctggaagtgtgatgctgaacactgcctaagacaaggatgagacggactagctggtgatttataatgtgctgttt

SEQ ID NO: 162039 - DNA, 201 bp, Homo sapiens
tcggccagctgagctgacttttcagccaggtggaagctgttttctttgctccacctggggccagctcttgaatggccatggttgtcaacactgagcaacaratgctccggggtagaagcaagtaagctttccgagggcccagactcttcatcgtctccgaggagccctcaacatcctgcctgccatgtggcaggcactctg

SEQ ID NO: 162040 - DNA, 201 bp, Homo sapiens
gcttggataggaatgagagggagacaaaggtattagaatgaatttcctggtttgggtaaatggatggcatgtgtttccatgtctgagacaagtaccaggtmttggagattaaggtccctggttgccttgtgaacagtttgagatgcctttgagattgccggagagatgttaaagaggcaaccagatataatcgtggagctc

SEQ ID NO: 162041 - DNA, 201 bp, Homo sapiens
aaatgagttaaatatctctgctattcattaaagtatttatggcatgttgagtggaaaaccaagtggcagagaaattttaaaagggaaagaaaaaacaagawtgtccatgtttgtctagagaaaggtgtgcgaggattcatcagttagtactccttactgtgagaaactggccttgagaagaggaatgtcagcttttacctt

SEQ ID NO: 162042 - DNA, 201 bp, Homo sapiens
aggaactcgtggatggagggtcaggctgtgcaggtgagggagaggcaaggaagccggaagtgcagtgctgccctgggcacctctgacctatcacagtcccrtcggctgcccagctaatttacctgtctctttgctggttggatatacaaagcaagcagcagtctcctagtcccatagttacattcagagatctctgttctt

SEQ ID NO: 162043 - DNA, 201 bp, Homo sapiens
attctcctttgagagaggccctgctgcctagagggccttgttctgaactgcagcctttttggcctcagctgattggactatggttggctcctgacccaggktcaaccaattcttatgtgactcagacacttgtaaccttgtggtttggctcaaaaagagtctctgtgttaatcatatctctcttgaaaacattaaagttag

SEQ ID NO: 162044 - DNA, 201 bp, Homo sapiens
gggcagtatgccacatttttctaagtatttctccaataatgaattgagagagaacatttgggtggagaggagaatgcactgtttggctggagacaaagatycgcaaaaggtcggttggagaaaggaggtaaataagtttgaacgtggagagaaaactgatcagagcaaggttgagggaaaatgagcacgtacagaagatgg

SEQ ID NO: 162045 - DNA, 201 bp, Homo sapiens
tcttttcccccccttgaaatgacttgaatgggtttctgttcccttcatccagattggccagatgtatgactgtcatgcctgtaagttgtttacaaccaaastggggagaaaggacttaaagagggaataaatagtctaagaggggatgttgttaattaaatattgtgcatgctgtgggggacgcaggacctgtggaagatt

SEQ ID NO: 162046 - DNA, 201 bp, Homo sapiens
tttgtaactatgtagaatagtatgttttatttacataaaaggtaacaaaaggaataaaaagtaatttaagctgtccttaaaggaaaaattttaggacgctmttccaggtaaaagatgactaaggtttttgttcctttaaaaaccacttattatgcaccagctgtgtgccagctaaatgggtggtgggacaaaaggctgtgg

SEQ ID NO: 162047 - DNA, 201 bp, Homo sapiens
tgctacagaaacaacaaaataaaagttaaaaaaaccatacccaaactaataagtgaagtaacaaaattacaggatgacaaggtcattcattgtacaaaaayttaatgcatttctaaatattgccaatgactggaatatagaataaaaaataaccctcgtgaggttaagaaaaaacataaaatatcaagaattaaatctagt

SEQ ID NO: 162048 - DNA, 201 bp, Homo sapiens
aaaggctgtggtcgatgaaggaggtcccaaaggaaacatggagatgagtatggagatgagttcagttttacctgaagtggcactgtgtgagaaggtgtgtrtgagtatagcgatacagcatgtcatcaatatttgaaaatctcaaagtaggtgtcattttacttagtgtaattctggagatataagtgtattagatctgat

SEQ ID NO: 162049 - DNA, 201 bp, Homo sapiens
ttgctttattaggtttaacatattttggtaaatgtagtgattatttttttctgaattgtttatcaagttttgtattgaagtttaagaacttatatgttaamgataataccttttttccttattcatagtttatcttaactttgtagtgctttaacatgtatgtaaattaatttttatgaagtataatctttccttttttta

SEQ ID NO: 162050 - DNA, 201 bp, Homo sapiens
tgcccagcccattcacatcacatggaccaggaattcttttgtaaatgacttaaggtaacatcatgcagttcagtgcctaataaatgctttttaatgatgarcatttctataatgactcgtaagataccatagtctgatttttctcacattaaaataactgaagtcacttgtgtaacgtagttatactttgctgcattttaa

SEQ ID NO: 162051 - DNA, 201 bp, Homo sapiens
actcctgaccttaggcgatccacccgcctcggcctcccaaagtgctgggattacaggtgtgagctaccatgtctggccaacaactatgttcttaatagacrtgaagtaatattactgtcagtgtcaaaatgttcacatgagaagggcttaaattatgtgtttatttttcacagccaactgcacctataatatgtgaatttc

SEQ ID NO: 162052 - DNA, 201 bp, Homo sapiens
cccttctatgcaaatttattttagaatctgttccttaccttaggggttgggttagacagtttcagggagcctcagtgtaatgcctaaagactgcatgaaartcaaggatatttcagaaaactcaatgggatagttggaatttacaccaaagtccatgaattatcatttagtctctgattttaaaacatatacacacttcaa

SEQ ID NO: 162053 - DNA, 201 bp, Homo sapiens
aggtcatttatatagaaaatggtggaatgatagtaaacctagattgcatgattcatagacaggctctaactaccatactgttctgcccttactgtggaatrtagtagtctgtattgaatacttttcagaaaaatcgaattaaatggtataggaataacaggaaattagtgcctacatatagttcatcaaacagtgacttat

SEQ ID NO: 162054 - DNA, 201 bp, Homo sapiens
cgttttcaagctactgataaagacatacccaagactggacaatttacaaaagaaagaggtttaattgaacttacagtcccatgtggctggggaagcctcamaatcatggcagaaggcaaggaggagcaagtcatgtcttacgtggatggcagcacgcaaagagagagcttgtgcaggaaaactcccccttataataaccat

SEQ ID NO: 162055 - DNA, 201 bp, Homo sapiens
agatttgggtggggacacagccaaaccatatcattccaccccggcccctcccaaatcttatgtcctcacatttcaaaaccaatcatgccttcctaacaatyccccaaagtcttaactcatttcagcattaactgagaagtccacagtccaaagtctcatctgagacaaggcaagtcccttctgcctatgagcctgtaaaat

SEQ ID NO: 162056 - DNA, 201 bp, Homo sapiens
aaatcatgattaaaattacaaaagccagttcataaaagaggcaagagtttacagattgtgcatttcctcctcttagttactaggagttaaattcaatagcrttgaggatttttgaaagaatgcctgtaaattatttaaattacagtttgcttaatgaaatgatacattctgagaaacatgacattaggcaattttgtcatt

SEQ ID NO: 162057 - DNA, 201 bp, Homo sapiens
tggcccaaacctcaattcttgatttctgtgtacccacaggctcaacactgcatgaaagctgccaagacttggggcttccaccctctgaagcactagcctcytttagttatggctggagtggccgtgacacagggcaccaagtcctagactgcacacagcatggggaccctggccctagcccatgaaaacattttctcctag

SEQ ID NO: 162058 - DNA, 201 bp, Homo sapiens
acagtagtgcctcctgctcaggatggtagcaagtgttaacttaaatgctgcatctctgtgttgcatctcagaactgtgcttagtgtgtagtatgtgctaartattttgtatcagttcattgacttatttgttcatttaatctatatgaatttgctgttaagataatccaggggatatctattatagattgtcattagtaaa

SEQ ID NO: 162059 - DNA, 201 bp, Homo sapiens
caatttacagaagaaagaggtttattggacttacagttccacgtggctgggtaagcctcacgatcatggcagaaagcaaggaagagcaagtcatgtcttayatggatgccagcaggcaaagagagcttgtgcaggaaaactcccccttgtaataaccatcagatcttgtgaaatatattcactgtcacgagaacagcacag

SEQ ID NO: 162060 - DNA, 201 bp, Homo sapiens
acagattttagcatttaataaataatgaatacatttatgtgttaagaaagtataaagtagggtaaaataactcaagctgttaattcaagtccatattctcmgcatgtctatttcataccctctctgaaaaaatttctctggattcaaaggcttacccttccaaaacaatgcattctctagacttcattaattgctaagtaa

SEQ ID NO: 162061 - DNA, 201 bp, Homo sapiens
atagatagatagatagatagatagatagatagatagatagatacacacacaaaggggagtttattaagtcatattaactcacacaatcccacaataggccrtctgcacactgaggagcaaggaagccagtccaagtcccaaagctgaaaaacttggagttcaatgtttgagggcaggaagcatcctgcaagggagagatgt

SEQ ID NO: 162062 - DNA, 201 bp, Homo sapiens
ctctctggaggtacccccacatctgctctgttcggtagacctgaacatatattctgccacgtgtatgttggcttacctataaatggtttttagaaagtagygtttcagtgatcctagggacttaaaattaagcatatttatggcctaagtaatttcagacatctataagctttataatattttcagattgtcacaaagatc

SEQ ID NO: 162063 - DNA, 201 bp, Homo sapiens
aatgccatttgaggggttcatgaagtaagagtggaactttggtaagcagatatcagggtagtaactgtgagtgatgcagggtgaaaggactaatatgagcrttactgtggaagtgggaagacatgagatgtactctggaaatagcaaatagtctgttttggccagggcatagaatccatgtcatgaaacaatgagggacag

SEQ ID NO: 162064 - DNA, 201 bp, Homo sapiens
aaaagtttacagtaagaaatgatggacactgtgggctcattggaggcaggacaattatttttggatatcattggagtatgtgtgaagcagtgcatttcatvggcaaatacaataatgagactcataattcttttttatttctcactgtagatattagccagcatatcatcattggccattactaaatagaattttagccta

SEQ ID NO: 162065 - DNA, 201 bp, Homo sapiens
gatagattatcagcaaagtgttcctcccaaattatcaaataagctgcgtagtatggaaaacttgtattatgctaatttggggtcaatgcaaataaaatatraaactgtaaatgacgttcttcctgcctctcccaacagatggtggcgctagtaattttggactgaatttcttgaccttcatcatccttttcaacaatctca

SEQ ID NO: 162066 - DNA, 201 bp, Homo sapiens
aagggatatgaatgcaaagagatgactttttacttttttagaaaaataactcattgtcaatgtatgtttaaaagtatagcagtttcattgtatgatatttmtcttaacctaaaatgcatgcacccaaaaattgtacacactttgaagatttttattattcctttgggagcaaagtgatttaatatatgcaaagcctttctt

SEQ ID NO: 162067 - DNA, 201 bp, Homo sapiens
tcacaggaaaaaaaaattatactggataaccctactgatgtgaagcagtagcgaaaccctaagaaatacctaccccccatcataatttaatagtagcctcttcttctgccttttttttttcttttcagaaaaccaaatatagaaaatttggatttttagggccaggcgcggtggctcacgcctgtaatccaagcactttgg

SEQ ID NO: 162068 - DNA, 201 bp, Homo sapiens
atagcttggtatgtaaatgaaagactataagagactacgtaaaactgctagtcaagagttgtgaataaaatgtggttttagtgagaaggtatctttagtgtttttttttttgtcttttcacactgttaagctgttccactaaaactgaacttttaatatatctattagtgttagcataaatatattttataatgtgcctta

SEQ ID NO: 162069 - DNA, 201 bp, Homo sapiens
ggcagtcacgtgtgtataaaacttcacacattatatgggtgcttagataatactgcctttgacttggcccttgtggcaatttagaggttttatgtaagtayattgtggcatcttttgtagcctgttttgtttccaattttttaatctcttataaaatatatttgataaataaaacaccctgccatgtcttcctattcattt

SEQ ID NO: 162070 - DNA, 201 bp, Homo sapiens
acattcatatcatccaatagagaagccccatatccattggcaatcactccctgtttctccacaccttccctaccagaccctggcaactacttacatttttwttatctctatggatttacctattctagacattttatataaatggaatcattatgtgaccgtggttcatccatgttgcaactggaatcaatacttcctttt

SEQ ID NO: 162071 - DNA, 201 bp, Homo sapiens
tttccttttggttttctcctgttttggattttctgtttcctgtaactcaatttacgtaaaagttagtaagctcccttccatatttcagcagggaaaatttktttgtgttggcattttttacagtaaaattttatggctaggatttatttcctagaagcttaagacttttccaactgtatgtaattatatattccttttctt

SEQ ID NO: 162072 - DNA, 201 bp, Homo sapiens
catctactgtccaagtaaaaataagaatttgagttctgatgttttacttctgcatattttacttccaattcatatagtgagactaattacatttgcttacyactaattcctttaaaacaaaaatcttacaaattaaacattgtcttctaatgaaatcagttctttaacatcaaagattaatttgtttataggacctctaac

SEQ ID NO: 162073 - DNA, 201 bp, Homo sapiens
taaatgtcaactgactaaaagagttaaatgttaaaatgttgtttttagaaaacgtacaaatagaataaaggccttaataaatatttgaagaagagcaatawctcaaaatctatggaattagattatataaattttaaaacaaatacacaacaaaaactgccacaaataagtaggcaggctatgtgaaatatttgcaccaaa

SEQ ID NO: 162074 - DNA, 201 bp, Homo sapiens
atctttaaaagagatgactgatcttgatccatctagggctgtgcttaataatatcagattagttgagtgacagctcagaatgtcactaagaaggccaaagccagcctgggttctggaccagagcaccactttagtgggccagacctgtttagagtacaagattggcctttgtgagtgaaacaagcaaacaatggtatgcag

SEQ ID NO: 162075 - DNA, 201 bp, Homo sapiens
ttagtgtaaatgggctttacttcagggctctttctctgcctttctaaatgtgtggctactgtggttgctctttaatgatcctcaaaggacctacaaatttkcctagcatgcatctaatcattcacagctgggcagacttcagctctcagatattagtggtttatctctccagttactgccctgaaaccttttccctgttgc

SEQ ID NO: 162076 - DNA, 201 bp, Homo sapiens
aacgttgtataaaacaaatcttccagcttctacagaccgtctttttcccgtgtcccttcctcaatcccacatagatttagtcccaaaaatctttaacgtcracatttgaagagctctgacttagcactctaaagatgaggcatgcacaccctgtcaccacttccctgaccctgagtgcctgtcccagcagcttatagagct

SEQ ID NO: 162077 - DNA, 201 bp, Homo sapiens
acttaatagactacagtatagggtaaacctaagttttgtctgggtagagtgactcacacctgtaatcccagcactttgggaggtcagggtgggttgactgtttgagcccagcagttcaagaccagcctgggcaacatggcaaaacccatctttacaacgattacaaacattacctgggcatggtggcgcatgcctgtcgtc

SEQ ID NO: 162078 - DNA, 201 bp, Homo sapiens
catccagatggccacggagcagccccaggcatgtgagccacatcccggctccccctgctgccgtgtgcacgcatgtatgccagcccgctccacccagcagkctgtgtctccgggacacacgtgttttgtcctgtgccggtctccttactgtgtgtgcggcaggctggtcaggccaggctttgctttctgtgcttcacactt

SEQ ID NO: 162079 - DNA, 201 bp, Homo sapiens
agttgctgcaatctcaggacaaaatttaacagataaagagtggcttttcatggatgagcagtaaagtagttttttgttttgttttgttttgttttgttttkagatggagcctccttgctctgtcgcccaggctggaatacagtggtgcggtcttggctcgctgcaacctccgcctcctgggttcaagtgattttcctacat

SEQ ID NO: 162080 - DNA, 201 bp, Homo sapiens
  misc_feature (1)...(201): n = A,T,C or G
tgatcccgtggagctagacccggaggacatgtgccggatggccacggagcagccccaggcacgtaagccacatcccggctgcccctgctgccgtgtgcacncatccagatggccacggagcagccccaggcatgtgagccacatcccggctccccctgctgccgtgtgcacgcatgtatgccagcccgctccacccagcag

SEQ ID NO: 162081 - DNA, 201 bp, Homo sapiens
tgcgggtggagaggctgcagcgagttctccagaagatctgtctgggatcattggcgaaggtggctacactgacaacatattttccgtgtagacaaaacagycttcttttggaagaagatgccatctaggactttcatagctagagaggaggcctcagagcctggcttcagaggaaaggctgactcttgttagcggcagatg

SEQ ID NO: 162082 - DNA, 201 bp, Homo sapiens
gaggaaggcgagggccggaaggaccagtcctggtgcttccttgtgttgtggataggtctgtgagattaactagatcctgatgaagggttttcacaaggtgyctacaccatgtggggccttggtgtgaggctcctgggtgcctgttaggaacttgcatctgtctgtgtggtgcccagttttgccagttctcaggggttcccg

SEQ ID NO: 162083 - DNA, 201 bp, Homo sapiens
cagtgtggttgatagaactaggccccaggggtgcagacctgaggtctggggagaggcccaaggaggtggggcgcccgtcggcgaggccacaaactctgctraggatgggaggaaggcgagggccggaaggaccagtcctggtgcttccttgtgttgtggataggtctgtgagattaactagatcctgatgaagggttttca

SEQ ID NO: 162084 - DNA, 201 bp, Homo sapiens
cagtgtgaggagagaagatcagtgtggttgatagaactaggccccaggggtgcagacctgaggtctggggagaggcccaaggaggtggggcgcccgtcggmgaggccacaaactctgctgaggatgggaggaaggcgagggccggaaggaccagtcctggtgcttccttgtgttgtggataggtctgtgagattaactaga

SEQ ID NO: 162085 - DNA, 201 bp, Homo sapiens
tctgtagggaggaggtagagacaggttccgggtagagtgtgggggccttcttttcttaatttttattttttatttattttttaaatttttattcttcttgscatctgatcacatcttgccttctattaaaggagggtgggcttgagtgtttccgtgctgaagggacagtgtgaggagagaagatcagtgtggttgatagaa

SEQ ID NO: 162086 - DNA, 201 bp, Homo sapiens
actgcttctgttcaaaacagtttggagatcctagccagcataattaaaccagaaaaagaattaaggattgaaaagggagacatcaacttattatttacagrcgatgtaatttgttaacagaaaatgtaaggaaacctagattttgtgttaacttatatgtatttcagcaacaattagataccaaggtaagatataaaagtc

SEQ ID NO: 162087 - DNA, 201 bp, Homo sapiens
gttgatcttactatgtaacgagacacactatcatggcatcttgacaagatgagaggagagcagtagagccgattgggagcctagaaacagactcccctgtwagtcggaagttggtaggtcacagatcgttaaggagagagtggactgcagtgagtgatgctggtgaaaatggtttttcatatttggagaagtaagttgttg

SEQ ID NO: 162088 - DNA, 201 bp, Homo sapiens
cacagagagacagaataaaggaagtgtgacaaaatattgacagttggccagtctaggagaagaatgtacactcttcattgtactggttttttaggttttcyatagatttgaaaattttcaaaatactaaaaacctgggctattgactttgtagaatgtgaaatggaagaatctgtgaggtgctccatgttcatgtgcttct

SEQ ID NO: 162089 - DNA, 201 bp, Homo sapiens
agcagggtcttggcagagagacagtagcccaggcctgaaaggtagaaggagtccaacagcagatacccaaactgccgctctggagaatgtggggtttgccraattattgaagagtttgtgatgaaagggagttttaggaatgggacttggacctctgtaggttctcttgtaacattctgttcttgaccccattgaagttcc

SEQ ID NO: 162090 - DNA, 201 bp, Homo sapiens
ctacccggtattgtgggaagaacggacatgtggatctttccaaggcctcaggcattccgtcagatcagaattgcagctccatgagctttgttctcagggtrtgaccgtcttttctgccagagacgggcggaggggcggggcaggaataagggccaacatgaggctgctgcttctgaactttgggagaggaatttggaatag

SEQ ID NO: 162091 - DNA, 201 bp, Homo sapiens
aattattgaagagtttgtgatgaaagggagttttaggaatgggacttggacctctgtaggttctcttgtaacattctgttcttgaccccattgaagttccygcttcttcagtagggtgatgtgcagttttggaatcctttagctgaattggggttccagtaccagagcagctggcatctctgccccatgggaagtgaaggg

SEQ ID NO: 162092 - DNA, 201 bp, Homo sapiens
gtctgtgcctccttttgaacttgcccccattgcctccttcccagtgccagccagtcgcagcgaataccatcggatccagcaccagctggagtcagagaagwtcccccccttgttcccagaggggccagctcgggcctttcatgaactgtcccgcgaggaacaggcgaaatacgagaagagaaggctggcgggtgagtgcct

SEQ ID NO: 162093 - DNA, 201 bp, Homo sapiens
accatcatccaccctggtctgaggcctcagaaggaccctaaaggatgatttctaaagtgattatttagagcaggggtcagcaagctacagctggctggccrtttgagtacatcaagttttacgaacccatctgccttcgcctattgtttatctctttcccgctgtcatgggaggtgaggagttcctagaaactctaaggcc

SEQ ID NO: 162094 - DNA, 201 bp, Homo sapiens
gggcgcaggtgcacctgacagaggccccatcttccaccgggcaccagccgaacacctcgcaggtcttggagggcccctggtaatagggcacacagcgcccrgtcctcaggcctgggaggcagaggtcactgaggcattagcggggacgcagccctgccccacccgcccagccccagctggcgcacaccgaccgtttcccag

SEQ ID NO: 162095 - DNA, 201 bp, Homo sapiens
gcctccttagttttacgtttaccacatttccccaggaagcctgagggatgatgtgatctgaatgaactttcaaattcagtgttaagtaagtggagggtacrgatagatacaaggggaaataaaggaaagttgagaacaaggtcgatttcactgaagcagcgtcttcaatgcttcctctgcagcatccattcaaaggagacc

SEQ ID NO: 162096 - DNA, 201 bp, Homo sapiens
gaaggaccctaaaggatgatttctaaagtgattatttagagcaggggtcagcaagctacagctggctggccatttgagtacatcaagttttacgaacccawctgccttcgcctattgtttatctctttcccgctgtcatgggaggtgaggagttcctagaaactctaaggccttctcatctatggtattcaccatccggcc

SEQ ID NO: 162097 - DNA, 201 bp, Homo sapiens
ggcacccagctctctttgtggcgccagctcccaggggcctggtgggcctccttagttttacgtttaccacatttccccaggaagcctgagggatgatgtgrtctgaatgaactttcaaattcagtgttaagtaagtggagggtacggatagatacaaggggaaataaaggaaagttgagaacaaggtcgatttcactgaag

SEQ ID NO: 162098 - DNA, 201 bp, Homo sapiens
tgggaggtgaggagttcctagaaactctaaggccttctcatctatggtattcaccatccggcccctcgtgtttaactgacgtatttcatccggtaggaacrtggaaaatgcatagcaacacctctgttttgataccaacgggtcattattttatatctgatcagattgagccattttttttctgagagaccttcactgtag

SEQ ID NO: 162099 - DNA, 201 bp, Homo sapiens
tcacctaaggccgcagagcagaggcagaacaccctgtgggccatccccagcacgaggaggcacccagctctctttgtggcgccagctcccaggggcctggkgggcctccttagttttacgtttaccacatttccccaggaagcctgagggatgatgtgatctgaatgaactttcaaattcagtgttaagtaagtggagggt

SEQ ID NO: 162100 - DNA, 201 bp, Homo sapiens
tgccttgggtcaagagctggccttgtgggtgcttcgttctagcagaaggaggcagacactcccaagtgtgaagagaaggaaaggaggaagagggagttgcrcagctcggccacaggaaggtcttgccgaggggcatctgagcagaggctgggggacgcgccaagctgccgtgtggtggtgcacggcgttcaggcctgcagg

SEQ ID NO: 162101 - DNA, 201 bp, Homo sapiens
aggcacacagctgtgatactgtctgtctctgaggggtctgcacagcccagggagcccgagatgtgtcctgacccctagggaggctgcttgtgagaaagtcrtggcgggcattcccatctcaccacttgcacactggctgtgctcaccatccatcccaggaggaatggcttgtctggctccggttccacaagaagaagtggc

SEQ ID NO: 162102 - DNA, 201 bp, Homo sapiens
gaagagtcagttgatgcagcaaacttcattgttgtcttgttttaagaaattgccacagccaccccaactctcagcaataccaccctgatcagtcagcagcygtttacattgaggcaagaccctccaccagcaaaacgattgcgactcactgaaggctcagatgatcgttaatatttctgagcaataaaacattttaaaatt

SEQ ID NO: 162103 - DNA, 201 bp, Homo sapiens
ggtgaaatgttatcaaacagcatcacatgctacagagtctttcatggaaggaagagtcagttgatgcagcaaacttcattgttgtcttgttttaagaaatwgccacagccaccccaactctcagcaataccaccctgatcagtcagcagctgtttacattgaggcaagaccctccaccagcaaaacgattgcgactcactg

SEQ ID NO: 162104 - DNA, 201 bp, Homo sapiens
cgggggccacgtggaggccctcgagtctggggttttccgcagcgatatcccttgccggtttaggatggtgtgcttcttccctgggattcagattcttcccrctcttgtgctgtggtaggacccagaagctgcaggggctgtaataaagccccttctccccatcctgtcccacggcccctcaccgggtgtggcttctctggc

SEQ ID NO: 162105 - DNA, 201 bp, Homo sapiens
aggctggaggccacacactgggcaggaaggaaggagggaaggctggaggccacacactgggcaggaaggaaggagggaaggctggaggccacacactgggygaaaaggaaaggggaactcacgaccttgctcctctctttctctgaaggaggcccttagagctggacacagatggtatatggtgcgtcctgcccaacagct

SEQ ID NO: 162106 - DNA, 201 bp, Homo sapiens
tccactattattatatcagccgtgataacctttgatgcttctatggcaattgttttggggcgccatgaaccgtgcgcatagaagacaatgagcttcatcartgttgtgtgtgtcctgattgctccactcacgggccattctgccatctcgccctttctccttgggcctccccagtcccggtgacacaacactatagaaatt

SEQ ID NO: 162107 - DNA, 201 bp, Homo sapiens
gtttgtggtgtcctctcagggctcgctggtactccatggagatggctggcatcgtctgcttcacaggggccaacatcatcacccaggcacgggagctgatygagcagattgggtgagtgcagaaggggagccgtggggctgggagcaggtcctgggggcaagcatgggcaggaaggaaggagggaaggctggaggccacac

SEQ ID NO: 162108 - DNA, 201 bp, Homo sapiens
tagagacggggtttcaccatgttggccaggctggtctcaaactcctgacctcaggtgaatgcacccgccttggcctcgcaaagtgctggaaatacagcacwgcgcccagtggcttatgggccagtataacaatttcaagagttatattgaaaagataggacgcaggaaaagcaaaaggactaaaaaatacgtataccaggt

SEQ ID NO: 162109 - DNA, 201 bp, Homo sapiens
cctcgcataaaccatggtgcgcttgtcaaaactaagaaacctatgtctgtgccccagtaactgcactgcaggcctcacctggatttcccatttcccaccayagcccctcttctctcccaggatcccagcaaggacccacgtggcgccgagttgtcctgtcccggtctgtcctcgtgtcacgacctccccctctggtggtgc

SEQ ID NO: 162110 - DNA, 201 bp, Homo sapiens
ctctgatggagacgtacaaggagatgaatgttgctttcatgcctgcggacacagcatcccttctgcagcccatggatcaaggagcaatttcgactttcaaygtttattatttaaaaatatatttcatgaggctatagctgccatagatagtgattcccctgatggaactgggcacagtaaattgaaaaccttctagaaagg

SEQ ID NO: 162111 - DNA, 201 bp, Homo sapiens
tgatgctggggtgggaagggcttttttaaggcacatgtgaaaaacatcacaaagggaaagaatgatcaattaattaaaagttaaatcttgtgtagtctgtwacaagaaaggcagaatgttgataattgttgacactggtgataagaacatgggagctcattactgtgctttcgtgtatgtttgaaaactttcctgatagga

SEQ ID NO: 162112 - DNA, 201 bp, Homo sapiens
ttagccaagtcaactgcaaaggaaaggttcttgaaggaaattacaagtgctcctccagtgaacacatgaaagataaagaagtgaagcagcctgttgctgayatggagaaagttgagtctggatagatcaaaccagatataacatcccctcaagccagagcctaatccagagcaaggctctcactctgttcagttccatgaa

SEQ ID NO: 162113 - DNA, 201 bp, Homo sapiens
ttttgttttgttttgttttgttttgttttgagatggagcctccttgctctgtcgcccaggctggaatacagtggtgcggtcttggctcgctgcaacctccrcctcctgggttcaagtgattttcctacatcagcctcccaagtagctgggattacaggtgcccgccacaatgctcagctaatttttgtatttttaatagag

SEQ ID NO: 162114 - DNA, 201 bp, Homo sapiens
tagtatttgttgagtgaataatgagttagtccaggaatgggagcaaccaagccgttccgacctccagctgtaccctcccctttcgagtgggaatccacacrcagagcgtctcttctcaggaagcttaaagcactttcacattgctgtggacttctttgtagtgagaatctctaggcagagtgtgtgggcagggtgggaacg

SEQ ID NO: 162115 - DNA, 201 bp, Homo sapiens
ctggagtgcagtggcgcgatcttggctcactgcaagctccctcccaggttcacgccattctcctgcctcagcctcccgagtagctgggactacaggcaagygccaccacacctggctaattttcgtatttttagtagagacagggtttcaccatgttagccaggatggtctcgatctcctgaccttgtgatctgcccacct

SEQ ID NO: 162116 - DNA, 201 bp, Homo sapiens
cagaccagtccatgccctgagcctgatggactgttctgtccacactggttgagcacctgccttgggtcaagagctggccttgtgggtgcttcgttctagcrgaaggaggcagacactcccaagtgtgaagagaaggaaaggaggaagagggagttgcgcagctcggccacaggaaggtcttgccgaggggcatctgagcag

SEQ ID NO: 162117 - DNA, 201 bp, Homo sapiens
accagattatgatgatttcctacatgatcgatggccaggtgagcaggtggcttctgggaagtaagctcctgggatggggaccttgtctggtccccatactrcagcagcatctgccccactgttagtatttgttgagtgaataatgagttagtccaggaatgggagcaaccaagccgttccgacctccagctgtaccctccc

SEQ ID NO: 162118 - DNA, 201 bp, Homo sapiens
agtgtttaatgttttaacatcaaccgtagccaaatcccgcccaacacacacacgttaggtatgttaaggtacacggtaggccctcactttatgttgttgakaggtccttagaaactgcaattttaagtgaaatgactaagtaaaatgatgtataatgaaacagattttttttcttctcagaaactataatgaaactgtgtt

SEQ ID NO: 162119 - DNA, 201 bp, Homo sapiens
tctgggatgggagggttagagtgggcctggagtttcctgcccatcgtagggaggcctaaggccctgtgctgggagctgcaagctacctggaaggtggcccygtctgtgggttccagtgtgtcctgtgatgtgctgtatgtccgtgtggcctttcagatcagcgagaccagccaggccggcctgttcaggctgtgggcgctc

SEQ ID NO: 162120 - DNA, 201 bp, Homo sapiens
cttggggcagcctcccgccctgggaaccagccaggtaaggcacacagctgtgatactgtctgtctctgaggggtctgcacagcccagggagcccgagatgygtcctgacccctagggaggctgcttgtgagaaagtcgtggcgggcattcccatctcaccacttgcacactggctgtgctcaccatccatcccaggaggaa

SEQ ID NO: 162121 - DNA, 201 bp, Homo sapiens
gtgaagaagaacagggagcaggatcacgccagcgacgcgtacacagctctgctttccaggtaaactttggtcttgtgagcaaagcatcagcggttcagaaygacaagatggataggagacaggaacacgtagcaacaaagttaccttaatggctggctctgtttgatacggaaaacttgagcaattaggtagagatttctg

SEQ ID NO: 162122 - DNA, 201 bp, Homo sapiens
ctctcgctttcttctttctcatcacccctggatgggttggtgactcttaacaggtggctttgccctataaaccgtatttctacattgcgaccagaaaggtragtgtgtttcatagactcaggtcagacgacctgtgtgtcattctgtggtgggctttgcaactgggaaataggcaaggaaggaaatgtattttaccaatgg

SEQ ID NO: 162123 - DNA, 201 bp, Homo sapiens
aaaaaaaagaaaaaaagaagcagcagcaggtggcattacaaattaagcacggggttcccttctttcactcagggatgatggcgccacttcctcagtttcgkcactcaagcgcctggaacggagtcagtggacggataagatggatttgcggtttggttttgagcggctgaaggagcctggtgagaagacaggctggctcat

SEQ ID NO: 162124 - DNA, 201 bp, Homo sapiens
aaccagatataacatcccctcaagccagagcctaatccagagcaaggctctcactctgttcagttccatgaaggctgagagctgaggaggctgtagaaggraagcttgaagctggcggaggttggttcatggggtttagggagagaagccgtcccagtaacataaaagggcaaatgaggcaacaggtgcgggtggagaggc

SEQ ID NO: 162125 - DNA, 201 bp, Homo sapiens
ctctcacaccagttagccaagtcaactgcaaaggaaaggttcttgaaggaaattacaagtgctcctccagtgaacacatgaaagataaagaagtgaagcakcctgttgctgatatggagaaagttgagtctggatagatcaaaccagatataacatcccctcaagccagagcctaatccagagcaaggctctcactctgtt

SEQ ID NO: 162126 - DNA, 201 bp, Homo sapiens
aatggtgagaagtagcgtgtctttcagattcttgcccctgtgaaaagtgcgcattctgacttcctgtatgctaccaaggtcaaggctaccctggccctagrctgttcatgggatataggagcaagcaatgtgttttcacttttctctcgctttcttctttctcatcacccctggatgggttggtgactcttaacaggtggc

SEQ ID NO: 162127 - DNA, 201 bp, Homo sapiens
agcgatatcccttgccggtttaggatggtgtgcttcttccctgggattcagattcttcccactcttgtgctgtggtaggacccagaagctgcaggggctgwaataaagccccttctccccatcctgtcccacggcccctcaccgggtgtggcttctctggcccagcaccccccgggggcttctttagggcagtgcactgca

SEQ ID NO: 162128 - DNA, 201 bp, Homo sapiens
gatggcctggcagtggaggggcgagttcagtgagtgtcggccgcctgggtgggcactcggtgggaaacgggtgggtgagtgtcggccgcctttctccactyggtgggaagccggtgtgtctgtgcctccttttgaacttgcccccattgcctccttcccagtgccagccagtcgcagcgaataccatcggatccagcacca

SEQ ID NO: 162129 - DNA, 201 bp, Homo sapiens
ggtaggacccagaagctgcaggggctgtaataaagccccttctccccatcctgtcccacggcccctcaccgggtgtggcttctctggcccagcaccccccgggggcttctttagggcagtgcactgcagattgtgcacatgagtccttccggagctttctcgggcacaacctgccacgtgcagccacagcgtcaaacctga

SEQ ID NO: 162130 - DNA, 201 bp, Homo sapiens
catggcacatctcaggtcttttttttttttttttttttttttccctttttgagatggagtctcgctgttgttggcctgggctggagtgcaatggcatgagyttggctcactgcaacctctgcctcccgggttcaagcaattctcctgcctcaggctccccagtagctgggattacaggcatccgccaccacacctggctag

SEQ ID NO: 162131 - DNA, 201 bp, Homo sapiens
ccattattcccatggagcccgacgaggtgagcattatctgtcctgtcggcaccctggcctcctcagcccttgccccattccaaatgcactggagctgaatrgaggtggatgtcccaggagtgctggcaccagaggcggcagtagaattctggtgtgtgacgtcagggatgtcctttgggaattctctggccctggtgtgag

SEQ ID NO: 162132 - DNA, 201 bp, Homo sapiens
gtgctgttgggctcatttggcccagtctgcacccctcttgggatcccagcaccatggctggatggcttgtaatttgcacacagtgacgttcactctgtagygtacagccctgtgggtttggacaagtgcatagtgtgtgtgtccagcaccacgaagcaacacaaaacagctgcaacccctttgtcagcaaatcctctccct

SEQ ID NO: 162133 - DNA, 201 bp, Homo sapiens
gcctgtggtcaggaacatgtgtgcaaagcacagctccagctggatgtgggtgccacactggaactgctcaggcctccactgctcaggccactctccagccrgccggagtttctctttcctctcttctggctcttcctgccccttctttctcttcctttcaaggagaaaaacttcctgtcttaggccgagcaacatcctttt

SEQ ID NO: 162134 - DNA, 201 bp, Homo sapiens
gagtcagagaagttcccccccttgttcccagaggggccagctcgggcctttcatgaactgtcccgcgaggaacaggcgaaatacgagaagagaaggctggygggtgagtgcctgggcatggtcacggctgtaaagatgtggctcctgctcccactttctgttcttactgggctgcgttggtccatcccagctggggcccca

SEQ ID NO: 162135 - DNA, 201 bp, Homo sapiens
gtttgggttgtgttgagggatgcggtgaagcctgaacaagtttaaggaatgaaatgggaagaaacagatgaggcatgagggtgaagggatgaaatttggaycgtgacttaaggtggggacagtgagaaggggaggcgacagtgacggatttggacccagccgtgtagggaaaacctgtgcccatttcagttggagcgtccc

SEQ ID NO: 162136 - DNA, 201 bp, Homo sapiens
actggttttttaggttttccatagatttgaaaattttcaaaatactaaaaacctgggctattgactttgtagaatgtgaaatggaagaatctgtgaggtgytccatgttcatgtgcttctcaggtgtggaaaaagaagctctcggcggccgtggaggtgggcgacgcggctgaggtgaagcgctgcaagaacatggaggtg

SEQ ID NO: 162137 - DNA, 201 bp, Homo sapiens
attgtactggttttttaggttttccatagatttgaaaattttcaaaatactaaaaacctgggctattgactttgtagaatgtgaaatggaagaatctgtgmggtgctccatgttcatgtgcttctcaggtgtggaaaaagaagctctcggcggccgtggaggtgggcgacgcggctgaggtgaagcgctgcaagaacatgg

SEQ ID NO: 162138 - DNA, 201 bp, Homo sapiens
atttctgcagtgttttacccattgtctttctctaggcagccaacatgcctgactctgagctattcgagctcatctctgagaaccgttccatgtctcggaarctggaagattacggggagcagaagtctacgtccatcagcacagcaaagcgcctggccgagttcctgggagaccagatggtcaaggatgcagggctgagtt

SEQ ID NO: 162139 - DNA, 201 bp, Homo sapiens
tacgtggagtacatcaccagcaggtgcggctggctggtcctggtgacgcagcactgtggctttgagagggatgctaaaatgaccccctgaggtgccagctstccttctgggtgggctgggaggtcgttagaagtgcaggactcaccatggtgaatctgagcagcgtgaaaagggggttaccaccacctgtgcgcggtagca

SEQ ID NO: 162140 - DNA, 201 bp, Homo sapiens
ggagtacatcaccagcaggtgcggctggctggtcctggtgacgcagcactgtggctttgagagggatgctaaaatgaccccctgaggtgccagctgtcctyctgggtgggctgggaggtcgttagaagtgcaggactcaccatggtgaatctgagcagcgtgaaaagggggttaccaccacctgtgcgcggtagcagatcg

SEQ ID NO: 162141 - DNA, 201 bp, Homo sapiens
accccctgaggtgccagctgtccttctgggtgggctgggaggtcgttagaagtgcaggactcaccatggtgaatctgagcagcgtgaaaagggggttaccrccacctgtgcgcggtagcagatcggaggccactcagctgtgcagcttgagttgggcaagttcaggaagtggcctgcctttgctaagaaggttccacagtg

SEQ ID NO: 162142 - DNA, 201 bp, Homo sapiens
gcaggactcaccatggtgaatctgagcagcgtgaaaagggggttaccaccacctgtgcgcggtagcagatcggaggccactcagctgtgcagcttgagttrggcaagttcaggaagtggcctgcctttgctaagaaggttccacagtgatttttgtttgtttgctttttttccccatggatattcagggcacagattcaag

SEQ ID NO: 162143 - DNA, 201 bp, Homo sapiens
cagtgttggcgagtggagtggtgtggttcccgggtgctcaggtgtgcacagctctcagctgtcagagcctggtgtggttttgacttcctgccttccaggcmatgttcctgaggttccctcctaggccttgctgtgcttctcacacactcagcactatttaaatctaaatagaagacaaagcaacagaaaaatctccaccag

SEQ ID NO: 162144 - DNA, 201 bp, Homo sapiens
gaggaggccggggttgctcatgtcgagaaacaggctgctattcttccttagcgcgaagagcagagttagggagaacataaagttctcctgcaggagctgcratgtgggctactcagctgcattttgaaactgtgatttaggatgttcctccttccttcctctctttctttgtttattcttccattttttggggttttgttt

SEQ ID NO: 162145 - DNA, 201 bp, Homo sapiens
ttgaacccaggaggcggaggttgcagtgagctgagattgcgccattgcactacagtctgggcaacaagaatgaaactgtgtctcaaaaaaaaaaaaaaaargggtaagtgccaggtgacaggcccagagtagtttttggagaagcttgctgatgccaggggccctgcctttgcttgtgttgggagctgtttttcacacgct

SEQ ID NO: 162146 - DNA, 201 bp, Homo sapiens
gtgagctgagattgcgccattgcactacagtctgggcaacaagaatgaaactgtgtctcaaaaaaaaaaaaaaaaggggtaagtgccaggtgacaggcccrgagtagtttttggagaagcttgctgatgccaggggccctgcctttgcttgtgttgggagctgtttttcacacgctacccagtgagaggcttagtgtacat

SEQ ID NO: 162147 - DNA, 201 bp, Homo sapiens
tgtcatggagttcgatgaccaagccactgttgagatcaacagttcaggctgttactccacaggtaagtgggcgggaggacgaggcccatgagacctggctrgtgtttctgccattctgtgacatcttctcaaggcaatagtgccgaggatgggctcagagttcgaccgcgcaggtcagagctgaggctgcaggagacggtc

SEQ ID NO: 162148 - DNA, 201 bp, Homo sapiens
aaaaaaaaaaaggggtaagtgccaggtgacaggcccagagtagtttttggagaagcttgctgatgccaggggccctgcctttgcttgtgttgggagctgtytttcacacgctacccagtgagaggcttagtgtacatggccccatttatacagttttctctctgacagtgaactcaggtgtcagcgagtgttccttctcat

SEQ ID NO: 162149 - DNA, 201 bp, Homo sapiens
aaaaggggtaagtgccaggtgacaggcccagagtagtttttggagaagcttgctgatgccaggggccctgcctttgcttgtgttgggagctgtttttcacrcgctacccagtgagaggcttagtgtacatggccccatttatacagttttctctctgacagtgaactcaggtgtcagcgagtgttccttctcatttccact

SEQ ID NO: 162150 - DNA, 201 bp, Homo sapiens
gccaagtgctcctgacatggaggacttcggcctcgtaaagctgcctcacccagcagcccctgtcactgtgaagaggaagcgagttctttgggagagccagraggagtcccaggacctcacgccgactgtgccctggcaggaaatcttggggcagcctcccgccctgggaaccagccaggtaaggcacacagctgtgatact

SEQ ID NO: 162151 - DNA, 201 bp, Homo sapiens; identical to SEQ ID NO: 30152

SEQ ID NO: 162152 - DNA, 201 bp, Homo sapiens
ggggccccacaggctccccaggaggctcgtgtctttggcccagagccagccttagtttgtccctgccatctactgtctgaggccatcgctgctacactttktttttatttgtatttcatactgaagtttctctaggttgtcactgtgtatttgtgcagagcgcctcagatcggggactgggtaccactgggcacgtgtttg

SEQ ID NO: 162153 - DNA, 201 bp, Homo sapiens
ttctttgtagtgagaatctctaggcagagtgtgtgggcagggtgggaacgccatttcttggctttgcagcctctgacttgtgctgattgctaatgaacttsgctagggctacctcatcaccaacagggagattgtttcagaagatattgaagattttgagttcacccccaagccagaatatgaaggccccttttgtgtctt

SEQ ID NO: 162154 - DNA, 201 bp, Homo sapiens
gcaccaaggtggggacagagaggtgtcctcgggcagagccagattccaccttagttctgtcctggtgcacgcacatttggctgcttcccttgtccctgtckcatctctcctttcctcctccctactcctcactgcctctgataccccctggaggagccatgccagccccacccaccagtttgtggtgtcctctcagggctc

SEQ ID NO: 162155 - DNA, 201 bp, Homo sapiens
taaatggctgaataatatttcattgtgtggatttgtcacattttgtctatccttcatacaccgacgtgcacttgggttgcttccaccttttggctgtcgckagcaatcctggtttcaacatgggctgcaagtgcgtcttcaggtctctgcttttggtgattttggatatgtacccagcagtagagttgttgggtcatatgc

SEQ ID NO: 162156 - DNA, 201 bp, Homo sapiens
tgcttcccttgtccctgtcgcatctctcctttcctcctccctactcctcactgcctctgataccccctggaggagccatgccagccccacccaccagtttrtggtgtcctctcagggctcgctggtactccatggagatggctggcatcgtctgcttcacaggggccaacatcatcacccaggcacgggagctgatcgagc

SEQ ID NO: 162157 - DNA, 201 bp, Homo sapiens
aggggccctgcctttgcttgtgttgggagctgtttttcacacgctacccagtgagaggcttagtgtacatggccccatttatacagttttctctctgacartgaactcaggtgtcagcgagtgttccttctcatttccacttctcacttctctaatttacttttagctcatctaaaggctgcagataaaattattaacaat

SEQ ID NO: 162158 - DNA, 201 bp, Homo sapiens
ctcaggattatgtcgcaaatgagctcactcagagcttcttcaccatcactcagaagattcagaagaaagtcacaggctctcggaactccactgagctctcrgagatgtttcctgtcctccccggttcccacttgctgctcaataaccctgccctggagttcatcaaatacgtgtgcaaggtgagagtgccagcatgcgtgt

SEQ ID NO: 162159 - DNA, 201 bp, Homo sapiens
atgggccctaccttgccatgattcttccagcctccaaggaagaaggcaagaaattgaagaagaggtgggactctcatagcttttgtgctttagaaaggacrtggattgagatagattaaatttagcccagaaaggaggttggatcaggagccaggatagaaacagacctgggttcttgtgatcttactgattccgtttgca

SEQ ID NO: 162160 - DNA, 201 bp, Homo sapiens
agctctcggagatgtttcctgtcctccccggttcccacttgctgctcaataaccctgccctggagttcatcaaatacgtgtgcaaggtgagagtgccagcrtgcgtgtgaggagaggacactaacgtacatgtgtaaggcgagaatgttactgtgtgcaaggtgaggctgtaatgcgtgcaccatgaacgtgctagcgtat

SEQ ID NO: 162161 - DNA, 201 bp, Homo sapiens
tttgtggtggtgtgggagtgtgggtgtgttgtggggacggcttagtctcctgcctgaggggcttctgcaggccttactgtggcgctcctgtgccccctccyatacggctcttcagtcgtaaatacacacccagtggggaggatataagcgtccctggaggagggctgtcagagtttctggacctgtattagagccatcaca

SEQ ID NO: 162162 - DNA, 201 bp, Homo sapiens
ttactgtgtgcaaggtgaggctgtaatgcgtgcaccatgaacgtgctagcgtatgtgtgcaagataaggacaccgacatacctgtgcatggtaaggatgtyaatgaatgcaggatgaggctttcagctgtgcaagggggaggtacctacatgtgtagggtcagggtgccagcgtgtgcaaggtgaggagcaggtgtaagtt

SEQ ID NO: 162163 - DNA, 201 bp, Homo sapiens
gaaactgccaaactcttttctgaagtggctgcaccgtgtcagggtctcctcagcagtgtgtggcaagagttgctgttccacatcctcaccaggacttggtrtcattgggtttttaaattgcagctattccagtaggtgtgtagtggtatcgcattgtgtttctgatttgcatttccctggcgactaatgatgtggagcttt

SEQ ID NO: 162164 - DNA, 201 bp, Homo sapiens
tcagcagtgtgtggcaagagttgctgttccacatcctcaccaggacttggtgtcattgggtttttaaattgcagctattccagtaggtgtgtagtggtatmgcattgtgtttctgatttgcatttccctggcgactaatgatgtggagcttttttttggagatggagattcactctcattgcccaggctggggtgcagtgg

SEQ ID NO: 162165 - DNA, 201 bp, Homo sapiens; identical to SEQ ID NO: 30159

SEQ ID NO: 162166 - DNA, 201 bp, Homo sapiens
gactggtaagcgagctgcagtgtggcacccgagccagctttgggggtcgcgttcattcctgcagcaagtgctgagtgctcagggccccggcgggcctggcygtgagcagcagacactgcacccgcatcctgccctcatgaacacggggagggaccatgcgcagacaagcacgtcagtgtggagtgtggcgtcagccctggt

SEQ ID NO: 162167 - DNA, 201 bp, Homo sapiens
agtcttagtatgatgttttcaaggtttatcaacatacagcgtgtatctgtactgtatttttgtaaatggctgaataatatttcattgtgtggatttgtcayattttgtctatccttcatacaccgacgtgcacttgggttgcttccaccttttggctgtcgcgagcaatcctggtttcaacatgggctgcaagtgcgtctt

SEQ ID NO: 162168 - DNA, 201 bp, Homo sapiens
cctccttttgaacttgcccccattgcctccttcccagtgccagccagtcgcagcgaataccatcggatccagcaccagctggagtcagagaagttcccccscttgttcccagaggggccagctcgggcctttcatgaactgtcccgcgaggaacaggcgaaatacgagaagagaaggctggcgggtgagtgcctgggcatg

SEQ ID NO: 162169 - DNA, 201 bp, Homo sapiens
cgggcagaccacttgaggtcaggagttggaaaccagcctggccaacatggcaaaaccctttctctactaaaaatacaaaaattagctggatgtgatggcaygtgcctgtaatctcagctacttgggaggctgaggcacgagaatctcttgaacccaggaggggaggttttagtgagttgagattgcaccactgcactccag

SEQ ID NO: 162170 - DNA, 201 bp, Homo sapiens
taatagaaatggggtttcactgtgttggccaggatggtcttgaactcctgacctcaggccatccacctgccttggcctaccaaagtgctgggattacaggmgtgagccaccacaaatcacgtaacttttatatgtactgagaaaacaagcgtgagccaaaaatcatgtaacttttatatgcactgagaaaccaaataattt

SEQ ID NO: 162171 - DNA, 201 bp, Homo sapiens
ttgccatatctccaagatacgcttgtattcaagaaccatttgttgaaaagactattctttttctatcgaatcatctttgtacctttttccataacttagtraccttatctatgtgagtctctttctggattatgtattctttttttcgatcttggattcaatttgctaatatctcgttgcgcatttttgtgtctgtgctca

SEQ ID NO: 162172 - DNA, 201 bp, Homo sapiens
ttctttttctatcgaatcatctttgtacctttttccataacttagtgaccttatctatgtgagtctctttctggattatgtattctttttttcgatcttgsattcaatttgctaatatctcgttgcgcatttttgtgtctgtgctcaggctgttattggtctgtagtttcttagtacggtctttggttctagtatcagggg

SEQ ID NO: 162173 - DNA, 201 bp, Homo sapiens
tctaggcagccaacatgcctgactctgagctattcgagctcatctctgagaaccgttccatgtctcggaagctggaagattacggggagcagaagtctacrtccatcagcacagcaaagcgcctggccgagttcctgggagaccagatggtcaaggatgcagggctgagttgccgctacatcatctcccgcaagcccgagg

SEQ ID NO: 162174 - DNA, 201 bp, Homo sapiens
cacggagaggtgagggctccccccatcacggagaggtgagggctcctcccatcacggacaggtgagggctccctccgtcacggagaggtgagggctccccycatcacagagaggtgagggctgccctgtcacggagaggtaaggggttccttacagatttgggctgtgtttaacaccaagtttggggatggcataagtgtc

SEQ ID NO: 162175 - DNA, 201 bp, Homo sapiens
agacccggaggacatgtgccggatggccacggagcagccccaggcacgtaagccacatcccggctgcccctgctgccgtgtgcacgcatccagatggccayggagcagccccaggcatgtgagccacatcccggctccccctgctgccgtgtgcacgcatgtatgccagcccgctccacccagcaggctgtgtctccggga

SEQ ID NO: 162176 - DNA, 201 bp, Homo sapiens
gtttttgctctatttatatatttttcagctttttcctctcctgaatgtctaaaaggggttggtgaactgcacacgaggcaagcttggtcaccagcctctaytgagtttcgctttctctgcaggtgtgtgatgagattaagagcaagcttgcctccctgaaggacgttcccagccgcatcgagtgtccactcatctaccacc

SEQ ID NO: 162177 - DNA, 201 bp, Homo sapiens
ttctgtcaacacagagagacagaataaaggaagtgtgacaaaatattgacagttggccagtctaggagaagaatgtacactcttcattgtactggtttttyaggttttccatagatttgaaaattttcaaaatactaaaaacctgggctattgactttgtagaatgtgaaatggaagaatctgtgaggtgctccatgttca

SEQ ID NO: 162178 - DNA, 201 bp, Homo sapiens
ttgacctgaagatccacgtggtgagtggggcagggttgggtcgctgctcacatgaatttcctaacagccaggagatgatcattatgggtgaatccacagargaatagactttcctggatgtagaactctagttagcacactgtgtgttttgcaggctcattggtacaatgtcagataccgaggaaatgcttttccggtaga

SEQ ID NO: 162179 - DNA, 201 bp, Homo sapiens
tgaatccacagaagaatagactttcctggatgtagaactctagttagcacactgtgtgttttgcaggctcattggtacaatgtcagataccgaggaaatgyttttccggtagaaatcacccgccgagatgaccttgttgaacgacctgtaagttttgcttgtgttaccttcatcctaaaatttccagttttctggagagaa

SEQ ID NO: 162180 - DNA, 201 bp, Homo sapiens
agtcgtgatactcttgatgtaggttggttagtcttagggtccttctcccagctctagagccttttgactcttttaacaaccagagggaggtagagcaggcygggggtgggtgttcagggaggcctaatggggagtttagagcttggctttatgcttattttgtccccacaggaccctgtggttttggcatttgacattgag

SEQ ID NO: 162181 - DNA, 201 bp, Homo sapiens
ttgccactgctgtgcttgccttttttttttttttcaggtatgctgtgttcaatgaagacggttctctggctgagctcaagggctttgaggtcaaacgccgyggggaactgcagctgattaagatcttccaatcctcggtgtttgaggccttcctcaagggcagcacgctggaagaggtgtatggctctgtagccaaggtgg

SEQ ID NO: 162182 - DNA, 201 bp, Homo sapiens
tttcctggatgtagaactctagttagcacactgtgtgttttgcaggctcattggtacaatgtcagataccgaggaaatgcttttccggtagaaatcacccrccgagatgaccttgttgaacgacctgtaagttttgcttgtgttaccttcatcctaaaatttccagttttctggagagaatattcttcagtgctggagagt

SEQ ID NO: 162183 - DNA, 201 bp, Homo sapiens
aaggacagccagggggagtacaaggcgccccagtgcatccacatggactgcctcaggtaggggccacagagcagcatggctcctcactgctgtccgtgagygagatctgaaggcctcttgcagactgtgctgtcaccacatctcatgggaggagggtggcctccgagaggccgtttcaggtcacccaagagtatggcagct

SEQ ID NO: 162184 - DNA, 201 bp, Homo sapiens
taggttttccatagatttgaaaattttcaaaatactaaaaacctgggctattgactttgtagaatgtgaaatggaagaatctgtgaggtgctccatgttcrtgtgcttctcaggtgtggaaaaagaagctctcggcggccgtggaggtgggcgacgcggctgaggtgaagcgctgcaagaacatggaggtgctgtatgact

SEQ ID NO: 162185 - DNA, 201 bp, Homo sapiens
aggctggggtgcagtggcgcgatctcagctcactgcaacctctgcctcctggttagctgggattacaggtgcctgccaccacgcccccccaattttttgtwtttttagtggagacggagtttcaccatgttggccaggctggtctcgaactcctgacctcaagtgatccacctgcttcggcctcccaaagtgctgggatta

SEQ ID NO: 162186 - DNA, 201 bp, Homo sapiens
ccaggctggggtgcagtggcgcgatctcagctcactgcaacctctgcctcctggttagctgggattacaggtgcctgccaccacgcccccccaattttttktatttttagtggagacggagtttcaccatgttggccaggctggtctcgaactcctgacctcaagtgatccacctgcttcggcctcccaaagtgctgggat

SEQ ID NO: 162187 - DNA, 201 bp, Homo sapiens
cttgaacccaggaggcggaggttgcagtgagctgagattgcgccattgcactacagtctgggcaacaagaatgaaactgtgtctcaaaaaaaaaaaaaaaaggggtaagtgccaggtgacaggcccagagtagtttttggagaagcttgctgatgccaggggccctgcctttgcttgtgttgggagctgtttttcacacgc

SEQ ID NO: 162188 - DNA, 201 bp, Homo sapiens
ggagaacataaagttctcctgcaggagctgcgatgtgggctactcagctgcattttgaaactgtgatttaggatgttcctccttccttcctctctttctttgtttattcttccattttttggggttttgtttgttttttaggagatggggtcttgctctgtcacccaggctggagtgcagtggtgcagtcatggctcactg

SEQ ID NO: 162189 - DNA, 201 bp, Homo sapiens
agcgcgaagagcagagttagggagaacataaagttctcctgcaggagctgcgatgtgggctactcagctgcattttgaaactgtgatttaggatgttcctycttccttcctctctttctttgtttattcttccattttttggggttttgtttgttttttaggagatggggtcttgctctgtcacccaggctggagtgcagt

SEQ ID NO: 162190 - DNA, 201 bp, Homo sapiens
taatagactacagtatagggtaaacctaagttttgtctgggtagagtgactcacacctgtaatcccagcactttgggaggtcagggtgggttgactgtttgagcccagcagttcaagaccagcctgggcaacatggcaaaacccatctttacaacgattacaaacattacctgggcatggtggcgcatgcctgtcgtccca

SEQ ID NO: 162191 - DNA, 201 bp, Homo sapiens
ttaatagactacagtatagggtaaacctaagttttgtctgggtagagtgactcacacctgtaatcccagcactttgggaggtcagggtgggttgactgtttgagcccagcagttcaagaccagcctgggcaacatggcaaaacccatctttacaacgattacaaacattacctgggcatggtggcgcatgcctgtcgtccc

SEQ ID NO: 162192 - DNA, 201 bp, Homo sapiens
cagggccacttttcgatgtgaccaaaggtacatcacagggatctccagccagctctactgagtatgatgtgtgaggcatcagcacttaggtgtcaggagcygtcggtctgctgcagagggcgtggttgagggtcaggagccatcagtctgcggagagcatggttgagggcagctactcgcattacccaccagcggtggttc

SEQ ID NO: 162193 - DNA, 201 bp, Homo sapiens
gtgggcaacagggaggtggaggcccatgaggtggtgacagggaatccgagagctgatgaagtgcaccatagttgtgcgagcataaggcgcctccagcggayggacaccagggaggcaaagcacaagtcagtggagcagtggttgcagatgcaggcagagagctgacagagccaggcaacttgggcatggcagggcagggcc

SEQ ID NO: 162194 - DNA, 201 bp, Homo sapiens
cttaatagactacagtatagggtaaacctaagttttgtctgggtagagtgactcacacctgtaatcccagcactttgggaggtcagggtgggttgactgtttgagcccagcagttcaagaccagcctgggcaacatggcaaaacccatctttacaacgattacaaacattacctgggcatggtggcgcatgcctgtcgtcc

SEQ ID NO: 162195 - DNA, 201 bp, Homo sapiens
aacagatgggcaggtagagtgaggctggaggtgtggtagatgtgaggatgccaggctccctggtgagtgaggaagagagctctgtagatgtgaggacgccrggctccctggtgagtgaggaagggagctctgtagatgacattgtcctgttagcgattcctaagtcctcgcaagtacccttgaaagggaagcccaggatcg

SEQ ID NO: 162196 - DNA, 201 bp, Homo sapiens
tgactccccagccaccctcgactgaactgggggaggctccagcagggtggtatggaggaaagaaacccgcccagggtgtgggctggggaacagcagcgacwgtggactcgttcccacaggtgaggtgaatgtcagcagtgtgtctgccaaaagtggcctttgggcagtgggccgggcagctgcaggggcacagccacatcc

SEQ ID NO: 162197 - DNA, 201 bp, Homo sapiens
ggtgcgggccaggctgtgggtgagtggaggtggctgtcgggagcagtctggggaaggggtcatgtctggctggggctcatggtgtttgcaaggttgagacrtgggtggtcagctggtgcaggagtggccagagagtggctgggtgggttgagaggaggcctgtgtcctccacaggggccctcatagtggactgagaggaag

SEQ ID NO: 162198 - DNA, 201 bp, Homo sapiens
agagctctgtagatgtgaggacgccgggctccctggtgagtgaggaagggagctctgtagatgacattgtcctgttagcgattcctaagtcctcgcaagtrcccttgaaagggaagcccaggatcgcctttgtgtccctgaagggtcacctgttgggcggagggtggctggggggatgtcagcaggggctcacagccacgt

SEQ ID NO: 162199 - DNA, 201 bp, Homo sapiens
aaagtgctggaaatacagcactgcgcccagtggcttatgggccagtataacaatttcaagagttatattgaaaagataggacgcaggaaaagcaaaaggastaaaaaatacgtataccaggtaaatgttaaccaaaagaaagctgatgtggctgtattaataccagacaaaatactctttaggccaaaagtattaggaaac

SEQ ID NO: 162200 - DNA, 201 bp, Homo sapiens
ctcctttgtggtgacgtagaagccatgttcttcagcacccctgtgccctggctccctctgctctgggagatctcacccacctgctctgcccatctccgtcrtgcttagattactgccggaaagcctacaagaagatccacatcaccaaggtggaagagcgtctcaccaccatctgccagcgggaaaactccttctacgtgg

SEQ ID NO: 162201 - DNA, 201 bp, Homo sapiens
cctgtcccacggcccctcaccgggtgtggcttctctggcccagcaccccccgggggcttctttagggcagtgcactgcagattgtgcacatgagtccttcyggagctttctcgggcacaacctgccacgtgcagccacagcgtcaaacctgaggcaggctagtgtgggtgtgtttcccctctgaccccgtcgtctcactgt

SEQ ID NO: 162202 - DNA, 201 bp, Homo sapiens
agctctcccagacccctccaggaccccattcacgaagctagggtgcccctctccagctctcccagagccccccaggaccccacacacacactctggctccmccaggggctctctttccgtttctctgactaggaaaatgtgatttctctcagtttttgccatctacaccctcaggttaaacccatgagagaatggaggaag

SEQ ID NO: 162203 - DNA, 201 bp, Homo sapiens
cttctccccatcctgtcccacggcccctcaccgggtgtggcttctctggcccagcaccccccgggggcttctttagggcagtgcactgcagattgtgcacrtgagtccttccggagctttctcgggcacaacctgccacgtgcagccacagcgtcaaacctgaggcaggctagtgtgggtgtgtttcccctctgaccccgt

SEQ ID NO: 162204 - DNA, 201 bp, Homo sapiens
gtctgtaaaaaataaataaataacataaaaattacatccagagtttttagttgtaatcattgagagaggtggactgtggcgtggtgggtgtaccccgtcgytaggggcaccagaagtcctaggactccgaatagcgtgtgctttgtgtgtgtaccacagacattaccacttacgcccagtgacgagatcatcgtcgtattc

SEQ ID NO: 162205 - DNA, 201 bp, Homo sapiens
agcagcgactgtggactcgttcccacaggtgaggtgaatgtcagcagtgtgtctgccaaaagtggcctttgggcagtgggccgggcagctgcaggggcacmgccacatcccgggcagaagtcacgtgggcagccagagcccccaccatccagcccttgccggcctgtctgcccgattcttccaggttccgttactgttccg

SEQ ID NO: 162206 - DNA, 201 bp, Homo sapiens
cagctggtgaggcacctttcaggctgggaagcagagacctttgctcttgagcacctggagatgcgctctctggcccagttcagctacctggaaccaggtawggcctgcaccagccgcccatcatgtgcctgcctcccacacatctggggtgacggtcttgtttccttctccagggagtatccgccatatctacctgtacca

SEQ ID NO: 162207 - DNA, 201 bp, Homo sapiens
tgtttccttctccagggagtatccgccatatctacctgtaccaccacgcacaggcccacaaagcgctcttcgggatcttcatcccctcacagcgcagggcrtccgtctttgtgctggacactgtgagtcctgggccctccatggcagcacattggctggggcagggtttggggaaggaggacatctcccagggtgcccagg

SEQ ID NO: 162208 - DNA, 201 bp, Homo sapiens
gtaatttatagaaaattaagagacaaaattattacagtggaggctatactgaaataaaatgtctttttctatagtgctaataattgagaaattattaagtstgggtatcaataatctctgagttttgaattgctaaaagctgtaaaaagtcctttatggttacaaattgaacattgtaatcctaatatggtattttcaagg

SEQ ID NO: 162209 - DNA, 201 bp, Homo sapiens
gggaggtggaagttgctgtgagctgagatcatgccactgcactccagcctgggtgacagagcaagacttcatctcaaaaacaacaacaacaacaacaacaaaactgaagtttttgtttattttcctggagctagacaagttgtcacaggttaggttctctgggaagcatatgctgagacagtgataagtgtacaagagctt

SEQ ID NO: 162210 - DNA, 201 bp, Homo sapiens
tgggaggtggaagttgctgtgagctgagatcatgccactgcactccagcctgggtgacagagcaagacttcatctcaaaaacaacaacaacaacaacaacaaaactgaagtttttgtttattttcctggagctagacaagttgtcacaggttaggttctctgggaagcatatgctgagacagtgataagtgtacaagagct

SEQ ID NO: 162211 - DNA, 201 bp, Homo sapiens
gtcaaaataggaaagctccgcaagacaggtccattactctgtgtaagccagtgtcaaaaggattgttgaatattttatctctttctaacaaagatggtaayttatagaaaattaagagacaaaattattacagtggaggctatactgaaataaaatgtctttttctatagtgctaataattgagaaattattaagtgtggg

SEQ ID NO: 162212 - DNA, 201 bp, Homo sapiens
ctgggaggtggaagttgctgtgagctgagatcatgccactgcactccagcctgggtgacagagcaagacttcatctcaaaaacaacaacaacaacaacaacaaaactgaagtttttgtttattttcctggagctagacaagttgtcacaggttaggttctctgggaagcatatgctgagacagtgataagtgtacaagagc

SEQ ID NO: 162213 - DNA, 201 bp, Homo sapiens
tatatagaaaggtaaaatgtaattacataaaaagattgaaatatgaagtcttggtcattgaatttgtttaaatgagcaaaagaaggtcacttagtcaaaayaggaaagctccgcaagacaggtccattactctgtgtaagccagtgtcaaaaggattgttgaatattttatctctttctaacaaagatggtaatttataga

SEQ ID NO: 162214 - DNA, 201 bp, Homo sapiens
aaattagccaggcgtggtggagtgtgcttgtaatcccagctacttgggaggctgaggtgggagaatcgcttgaacctgggaggtggaagttgctgtgagcygagatcatgccactgcactccagcctgggtgacagagcaagacttcatctcaaaaacaacaacaacaacaacaacaaaactgaagtttttgtttattttc

SEQ ID NO: 162215 - DNA, 201 bp, Homo sapiens
ttacgaaccaagtatatccgtattttacatatgtatatagaaaggtaaaatgtaattacataaaaagattgaaatatgaagtcttggtcattgaatttgtwtaaatgagcaaaagaaggtcacttagtcaaaataggaaagctccgcaagacaggtccattactctgtgtaagccagtgtcaaaaggattgttgaatattt

SEQ ID NO: 162216 - DNA, 201 bp, Homo sapiens
tagtgaaaccccatctctactaaaaatacaaaaaattagccaggcgtggtggagtgtgcttgtaatcccagctacttgggaggctgaggtgggagaatcgyttgaacctgggaggtggaagttgctgtgagctgagatcatgccactgcactccagcctgggtgacagagcaagacttcatctcaaaaacaacaacaacaa

SEQ ID NO: 162217 - DNA, 201 bp, Homo sapiens
gtttctcatattattctttagtgattttagttttattgtgtctatgtttctattgatacaataccagattcatttgtgaagttggtggtcattacgaaccragtatatccgtattttacatatgtatatagaaaggtaaaatgtaattacataaaaagattgaaatatgaagtcttggtcattgaatttgtttaaatgagc

SEQ ID NO: 162218 - DNA, 201 bp, Homo sapiens
aaaatactgaattttggcctggtgcagtggatcacacctgtaatccaagcactttgggagctgaggtgggtgcatcacttgaggtcaggagttcgagaccygcctggccaacctagtgaaaccccatctctactaaaaatacaaaaaattagccaggcgtggtggagtgtgcttgtaatcccagctacttgggaggctgag

SEQ ID NO: 162219 - DNA, 201 bp, Homo sapiens
ataagaaaatgtagttacatgaaaaaagttatatgtaaaaaatgcaaaagaatcaataataaaaacaataaaacatatgttaatatagcaagccataaacktgatatacaaaaagtcaatatcttcataaatgtaaataataaccatttagaagttataacagaaaggaaaccaccatttacattagcaatgaagccaggc

SEQ ID NO: 162220 - DNA, 201 bp, Homo sapiens
ttaaggaaccactgggattttgtatcaaattaactattttcccatattttccaaactttatgtaagagttatatttctgtccaggtacggtcatatgaccygttggaccaaaagaaggaaggacaccttggttgacagtctcatttgcatgagtaaaagtggagtcattgtttcccaaagggaaattagggactgttacaa

SEQ ID NO: 162221 - DNA, 201 bp, Homo sapiens
atagtgtgaaaacacaatttgagtgagtgtatatttgcccctcatagagtaaaatgcttgatgaaatagagcaatgcattgacaattcgtgaagaaattcyaaaaaaaataaagatcacttaaaaatttttttgcttttcttgtttttttaagagtaaaattccggttggaataaaagctgggcattctaataaggtgagt

SEQ ID NO: 162222 - DNA, 201 bp, Homo sapiens
taaggatgctggattttattttaagcaggataagaaactactgaagggatttttgtgcaaaaaagactgtaagggtagaagacaagaaatagaggaaccayttaggagactcttgcgttagttcagataaaaacaatacagatttgcaatagaatgctgcagctgaaaaatgtagaaaatgatcaaattagggttgtacac

SEQ ID NO: 162223 - DNA, 201 bp, Homo sapiens
attgcaaataattttgaactttcaaaactttcttttctatggtaacaaagtttgtggaaggaagtgattgtcagtgttttcaacctaaattatataaactrtaaaaaatactgcaatagttattagagctgcttttggctttcttactttgtgtatgtcattcagttttctatactttgatttataagtctgtatattggg

SEQ ID NO: 162224 - DNA, 201 bp, Homo sapiens
ctacatgcagttctcccattggtaaaccctagattagattggtaaactctaggttaatcgtgtgggccaaaaaaagctttctagtaatccaaaattgcctwcactttgttagagcagaagttaaaattgcacataatacattgcaaataattttgaactttcaaaactttcttttctatggtaacaaagtttgtggaagga

SEQ ID NO: 162225 - DNA, 201 bp, Homo sapiens
ttattttaagcaggataagaaactactgaagggatttttgtgcaaaaaagactgtaagggtagaagacaagaaatagaggaaccacttaggagactcttgygttagttcagataaaaacaatacagatttgcaatagaatgctgcagctgaaaaatgtagaaaatgatcaaattagggttgtacacaaaaggcaacaccag

SEQ ID NO: 162226 - DNA, 201 bp, Homo sapiens
ttttttcttttctcacctttttcctgcactatgctctttatttctgaagctcagaggtcatttttctttcactcatttctacatgatttacttctgtatasagacatataatttgcttgcttgtttacatcaccagtggtttaaaaaataatttgaatttgccagcagagatacatgtaatgccaactgaggaatacagaa

SEQ ID NO: 162227 - DNA, 201 bp, Homo sapiens
aagttctgtttgataaaccggttgtaataattcagatacatttattaaagcctaacactaattattggccttgtgaaaaagaatgttccagctacatgcasttctcccattggtaaaccctagattagattggtaaactctaggttaatcgtgtgggccaaaaaaagctttctagtaatccaaaattgcctacactttgtt

SEQ ID NO: 162228 - DNA, 201 bp, Homo sapiens
ggtctcaaacttatgacctcaagtgatcacacctcggtctcccaaagtgctgggattacaggcgtgagccaccctgcctgaccagtgtaggaaactattayagcaaaatagagggatccagtaagcatctccataacaactgcattagcaaatgtagaggactgtgggaccatgtgtgtcacacaggcctgttatcattca

SEQ ID NO: 162229 - DNA, 201 bp, Homo sapiens
ccttcctaaagggaacattctttaaaaatttataatattcagtttcctttaagaataaaatatgtattaagtattttgtttaaagttctgtttgataaacyggttgtaataattcagatacatttattaaagcctaacactaattattggccttgtgaaaaagaatgttccagctacatgcagttctcccattggtaaacc

SEQ ID NO: 162230 - DNA, 201 bp, Homo sapiens
gcaccaccacacctggcagattttgtatttttagtagacatgaggtttcactatgttgtttaggctggtctcaaacttatgacctcaagtgatcacacctyggtctcccaaagtgctgggattacaggcgtgagccaccctgcctgaccagtgtaggaaactattatagcaaaatagagggatccagtaagcatctccata

SEQ ID NO: 162231 - DNA, 201 bp, Homo sapiens
gtccttaaaaatctgtaccaatgtccttcctaaagggaacattctttaaaaatttataatattcagtttcctttaagaataaaatatgtattaagtatttygtttaaagttctgtttgataaaccggttgtaataattcagatacatttattaaagcctaacactaattattggccttgtgaaaaagaatgttccagctac

SEQ ID NO: 162232 - DNA, 201 bp, Homo sapiens; identical to SEQ ID NO: 30229

SEQ ID NO: 162233 - DNA, 201 bp, Homo sapiens
gtgaaacaaatgaggaaattttctcttaaccaatcttatccgcagataaagtgagaccaaccttaaaggcatattgcacacaaatgcttataggcagaagmatttccccagtgtaggaaacttctctttttttttttttttttttttgagacagagtttcactctagttgcccaggctggtgtgcagtggtgcgatctcgg

SEQ ID NO: 162234 - DNA, 201 bp, Homo sapiens
atgttctacttttaatcttcagaatgatcttgtgtaatagggcaactataattatgtatgtttttgtagatgaggaaagtgagactaagcaaagcctaagkgtctcacagcaagcttttaactacacaatgctgggattttgtttgctgtttgtcaagaatgtatgaaggagaacctatgtcccttttccgtctgctgcaa

SEQ ID NO: 162235 - DNA, 201 bp, Homo sapiens
tgttgtcttctcttttgaagccattactaacctttattttttccactgagtgcaagctttttattaaaatgtcctcattgttcattgaattagaatttagraataggcagatccaaggtgttttttctgttgatgaaaaaattaatattaaagtatatgtgttacatgtatgtgaaaggatgtttctcatattattcttta

SEQ ID NO: 162236 - DNA, 201 bp, Homo sapiens
ggaaggttgttttattttacagttgttttagaggtatattgccattttggtattttgtatgttaattcatttttataatgcttcctgttttctaagtatcracacatatgttctacttttaatcttcagaatgatcttgtgtaatagggcaactataattatgtatgtttttgtagatgaggaaagtgagactaagcaaag

SEQ ID NO: 162237 - DNA, 201 bp, Homo sapiens
tgtgttggatgtgacaaatgcagattatggggaaaattacaggtatatgtgttgtcttctcttttgaagccattactaacctttattttttccactgagtscaagctttttattaaaatgtcctcattgttcattgaattagaatttagaaataggcagatccaaggtgttttttctgttgatgaaaaaattaatattaaa

SEQ ID NO: 162238 - DNA, 201 bp, Homo sapiens
gaactcagcggtgaagccatgaggtcctggtctgtctgtctttttttttttttttgagaccaactcttgctctgttgcccaggctggagtgcagtggcgcratctcggctcattgcaacctccatctcctgggttcaagtgattctcctgcctcagcctgttgagtagctgggattataggcccatgccaccacacccagc

SEQ ID NO: 162239 - DNA, 201 bp, Homo sapiens
gtgcaaggtaattttttagcaaaacctgacctaaactggtgtaacaatatagcagatattcgtagttttgtggggttgttttcaaattctgcttggtatgrattttttatattttgctacagaaacattaacggatttgactgcagggtgtttcctcacactctggtgagatgtttcataatatacagtacatgtactgta

SEQ ID NO: 162240 - DNA, 201 bp, Homo sapiens
tccagcctgggcgacaaagcaaaactccttctcaaacaaacaaaaaacacaactgatttattaataagcatcaaaacttacctatcgtttagccaaatgcrgttcaattttaaaagtctaattagactgaaaatattttctgcttgctaggaggaattccgattacatttcaagaatatctcccgtataatggactgtgtt

SEQ ID NO: 162241 - DNA, 201 bp, Homo sapiens
cgagatggcaccactgcactccagcctgggcgacaaagcaaaactccttctcaaacaaacaaaaaacacaactgatttattaataagcatcaaaacttacytatcgtttagccaaatgcagttcaattttaaaagtctaattagactgaaaatattttctgcttgctaggaggaattccgattacatttcaagaatatctc

SEQ ID NO: 162242 - DNA, 201 bp, Homo sapiens
ggaggtcgaggtgggcggatcatttgaggccaggagttcaagaccagcctggccaacatggcaaaaccccgtctctactaaaaatacaaaaattagctggkcatggcggcatgcgcctataatctaagctacttgggaggctgaggagacaggagaatcccttgaacctgggaggtggaggttgcactaagccgagatggc

SEQ ID NO: 162243 - DNA, 201 bp, Homo sapiens
aaacgttcaagtgcaggtgtctttttgatataatgatttcctttgggtagatagatacccggtagtgggattgcagggtcaaatgatggttctacttttakttctttgataaatctccatattgtttttcataggtgttgaactaatttgcattcccactaacagtgtataagcattcccttttttccacatccttgccaa

SEQ ID NO: 162244 - DNA, 201 bp, Homo sapiens
tggagtgcagtggcacgatcttggctcactgcaacgtccgcctcccaagttcaagtgattctcttgactcggcttcccgagtagctgggattacaggtgcrcaccagcacacccagctaatttttgtacttttttagtagagatgaggtttcaccacgttggccaggctggtctcgaatttctggcctcaagtgatccacc

SEQ ID NO: 162245 - DNA, 201 bp, Homo sapiens
tattaagatattcatttttaatgattgttcttgtcctcttatgagagtattatattttgccattgatatgtttttagagaaccgtttatttcctgtttttyactactgcgcatccataataaagatcatcataccctctctctctgtctccttcttgtgcctcctttgcgttttcttcttgctctctctcccgtgtaatct

SEQ ID NO: 162246 - DNA, 201 bp, Homo sapiens
ctgactacaactcgtactaaacatacgaatatttaatttgtttccttcaatagatttttaagttccagagggataggggagttctttttctgtccattttycccccatagcctacccagtgcctgacacatagtggatgctcagttcttatttgttgaataaatgggtgcatgagagaactctcattaataagataacatt

SEQ ID NO: 162247 - DNA, 201 bp, Homo sapiens
ctaaaatattactgcctcagaggcctccatctgctagcctcactattacagttctctggcttttctttgtagcactgactacaactcgtactaaacatacraatatttaatttgtttccttcaatagatttttaagttccagagggataggggagttctttttctgtccatttttcccccatagcctacccagtgcctgac

SEQ ID NO: 162248 - DNA, 201 bp, Homo sapiens
catcctaaaatattactgcctcagaggcctccatctgctagcctcactattacagttctctggcttttctttgtagcactgactacaactcgtactaaacwtacgaatatttaatttgtttccttcaatagatttttaagttccagagggataggggagttctttttctgtccatttttcccccatagcctacccagtgcc

SEQ ID NO: 162249 - DNA, 201 bp, Homo sapiens
tggtgttttttagttcacacaactgcccaggctttttattgccttatccaaatgcacacttcctccatcctaaaatattactgcctcagaggcctccatcygctagcctcactattacagttctctggcttttctttgtagcactgactacaactcgtactaaacatacgaatatttaatttgtttccttcaatagatttt

SEQ ID NO: 162250 - DNA, 201 bp, Homo sapiens
ggtcttgctatgttgcccaggctggtctcaaactcctggccctgagctgtcttcccacctcagcctcccaagtacctaggattacaggcacaagccaccayacctggccacaaataatctttgagtacaacttcatagtcttttatatgtacttctgaaatccgggtagtttcaaaaactgaaacattttcttatgtttag

SEQ ID NO: 162251 - DNA, 201 bp, Homo sapiens
ttaagaaacaaattgtacccttaaaatgttcataaaagtatttgaaattggcaatttttttttttttttacttttaaatttattttttgagatggggtctygctatgttgcccaggctggtctcaaactcctggccctgagctgtcttcccacctcagcctcccaagtacctaggattacaggcacaagccaccacacctg

SEQ ID NO: 162252 - DNA, 201 bp, Homo sapiens
aggcaagaggtaggtggtgacaaatggaaaaatgaattgtttgatggggaacaagaaaagggaggaaggagaataaaacctagattttggcatgggcaatstgcaagtcctattgaattactgtcttcctgtaatgtgtagaataggaaaatccagcttttttaccatggttaaaatgtcctgcatgactgtcccttgttt

SEQ ID NO: 162253 - DNA, 201 bp, Homo sapiens
ttataaactctaagggtgatgggaagccacaggaaggttttgaggagggattgatatgatctgatctgttttaaatagataactgtagttgctgtatggamatagaagtagaagcagggagactattgcaatagtgtaggcaagaggtaggtggtgacaaatggaaaaatgaattgtttgatggggaacaagaaaagggag

SEQ ID NO: 162254 - DNA, 201 bp, Homo sapiens
cagaggccaggttatggagggccttgtggagcttgctgcagagtttataaactctaagggtgatgggaagccacaggaaggttttgaggagggattgataygatctgatctgttttaaatagataactgtagttgctgtatggaaatagaagtagaagcagggagactattgcaatagtgtaggcaagaggtaggtggtga

SEQ ID NO: 162255 - DNA, 201 bp, Homo sapiens
gaaaagagtcttctataagcttatatcgggacttcatgctagcatcaatttacatctatgcgcaaattatcttttggaaggtaatcatatttttaagtcgrgattttgccttctattagtgtaaaaattattggagagaatacatattctttagagcagaaaaaaaatcctgtttactaaaacaatgtaatgtatttctct

SEQ ID NO: 162256 - DNA, 201 bp, Homo sapiens
agcatggtatgttcccagcaaggccagtgtggccagaggagcataatagaagaggtcagagagataggccagaggccaggttatggagggccttgtggagsttgctgcagagtttataaactctaagggtgatgggaagccacaggaaggttttgaggagggattgatatgatctgatctgttttaaatagataactgtag

SEQ ID NO: 162257 - DNA, 201 bp, Homo sapiens
gagtcaatatttctgatatctaaataggtgtaatttctttttcaatatttttctgaataggtttgtgtctggagaaaagagtcttctataagcttatatcrggacttcatgctagcatcaatttacatctatgcgcaaattatcttttggaaggtaatcatatttttaagtcgagattttgccttctattagtgtaaaaat

SEQ ID NO: 162258 - DNA, 201 bp, Homo sapiens
ggcttgttagaggccagagcctcagggagttgctggaaaagctgccaagatttttggcttgaggaactagaataatggagttgctttttactcagatggtragaatttctagaaggaggaggtgcagttttggatatgttaattttgagatacctatgaatgccttgtccaggaagagataatccaggaagcaggtgggta

SEQ ID NO: 162259 - DNA, 201 bp, Homo sapiens
taactccattctgaagccaaaatcttactttgccttctagtgagagaatcttgatctaatcagttttatattattccttgatttattttaatgttcttcartcaaaaataagcctacatactgaacctccttgagtcaatatttctgatatctaaataggtgtaatttctttttcaatatttttctgaataggtttgtgtc

SEQ ID NO: 162260 - DNA, 201 bp, Homo sapiens
caggcatgagccactgcgcccagtgccttgtctttctttgataagatactttttattgaatcagtttccttaattattattggcctattcagattttcatkacttccttactccagcttttgtaggctgcatgtttctagtaatatcttcatttcttctaggttatccaatttattggaacatagtcgtgattagtagtct

SEQ ID NO: 162261 - DNA, 201 bp, Homo sapiens
taaaccacaagaaaacctgtgctgttgctgtctaacatgggaacttgccaactttatccatagtgttttgacccctagttgctcaaacttttctgcttttwtcagcattaagttctcatcatattcagttaactccattctgaagccaaaatcttactttgccttctagtgagagaatcttgatctaatcagttttatatt

SEQ ID NO: 162262 - DNA, 201 bp, Homo sapiens
taattaaagataccatccagcctggcacagactgtgtgtaggccaggagaagctctccagcaatttcctgctaagtgtgttgtgtgtctgggtgcacttasttggtgcatattttattattaatttgcttaaagttacctgtttttcacagtttgtggaaatacatttctattcctctcccctcacttatcccctacctca

SEQ ID NO: 162263 - DNA, 201 bp, Homo sapiens
aaagaggaagaagagaaccattttctaaattgtgtaattgaattgctctatgttgttagaagttggtggattctgccttggtaagtcagcttttgcagatrtcacttcagagtgagattgagaaggcttttgcctggacctcggtaattaaagataccatccagcctggcacagactgtgtgtaggccaggagaagctctc

SEQ ID NO: 162264 - DNA, 201 bp, Homo sapiens
  misc_feature (1)...(201): n = A,T,C or G
agtagttctaaatgctttctctgtcacccagtctggagtgcaatggcatgatctagctcattgctgtcattttaaattctgaaccttataggtgccacgangataggaagtattccttcttattcaccaccatgtcactggtgcccaacacaatgacactttgagagcaccccataactataatatgagtttactaacttt

SEQ ID NO: 162265 - DNA, 201 bp, Homo sapiens
tgggttcccagatactggcttgttagaggccagagcctcagggagttgctggaaaagctgccaagatttttggcttgaggaactagaataatggagttgcwttttactcagatggtgagaatttctagaaggaggaggtgcagttttggatatgttaattttgagatacctatgaatgccttgtccaggaagagataatcc

SEQ ID NO: 162266 - DNA, 201 bp, Homo sapiens
tgcagaaacttatctcaggagcaagtcagggaagaaagcgcagagggtgctgttcctcctgttcttgctggcagaggcctccaacctttttccaaggagasagtggatggctgggattagcgcctgaagtaagccaggggaagaaggcacatagagtgctgtcccttctgtttaggctcaaggaggtttattctttatttg

SEQ ID NO: 162267 - DNA, 201 bp, Homo sapiens
ggaagaagacacagggaatatccccttctctttcttgtcatggagaggtccccttgcctccttctaatgagaggttgcagaaacttatctcaggagcaagycagggaagaaagcgcagagggtgctgttcctcctgttcttgctggcagaggcctccaacctttttccaaggagacagtggatggctgggattagcgcctg

SEQ ID NO: 162268 - DNA, 201 bp, Homo sapiens
cttactctcccgttcaagcaagaagtctcacatgcaccttgcaggagtaaccttttggtctggagttccctgaagcaagccagggaagaagacacagggamtatccccttctctttcttgtcatggagaggtccccttgcctccttctaatgagaggttgcagaaacttatctcaggagcaagtcagggaagaaagcgcag

SEQ ID NO: 162269 - DNA, 201 bp, Homo sapiens
atttcagagttgggattgtgtctggagcaagccagggaaggaggtgcagagtgtgcttactctcccgttcaagcaagaagtctcacatgcaccttgcaggrgtaaccttttggtctggagttccctgaagcaagccagggaagaagacacagggaatatccccttctctttcttgtcatggagaggtccccttgcctcctt

SEQ ID NO: 162270 - DNA, 201 bp, Homo sapiens
gtaacgagtatgcaaaatattttaaaagtggagacattccttttggaaggaagtactttttatatataaaattaatggaagataaatatgaattcaaaagrttcgaaacatatttgccacgttaatatagtctaaccttgtctgattaaaagataaagcaatatagatcctgatatattagatgcttttgcattcttgtac

SEQ ID NO: 162271 - DNA, 201 bp, Homo sapiens
ctgatctgaagctattactgaagcatgccaggagaaaggcacagggagtgctgactttccttttcaggaatggggaggtcccccgcctccttccattgagrgattgtgggagtttgtctctagagcacatggaggcagaaggcatgagaagtgctgtcccttccattcgtggtggcagagatttcagagttgggattgtgt

SEQ ID NO: 162272 - DNA, 201 bp, Homo sapiens
aaaaaatgtgttttaggttaacatatggggataaaattatgtgaaaagtttgaagatagtggtcagctaaaaaccaggtttatataaatacacaggccaartactgtcatcaggttttcataactggttccctaatcttatttctgttctgtatgtaatgttcattcaaactacttctctagtaacgagtatgcaaaatat

SEQ ID NO: 162273 - DNA, 201 bp, Homo sapiens
tattttcatggagagttgaagacctggaattattgccagagcctgtaggggaaaaggtgcaggaagcccactctactttttgggccagcaggtctcatgcycccctagcagggggagacttctgatctgaagctattactgaagcatgccaggagaaaggcacagggagtgctgactttccttttcaggaatggggaggtc

SEQ ID NO: 162274 - DNA, 201 bp, Homo sapiens
ctttttttttttttttttcaagtgtttaacatgttttgaaatatgtatacattgtggaatgggtatattgagctaattagctcacataccatttttttggygaaaacacttaaaatcgcagcaattttcaagaatacaatacgttgtaattaactgtagtcagcatgttctacaataaatctcttgaacttactgcatttc

SEQ ID NO: 162275 - DNA, 201 bp, Homo sapiens
gtggtctaggagactcaggagtgtagggcttcatcaactcccagagctaggtgatttagcagcctatccctccagtgaaggctataaaagttggggttctygatgtgttcaaaaattattttcatggagagttgaagacctggaattattgccagagcctgtaggggaaaaggtgcaggaagcccactctactttttgggc

SEQ ID NO: 162276 - DNA, 201 bp, Homo sapiens
gtggtagtttaaattagattgatagaggccatattttttagtacgttgggtactagacttttcctgttggcacttgaggtgttttgaatcacaagtgatayaatgataaatgatccttactatatgttgaatgaattaatttgttagacgttttcatttttgtacaaagtatgaagactctcaggaggcaaagtaattccc

SEQ ID NO: 162277 - DNA, 201 bp, Homo sapiens
tacataaacaatggtaatgaggtaaagaaatactccatagatggtacaaacagtaggtgatatatatagctccttagaggagaaacagatcgtatctcacrggagcgatgtgggaaagcttactggaggaggggtagcatttgaggtgaattttgaataatgggacagatttagatccgtacaattggatagtgcatgttg

SEQ ID NO: 162278 - DNA, 201 bp, Homo sapiens
tggaagagagagatagctgctgaatatttatttgcaagtttaaaagtcacctgtttgttctctgtggtctaggagactcaggagtgtagggcttcatcaamtcccagagctaggtgatttagcagcctatccctccagtgaaggctataaaagttggggttcttgatgtgttcaaaaattattttcatggagagttgaaga

SEQ ID NO: 162279 - DNA, 201 bp, Homo sapiens
agagtttatctcccactgattctgctctgcaccaaagagagcatctgaggcagatgcctgtattcttgatctaactggtgactttttaacttggaagagagagatagctgctgaatatttatttgcaagtttaaaagtcacctgtttgttctctgtggtctaggagactcaggagtgtagggcttcatcaactcccagagc

SEQ ID NO: 162280 - DNA, 201 bp, Homo sapiens; identical to SEQ ID NO: 30226

SEQ ID NO: 162281 - DNA, 201 bp, Homo sapiens; identical to SEQ ID NO: 30228

SEQ ID NO: 162282 - DNA, 201 bp, Homo sapiens
attgggatgttagatgtgtgctttggtttcttctttccttgcagagaagctgaaagccagagtttatctcccactgattctgctctgcaccaaagagagcrtctgaggcagatgcctgtattcttgatctaactggtgactttttaacttggaagagagagatagctgctgaatatttatttgcaagtttaaaagtcacct

SEQ ID NO: 162283 - DNA, 201 bp, Homo sapiens
ataaaattcaatttcttttggtccccatccatgacaatttgaatattctagcaagaattcccaattagggaacgagaactcaaaagaattattttttctarttagaggccacgtgcttcagaatcatctgtgataggacagaaagagagagtgaattgctggaaaatcttaatagacacaaagaaaaccacatactcttac

SEQ ID NO: 162284 - DNA, 201 bp, Homo sapiens
ctcttttaggcgaagatgatggtgagcaaaactcatgtttgtttgtttcaagtgtggaggaaattttttgtaacaatcagaatttgatttttcctttatgkaattcaaaagaaagtattcctgttttctaagaaaatagctactaatgaatggtgaccaaaaaaaaaaagattattttatatatatcaagttatcctatgt

SEQ ID NO: 162285 - DNA, 201 bp, Homo sapiens
cctcaggtgatccacccaccttggcctcccaaagtcctgggattaccgccgtgagccaccacacctggccaaaatgtgcaaatcttatactctttgacctrtattctgattaagaggactcatttgcagggcgtctactcagtgaccaaggtttgtgatataattaatagtttaacagttttaatctcaaaaaatagtatt

SEQ ID NO: 162286 - DNA, 201 bp, Homo sapiens
cacatttctgagtcataacccctaggcttatacaactattttctaacaggttttgagcaataggaacttttgtccaaaaatgaaatcttatttcagaaccyacataataaagctgataggcagagctgctgtgttgccctagagcccaacctctggcctcttcctcacctctaggcctcctggaagcagcaccttgcccaa

SEQ ID NO: 162287 - DNA, 201 bp, Homo sapiens
ggcttcttatcctttgtctcttttactacttttgcctcacaacttttctattttcaacttaaaggttttaattaaacaaaattttataaaaattgaagcartatagtagttatataaagtgaaaagggaaagctcttctattccatagtacagagtttgaaaggtgttcttccagaccttttctacagccacttaatactt

SEQ ID NO: 162288 - DNA, 201 bp, Homo sapiens
ggtcctgaaaaagacgtgcctggcttcttatcctttgtctcttttactacttttgcctcacaacttttctattttcaacttaaaggttttaattaaacaamattttataaaaattgaagcaatatagtagttatataaagtgaaaagggaaagctcttctattccatagtacagagtttgaaaggtgttcttccagacctt

SEQ ID NO: 162289 - DNA, 201 bp, Homo sapiens
tgcaatttatctctctcttcaaagctattgatatttgctttatatatttaccttttcagaagttgggtgcatatatatatttagtttttgtaacttcttgrtaaattgacccccttatcattttaaatgaccttctttatctctttttacatgtttgacttaaagtctattttgtctgacatatggatagctacccctgct

SEQ ID NO: 162290 - DNA, 201 bp, Homo sapiens
gcatatatatatttagtttttgtaacttcttgataaattgacccccttatcattttaaatgaccttctttatctctttttacatgtttgacttaaagtctrttttgtctgacatatggatagctacccctgctcttttggtttctagttgcatagaacatctttttctatcttttcagtctgtgtgtgtccttagaggtga

SEQ ID NO: 162291 - DNA, 201 bp, Homo sapiens
aacagtaattagttgtaagctttgttttcctttcactttctgcttttcttacctaatcagttagtctagtttgttgtccttaaaaatctgtaccaatgtcyttcctaaagggaacattctttaaaaatttataatattcagtttcctttaagaataaaatatgtattaagtattttgtttaaagttctgtttgataaaccg

SEQ ID NO: 162292 - DNA, 201 bp, Homo sapiens
ttatctctttttacatgtttgacttaaagtctattttgtctgacatatggatagctacccctgctcttttggtttctagttgcatagaacatctttttctrtcttttcagtctgtgtgtgtccttagaggtgaagcaagtcttttataagcagcatatagttaggtcttattttttaatccattcgccacttttaatccaa

SEQ ID NO: 162293 - DNA, 201 bp, Homo sapiens
tcattgataggtaaggacttactattgccattctgttaattgctttttttgttaatctgtaattcgtttgttctctcctcctctcttgctgttttcctttrtggtttgatgatttttttatagtggtatgccttgaatcttttatcttttctgcaactactaaaggtttttgctttgtagttaccatgagacctacataca

SEQ ID NO: 162294 - DNA, 201 bp, Homo sapiens
aactgcttagtgaatcattggtcattagtatgtcctataacacctttataaatgtctttttaaaagatactagttgagggaaagttttcttagtttaaaakcagtgtatattgtcgttttgatgcagctttcagaataccatgagcttttagccactttgaggacaataaatatttttctaaagtttattttatggaatgt

SEQ ID NO: 162295 - DNA, 201 bp, Homo sapiens
gtgccaccacacacggctaattttgtattttttagtagagatgaggtttcaccatgttggccaggctggtcttgaactcctgaccataggtaatccacccrccttggcctcccaaagtgctgggattacaggcgtgagccaccgtgcctggcctgatcatcttttagatagtactttaatctataacatggttacacgtac

SEQ ID NO: 162296 - DNA, 201 bp, Homo sapiens
ttctgttgctgaattaaaaaattagctttaaatttagcagcttaaaacagcagggctgggcatggtggctcacgctcgtaatcccagcactttgggaggcygaggctagtggatcatttgaggtcaggagttcaagaccagcctggccaacatggtgaaaccccatctctactaaaaatacaaaaaaaattaggcagtagt

SEQ ID NO: 162297 - DNA, 201 bp, Homo sapiens
agcctggtttcccggagaagaggtcgccccgcttcccccgcccgcaccccccggtgttttggaggcccgcgtggtcccgcctcattggccgccgcggagcycgaggcctcggggaggcggggcggccttcgcagttgtagttcccgagtcctctcgttcagcggctccgccttcctgccgcggcgcctaggcgaccgccca

SEQ ID NO: 162298 - DNA, 201 bp, Homo sapiens
gaggaagtaaggatccaatcttgggtaaggtggttcttttcacccaagcttgtctacctgcaacatttccacaactgaggtaattacatcccctttattcytgaagggtgatctgagtagtatgttacagtgtctaccacagtccactcgttgcaccatgtatttctgttgctgaattaaaaaattagctttaaatttagc

SEQ ID NO: 162299 - DNA, 201 bp, Homo sapiens
tatctctccatcagttggtcattggatgaaggccaccagaggaagtaaggatccaatcttgggtaaggtggttcttttcacccaagcttgtctacctgcarcatttccacaactgaggtaattacatcccctttattcttgaagggtgatctgagtagtatgttacagtgtctaccacagtccactcgttgcaccatgtat

SEQ ID NO: 162300 - DNA, 201 bp, Homo sapiens
ccactgcacctggccgtgttaactattttttaaaatattagtttcttaaattgtagaaagtaagaaatattttttaagaatttacatgaaatcatcccctkaagattttcaagattatatttaaaatcaattatttttatattcttataaaaccatggtacctactaattggtttaccatgactcttctgagttgtaatgt

SEQ ID NO: 162301 - DNA, 201 bp, Homo sapiens
ggaataacccttccgagttagtcgtccccatttggcacgagaggtataggcctttatatctctccatcagttggtcattggatgaaggccaccagaggaartaaggatccaatcttgggtaaggtggttcttttcacccaagcttgtctacctgcaacatttccacaactgaggtaattacatcccctttattcttgaagg

SEQ ID NO: 162302 - DNA, 201 bp, Homo sapiens
tgtagtaccagctacttgggaggctgaggcaggagaatcgcttgaacctgggaggcggaggttgtggtgagctgagattgcgccactgcactccagcttargcaacagagtgagactccgtctcaaaaaaaaaaaaaaaaaaaaagtccaaatagtggagatcggggtaaatactcatttgggtttcaatatggaaaatgg

SEQ ID NO: 162303 - DNA, 201 bp, Homo sapiens
tttttgtttattttcctggagctagacaagttgtcacaggttaggttctctgggaagcatatgctgagacagtgataagtgtacaagagcttagttagggwatactcttgggaacaacagtttggggaaggcagggaatcaggattgggcaaagggagatgtcaagctgtgatgcagcctcagtggaaacctcaggtaagc

SEQ ID NO: 162304 - DNA, 201 bp, Homo sapiens
attgcttgaacctgggaggcggaggttacagtgagttgagatctcacactgcactccagcctgagagacaaagcaagactctgtctcaaaaacaaaagtgycaggtaattcttggaaggcatggatcaagatgctgttttgcccttgtgatcatggataatcccagtctgtggtcattgactgtccagggaatactgttta

SEQ ID NO: 162305 - DNA, 201 bp, Homo sapiens
gtcatttatttctaaattgtccatttacctattctttgattaaagtataaataatagtgcttatttaataggttttcaaattaataatttgtgtgactatrtattactcttatggtaaataggtatttaataaaaatacttaattgcaggaagtacttgctataaataaattgatatgtagattacctgccatcagtataa

SEQ ID NO: 162306 - DNA, 201 bp, Homo sapiens
gttatatttttcacagtggaaaagaatttggggattaagtgtgcatagttggaaatagtagttctttggaactcttcaagtatctagaatgatctgctttytaaagttttaaaaaagattcacgggtagaattgtgctataaatccagcccatagtggagtaagttagagtgagcttctacgatagtatggtaaactgaga

SEQ ID NO: 162307 - DNA, 201 bp, Homo sapiens
taatttttattctgacatcctggatactaaacttttctgattgtcttcctgtctagtggaccagtctgtcttagcattctttctttgttcctcccctgccmttgactgctaatcatttgaacctcagggttcaaagcttgtactctttcttctctttatcttagtcatctcttctggtctcttagctttaaataccaaatg

SEQ ID NO: 162308 - DNA, 201 bp, Homo sapiens
cttggtattgttatatttttcacagtggaaaagaatttggggattaagtgtgcatagttggaaatagtagttctttggaactcttcaagtatctagaatgmtctgctttttaaagttttaaaaaagattcacgggtagaattgtgctataaatccagcccatagtggagtaagttagagtgagcttctacgatagtatggt

SEQ ID NO: 162309 - DNA, 201 bp, Homo sapiens
aatgaaaatataaactgaattatagcttcagtactggattttgctatgtagaccttattattcataatggcatttattgagagcctgtgttccaggccctrtgttaagtgccttaaatacattatttctggtctttgcagctaccttcataagtgtgtattatttcatatctgagaaaactgagtctgaaaaagactaaat

SEQ ID NO: 162310 - DNA, 201 bp, Homo sapiens
tattttaactttaacccttttataagacattttaatcaatgaaaatataaactgaattatagcttcagtactggattttgctatgtagaccttattattcrtaatggcatttattgagagcctgtgttccaggccctatgttaagtgccttaaatacattatttctggtctttgcagctaccttcataagtgtgtattatt

SEQ ID NO: 162311 - DNA, 201 bp, Homo sapiens
aattattattgactagtcctaataattcagtatagttaagaaatataaattactcaaggaaattaatacatatattttcctataacttgttttttgtcatyccttcatgtaatcactaatagcagaattgtgacatcatctaatctttaactgacctcagattatctattttaattacactagaatacagtattaaaagtt

SEQ ID NO: 162312 - DNA, 201 bp, Homo sapiens
tttacctttatatacctgatttatacagttttttgtaccttgttttttccttttgtgttatgaataaagagggtagcaaaatgatgcctctctgatagatmctaccatcatgagtattcaatacagagaaggcctgaatataggttcaagttaatgtagatcaaagttgatttcaaggaatgtagttgttacttatcagtt

SEQ ID NO: 162313 - DNA, 201 bp, Homo sapiens
tcaaagttgatttcaaggaatgtagttgttacttatcagttcttcaagttagaaatcttgatcatagattttgttaaatgttaactaggctgtgaaacgartgatacaccatgataaaagtggcattgttgtaaccagtgaataccacattggatgggagattatagaaatacagttattggtattttagatcttgtaagt

SEQ ID NO: 162314 - DNA, 201 bp, Homo sapiens
agttctttttctgtccatttttcccccatagcctacccagtgcctgacacatagtggatgctcagttcttatttgttgaataaatgggtgcatgagagaaytctcattaataagataacattaggaggctggaagacattcaagtagttctaaatgctttctctgtcacccagtctggagtgcaatggcatgatctagctc

SEQ ID NO: 162315 - DNA, 201 bp, Homo sapiens
agcctataaaagaaataagaaggaatatactctactcaatatactctacctacaacagtggcaaagaaaggaaagctttaaaaagaaaaagctaagagaaraggttaatttaacttattattattttttaattttaatttttttttttttgagacagagtcttgctctgttgcccaggctggagtgcagtggtacgatctt

SEQ ID NO: 162316 - DNA, 201 bp, Homo sapiens
cagggtcttgccatgtttgcccaggccgatctcaaattcctggcttcaagtgatctatcgattgatcaatctatctatctatccatgtgtctttttgtttyctaggcttacgtcagctaaattaatttttttttgtttttttttagacagggtctcgctctgtcgcccagactggagtgcagtggctccatctcagttcac

SEQ ID NO: 162317 - DNA, 201 bp, Homo sapiens
cttctgtaactgtcctattttaaatggttagcagccccagttctgcagtctgtttccagtccttagttttatctatatcactttattaccatctgacattytgtactttgttcattcattttgcacccccttttccctatgagaatgtaaactccttgagggcagagatttttgtctgtcttttttttttcttctaatttt

SEQ ID NO: 162318 - DNA, 201 bp, Homo sapiens
atcaaagatataaatagacattttacacaagaagaaatataaatgtgtcataaaacatatgaacattgtaccttcttagtgcaaataagaaaaaagataayctttcatgctaactagattggcaaaaattaaagcatagattaatattaaatattgatgaggatatgggctggcacagtggctcacacctgcaatcccagc

SEQ ID NO: 162319 - DNA, 201 bp, Homo sapiens
ttagatatatgtaagtttttctaaatgcatttctgaggtggcataaaattgagtaatacacagagcccctcaatatatgaaaagccagaaacttagaactyaaatagtgctataccagtccgttactctgagggcttctcctaaaccctaaagatcttgagctgctttagcagttgcatggagtggagtgggcaagaaata

SEQ ID NO: 162320 - DNA, 201 bp, Homo sapiens
ttaaaactcgatggatagattaaatagctgatcatatccagctgaagaaatgattattgaattagacaaccatttcatgtcttttttctttctccttaatyctccatcaccttttcatctatccttactctcagttcataccttactaaaattggagcaatcagaagagaaattccacagagtaacccatatctatccatt

SEQ ID NO: 162321 - DNA, 201 bp, Homo sapiens; identical to SEQ ID NO: 30217

SEQ ID NO: 162322 - DNA, 201 bp, Homo sapiens
aattgactcacagctgtacaggaagcatggctggcgaggcctcaggaaacttacaatcggggaagtgctgcacacttttaaacaaccagatctcatgagarctcactatcaggagaacagcaagggggaagtccgcccccatgattcaaacacctcccaccaggcccctccccaacactggggattataatttgacatgag

SEQ ID NO: 162323 - DNA, 201 bp, Homo sapiens
agtcagtcagtaatcatttactgaatactataagcatcaatgggtatggggcacaggagagagactcagcaggagatgaaatagagtctttacccttaggragctaacaacataagacaaattagtgtgtttggggaacattgagtaaagagcaatcatttgaagaggaatgtgcaaaataaatttattagaccaattgta

SEQ ID NO: 162324 - DNA, 201 bp, Homo sapiens
ccacttgagcttcccaagtagctgggactacggacacatgctattttgcctggctaattaaaaaattttttttgtagagatgggggtctcactttgttgtycagtctggtctcaaacacctggcttcaagtgattctcctgtcttggcctcccaaagtgctgggattacaggcatgagccactgtacctggccatttccca

SEQ ID NO: 162325 - DNA, 201 bp, Homo sapiens
cattatatgttgaagatttttgatttcccattgggtttcaacaaactgcaaagataatcttctttgctaaaagtagggtttgttttgttgacaaaaaaaaattttatattgtatctgtactaacttagagaggccttaatgctgacaagtcagtttctctacaggtcataggaaaaactaagtttccaattgccagtgttt

SEQ ID NO: 162326 - DNA, 201 bp, Homo sapiens
aaaaggattgttgaatattttatctctttctaacaaagatggtaatttatagaaaattaagagacaaaattattacagtggaggctatactgaaataaaawgtctttttctatagtgctaataattgagaaattattaagtgtgggtatcaataatctctgagttttgaattgctaaaagctgtaaaaagtcctttatggt

SEQ ID NO: 162327 - DNA, 201 bp, Homo sapiens
ctattttatttcaggctaatgtcaatggatttggatgtgtcagcaaattcatatgctctcagctctctcctttagaaccagattattgaagattctatacytgacaccaaaatgggtttgaagacacttgtatccagtgatactggtgatcaaatatggaaatatagtcttattctaaaatggaaggaaaatcagaggcct

SEQ ID NO: 162328 - DNA, 201 bp, Homo sapiens
tgatactggtgatcaaatatggaaatatagtcttattctaaaatggaaggaaaatcagaggcctgttctaggattggatctgcagttgtcttttatttcaygctttattgaatcagcatcttgtttcataggaaaaaaaaaacaaaataaaaacaagctactggaccctatatttcaaatttatagtgatttaattgggga

SEQ ID NO: 162329 - DNA, 201 bp, Homo sapiens
tacatttacatttaaaaaaaaaacctatacttaataccaagagaatgctacattttagactttgatttttgttatctaacataattaattatattcctctycttcaacagtaattagttgtaagctttgttttcctttcactttctgcttttcttacctaatcagttagtctagtttgttgtccttaaaaatctgtaccaa

SEQ ID NO: 162330 - DNA, 201 bp, Homo sapiens
tcgcttgagcccaggaggttgagacaagcctaggcaacatagcgatactactgactcaaaaaaaaaaaaagcaaacaaaataaaacaaaaaatatattagygataaaacagataagatatataggaataagtacatcaagaagtatgcaaaacctaaaggaggaaagctttaaaacattcttgaaagacacaaaagtagat

SEQ ID NO: 162331 - DNA, 201 bp, Homo sapiens
caagatattttgagcagagtactttcagatggtattaagatattcatttttaatgattgttcttgtcctcttatgagagtattatattttgccattgataygtttttagagaaccgtttatttcctgtttttcactactgcgcatccataataaagatcatcataccctctctctctgtctccttcttgtgcctcctttgc

SEQ ID NO: 162332 - DNA, 201 bp, Homo sapiens
ttttgagatgaagtctcgctctgtcacccaggctgaagtgcagtggcacaatctcagctcactgcaacctccgcctcctggcttcaagcgattcttctgcytcagccttctgagtagctgggattacaggcgcccgccaccacacccagctagtttttgtatttttagtacagactgggttttgccatattggccaggctg

SEQ ID NO: 162333 - DNA, 201 bp, Homo sapiens
agtggaaacctattgatctttttaaacagtacaaatcttagcccccttcctttgtatggggagttcctcatttttcagttttggtttttaggcagagactrctgtctctatagaagctgaaaatgccacagacttactttgtcagcctctcttataacatagttctgccatctggacacacctactcagcctttgagttgt

SEQ ID NO: 162334 - DNA, 201 bp, Homo sapiens
tctcaagatcctcaaattaatcacatctttgaagtcccctttgccatgcaaaaataatatatttgcttatttcaggaattagggacatcttgggggtgggrcattctgtctactgtatgcatcaagagtagaatggataaattatgatattctaataaaatgtaacacttgcaacagggaaaatgaatgaggtgctacaaa

SEQ ID NO: 162335 - DNA, 201 bp, Homo sapiens
gctcttgcttgggtgacagagtgagactctgtctcaaaaaaaaaaaaaaaaaaaataggatatggctcaacagtaagtcccattcattgttgaggggctgrtaaattggtaaaactgttttggaaatcattttgccatttcctgaaaaagctgaacatatactttcagcggttccattcctaagcatataacctggagaaa

SEQ ID NO: 162336 - DNA, 201 bp, Homo sapiens
ttattctgacatcctggatactaaacttttctgattgtcttcctgtctagtggaccagtctgtcttagcattctttctttgttcctcccctgcccttgacygctaatcatttgaacctcagggttcaaagcttgtactctttcttctctttatcttagtcatctcttctggtctcttagctttaaataccaaatgtacagt

SEQ ID NO: 162337 - DNA, 201 bp, Homo sapiens
ctgtgtccgcctcccaaagtgctaagattacaggtgtgagtcattgtgcctggcccaacctggagaaactcttgcatgtgtttttacaccagaatatgtgyccagaaacatttgtgtagcaatgttctttagccaaatctgaaaacaatctaaatttggattgtggtaattttctattgctgttgtgacaaattgccacaa

SEQ ID NO: 162338 - DNA, 201 bp, Homo sapiens
agatttaatttattcttcctttgctggttcttctatttttcagcccattctaatcagacttttgctcctaccgcacctctgaaactgctcttggcaaggtygccgatgtcctccttgttgctaaggccaacggtttgttcttaaacctcagctttacctgttggcggcattttttcacaactcatcactcactctccttga

SEQ ID NO: 162339 - DNA, 201 bp, Homo sapiens
ttgggtatggtggcttacaccgtaatcccagcactttgggaggtcgaggtgggcggatcatttgaggccaggagttcaagaccagcctggccaacatggcraaaccccgtctctactaaaaatacaaaaattagctggtcatggcggcatgcgcctataatctaagctacttgggaggctgaggagacaggagaatccctt

SEQ ID NO: 162340 - DNA, 201 bp, Homo sapiens
acaactcgggttgggtatggtggcttacaccgtaatcccagcactttgggaggtcgaggtgggcggatcatttgaggccaggagttcaagaccagcctggmcaacatggcaaaaccccgtctctactaaaaatacaaaaattagctggtcatggcggcatgcgcctataatctaagctacttgggaggctgaggagacagg

SEQ ID NO: 162341 - DNA, 201 bp, Homo sapiens
acaagtatcaggtatttttctttactgttgaaaaacacaactcgggttgggtatggtggcttacaccgtaatcccagcactttgggaggtcgaggtgggcrgatcatttgaggccaggagttcaagaccagcctggccaacatggcaaaaccccgtctctactaaaaatacaaaaattagctggtcatggcggcatgcgcc

SEQ ID NO: 162342 - DNA, 201 bp, Homo sapiens
ccaaatctgaaaacaatctaaatttggattgtggtaattttctattgctgttgtgacaaattgccacaaatataatgacttaaaaacaatataaatttatyatgctgtagttctgggggccagaattctgaaaatgggatttacagggttaaaatcaagatgtcagcaaggttgcatttccttctggaggctccttttcaa

SEQ ID NO: 162343 - DNA, 201 bp, Homo sapiens
agcatttccccagtgtaggaaacttctctttttttttttttttttttttgagacagagtttcactctagttgcccaggctggtgtgcagtggtgcgatctyggctcactgcaacctccacctcccgggttcaagctattcttcttcctcagcctcccaagtagctgggattacaggcatgcaccaccacacctggcagatt

SEQ ID NO: 162344 - DNA, 201 bp, Homo sapiens
caaatgcttataggcagaagcatttccccagtgtaggaaacttctctttttttttttttttttttttgagacagagtttcactctagttgcccaggctggwgtgcagtggtgcgatctcggctcactgcaacctccacctcccgggttcaagctattcttcttcctcagcctcccaagtagctgggattacaggcatgcac

SEQ ID NO: 162345 - DNA, 201 bp, Homo sapiens
tataggaaccaataaatcaatactgagtgattctcctttggcgagactttcttggtatttctgaaataagtaatttagtcacaactatattttagtgttggaaggttgttttattttacagttgttttagaggtatattgccattttggtattttgtatgttaattcatttttataatgcttcctgttttctaagtatcga

SEQ ID NO: 162346 - DNA, 201 bp, Homo sapiens
ggtgttctttattttcatttgcttaaagtacattaagaaacaaattgtacccttaaaatgttcataaaagtatttgaaattggcaatttttttttttttttacttttaaatttattttttgagatggggtcttgctatgttgcccaggctggtctcaaactcctggccctgagctgtcttcccacctcagcctcccaagta

SEQ ID NO: 162347 - DNA, 201 bp, Homo sapiens
ccaaacttcatgttaggtgttctttattttcatttgcttaaagtacattaagaaacaaattgtacccttaaaatgttcataaaagtatttgaaattggcaatttttttttttttttacttttaaatttattttttgagatggggtcttgctatgttgcccaggctggtctcaaactcctggccctgagctgtcttcccacc

SEQ ID NO: 162348 - DNA, 201 bp, Homo sapiens
ttatcttttggaaggtaatcatatttttaagtcgagattttgccttctattagtgtaaaaattattggagagaatacatattctttagagcagaaaaaaaatcctgtttactaaaacaatgtaatgtatttctctttctctttagaaacctggggtaagcccagttggggacctaatattaaagaattcaaacaccgcttt

SEQ ID NO: 162349 - DNA, 201 bp, Homo sapiens
aaaattgatatttcatagccataaccttataggaatactacagagtaaaactaattctattttatgcatgtcaattggtcatgttatcttatgaatattayttcttttttttttttttgagtcagagtctcgctgttgcccaggctggagtgcagtggcgccatctcggctcactgcaacctctgcctcccagggtcaagt

SEQ ID NO: 162350 - DNA, 201 bp, Homo sapiens
accatttttctgaagtatcctgtgattttatattcttattgcaggtgtatctacaagtaatatattttacacttttattgcatgtgtatccacaagtaatrtgtaatttattgtgtgtaaattttttttaatttaaataataatatttttctatttctttaggttacaaacttttttcagtttgtgcttttactcagtctt

SEQ ID NO: 162351 - DNA, 201 bp, Homo sapiens
tcatcttaatagctgtagtcagttgtatgactataacacatattagccattcctctattgatggacatttcagttgttcccaatttttggctatttcaaayagtaatgcactagcatttttgtcctttgtctcattgtgcacacatgtaagagtttctctaggtctacctgtaaaggcaggattgctgaaccataaggcat

SEQ ID NO: 162352 - DNA, 201 bp, Homo sapiens
gtttgaaaggtgttcttccagaccttttctacagccacttaatacttttaaagcagaaaatacaattttttcacttaagaaaaccatcaagtcctaagaarcacttcatttccatgttagtgatatatcagagacataacactgctgaaaagatgaggaaaaggaaactactacatagaaaaagaggaagggaagaggaga

SEQ ID NO: 162353 - DNA, 201 bp, Homo sapiens
tgagaagatatgagcttttggatgactacaagatttggaattataaaaatggagttgccatttactgacctgtggacagctggaggaggagcaagtctgakacaaagttatagtcaaatttggatttgttaagtttgagctgcctgtgagacatccacttggagatttcaggtaggcagttggatatacaaatctgaaata

SEQ ID NO: 162354 - DNA, 201 bp, Homo sapiens
tatattctttgtcatttttttctccattgggttggattttaaaattattactgatttgtaagcattctttatataatgtgataattctttgttggctgtgwtgttaggatttgtcctttaattttgcatatagttttttgttgttgaacagaaattattctttaaacttaaaaaatttaagtataatacacatatggtgga

SEQ ID NO: 162355 - DNA, 201 bp, Homo sapiens
tctgtactaacttagagaggccttaatgctgacaagtcagtttctctacaggtcataggaaaaactaagtttccaattgccagtgtttttcagtttgctgycttaattttgtaagggagatattcttctaatattctttttgcttggctataacttgttcaactacaatagcaggagtaaggaatgtgtgattgagaaggt

SEQ ID NO: 162356 - DNA, 201 bp, Homo sapiens
agtcaaaagaggaagatggtgacggtccccctgagctgttttcgttttttcctctcggatgtgttaagcggctgggagtgtggcgggagatgggacgggcrtgaaccacctcggctgtcttgcgaagggagcgagcgcccagagaaacggtgacgtccttcccttcaggagttagtgagggagggagactgagagttgggg

SEQ ID NO: 162357 - DNA, 201 bp, Homo sapiens
cttaatgctgacaagtcagtttctctacaggtcataggaaaaactaagtttccaattgccagtgtttttcagtttgctgccttaattttgtaagggagatwttcttctaatattctttttgcttggctataacttgttcaactacaatagcaggagtaaggaatgtgtgattgagaaggtgataaaagaaaattaaaacct

SEQ ID NO: 162358 - DNA, 201 bp, Homo sapiens
  misc_feature (1)...(201): n = A,T,C or G
gggtccgccgggcaggcgctgggcagggggtagcggccgcggtgcagctgctggtcaccctgagcttcctgcggagcgtcgtcgaggcgcaggtaagcccnagtgatagcgggccgggaacccccggccgaacacccgcggccgctacacacgggccgcggctgtgacgcggggagggccgggcagggccgggcagggccg

SEQ ID NO: 162359 - DNA, 201 bp, Homo sapiens
cgttcagcggctccgccttcctgccgcggcgcctaggcgaccgcccaggaccacaactcccacaaggccccgcgcttgggggcgtggccgaggagccaagmgagccgggggcggggccgcctgggggatgaagtgggggcgctcgcctttcctgcctcactcgcagctgccgggtgttggggaaagagtcgcctgcctccg

SEQ ID NO: 162360 - DNA, 201 bp, Homo sapiens
ggaacatagtcgtgattagtagtctctttttcttcgatgtcagttgtaatgtctcctctttaattctgattttgttggcatcttctctttttctttgttartctagctaaaggtttgtctatttgtttatctttaaaaaaaaactttggtttcattgattactgatttctagtttcatgttagtgtggtcacataagatac

SEQ ID NO: 162361 - DNA, 201 bp, Homo sapiens
tacttttactagtgagttttatgttttctaatttatttatttatttatgtttgagatggagtcttactctatcacccaggctggagtgcagtggcacgatsttggctcactgcaacgtccgcctcccaagttcaagtgattctcttgactcggcttcccgagtagctgggattacaggtgcgcaccagcacacccagctaa

SEQ ID NO: 162362 - DNA, 201 bp, Homo sapiens
tatgacctctttattccttcatcttcagagccagcagtatagcatcttccagtctctctctgactctgacactcccgccttcctctctcataaagaactcrtctcacctgaataatccagtatactccttccatctcaagatcctcaaattaatcacatctttgaagtcccctttgccatgcaaaaataatatatttgctt

SEQ ID NO: 162363 - DNA, 201 bp, Homo sapiens
acaaaagaggcacatcacagaaaaattcacacattagattccattaatattaaagttcaaaaatgggggaaaaaaacctcaagcatattgtttagggatgyattaccagaaaaggaaaaactgataacaaaaacaagatttatttctacctttagggagagggaggtagatgtaattaaagaggagcttaaaggatactgg

SEQ ID NO: 162364 - DNA, 201 bp, Homo sapiens
gattccattaatattaaagttcaaaaatgggggaaaaaaacctcaagcatattgtttagggatgtattaccagaaaaggaaaaactgataacaaaaacaakatttatttctacctttagggagagggaggtagatgtaattaaagaggagcttaaaggatactggcagtatttatttttattttttatttttttcctaaga

SEQ ID NO: 162365 - DNA, 201 bp, Homo sapiens
atttctacctttagggagagggaggtagatgtaattaaagaggagcttaaaggacactggcagtatttattttgttatttaattatatattatatataaaraacaatcactagataaaatatttttaaaacctagggagctttttggtttgtatttttttcctatttaggggctatgatttgaagtctttacaaacatatt

SEQ ID NO: 162366 - DNA, 201 bp, Homo sapiens
tcactagataaaatatttttaaaacctagggagctttttggtttgtatttttttcctatttaggggctatgatttgaagtctttacaaacatatttcagaytggctggggaggaaggaaaaaatagaactcgcagtcttgtaagtagtaagtgagagcaatggaatgaaatttgggagttagtgacaggatcctagtgagt

SEQ ID NO: 162367 - DNA, 201 bp, Homo sapiens
tggttgttatgaaaagcaaatttgagatcgttaaaatgtttgccctatgttttcagatatttacaccttcaatgaataagatttatatactttttttttttaaaagaggcaggatcttgctatgttgcccaggttggatccgatctcctgggctcaagcaatccttccccctcaaccttctgagttaactggggctacagg

SEQ ID NO: 162368 - DNA, 201 bp, Homo sapiens
atgaattaatttgttagacgttttcatttttgtacaaagtatgaagactctcaggaggcaaagtaattccccaccgtctagtttatccctagactccttaytcagctcatctgagtgttcggtttttctataatttctatcattctcaatttaaaaaaaaacaacatcgaggataggtaacgcaggaagtgcattaacaat

SEQ ID NO: 162369 - DNA, 201 bp, Homo sapiens
aagtattcctgttttctaagaaaatagctactaatgaatggtgaccaaaaaaaaaaagattattttatatatatcaagttatcctatgttaaaaaaaaaaagaccatttttcctaaatgcttagtttgtaaatcaattcacattacaagttccccattttctggttattatataatttacttgaatatgtcctgaggaagt

SEQ ID NO: 162370 - DNA, 201 bp, Homo sapiens
atttttcctttatggaattcaaaagaaagtattcctgttttctaagaaaatagctactaatgaatggtgaccaaaaaaaaaaagattattttatatatatmaagttatcctatgttaaaaaaaaaaagaccatttttcctaaatgcttagtttgtaaatcaattcacattacaagttccccattttctggttattatataa

SEQ ID NO: 162371 - DNA, 201 bp, Homo sapiens
atatgtgtgtgtatatataacttttatataaaaaccctctttagaactaaatttgaccatatatatatatatatgtttgcacacacacatgtttgctatayatatatggtcaaatttacttcccaagagggttgttttttcagttgatatcaccaacacatcagtgctaattgttaacttttacttttgaatttttattta

SEQ ID NO: 162372 - DNA, 201 bp, Homo sapiens
tgtaacaatcagaatttgatttttcctttatggaattcaaaagaaagtattcctgttttctaagaaaatagctactaatgaatggtgaccaaaaaaaaaaagattattttatatatatcaagttatcctatgttaaaaaaaaaaagaccatttttcctaaatgcttagtttgtaaatcaattcacattacaagttccccat

SEQ ID NO: 162373 - DNA, 201 bp, Homo sapiens
tttttttttttcttgagacagagtcgcactctgtcactcaggctggagtgcagtggtgtgatctcggctcactgcaacctccgcctcctgggttcaagcakttctctgcctcagcctcctgagcagctgggatgacaaggtgccggtcaccacgcctggctaattttttgtatttttagtagagatggggtttcactatct

SEQ ID NO: 162374 - DNA, 201 bp, Homo sapiens
caagtacagtcacaagtatactaaccactataccatttaagttggagattacttgaaaagcatgacatttttcttacctttgagtagtccggtttgctttktactgttaaatcttagataaatggtgaaatatggatggtttttatgaattttttcttgttcagatgagagatctccagctgctcagtatgtagacctatt

SEQ ID NO: 162375 - DNA, 201 bp, Homo sapiens
cctatgcgtcatgtaacatatttttgttgtagtgtgtgtatacttttgaattttaaaaatgtggctattagaaacattttaagttaacactcgtgtgtggygttatatttcaatggaacagcattactgtcatcagtgggatacatcctcagtctgttctcagtgaggaaccaaaccctgggagcaactctgtcattgacc

SEQ ID NO: 162376 - DNA, 201 bp, Homo sapiens
aaaaatgtgaagcttaatgaagataaacccaaataaacccaaagtctggagagtctctggctgagggtccaccaaaatatgcaaaatctgttctaaaaacrtgagataaggccaggcgcatttgcttatgcttgtaatcccagcactttgggaggccgaggcgggtggatcacctgaggtcaggagttcaagaccagcctg

SEQ ID NO: 162377 - DNA, 201 bp, Homo sapiens
atagagggtcgggagaggccgggtgctgtggctcacgcctgtaatcccagcactttgggaggccaaggtgggtggatcatctgaggtcaggagttcaagamcagcctggccaacatggtgaaaccccgtgtcaactaaaaatacaaaaaaattagccgggcatgatggcaggtgcctgtaatcccagctacttgggaggct

SEQ ID NO: 162378 - DNA, 201 bp, Homo sapiens
ccccaccgtctagtttatccctagactccttactcagctcatctgagtgttcggtttttctataatttctatcattctcaatttaaaaaaaaacaacatcraggataggtaacgcaggaagtgcattaacaattttgattcttattgactgctctcttttctttctctttccccaactcagaagaaggttacagggccagg

SEQ ID NO: 162379 - DNA, 201 bp, Homo sapiens
cacaagtatactaaccactataccatttaagttggagattacttgaaaagcatgacatttttcttacctttgagtagtccggtttgctttgtactgttaartcttagataaatggtgaaatatggatggtttttatgaattttttcttgttcagatgagagatctccagctgctcagtatgtagacctattgctgaaccca

SEQ ID NO: 162380 - DNA, 201 bp, Homo sapiens
tactgaggactcccataccctcactatctgcctaagtagtttcttcttaactcctctgtcattttgacactatccgtttgaaaaggtgaagcacactgagktcatccatggttgagtctgtttggcttcgtttcgttttgtttagttttaggctttccgcggcctgaagccatggtttttagtttctgtctctagtgataa

SEQ ID NO: 162381 - DNA, 201 bp, Homo sapiens
tgccctatgttttcagatatttacaccttcaatgaataagatttatatactttttttttttaaaagaggcaggatcttgctatgttgcccaggttggatcygatctcctgggctcaagcaatccttccccctcaaccttctgagttaactggggctacaggtccaagccactgtggccagctcatattttgactgaaatgt

SEQ ID NO: 162382 - DNA, 201 bp, Homo sapiens
aatcttgcatcaagtacagtcacaagtatactaaccactataccatttaagttggagattacttgaaaagcatgacatttttcttacctttgagtagtccrgtttgctttgtactgttaaatcttagataaatggtgaaatatggatggtttttatgaattttttcttgttcagatgagagatctccagctgctcagtatg

SEQ ID NO: 162383 - DNA, 201 bp, Homo sapiens
aaaacccttggaatttgagtcataggagtgccttttgttactcataatgagcccctttcaatcacacttgtgtttatagtaatgaaatgacttaagacggsgaccctacatagatagcctcaggattgggggctggtcaccacaaagacccaagtgattagaaagttgaaacttttggccccaccaatctgcaggaagggg

SEQ ID NO: 162384 - DNA, 201 bp, Homo sapiens
caccatcacagtcaaaatactgaacagttttgtcaccacaaatattgcttctgttgcccttttataaccacactatttccttcctaccctacctaccccaycatccatcccctaccccagtccctaatccctggcaacaaatgatatgctttccatttctaaaattttttcatttaaaaagtgttctgtaaatggaatcat

SEQ ID NO: 162385 - DNA, 201 bp, Homo sapiens
  misc_feature (1)...(201): n = A,T,C or G
ggaatgtatgtatatttagtatatatcattgttgacagattgattattctgccaatagaaactgaaataaagaataaggtaataatttttactaaacttangaacttctttgcagtacttgaaaatggcaaacaataccaaagaattagaagattgtgagcaagctaataaactgggagcaattaacagcacattaaggca

SEQ ID NO: 162386 - DNA, 201 bp, Homo sapiens
  misc_feature (1)...(201): n = A,T,C or G
aataaaacccttatttctctgctagcaaataacacatataaggaagggggaaaaatccagcagtgactttataattacatttacttcagtaagttcttagnctaaaccacaagaaaacctgtgctgttgctgtctaacatgggaacttgccaactttatccatagtgttttgacccctagttgctcaaacttttctgcttt

SEQ ID NO: 162387 - DNA, 201 bp, Homo sapiens
atatgtacttctgaaatccgggtagtttcaaaaactgaaacattttcttatgtttagtgcaaggtaattttttagcaaaacctgacctaaactggtgtaasaatatagcagatattcgtagttttgtggggttgttttcaaattctgcttggtatgaattttttatattttgctacagaaacattaacggatttgactgca

SEQ ID NO: 162388 - DNA, 201 bp, Homo sapiens
ggatgttatattacttaaaagagcactgcgtatccaaaggaaatggaagagttgttttttcttctcttaaggaatttgtccaagttattacaaatcttgcrtcaagtacagtcacaagtatactaaccactataccatttaagttggagattacttgaaaagcatgacatttttcttacctttgagtagtccggtttgctt

SEQ ID NO: 162389 - DNA, 201 bp, Homo sapiens
aaagcctaagggtctcacagcaagcttttaactacacaatgctgggattttgtttgctgtttgtcaagaatgtatgaaggagaacctatgtcccttttccrtctgctgcaaagaacttacattacatgagaatatgaccagcacaggagtttttgtgttctatttatattgtctttctttgccaaggtattgattcctttc

SEQ ID NO: 162390 - DNA, 201 bp, Homo sapiens
aagaaatgattcatgtctctaataaggtgaaggggatgttatattacttaaaagagcactgcgtatccaaaggaaatggaagagttgttttttcttctcttaaggaatttgtccaagttattacaaatcttgcatcaagtacagtcacaagtatactaaccactataccatttaagttggagattacttgaaaagcatgac

SEQ ID NO: 162391 - DNA, 201 bp, Homo sapiens
gttgtttaggctggtctcaaacttatgacctcaagtgatcacacctcggtctcccaaagtgctgggattacaggcgtgagccaccctgcctgaccagtgtrggaaactattatagcaaaatagagggatccagtaagcatctccataacaactgcattagcaaatgtagaggactgtgggaccatgtgtgtcacacaggcc

SEQ ID NO: 162392 - DNA, 201 bp, Homo sapiens
taagaaatgattcatgtctctaataaggtgaaggggatgttatattacttaaaagagcactgcgtatccaaaggaaatggaagagttgttttttcttctcttaaggaatttgtccaagttattacaaatcttgcatcaagtacagtcacaagtatactaaccactataccatttaagttggagattacttgaaaagcatga

SEQ ID NO: 162393 - DNA, 201 bp, Homo sapiens
ctgcctgaccagtgtaggaaactattatagcaaaatagagggatccagtaagcatctccataacaactgcattagcaaatgtagaggactgtgggaccatrtgtgtcacacaggcctgttatcattcatattgattgagcaaccatgacaaacatagtgtggtactaaggagtgatacaaaaattgatcattgttctagga

SEQ ID NO: 162394 - DNA, 201 bp, Homo sapiens
ttaagaaatgattcatgtctctaataaggtgaaggggatgttatattacttaaaagagcactgcgtatccaaaggaaatggaagagttgttttttcttctcttaaggaatttgtccaagttattacaaatcttgcatcaagtacagtcacaagtatactaaccactataccatttaagttggagattacttgaaaagcatg

SEQ ID NO: 162395 - DNA, 201 bp, Homo sapiens
gcctgaccagtgtaggaaactattatagcaaaatagagggatccagtaagcatctccataacaactgcattagcaaatgtagaggactgtgggaccatgtrtgtcacacaggcctgttatcattcatattgattgagcaaccatgacaaacatagtgtggtactaaggagtgatacaaaaattgatcattgttctaggact

SEQ ID NO: 162396 - DNA, 201 bp, Homo sapiens
cttaagaaatgattcatgtctctaataaggtgaaggggatgttatattacttaaaagagcactgcgtatccaaaggaaatggaagagttgttttttcttctcttaaggaatttgtccaagttattacaaatcttgcatcaagtacagtcacaagtatactaaccactataccatttaagttggagattacttgaaaagcat

SEQ ID NO: 162397 - DNA, 201 bp, Homo sapiens
atacaaaaattgatcattgttctaggactagctttctgatataggcttacacaaagcaaaggatcaaaaataagtgaaacataaactagacatatttattrttggttgtatgtagataacaaatggaagcagcaattaagttccttaaaagtaaagaccatgtattatttacttttgtatctcccatagtgcatattttgg

SEQ ID NO: 162398 - DNA, 201 bp, Homo sapiens
acttaagaaatgattcatgtctctaataaggtgaaggggatgttatattacttaaaagagcactgcgtatccaaaggaaatggaagagttgttttttcttctcttaaggaatttgtccaagttattacaaatcttgcatcaagtacagtcacaagtatactaaccactataccatttaagttggagattacttgaaaagca

SEQ ID NO: 162399 - DNA, 201 bp, Homo sapiens
tgaaatattaaagcaggttatgattctgtttggtcttttcaatcctgggtggttaaaacttaagaaatgattcatgtctctaataaggtgaaggggatgtwatattacttaaaagagcactgcgtatccaaaggaaatggaagagttgttttttcttctcttaaggaatttgtccaagttattacaaatcttgcatcaagt

SEQ ID NO: 162400 - DNA, 201 bp, Homo sapiens
tcctcagtggaaagtttattgaattaatatgcagaatgaattttattaatttccattaatgtcagtattttatgtaccatgttatagtatacaagtatcargtatttttctttactgttgaaaaacacaactcgggttgggtatggtggcttacaccgtaatcccagcactttgggaggtcgaggtgggcggatcatttga

SEQ ID NO: 162401 - DNA, 201 bp, Homo sapiens
aacctgggaggcggaggttgtggtgagctgagattgcgccactgcactccagcttaggcaacagagtgagactccgtctcaaaaaaaaaaaaaaaaaaaaagtccaaatagtggagatcggggtaaatactcatttgggtttcaatatggaaaatggttatttagttttaaatatttcaacaagtttgtgaaagttgtgcc

SEQ ID NO: 162402 - DNA, 201 bp, Homo sapiens
taatactatgcttccttggggaaaaagagaaaaaagtcaacttgaggaagaattaaaaaaaaaaaaataggggactaagtaatacaaagattatttcttgkttttcttaacatgtgttttaagttaaaaagaagcagttaaattaaaaacagatttattatatgtcccctgcttttttttttttttttttttaaagagatg

SEQ ID NO: 162403 - DNA, 201 bp, Homo sapiens
ttcctaaaagccatactttcttttttttttaaaaaaaaaaaaaaaaaggctgttgcccagggtggagtgtagtggtgccatcatagttcactgcagcctcygactcctgggctcaagtgatcctcccacttcagcctcccaagcaactgggactagaggcatgtgccaccatgcccatatcaaaagccatacttatacttc

SEQ ID NO: 162404 - DNA, 201 bp, Homo sapiens
cccaggctggagtgcaatggcacaatcttggctcactgcaacctgtctcctaggttcaagcaattctgcctcagcctccctagtggctgggattacaggcrtgcaccaccatgcacagctaatttttttttttatttttagtagagacagggtttcgccatgttggccaggttggtctcaaactcctgacctcaggtgatc

SEQ ID NO: 162405 - DNA, 201 bp, Homo sapiens
tcatatatgtgatgggcttagaacattgcctgtcctcctaagtgattaaggaataatttttcttctatcaaatagttaaagatttttcttctatcaccccygaattgtacatagggatacttgagcttttagaattacttttttatatttcccatcccagagttttactttttggcctgggctgagaagcacttcatttag

SEQ ID NO: 162406 - DNA, 201 bp, Homo sapiens
aattagccaggcgtggtggagtgtgcttgtaatcccagctacttgggaggctgaggtgggagaatcgcttgaacctgggaggtggaagttgctgtgagctragatcatgccactgcactccagcctgggtgacagagcaagacttcatctcaaaaacaacaacaacaacaacaacaaaactgaagtttttgtttattttcc

SEQ ID NO: 162407 - DNA, 201 bp, Homo sapiens
gtgatatatatagctccttagaggagaaacagatcgtatctcacaggagcgatgtgggaaagcttactggaggaggggtagcatttgaggtgaattttgartaatgggacagatttagatccgtacaattggatagtgcatgttggaggaaacagcatgcagctgggagttgagacaagtcaggcatgtttggggagacag

SEQ ID NO: 162408 - DNA, 201 bp, Homo sapiens
ctttataactaaacttcatattgaaaaaactttcatttttatattttgtttaatttgaatgatgaacaaaaagtgtaagattagttcatagtcgagtctcragatctctaggcatgttgttttacataattactgtcatttattgaatgcctgctctgtgccagaccctaaactaggaagtttatgtaaaataattaaaat

SEQ ID NO: 162409 - DNA, 201 bp, Homo sapiens
cttttagaattacttttttatatttcccatcccagagttttactttttggcctgggctgagaagcacttcatttagtcagtcagtaatcatttactgaatrctataagcatcaatgggtatggggcacaggagagagactcagcaggagatgaaatagagtctttacccttagggagctaacaacataagacaaattagtg

SEQ ID NO: 162410 - DNA, 201 bp, Homo sapiens
ctaatgtctgtagatagtatgaagtaacaggcttcctttgccccttctaaaccagtcttaatgagaacactaatttaaacatggaagcttcagtgtttgakgttttttattttaggttttgctttcaaattatagcttatgtaacaatatcaataatttgaaacagtatgcaacatgttagccttactaataagctttttc

SEQ ID NO: 162411 - DNA, 201 bp, Homo sapiens
caacatggcaaaaccctgcctctactaataatacaaaaactagccaggcgtggtggtacatgtctgtagtcccagctacatgggaggctgaggcaggagarttgcttgaacccgacaggcagaggttgcattgagctgagaccatgccattgcactccccactgctcaacagagtcagcctcatcgcaaaaaaaaaaaaaa

SEQ ID NO: 162412 - DNA, 201 bp, Homo sapiens
aatgtctgtagatagtatgaagtaacaggcttcctttgccccttctaaaccagtcttaatgagaacactaatttaaacatggaagcttcagtgtttgaggytttttattttaggttttgctttcaaattatagcttatgtaacaatatcaataatttgaaacagtatgcaacatgttagccttactaataagctttttctt

SEQ ID NO: 162413 - DNA, 201 bp, Homo sapiens; identical to SEQ ID NO: 30218

SEQ ID NO: 162414 - DNA, 201 bp, Homo sapiens
tggcctatagtagtttttaaaattactgtcagggtagctttagaatcattgtttagttattgctgtttcccaaattcagtggattaaaacaaaaatataaagaatattcacccagtttactagggaatatgtccatttcctgctgttttgctgttgataatgacttcatttgaatggaagatgatccctatagatcaaata

SEQ ID NO: 162415 - DNA, 201 bp, Homo sapiens; identical to SEQ ID NO: 30219

SEQ ID NO: 162416 - DNA, 201 bp, Homo sapiens
tcactgcaacctgtctcctaggttcaagcaattctgcctcagcctccctagtggctgggattacaggcgtgcaccaccatgcacagctaatttttttttttatttttagtagagacagggtttcgccatgttggccaggttggtctcaaactcctgacctcaggtgatccgtctgccttggcctcccacagtgctgggatt

SEQ ID NO: 162417 - DNA, 201 bp, Homo sapiens; identical to SEQ ID NO: 30221

SEQ ID NO: 162418 - DNA, 201 bp, Homo sapiens
cttataaaaccatggtacctactaattggtttaccatgactcttctgagttgtaatgttcatatatattccaatggtttatatgcagtttgtttttgttttgttttgttttgagatggagtctcactctgttgcccaggctggagtgcaatggcacaatcttggctcactgcaacctgtctcctaggttcaagcaattctg

SEQ ID NO: 162419 - DNA, 201 bp, Homo sapiens
agccactgcacctggccgtgttaactattttttaaaatattagtttcttaaattgtagaaagtaagaaatattttttaagaatttacatgaaatcatccccttaagattttcaagattatatttaaaatcaattatttttatattcttataaaaccatggtacctactaattggtttaccatgactcttctgagttgtaat

SEQ ID NO: 162420 - DNA, 201 bp, Homo sapiens
atggcatgagaatttgattgtaacctgtggagaagggagaaaatgtatttataagtagtctgaggttgtttcttatcataatggcaagcattggctggcaytgtattaagggcttttacatgcatagtttggctttaaaagaatacaccgttaatcttcacaatagcactagtaggtaggtacaattacttctctgtttta

SEQ ID NO: 162421 - DNA, 201 bp, Homo sapiens
ataaacagtgttaacgatttttttttttttttgagacagagtctcgctgtgtcgcccaggctggagtgcagtggcacaatctcggctcactgcaagctccrccccccaggttcacgccattctcctgcctcagcctcccgagtagctgggactacaggtgcccaccaccacgcccagctaattttttgtatatttagtaga

SEQ ID NO: 162422 - DNA, 201 bp, Homo sapiens
ttatcaggtcctttcccatgcactttgatgagaaatccatgtttgcaggtgacaaaaaaggggccaagtcactaaaggtaaaaagttctcgattgggacayggggttgggagcagtttgctggttatgctttaatgctgtgcatccaaactgttttctttcccagttttccagcttcttgtcagagttggtctgattggat

SEQ ID NO: 162423 - DNA, 201 bp, Homo sapiens
tttaaatgcttttggaaggtaagaaccattatatgttgaagatttttgatttcccattgggtttcaacaaactgcaaagataatcttctttgctaaaagtrgggtttgttttgttgacaaaaaaaaattttatattgtatctgtactaacttagagaggccttaatgctgacaagtcagtttctctacaggtcataggaaa

SEQ ID NO: 162424 - DNA, 201 bp, Homo sapiens
ccgcccgccttggcctcccaaagtgctgattacagacgtgagccactgcacccagcctaattgttaaattttaatatgttgttgatggaaataatatttarttggtggaaatttctgcctcattttcatttgtatttcttacatatgatagggatttttatagtggaatgtatgtatatttagtatatatcattgttgaca

SEQ ID NO: 162425 - DNA, 201 bp, Homo sapiens
tgtttttatatatttatatgtataaataagatagttttattttgtgtatatggttttatttttcctttgtataaatgatatcctatatttaacattctgcwacatttttcattgtacattttgctttctagatctgtccatgttgaaacacagatttattcttttaactgatgaatgattttcatcatataaatatcccat

SEQ ID NO: 162426 - DNA, 201 bp, Homo sapiens
tatagaaatacagttattggtattttagatcttgtaagtatagacacaatttaaattaaaagaattctgaaaataaatttaattacttcggaaaaaatacrtttaacgttataatttctaagttaattgaaaagtttagcttgagttttgtgtttaactacatgttatatgtatttacaaattaatttctccttgaaataa

SEQ ID NO: 162427 - DNA, 201 bp, Homo sapiens
tgttttgacatgtgtccacccatataacatcatcacaattaagataccataggctgggtgttgtgtctcatgcctgtaatcctagcactttgggaggccgmggcagggggatcatgtgaggccaggagttcaagaccaacctggccaacatggtgaaaatactacttaaatactactaaaaataaaaaaattagccaggcg

SEQ ID NO: 162428 - DNA, 201 bp, Homo sapiens
tacactgtgagtgtagatgattcctgtaaaggttcctttggaaaccacaaatccacgtccaaatgccaaatattactgttacagtaaatgcaacccctttytgaaagttcaagtgctgaaaatgcattttaatgaaattaaatcgaaaagaggaagaagagaaccattttctaaattgtgtaattgaattgctctatgttg

SEQ ID NO: 162429 - DNA, 201 bp, Homo sapiens
gaggtataatgaaatatgatacactgcatataaagtatacagtttgatgttttgacatgtgtccacccatataacatcatcacaattaagataccataggytgggtgttgtgtctcatgcctgtaatcctagcactttgggaggccgaggcagggggatcatgtgaggccaggagttcaagaccaacctggccaacatggt

SEQ ID NO: 162430 - DNA, 201 bp, Homo sapiens
ggtttcacatgttggccaggctggtctcaaactcctgacctcaggtgatccacccaccttggcctcccaaagtcctgggattaccgccgtgagccaccacrcctggccaaaatgtgcaaatcttatactctttgacctgtattctgattaagaggactcatttgcagggcgtctactcagtgaccaaggtttgtgatataa

SEQ ID NO: 162431 - DNA, 201 bp, Homo sapiens
agggaagaacaaagagggctaggagtgagagagtggcactgttttaaattgggtggtcagagaagacctaagtgataatacaacatttgaacaaattgccraagaaggtgaaggcatgagtcttactatggttggctgggggatgagcattccaggtatatataaatgttagttgaaaacccccatggcaggatcatgcct

SEQ ID NO: 162432 - DNA, 201 bp, Homo sapiens
tgtggtggcgggtgcctataatcccagctacctgagaggctgaggcaggagaattgcttgaacctgggaggcggaggttgcagtgagctgagatcacaccrttgcactctaacctgggtgacaagagtgagactctgtctcaaaaaaaaaaaaaaaagatttgtatttatgtaccataattgctaatgactcagtataagt

SEQ ID NO: 162433 - DNA, 201 bp, Homo sapiens
atctctactaaaaatacaaaaattagccgggtgtggtggcgggtgcctataatcccagctacctgagaggctgaggcaggagaattgcttgaacctgggargcggaggttgcagtgagctgagatcacaccgttgcactctaacctgggtgacaagagtgagactctgtctcaaaaaaaaaaaaaaaagatttgtatttat

SEQ ID NO: 162434 - DNA, 201 bp, Homo sapiens
gattaggtttgtatttatgagccgggcatggtggctcatgcctgtaatcccagcactttgggaggctgaagtgggcagatcacctgaggccaggagtttargactagcctggccaacatggtgaaaccccatctctactaaaaatacaaaaattagccgggtgtggtggcgggtgcctataatcccagctacctgagaggc

SEQ ID NO: 162435 - DNA, 201 bp, Homo sapiens
ttgtctcattgtgcacacatgtaagagtttctctaggtctacctgtaaaggcaggattgctgaaccataaggcatgcctatctcaacattagaaataatamcaaataattttccaaggcagttgtacctttttaaaaaaatggttgccctgggatgtggtctcactagtgggactgcaggttcaaaggtttaagcattttg

SEQ ID NO: 162436 - DNA, 201 bp, Homo sapiens
tattgcatgtgtatccacaagtaatgtgtaatttattgtgtgtaaattttttttaatttaaataataatatttttctatttctttaggttacaaacttttttcagtttgtgcttttactcagtcttacacttttgaaattttctctgttggtatatgtggattttgctcatcatcttaatagctgtagtcagttgtatgac

SEQ ID NO: 162437 - DNA, 201 bp, Homo sapiens
aagaatgcaaggatgattcttgcattgatgttgataatcatcaaaattcaatatgtgctcctgatttttaaaataataagaatgatgtatatttcttaacmtgatgatttcagtcctaacatcagcatagctaacacgtcttgcatatggggaaacactagaggaattctcacttaggtcaggaaccaagacaaggatacc

SEQ ID NO: 162438 - DNA, 201 bp, Homo sapiens
tgcttctgttgcccttttataaccacactatttccttcctaccctacctaccccaccatccatcccctaccccagtccctaatccctggcaacaaatgatrtgctttccatttctaaaattttttcatttaaaaagtgttctgtaaatggaatcatatagtgtgtaaccttttggcttggctttttcattcaggataattc

SEQ ID NO: 162439 - DNA, 201 bp, Homo sapiens
acacatgattcaacaagcaaggaatacaggtggaggtaacagtctgcctttatgcagttgggcagttggctgctgtagctggtatttctaacttctctttyttacttcttattcctttcctttatgcagtaaatatttattgaatgattagtttgtgtcaggtactatggatacagtagtgaataagacaaaacttttctg

SEQ ID NO: 162440 - DNA, 201 bp, Homo sapiens
tggttggggggcaggcagaggcatgagaattgcttgaacccaggaggtagaggttgcagtgagccaagatcacgccactgcactccagcctgggtgacagygagactctgtctcaaaaataagaaaatgtagttacatgaaaaaagttatatgtaaaaaatgcaaaagaatcaataataaaaacaataaaacatatgttaa

SEQ ID NO: 162441 - DNA, 201 bp, Homo sapiens
gtatgcaacatgttagccttactaataagctttttctttcttccataggctttctacaagtataagagacttacagaattttaaagtcttattacaacacrgtaggtaataaaggcttttatgtgtctaactagagacataaagtgactgtggaaagccttttaattatggacattcatcagaaagacactaatctgactt

SEQ ID NO: 162442 - DNA, 201 bp, Homo sapiens
tatataaattctaggtcactggagttctggatgattgcttgtgtgatattgacagcatcgataacttcaatacctacaaaatcttccccaaaataaaaaamttgcaagagagagactattttcgttattacaaggtaaggttgtaattttttattctgttgatatcaaaggtttatatgtgacctttatgatccttttgaa

SEQ ID NO: 162443 - DNA, 201 bp, Homo sapiens
caagtagttctaaatgctttctctgtcacccagtctggagtgcaatggcatgatctagctcattgctgtcattttaaattctgaaccttataggtgccacraagataggaagtattccttcttattcaccaccatgtcactggtgcccaacacaatgacactttgagagcaccccataactataatatgagtttactaact

SEQ ID NO: 162444 - DNA, 201 bp, Homo sapiens
tatttcttgtttttcttaacatgtgttttaagttaaaaagaagcagttaaattaaaaacagatttattatatgtcccctgctttttttttttttttttttwaaagagatgagggtctcgctctgtcatccaggctggaatgcagtggcacaatcatggctcactgcagcatccaaatcctggggtcaggcgttccttccac

SEQ ID NO: 162445 - DNA, 201 bp, Homo sapiens
tgacctcaggtgatccgtctgccttggcctcccacagtgctgggattacagccatcagccaccgtgcctggcctatagtagtttttaaaattactgtcagkgtagctttagaatcattgtttagttattgctgtttcccaaattcagtggattaaaacaaaaatataaagaatattcacccagtttactagggaatatgtc

SEQ ID NO: 162446 - DNA, 201 bp, Homo sapiens
tcagtggattaaaacaaaaatataaagaatattcacccagtttactagggaatatgtccatttcctgctgttttgctgttgataatgacttcatttgaatrgaagatgatccctatagatcaaatagtagtttttaaaataatttagtaatttaatatcctttaaggtaaactgctttccctaccactcttttttgttgtt

SEQ ID NO: 162447 - DNA, 201 bp, Homo sapiens
tggaccctatatttcaaatttatagtgatttaattggggaaatttcaggcttagaattagattttcacttggccttgttacatttacatttaaaaaaaaaacctatacttaataccaagagaatgctacattttagactttgatttttgttatctaacataattaattatattcctcttcttcaacagtaattagttgtaa

SEQ ID NO: 162448 - DNA, 201 bp, Homo sapiens
aaaacaaaaatataaagaatattcacccagtttactagggaatatgtccatttcctgctgttttgctgttgataatgacttcatttgaatggaagatgatycctatagatcaaatagtagtttttaaaataatttagtaatttaatatcctttaaggtaaactgctttccctaccactcttttttgttgttgttgttactg

SEQ ID NO: 162449 - DNA, 201 bp, Homo sapiens
agccaggcgtggtggtggacacctgtaatcccagctacttggggggctgaggcaggagaatcacttgaacccaggaggcagaggttgcagtgagccaaaaytgcaccattgcactccagcctgggtgacagagtgagactctgtctcaaaaaataaaaaaaaaataaagatcttgagacatagggagcatggtatgttccc

SEQ ID NO: 162450 - DNA, 201 bp, Homo sapiens
gggagtctgaggtgggtggatggcttgagcccaggaattccagcccaacctgggaaacatagtgagaccttgtctctacttaaaaaaaaaaaagaaagaaraaaaaaattagccaggtgtggtggtacatctgtggtcccagctacttgggaggctgaggtacaaagatcacctgagcccaggagttcgaggctgcagtga

SEQ ID NO: 162451 - DNA, 201 bp, Homo sapiens; identical to SEQ ID NO: 30227

SEQ ID NO: 162452 - DNA, 201 bp, Homo sapiens
ctagcagggggagacttctgatctgaagctattactgaagcatgccaggagaaaggcacagggagtgctgactttccttttcaggaatggggaggtcccccgcctccttccattgagggattgtgggagtttgtctctagagcacatggaggcagaaggcatgagaagtgctgtcccttccattcgtggtggcagagattt

SEQ ID NO: 162453 - DNA, 201 bp, Homo sapiens
ggattggttgaagccaggagttcaaaatcagcctggccaacaagtgagatcctgtctctacaaaaaattaaaaaaaaaaatagccaggtgcagtggcatgrgcctatagtcccagttacttgagaggctgaggcaggaggatcactttgagttcatgagtttgagactgcaatgagctatgattgtgccactgtactcccc

SEQ ID NO: 162454 - DNA, 201 bp, Homo sapiens
atcaactcccagagctaggtgatttagcagcctatccctccagtgaaggctataaaagttggggttcttgatgtgttcaaaaattattttcatggagagttgaagacctggaattattgccagagcctgtaggggaaaaggtgcaggaagcccactctactttttgggccagcaggtctcatgctcccctagcagggggag

SEQ ID NO: 162455 - DNA, 201 bp, Homo sapiens
aaatcagcctggccaacaagtgagatcctgtctctacaaaaaattaaaaaaaaaaatagccaggtgcagtggcatgggcctatagtcccagttacttgagwggctgaggcaggaggatcactttgagttcatgagtttgagactgcaatgagctatgattgtgccactgtactccccagcctgagtgacaaagtgagacac

SEQ ID NO: 162456 - DNA, 201 bp, Homo sapiens
gtttatctcccactgattctgctctgcaccaaagagagcatctgaggcagatgcctgtattcttgatctaactggtgactttttaacttggaagagagagatagctgctgaatatttatttgcaagtttaaaagtcacctgtttgttctctgtggtctaggagactcaggagtgtagggcttcatcaactcccagagctag

SEQ ID NO: 162457 - DNA, 201 bp, Homo sapiens
agtttatctcccactgattctgctctgcaccaaagagagcatctgaggcagatgcctgtattcttgatctaactggtgactttttaacttggaagagagagatagctgctgaatatttatttgcaagtttaaaagtcacctgtttgttctctgtggtctaggagactcaggagtgtagggcttcatcaactcccagagcta

SEQ ID NO: 162458 - DNA, 201 bp, Homo sapiens
gagtttatctcccactgattctgctctgcaccaaagagagcatctgaggcagatgcctgtattcttgatctaactggtgactttttaacttggaagagagagatagctgctgaatatttatttgcaagtttaaaagtcacctgtttgttctctgtggtctaggagactcaggagtgtagggcttcatcaactcccagagct

SEQ ID NO: 162459 - DNA, 201 bp, Homo sapiens
ttgataataatgtcttttggtgtgtgagtctcttcggattcctcctatcaagttttcattgaacttcctggatctggctgggtgttttttttttttttttygctttgtttttcttttttttctttctctctctctctttctgtccttctttctttctttcatcataagcaagctaacaggagggatctggctttctgtttc

SEQ ID NO: 162460 - DNA, 201 bp, Homo sapiens
ccaagttgttgggattacaggtgtaagcccctgcacccagccgttttcatatgtttttaatattgctagttggcagcatttttcttcagcttgaaggatcsttttagcatttctcataaggcagatctagtggtgataaatttccttacgttttgtctgagaaagtttttatttccccttttatttttgaagaacaggatc

SEQ ID NO: 162461 - DNA, 201 bp, Homo sapiens
gaacccaggaggtagaggttgcagtgagccaagatcacgccactgcactccagcctgggtgacagtgagactctgtctcaaaaataagaaaatgtagttayatgaaaaaagttatatgtaaaaaatgcaaaagaatcaataataaaaacaataaaacatatgttaatatagcaagccataaacttgatatacaaaaagtca

SEQ ID NO: 162462 - DNA, 201 bp, Homo sapiens
tagaggttgcagtgagccaagatcacgccactgcactccagcctgggtgacagtgagactctgtctcaaaaataagaaaatgtagttacatgaaaaaagtwatatgtaaaaaatgcaaaagaatcaataataaaaacaataaaacatatgttaatatagcaagccataaacttgatatacaaaaagtcaatatcttcataa

SEQ ID NO: 162463 - DNA, 201 bp, Homo sapiens
agctacttgggaggctgaggcaggagaatcacttgagcctgggaggcagaggttgtggtgaactgaggttgcatcactgcactccagcctgggcgacagartgagaccctgtctcaaaaaaacaaacaaaaaaagactgaaaagatgccatttcaggaagacctaaagagtgtgagaaagcaagcaatgtggatacctggg

SEQ ID NO: 162464 - DNA, 201 bp, Homo sapiens
tcctgtgaatgtgaatatccagttttcccaacactttattaaagagactgtcctttccctgttgtgtgttcttggcacttttgccaaaaatcaattgaccrtacatacttgggagtcttaggtttatttctgggcttcctaacttgttccattggttgatgtgtctatttttatgccagtaccatgctgttttgattacag

SEQ ID NO: 162465 - DNA, 201 bp, Homo sapiens
tgacaattctttttcttccttttctttcagctttttgaatctaacattccactcctttctggcctacaaggtttctgttgaaaattttgcctataatttaytggaagttcccttgtttgtaacaactcacttttcccttgcagctttcaatattttctctgtctttaacttttgacaatttgataataatgtcttttggtg

SEQ ID NO: 162466 - DNA, 201 bp, Homo sapiens
ttttgccatatgttttaaggaacaagaaacatcacagataaatttaaaatcccttatgctgtattccctaatccagtagaggtaactactatcaagaattwgttggtgtatatccagtctgtttttgtttttatatatttatatgtataaataagatagttttattttgtgtatatggttttatttttcctttgtataaat

SEQ ID NO: 162467 - DNA, 201 bp, Homo sapiens
cctataatttattggaagttcccttgtttgtaacaactcacttttcccttgcagctttcaatattttctctgtctttaacttttgacaatttgataataaygtcttttggtgtgtgagtctcttcggattcctcctatcaagttttcattgaacttcctggatctggctgggtgtttttttttttttttttgctttgtttt

SEQ ID NO: 162468 - DNA, 201 bp, Homo sapiens
ttttatatatttatatgtataaataagatagttttattttgtgtatatggttttatttttcctttgtataaatgatatcctatatttaacattctgctacwtttttcattgtacattttgctttctagatctgtccatgttgaaacacagatttattcttttaactgatgaatgattttcatcatataaatatcccatatt

SEQ ID NO: 162469 - DNA, 201 bp, Homo sapiens
tttctttgaattttttttgtccctttttctctttcttctccttctggtactctgataatgtgtgtaattctgcttggtggtatcctatgagtcccttagaytgtcttcactctttttcattcttttctctttttgttcctcagattggatgatttccattgaactgtcttcaagtttgctaatcctttcttctgcttgatc

SEQ ID NO: 162470 - DNA, 201 bp, Homo sapiens
gctttctagatctgtccatgttgaaacacagatttattcttttaactgatgaatgattttcatcatataaatatcccatattttacttagctattcacttrttgatggatgtttagctatttccaattatttacttttacaaacatgccaccttgagcattcccaaattttttttcacattagaagtagaattgttgaatc

SEQ ID NO: 162471 - DNA, 201 bp, Homo sapiens
ttctctttcttctccttctggtactctgataatgtgtgtaattctgcttggtggtatcctatgagtcccttagattgtcttcactctttttcattcttttytctttttgttcctcagattggatgatttccattgaactgtcttcaagtttgctaatcctttcttctgcttgatctagtctgctgttggacccctctattg

SEQ ID NO: 162472 - DNA, 201 bp, Homo sapiens
atgaatgattttcatcatataaatatcccatattttacttagctattcacttattgatggatgtttagctatttccaattatttacttttacaaacatgcyaccttgagcattcccaaattttttttcacattagaagtagaattgttgaatcttaggattgtctttttaatacccattcttgatattgcctgatgacatt

SEQ ID NO: 162473 - DNA, 201 bp, Homo sapiens
ttctctttttgttcctcagattggatgatttccattgaactgtcttcaagtttgctaatcctttcttctgcttgatctagtctgctgttggacccctctaytgaatttttttagtttggctattgtgttcttcaggtcaatgatttctgtttgatattttaaaaatattttctacctctttgttgatattctcaatttgtt

SEQ ID NO: 162474 - DNA, 201 bp, Homo sapiens
tgaatgattttcatcatataaatatcccatattttacttagctattcacttattgatggatgtttagctatttccaattatttacttttacaaacatgccrccttgagcattcccaaattttttttcacattagaagtagaattgttgaatcttaggattgtctttttaatacccattcttgatattgcctgatgacattc

SEQ ID NO: 162475 - DNA, 201 bp, Homo sapiens
gagactagtctggtcaacatggcagaaccctgtctccactaaaaatacaagaaactagctgggcatggtggcgtgtgcctgtaattccagctactggttgrggggcaggcagaggcatgagaattgcttgaacccaggaggtagaggttgcagtgagccaagatcacgccactgcactccagcctgggtgacagtgagact

SEQ ID NO: 162476 - DNA, 201 bp, Homo sapiens
atacccactatctgcattaactgttggatatactacccagcacagtcaaataagaaaaaaacaactatccagtgtgatggctctgatttaaaaaaaaaaaaagagaaaaaaataactagagccataaaattttattttacttttttgtgtataaatttaaggggtacaagtgcagttttgttacatggatatattgcctag

SEQ ID NO: 162477 - DNA, 201 bp, Homo sapiens
atcgattgatcaatctatctatctatccatgtgtctttttgttttctaggcttacgtcagctaaattaatttttttttgtttttttttagacagggtctckctctgtcgcccagactggagtgcagtggctccatctcagttcactgcaacctccgcctcctggcttcaagcgattcttctgcctcagcctcccgagtagc

SEQ ID NO: 162478 - DNA, 201 bp, Homo sapiens
ttagtagagacggggtttcaccatgttagccaggatggtcttgatctcctgaccttgtgatccgcccgccttggcctcccaaagtgctgggattacaggcrtgagccaccgcgcccggccttgtttttgctttttttagagacagggtcttgccatgtttgcccaggccgatctcaaattcctggcttcaagtgatctatc

SEQ ID NO: 162479 - DNA, 201 bp, Homo sapiens
ggcacctgccaccacgcacggctaatattttgtatttttagtagagacggggtttcaccatgttagccaggatggtcttgatctcctgaccttgtgatccrcccgccttggcctcccaaagtgctgggattacaggcgtgagccaccgcgcccggccttgtttttgctttttttagagacagggtcttgccatgtttgccc

SEQ ID NO: 162480 - DNA, 201 bp, Homo sapiens
ctcccgagtagctgggactacaggcacctgccaccacgcacggctaatattttgtatttttagtagagacggggtttcaccatgttagccaggatggtctygatctcctgaccttgtgatccgcccgccttggcctcccaaagtgctgggattacaggcgtgagccaccgcgcccggccttgtttttgctttttttagaga

SEQ ID NO: 162481 - DNA, 201 bp, Homo sapiens; identical to SEQ ID NO: 30220

SEQ ID NO: 162482 - DNA, 201 bp, Homo sapiens
accattctcctgcctcaggctcccgagtagctgggactacaggcacctgccaccacgcacggctaatattttgtatttttagtagagacggggtttcaccrtgttagccaggatggtcttgatctcctgaccttgtgatccgcccgccttggcctcccaaagtgctgggattacaggcgtgagccaccgcgcccggccttg

SEQ ID NO: 162483 - DNA, 201 bp, Homo sapiens
cccaggttcacaccattctcctgcctcaggctcccgagtagctgggactacaggcacctgccaccacgcacggctaatattttgtatttttagtagagacrgggtttcaccatgttagccaggatggtcttgatctcctgaccttgtgatccgcccgccttggcctcccaaagtgctgggattacaggcgtgagccaccgc

SEQ ID NO: 162484 - DNA, 201 bp, Homo sapiens
cacacccagctaatttttgtacttttttagtagagatgaggtttcaccacgttggccaggctggtctcgaatttctggcctcaagtgatccacccgcttcrgcctcccaagttgttgggattacaggtgtaagcccctgcacccagccgttttcatatgtttttaatattgctagttggcagcatttttcttcagcttgaa

SEQ ID NO: 162485 - DNA, 201 bp, Homo sapiens
tcactgtgcccggcctaaatatatgtattttgttatttaataatatatatatgtttttgtttttgcttttattttttctctcgagacagagtctcactccrtcgcccaggctggagtgcagtggcgcgatctcggctcactgcaagctctacttcccaggttcacaccattctcctgcctcaggctcccgagtagctggga

SEQ ID NO: 162486 - DNA, 201 bp, Homo sapiens
gagtagctgggattacaggtgcgcaccagcacacccagctaatttttgtacttttttagtagagatgaggtttcaccacgttggccaggctggtctcgaayttctggcctcaagtgatccacccgcttcggcctcccaagttgttgggattacaggtgtaagcccctgcacccagccgttttcatatgtttttaatattgc

SEQ ID NO: 162487 - DNA, 201 bp, Homo sapiens
gattctcttgactcggcttcccgagtagctgggattacaggtgcgcaccagcacacccagctaatttttgtacttttttagtagagatgaggtttcaccaygttggccaggctggtctcgaatttctggcctcaagtgatccacccgcttcggcctcccaagttgttgggattacaggtgtaagcccctgcacccagccgt

SEQ ID NO: 162488 - DNA, 201 bp, Homo sapiens
agtattgaagtcttattgtattgcaatttatctctctcttcaaagctattgatatttgctttatatatttaccttttcagaagttgggtgcatatatatatttagtttttgtaacttcttgataaattgacccccttatcattttaaatgaccttctttatctctttttacatgtttgacttaaagtctattttgtctgac

SEQ ID NO: 162489 - DNA, 201 bp, Homo sapiens
gagtattgaagtcttattgtattgcaatttatctctctcttcaaagctattgatatttgctttatatatttaccttttcagaagttgggtgcatatatatatttagtttttgtaacttcttgataaattgacccccttatcattttaaatgaccttctttatctctttttacatgtttgacttaaagtctattttgtctga

SEQ ID NO: 162490 - DNA, 201 bp, Homo sapiens
atgttgtattaaatatattcatattgtttgtatccattgttatcgtaaacattcaaaattgtcatatacttttagggaggaagctacaaaataaaattcartttcttttggtccccatccatgacaatttgaatattctagcaagaattcccaattagggaacgagaactcaaaagaattattttttctagttagaggcca

SEQ ID NO: 162491 - DNA, 201 bp, Homo sapiens
attctgttactgttgtatggaatattctataaatatctggtagggccatttggtctaaagtgtagttcaaatccagtgtttcctcattgatttttttttttctgtctaggtgatctaatgttgaaagtggagtattgaagtcttattgtattgcaatttatctctctcttcaaagctattgatatttgctttatatattta

SEQ ID NO: 162492 - DNA, 201 bp, Homo sapiens
agtgtggtcacataagatacttcgtatgatttcagtgttcttaaatttgttaagacttgttttgtggcctaacatgctctatcctggagaatgttccatawgcactgagaataatgtatattctgttactgttgtatggaatattctataaatatctggtagggccatttggtctaaagtgtagttcaaatccagtgtttc

SEQ ID NO: 162493 - DNA, 201 bp, Homo sapiens
tttgttaatctagctaaaggtttgtctatttgtttatctttaaaaaaaaactttggtttcattgattactgatttctagtttcatgttagtgtggtcacawaagatacttcgtatgatttcagtgttcttaaatttgttaagacttgttttgtggcctaacatgctctatcctggagaatgttccatatgcactgagaata

SEQ ID NO: 162494 - DNA, 201 bp, Homo sapiens
gttgtaatgtctcctctttaattctgattttgttggcatcttctctttttctttgttaatctagctaaaggtttgtctatttgtttatctttaaaaaaaaactttggtttcattgattactgatttctagtttcatgttagtgtggtcacataagatacttcgtatgatttcagtgttcttaaatttgttaagacttgttt

SEQ ID NO: 162495 - DNA, 201 bp, Homo sapiens
ttgttgatattctcaatttgttcatgcatcgcactccttacctcagtgagcatctttatgactccttctaaatgtcctgttaggtaaatcacatatcttcmtttcagtagggttggcttctaattgagattgtcttgttcttttttttttttttttggagcatatttccctatttcttcatttttcttaacttaaggcaca

SEQ ID NO: 162496 - DNA, 201 bp, Homo sapiens
atttttggcttgaggaactagaataatggagttgctttttactcagatggtgagaatttctagaaggaggaggtgcagttttggatatgttaattttgagrtacctatgaatgccttgtccaggaagagataatccaggaagcaggtgggtatacaggccagaagcttaagggaggtgtccaggctgagaacttgcagtcc

SEQ ID NO: 162497 - DNA, 201 bp, Homo sapiens
atattgtttacttaaccatattaattaggtgtctactatgtattataccactgttccaagcactaaggataagatgatgcaaaattctgatccttatggtrggaggcgcagacaataagcagataacattcagggataagtgccataaaagaatgtaaaacagtacgttggggtagaggttgcatactgagcactacttta

SEQ ID NO: 162498 - DNA, 201 bp, Homo sapiens
ctagtggctgggattacaggcgtgcaccaccatgcacagctaatttttttttttatttttagtagagacagggtttcgccatgttggccaggttggtctcraactcctgacctcaggtgatccgtctgccttggcctcccacagtgctgggattacagccatcagccaccgtgcctggcctatagtagtttttaaaattac

SEQ ID NO: 162499 - DNA, 201 bp, Homo sapiens
tgcaaaattctgatccttatggtaggaggcgcagacaataagcagataacattcagggataagtgccataaaagaatgtaaaacagtacgttggggtagakgttgcatactgagcactactttagcaagcctggccaggaatggtctctctgcttaggtgtgatatgtgagagagacttgaatgcggcgaaagagtgagcc

SEQ ID NO: 162500 - DNA, 201 bp, Homo sapiens
ctttagcaagcctggccaggaatggtctctctgcttaggtgtgatatgtgagagagacttgaatgcggcgaaagagtgagccgtcataagatctggaggarcaataatacaggcagagaggacagcaaatataaagaccttgaggccgggcatggtggctcacacctataatcttaacactgggagtctgaggtgggtgga

SEQ ID NO: 162501 - DNA, 201 bp, Homo sapiens
atagaagaggtcagagagataggccagaggccaggttatggagggccttgtggagcttgctgcagagtttataaactctaagggtgatgggaagccacagsaaggttttgaggagggattgatatgatctgatctgttttaaatagataactgtagttgctgtatggaaatagaagtagaagcagggagactattgcaata

SEQ ID NO: 162502 - DNA, 201 bp, Homo sapiens
aggctttttattgccttatccaaatgcacacttcctccatcctaaaatattactgcctcagaggcctccatctgctagcctcactattacagttctctggmttttctttgtagcactgactacaactcgtactaaacatacgaatatttaatttgtttccttcaatagatttttaagttccagagggataggggagttctt

SEQ ID NO: 162503 - DNA, 201 bp, Homo sapiens
  misc_feature (1)...(201): n = A,T,C or G
taccaaagaattagaagattgtgagcaagctaataaactgggagcaattaacagcacattaaggcaagttttattttggtaatattaagaaaatattctcnttgatatcaagaatcaattttttatgattttggtaaaacattttcgaacccattaaagttttaactaatatatttttaaaaggaagaaaaagtttttctt

SEQ ID NO: 162504 - DNA, 201 bp, Homo sapiens
tttttcctgattactatggaagaaggggcttgaactcctaaatctttttaaatagtgattgagtctggatgttacattttgaatgataaaagttattagcytgttaaatttcgtagattttttttctgttaacttttccttatttgttctacacagaaaccagcataaacaatatataaatggcctcaaattgtgtagtat

SEQ ID NO: 162505 - DNA, 201 bp, Homo sapiens
tatattgctactagtagtgtatcagttatctgttctacaacttctccagtgattggtactatgatttttaaacagctttactttgaggtataatgaaataygatacactgcatataaagtatacagtttgatgttttgacatgtgtccacccatataacatcatcacaattaagataccataggctgggtgttgtgtctca

SEQ ID NO: 162506 - DNA, 201 bp, Homo sapiens
ggtgtgagaaaataactcagattcagtaaaagctaaaatcttatagtggtctaattctccttcttgcctattgtatagtcctccttattcctcaaaaacayggggcaagcttactgcattaggatctttgcactcactcccaatgcctggaatgctgtccccccagatacctgcatgtcttgctccttgccaaaatttcat

SEQ ID NO: 162507 - DNA, 201 bp, Homo sapiens
ttgagttcatgagtttgagactgcaatgagctatgattgtgccactgtactccccagcctgagtgacaaagtgagacactatctgtgaaaaaataaaaaamaaatttggtacatacatatgtatatttttatggagaatatacctagaaatgagattaggtactgccaaattgttttctaaaattgctaccaaattatatt

SEQ ID NO: 162508 - DNA, 201 bp, Homo sapiens
ctcaaactcctgatctcaggtcatccacctgcctcagcctcccaaagtgctgggattacaggtgtgagtcactgtgcccggcctaaatatatgtattttgktatttaataatatatatatgtttttgtttttgcttttattttttctctcgagacagagtctcactccgtcgcccaggctggagtgcagtggcgcgatctc

SEQ ID NO: 162509 - DNA, 201 bp, Homo sapiens
aagtcccattcattgttgaggggctggtaaattggtaaaactgttttggaaatcattttgccatttcctgaaaaagctgaacatatactttcagcggttcyattcctaagcatataacctggagaaactcttttttttttttttttcttttgagacaaggtctcgctcttttccccaagctggagtgcagtggtgtgattt

SEQ ID NO: 162510 - DNA, 201 bp, Homo sapiens
aaatttatcatgctgtagttctgggggccagaattctgaaaatgggatttacagggttaaaatcaagatgtcagcaaggttgcatttccttctggaggctycttttcaagcttctaggtattgtcatgatttttggcttatgacctctttattccttcatcttcagagccagcagtatagcatcttccagtctctctctga

SEQ ID NO: 162511 - DNA, 201 bp, Homo sapiens
tattccattacgaattatttgcccaaaagttggatatctgtcaaagattcataagacaagagggagagacccttaaataagtactaaacttgtaaaatcartatgtggataaaagtgcaagtacaagaagttactttggaaaaaaaaaaaaaagcagacatctaccaaaaaacaggatttgactattcattcactgttata

SEQ ID NO: 162512 - DNA, 201 bp, Homo sapiens
acgtgatgattgcacgacttcagtactgtgaatagtgccgtgataaacgttcaagtgcaggtgtctttttgatataatgatttcctttgggtagatagatrcccggtagtgggattgcagggtcaaatgatggttctacttttatttctttgataaatctccatattgtttttcataggtgttgaactaatttgcattccc

SEQ ID NO: 162513 - DNA, 201 bp, Homo sapiens
gttgctgcaaaggacattatttcattttttttaaatggctacttagtattccatggtgtacatagaccacattttctttattccatccaccgttgatgggyacttgactacgtgatgattgcacgacttcagtactgtgaatagtgccgtgataaacgttcaagtgcaggtgtctttttgatataatgatttcctttgggt

SEQ ID NO: 162514 - DNA, 201 bp, Homo sapiens; identical to SEQ ID NO: 30222

SEQ ID NO: 162515 - DNA, 201 bp, Homo sapiens
aacatgcagtatttgattttctgcttttgcattaattcacttaggataatggcctccagctgcatccatgttgctgcaaaggacattatttcatttttttwaaatggctacttagtattccatggtgtacatagaccacattttctttattccatccaccgttgatgggcacttgactacgtgatgattgcacgacttcag

SEQ ID NO: 162516 - DNA, 201 bp, Homo sapiens
gccattcctctattgatggacatttcagttgttcccaatttttggctatttcaaacagtaatgcactagcatttttgtcctttgtctcattgtgcacacaygtaagagtttctctaggtctacctgtaaaggcaggattgctgaaccataaggcatgcctatctcaacattagaaataataccaaataattttccaaggca

SEQ ID NO: 162517 - DNA, 201 bp, Homo sapiens
agtatgcaacatgttagccttactaataagctttttctttcttccataggctttctacaagtataagagacttacagaattttaaagtcttattacaacasagtaggtaataaaggcttttatgtgtctaactagagacataaagtgactgtggaaagccttttaattatggacattcatcagaaagacactaatctgact

SEQ ID NO: 162518 - DNA, 201 bp, Homo sapiens
aattagctgggcatggtggcatgtgcctgtagtcccagctactcgggaggctgaggcacgagaatcacttgaacccaggaagcggaggtttcagtgagccmagactgtgatcctgcgctcttgcttgggtgacagagtgagactctgtctcaaaaaaaaaaaaaaaaaaaataggatatggctcaacagtaagtcccattc

SEQ ID NO: 162519 - DNA, 201 bp, Homo sapiens
caccagcacacccagctaatttttgtacttttttagtagagatgaggtttcaccacgttggccaggctggtctcgaatttctggcctcaagtgatccaccygcttcggcctcccaagttgttgggattacaggtgtaagcccctgcacccagccgttttcatatgtttttaatattgctagttggcagcatttttcttcag

SEQ ID NO: 162520 - DNA, 201 bp, Homo sapiens
tttgaaacagtatgcaacatgttagccttactaataagctttttctttcttccataggctttctacaagtataagagacttacagaattttaaagtcttaytacaacacagtaggtaataaaggcttttatgtgtctaactagagacataaagtgactgtggaaagccttttaattatggacattcatcagaaagacacta

SEQ ID NO: 162521 - DNA, 201 bp, Homo sapiens
gtgtttgaggttttttattttaggttttgctttcaaattatagcttatgtaacaatatcaataatttgaaacagtatgcaacatgttagccttactaatawgctttttctttcttccataggctttctacaagtataagagacttacagaattttaaagtcttattacaacacagtaggtaataaaggcttttatgtgtct

SEQ ID NO: 162522 - DNA, 201 bp, Homo sapiens
tgcctcacaggttcaagcaattctgtctgcctcagcttcccaagtagctgggattacaggtgcttgccaccgcgcctggctaatttttgtgtgtgtgtgtktttttttttttcccagtagacagggttttgccatgttggccgagctggtcttgaactcctgacctaaggtgatccgcctgcctcggcctcccaaagtgct

SEQ ID NO: 162523 - DNA, 201 bp, Homo sapiens
caggctggtcttgaactcctgacctgacctcaggtgatccacctgccttagcttcccaaagtgctgagattacaggcatgagccactgcgcccagtgcctygtctttctttgataagatactttttattgaatcagtttccttaattattattggcctattcagattttcatgacttccttactccagcttttgtaggctg

SEQ ID NO: 162524 - DNA, 201 bp, Homo sapiens
gttaaattttaatatgttgttgatggaaataatatttaattggtggaaatttctgcctcattttcatttgtatttcttacatatgatagggatttttatartggaatgtatgtatatttagtatatatcattgttgacagattgattattctgccaatagaaactgaaataaagaataaggtaataatttttactaaactt

SEQ ID NO: 162525 - DNA, 201 bp, Homo sapiens
atttaaacatggaagcttcagtgtttgaggttttttattttaggttttgctttcaaattatagcttatgtaacaatatcaataatttgaaacagtatgcawcatgttagccttactaataagctttttctttcttccataggctttctacaagtataagagacttacagaattttaaagtcttattacaacacagtaggta

SEQ ID NO: 162526 - DNA, 201 bp, Homo sapiens
tctgcctcacaggttcaagcaattctgtctgcctcagcttcccaagtagctgggattacaggtgcttgccaccgcgcctggctaatttttgtgtgtgtgtktgtttttttttttcccagtagacagggttttgccatgttggccgagctggtcttgaactcctgacctaaggtgatccgcctgcctcggcctcccaaagtg

SEQ ID NO: 162527 - DNA, 201 bp, Homo sapiens
aagccatgaggtcctggtctgtctgtctttttttttttttttgagaccaactcttgctctgttgcccaggctggagtgcagtggcgcgatctcggctcatkgcaacctccatctcctgggttcaagtgattctcctgcctcagcctgttgagtagctgggattataggcccatgccaccacacccagctaatttttgtatt

SEQ ID NO: 162528 - DNA, 201 bp, Homo sapiens
tggatttggttcactaatattttattaaggatttttgcattttttttcatcagggctgttggcctgtagtttcctttgtttatttttttgtagtgtctttktctgccttcgaaatcagggtaaatactggctttctaaaatgagtttggaagtattaccttctcttcaatttttttgaaaagtttaaggattggttgctgt

SEQ ID NO: 162529 - DNA, 201 bp, Homo sapiens
gagtgatctttttactatgctcttggatttggttcactaatattttattaaggatttttgcattttttttcatcagggctgttggcctgtagtttcctttrtttatttttttgtagtgtctttttctgccttcgaaatcagggtaaatactggctttctaaaatgagtttggaagtattaccttctcttcaatttttttga

SEQ ID NO: 162530 - DNA, 201 bp, Homo sapiens
ttaatgtgtattatttttattgatttatgtacgtcaaactactcttgcatctctgggataaatctcacttgatcatggtgagtgatctttttactatgctsttggatttggttcactaatattttattaaggatttttgcattttttttcatcagggctgttggcctgtagtttcctttgtttatttttttgtagtgtctt

SEQ ID NO: 162531 - DNA, 201 bp, Homo sapiens
gttgaattttgtcatatgttttttctgcatctatcaaaataatcatgtggcttttgtctttaatttgcttaatgtgtattatttttattgatttatgtacrtcaaactactcttgcatctctgggataaatctcacttgatcatggtgagtgatctttttactatgctcttggatttggttcactaatattttattaagga

SEQ ID NO: 162532 - DNA, 201 bp, Homo sapiens
tttttcttgccttattgctctgactagaacttccagtactatgttgaatagaagtggcaagagtgggcgttcttgtcttgtttctaatcttagaggaaaarcttttcagttttcaccactgagtatgatgttagctgtgggtatatgacctttattatgctggggtacattttttccataccttatttttcaggggtagtt

SEQ ID NO: 162533 - DNA, 201 bp, Homo sapiens
attcttataaaaccatggtacctactaattggtttaccatgactcttctgagttgtaatgttcatatatattccaatggtttatatgcagtttgtttttgwtttgttttgttttgagatggagtctcactctgttgcccaggctggagtgcaatggcacaatcttggctcactgcaacctgtctcctaggttcaagcaatt

SEQ ID NO: 162534 - DNA, 201 bp, Homo sapiens
agacattctcatttctttttctatatagatgtcttttatttctttttcttgccttattgctctgactagaacttccagtactatgttgaatagaagtggcragagtgggcgttcttgtcttgtttctaatcttagaggaaaagcttttcagttttcaccactgagtatgatgttagctgtgggtatatgacctttattatg

SEQ ID NO: 162535 - DNA, 201 bp, Homo sapiens; identical to SEQ ID NO: 30212

SEQ ID NO: 162536 - DNA, 201 bp, Homo sapiens
tctatgagatcatgtcatcagcaaacagacattctcatttctttttctatatagatgtcttttatttctttttcttgccttattgctctgactagaacttycagtactatgttgaatagaagtggcaagagtgggcgttcttgtcttgtttctaatcttagaggaaaagcttttcagttttcaccactgagtatgatgtta

SEQ ID NO: 162537 - DNA, 201 bp, Homo sapiens
taaagttacaactatttcatttcttgatgttactgtaaatatgatctctcaattttgggggggattgttcattgttagtgtatagaaatgctatggacttytgtatgctgacatcgtaacctgcaactttgcagaatttatcaccagtttattactagattttttggtggagtctttaaagttttctctctatgagatcat

SEQ ID NO: 162538 - DNA, 201 bp, Homo sapiens
tactatggaagaaggggcttgaactcctaaatctttttaaatagtgattgagtctggatgttacattttgaatgataaaagttattagcctgttaaatttygtagattttttttctgttaacttttccttatttgttctacacagaaaccagcataaacaatatataaatggcctcaaattgtgtagtataaaatgactag

SEQ ID NO: 162539 - DNA, 201 bp, Homo sapiens
tatgttaaaaaaaaaaagaccatttttcctaaatgcttagtttgtaaatcaattcacattacaagttccccattttctggttattatataatttacttgartatgtcctgaggaagtggggagaaggagttaaggtagttttaccagataatttgtcttgtgacctctttattttcttattgactgaaatttctaacctca

SEQ ID NO: 162540 - DNA, 201 bp, Homo sapiens
  misc_feature (1)...(201): n = A,T,C or G
atggaaataatatttaattggtggaaatttctgcctcattttcatttgtatttcttacatatgatagggatttttatagtggaatgtatgtatatttagtntatatcattgttgacagattgattattctgccaatagaaactgaaataaagaataaggtaataatttttactaaacttatgaacttctttgcagtacttg

SEQ ID NO: 162541 - DNA, 201 bp, Homo sapiens
caatagaaactgaaataaagaataaggtaataatttttactaaacttatgaacttctttgcagtacttgaaaatggcaaacaataccaaagaattagaagwttgtgagcaagctaataaactgggagcaattaacagcacattaaggcaagttttattttggtaatattaagaaaatattctcattgatatcaagaatcaa

SEQ ID NO: 162542 - DNA, 201 bp, Homo sapiens
cagagccagcagtatagcatcttccagtctctctctgactctgacactcccgccttcctctctcataaagaactcgtctcacctgaataatccagtatacyccttccatctcaagatcctcaaattaatcacatctttgaagtcccctttgccatgcaaaaataatatatttgcttatttcaggaattagggacatcttgg

SEQ ID NO: 162543 - DNA, 201 bp, Homo sapiens
gtagaatggataaattatgatattctaataaaatgtaacacttgcaacagggaaaatgaatgaggtgctacaaacctcatcatcatagatgccataataamgtgttaacaaaagaggcacatcacagaaaaattcacacattagattccattaatattaaagttcaaaaatgggggaaaaaaacctcaagcatattgttta

SEQ ID NO: 162544 - DNA, 201 bp, Homo sapiens
gatttatttctacctttagggagagggaggtagatgtaattaaagaggagcttaaaggatactggcagtatttatttttattttttatttttttcctaagwttcagggggtacatgtgcaggtttgttacatgggtatagggaatttttcagctcttgtccccctctttcctcaccttttggggtccccagtgttgtttcc

SEQ ID NO: 162545 - DNA, 201 bp, Homo sapiens
attttgagcagagtactttcagatggtattaagatattcatttttaatgattgttcttgtcctcttatgagagtattatattttgccattgatatgttttwagagaaccgtttatttcctgtttttcactactgcgcatccataataaagatcatcataccctctctctctgtctccttcttgtgcctcctttgcgttttc

SEQ ID NO: 162546 - DNA, 201 bp, Homo sapiens
cagaattatattgtatagagtaaataattatcaagatattttgagcagagtactttcagatggtattaagatattcatttttaatgattgttcttgtcctyttatgagagtattatattttgccattgatatgtttttagagaaccgtttatttcctgtttttcactactgcgcatccataataaagatcatcataccctc

SEQ ID NO: 162547 - DNA, 201 bp, Homo sapiens
ttagcctggcaggttcagaattatattgtatagagtaaataattatcaagatattttgagcagagtactttcagatggtattaagatattcatttttaatkattgttcttgtcctcttatgagagtattatattttgccattgatatgtttttagagaaccgtttatttcctgtttttcactactgcgcatccataataaa

SEQ ID NO: 162548 - DNA, 201 bp, Homo sapiens
tcagcaggtgttttatcacatagctatttttagtcttctgtttcaactagttagcctggcaggttcagaattatattgtatagagtaaataattatcaagmtattttgagcagagtactttcagatggtattaagatattcatttttaatgattgttcttgtcctcttatgagagtattatattttgccattgatatgttt

SEQ ID NO: 162549 - DNA, 201 bp, Homo sapiens
ttccaaaaaaaataaagatcacttaaaaatttttttgcttttcttgtttttttaagagtaaaattccggttggaataaaagctgggcattctaataaggtragtccctcctcttccttgagtgtttctgctttacattgtgaaacttaccatttactgactgacagtggctgtagtaaagaaccatattatggttagttgg

SEQ ID NO: 162550 - DNA, 201 bp, Homo sapiens
ttttttgctcatgattgctttggctattcagagtcatttctggatccatacaaattttaggattgttctttttttgtttgtttgtttttgtttttgtttttgagacagagccttgctctgttgcctgggctggagtgcagtggcacaatcatagctcactgtagccttgaaaaccttgtactgacctcaactgatcctccc

SEQ ID NO: 162551 - DNA, 201 bp, Homo sapiens
tcagttcatatgaatttcctaactggcataacagtggctatatattcctttaagcctttttactagttattattatttaaagttaattatgagtttattgstattttctttagactcagggtttaggaactgccctgaagatattattctctgaaaaagaaatccaaaagcttccagagaatagtccatctaaaggcttcc

SEQ ID NO: 162552 - DNA, 201 bp, Homo sapiens
ccaggctggaatgcagtggcacaatcatggctcactgcagcatccaaatcctggggtcaggcgttccttccacttgagcttcccaagtagctgggactacrgacacatgctattttgcctggctaattaaaaaattttttttgtagagatgggggtctcactttgttgttcagtctggtctcaaacacctggcttcaagtg

SEQ ID NO: 162553 - DNA, 201 bp, Homo sapiens
aatgagtccacctttggattttttgctcatgattgctttggctattcagagtcatttctggatccatacaaattttaggattgttctttttttgtttgtttgtttttgtttttgtttttgagacagagccttgctctgttgcctgggctggagtgcagtggcacaatcatagctcactgtagccttgaaaaccttgtactg

SEQ ID NO: 162554 - DNA, 201 bp, Homo sapiens
gaatagtatgatatgtattcaataagtgttaagactattcaggtttccttaactgctcagatgtgtttattatatgcataacctgtgagaaagtagaaacygtagtaatatttttgtgaaaagctcagttcatatgaatttcctaactggcataacagtggctatatattcctttaagcctttttactagttattattatt

SEQ ID NO: 162555 - DNA, 201 bp, Homo sapiens
actatgctctttatttctgaagctcagaggtcatttttctttcactcatttctacatgatttacttctgtatacagacatataatttgcttgcttgtttayatcaccagtggtttaaaaaataatttgaatttgccagcagagatacatgtaatgccaactgaggaatacagaacagaaggaaaagaatcacagaaaataa

SEQ ID NO: 162556 - DNA, 201 bp, Homo sapiens
gtgcaatgagtccacctttggattttttgctcatgattgctttggctattcagagtcatttctggatccatacaaattttaggattgttctttttttgtttgtttgtttttgtttttgtttttgagacagagccttgctctgttgcctgggctggagtgcagtggcacaatcatagctcactgtagccttgaaaaccttgt

SEQ ID NO: 162557 - DNA, 201 bp, Homo sapiens
catggcagtgacctaccttcttatttcagctctcatcctgtacacagatgtcctttttgcagtctaatgccatgtttttcacacttttatgcgttttgttrgtgaggtcactttttaaaatggccccatactagtgctgtctagtgttctaagcacaagaaggctgtgatgttccttagggaggaaatatgtgtgttagat

SEQ ID NO: 162558 - DNA, 201 bp, Homo sapiens; identical to SEQ ID NO: 30255

SEQ ID NO: 162559 - DNA, 201 bp, Homo sapiens
caagttcatagtgaactagggagtctgttcatttaggctatggaagccttctagtaatttgtactttcagtgaataaggaattcctctttgtctttctgcktgtgtgtgtgtgtgtgtgtacgcgcgtgttctccttagggagattggagtctagtaggaaaaactacttacgaagcagcgcctttgtaatactgtaatac

SEQ ID NO: 162560 - DNA, 201 bp, Homo sapiens
gttttccatgttagaatctgaatttagctctgatagaactgccaactttgcctcttccacagaagagtaataaaatgctctggaagaaggataggacactrtgagattaaccacatccttgttttatcagccttactggtagtaagacttagatttctgaaattgcttatggaagccttaggctcaacaaagctgaaagga

SEQ ID NO: 162561 - DNA, 201 bp, Homo sapiens
tgaatttgagtagtgaatggagattcaaaggtgatacttaggtttccggtttggcagctggtacctccagttgaggtggagaaaacaataaagtaatgcartttatcaggtgtgccatgatcattgcgcttttgttcctttgctgaatctgccccttctcatcattcagcttctttgaaacttttctttgccaccttagct

SEQ ID NO: 162562 - DNA, 201 bp, Homo sapiens
ttacatattttctacctctcttatgacatggctgtcttactctgttttctttggctctaacggaataccaaagactggataatttataaagaagtttattkagctcacaattctggcagctggaaaatccaagagtatggccttggcccctggtgagggccttcttgctgtgtcataacatggcagagggcatctcatgtc

SEQ ID NO: 162563 - DNA, 201 bp, Homo sapiens
tatgcatttgaacttattagtccttctctgttagcacattttactgaggtatattttaaagcattttttaattggcatataaaattgtatgtatttactgsatacaacattctgttttggaagtgtatgaggtatttactttgtttgtatcaataaagccagctaagcactttatctcaatcctcaaaataaacatatgag

SEQ ID NO: 162564 - DNA, 201 bp, Homo sapiens
tcctttgaactgtttgggcttcggtttccaggtctgtctttgaggtgctcttggttgtattgaattgctttctgtgctggcccctgcctggctctggagarctaggtgttccaccctaaacaaccctgccttgctgagctgcttggcttcctttccaggacccttaccagggcaccatcgtgctggccactgttaaaggcg

SEQ ID NO: 162565 - DNA, 201 bp, Homo sapiens
tggagaactaggtgttccaccctaaacaaccctgccttgctgagctgcttggcttcctttccaggacccttaccagggcaccatcgtgctggccactgttaaaggcgacgtgcacgacataggcaagaacatagttggagtagtccttggctgcaataatttccggtaagttaggacctcacctctttcaaccccttttcc

SEQ ID NO: 162566 - DNA, 201 bp, Homo sapiens
ttcctaaagtctacaaagcatttctgctataggcttacctttgcaaacctgaggttgttggttcctgtttgcattcatcacagtcagttaaaattcacttsagttaatgtttatagatcatcttctacttaccaggcattatactagagacaccaaaatgatttagttgacttttctccttgaaaaagtttactgtttctc

SEQ ID NO: 162567 - DNA, 201 bp, Homo sapiens
ccagggtgctactggaactgaatgtcagcagttgtgaagactgcgtattaagcctgaggctttcctgcaacaaacccagttgctatgtgttgggcactgarggtttgcgtatctttgctaataagtctaactggagaaacactttctgatgaaacgttactttcattttacaaaaacaagtgaatgtgcaaacttcatgtc

SEQ ID NO: 162568 - DNA, 201 bp, Homo sapiens
cagtatttgtagatatacacagtttttttgctgtcacatggcatgtaataaagtggatatattttagtttatttagctgtttccctatgggtagatatttmggatgtttgttattgttactataaatgtgcgtatcttggtttttatctcccagtgcttctgcaaccattgtccatcgacttaagaggggttgggtttatt

SEQ ID NO: 162569 - DNA, 201 bp, Homo sapiens
ttttttaactttttttaaaaaagtaatatgagtacaagctaaaaatccagtggtatgaaagggcatatagtgagaagccagtccccttcctgccccagcgktcagcacccattgttaccagccagtatgtcatgttgtagtcttaagcattcttttttgttcttgttatttaaacgtttttgcctatttaattttaagaat

SEQ ID NO: 162570 - DNA, 201 bp, Homo sapiens
tgcccctgaatcatcacaggtgagctgtccaggggccgtgggacaggcttctcaccatgggcagggtggccgagtctcacggaaaccgagatggtgtcctyggaggctggctcccactgcaggtccgggagcaggccagcccaggtgcagcattgaagccacatgtgaggatttgggccacacttcaccccttaccactaa

SEQ ID NO: 162571 - DNA, 201 bp, Homo sapiens
atagtagtgctttcatgatagagttactatgagggtttaaatgagatcatttatgcaggccgggcactgtggctcaagcctataatcctagctcaagcctrtaatcccaaaggaagccgaggtgggaggatcacttgagcccaggagtttgagaccagtctgggcaacatagggaaaccctatctacaaaaactgtaaaaa

SEQ ID NO: 162572 - DNA, 201 bp, Homo sapiens
tcttctatcaacttgataatcataataacaaataatatttagctgatcctacttttacaatttaatgagtagacttcacattttctcagattattggtttyctttccaattttagcagaaagtcagtggactatgaagattagcctcattccctcagcaaacatttagtgagaatgcacctccagacactgggctaggcac

SEQ ID NO: 162573 - DNA, 201 bp, Homo sapiens
tcccattccaaaagatggctcttgactcactggcttatgcctgaatgcccatcttccagctcagttctcatagcctaaggctttgtagtcctttgcttccrtttacaagtggacatactgttaggaagatggaacaggtgaagtgttactggtcttgtctgtcttatgagtttttagagccttccttgagaagcctgttaa

SEQ ID NO: 162574 - DNA, 201 bp, Homo sapiens
tgaagaggctgtcagggaagagttggcctgttcagaacaggtggtcttataagacccctctgaggaggcaacatttgaaaaccagaataaaatgagagagsaagccacatggccacgtggagaaagagcaaacgaggtttcagcaaatgaaaagttttgtataaacgagattatacctggtattctgtaactcttttcccc

SEQ ID NO: 162575 - DNA, 201 bp, Homo sapiens
caaaatggattttatgcatttgaacttattagtccttctctgttagcacattttactgaggtatattttaaagcattttttaattggcatataaaattgtrtgtatttactgcatacaacattctgttttggaagtgtatgaggtatttactttgtttgtatcaataaagccagctaagcactttatctcaatcctcaaaa

SEQ ID NO: 162576 - DNA, 201 bp, Homo sapiens
tcatctccaggggtagagctcctgcctgagaaggtctaggcttaggagcaaattagggcacctgtaactgatctgggatggctggaggtgggagtgtagartctttcccaggcctgtccccctgggttagaggagatctgcatgtcccgaatttgtttcttcacctggcaggaatttgctagacttctctgatcacagctt

SEQ ID NO: 162577 - DNA, 201 bp, Homo sapiens
ctgtaaaatcaacaacttccgtaacattcatttttattctctttagcctcccatgtggcgaaatacaggaatgtgtatagggagaggcttacagacatagrgtatggctcaaaatgacaaagggaaactgagggagagtcaaggaagatggggttatgtgtaggggtaaaacaggaggttgtggtagaggtgagagggatg

SEQ ID NO: 162578 - DNA, 201 bp, Homo sapiens
gcgacctctgggggacggggcctgtgccttatattcaccatgctttgtattctgtggtgtctgggcctggacgcatacagtgaggatttaccgagtctgaktgcatagggtgaggatgtagctgtccttgtttaactcttcatggtactgttgaaggccccaaattgaagaatcccttcagaggttgttacggtcaaaatg

SEQ ID NO: 162579 - DNA, 201 bp, Homo sapiens
gttatgttttgcctgtggattgattctaaaagctgaaaatgacaagctggcatgtgcctttctgagacaaaggcccagacacccggcctcagcgtcctgtscccagagctgacttggctcgtggttctgtggctgcacattgtcatgtcaatgtcctggttctgtcattactgcagagttcatgtagttgagatggcccag

SEQ ID NO: 162580 - DNA, 201 bp, Homo sapiens
gaccagttttttctgacacacatctcagtctcaaccttaaccttttcactctaactgaaggcagaggaagtaagcattgagaaaattccattaaggaagaygaaagctcgccaccttccctaaagcctgggtgcagtgaggccacagagaccacttcctgtctccctttccctgggccattttgtctgctaagtcctggag

SEQ ID NO: 162581 - DNA, 201 bp, Homo sapiens
  misc_feature (1)...(201): n = A,T,C or G
tggcacctgcttcagcagtctcaggcctctacttctccaatttgaagtccaaatattttgctgtggggaagatttccaaggatcaggtaagctagctgttncattatatgtggcttgcctagttcaaatgaaattctagaacctctctcattttaaatgtgaatgagaataaagtgaggggaaaggatgaagaaatttact

SEQ ID NO: 162582 - DNA, 201 bp, Homo sapiens
ggaatgttgtatacaagtaaaacccctttctatcttattataattaataaatattcataacaaaatcatttgcatgtgagagctgatgacctgtagtaagwatgtgtttcgcttagatttgaacatattctttgtaatgaaaagcctgatggaaataatgctttcccatatccatgtccagccaacagtccttttgagtca

SEQ ID NO: 162583 - DNA, 201 bp, Homo sapiens
atgttgtatacaagtaaaacccctttctatcttattataattaataaatattcataacaaaatcatttgcatgtgagagctgatgacctgtagtaagtatrtgtttcgcttagatttgaacatattctttgtaatgaaaagcctgatggaaataatgctttcccatatccatgtccagccaacagtccttttgagtcatag

SEQ ID NO: 162584 - DNA, 201 bp, Homo sapiens
agaacatgtgtcttgatggcatttttccaatagcatgtgctcatttcacgtctctgtgtcacattttcctaattctcacaatatttcaaaccttattattrtatctgttatgatgatctgtgatcagtgatcagtgttactattttaattgttttggggtaccatgaaccacacccatagaagatggcaaacttaatccat

SEQ ID NO: 162585 - DNA, 201 bp, Homo sapiens
gctttcccatatccatgtccagccaacagtccttttgagtcatagacttctttccaatgtgccattttctctagatagagaagaaaattgactggagctayccctgtactcctcagttctcttctttgctgtcaagtaacaattacctgctaagctgtgtccctgctgtcaacatttttatccatctctgccttcaaggct

SEQ ID NO: 162586 - DNA, 201 bp, Homo sapiens
ctgttccactaaccagccattccccatctctctccctttcctcgggcctccatagtccctgagacacaacaatattgaaattaggccagttaataactctgtaatggccttgtaatcctctaagtgtttaagtgaaaagaagagtcacacacctcgacattaagtcaaaagttagacatgattaagtttagtgaggaaggc

SEQ ID NO: 162587 - DNA, 201 bp, Homo sapiens
gaggctttcctgcaacaaacccagttgctatgtgttgggcactgagggtttgcgtatctttgctaataagtctaactggagaaacactttctgatgaaackttactttcattttacaaaaacaagtgaatgtgcaaacttcatgtcaaacactcctttggcttgtgtgtgataacacatagactcttccattggtgagttt

SEQ ID NO: 162588 - DNA, 201 bp, Homo sapiens
acagtttatgcaaaagaaaagttcttaaaggaaatctaaaatgctcctccagtgaatacacaaaggataggaaagcaaaacagccccactgctgttatgargaaagtttgagtggtctggatagaagattaaaccagccacaatattcccttaagccagagtctcacccagagcagtttggcattgctggagcaataacaa

SEQ ID NO: 162589 - DNA, 201 bp, Homo sapiens
tataaattgctgtatagttcaagctccgattatttgctctgtatctttccctgtgaaattggaataataacacaagggcaagtctgtttggattaattcaracatccaaaacgtattttgctggaaataccctccaaaggcccacagcacctggcagcggttgggatgcttttttagtggctgctttaacctctggcatgg

SEQ ID NO: 162590 - DNA, 201 bp, Homo sapiens
agttttccagatctagctgacatcactgaggaaggtggctatgctaaccaataggttttcaatgtagatgaaatagctttctgttggaagtaggtgccatscaggactttcatagctagaggggagaagtgaatgcctggcttcaaaacttgaaaggacaggctgactctcttgtggaggggctgatgactgtcagttgaa

SEQ ID NO: 162591 - DNA, 201 bp, Homo sapiens
ttttgctggaaataccctccaaaggcccacagcacctggcagcggttgggatgcttttttagtggctgctttaacctctggcatgggctactgcagggtcygccctgctgccccagggccatgggccactgagggctggccctctgaaatatgtcttgaggacagccagtcctagggtagttgcaggaagtcggtagggaa

SEQ ID NO: 162592 - DNA, 201 bp, Homo sapiens
tagctttctgttggaagtaggtgccatgcaggactttcatagctagaggggagaagtgaatgcctggcttcaaaacttgaaaggacaggctgactctcttktggaggggctgatgactgtcagttgaagccagtgcgcatttgccattctgaaaattctagggctttaagaattatgttaaatctactctgtctgtgctct

SEQ ID NO: 162593 - DNA, 201 bp, Homo sapiens
cctggcagcggttgggatgcttttttagtggctgctttaacctctggcatgggctactgcagggtccgccctgctgccccagggccatgggccactgaggsctggccctctgaaatatgtcttgaggacagccagtcctagggtagttgcaggaagtcggtagggaataaaagagggttttcttttacggccctgatggta

SEQ ID NO: 162594 - DNA, 201 bp, Homo sapiens
gttaaatctactctgtctgtgctctataaatggaatgacaaagcctggatgagagcacatctgtttacagcatgggtttactgaatattttaagcctaccrttaagacctactgctcagtaaaaaagattcctttcaaaatattactcctcattgacagtgcacctggtcacaagaattctgatagagatatacaaggaga

SEQ ID NO: 162595 - DNA, 201 bp, Homo sapiens; identical to SEQ ID NO: 30265

SEQ ID NO: 162596 - DNA, 201 bp, Homo sapiens
cacggaaaccgagatggtgtcctcggaggctggctcccactgcaggtccgggagcaggccagcccaggtgcagcattgaagccacatgtgaggatttgggycacacttcaccccttaccactaacgttccctgtacacatacaattccactgacttcacagcgacctctgggggacggggcctgtgccttatattcaccat

SEQ ID NO: 162597 - DNA, 201 bp, Homo sapiens
tcagtggaggaagtaactgccgatgtggtagaaatagcaagagtaaaccagaattaaaagtggagcctgaagatgggaatgaattgctacaatctcgtaayacaacttcaacagatgaggaattgcttcttacggctgagcaaggctgagcaaagaaagtagtttcttgagatggctatgaacagtgttgaaataacaaca

SEQ ID NO: 162598 - DNA, 201 bp, Homo sapiens
tccattttgcattcctaccagcagtgaaggagagttcctgttgttccgcatccttcccaacatttgtttggtggtgtcagtttcagattttagccattctrataggtgtatagtggtatcttgttgtatttgcaattccttaaaaacatgataattttgagcatcttttcatatgcttacttgctatctgtatatcttctt

SEQ ID NO: 162599 - DNA, 201 bp, Homo sapiens
gcttcaggttgtttgattttgaaaaggctcccctggtgattctgatgcgaagtctacacaggctctggccttttcctcctcctctgaacttatcacccacaactctatccttctccgtttctgttccagccacaacaatttccttactcttccttaaacatggcaagcatccacataagatgttcctgagagaaacactgc

SEQ ID NO: 162600 - DNA, 201 bp, Homo sapiens
  misc_feature (1)...(201): n = A,T,C or G
ctggatgaaatgatttttgttgccaaggaaatggagagattagctataaggattccattgttgattggaggagcaaccacttcaaagtaagttatactaangagctttgtcctcacttcaaattttcttatatgccagtgtttgaaacagtgggaaacctgtgttgttttggattttcccttatgtttagtacattgactt

SEQ ID NO: 162601 - DNA, 201 bp, Homo sapiens
ggctatcttgcattttcagtgttcccagctgttagatgaaaatctaaaggatgaatactttgaggaaatcatggaagaatatgaagatattagacaggacsattatgagtctctcaaggtaagtggtagaaacagatttttgcttgtttttaatgtgactgttttttatgatcctagtttttaatgtgactttttaaaatg

SEQ ID NO: 162602 - DNA, 201 bp, Homo sapiens
tgcaatcaaggtatggtagaagaactcttagccctgcggaaaccagtttttagttggggcaggggttttcaaagtgtggcatgcaggctaagtccggcctkctgccagtttctgtaaataagattttattgggatagagccacacctattcatttgtatcttgtctgtggctgcttttatgctgtaactacaaagttgagt

SEQ ID NO: 162603 - DNA, 201 bp, Homo sapiens
gaggagcgaatatgatctgacttatgtttaaacctctctggttctttgtggagaatggtctgttagggccaaagcagaaatgttagagtttattgctgtarttcagatgagatatggtgatggttagggccatggtgaaagcaaaagaggatgttaaaagtcatctgtttctacatatatttttaacatagagccaatagg

SEQ ID NO: 162604 - DNA, 201 bp, Homo sapiens
gcggttgggatgcttttttagtggctgctttaacctctggcatgggctactgcagggtccgccctgctgccccagggccatgggccactgagggctggccstctgaaatatgtcttgaggacagccagtcctagggtagttgcaggaagtcggtagggaataaaagagggttttcttttacggccctgatggtaacacctc

SEQ ID NO: 162605 - DNA, 201 bp, Homo sapiens
actctcttgattcttgggttctgataacgggactgatataattgttcttgaaactagtggaactgtggctgagaaacacatcactgctgttattaaataasatataaacctccctatgagaggtttatatgttatttaatatattaaataagatgtaatgaggttacatcttatttatatttaatatttaattaataaatg

SEQ ID NO: 162606 - DNA, 201 bp, Homo sapiens
ggtctcccaaagtgttgggattacaagtgtgaaccaccacacccagcccaagtaatggatttttaagggcctcagttgcataggagttttttattcaggcygcaaaattcctgtgttttattatatattcctttttatctgtattttctattcacaattctcttgtttccatagaccgcctttttcacatatatccatata

SEQ ID NO: 162607 - DNA, 201 bp, Homo sapiens
gacattgaagaatctcccccaacccatcgtctattatttttgtctatggtgactttcgtttaacagaaatccttggtttttatgtaatcaaattcattgtkttttttttttttaaattaagaggttggtctttttgagtcttaagaagttccttttcattcgaagtcataaagttcttcccaataaattatacaataagtt

SEQ ID NO: 162608 - DNA, 201 bp, Homo sapiens
tgggcatgtaggttagagtctttagttcttagtcttctcattcctcctgtgaaattatctacatttaacagctttcactgagtattttcttctttcactcractgttagaagacatttcccaacctgcaaatatgccattcctgccccaacatgaccaactgagagcttcaggctttacatgatttttcacagcccactga

SEQ ID NO: 162609 - DNA, 201 bp, Homo sapiens
tccataagcattttccctgtgttgctccctctaggcattaggttaacagaatcattagcaatggcacctgcttcagcagtctcaggcctctacttctccartttgaagtccaaatattttgctgtggggaagatttccaaggatcaggtaagctagctgttgcattatatgtggcttgcctagttcaaatgaaattctaga

SEQ ID NO: 162610 - DNA, 201 bp, Homo sapiens
gtgatctttttggagctggaaaaatgtttctacctcaggttagcaaaatatggggagaaattttcacagttgcatcttttctttgtcatttaataaatggygatttgggatatatttctcaggttttaatttggacaagagttcaatggtattggctagtcattccttctctaaatatgtttaggagtcatgtctgcaaga

SEQ ID NO: 162611 - DNA, 201 bp, Homo sapiens; identical to SEQ ID NO: 30257

SEQ ID NO: 162612 - DNA, 201 bp, Homo sapiens
catgggccttcccagtttggaaattccacagggtgacttttttttgtgtatgggataaaactgaaattccttagtctgtcattccgtcctcttcacttagrtattaaactgccctcccatcctgatctgtcatctgaacattccaggaggctcgcttctgactctgtgcctttgttcttgtttgcttccttctgaagtgcc

SEQ ID NO: 162613 - DNA, 201 bp, Homo sapiens
cctgtatgcatccatcatgggccttcccagtttggaaattccacagggtgacttttttttgtgtatgggataaaactgaaattccttagtctgtcattccrtcctcttcacttaggtattaaactgccctcccatcctgatctgtcatctgaacattccaggaggctcgcttctgactctgtgcctttgttcttgtttgct

SEQ ID NO: 162614 - DNA, 201 bp, Homo sapiens
tacacccgtaaaaacgggtgaggagatgtagaaacgagaattagtgataagtacaaaacagtaaatatcctatcacatagtggggatgtttagcttcaggmagagggggaatactaaattcgtaacgcacaaggaaatttatcagaggttaaccggtgactctcttgattcttgggttctgataacgggactgatataatt

SEQ ID NO: 162615 - DNA, 201 bp, Homo sapiens
tgacttttacaatctgcttaaaaataactccctatttatattttatttttcatatccaaatgttttaaattgtgtactttgagtgacatggaagagtatcwgagtatatatgctgttttttgcctggactttttttatttctgggcttttttcttctattcctactgcctggaagctatgctggtccccttccccctttcc

SEQ ID NO: 162616 - DNA, 201 bp, Homo sapiens
ttggtcattgcttttgctacagtgactttcccttgtctctgtttctgtggcttcctgcctctttccctagtctcttggcacatgtctgttctgactattayagaaagtgccccctttgaatttgagttccacatttcttttccttgtaaaagagcaaaggaagtcagtgtgttcattttattttgcctttatatctatatt

SEQ ID NO: 162617 - DNA, 201 bp, Homo sapiens
ttgctatattgcccaggctggtctcaaattcctggcctcaagtgatcctcctgcctttgcctcccaaagtgctgagattataggtgtgagccaccataccyagcctctcactgcattttaaatggtataaaggatttcacagcatctgaactattctttgcttttatcctatgtctagggcatgtgatatctttgtatcta

SEQ ID NO: 162618 - DNA, 201 bp, Homo sapiens
acatagcaggatctgtctctaaagaattaaattaacatgacttttacaatctgcttaaaaataactccctatttatattttatttttcatatccaaatgtkttaaattgtgtactttgagtgacatggaagagtatctgagtatatatgctgttttttgcctggactttttttatttctgggcttttttcttctattccta

SEQ ID NO: 162619 - DNA, 201 bp, Homo sapiens
tctcagtcaaagttgcaatttctgagaacctgtcaacgatgttacaagaggactttgttgtgtaggcttctctgttggatatctgagcattatcttggctwactgcagcctccacctcctgggtttgagcgattatcctgtctcactctccccagtagctggggctacaggcgtgtgccatcacgcctggctaatttttat

SEQ ID NO: 162620 - DNA, 201 bp, Homo sapiens
gccccaacatgaccaactgagagcttcaggctttacatgatttttcacagcccactgagctttgtaatatatagaacacaatctttagagcttcagtcctygctgtgctataataccaacataataagagtagctaatatttatcagatgtttactatacatcaaacaccaatgtctcatttcatgacttgtgtgacttaa

SEQ ID NO: 162621 - DNA, 201 bp, Homo sapiens
aagccatgtcagaaggataagaaatcggtggttgctgaggtggaactgtgggagtgggaagggctagatgagggagcagtgggaggtgttggtcatcatgmgcttttccttaggtacagaaagaagggaaatagagtgagccagactgcaagaggattttgaggtggagagggtgtgagtttgaggagcctccaacagaaa

SEQ ID NO: 162622 - DNA, 201 bp, Homo sapiens
atcatccaactttcctcacttttttgcaacctttaggagatcttccagaaaccagtaccagagctgatttagttttcataacaaggaaaggaccatttatyccccttcatggacctgttcattattacctgatggcatccctggaggcgtgtcttccttcccagtccctcagctgacacattagcagggcctggttgccca

SEQ ID NO: 162623 - DNA, 201 bp, Homo sapiens
gtttagtggggcatgcctgtggtcccagctactctggaggctgaggcaggaggtcaaggctgcagtgagccgtaatcacgccactgcactccagcctgggygacagaatgagaccctgtctcaaaaacaacagcaaaagagattgcttatgcaaaaagctgagcacagtgtctttcaacagatgaatggataagcaaaaca

SEQ ID NO: 162624 - DNA, 201 bp, Homo sapiens
tgcagtttcataatcaagcactcaacatctttgaattgatgccaactctgtggtccttgggctcggaatttgctctttcaccctgggttagcctgactttrtagctaggcccctgacttccttgtgtatttagagctgaaataatttatgtctctttggaagcacatcatcatgtcattaaaagtaacagctggctgtttt

SEQ ID NO: 162625 - DNA, 201 bp, Homo sapiens
gttaggtcttttggtcttcattacaaagttttttaaatggatcttcatccttttcctttttctttcatcttcctcactgtcctttttgtcctttttttttwaaaaaaaaaaaaaatagatataattggcctgtcaggactcatcactccttccctggatgaaatgatttttgttgccaaggaaatggagagattagctata

SEQ ID NO: 162626 - DNA, 201 bp, Homo sapiens
aaataactagcctcctggctggatgccatcagaacacttgggcaccagctggtaggaggctttgagggagggaaaggaatataagaaatatatgtagcccyttaagacttggaaacgtgaagttattgccaacaggaaagcagaattgctgtgaagttatacacagcatactaatgaagaccaaagcaggaactctgtttc

SEQ ID NO: 162627 - DNA, 201 bp, Homo sapiens
cagtttgggggtcctgacagatgcgatacagatataggcatgtgtgtatgtgtgtgtttgtgttccttacatacatgcaaaggcacataagtgtatatggrgagagaagcaaatatccttatacatacgtttttacacagtgtatctgtaggatacatttctacaagttaaattgctgaatcaaagggtatatgcgttgtt

SEQ ID NO: 162628 - DNA, 201 bp, Homo sapiens
tggtgggacactacactcagaaatttgcttcttgtgcaaattggaactttaccaaatagtccattctatcatttactatgtaaaagctaccagattaaagaaaaaaaaacattgagaagcaacgtgactagcctctcaagatacattattggcaaaattagcttgctaatgattcttagcagttgcaacctgatatatcag

SEQ ID NO: 162629 - DNA, 201 bp, Homo sapiens
acagtgtatctgtaggatacatttctacaagttaaattgctgaatcaaagggtatatgcgttgttaatttttatctttagtgtcaaattaccctcatttgygactggactcatttatactcccttcagcaagcaatgtacaatagtcctggtttcacgacaccctcactagcactgtgtattattaaactgtttgaccttt

SEQ ID NO: 162630 - DNA, 201 bp, Homo sapiens
atacgttggttttgcttgcatttcaactttatataagtggagtcatattgtatgtgctctcctgtgtccggcttcttttgccccacatcagccttgttacratagttgtttggttttttgttggttttttttcaatgtagtattccattgtataatgtgctgtgacttatttactcttgctactgttggtggacatttgag

SEQ ID NO: 162631 - DNA, 201 bp, Homo sapiens
gttttagagccatttatatttcattttctatgatttatgtcttctgtcctttttttctattggactttggctttttaaaattgagtcctttactgaggaawtcaggcccctctcaataataagtagcagctcctgtcctccagtttgtttgacatttgactttctttatggtggtgatggtggtagtgttgtgttattgtt

SEQ ID NO: 162632 - DNA, 201 bp, Homo sapiens
gctctcctgtgtccggcttcttttgccccacatcagccttgttacgatagttgtttggttttttgttggttttttttcaatgtagtattccattgtataaygtgctgtgacttatttactcttgctactgttggtggacatttgaggttttccactttggggctatcacaaacaatgctgctatgaacacttatgcttatg

SEQ ID NO: 162633 - DNA, 201 bp, Homo sapiens
tgcaagcaggaagaacgtagagagccactaccagcctgaagctagatgaccaccctacctcattcttaacacatcactttcactgggttcttttttatatrtctttttagaaattgttttgtgaatctgcagtaaacaaattataatttgaaaaggaattcagatacacattttgaaaatgagagcagtaacaagataagg

SEQ ID NO: 162634 - DNA, 201 bp, Homo sapiens
gtgaggatgcacctgcttgtcccacaagcagggctgtctttggtatacagctgggccctacaccctactctcctgtgggtaacatactgttcacttcaacytgccctgcttggccagataatattcatggctcagatgaggaatgaccaggaccttgacttcttcatctaccaaccagactaggttactcagtaatactag

SEQ ID NO: 162635 - DNA, 201 bp, Homo sapiens
tagtaataccttgctatggttttcgtttgcatttctctgctgagtaatgatgttgaacaccttttcatttatatattgaccatttggatatgctttttaartatttttaaaaattgggtattctgctttattcttattggtttgtacacattctttagtttatagtagttacaagtcctttatcagaaatacatatattgc

SEQ ID NO: 162636 - DNA, 201 bp, Homo sapiens
aaaaattgggtattctgctttattcttattggtttgtacacattctttagtttatagtagttacaagtcctttatcagaaatacatatattgcaaatagattttttttcaatctggcttgccttttgctatcttagtgctgtctttggataacaaaagtcttaatttttataaagtccgatttatcagtctcttcatatat

SEQ ID NO: 162637 - DNA, 201 bp, Homo sapiens
aattatggagaaccattggatcttgattaatatctaattaatcctaacctggaaaataacaaggaattggtatcttgccagtgtttagatttgtcattgargaacatggcgtgtctttcaattactcattcaatggagttttgtaattatccctaaataggcaatctctagatcattcctgtgtgttttgtttgttgtttt

SEQ ID NO: 162638 - DNA, 201 bp, Homo sapiens; identical to SEQ ID NO: 30263

SEQ ID NO: 162639 - DNA, 201 bp, Homo sapiens
tcagtcagcagccatgaacatcaagtcaagaccctctaccagcaaaaaggttacaactcactgaagacccagatgatcattagcattttttttttagcaayaagtatttttaaattaaggtatgtataccttgttcttttagacataatactattgcacacataatagagtacagtatagtgtgaacataacttttatatg

SEQ ID NO: 162640 - DNA, 201 bp, Homo sapiens
gcctagaactctattgggctgtctggtgaagggtagactttaaaagttcaagcctaaaggcagctgcaaatgggctgtttctgaccagttttttctgacayacatctcagtctcaaccttaaccttttcactctaactgaaggcagaggaagtaagcattgagaaaattccattaaggaagacgaaagctcgccaccttcc

SEQ ID NO: 162641 - DNA, 201 bp, Homo sapiens
tctggtgccaatgtgaaaccgactgggtagaaaaggaagagctttttagaataaacattctcatgaataagagcatttgctttcttgcaaagcttacataytggccttcttggacatgttttcacagtagttgtagaaaagctaagagtgtctaactaatttttctttgttttttaacaggagaggagatacttaccctta

SEQ ID NO: 162642 - DNA, 201 bp, Homo sapiens
tctccatttgttaaaattaaccatcaactgggaaaaatagaaaaaaacaaaccttttcctaaaagagacagggaggcatggtacccattctatttgctaargcactcaaggaggaaagatcatcatatgcagtagataatgtcagaaccaaaaatctagcaattctgccaggcacatagtaggaacttaaatatttgttga

SEQ ID NO: 162643 - DNA, 201 bp, Homo sapiens
ttccttctgaagtgccagtgactcttcctagccatatagtgttcttcagttggcagtgtttctattatgttttgcttcttatgcctattctatggtgtccytttggtggatttgatagatttgacactgagagcattttaggaagaagcaaacaggtggaagtaataatatctatcatttaataaggtctttctatatgcc

SEQ ID NO: 162644 - DNA, 201 bp, Homo sapiens
cccctgtgccttctctcttagtgagcttagatgagccatgaacctagagcctagaactctattgggctgtctggtgaagggtagactttaaaagttcaagmctaaaggcagctgcaaatgggctgtttctgaccagttttttctgacacacatctcagtctcaaccttaaccttttcactctaactgaaggcagaggaagt

SEQ ID NO: 162645 - DNA, 201 bp, Homo sapiens
ctgtatggtaggaggggagtcagaagagagagttcccttggaagccaagtgaagaacaatcatcaaagaaaagggcatgttcagctgtttaaagagttgtrgatagatcaagtgggatgagaccaagagtttaccgttggatttagaaatggggtcatttgtgatcttgctgtactgtttccaaggagatgaaaactttat

SEQ ID NO: 162646 - DNA, 201 bp, Homo sapiens
tggctgagcatgaaaataattccaaactgtataatgttggaacgttcagctgagtgaggaacatgattgtacctaagtcaaagatacggtaatgcagtctytcctgagaacttcacatgctgataattatttagaggatttggatccattttttgaaggagagatcaacaatttgtttattttttttaaaaagtaatggaa

SEQ ID NO: 162647 - DNA, 201 bp, Homo sapiens
atgcctgtaatcccagcactttgggaagccgaggcaggtggatcactaggtcaggagatcgagaccatcctggctaacacagtgaaaccccatctctactaaaaaaaaaaaatagaaaaaaattagctgggcatggtggcgggtgcctgtagtcccagctacttgggaggctgaggcaggagaatggtgtgaacgtgggag

SEQ ID NO: 162648 - DNA, 201 bp, Homo sapiens
tccatgtcctggacgcgtccaagagtgtggtggtggtaagtgggtgaccttacattttattccagatgtgttggaaagcttgcattacaagtaagggtttaacttaagatctattcatttttattcagttctactaaataaaggtcaaagagcagcctgaggctcatggtgtgcctctgcagtgactgccttgctggaagg

SEQ ID NO: 162649 - DNA, 201 bp, Homo sapiens
ggattgttgccctgttgcccaggctgaggtgcagtggctcgatctcggcttactgcaacctacgcctcccagattcaagcaattctcctgcctcagcctcacaagtagctgggattacaggtgtgcaccaccacttccggctaatttttttgtatttttagtagagatggggtttcaccatgttggccaggctggtcttga

SEQ ID NO: 162650 - DNA, 201 bp, Homo sapiens
ccttcaccatcttgaagagctagagcagtgggggccttgctgaaagccaggcagggaatgaggagtgggtgtttgtgctctttccagtttggtccagccaygcagccagcagtggttagctcctcccgtgtacaaagaaacgaccacattttgaaattgctaaaacataagtcagatgataaatcatgtgggtaactgctg

SEQ ID NO: 162651 - DNA, 201 bp, Homo sapiens
aacgaggtttcagcaaatgaaaagttttgtataaacgagattatacctggtattctgtaactcttttcccctgctcaacataatgttggcattttcccatmttagtggattaaaactccatgttttctggttgcattgcattccagtatgttttacttactattattgaatgaaattgtgtttctaattttttagtagcat

SEQ ID NO: 162652 - DNA, 201 bp, Homo sapiens
gggtgtttgtgctctttccagtttggtccagccacgcagccagcagtggttagctcctcccgtgtacaaagaaacgaccacattttgaaattgctaaaacrtaagtcagatgataaatcatgtgggtaactgctggtgacacttcaggagccagtggtataatttgtttcagttggttgtgggctcattggctcaggctct

SEQ ID NO: 162653 - DNA, 201 bp, Homo sapiens
ttttcatatccaaatgttttaaattgtgtactttgagtgacatggaagagtatctgagtatatatgctgttttttgcctggactttttttatttctgggcttttttcttctattcctactgcctggaagctatgctggtccccttccccctttcccccctttccctcctccatacctgttcactctgctgacttcttctta

SEQ ID NO: 162654 - DNA, 201 bp, Homo sapiens
caggtttttcaacatatgagagtccttgtattattattccagttaccactttggccctaaatcttggagttctccccaattccttcctcctctccttcttstttcttctttcttctttctttttttctttcttctttcttcttgttcttcttctttctttttttttcttcttctattattattatttttatactttaagtt

SEQ ID NO: 162655 - DNA, 201 bp, Homo sapiens
ctgccacgatggccttttctgattgtattcctgaatgaggtgattttgttttatactaactcataggtgattggattgttattagagatacttagaaaacmcacatagagttatagaattttaaagctggtaggcactttagccgtcattcagtctgacttccttaagttcagatgaagatgttgaactttcttgcctttt

SEQ ID NO: 162656 - DNA, 201 bp, Homo sapiens
ttagttactaatcatgtattgctattggttcacattctaataggtgtaccacaccagtgtgagatcttaataataatgatatagtctttcctagcgattaggtaaaacctctgtgttgtcctgggtgtcactggagtctttagtttgctgacagttctcaagggccccttagaggacgttcttcctgccactgcctcacct

SEQ ID NO: 162657 - DNA, 201 bp, Homo sapiens
gggttggtcacataggcccagaatgcccatgtgtctagccttaattgttcagtcttcagtccctgcagaggtcaaacataagcatgagcgaaggtcccccmccataaatcagactgttagcataaacgatgtgacgtggcccagggtgccaggtatacagtgactctcttatcaggcaggctgtcccaagggtttagagtt

SEQ ID NO: 162658 - DNA, 201 bp, Homo sapiens
ccacaccagtgtgagatcttaataataatgatatagtctttcctagcgattaggtaaaacctctgtgttgtcctgggtgtcactggagtctttagtttgcygacagttctcaagggccccttagaggacgttcttcctgccactgcctcacctccaggagccccaagatgaggttttatcgaggtctaaataatttatgtt

SEQ ID NO: 162659 - DNA, 201 bp, Homo sapiens
gtggaaacctgcctgggtggtactgtcacctgaggtggcctgggtctttcgcaggcccaggggcagatgtgaaatgtctaaaatgggaaacgcctttgcaktcacacatctttaaaacactgcagcaaagcaggatcctctatttcttgctttctctctgtcctctctctggatgtttccctctctttttatttcttttat

SEQ ID NO: 162660 - DNA, 201 bp, Homo sapiens
aatttatgtttttatttcttaagcaaacattcagttctgacttttgatccactcagtggttaattaaaaatttttaaaaataatcctttctatgacttcarctacagtccattcacagagagaatgtatttgctctctatttcgttacgaatcttacagactgtaggggcagatagaaggcagcaaataatatgtgaaaag

SEQ ID NO: 162661 - DNA, 201 bp, Homo sapiens
gtctgtcccacagccctggtgaggagtaagacagaagcttggtgaaccttacgtgatatgagatatgacctgctcctgacaaaggcctgtacaccaatgcygtgttcactctgagagtcattgtttaatcaagtgacagaggttgagtatctgttaatgtggcacagatactgtgctagacgccatgagaacaatttgaca

SEQ ID NO: 162662 - DNA, 201 bp, Homo sapiens
tccactcagtggttaattaaaaatttttaaaaataatcctttctatgacttcagctacagtccattcacagagagaatgtatttgctctctatttcgttaygaatcttacagactgtaggggcagatagaaggcagcaaataatatgtgaaaaggatacattttcttacatatatgtaggaaacttttgcttactgacttg

SEQ ID NO: 162663 - DNA, 201 bp, Homo sapiens
taatcgcagctactcaggaggggcaggagaatcgcttgaacccaggaggcaaaggttgcagtgagccgagatcgcgccactgcactccaacctgggcaacmgaatgagactccatctcaaaaaaaaaaaaaaagaattaggaattgggaattcatgttaggtcttttggtcttcattacaaagttttttaaatggatcttc

SEQ ID NO: 162664 - DNA, 201 bp, Homo sapiens
acctctggcatgggctactgcagggtccgccctgctgccccagggccatgggccactgagggctggccctctgaaatatgtcttgaggacagccagtcctrgggtagttgcaggaagtcggtagggaataaaagagggttttcttttacggccctgatggtaacacctcaaacatttcttaaattctgggagacgagagag

SEQ ID NO: 162665 - DNA, 201 bp, Homo sapiens
acagcagtcctgaatttgggacttcatttgcctatactttgagcatatgtgtcagtagacaatctagatgattgtttccggttttgaaactttagataagwagcttactctccatgtctttctggacatgttcttcatgttctttcatgttcttcatgttcaccttgtcttcatttgtgcaagtgaggattaacccgtctg

SEQ ID NO: 162666 - DNA, 201 bp, Homo sapiens
attggtctgaggcatgcaggtgccctctgtgcctattcagcagtttccagctgaagactggagcactcagcctgccacggaagactggtctgcagctcccrctgctcaggccactgaataagtagcagcaaccactgaatggtcttaagctgttcttacctgggctgttaagtaacatggaaataaggctgatggaaaata

SEQ ID NO: 162667 - DNA, 201 bp, Homo sapiens
aggtgagctgtccaggggccgtgggacaggcttctcaccatgggcagggtggccgagtctcacggaaaccgagatggtgtcctcggaggctggctcccacygcaggtccgggagcaggccagcccaggtgcagcattgaagccacatgtgaggatttgggccacacttcaccccttaccactaacgttccctgtacacata

SEQ ID NO: 162668 - DNA, 201 bp, Homo sapiens
ctcaggccactgaataagtagcagcaaccactgaatggtcttaagctgttcttacctgggctgttaagtaacatggaaataaggctgatggaaaataagcrtcagtttcttaaaaaaaaaaaaaaaaagtttccgtaaacattcatggcaggtttttgtgtagacataagttttaattcatttgggtaaatagcaaggagg

SEQ ID NO: 162669 - DNA, 201 bp, Homo sapiens
ggcagcttgcttattaggtcgaagaagaatccatatattcttggcgcttaaatgaattctagtgaagaaccctttgtttttccagggctggggcaagatgmcgtcaactttagggtaaaagtgaaggaaggcccaggtgatttgcccaggtagagtccttggtgggagctcgatggtcctatctttattgtccactgtttt

SEQ ID NO: 162670 - DNA, 201 bp, Homo sapiens
cacaatataattcataatcatccatatttttaccataacagcatctgaagggattcttaaatttggggccttcagcagtaccatgaagaattaaacaaggrcagctacatccttaccatatgcacttaggctcagtaaatcctcactgtatgcgcccaggctcggacgccacagaatataaggcactggggttctaatgtt

SEQ ID NO: 162671 - DNA, 201 bp, Homo sapiens
gagagttgcagagatggtggtgtagctagggcaaggaagggtaaacagaccatgcctagggtgcttccgtattctgaacttaggtttctttaaatttattktaaaatgtaaaattaatttttcttgtaccaagtaacatattagttctagaaaatttacaaaattctggtaagcaaaggaagaaaataaaaatcacttgta

SEQ ID NO: 162672 - DNA, 201 bp, Homo sapiens
  misc_feature (1)...(201): n = A,T,C or G
aacgtgtacagcagtgcctggaatatagtagacatctaaatagaaagttagctatgatgattattattatttgaacttgctttcaaatatatatggtggtntgttaatgctgctttgtcagctgtggaaataaaaccaactaaaataaagctgtaaactcagaagttgaacaaatttggatactaggtttgtggtctatta

SEQ ID NO: 162673 - DNA, 201 bp, Homo sapiens
ctttgggcatttctctaaatgtcatatccccaggtgtctgtcatttccctagttgtctgtcagtgaatagtgatgccccatgagggttctgtgggacatamaatcaagtgccagctcctgcaccaggttgctttcattgccatttctaatggggttgagagacgagaatgagtaactatggaaccgagtcctggagatggg

SEQ ID NO: 162674 - DNA, 201 bp, Homo sapiens
gtggatgttagaggttattttttatttctttttgcttgctgtgtttttgaattttctacgtgaacacagcatttcaaatgaaataagttagtaattatccrtgttcaaaaaggacataaagaatagtaaaagctattcaagtggggtggaaaccgtccagaggattcctggggttggatgttgggacagaggtgctaatag

SEQ ID NO: 162675 - DNA, 201 bp, Homo sapiens
cagtggatgttagaggttattttttatttctttttgcttgctgtgtttttgaattttctacgtgaacacagcatttcaaatgaaataagttagtaattatmcgtgttcaaaaaggacataaagaatagtaaaagctattcaagtggggtggaaaccgtccagaggattcctggggttggatgttgggacagaggtgctaat

SEQ ID NO: 162676 - DNA, 201 bp, Homo sapiens
aacatttttaatatagatacaatttttcaatcaaaacccatgttttcaagacaaagccagttcattcatttgtgccttcattacctgatcatttacgaagstgctgtgatgtgccaagtactgtgccaggcactgctcactcaaaggtctgtccccgcccttgaggtcattgagtcatgcttgtttttagaaaactcttaa

SEQ ID NO: 162677 - DNA, 201 bp, Homo sapiens
gtgcaggtggaaatgggagcccaggtgttggatgtcaacatggatgatggcatgctagatggtccaagtgcaatgaccagattttgcaacttaattgcttmcgagccagacatcgcaaaggttatacaaagtttatgtttatcagggggatttacttgtctcactttgacactcatttaaccgtgccagttgtcccattaa

SEQ ID NO: 162678 - DNA, 201 bp, Homo sapiens
ggcaaaaaaggggaatcttttcatattttaaaatttttgccaggaaacattacctggagccagaataagtggaggtctttccaacttgtccttctccttcygaggaatggaagccattcgagaagcaatgcatggggttttcctttaccatgcaatcaaggtatggtagaagaactcttagccctgcggaaaccagttttt

SEQ ID NO: 162679 - DNA, 201 bp, Homo sapiens
acaagagttcattgagtgcctgctagctgcaggccctgtgctagacactgagtccataagcattttccctgtgttgctccctctaggcattaggttaacakaatcattagcaatggcacctgcttcagcagtctcaggcctctacttctccaatttgaagtccaaatattttgctgtggggaagatttccaaggatcaggt

SEQ ID NO: 162680 - DNA, 201 bp, Homo sapiens
ggaaacgcctttgcattcacacatctttaaaacactgcagcaaagcaggatcctctatttcttgctttctctctgtcctctctctggatgtttccctctctttttatttcttttatttggtttcttcctttttttaaatttctagccacctttcttgcctcatataggtgttcacaagggaataaaacgtgtaagatgttt

SEQ ID NO: 162681 - DNA, 201 bp, Homo sapiens
gaaacgcctttgcattcacacatctttaaaacactgcagcaaagcaggatcctctatttcttgctttctctctgtcctctctctggatgtttccctctctttttatttcttttatttggtttcttcctttttttaaatttctagccacctttcttgcctcatataggtgttcacaagggaataaaacgtgtaagatgtttt

SEQ ID NO: 162682 - DNA, 201 bp, Homo sapiens
atgtgccattttctctagatagagaagaaaattgactggagctatccctgtactcctcagttctcttctttgctgtcaagtaacaattacctgctaagctstgtccctgctgtcaacatttttatccatctctgccttcaaggctcattaaatgcggctaagaacctttcaggaaggctggagacagagaagcagtgtcag

SEQ ID NO: 162683 - DNA, 201 bp, Homo sapiens
gaataagtagcagcaaccactgaatggtcttaagctgttcttacctgggctgttaagtaacatggaaataaggctgatggaaaataagcgtcagtttcttaaaaaaaaaaaaaaaaagtttccgtaaacattcatggcaggtttttgtgtagacataagttttaattcatttgggtaaatagcaaggaggggattgctgta

SEQ ID NO: 162684 - DNA, 201 bp, Homo sapiens
aggaggggctttcctccagtgcactctggaacattctggtggcagtgccttattactctgggagtctgctcttctgagtaggctctgattgctgtctcttsgaaggtaccatggggctctgtgatctctctctcctgtggcgcagggaagctttgggtccccctctggcctttgttagcaaagaataattgatgggccgag

SEQ ID NO: 162685 - DNA, 201 bp, Homo sapiens
actttgaagaccggaatcggtgaggagcagtggatttggattgtgcagattacggctgctttcatattgctcacctgcccaactttttaatggttttcaawctgctagattggtccttattgcatcaactaaatttggtatttactttattctttcaataaatgtttattgacatcagttacatgctgagcactagggata

SEQ ID NO: 162686 - DNA, 201 bp, Homo sapiens
ttattggaaagaatatctgttctccattggattgcctgtgtttctgtcaaagattagttgaatgtatttgtgtggttctatttctggactctattctgttycattaatctatttgtctcttcttacaccaattccacattgtcttgattgctttagctttttagtaagtcttggagttgggtaggtcagtccttcaacttt

SEQ ID NO: 162687 - DNA, 201 bp, Homo sapiens
tctccatacagtggaatattttttggccttaaaaaagactgaacttctgacatgcctcaaaacatggttggactttgaaggcactgtgctaagtgaagttyagccaaacacaaaaggatgaatactgtattattctacttatgcgaaatatctagataaggcaaattcatagagaaagaaagtagagtagaggttaccagg

SEQ ID NO: 162688 - DNA, 201 bp, Homo sapiens
cagactgggaggtcagggcaggcttcctggacaaggtggtgttcgaactgtttttgacgattcagtgggagttgccgtggctgggactgtggatgtgatayggtgttgaagaaaaggtcattccaggtagaggagacagtgtgagaaggcacaggcacatgtgcctatttggggaactgcaaggagcccattgtgcttgga

SEQ ID NO: 162689 - DNA, 201 bp, Homo sapiens
tggaggataatgtgctttacttaggtctactgataaatgttaatcacatcaaaaaaaatactttcacagtaacatttaggttgtggttaaccaaaaagtakataccatggcctagccaagtttatacgtgaaattaaccatcataccatttaaaatttgaatgagtcatcttcataagtagaaacagtattatgtgtcttt

SEQ ID NO: 162690 - DNA, 201 bp, Homo sapiens
  misc_feature (1)...(201): n = A,T,C or G
tagtttttaatgtgactttttaaaatggttttgaggagtgtaaaaggctttggatcattttagagaatttctgtcttctagttcaaatcagaggtcttcantgtcttaagttcccaaataatttttggttgtattgaaatgaattttatttattcagccaaacatttactgggtacccagtaggtgttaggggctgtgcta

SEQ ID NO: 162691 - DNA, 201 bp, Homo sapiens; identical to SEQ ID NO: 30251

SEQ ID NO: 162692 - DNA, 201 bp, Homo sapiens
ctcgtggacttcaagagtggcttcttgccaccattctgtgttctttctgcctccaagatttccttttcctttcttttaaattttgctttcaggtcagatcyttttttttttttttttttttttttttttttttagcagtgttagtttgctgacatttctgtaccatagaataccatgtgaactgatttgaggagtccaccc

SEQ ID NO: 162693 - DNA, 201 bp, Homo sapiens
tgttctttctgcctccaagatttccttttcctttcttttaaattttgctttcaggtcagatctttttttttttttttttttttttttttttttttagcagkgttagtttgctgacatttctgtaccatagaataccatgtgaactgatttgaggagtccacccacaggcagcgtctttcagctgtaggattatctgaatgg

SEQ ID NO: 162694 - DNA, 201 bp, Homo sapiens
tcaggtcagatctttttttttttttttttttttttttttttttttagcagtgttagtttgctgacatttctgtaccatagaataccatgtgaactgatttraggagtccacccacaggcagcgtctttcagctgtaggattatctgaatggcaaaaatctttagtgctgcaggggacctcagtgagatggctttgatggta

SEQ ID NO: 162695 - DNA, 201 bp, Homo sapiens
gttcggctcaccctgaagcttcagaatagtacagaacttccggaaatgagcttagtcacataactgaccagagctttgcctttggtgacagcacaagcctkgtggacgtgaccagaaagatgggtgtaaggaagagaagagagacccctttctctggtccactctgttagtagaagagcaaaagaagaatcttgtgtggtg

SEQ ID NO: 162696 - DNA, 201 bp, Homo sapiens
tgaaaatgtgttatccaactcatattcattcagctcagcatgtgggtaaaaaagtcattagataggcaaatctcccactgaactttattttttgtgtttayttttttgagacagggtcttgctgtgttgctcaggctgaagttcagtggtgtgatcatagcttactgtagctttgaactcctgggctcaagcgatcctccc

SEQ ID NO: 162697 - DNA, 201 bp, Homo sapiens
ggaagattggaattcagtgaaatggaacattgtttaggactgtttatatttgttttttccctggagtgactgatgatcatatttccagccagtcatctcactgttccaagtctgttttcatgtgtgtcatatgttcactctactgagttaccttgtagttcactgcttttgttgactgatgtgatagactcttagtaaata

SEQ ID NO: 162698 - DNA, 201 bp, Homo sapiens; identical to SEQ ID NO: 30258

SEQ ID NO: 162699 - DNA, 201 bp, Homo sapiens
aaattacgaatgacagcaaaagtagtgtccacttttctcactcagaacatagcacagaattaatcccaatcagtgagtgtgaagttgggttaacacatacsaactatattcaggctagccctttatttttttttttaatactccagaaggtagaggatgagattaggaaaagtgggattcatggtttatgatactccctct

SEQ ID NO: 162700 - DNA, 201 bp, Homo sapiens
gagctccatgaaagagttcgccgagaactgtgggcctactgtggcagtgagcagctggacgtcgcagacctgcgcaggctgcggtacaagggcatccgccyggctcctggctaccccagccagcccgaccacaccgagaagctcaccatgtggagactcgcagacatcgagcagtctacaggtaggagccaggaggctgcg

SEQ ID NO: 162701 - DNA, 201 bp, Homo sapiens
atggctatcttgcattttcagtgttcccagctgttagatgaaaatctaaaggatgaatactttgaggaaatcatggaagaatatgaagatattagacaggrccattatgagtctctcaaggtaagtggtagaaacagatttttgcttgtttttaatgtgactgttttttatgatcctagtttttaatgtgactttttaaaa

SEQ ID NO: 162702 - DNA, 201 bp, Homo sapiens
gtttttgggtactggtgatccttgttgagagctttgaaggctcattgggtttggagtatagcttctcttactgtcctggaaattttgtgttgagttgttayttttagaaaagagggaaaggaaagaatggaattttactctgtctctacactaacagttcaaaccctaaaagatttctcatttttccctctccttccctca

SEQ ID NO: 162703 - DNA, 201 bp, Homo sapiens
ataagattttattgggatagagccacacctattcatttgtatcttgtctgtggctgcttttatgctgtaactacaaagttgagtagctgtgacagaggctrtggcctaaaatatttctctctggccctttacagagaaaagtttgctgatcgctgacttaaggtatcactgtaaattctcatttttatttgtattgccctt

SEQ ID NO: 162704 - DNA, 201 bp, Homo sapiens
gccactgagaagctcttacgttatgcccaggtagagagacaagtgttctaatagatggatttttcctatctttgaatgtattactcacctacagttagtaraccttcatggtggaatagaagcaaatatcgaatcatatatttggatcactgaagatttctacagagagttgcagagatggtggtgtagctagggcaagga

SEQ ID NO: 162705 - DNA, 201 bp, Homo sapiens
ctgacttaaggtatcactgtaaattctcatttttatttgtattgcccttagtctggcatggacatggggatagtgaatgctggaaacctccctgtgtatgrtgatatccataaggaacttctgcagctctgtgaagatctcatctggaataaagaccctgaggccactgagaagctcttacgttatgcccaggtagagaga

SEQ ID NO: 162706 - DNA, 201 bp, Homo sapiens
gcagcgcctttgtaatactgtaatacggcaagctttggtctatgtctagtaacaagaagctctgaattactttgaacttcggatgctttttgttttttttyctttccactcctatataaagcttaagagatgtgattgctgtttttggcaaaaaaggggaatcttttcatattttaaaatttttgccaggaaacattacct

SEQ ID NO: 162707 - DNA, 201 bp, Homo sapiens
agtgttttcagtgagtgaaatgtgctctaatgtataacacttaatattttaatattaatattttattaaaataaaataacaggtatttaatattaatattktaatagataatttttctatttcaaactacatcttttgctcttttccctaggcaacagaaacagacacaaaaatcagagtgtgcacccgggcctaccatct

SEQ ID NO: 162708 - DNA, 201 bp, Homo sapiens
ttccctgacaggcagccttgtttgcactccaaaatctttttgaggagaaatatgctccccggcctatctttgtaagttctaaagtgtttgcacaatacatbcttttattaataattgtccttttgagcatgtttttcccccgctttgcatagtagaactattaatggtatctttagaactcatctactttaacttccattg

SEQ ID NO: 162709 - DNA, 201 bp, Homo sapiens
cttggcatttagatttctgtgaaatccaagcattgacacttgagtgttttcagtgagtgaaatgtgctctaatgtataacacttaatattttaatattaahattttattaaaataaaataacaggtatttaatattaatattttaatagataatttttctatttcaaactacatcttttgctcttttccctaggcaacaga

SEQ ID NO: 162710 - DNA, 201 bp, Homo sapiens
aactgatcacactgatttcattctgatgttcagctgtgatctttgagttgtaaatccctggcccatgcatggagtatcttgtaagactgaaattactccargtattttgggcttaaagaacaagtatattaaaattctatctctgacatactactattttttgtttattgttttgctaaagaagaaatagggaatactttg

SEQ ID NO: 162711 - DNA, 201 bp, Homo sapiens
ttcagctgtgatctttgagttgtaaatccctggcccatgcatggagtatcttgtaagactgaaattactccaagtattttgggcttaaagaacaagtataktaaaattctatctctgacatactactattttttgtttattgttttgctaaagaagaaatagggaatactttggagcctttgaaaagtaatttatagtgac

SEQ ID NO: 162712 - DNA, 201 bp, Homo sapiens
agtgcatagctgatgggcaggcacataaaaggtacagtttatagattaattttctgccttgttgagaaaactaaaaggcatgattgttgctgcacacttgraagtaggtatataattatatgtatagttatgttaaatagacttaattttatagttaaaattagttttgaaattagtttcattaaatatattttattctga

SEQ ID NO: 162713 - DNA, 201 bp, Homo sapiens
gggtgggccatggaagaccagttaacagctgacctcaggtgttctaaaagtacaggtcagacacccctagtacctcaggttcaggccgcagaactaggctygtatttatatatcagcagttaatggatgcttattaagtctttactatctattgttctggtgccaatgtgaaaccgactgggtagaaaaggaagagctttt

SEQ ID NO: 162714 - DNA, 201 bp, Homo sapiens
agagggcctcctagacagaggaaaaaaaaacaagccaaagttcagaagacagaaattgcaacatttgatttccagccttgttttccttctgctgtaccttrttattcactggctttccctctggggagcttatcctttgttctgcctactgtcaaaagactccagtgtagctgtcctgaagtcaaagcatgcattcctaat

SEQ ID NO: 162715 - DNA, 201 bp, Homo sapiens
  misc_feature (1)...(201): n = A,T,C or G
tgaggaaatcatggaagaatatgaagatattagacaggaccattatgagtctctcaaggtaagtggtagaaacagatttttgcttgtttttaatgtgactnttttttatgatcctagtttttaatgtgactttttaaaatggttttgaggagtgtaaaaggctttggatcattttagagaatttctgtcttctagttcaaa

SEQ ID NO: 162716 - DNA, 201 bp, Homo sapiens
gagaggagagcccagcctgtacatatccccagtggccgttctttgactgtgctggctttttttctttcgagtgacgagaacagactcttctcagcaacttstctctcatcccccccacctttgaaaaggcaaatatcatatgcatgtccctttagctgctgtaaaaaagagtgtcttaatcaagaattggaaccagaattc

SEQ ID NO: 162717 - DNA, 201 bp, Homo sapiens
ctggaaaacggcttccccatgcacagctgtccctgagctctgtgacattcctgtgtgccattaccaaacacctcctcgcctgtacttaacaatttcctgcyctgtgtcaatgaagctgtacttgcttccacggcgggcaacgagctgtgaagtgtgtgggttggccactcattgattaattgatcagtcctgagcagtacc

SEQ ID NO: 162718 - DNA, 201 bp, Homo sapiens
ttactgacttaattaattgatttatttattttgagatagagtcttgctctgtcacccaggctggagtgcgatggcatgatcttggctcactgcaacctccrtctcccaggttcaagtgattctcctgccccagcctccagagaagctgggactacgggctcatgccaccaggcccagctaatttttgtatttttagtagag

SEQ ID NO: 162719 - DNA, 201 bp, Homo sapiens
ggcttccccatgcacagctgtccctgagctctgtgacattcctgtgtgccattaccaaacacctcctcgcctgtacttaacaatttcctgccctgtgtcartgaagctgtacttgcttccacggcgggcaacgagctgtgaagtgtgtgggttggccactcattgattaattgatcagtcctgagcagtaccatatatgta

SEQ ID NO: 162720 - DNA, 201 bp, Homo sapiens
agtgatttttttttttcccctcctgaggcagggttttgctctgtggcccaggctggagtgcagtggtgcaatcatagctcactgcaacctcaggcttctcycacttcggcttcctgagtagctgggaccacaggcacgcatcatttaaaaaaaatttttagtagagaggtcgggtcttgctgtgttcacaggctgattttg

SEQ ID NO: 162721 - DNA, 201 bp, Homo sapiens
tctcttgatcagcttcagggaatccatggagaacaggcataattaggctttggaagtcactgaaatatttctttccggttatctgccttctgggctttggkgggagcattttgggagttgctaggcaagtgaaatgagatcaacagcatgaggaaaacacgctgttttgcttctgaggtggtaggtaggccaagacgcagt

SEQ ID NO: 162722 - DNA, 201 bp, Homo sapiens
ggggatgtaacagtgcacaatacaggctgccatctgtgcgttgtgaagcttattctcatttgacgatacccgattgctcttcatggtgtgctggcgccacrttcttgctaacggcgcccccgcacactcctacactccttggttttaaggctgagaaggactctgccagcacggagccatactactgcctctcagacttca

SEQ ID NO: 162723 - DNA, 201 bp, Homo sapiens
ctgagtgtggagggtccctggagctcaggagttcaagaccagccaaggcaacatagttagaccctgtctttaaaaatataaaaataatgcagcctagatcwgttgcctcatttcatttctttgtatcaatctaattcttcaagcccttcctttcatctttcctggaacagaggtatgaattaaaaggaacctattctcaac

SEQ ID NO: 162724 - DNA, 201 bp, Homo sapiens
gtctgtttggattaattcaaacatccaaaacgtattttgctggaaataccctccaaaggcccacagcacctggcagcggttgggatgcttttttagtggcygctttaacctctggcatgggctactgcagggtccgccctgctgccccagggccatgggccactgagggctggccctctgaaatatgtcttgaggacagcc

SEQ ID NO: 162725 - DNA, 201 bp, Homo sapiens
ttcctttctaatattaaaactctttttttgttttttttcagtaaagaacttgattttctaaagggaaggttgaatttgaataacttggctagagggctgtycccaaaggacacaaggctaaaccttaatccctgagtcagatcagggatgtctgaatcctagctgaggtgtttgcctcggggcttaggcgcttgaaagtgt

SEQ ID NO: 162726 - DNA, 201 bp, Homo sapiens
tactcttatcagcatactggcacttagggttaaacatgtttttaaaatggaagggcttctaatcacattgtcccttatgctgtcctttttcactcgtagcwattctgcattttacttcagtattactgattagtattcttacatcattatttttagatgtatcaatttaaattatttcctcttggcctacgccagatggga

SEQ ID NO: 162727 - DNA, 201 bp, Homo sapiens
gaataacttggctagagggctgtccccaaaggacacaaggctaaaccttaatccctgagtcagatcagggatgtctgaatcctagctgaggtgtttgcctyggggcttaggcgcttgaaagtgtactgcactgaagccagtgaactgatcacactgatttcattctgatgttcagctgtgatctttgagttgtaaatccct

SEQ ID NO: 162728 - DNA, 201 bp, Homo sapiens
ggtgatgtctttaatccctcccttagagaccgacctttgtccctcagtaatgtcactttgcttcatgctcttgtctcattgcttgtggatggtgtccctgrgtgctggtcttgcagagcgcccagccttcccttcagccctcttttctctttacttttacactgttagtaacatttatattcttctgtaatcataattctc

SEQ ID NO: 162729 - DNA, 201 bp, Homo sapiens
tcttggagaaggccaggaagattaaaaagtatggagctgctatggtggtcatggcttttgatgaagaaggacaggtgagtggtttcttttggcctaatccrttgtgtttcccaggttagatagtggtgggagaaaatgcaagtctgaaacagctacatatatacatacacatatacatttatctctttccatatacattca

SEQ ID NO: 162730 - DNA, 201 bp, Homo sapiens
cttcagccctcttttctctttacttttacactgttagtaacatttatattcttctgtaatcataattctctgttatgttttgcctgtggattgattctaawagctgaaaatgacaagctggcatgtgcctttctgagacaaaggcccagacacccggcctcagcgtcctgtgcccagagctgacttggctcgtggttctgt

SEQ ID NO: 162731 - DNA, 201 bp, Homo sapiens
gaataaggaattcctctttgtctttctgcgtgtgtgtgtgtgtgtgtgtacgcgcgtgttctccttagggagattggagtctagtaggaaaaactacttaygaagcagcgcctttgtaatactgtaatacggcaagctttggtctatgtctagtaacaagaagctctgaattactttgaacttcggatgctttttgttttt

SEQ ID NO: 162732 - DNA, 201 bp, Homo sapiens
ctgttagggccaaagcagaaatgttagagtttattgctgtaattcagatgagatatggtgatggttagggccatggtgaaagcaaaagaggatgttaaaastcatctgtttctacatatatttttaacatagagccaataggatttgtattcacattgggtataggttgtgaaagaaagaggagtcagggataactttaga

SEQ ID NO: 162733 - DNA, 201 bp, Homo sapiens
gtaccatgaagaattaaacaaggacagctacatccttaccatatgcacttaggctcagtaaatcctcactgtatgcgcccaggctcggacgccacagaatwtaaggcactggggttctaatgttaagttccagcccctcctcactagggaatttgtggctattcttttacagacataactgttcaaaaacctctgctctag

SEQ ID NO: 162734 - DNA, 201 bp, Homo sapiens
gcatgtgcctttctgagacaaaggcccagacacccggcctcagcgtcctgtgcccagagctgacttggctcgtggttctgtggctgcacattgtcatgtcratgtcctggttctgtcattactgcagagttcatgtagttgagatggcccaggctaagctcacagttttcagcggaattaataaaaagcatgccatcaaag

SEQ ID NO: 162735 - DNA, 201 bp, Homo sapiens
tttctcaggttttaatttggacaagagttcaatggtattggctagtcattccttctctaaatatgtttaggagtcatgtctgcaagaatccgtcttcagastggtgtggatgttggaaatccgaaaattcttagcatcataatctatcataatccttatgttctaatttttgtatcacctcttacccccagtgcctatctc

SEQ ID NO: 162736 - DNA, 201 bp, Homo sapiens
agacattttaaagccttggaggtgattctcatgtatcttttggttgaaaaccaccagcagaggttatttcgtttagtcttcagagtgaccaccgaggtggyggccattgcattttacagtggaccagtgtcatatctaggacatggtggaaccaagtttttacctttggtcttcctcatttgaagactggtgtatgtttcc

SEQ ID NO: 162737 - DNA, 201 bp, Homo sapiens
gcagtgccttattactctgggagtctgctcttctgagtaggctctgattgctgtctcttcgaaggtaccatggggctctgtgatctctctctcctgtggcrcagggaagctttgggtccccctctggcctttgttagcaaagaataattgatgggccgagtatacctggaaaacggcttccccatgcacagctgtccctga

SEQ ID NO: 162738 - DNA, 201 bp, Homo sapiens
aaagcaaatgtaggaaaaaaaattaacttgctagttatgaaagatatacaaattagagcagcattaaggtaatgttttatccctactaaattagtaaagtraaaaatggtcaaggtctgtgtagatacagcagtgataaaactgaaggctcatttgttgcagagtgtagtataaactggtacagtcctattgaaagagaat

SEQ ID NO: 162739 - DNA, 201 bp, Homo sapiens
acgtcgcagacctgcgcaggctgcggtacaagggcatccgcccggctcctggctaccccagccagcccgaccacaccgagaagctcaccatgtggagactygcagacatcgagcagtctacaggtaggagccaggaggctgcgggttcctgtcttccttcttcagtagatactcttatcagcatactggcacttagggtta

SEQ ID NO: 162740 - DNA, 201 bp, Homo sapiens
cacattttcctgtttttttcattttcttgttttaaaatgatttgaaaataaatttctaattatggagaaccattggatcttgattaatatctaattaatcytaacctggaaaataacaaggaattggtatcttgccagtgtttagatttgtcattgaggaacatggcgtgtctttcaattactcattcaatggagttttgt

SEQ ID NO: 162741 - DNA, 201 bp, Homo sapiens
tacatgggaagtggaagttacgtggcaggtgtttaggaacagctgccttcagcttacttgtttaccttctgtccctgccacctttctttatttggtttctyacaaaagatcatgttcttaaactatgcattgtaaaccagcaatagttcacaggtgccagacctacactcgagataccctagggccattcagaggatattg

SEQ ID NO: 162742 - DNA, 201 bp, Homo sapiens
attatatgtatagttatgttaaatagacttaattttatagttaaaattagttttgaaattagtttcattaaatatattttattctgaattaatggatacartgtttcctctttcaactcagggaaattgctgaagctgtgaaaaattgtaagcctagagttccacctgccactgcttttgaaggacatatgttactgtctg

SEQ ID NO: 162743 - DNA, 201 bp, Homo sapiens
tcagtgtgttcattttattttgcctttatatctatattcttaacttgagtctgtattgttgactttgtttactttgtcaattcagatttcagggacgatcrttgataaaagtgggcggactctttccggacagacaggagagggatttgtcatcagcgtgtctcatggagaaccactctggtgagtgatccatctttctgt

SEQ ID NO: 162744 - DNA, 201 bp, Homo sapiens
  misc_feature (1)...(201): n = A,T,C or G
tgttttggtcattgcttttgctacagtgactttcccttgtctctgtttctgtggcttcctgcctctttccctagtctcttggcacatgtctgttctgactnttatagaaagtgccccctttgaatttgagttccacatttcttttccttgtaaaagagcaaaggaagtcagtgtgttcattttattttgcctttatatcta

SEQ ID NO: 162745 - DNA, 201 bp, Homo sapiens
actgccaatttattaactcagtaggcagacctctctgcgagtcctaaaattgcttggtgagaagcgaattgaatcaaaacaagggtgttagataaatccartgtttaacagcaggaggtcaggatgacttgatgttatctctgggaaatctgcctctaatgagactggatgtgtgaattccaaagttgttttggtcattgc

SEQ ID NO: 162746 - DNA, 201 bp, Homo sapiens
ccactctggtgagtgatccatctttctgtaacttcttttcttttttggggaaccttttctgatggctgtggagtgtgacctgggaggggattgcttctacrtattttcactgtaccacttctgctatattgactttcctttaagtactttcagacttttccctaaaggtttcagaagatcgctgcctaaacgggtcaattt

SEQ ID NO: 162747 - DNA, 201 bp, Homo sapiens
aggtaagctagctgttgcattatatgtggcttgcctagttcaaatgaaattctagaacctctctcattttaaatgtgaatgagaataaagtgaggggaaargatgaagaaatttactccagttaatgtcttaatttgatttcaatagaatacctctattctagccctcacttctacatgcaagccacacacacgcacacac

SEQ ID NO: 162748 - DNA, 201 bp, Homo sapiens
ctacattttgttactgaagaaaactgagtattagatggtcatgaatccattatttattgtgcggaggaaaagaaggacaagctaacgtttgtggttgataygttaggcctaccggatgaacatgtgctctgcaggagtggccagaaaagctgccgaggaggtaactctccagacaggtagggaatgttcttctcttttttt

SEQ ID NO: 162749 - DNA, 201 bp, Homo sapiens
cttctctttttttgcacacgtggttcctttgatactgtcagctataatgtgctgtccttattgcagtttttccttatgtggcctttggcttacgagtaacrctgcagagactgtattttacatgtttgtagattacttctctgcagtttcataatcaagcactcaacatctttgaattgatgccaactctgtggtccttgg

SEQ ID NO: 162750 - DNA, 201 bp, Homo sapiens
tcagattaattcactctacattttgttactgaagaaaactgagtattagatggtcatgaatccattatttattgtgcggaggaaaagaaggacaagctaaygtttgtggttgatacgttaggcctaccggatgaacatgtgctctgcaggagtggccagaaaagctgccgaggaggtaactctccagacaggtagggaatg

SEQ ID NO: 162751 - DNA, 201 bp, Homo sapiens
aggattatggtgctggatggagggatggggaccatgatccagcgggagaagctaaacgaagaacacttccgaggtcaggaatttaaagatcatgccaggcygctgaaaggcaacaatgacattttaagtataactcagcctgatgtcatttaccaaatccataaggtaaagtattcccaggttcccatgtgtattcattct

SEQ ID NO: 162752 - DNA, 201 bp, Homo sapiens
cttcaccttggtttcgtgcttcaccaggaattttgtgctgtgtgcaatcttgtattaggcattgtcacgacttaatgacctttttgggcagcgttttcctrtatagagttatgagtgcatcttttataaactccatttactccttattggagattattataaatttctctaaagctcctccctcacacatctttttcacct

SEQ ID NO: 162753 - DNA, 201 bp, Homo sapiens
catggctgtcttactctgttttctttggctctaacggaataccaaagactggataatttataaagaagtttatttagctcacaattctggcagctggaaartccaagagtatggccttggcccctggtgagggccttcttgctgtgtcataacatggcagagggcatctcatgtcaagagggcaagagcaagagagccaga

SEQ ID NO: 162754 - DNA, 201 bp, Homo sapiens
ggctcgtatttatatatcagcagttaatggatgcttattaagtctttactatctattgttctggtgccaatgtgaaaccgactgggtagaaaaggaagagytttttagaataaacattctcatgaataagagcatttgctttcttgcaaagcttacatactggccttcttggacatgttttcacagtagttgtagaaaagc

SEQ ID NO: 162755 - DNA, 201 bp, Homo sapiens
ggggttggatgttgggacagaggtgctaatagccggaatatcaggctccttcccatggccagtggtgttcatcatatcctctttttcctttcaataaactyagattttagaaccgagatcttatgagaccttggctaaacagttttacaggaaggccttctctgtacaagtctcagttggctttgcttagagccaggaccc

SEQ ID NO: 162756 - DNA, 201 bp, Homo sapiens; identical to SEQ ID NO: 30249

SEQ ID NO: 162757 - DNA, 201 bp, Homo sapiens; identical to SEQ ID NO: 30250

SEQ ID NO: 162758 - DNA, 201 bp, Homo sapiens
ttgcataaatgagggtctgcttcacctcctcccaaatgaccaatcacatgcccaagaagtgaccagtcacacgcccaagcccaagccatctgtgaggacgrgggagagaaggcgccaccatgggtgtcagaggcaggaccactcagcaggagtgaggcgtttaatattgtgttccatggatgggcgaggaccattgctgct

SEQ ID NO: 162759 - DNA, 201 bp, Homo sapiens
gactacattaaagaatctagatgtcttctacacattgtccttctcttcctcacagtgtctgccttgatgaccaaatcaaaaattgttttattgcattactscctgagtgtgtgatattttagcagaatctgagccatgagcttcttaagtaaagccttctactcactggtcacagtctagcttctctatggcttaagagta

SEQ ID NO: 162760 - DNA, 201 bp, Homo sapiens; identical to SEQ ID NO: 30252

SEQ ID NO: 162761 - DNA, 201 bp, Homo sapiens
aattcaggatgtaatttggtgaataccctgtgttgaggttgtaaatttgatctgaagacagtttccatgacaaagttcagaaatactttgagtaaaagcascattcatacataatgttgagcacctactttgacaggcactgctcagggcactggggataaagcaagactggcattctatctaggggagaggagtttacca

SEQ ID NO: 162762 - DNA, 201 bp, Homo sapiens; identical to SEQ ID NO: 30253

SEQ ID NO: 162763 - DNA, 201 bp, Homo sapiens
aagttcagaaatactttgagtaaaagcagcattcatacataatgttgagcacctactttgacaggcactgctcagggcactggggataaagcaagactggyattctatctaggggagaggagtttaccaattaacaagtaataaaacaacgaaaaatactaaagatgttgccaaaataatacaatttctggaaagaaatac

SEQ ID NO: 162764 - DNA, 201 bp, Homo sapiens
gccttagttctgtgaagcacaaagccatgtcatggtatgttctggtagtggcagcaataaatgaaagttgctgagggaggaacaagcttgacgggtttcaraaacaccaaaggagcaatgtaggaggtgcggagtagaggagagggcaaatggtaggagatgagattggagatggaggctgagattctgaggcttttggga

SEQ ID NO: 162765 - DNA, 201 bp, Homo sapiens; identical to SEQ ID NO: 30254

SEQ ID NO: 162766 - DNA, 201 bp, Homo sapiens
gtcattaaagtaagtgtaggcatgttctctcccaagtcatggctcaaatttgtcccatgggtctaatgaatggttagaactaacttatatatttattggctgatgaaatgttaacattcttagttagtaaattgtttttctgaaatgtaggagaccttattttttttctttagtagagttttaacttgtgtaacaaacaga

SEQ ID NO: 162767 - DNA, 201 bp, Homo sapiens; identical to SEQ ID NO: 30256

SEQ ID NO: 162768 - DNA, 201 bp, Homo sapiens
tcattaaagtaagtgtaggcatgttctctcccaagtcatggctcaaatttgtcccatgggtctaatgaatggttagaactaacttatatatttattggctgatgaaatgttaacattcttagttagtaaattgtttttctgaaatgtaggagaccttattttttttctttagtagagttttaacttgtgtaacaaacagac

SEQ ID NO: 162769 - DNA, 201 bp, Homo sapiens
tacaaagcatttctgctataggcttacctttgcaaacctgaggttgttggttcctgtttgcattcatcacagtcagttaaaattcacttcagttaatgttyatagatcatcttctacttaccaggcattatactagagacaccaaaatgatttagttgacttttctccttgaaaaagtttactgtttctcaggctaaatag

SEQ ID NO: 162770 - DNA, 201 bp, Homo sapiens
ttgattttttatcatatgcatgtatttttagaagctttttcataatataccatatgtgtgtatatgtttaaggtttgattttttgcagaaagagtatagcygctgtgtttgtgaaaacacaaagagatctttaaaccagtctctcctctgagataatttgataagtgatcggaagctgcttggcatttagatttctgtgaa

SEQ ID NO: 162771 - DNA, 201 bp, Homo sapiens
cattaaagtaagtgtaggcatgttctctcccaagtcatggctcaaatttgtcccatgggtctaatgaatggttagaactaacttatatatttattggctgatgaaatgttaacattcttagttagtaaattgtttttctgaaatgtaggagaccttattttttttctttagtagagttttaacttgtgtaacaaacagact

SEQ ID NO: 162772 - DNA, 201 bp, Homo sapiens
aatgtgcaaacttcatgtcaaacactcctttggcttgtgtgtgataacacatagactcttccattggtgagtttaattttatggtgtcagctagtagacargtgtccctggagattgtcttatggaataatgtgtacttttactgtcagtaccaggctagtatgcttgaaggaattacctagcctagtgagtgagtctagc

SEQ ID NO: 162773 - DNA, 201 bp, Homo sapiens
cagtaaaaaagattcctttcaaaatattactcctcattgacagtgcacctggtcacaagaattctgatagagatatacaaggagatgaatattgttttcaygcctgctaacacaacatccattctgcagcctgtgaatcaaggaggaattttgactttcaagtcttacattttgtaaggctgtagctgccatagatagtga

SEQ ID NO: 162774 - DNA, 201 bp, Homo sapiens
ttttaacttgtgtaacaaacagactggagaacataacagagcctgatgaactcgcttgaacccaggagggtggaggttgcattgagctgggatcacgccartgcgctctagcctgggcgacagagtgaggccctgccttgaacaaaatgatgcaaaacaaaaaaaccacagaacctgataaataattaattatgaagcata

SEQ ID NO: 162775 - DNA, 201 bp, Homo sapiens; identical to SEQ ID NO: 30262

SEQ ID NO: 162776 - DNA, 201 bp, Homo sapiens
ttttgccaagtttcccacgggggggcgtgcctgggtgtgcgtgttcggatgctgagactcaggaactctcaggtagtcaggaacgtggtgatgagcaaggrgcttcttagtgtgctgcccctgaatcatcacaggtgagctgtccaggggccgtgggacaggcttctcaccatgggcagggtggccgagtctcacggaaac

SEQ ID NO: 162777 - DNA, 201 bp, Homo sapiens
atgcatgcataggtacatatacatacattttttacaaaaatagaactatactctagatgcttttatggtaatatttttttcttagcagtgtactgggaacmtatttccattttacttgatatttttctacctcattatttaaaatagctgttctggattttcttgtgtggctatgttagtgttacatggtccccactgttc

SEQ ID NO: 162778 - DNA, 201 bp, Homo sapiens
ttttcttcataaatttattgcttatatatgtagatttgatttgcatcatctatggattttatatttgcaaattcatgtacttactgaaatttatttgtgamcccaaaatcaatactcaacgtcacttctgcagttgttcagacttacccatatgcagagtggtggaaaatttgagtggcccaacccatattattcccaaag

SEQ ID NO: 162779 - DNA, 201 bp, Homo sapiens
gagggcaaacatggcagtgacctaccttcttatttcagctctcatcctgtacacagatgtcctttttgcagtctaatgccatgtttttcacacttttatgygttttgttggtgaggtcactttttaaaatggccccatactagtgctgtctagtgttctaagcacaagaaggctgtgatgttccttagggaggaaatatgt

SEQ ID NO: 162780 - DNA, 201 bp, Homo sapiens; identical to SEQ ID NO: 30264

SEQ ID NO: 162781 - DNA, 201 bp, Homo sapiens; identical to SEQ ID NO: 30266

SEQ ID NO: 162782 - DNA, 201 bp, Homo sapiens
cgcaaggaggagactcgacaacatgtcacccgcgctccaagacctgtcgcaacccggtaacgctgcgaccccgtctgcgtggttgggttgtgtttcttaaytcgtgctgtggcctcctaatccctggggcgattcccttctgcggcgggagacgcccggcggtgtttccccgcgtgtgggcggcacctttagaacttagcg

SEQ ID NO: 162783 - DNA, 201 bp, Homo sapiens; identical to SEQ ID NO: 30269

SEQ ID NO: 162784 - DNA, 201 bp, Homo sapiens
caaaaatctttagtgctgcaggggacctcagtgagatggctttgatggtagttgaataaaagtgctttgaatgaggagatttattatccacttggttttaratatattgtctccatatataacttatatgcataaatatgaatgagagatgatgcttttaatatgttttttctgtttttctagcattggattaaattgtgc

SEQ ID NO: 162785 - DNA, 201 bp, Homo sapiens; identical to SEQ ID NO: 30271

SEQ ID NO: 162786 - DNA, 201 bp, Homo sapiens
gtgaatagtgatgccccatgagggttctgtgggacatacaatcaagtgccagctcctgcaccaggttgctttcattgccatttctaatggggttgagagaygagaatgagtaactatggaaccgagtcctggagatggggaatggggacagacttcttagaacagttgtatgtagtcatttttatatttcttctcacactg

SEQ ID NO: 162787 - DNA, 201 bp, Homo sapiens
catactggcacttagggttaaacatgtttttaaaatggaagggcttctaatcacattgtcccttatgctgtcctttttcactcgtagctattctgcatttyacttcagtattactgattagtattcttacatcattatttttagatgtatcaatttaaattatttcctcttggcctacgccagatgggagtttagcttatg

SEQ ID NO: 162788 - DNA, 201 bp, Homo sapiens
ctttgggtcccaaggcctttgcagaagagctccatgaaagagttcgccgagaactgtgggcctactgtggcagtgagcagctggacgtcgcagacctgcgmaggctgcggtacaagggcatccgcccggctcctggctaccccagccagcccgaccacaccgagaagctcaccatgtggagactcgcagacatcgagcagt

SEQ ID NO: 162789 - DNA, 201 bp, Homo sapiens
gctttgggtcccaaggcctttgcagaagagctccatgaaagagttcgccgagaactgtgggcctactgtggcagtgagcagctggacgtcgcagacctgcrcaggctgcggtacaagggcatccgcccggctcctggctaccccagccagcccgaccacaccgagaagctcaccatgtggagactcgcagacatcgagcag

SEQ ID NO: 162790 - DNA, 201 bp, Homo sapiens
gagcaaggcctatgaggatgatggtgacgactacagcagcatcatggtcaaggcgctgggggaccggctggcagaggtaaggcagaggcattgcgccgagrggctgaggacagaggccaggcagtagggagcctggggtgggtgcctgaagactgatcagcccttagaaccagtgtctttttttttttttttcttgagatg

SEQ ID NO: 162791 - DNA, 201 bp, Homo sapiens
atatgctgaacacactgattagtcaaaagaaactccgggcccggggtgtggttgggttctggccagcacagagtatccaagacgacattcacctgtacgcrgaggctgctgtgccccaggctgcagagcccatagccaccttctatgggttaaggcaacaggtatggaaggtgtactgacagccagcacaccgctttcgct

SEQ ID NO: 162792 - DNA, 201 bp, Homo sapiens
cctcaggttcaggccgcagaactaggctcgtatttatatatcagcagttaatggatgcttattaagtctttactatctattgttctggtgccaatgtgaawccgactgggtagaaaaggaagagctttttagaataaacattctcatgaataagagcatttgctttcttgcaaagcttacatactggccttcttggacatg

SEQ ID NO: 162793 - DNA, 201 bp, Homo sapiens
tagttctaacatgttcttttgataacttctattaattctgtagcttgacagttaccctgaacaaattactttcatttcacttcttcttgacctcaaccttytttcctgccttgattctctgactcttcctatagtttgtattgctgtgtttccttatgatggaaagatacatgacttcactgatctctaagggatctaggg

SEQ ID NO: 162794 - DNA, 201 bp, Homo sapiens
aaagccttaacattgttaccaacctgcatttcttcatgaagaaagcacaatacttgccttaactgagggaagtttcgcaggaaggggtattcagctgtgtragtatgtgctctgattcttgcctgtttctcagttccctgtgtgttactgccactttcatttattactgtttgcttattttagagctatgtaccttgcacc

SEQ ID NO: 162795 - DNA, 201 bp, Homo sapiens
atagcaacaaaaacagaggtggattttgagaaagtatttagttttcagttgatttccacaattacggatttcgagtgaatgaaagaaaaagaatggggaastgtattcaggttgtgagcactttcacatttatagctacgatccatttaaagttaattgtcgtataaggtttgacgtaagagttggggtttattttgtccc

SEQ ID NO: 162796 - DNA, 201 bp, Homo sapiens
actctagggacctcctatagatagaatcatgcagtatttacccttttgtgactggcttattctacttcgcataatgtcttcaaagttcatccatgttgtaytgtgtatgaaaatttccttcttatcccattgtatctatagaccacatttggtttgtccattcacctgtcaatcaatacttgagttgcttccaccttttcg

SEQ ID NO: 162797 - DNA, 201 bp, Homo sapiens
ctgatactgtgggcactgggcaccgtgtctgccagcaggaatggtgtggcttatttaatctaagccatcctgtccattctaggatcttcttcctgtgttayggtgctcgtcattttcaacatctgaagcactcttacctctacctgtgtgtgtctaagtagttcccgtttttcaacattgatatggtttgactgtatcccc

SEQ ID NO: 162798 - DNA, 201 bp, Homo sapiens
aaacaaaattaaatattaattttaatagaaacaaagctgtatttcttcttctgcttttatttctgtatgtgtgacatttaattaaaatttctaattagaarataaagtgcaattggcctaaaccagtttgggaacagtcacaactaattgggtaagggtacccctcagctggagggagcttcttggtgcaggcatgtcaga

SEQ ID NO: 162799 - DNA, 201 bp, Homo sapiens
ttccccccatctcaatgtattttgtacctgttaaccagtctctccctatatccccttccccccgctccttccccgcctctggtaaccactctactctctamttctataagatcaactttttcagcttccacgtatgagagagaacatgcggtatttatcttcctatgcctggattgtttcagttcataaaatgtcatctaa

SEQ ID NO: 162800 - DNA, 201 bp, Homo sapiens
tgacctagagtcccctccctacttggagtggctcctcatcttccttctttagcacagtgtggaggtaggagtgaagattctggagctacattatggaggtstgggttctgactccgcccctcagtggtggtgtgatggtggctgtgccatgtaacctctctgtgcctaactgtcctcatctgtaaaatggatataatgaaa

SEQ ID NO: 162801 - DNA, 201 bp, Homo sapiens
agagtggggatgcccttgtattcagtatacctccagaccttatcactaccaagtgtccaacacagggctgctaagtaatcttgaaaatataccttccactyttatcagtgcaccttcttgacaccaaatctgtattcttgatcctggaattcagaattctccatcaaaaacattgaaaagcaggttacttcatcagctctc

SEQ ID NO: 162802 - DNA, 201 bp, Homo sapiens
gttctccaaatgcagtagactttttggcaaaatctcaggtaaacctcatacatataaatcacagaaatggaagaattaggtaggtgcaaaagtaattgcgstttttgccattacttttaatggcaaatacttcagttaatgcaggggtgatctaggacctcacctgcttatcatttctttgtcctttgtcaaagccctgaa

SEQ ID NO: 162803 - DNA, 201 bp, Homo sapiens
tttgtgctgcatcaaaacttggtgcagaaggtcaaaggagaagcgagcacctgcgaagaaggaccaaacccaaggggcgtcctggctttataacaccccastctcagggaacgaatctattcctttagaaacagtcccgtttcatgagagtgagagctcacttgatcccttgagaatggcaccaatccgttcatgtgggat

SEQ ID NO: 162804 - DNA, 201 bp, Homo sapiens
tctttactactcatttggtatgcattcatattatttgaagacttcatatattgtctttttatttaagtttataatagtgattattgtatttctgttttctstataatggcattgcaaatttaatgagagcttatttacttatgtggatccctcccacacctaggcatgtctgttacatgatgaccattagttaaatgaact

SEQ ID NO: 162805 - DNA, 201 bp, Homo sapiens
gagattgaacatcttttaatattggtaatttagatttccttttctgtgcattctgtattcatatgctttgcacagtattcttttgagttgttttattcttrctaatttgtatcatattaactaatcctttgttatgctcatcgaagataccttctcaatctttttttttctcattttccttatggcaactttggaaattaa

SEQ ID NO: 162806 - DNA, 201 bp, Homo sapiens
agatcacagagcaatattattctctggatttattgggtttgctgcattctgttagcatcattcatatttttctcccatgggtaccactttcctctcttttyctaataccaagatatggagactcatttatgccgtggagtgtgatgctgggaaatgaatgcttgcttattacctctctccacaggacctttcatgaccata

SEQ ID NO: 162807 - DNA, 201 bp, Homo sapiens
tgcttattacctctctccacaggacctttcatgaccatacgtcgatgtctgccgcctcagtataaataggcacattcagaaatgtgttctctagtgaaggrcatgttggcttggtggaaagcacagggacttcacgtctggactgcgagtcagagctgtgcgtcatgtgcttaactggctgtgtgaccttggataaatttg

SEQ ID NO: 162808 - DNA, 201 bp, Homo sapiens
ggctctcgtgtcctaggtctagtgccctgcgccatggccccgtgcaggtagaggcctgggcatggtgcgttgcaggacgggccgggcgcagggaccgcccmccgcaccgtgcgccccacccagctgtccagaaacggtcagggtcaatgtcatcagcttctccatggaatgggaagcaggtgaaggacaaaagcaaggctc

SEQ ID NO: 162809 - DNA, 201 bp, Homo sapiens
acaaacagtggcataagtgcaaagtgctacttgggtgagtgctgcagaggaaaggcccttggtcctgagggatcagggtggctgtggtggatggatgaggratgctagtgttctgaccatgcaggtgcttgcaggccatgccaaagagctttgactgtggcctgagagtcatgggatgccatggaaggggaggaggggtct

SEQ ID NO: 162810 - DNA, 201 bp, Homo sapiens
gtcagatagggtgcactttggattgtgaacatgtgggtttcagctgggccatcgacagaccttgatggattgtcctgggaaaccaactactgtggaaaaartagaaaaatctataattttcatttgtttgaattcaaacattttcaccctagacaaaaagaaaagaatctaacaatgagaaaggaaataaataaaaataaa

SEQ ID NO: 162811 - DNA, 201 bp, Homo sapiens
tttttctcacagcaatctgggtcttacagccctttttctgttcaaagtcttccttaatacaaactgttttatttaaaatcttagtgcttttggttcgactrtgtgatctttagctttacagtgagaaggcggttaaatgccagggcccctctgagccgaaggctctccgtgtctgcctgcagcctttgttctctgccatgt

SEQ ID NO: 162812 - DNA, 201 bp, Homo sapiens
gatgggggtatataggtaatatcccatatatcatagtaataacaagacatagaaactaatatactcactcccagatttccatggggactaggaggagcctscattgtagccggggtcaggaatggcagggtggcagaactacagatgcatgctccctccatgccaatgtgtggaaagggagtgacggacaaaggcagtggg

SEQ ID NO: 162813 - DNA, 201 bp, Homo sapiens
tactgttgtttatgagccatccatttttatggtactctgtccaatcagcccaagttggctaagacatagatgatcatgtcttctgcgaataatgatagctkatttcttcctttgctatctcaatgaattttacttccttttcttattgtgctagctaggctctccagcatgatgttgcataggcgtggtgagagtggatat

SEQ ID NO: 162814 - DNA, 201 bp, Homo sapiens
gggaagtagcattgatttaatatttaaacagtaccatttaaacctagtagcaaaacccctatacgataatgagttgtagtctattttacagatcaagaaartgaagctcagagaagggaagcaactggcccaatgtcacatagctagtaagtgactcagctgggattcgaccacacttctgttttcagaagtgcccatccc

SEQ ID NO: 162815 - DNA, 201 bp, Homo sapiens
ctctcccatgccaggaattaaaatgttttgtctggaaacaagtgagcttgactaacgtggccgggctcccactgcagctgagttctgcatgttctgatgtyagtgttgtgagctttaactggagattggtgtccaaaggcagccgatactgctctgtccatttctgttgtgctgaaaatcacatggaaaccaatcacataa

SEQ ID NO: 162816 - DNA, 201 bp, Homo sapiens
gcttctattctttttttaaaaaacaaacaaacaaacaaacaaacaaacaaaaaactgagtttccgattaaaaacccaagcttaggccagaacagaactttkgaactgcagtcaaacaaaattttagataattgttttctaatggcttcctgacaaatggagactaaagacaggcaagggggctaagaccaggctgggtggg

SEQ ID NO: 162817 - DNA, 201 bp, Homo sapiens
ggctagcctgggagtcttctgtgcatgtgattatagcacggaaaatgtgggcaatcaggactgcctagcatccgtatgtcttgtatagtttatgacctgcrcacgggcagcttgtgccccaagtaatggagtcagcacgtggttgttatacaggtacagttacatggctaataggtgagcatgcattgaattgagacagtt

SEQ ID NO: 162818 - DNA, 201 bp, Homo sapiens
gtcttaaagtttgcacctctccaaattcctaggttgaaatcctagcccacaaattcgtaagttagtatttggggagggggctctgggaggtgatttgttaygagagtgcgaccctcatgaatgggaccaagagccttagtgcctgcctgaaagggacctctttgcaccatgggaggacacaatgggaggttgaccaactgt

SEQ ID NO: 162819 - DNA, 201 bp, Homo sapiens
tccttctcttctgtttctgtttttcctcccagtaagaccataccttgatttggaacctcaagattgttaagtgaatgaaattgcccaagcccagtaaagcygatggtctggggtatggcccttacgcgagatctgttgagtaaagccttccctgagcctcccagccagaattattcagtttgacatctgtgctccaaggca

SEQ ID NO: 162820 - DNA, 201 bp, Homo sapiens
tgtggcacaggggaaacccgtagctctgtgccttactattttactataccatctcatttagtgcccacgatttcttaagaggtaggcactgaaggggaaayctgtagctctgtgccttactataccatctcatttagtgcttatgattccctaagaggtaggcactgaaaccattaccatttgtagatggggaaaccaagg

SEQ ID NO: 162821 - DNA, 201 bp, Homo sapiens
gtcaccccatctctccccgcctctgacactttgtctttaaaatgggaatacaccacttgttttgcccacttgttacagggtggtccggaggtctgaatacragagcgcactgcatggtcctgtgcggatcccagctcgcagcaggtgcccacaggacgccgcccctcgcttccctcatgtcctagattctgtgagacacag

SEQ ID NO: 162822 - DNA, 201 bp, Homo sapiens
cacatgcaggcccctccctcccacgcatgtgcccacaggttcataggcatcagcatctctagagccagccccctccactccctcccgaccctgctctgtaraattcctatacaaggttcttgtggatttgtatcatcccttgcacctctcacgtgtcgcaggacagaacactcggcatcctgggggcttccttatcccaca

SEQ ID NO: 162823 - DNA, 201 bp, Homo sapiens
gtgggtaaagtgaattcaagtaaggtctgtgaatttaagtaaggtccctaactgctttgggtttcctagtgggtaaagtagaataacggccccaccctgcwggatgagtagcctgatgacgtgagatggtgaaagagaggcaccctgcaatccgtctctgccccattagaggggccctgcaaactcctcctgacatccatt

SEQ ID NO: 162824 - DNA, 201 bp, Homo sapiens
gcagcctctaagagcctttgtggtaccaaaaccgggaatcattctttggctttgtttttaaacactgaaatccttcttcagtcttctctcttttttattcycactgccaccgatgtgaaactggccctggcttcatggctggccccttgaggcttcgtgctggactcaacaccttgggtctttctgaagggaagcctgctg

SEQ ID NO: 162825 - DNA, 201 bp, Homo sapiens
tctgagtatgtctcctgtcatctcctagaatcaggaggttacttgggaagttggtggcgcttggtgtttagagcgtatatctctttgggtggagggcaggygggcaagtctagctctcttgccatcaggtgacccaggacaagctctctgttagctttctgtctttataatggcgtcatggccactgggatcagctgggtt

SEQ ID NO: 162826 - DNA, 201 bp, Homo sapiens
tcctgtatcggaattccattggtggggtggagggggaggcgtgagagtatgtttcagagttccacaaggatttctaagttgttaaattgtgaaccactctycttgtgtagcccactgacaacaaggcacacacagacctctttttaaacttggtggtataattcagtagcatcaaggaatcatagtttctcagtgtgcaat

SEQ ID NO: 162827 - DNA, 201 bp, Homo sapiens
catatgcttggggcaagtccttctgctgtcacgttccttttgcagttctgtagaggagcacagggtcagcgctggaagctgctgatacaacaggctggagyataacgaggtgtctttgtggggtgtgcttgtcatgttcccagatgtgtattatttgacagctaaagaaacaaaagcaacaaaatatggcatgtacgtaga

SEQ ID NO: 162828 - DNA, 201 bp, Homo sapiens
agtggtgaaggactacagatcagtaaatgtggccaagcgcagtgactgttaggagaggagaaaggatcctgcttttcctcaccttcttgtccctctgcaaytcagagggagaatcaaaattcacattttttagagaacatggatctttcagaatatgagagtttcatgagtgtttttttttttaatttaacacttaagtat

SEQ ID NO: 162829 - DNA, 201 bp, Homo sapiens
tgtcaaatgtcttgattttcacagtagtgatcgcgctttctcccaggctggctgacctgtgctgtctttggtaagttattctgttgagttgtggtgctgcratctttctatccattactttcatctgtggcttctcctttaaccttttggggtcatacagcacaaaatctaatttcgacacgtggcagcctttcacatatt

SEQ ID NO: 162830 - DNA, 201 bp, Homo sapiens
agaacctagaatggtacctggctcctgccagttgcacagaatgtttgttttgcagtgtgatgcgtccagtagggacacttaggggacagtgtactgtcatrctgttgccctgttttgtaagagtgactgatggctacgtgacatcaccacactccctgcaagagctgcggtgtatggcacgtggctaagctgtaggtgcac

SEQ ID NO: 162831 - DNA, 201 bp, Homo sapiens
ttacctgtaatgggagggtaggaggaggggattgtgcagaactgacgttcataggtttggtgatgggatgttggggaagttttcttctttgaatgatgctrttgttgacagtgagaagtggtgggcttggagatttgaataaagtaggtaataaaatgggtactggccattaagaaagagaatgagacagagcagactgag

SEQ ID NO: 162832 - DNA, 201 bp, Homo sapiens
ggttgattattacttaaacccatagtcttataacctcttgggaaaagattctctcaaaatgactcttgatggtcaacatgggtgtgcatttacgcagcttycattcccatcgcttcttgcaggcagtgttgttcctgattgccccagtctagtttatcgcaagggaatttctttgcggggcagtgagctcccttttggcag

SEQ ID NO: 162833 - DNA, 201 bp, Homo sapiens
tccgcaagtgtctccacccagctccgatagagtgggtagcatcaggagaagggagggcagggatgagtgttgtagcatctcaacatttaagagcagaggayggggggctggggaagagcatacactggggccgggtgtgaggagggagaacattagaaaaaaaaagctaatgcctgctgggcttaatacgtaggtaatggg

SEQ ID NO: 162834 - DNA, 201 bp, Homo sapiens
tttgggggctccggcctacatttgtggttatgttactggtttttcctatcgcatcagaaaactttattaactagatggaatttctgcagccagatgaaaaygtatgtgataggagtggatcgtgtgataggagtggatcgtgttagctgcgtgagattgctagtgaggcactgagttgtcatcaggtagcaattccaccat

SEQ ID NO: 162835 - DNA, 201 bp, Homo sapiens
aaagccttccctgagcctcccagccagaattattcagtttgacatctgtgctccaaggcatgacctcttgggtgccgatgccatcagtcggcttccaaacsgtgaacattcagagtgtcgctgagtaccagactctatgcttttttactccaggaacctggataaggattgttctccatctctagacagcttagagcagag

SEQ ID NO: 162836 - DNA, 201 bp, Homo sapiens
acctaacaggtgatgtctgctttggaattggaagactctctgcaagtgaaaatcatttcgtcttctaccttattcatgctctcatgctctcaaattccatktaaaaatattttgcgtggaacatgaagatgttgttggaatattcaatatctggattggagctttctttgaagaacattctgttttctcatagtctcatag

SEQ ID NO: 162837 - DNA, 201 bp, Homo sapiens
cctgtgctcttctttgggagtgttcactggtccaggcttcagggtgcttctcagaggtctttggagggcaggggccacatctttcattggtcttcatccasgacggtagctaagagagggcctggcacctaacaggtgatgtctgctttggaattggaagactctctgcaagtgaaaatcatttcgtcttctaccttattc

SEQ ID NO: 162838 - DNA, 201 bp, Homo sapiens
gggtgtctgcatctgggcagcgatggaacaggactgtggctctccaaggccacttcagctttggagtgggaccttcgtgaatcccgccctgcccctgatarccatgggccctgggcaagtcaccccatctctccccgcctctgacactttgtctttaaaatgggaatacaccacttgttttgcccacttgttacagggtgg

SEQ ID NO: 162839 - DNA, 201 bp, Homo sapiens
acatctttcattggtcttcatccacgacggtagctaagagagggcctggcacctaacaggtgatgtctgctttggaattggaagactctctgcaagtgaaratcatttcgtcttctaccttattcatgctctcatgctctcaaattccatgtaaaaatattttgcgtggaacatgaagatgttgttggaatattcaatatc

SEQ ID NO: 162840 - DNA, 201 bp, Homo sapiens
tgcccagcaagccaataattccattcctcagagcattgctgagaatatttatataattaaatatcatctgtttccccatttaattcctggtggctatcccscaaccccctggctgtttttgctgtttccttgggcaggaatggcacaataaagttgctgcagtgctgatggattatcttcattaggtacttgggtgatgag

SEQ ID NO: 162841 - DNA, 201 bp, Homo sapiens
agaacattctgttttctcatagtctcatagtctttagaactttttattcctgtcattctaaattaccaaaaaaaaggagaagtaaggaagtaagcccattrtaacagcttgttgcagggaaaagtgggtggaggcccctcttccctctcttgttaatgtgaaaagccttgaacttgggctataacatcaccaatataaaag

SEQ ID NO: 162842 - DNA, 201 bp, Homo sapiens
ccactttctaaatacggtctgtgtgaattctaatgaaaacatcagctctgtggtataaatctcctttgccgcctggttcaatgaggggctgcccagcaagscaataattccattcctcagagcattgctgagaatatttatataattaaatatcatctgtttccccatttaattcctggtggctatcccccaaccccctgg

SEQ ID NO: 162843 - DNA, 201 bp, Homo sapiens
agttcctcaagaagttaaacgtagaattgctgtatcctgcagcaatctcacgcctatgtatatatccagcggaattgaaagcagggattcaaacctgtacrcctgtgttcttagcagtattatttacaatagccaaaaagtggaagcaacttaagtgcccgtcatcagatgaatgggtaaaaaaaaatgtgacttatagat

SEQ ID NO: 162844 - DNA, 201 bp, Homo sapiens
tttagtagagacaggatttcaccatcttggccaggcagatcttgaactcctgacctcgtgatccacaccccttggcctcccaaagtgctgggattacaggyatgagccatcgtacccggccgagatttcatttttaaaaaacatgaatccaagaagtgacttgagttccaaataaataaatttataaatttacttatgttc

SEQ ID NO: 162845 - DNA, 201 bp, Homo sapiens
attgaaagcagggattcaaacctgtacgcctgtgttcttagcagtattatttacaatagccaaaaagtggaagcaacttaagtgcccgtcatcagatgaaygggtaaaaaaaaatgtgacttatagatacgcaatggactacagcctgaaaagggaagaaaattctgacatgtgctacagatgggcgaaccttgaggacat

SEQ ID NO: 162846 - DNA, 201 bp, Homo sapiens
agtggtctctgggctggaggcagacatttgggaattgttaatatatatcagcagtatctccagaactgggaatggctgaggttggagagtgagaggaaacyaggatatttgagcttacctcttacttctggagctttgtgatgcttttgcccttttagaaaaatgcatggaagtacagttttttactcaatatggaataca

SEQ ID NO: 162847 - DNA, 201 bp, Homo sapiens
tgtgtgcagatctggaggggttgagtttgcatttactatcaagagaggagatcaggagtggtctctgggctggaggcagacatttgggaattgttaatatrtatcagcagtatctccagaactgggaatggctgaggttggagagtgagaggaaactaggatatttgagcttacctcttacttctggagctttgtgatgct

SEQ ID NO: 162848 - DNA, 201 bp, Homo sapiens
tattggggcttctcatctaaaaatatggggagactctttgaatccatttgtattgtataacaaactaccccaaaacttaatgacataaaacaacaaatacrtcttatttcttacagttcttgtggtctggagagcccatctgaggctgaatagtcttaggtggcctttccttcatgttggggtctcaccttacacagctag

SEQ ID NO: 162849 - DNA, 201 bp, Homo sapiens
gcagtattatttacaatagccaaaaagtggaagcaacttaagtgcccgtcatcagatgaatgggtaaaaaaaaatgtgacttatagatacgcaatggactrcagcctgaaaagggaagaaaattctgacatgtgctacagatgggcgaaccttgaggacatcaagctaaatgaaataagccagttacaaaaagacaaatac

SEQ ID NO: 162850 - DNA, 201 bp, Homo sapiens
accaggaggagacaggctcaggatgacaagtggcttttgcaaggccgcgtggtgaatacatcgtagatttgaaatttaaacccagttctttctgactctartttacctatatgttcatcctccagtatcatgctacctgtatgcctggaaataaaccattttacatagtttctaatgggattacatttttaaaggaaattc

SEQ ID NO: 162851 - DNA, 201 bp, Homo sapiens
gatgtgagctgggtagggagagtctgactcacatacaggctgatccatgtctagagctcctttgggtattttataacctactgggctcctggggcagggcrgcatccttgtctagccacctgtgggagtagtcaggagccagggttcagggctggcctcggctgctgaccggtggctgtggtcatgcctgtcctctccccc

SEQ ID NO: 162852 - DNA, 201 bp, Homo sapiens
atctaatgggtaaagaatttctgtcggatgatgacagtttttgaaaatggatagtggtgatggttgcacagcactgtaaatgtacttaatgcatttaattstatacttacaatgcctaaaatagtaaatattatgttacatatattttaccataatagaaaaaaatgtaaaggaaggcaggcagaccctgagcattgggtt

SEQ ID NO: 162853 - DNA, 201 bp, Homo sapiens
ggctgtggtcatgcctgtcctctcccccaggcttccctgtcctcagctgagaaacaggaataagaagcctacattttagtcaatggaaggttcacgtgaayagagggtggaagccctttggaaacactgttgttctggacaaacacagggtcctggtctccactctgggctctgggtctcaatgcctttctaaccttgccc

SEQ ID NO: 162854 - DNA, 201 bp, Homo sapiens
cttcctccactgcccctaccagagaaatgtgaatgctgattcacttcttttgaccagtggtgatggaatagaattttccagtcatgcagttgtacttattkccttctggttctgtatcgataagcttcattcctttttttttttttttttagcttcattctttagaaattggattctttacttagtcaagtctataatcaa

SEQ ID NO: 162855 - DNA, 201 bp, Homo sapiens
cctttctaaccttgcccactggtgcccactgccacctgtgctgccaggagccatcctgcatttcccagggtggtatgagagcgtgtcacctccatgtaatrggctgagacactcgggcacttggagaatctcggtgatcctaatcgtaagcttgttagcaggctgcagtcagcagaatgatcacatgttcattacatttat

SEQ ID NO: 162856 - DNA, 201 bp, Homo sapiens
acaagcaaaagtcaagatacttggagtcagtaagagagagaaaagttgccgggagctaggctcaggtcattcctcccctgaagtggaacgtggaaggggcwtgtgagactggctgtcagtacagccctgggggtacctggccccacaggctggagtagggagctgggccggggctaccctatgcagaggcaggccctgggg

SEQ ID NO: 162857 - DNA, 201 bp, Homo sapiens
accacccatgtgactttcactcacagcttactggccaaagcaggtcccgtgggtgacctgacttcaaaaggagggtgagggagttggagagcacttgtgcmgttgaccacacttgcctgcaagagcagagctgcttacactctaacctcacatgggattcggtacgtctggggaagggcccagactttgcatttcttgcaa

SEQ ID NO: 162858 - DNA, 201 bp, Homo sapiens
cttcccaacccttcggtatcacaccccatgcccgggaaagcccaggaaaaccaacgcaggaaataaacgattccatcgggccgtggtgctcccagcgtggrtttgtcagtgtccttatgtgagggcccagggtgttggagccatcactggctggagcatggctggttactgtggcaaagggtggacaagtagggacgcttc

SEQ ID NO: 162859 - DNA, 201 bp, Homo sapiens
aggtggaagactgttaatttatggtgacaccaatctgtgagttcaggagattgtgcattgaagccttaagcagcccaggtatttgcatgtttttttttttwaaaaaaaagattattaattgtttagtgagatctaattcacatactgtagagttctccattttataattatacaattcagtggttattagtatattcacaa

SEQ ID NO: 162860 - DNA, 201 bp, Homo sapiens
catcttattcaccctaatattagtgaaaatattcactaatattttcagttttgtgcttaattccttgaaggttttgggatttaagcccaaccaatttctgygaagagcagtagcataggaaattaaacacaaaaaataaaagtttaatttagaactgccctaaagccaaattgggaaaatttagtcactgttttccggtaa

SEQ ID NO: 162861 - DNA, 201 bp, Homo sapiens
tccctgtctcacatcagctgacagcacaataaatttgaagttaaatatttgtgaagaaaaatatattcatagaacactagaagagtaactgcggtcatggkgttagattttgtggaatggaagagagaccagcctcacagcgaagaggccattgaagacttggacagagctggctgtgatgcagccacagccaggaacagt

SEQ ID NO: 162862 - DNA, 201 bp, Homo sapiens
gtagcataggaaattaaacacaaaaaataaaagtttaatttagaactgccctaaagccaaattgggaaaatttagtcactgttttccggtaagtacacagyaacaggtgttttggatggggagaggtgagcactataaagatgtctctgcagttctgaaatttccttttctgctttttctttccctcttcttcctcctctt

SEQ ID NO: 162863 - DNA, 201 bp, Homo sapiens
caggcaccagtgacccctggggtgggtcatctgaccctttctggacagcgtctgcttcctgcagcttgtgtgcctgttttccagagatgggagctgtaaaytgtgaaagtctagggctggcagctgccacggtgctgcaccctgcagaagatctgctttcagcaggagaggctgaggcccacgggaggaggcagaaatggt

SEQ ID NO: 162864 - DNA, 201 bp, Homo sapiens
tacttccgcctcaaggttcgggcatctccagatgctacctctttttcacactgaattgactccttttcatttattttttgagttggagtcttgctctgtcwcccaggctggagtgcagtggcgtgatctcagttcactgcaacctccgcctcccgggttgaagcagttctcctgtcttggtctcccgagtaggtggactta

SEQ ID NO: 162865 - DNA, 201 bp, Homo sapiens
cacagaagaaattacttctagctgataggatcaaagaaagctacatagacaaaagagtggaaatggtatttaactattttcaaggatatgtaggatttggscaggtagcaattagctttcaggaagaaaagaagacttattgtaggggagggcagtccatgccggggagtggcattcacaaaggttatgagtgtgaagtga

SEQ ID NO: 162866 - DNA, 201 bp, Homo sapiens; identical to SEQ ID NO: 30285

SEQ ID NO: 162867 - DNA, 201 bp, Homo sapiens
ctcatgattacttccgcctcaaggttcgggcatctccagatgctacctctttttcacactgaattgactccttttcatttattttttgagttggagtcttrctctgtctcccaggctggagtgcagtggcgtgatctcagttcactgcaacctccgcctcccgggttgaagcagttctcctgtcttggtctcccgagtagg

SEQ ID NO: 162868 - DNA, 201 bp, Homo sapiens
tgaattctcacgagatctgattatttaaaagtgtgtagcttgcccctttgcgctctctcgttctctcctgctcctttgtgtggagatgtgccagcttcctyttctgccatgattgtaagtttcctgaggcctccctggccatgctttctgtacaggctgtgaaactgtgagctaattaaacctctcttctttataagttac

SEQ ID NO: 162869 - DNA, 201 bp, Homo sapiens
tccaaaaactcttgttcagatttccaaactggttcaaggtcaagatggaccaaaatttactttggctttatcttaaccaaagtcttcccaatcagtttccyaatatgtaaatgacatttttggtaaaagatgagcaaacatttcagaaatgagccaacaatttttttcttatccccatcataacttttaactgcaaaacct

SEQ ID NO: 162870 - DNA, 201 bp, Homo sapiens
aaaaaaaaaaaaaaaaaaaccccaaataatccaaaaactcttgttcagatttccaaactggttcaaggtcaagatggaccaaaatttactttggctttatsttaaccaaagtcttcccaatcagtttcctaatatgtaaatgacatttttggtaaaagatgagcaaacatttcagaaatgagccaacaatttttttcttat

SEQ ID NO: 162871 - DNA, 201 bp, Homo sapiens
gtgagtgtggactgtatgttggatgatggtattgaatcaccctttccttttttaaaggtgtgactggataggagaaggtgtttattcttgagagatgcctkttggattacttagggtgaaatttcacaaggtcttaagtccagttttggatagtttggtaaaaggaaagcatgtgtgtgtacgtgtgtgtatgagagagag

SEQ ID NO: 162872 - DNA, 201 bp, Homo sapiens
ctagaagaaaccatgagagaaatggcgagcctgagatcctttattgcaccaaaagcaaggaagtatggaaggagagctgagggcttgccaggacattggcygacatggtctctcactggtcaaacttgggatggttggaacatcaataaagaatattaatgatcatggattataagtacattaaaaaaacccatatgagtc

SEQ ID NO: 162873 - DNA, 201 bp, Homo sapiens
aagcgacagcagtggtagcacaggtgagggtgtcgcccaccgtctgagaaacccatgaagtacgctggctgctcttccatgttgcccccttcataacaaartgttcgctatcacgttaagaaatatgttcgaggaggaagccgtgcaacagcttcagaaaaaaattctagagctagaacatgcagttggttttcaaatctc

SEQ ID NO: 162874 - DNA, 201 bp, Homo sapiens
ttgccattttaagaccgacagtggcataaggtcactgggtgaggtagagatacactgatctttttttggtggcagttagggatattgacattggtcatttsccaaagcgacagcagtggtagcacaggtgagggtgtcgcccaccgtctgagaaacccatgaagtacgctggctgctcttccatgttgcccccttcataac

SEQ ID NO: 162875 - DNA, 201 bp, Homo sapiens
acctgtctttcttccagttaattgttctttcccccttgccttccaccttcctttccctcctgatggctcatcctgtctccctctcacgtgcctgctgtatrctttcttccttttccctgctggtccacccgacctatttttactccctcacatttggttgtctttatcctcggaggagaatgctcacaccagcgtctttct

SEQ ID NO: 162876 - DNA, 201 bp, Homo sapiens
ggaacctgtctttcttccagttaattgttctttcccccttgccttccaccttcctttccctcctgatggctcatcctgtctccctctcacgtgcctgctgyatactttcttccttttccctgctggtccacccgacctatttttactccctcacatttggttgtctttatcctcggaggagaatgctcacaccagcgtctt

SEQ ID NO: 162877 - DNA, 201 bp, Homo sapiens
tggagagataaaaataggccttcctccctgggtaatttgaagcaacttgagggggcaatggtcattggagacatagtttaagatgcattttattttatatrtcttgtgcatgatttcaactttcgttttcttcttgagtgtagagaagtcagataatatagagaaggagaaagagacctttgaaaacctgtgttgaaaatc

SEQ ID NO: 162878 - DNA, 201 bp, Homo sapiens
ggtgtgggggtagagtgtaagttactgatttaaaaatctgatataaacctgatttcagttcccagtcaactgaggcacagcaaggtaagtccctgcccagygtcactccacttggaatgcggagagcccggcctaaaggggacccactgcacatcccaagccacgcgtctgctcactgcagccctggcccctcagtgccac

SEQ ID NO: 162879 - DNA, 201 bp, Homo sapiens
tgccctgccctgactccccaggctccctggcctggagttcagagtacagaccccaagcgaccgcctgctcaccaggacgtgccagcagggtccttctcccsagagccacagcgagtgaggggacactctgtctatcctgggagtgggctggggtcctgttcctgagctggtgggcagatgcgatagtgccaggtagagctg

SEQ ID NO: 162880 - DNA, 201 bp, Homo sapiens
taaaaggtcagcaagacacacacacaaaaaaatgccacaagcaaaagtcaagatacttggagtcagtaagagagagaaaagttgccgggagctaggctcasgtcattcctcccctgaagtggaacgtggaaggggcatgtgagactggctgtcagtacagccctgggggtacctggccccacaggctggagtagggagctg

SEQ ID NO: 162881 - DNA, 201 bp, Homo sapiens
tatgagattagaaaaggtagaggttttttggattagaggcagtttagaaattgtgtgactggcttattattaatcgaattagcagtttctgtttcctggtytccccatcatttcacctgctactcagccgtaaaagtttatttttgattcaaatgcagagattgagttttgaaacaaatctagattagtaaacatctatac

SEQ ID NO: 162882 - DNA, 201 bp, Homo sapiens
ggataggaggaggtcatattgagagtttgtcatctcgtagaataatcagtatgagattagaaaaggtagaggttttttggattagaggcagtttagaaatygtgtgactggcttattattaatcgaattagcagtttctgtttcctggtttccccatcatttcacctgctactcagccgtaaaagtttatttttgattcaa

SEQ ID NO: 162883 - DNA, 201 bp, Homo sapiens
ggacgtcatcttagtcactgctgtatccccagcgttaagaagagttagaagaggacacagtccacactcaatgactgtttaatgaattaattaataaatasaaaacacacaaaaatgtaaacactatccatttttaaaacaagatactaatttttgaataaaaccaggttgtggtggggaccatagggccagaatagttgc

SEQ ID NO: 162884 - DNA, 201 bp, Homo sapiens
caatctctaaaacaagtcctccaggtgattgtaatgtacgctgtagcttgtaaaccactgccttagagctgttggaggattaagtgatgtttaatctacayatggctcaatgccagagaaattcagcatttaaaaaatttccttagaagtttctttttcttttccttcaagaattgttgaggataggaggaggtcatattg

SEQ ID NO: 162885 - DNA, 201 bp, Homo sapiens
agatgtgtctgtacctctgtatctgctttataacctccctgaggaaatgctacaggcctgatccatctctcccctctttaaagactgtcaggggctctctrtttcccccaccatagagtccaaactcgagcctagtacccaacattcttcagaacctgaccccaagccatctgggtgtcctcatctcccaccgctccgccc

SEQ ID NO: 162886 - DNA, 201 bp, Homo sapiens
taatattaccttagtgcagcgcttctcagagtgcccccacctgccgcagcagcagcagcatcaccacctgggtgggcgttcccccattactgaatcggagrctctgggggtggagcccaacaatctctaaaacaagtcctccaggtgattgtaatgtacgctgtagcttgtaaaccactgccttagagctgttggaggatt

SEQ ID NO: 162887 - DNA, 201 bp, Homo sapiens
tgacccctggggtgggtcatctgaccctttctggacagcgtctgcttcctgcagcttgtgtgcctgttttccagagatgggagctgtaaactgtgaaagtstagggctggcagctgccacggtgctgcaccctgcagaagatctgctttcagcaggagaggctgaggcccacgggaggaggcagaaatggtagctggtccc

SEQ ID NO: 162888 - DNA, 201 bp, Homo sapiens
ttatccttaacaaggtttgtcttgaatggaaaataaatggggatcacatttggagccagtggtccctcgctagcttttcatgtgagccacacttagaagcygtgctagggccgcaggcgtgctggacattcgtgttgttccagtattcaccgctgtgtgctggcaggatcctacctggaggttctggggactgcttcccca

SEQ ID NO: 162889 - DNA, 201 bp, Homo sapiens
tgtgctttacctatttgtccatctcccccttcccaagaaccccttgcaaccactgaactttttttattgtctccatagtctttgctttttccagaatgtcrtatatttggaattatatagtatatagccttttcggttggcttctttcacttaacaatatgatttgaggaaccttcatgtcttttcctggttggatagcca

SEQ ID NO: 162890 - DNA, 201 bp, Homo sapiens
aagaaccccttgcaaccactgaactttttttattgtctccatagtctttgctttttccagaatgtcgtatatttggaattatatagtatatagccttttcrgttggcttctttcacttaacaatatgatttgaggaaccttcatgtcttttcctggttggatagccaaatttctttttattatcaataatattccattgta

SEQ ID NO: 162891 - DNA, 201 bp, Homo sapiens
ctccatagtctttgctttttccagaatgtcgtatatttggaattatatagtatatagccttttcggttggcttctttcacttaacaatatgatttgaggarccttcatgtcttttcctggttggatagccaaatttctttttattatcaataatattccattgtatggatgtaccacagttgatccattcacctactgaat

SEQ ID NO: 162892 - DNA, 201 bp, Homo sapiens
cacaatcctataggaaccctccttggttgttcaaacatttggcaccactgcgtgtctgctgatggtttgccacagtcataggtgaggttctgggcagataytaacagctgagggaagagtgggcttgcaaacccaaacgtggaagtcagaccttgaggtatggttctcacagacttgactttcttaaggacagtggccata

SEQ ID NO: 162893 - DNA, 201 bp, Homo sapiens
taccagactttaaaattcttgtcaatctcatgggcaaggaatattttgctgttacgtttattggtatagctgattacttagtgagattgaacatcttttawtattggtaatttagatttccttttctgtgcattctgtattcatatgctttgcacagtattcttttgagttgttttattcttgctaatttgtatcatatta

SEQ ID NO: 162894 - DNA, 201 bp, Homo sapiens
agtttgtttttatgactcagagggaatgtgtaataaagaggtatttttaagaccgagagccagtgtgtgtcagcttctttttgcccattgtttgtgtcctkggcaggaagatgactcactagatctgaatcacaaggcaattaagagccccaggaaaggctgatttcaggatggatatttagaagcttcagctaaatcagg

SEQ ID NO: 162895 - DNA, 201 bp, Homo sapiens
aggagtttgtttttatgactcagagggaatgtgtaataaagaggtatttttaagaccgagagccagtgtgtgtcagcttctttttgcccattgtttgtgtsctgggcaggaagatgactcactagatctgaatcacaaggcaattaagagccccaggaaaggctgatttcaggatggatatttagaagcttcagctaaatc

SEQ ID NO: 162896 - DNA, 201 bp, Homo sapiens
tatcatgctcgtagggcctctctagttgtcttttaactctgaggtggaacacagacacttttaggaaaacgtacgcttgacaacttacccagagaaacctrtctttgcttggagagccgtccatgttgttctgtttgtactaacatagatcctaaacatttgaagtcttctggcatctcattgtgaagttctgcgatgcca

SEQ ID NO: 162897 - DNA, 201 bp, Homo sapiens
tgatggataaagataatgtacctaattctgtatgcttttcagctgtttattccaatagactgttttatatatatatatatttaaaatgctttaaaattgtktaaatatcgaagaccttcaaatagatagcaaagtattaaataaagtagaatgaatacccatatacccattattcagaagtgacaaatgccatatttattt

SEQ ID NO: 162898 - DNA, 201 bp, Homo sapiens
ttagaaggtcagtgtctcaccacctgacccttatttccttggtttatgatggccaatttattgcgtctgttttattcaaaagaaaactgagggtgcttctraagtagtttcttatttcaatgtgtacacacctccactctgaaacatggctcccttaactgcacaggcaaatttatcacatgtagttgtgaacatatattt

SEQ ID NO: 162899 - DNA, 201 bp, Homo sapiens
gaaacctgtctttgcttggagagccgtccatgttgttctgtttgtactaacatagatcctaaacatttgaagtcttctggcatctcattgtgaagttctgygatgccatggttgatcattattagtatatggagttataagatttgattaccactggtaagttcccaaagtgctttgtgctttcccctttatgtctgttat

SEQ ID NO: 162900 - DNA, 201 bp, Homo sapiens
tttgtggaaacatgtttataatggctactttcaaatccttgtcagataattccaacatctgtgccatctcaatgttggcatctcttgactgtgttttctcrtttaaattgaggttttcctggttcttggtatgataaatgattttgattatatccaggcatgttgggtactatgctatgagactggattttatttaagcct

SEQ ID NO: 162901 - DNA, 201 bp, Homo sapiens
gagtttttaggctcctagtagcctgatggcaatgtctctctgacctcaaaccactggaaaacatgttttccgggtcagattctctgaagattcttcaaacragagtggggagcaaaagccaagccgaggacttaggaaaatgtgttttttgtcgcacggcacatctcttttgacagctaaggtgccgagtgttcgcgtgac

SEQ ID NO: 162902 - DNA, 201 bp, Homo sapiens
aactccaaagagcgggaaaacgactttagagggaccggaaaggggaagcgagtctcccatggtttgaggtgttgctgcccgtacctgtgcacttggccacrgtccaaagtgactccattgcgggcacagccgtggggctgacgtgagaccccagcctggcaaagcgagcactcggaggcagtgggcagaaagggctcctct

SEQ ID NO: 162903 - DNA, 201 bp, Homo sapiens
cagattgcataatttctattgttcttaccttcagattcacctattcttttctctgtcatcttcattctgctgtttagctcactgggtgagttttaatttcrgttattttatctgctatgtctttactgagactttctgtttttaaaatttgtttcatgcccatttttagttgtttgtggaaacatgtttataatggctact

SEQ ID NO: 162904 - DNA, 201 bp, Homo sapiens
aggtaagattctgcagtgagaaaccttaatgttgataaattgataccaagcagcaacagcagaagtacctctgcaaattctttgggttgtcgtgagttttyaggctcctagtagcctgatggcaatgtctctctgacctcaaaccactggaaaacatgttttccgggtcagattctctgaagattcttcaaacaagagtgg

SEQ ID NO: 162905 - DNA, 201 bp, Homo sapiens
gcagtggctgacttctcccaaggcgtgtggtccaggaatgagtgaaagtcacagtgtctttatataaccctgcctgggaagtgacacactctgtctcctaygggtgacgccaaccaaccgtgtacagggtagaaggggtcacacagggcatgagaacaggaggcaggggccatggggctgtcctggggacagtctgccacc

SEQ ID NO: 162906 - DNA, 201 bp, Homo sapiens
tatggacagaccacattttctttctccattcatctgccagtggaaacttgggttgcttctaccttttggctgttgtgaataatggtgctatgaacatgagkgcacagatatctctttgagctcctgtttccagttcttttgagtatatccccaaaagtggaattctgggttgacaatttcttttttttcagcgcaacttca

SEQ ID NO: 162907 - DNA, 201 bp, Homo sapiens
gttgtacaactttctgaatagactaaaagccatcggattgtatactttaaatgggtcagttgtatggtatgtgaattatatctcagtgaaggtgttatttwaaaaaaaaatactgctgcatactgatgaaatcacactttctgggcgtggcgctggtctgagcctccttaggagccctgggctggagcagacgctggacat

SEQ ID NO: 162908 - DNA, 201 bp, Homo sapiens
taatgaattctccattacttgagatattcagatggtagagtggtcatccttaaccagtttggaggtggggctatgtagcctttaaaaccctttgttctcarttactgagaattgactttgttttggaacactgaaacatttaaaaaaacattctgctaagtcaaaattctttgaacccatcattatttattttttaattta

SEQ ID NO: 162909 - DNA, 201 bp, Homo sapiens
ccgtgagttgtgctcaggttattttatttctccaaaagcaagcagaaagtgaaaaatgttacctgtgtgtgttctgtattgcacgttatcagaggagatgmacattttcttctcttacagttaagaatctctcagtcttacacaattagaataccccttatgtgtggatctggaggttttgtgcaaaatactgaagaatta

SEQ ID NO: 162910 - DNA, 201 bp, Homo sapiens
attcaataaatattgttgtgttcttcctgaataacttcagtttgaaagttaatgcgtattcataaaacctagtttgtgatacttcaataagagtgagggarttgatctgattttacagttgcagttttaatattgtactaatactttccagggatgtagggtaatgaattctccattacttgagatattcagatggtagag

SEQ ID NO: 162911 - DNA, 201 bp, Homo sapiens
cagacgtcgtccttattgttgtcaccagaatattccatttccacagccacctggcatcccaaagccttccttcagtgggcagcctcttcacaggcaaatgmtagcgatggttcaagtcacacggccagcacatactccatttccaaggaggtcattgctaactctaaatctacccctgttagttagccaaccccacgtgct

SEQ ID NO: 162912 - DNA, 201 bp, Homo sapiens
gctgctttggtggcccaggcgtgaggcagagctggtggcccatggaatggagatgaggagtgtctcagccgtgggtatacactgctgaggtcattcagcasatactcccagaggacttgctctgtgccaggcaaaagatataattgctgcccataggaattcctagtgtagttgggtagaggagaggataggaataattga

SEQ ID NO: 162913 - DNA, 201 bp, Homo sapiens
acactagtagttacgctaactttggaaattatattcaataaatattgttgtgttcttcctgaataacttcagtttgaaagttaatgcgtattcataaaacstagtttgtgatacttcaataagagtgagggaattgatctgattttacagttgcagttttaatattgtactaatactttccagggatgtagggtaatgaat

SEQ ID NO: 162914 - DNA, 201 bp, Homo sapiens
gtgaggatgacgtaagttaatatttgtgaagcgcttagactggtgactggcacgccatcagtgttgtataggtgtttgtaaatagatgaaacagaaccaayattgcacgtacatgtattcaaaatatattcaagatcagattatccaaataccagtaaggtgttgaaaacagcgcttccccccctcctcccccttccctct

SEQ ID NO: 162915 - DNA, 201 bp, Homo sapiens
agattggattgtatataatgtcacatccacactagtagttacgctaactttggaaattatattcaataaatattgttgtgttcttcctgaataacttcagyttgaaagttaatgcgtattcataaaacctagtttgtgatacttcaataagagtgagggaattgatctgattttacagttgcagttttaatattgtactaa

SEQ ID NO: 162916 - DNA, 201 bp, Homo sapiens
tgtggccatagaacatggacgcctccagtacgcaggcacaggcagctcagggccgggagcgaggcccgtctcagcaggcggtgtcagccgcggagtgggtwggtcctctgaggacgatcacacctgtgggcaagagcacacccgggctctgggccaagtaagcctgtgaatcccactggcgttgtgaacccggagcccttg

SEQ ID NO: 162917 - DNA, 201 bp, Homo sapiens
agtctcgtggtgccatgttctaggttaggtgcatatcgctagtcgtagtgtgtcttcatattgcaaattgctttgtttaggagcgagaactgttaagccaygcttgttaatagcctctggagccagtctgcctgggttcagtgtttggctctgccacctcctaggtgtgtgaccttggcaagtttttgaacctctctgagt

SEQ ID NO: 162918 - DNA, 201 bp, Homo sapiens
agctactcattgccttaaaaatactccatagtcaagaagatgggtaatttcacgagaaaatcaaagcttactaatttaaaagggtggaaaatggagggcakgggattccaagcttaatttgtgaagattcttggtacaattaaaaaatattttatataaaatattagctgggtatggtggcatgcacctctaatcctagct

SEQ ID NO: 162919 - DNA, 201 bp, Homo sapiens
gagatggataggagttcctgcgatggaaaagaggaaaggacattccttggagatcgtgtgcaagggaatggaacattcgggaaacaggtaaaaatgaacamcaccaaagaaaatagtgcgcagaggggaaggaaaggctgaaaaggtagaagatggtgagggagacgatgctgaggggtgaatcagggagaagggcctggg

SEQ ID NO: 162920 - DNA, 201 bp, Homo sapiens
tcagaaaagggtcccttcacggagtaatttgcctggtatggcatcccagtttgttgtataatttcagccccgttactatggtaacctgctttagtgtcgcrgcgattgttaatcaggatttgtcgttattcccctttcatcacgaggctctatatccttatggattaaatcgcagttctcatcgacaatggcatagatcaa

SEQ ID NO: 162921 - DNA, 201 bp, Homo sapiens
tgtcgctggcatacagtcttcacagattttcttatgtagcccaacagttagtttttctcctggtctccttttctctctggtttttctgcccccatcattcytagcttcctctgtggctctccctctcctctgcccttttggacaatgagaacgaaggtaataggcttggtcctcctggggggcttctcctacctgtgtgtg

SEQ ID NO: 162922 - DNA, 201 bp, Homo sapiens
aatgggcacaagtcttcagattggccctggataggggaggcactgtgatgtgtatgaaatgtctagcacactgtctgggacttagcaagctgtggtgagtrtctgtggcattctctgattgaaccaaaatcataatttcagttaaaactatgaaaatattgttcatcacttatggataactgtgggcattttactactgat

SEQ ID NO: 162923 - DNA, 201 bp, Homo sapiens
ctgtgtcatccttccctagacccctccaagcgtggcttcagtgctgagccctttgcctgaacccagccaatccagtgtgacccattacatcaaagcgtctstgccgatgatgcagtgtgaagcgtcttagctatccttttcttttgtgttttccacataagtgctcctattcaaaacctgctgaggatattatttagaaaa

SEQ ID NO: 162924 - DNA, 201 bp, Homo sapiens
gcccctggaggttcaaaaaagcaaagataccagttattaggaaaaataaagacattctgtgtttgtaagtggctgagttgaatctgtccaaaccagcttayacttgtgcaaactctgtgtctggcttgcacagggttgacattcagcaaatagtagttccattccccatatttctcctctctctctccgtaatgataaata

SEQ ID NO: 162925 - DNA, 201 bp, Homo sapiens
ttccccaaggttgtgtttacataaaaaagacattgttttatgttctagcatcaagagatgattttacgatataacaagttccacaaagaactctcgtaagrtggttctcagtcccggcataactgctacggagatcacagagcaatattattctctggatttattgggtttgctgcattctgttagcatcattcatatttt

SEQ ID NO: 162926 - DNA, 201 bp, Homo sapiens
gtgtggtggtgtgcacccgtagtcccagctacttaggaggctgaggcaggaagattgcttgagcacaggaggtcaagactgagtgagctgtgatggtgccrctatactccagtctgggtggtagtgtgaaaccctgctgctaaaaaatgaaaaagccaaacaaacgaaacaaaacaaaccctacaaaacctgacccataac

SEQ ID NO: 162927 - DNA, 201 bp, Homo sapiens
cctttgttttctgttgtgagacaaaggaggaagataaggcccctcccacatcctgaggccagcatggccctttgaaagaaggtttgctagggggtgtggtrtattttaaatggacctatcagttcactttctatattctagtggttcgtgtgtgtgtatgtttgtgagtgagagagagagagagtgcatttaactcagtgg

SEQ ID NO: 162928 - DNA, 201 bp, Homo sapiens
tttggttgttacattttattggccagaaaacttgagttgttcaagtcttctgacagacatgtaaaataagcaattcaaatcagggaggaagaaactgagawtgagccactgctcacatgctagatcttacatatgtcaaagcaggtgtaattgaaccttcgaagacgtggctgcaacgtaaacaacagtggcctgtttatg

SEQ ID NO: 162929 - DNA, 201 bp, Homo sapiens
acagttaagcttaagtatgttcttcaactttttaattaatcaacattttgattttctgtaaaatgaaatcacttaacatttatgtgtgttgccaaaatgasaacctttgtttaataagctcctttatacactacgtcgctgatactcctaaaatggacgccaagacatgaaagacatgctgataggcactcggaaggaaat

SEQ ID NO: 162930 - DNA, 201 bp, Homo sapiens
acttttttcaaaggcccatccatgccattgcatgcgtcagtgcttccttcctttgtattgctgagtaatattccaatgtgtagcccaacaacattgtatcmgttcatcagctgctgaacatggggattgtttgcattttggattattatgaacaatgattctgtgggcatttatgtgtgcatttttgtcaaatccttttct

SEQ ID NO: 162931 - DNA, 201 bp, Homo sapiens
gagtgagacacagacaaaacgagccatacacctaaagatgaatatatgcaaggcaggcaaacggaagtcctttttgggggctgtgcaaatactggtgtaasataagaaaaggtgatgggcagatgcagtgagttgtagagggcctgttctgtccaaaggcactcaaatccaacaaaccctgcgctcaccaaaggaaattca

SEQ ID NO: 162932 - DNA, 201 bp, Homo sapiens
gaggggaaaccacagcgggtagacgagaggtaggtgtttgtcttaggtcattttgtgttgctataaaggaatacttgaggctggataatttatacagaaargaggtctttttccttcacagttctgcaggctgtataagaaatatggcattagcatctgctggcctccggtgaggacctttgtgctgcatcaaaacttggt

SEQ ID NO: 162933 - DNA, 201 bp, Homo sapiens
gtagactttttggcaaaatctcaggtaaacctcatacatataaatcacagaaatggaagaattaggtaggtgcaaaagtaattgcggtttttgccattacytttaatggcaaatacttcagttaatgcaggggtgatctaggacctcacctgcttatcatttctttgtcctttgtcaaagccctgaagcatctgggggact

SEQ ID NO: 162934 - DNA, 201 bp, Homo sapiens
agagaccgcaaaggcattatctctagtgtctgtatttttcatagaaggaaactgaagatcagggagattagtaccatgatcaagagcacacaggtaatgcrtaaggcagcagggattggaatgtgacttagtttagtgctcatttcactgggtcacaggcgtatatagatgaaataagagccttggcttcttggagctggt

SEQ ID NO: 162935 - DNA, 201 bp, Homo sapiens
agactagaccagtgcttcctttcagcaccactcgcctttccgccatgatgctgtggtctcttttgcactgtccagtggagggcctctggccacatgtggckgttgagcacttgaaatagtggctcactggctcagttcctcagtggctagtgtgactgaggaactgaatcttttaattaatttacatttatatttaagtgg

SEQ ID NO: 162936 - DNA, 201 bp, Homo sapiens
tctttggagtttcagattgtagctctaaggatctaaatttccagagggagagaaagtagggaaatggtccataactcatttgtcttccattttctgtcccrtgggctaggtaggtctgttcttgatatggttgggagagtggttgcctgtctcagtgttcaatgtcagatgacaatattagctcacattgtaaatattctg

SEQ ID NO: 162937 - DNA, 201 bp, Homo sapiens
tttgggaccttgtgcacaaagtgggcagtgggagtggtgactggggaggtataaggagcttagagcctggatgggtgcctgccctgccccttccaggtaascccctgaaacttgaaaaccattatgttaatacgttaattatatagctatagggatcccttaagtaaatacaaagttttattactgtagaggcatgttttt

SEQ ID NO: 162938 - DNA, 201 bp, Homo sapiens
ttttaattaatttacatttatatttaagtggccacatgtggctggtggctaccatttagagagcatagcagttcattaaggggtgagcttgtgcgtgtgtktgcatgcccatgtgcattgtagaggggtggagcatgtcagtctggatccctggccctctgctctcactatggcttatcccaagagcgggacggccatgga

SEQ ID NO: 162939 - DNA, 201 bp, Homo sapiens
gagtcgcgtggtcgccagttgagaaccactgacctaggctccatgtctgcccaggctcccctgcgagggccactggcacttgcctcttagtcttcctcccyactcccacccgtgtccccgcccaccacgggaagccaggggcatcctgtgcacatttatgacaggataggaagcaaaatgaagacttctagtgaaatcgtc

SEQ ID NO: 162940 - DNA, 201 bp, Homo sapiens
ggtccttccatcacacagctgggaccttccatcacacatctgctaattgtgccagttagtggctacagacctctataaggccactgagcccaccaccttgmcctcagaaccctgggctgggttctcccttttcccaggctttttgcttgtaggaatgccacaatgactttacaaccagtggaagccccagaagggaactga

SEQ ID NO: 162941 - DNA, 201 bp, Homo sapiens
agaattgtcacgtgtaaagcatggttgtgtttgcaaagtgtcttatcttcctactagaccttaaacatcttgagggttggagcctttctgatgtgcctctrtatttcccagagccttactaatttcagcatactataaatacaacaaatacctataaaatgagtatgttggtggatgactcatgaacaggttgtttccttc

SEQ ID NO: 162942 - DNA, 201 bp, Homo sapiens
ttttttccttttcaggaaccaaagtgtctctttgtgtaccccatcctggtgagcaatagagctaagtggacatccatgcctaggtgaccactgtgattttyatcttagcttagcttagcctgggtcccacagaaagcagagcccaagccagaggcttgtgtgtgaggattcactgagatgtgtggttccagggagcaggaa

SEQ ID NO: 162943 - DNA, 201 bp, Homo sapiens
atggtcgtggaggggaggtgactaatgtttatttgccgttcctgaaacagacctgttggaaagtaaagttcacacaggtgataataccagcctaactgttwtatagagtttgttatgtactggacactgttctgagtgctttttgtatttaattctcaaaacaccccatgaagtaagtacaaatgaggaaacttaaaatga

SEQ ID NO: 162944 - DNA, 201 bp, Homo sapiens
gaaagtgcctattgtgtgtatttggcagtcatttcttgccacgtgatatctaataacttccatggatctgtcctgtttctgcaactggaagaagatgagcrgaacctcttttaggtggggacagtgtcttagtcatctcaatagccccttgaaggcatgatacggtaccttggatggtttctatgttaatattttctgtta

SEQ ID NO: 162945 - DNA, 201 bp, Homo sapiens
aacacagttcaattttagcagagtgcatcctgctgcagtcatatggtgatataatatgtacttttatataggttatataccataattatgtataatacgtrtatctatataatatatagctatataataataatagtaatactgttagaacagcaacaacagtaccaacagagtacttactaaatgctaatcaagcagttt

SEQ ID NO: 162946 - DNA, 201 bp, Homo sapiens
cctactgctcaaggtcatcaccaaggtctgatttttcacaaaaaattcgtaacctccggcatgaatgggttaaaacactcacccactcctgggccccagcrcaggcaatccagtcagtgtttctctgtggaaaaggaccctggcatttgtatttttaaaagtttcctgggtgacttgaaataagctgtagccaggcttgag

SEQ ID NO: 162947 - DNA, 201 bp, Homo sapiens
atcatctgtaaggcctccccagtgcctggctccaggcctctcttcttcctccaaactttgtcgtgctcaagaaagtgcctattgtgtgtatttggcagtcrtttcttgccacgtgatatctaataacttccatggatctgtcctgtttctgcaactggaagaagatgagcggaacctcttttaggtggggacagtgtctta

SEQ ID NO: 162948 - DNA, 201 bp, Homo sapiens
ccaactcctgacctcaggcgatctgcccacctcagccttccaaagtgctgggattacaggtgtgagccactgtgcccggcctggatcctatcttaaaggamtttctgtggtgataaattatgaaatgcctttctcgtgccatccgacctcctgtgttcactctctgcacctttctattgtttcactggaagtgtcatgata

SEQ ID NO: 162949 - DNA, 201 bp, Homo sapiens
agaggttgtcctcccagagcatgtggctttggcatgtgccccttgtagcagagaaggggctggggcatgtgcccaacccaccagttgggaggcacccactstgctatggctgggtaacagatgtccctgttggagactcttgtgtctccatttgacactctactggtaatcaatagttagggctcaattaatgaatggctt

SEQ ID NO: 162950 - DNA, 201 bp, Homo sapiens
tgtgatacttggaggctgaaccttaacaggatattatcctgacctgtcagtttagctctttggatcctatggtttttttttgttgttgttcttttgtttgytttttgagatggagtctcgctctgtcgcccaggctggagtgcagtgtcacaatctcggctcactgtgacctctgtctcctgggttcaagtgattctcgtt

SEQ ID NO: 162951 - DNA, 201 bp, Homo sapiens
aggtatgggggttgcctgagctgggcatcggctccattaccagccgggaggtgtatctccgttctgctgcgtctggagcaaagggagcgggccagatggtmgtggagggcggggttgactgcggggaggccgtggtcagagcaagaggataaaatcctgaatgacacctgatttgtttttcgtgctgtgatttttcactgt

SEQ ID NO: 162952 - DNA, 201 bp, Homo sapiens
aaatcctcacccccccaggtgatgggggattatgaggtgggggctttgggaggtgattagtcatgagggtggaacacgcatgagtgggattagtgcccttrtaaaagagaccccagataactagctagtcttttcggccatgtgaggacatggtgagaaggcgctgtccgtgaaccagaatttgggctctcaccagacact

SEQ ID NO: 162953 - DNA, 201 bp, Homo sapiens
gattgctaattttaatttatctgaaccgtgcttttcaatgaggtgatattggtcctgatcgttctgtaaattggagattttgcccgaggaagttaattctsccctttcacaaaaaaagtttggactttcagatgacttatttgacattagcaatgttagattcttgctccactgcagctctgcctggccactctctgttct

SEQ ID NO: 162954 - DNA, 201 bp, Homo sapiens
caggctggagtgcaatgggacagtcatagctcaatgcagcttctaactactgggctcaaatgtttctcctggctcagcctccctagtagctgggaccacargtgcacaccaccatgcctggctaacttatttatttattttttgtagcaatgggagtctcgctatgttgcccaggttggcttttggcattcttggtaccta

SEQ ID NO: 162955 - DNA, 201 bp, Homo sapiens
ttgatttttccttcaccagagacctgcgtgtcctctgggtcagctggtacctcttctgtaagctcgggctcttatgaaaggggacataggcttttgcccawtttttttttttttaaaggcatggtttcttgtatttctgtaggaattttgtatcctttcatggaagtgcatctgtagtgtttctcagcagggtatattcct

SEQ ID NO: 162956 - DNA, 201 bp, Homo sapiens
ggtatctcaactcttcgcagttctattttatgcaaatagaggcagtggtggctaattgatgattccatcatccagaatatcttatgcctctagcttctgastgacggagactctgttttttaacagatgatctgaaatgagtttgctgtaggttctttgctgtcttggtcacccctggacatgattggtattctgcatgac

SEQ ID NO: 162957 - DNA, 201 bp, Homo sapiens
gtcattaggaattacttgtgttaatagtggtggtgagatttcataaaagtcaggtggaaaatttccatcaattaatgtaatattatatgcttatcacagaygcctaagttagacatggtacttaaatgtggcaattaataaaagtattacaaaggtgaaaatggatttcttctaaaaatggaattaatgatgatggagtgc

SEQ ID NO: 162958 - DNA, 201 bp, Homo sapiens
attctttggcctgctgaaaagatctgatattttaacagattgtacccagaagggaagagtcatgaaaatgaaatactttgagggaattcatagctttccasgtggggaaaatgagacctgaagtaaaaaattttgaatgcactgttgttagcagttgaaaaccgcgtaagagtttgcagaatggaatggtaggctgtcaca

SEQ ID NO: 162959 - DNA, 201 bp, Homo sapiens
cctcctctgtctcccctgtgtttgatattttcagacactgcggtaattttattcagcaaagctccattcagtcattacagaatccatcaaagaagtgtccmttgctagaatgtgcaagtttttattgagcatgtattcagggacgataaccaagcagacggtgctgctatccctaatctccatctgttagtgaagtcaggc

SEQ ID NO: 162960 - DNA, 201 bp, Homo sapiens
tttaatttctctcaacagtgttttatagttttcagggtacagaccttactgacattttattaaaaatctccctagtatttcatgttatatgttgttattakgtaaagtacttcttttaaaaagaaattaacatttcatttgttgctactatgtaaaattatagtttatttttgcatactgacctacatttggtgagcttgg

SEQ ID NO: 162961 - DNA, 201 bp, Homo sapiens
ttatcagaaaggacacattcttgcctattgctttgttcctttgtttcttatttatttccttctctgtggaatgttagggcactgatcatgtgctgggtccygtggatacaaaggggaatcctctgtggattcttctctctggaagcttgccctccaatgtaggagaaatgtacacgttcatatccacagtgcaaagtatag

SEQ ID NO: 162962 - DNA, 201 bp, Homo sapiens
ctgtgataggatcagaaaggttaaacagtttacccggagtcataaaatagatgtttaaaatagttgcagagtaggtacacaaagatatgtcttttgacttrtctagatggaccccataatgcagaagaacgagtcttggccatttgcatactgacacttgggctagcaggccagaaggttctacaataggcctggcctcaa

SEQ ID NO: 162963 - DNA, 201 bp, Homo sapiens
ataagtaatccagattgaccccagaagaggtagaaaatttaagcaggttgatttttatagaagaaataaagctatgaaagagttacctcctctcaaagcawtgtctagtttcaccaagattatctaccaaatatttaaagagcagataattccagagcaggaataaatggctatttccttgacatagcatatctatttgaa

SEQ ID NO: 162964 - DNA, 201 bp, Homo sapiens
cacatccaggagagagattttagggatagttcctactggcttcatcactctagggtttaaatctgggctttgctgcctaccagctgtgtggcccttccagygtgaacctgtccagacctgagttttagtatacccacagtggggaaaaaagacctacatcacagggttattgttaggcttaaaggacgagacagatgcaaa

SEQ ID NO: 162965 - DNA, 201 bp, Homo sapiens
attcaatcaatatttaccgaacgactagatgtgctcagcacggtgctaatggatgattagaaaagttaataatctcagctcttaaggagtttatagtctaktcaggaagccaaaaataacacagatgagaataattaagcctccaatctgatggcactgactgggggtgcatttatcaagaatttggaagcacgtaaccat

SEQ ID NO: 162966 - DNA, 201 bp, Homo sapiens
tggcacatgggacggtatatttgtgctgtagggcacagcgctctgagctcccggagagcagattttataaacactaaggtggttttttttttttttttttkgccaactttatctgtcaatttacaaatagttgctggtaagtgctgttttttcctcctgaatttagttaaaccaccaagggaggctttcttacactgggat

SEQ ID NO: 162967 - DNA, 201 bp, Homo sapiens
atttaatccatctgattttgatccaaatataatttactcacaatgatggagaaatatttgatatccacggaaatctattgatgcacttaaagtttttctcyagggaaataagaaatcacattttttcaagggtgaatcataaacctacagtgtctaatttttctgcttatttaacaaaacctgagttaagtatcaaattgg

SEQ ID NO: 162968 - DNA, 201 bp, Homo sapiens
acagaaaaattgagtggaaagtacagagttcccatacacactcctccctgagtttcccctgttaacgtcttgctttagttacaattgatgagccaatatasatacattattattaactaaagtctgtagtttacattagagttcatttttgctatcatccagtctgtgggttttgacagatgcatgatgatatgtacctac

SEQ ID NO: 162969 - DNA, 201 bp, Homo sapiens
tatgtgtgtccagtggctgactttccaagcagttattagaggagatctgagtttttagcttctgcattatgattcatgttgaatatttatggaagagaagygtttctacaaatatgtaaaaatattggtgagtgaaagaaatggctcccagtatgacagaagaaaatatcctaaagagatccacagttatctgcagtttcc

SEQ ID NO: 162970 - DNA, 201 bp, Homo sapiens
gactctccccccacgtacaatagtgtgtggatggcagagatgcattgggagctgaaataattcatttgtcctttctaatgaatagtaataatttataattygtactaatcaaaaacctttcatccacaaaagccaacaagttttataaacattctcctctcaccagcctctacagtaagtgcctgacaaaggtaggatcgt

SEQ ID NO: 162971 - DNA, 201 bp, Homo sapiens
gacgatttccggcatgtgctacaggggaaaatggtatcaaatctacacaatgaccgggttctatggagtggctcctctgtggggaattttactttattctytttgccagaaaccttgaccccaccctgtctgtgaagtagcagcctgctttgtaaaggggcgctgatcaagacgaaggctattatcgagctgggatccaaa

SEQ ID NO: 162972 - DNA, 201 bp, Homo sapiens
gtacaccgcatataacacaacttagaaaaatgctatcgataagaaatggtctttcagagacgatttccggcatgtgctacaggggaaaatggtatcaaatytacacaatgaccgggttctatggagtggctcctctgtggggaattttactttattctctttgccagaaaccttgaccccaccctgtctgtgaagtagcag

SEQ ID NO: 162973 - DNA, 201 bp, Homo sapiens
ccccatttgagatgaacatcatctgtaaggcctccccagtgcctggctccaggcctctcttcttcctccaaactttgtcgtgctcaagaaagtgcctattstgtgtatttggcagtcatttcttgccacgtgatatctaataacttccatggatctgtcctgtttctgcaactggaagaagatgagcggaacctcttttag

SEQ ID NO: 162974 - DNA, 201 bp, Homo sapiens
tggattaatggcgtctgtattcacgatgtttcagacctgtcagagcttggaaatagcatttaaatgtattgcttaattttaattttaaaatactttctctragaattagatcccagtcctaagtgagtactttgaatttcaaagaggggatttaggccaaggtacagctaaattttgtcctcttgaaagacctgaaatcca

SEQ ID NO: 162975 - DNA, 201 bp, Homo sapiens
taggcattacaatcttttcttcaggcaaaaattttgcacagaagtctattaaaacagtgtgcaagatgctgtgattgggagagggggcttcccccagcacygtcctcagtattctggccctagagtgctgcctcaaaacctaccaggagcttagtctgtaaagcagttgaggactagggccaagttaactttgggctgaaa

SEQ ID NO: 162976 - DNA, 201 bp, Homo sapiens
ttaaggtaataacacaattttgatgtctgtggattaatggcgtctgtattcacgatgtttcagacctgtcagagcttggaaatagcatttaaatgtattgsttaattttaattttaaaatactttctctgagaattagatcccagtcctaagtgagtactttgaatttcaaagaggggatttaggccaaggtacagctaaa

SEQ ID NO: 162977 - DNA, 201 bp, Homo sapiens
tcttggctattaacatcttagtgtagtacatttgttatcactgatgggccaatactgatatgttattattaactaaagtccatagtttacattcgggttcmcttttggtgttgtacatgctgtaggtttgacaattgtataataagtgtatctaccattatagaatcatgcagaatagttcactccctaaagattccctgc

SEQ ID NO: 162978 - DNA, 201 bp, Homo sapiens
taatttttctgcttatttaacaaaacctgagttaagtatcaaattgggcagttccagatcatttgtttttaagttttttagtcttttaaactatgcagagraaattttattcaaagaggtttttttttccttattctgacagttttatctgctatcctgtttttttccctaaacagtgatttttgaagatttaaggtaata

SEQ ID NO: 162979 - DNA, 201 bp, Homo sapiens
gaagacattcagtctccttggtaaacttgtacatgcctttactgtcagccttacttaaccctttacgctatataatatgctttctctcttaattttctcamgagtttgcaagccccttgaggggtaaagatggtatctcaactcttcgcagttctattttatgcaaatagaggcagtggtggctaattgatgattccatca

SEQ ID NO: 162980 - DNA, 201 bp, Homo sapiens
gttgcatacatagcatttaaattgtgactctcatccaacttatcactcagatacatttttttctgtgttaaaaatataaagccatatttccagagattttyaaagggcccaaaagattatgaatttgatcttaacatcagcagatgacaatctagttttaacaagttactttgaattagtcaaatctaaaactcactttag

SEQ ID NO: 162981 - DNA, 201 bp, Homo sapiens
tccagtgatgatcagatgtgaacataaacacgttcaggatcatatacattgctggatttgccatatctgactttgtctgtttctaggatattcgaaattcwgtgactcctattaatgtatcattctcctggggcatcacagctgaggctggtgtaggctcactagtagcccagcctggaaaacaagctactcagcacactc

SEQ ID NO: 162982 - DNA, 201 bp, Homo sapiens
gaacctgggaggcggaggttgccgtgagccgagattgcaccattgcactccagcctgggcgacaaaagcaaaactcttgtctcaaaaaaaaaaaaaattckgtctaaattccagtgatgatcagatgtgaacataaacacgttcaggatcatatacattgctggatttgccatatctgactttgtctgtttctaggatatt

SEQ ID NO: 162983 - DNA, 201 bp, Homo sapiens
ataattgacatcttacagagtctttcagtttatgaacatgatgtatctttccattgatttctatatgctttaatttctctcaacagtgttttatagttttsagggtacagaccttactgacattttattaaaaatctccctagtatttcatgttatatgttgttattatgtaaagtacttcttttaaaaagaaattaacat

SEQ ID NO: 162984 - DNA, 201 bp, Homo sapiens
tgtgtgtattctaaagggggaagatatgggaagatgttgaagaaaatctaaattttgtactactgtttgtcattttatacatggattctttttcactaccktctccttttttttttttttttttttttaaatgagacagagtctcactatgttgcccaggctggtcttcaactcatgagctcaagtgaccctccctcctga

SEQ ID NO: 162985 - DNA, 201 bp, Homo sapiens
cagcgctgatgacagagatgttctgtgttggtaccatagtcagccgaaagtctctcgtgaaagttttccctcttaaatgtttgtggtggtagttcaaaatkgaattggtccacaaaggtattgcacaatagaagatgcagtatcttaaccattgctatcatttgttgatgaccagaagttcaatcacagaaattgatacca

SEQ ID NO: 162986 - DNA, 201 bp, Homo sapiens
tgattgaattatctcagcacccttgtcacaattaaatcctgtcttctctattctgttccactcatttgtagaacttatgccattaccacactgtcttgatkactgtaaccttacagtaagtcctgaaatcaggtagtggaagtattccaactgatagttccaaattgtttttgctattttaggtattttaatttttcactt

SEQ ID NO: 162987 - DNA, 201 bp, Homo sapiens
ggtagaatccctttcctgtatttggtgcttggtggtagtcatttcccccgctgtgttttcggaactcctagcctggttatagaagctgctggcatgatcaragttctcagattccagctgctttctcctggatatcctatcaaaatgccctctccgttcagtgagatactcgatgactttgactcatgatgccaaatgatt

SEQ ID NO: 162988 - DNA, 201 bp, Homo sapiens
tatagcgggaaccactgagcagcgctgatgacagagatgttctgtgttggtaccatagtcagccgaaagtctctcgtgaaagttttccctcttaaatgttkgtggtggtagttcaaaatggaattggtccacaaaggtattgcacaatagaagatgcagtatcttaaccattgctatcatttgttgatgaccagaagttca

SEQ ID NO: 162989 - DNA, 201 bp, Homo sapiens
agaactatcaattatttgatcttacagtcattatacatgtagactataaattcatgggatttaatttaatgaacaggttcctgcctcagaactttgaacaktatgctgtgggaaggaaaatcttttcaatttgctttacagactttgagtatttgtaagttcaccttttaaacaattagggaatatttacatgttgaggat

SEQ ID NO: 162990 - DNA, 201 bp, Homo sapiens
gctctgagctccttccttgcaggttgctatggtctgaatgcctatgtgcccctactgaattcatgttgaaatcctcacccccccaggtgatgggggattakgaggtgggggctttgggaggtgattagtcatgagggtggaacacgcatgagtgggattagtgcccttgtaaaagagaccccagataactagctagtcttt

SEQ ID NO: 162991 - DNA, 201 bp, Homo sapiens
caggctcctgaaccgggctaaggagcttgaacctgatcctgcaggtatagcgggaaccactgagcagcgctgatgacagagatgttctgtgttggtaccayagtcagccgaaagtctctcgtgaaagttttccctcttaaatgtttgtggtggtagttcaaaatggaattggtccacaaaggtattgcacaatagaagatg

SEQ ID NO: 162992 - DNA, 201 bp, Homo sapiens
ggaaacccactcatcttgcaaggctcaactctaatgccaggaccaagtgctttcgtgtgaatcaccccttatgattctcacaacagctccataagataggkgtaatttccattcattttttttttcagagaaggaaagcacaactcagaggggttattgacctgtgcaaaggaggagttctgggttggggggagtggaacc

SEQ ID NO: 162993 - DNA, 201 bp, Homo sapiens
ggaagaagcacatggactgtggtgggagatgaggctgagaacattgggggccaggctcctgaaccgggctaaggagcttgaacctgatcctgcaggtatarcgggaaccactgagcagcgctgatgacagagatgttctgtgttggtaccatagtcagccgaaagtctctcgtgaaagttttccctcttaaatgtttgtgg

SEQ ID NO: 162994 - DNA, 201 bp, Homo sapiens
gagtcctgtgttcctacggaaacccactcatcttgcaaggctcaactctaatgccaggaccaagtgctttcgtgtgaatcaccccttatgattctcacaayagctccataagataggggtaatttccattcattttttttttcagagaaggaaagcacaactcagaggggttattgacctgtgcaaaggaggagttctggg

SEQ ID NO: 162995 - DNA, 201 bp, Homo sapiens
ggtagaaaagtgagcccaggtagtcacaggcttgacccaagcctggaaggaggagcaggagttagctatggagaagaagaggggagagaagggggacactsaggagtgagaatcacctgtgcagtggtaccagggccagagggagtcagtttggacctgctggctgcaactggacggaagaagcacatggactgtggtggg

SEQ ID NO: 162996 - DNA, 201 bp, Homo sapiens
ctcagtcctctggacctttgagtcctgtgttcctacggaaacccactcatcttgcaaggctcaactctaatgccaggaccaagtgctttcgtgtgaatcaycccttatgattctcacaacagctccataagataggggtaatttccattcattttttttttcagagaaggaaagcacaactcagaggggttattgacctgt

SEQ ID NO: 162997 - DNA, 201 bp, Homo sapiens
attttgcaagaaatctattattcgaggatgcagagatgatttttttttggttgagttaaacatttttatggattagatatgaattcagtaaaaataattgwattgggtaatatgaataattcatgacatgtaatttcacatcagttctaccttaaaaataaagctattggtttatgtactgggaagatgtattttattatt

SEQ ID NO: 162998 - DNA, 201 bp, Homo sapiens
gtgggccgaggaatgctcaagggtgtctttgtgagtcattgcgagaaggtccatgacagaagagggaaagaaccaaagagagagcaatggagaagaaagtwgcagatggttctctgtgatcttcaagagccaggccctggtggtattttctgtttcagctactgtgacgctttttgtggaatcctggatgaggcctgaact

SEQ ID NO: 162999 - DNA, 201 bp, Homo sapiens
gatctgatgatgagtgggtggggtaagatggacaaccctgtttctgcctttctacctcagagttaatgccctgaagatgccactgggggaatcagctctgbgcacagcttaatccttagtgcttctggtgggccgaggaatgctcaagggtgtctttgtgagtcattgcgagaaggtccatgacagaagagggaaagaacc

SEQ ID NO: 163000 - DNA, 201 bp, Homo sapiens
acaaactggatggcttaaaagcaacagggatttattctctcatggttccagagggcagaagcccaaagtcaatttccctggacccaaatcagggtactagstgggctctgctcccccaggggctccagggaagaatccctccccggatcttccagcgtctggtgggtgccaccatgcatggcctgtggctgcatcactcaa

SEQ ID NO: 163001 - DNA, 201 bp, Homo sapiens
ggtggatgaggcctagggggctgggggctccatcacaacttacacatgcctacccgccttcctgccccagagatctgctgctcagccatagaaatggggaytccatgggggaatgtggaaatgggggctacttaaggagggcaggataggcaggctagctttcacccctgggtggggatttttgggaaatggagccagtac

SEQ ID NO: 163002 - DNA, 201 bp, Homo sapiens
agcctgcagggccctggagggagatgtcatgattaacttaatgctgtcacttgtgccgcacacagcggggcccaccccgggggacagcgaaggagcagggsggctgcgaagcccactgaaatcaagacgtgaatctgaacagtggcggagggagacctcgcagaatgcatggagttgtccgaggggagtgacttgcaagtg

SEQ ID NO: 163003 - DNA, 201 bp, Homo sapiens
atggaagaggtgcataggtcaggtatgtggaaggggtgcagagcttccaggccctttggggtgctaccctccctcacagcaccctgatgtgtttaccaacmtggaagctctaggaacccattgtttagggtttttatggaggcttcattatgtaggagtgattgattaaatcactggcctcttccctcctcagaggttgga

SEQ ID NO: 163004 - DNA, 201 bp, Homo sapiens
tccatgaaatacgtaaataatagcacagttggcagaaaccacaaaggtggtatggaaatgactaatatttgagaagcactagtttgtggcacatgggacgrtatatttgtgctgtagggcacagcgctctgagctcccggagagcagattttataaacactaaggtggtttttttttttttttttttgccaactttatctg

SEQ ID NO: 163005 - DNA, 201 bp, Homo sapiens
agtgatttttgaagatttaaggtaataacacaattttgatgtctgtggattaatggcgtctgtattcacgatgtttcagacctgtcagagcttggaaatarcatttaaatgtattgcttaattttaattttaaaatactttctctgagaattagatcccagtcctaagtgagtactttgaatttcaaagaggggatttagg

SEQ ID NO: 163006 - DNA, 201 bp, Homo sapiens; identical to SEQ ID NO: 30280

SEQ ID NO: 163007 - DNA, 201 bp, Homo sapiens
gtgatttcacttttcatttatttcatttttatgtccattgtggcttctaacctcatatttcacacatagcaggtactcagtaaatacttaataaatcaatsaatgcaagtaatgactatgtatatactagtggagaaggaaggaggggagggaaaggagaggagaggcgaagagaggtgggccaggcagaggagagaagag

SEQ ID NO: 163008 - DNA, 201 bp, Homo sapiens
gctggattgaatggcagttctatttttagttctttgagaaatctccatactgttttccgtagaggttgtgctcatttacattctcaccaacagtgtgtaarcattcccttttttctgcacccttgccaacatctgttatttttttgactttttaatagtagccattctgactggtgtaagatgatatctcattgtgccttt

SEQ ID NO: 163009 - DNA, 201 bp, Homo sapiens
ggtactcagtaaatacttaataaatcaatgaatgcaagtaatgactatgtatatactagtggagaaggaaggaggggagggaaaggagaggagaggcgaaragaggtgggccaggcagaggagagaagagagggagggagagggagagagagagggagagggagagggagagggagagagaggagaatgagaatgagaatg

SEQ ID NO: 163010 - DNA, 201 bp, Homo sapiens
tttaaatgaagttcatctctcccctcatgagaaaggagatcatgtaaggtctcttgtcacacggggacatggaattctttttagttaagatggcagatttsgtgagtggttgagaaccatggctccagagtcagactgcctgggttgaaatactgcctctcctctcctttgctaagcacccttcttaccaaatgcagcaga

SEQ ID NO: 163011 - DNA, 201 bp, Homo sapiens; identical to SEQ ID NO: 30281

SEQ ID NO: 163012 - DNA, 201 bp, Homo sapiens
aaaaaggaaaattatgctttggcaaagaacacctatggcctattttgaattctcctcccccacacccatttttcctttctccctccctccttctcgtcttkccttcctcctttcaaaaaaaaaatcctgactgtacttcattgctaagcagcttaaacagcccgaatgagacccctccatctgacctccactcaggtttta

SEQ ID NO: 163013 - DNA, 201 bp, Homo sapiens
ctctgtggccgtgtgctcacatgcttcaagcagcctgcaacaggaaagaattagggcacagctgaaatccaaaggggagaagaagcaggctgaaatccacrgggagcaatgtctatttcttagtctgtctcctgccccaaatagcccctctctcctttcccagcttgtgttgatgcgtgtctttccctggcagcagatgtc

SEQ ID NO: 163014 - DNA, 201 bp, Homo sapiens
agcccttgggatccgattttttatttgctatttggatacagctgtaagagatgacagattattttacatccctcagttctccgaacttgccttggaccagraatgtcaggccctcaccgtgcctttttctcttctccaaactctctggtgctgcctggagcagatggcaccccccacagacgtcgtccttattgttgtcac

SEQ ID NO: 163015 - DNA, 201 bp, Homo sapiens
tcaagatacttggagtcagtaagagagagaaaagttgccgggagctaggctcaggtcattcctcccctgaagtggaacgtggaaggggcatgtgagactgrctgtcagtacagccctgggggtacctggccccacaggctggagtagggagctgggccggggctaccctatgcagaggcaggccctggggttgagcagcaa

SEQ ID NO: 163016 - DNA, 201 bp, Homo sapiens
ggagtgcttgtgttgggaactcaggctagtctggtgcttgccggagatgcaggatgctttgagagctgcaggcagtgctgtcaacacagaggcatgtgttsacgtgtctgatcagcaaccctaagaagtgggtcgggcattgcgggctggtgaaggctggagagagggccagggttgtctttccgtctgtatcaccaccag

SEQ ID NO: 163017 - DNA, 201 bp, Homo sapiens
tagttccgccttttccagaatgtcaagcagctgtgtgattcgagaatgggtggaagcatacagtaaatagcatgtttagataggtctttttcacttagcartatgtatttaacggtactccatgtctttctggggcttgatggcttatgtctttttatcactgagtaataatccactgtttggaggtaccataggttattt

SEQ ID NO: 163018 - DNA, 201 bp, Homo sapiens
ggtgctgttctcatgatagtgaataagtctcacgagatctcatggttataaaaaggggagtttccctgcacaagcactcctctctttgcctgctgccgccrccatccatgtaagatgtgacttgctcctccttgcctcccactgtgattttgaggcttccccagccatgtggaactgtaagtaggataaacctctttattt

SEQ ID NO: 163019 - DNA, 201 bp, Homo sapiens
agaccaaagaatgacttggacaagtccagcttggcgatagatgagtttattaggacttacatagcaggcactcctgggcggcaggacagatctagagatcyctgctgctcccgtctctaaactgcctttaagctaatttcctggctctttgcctactgtgtttgggcaatgagactgcttgtcttgctacgttctcagata

SEQ ID NO: 163020 - DNA, 201 bp, Homo sapiens
tgttgtcttctgggaccttgctggtgctgacagtggtgatgaggctggtggatccttgctcaaaagcctccttaaggcttcttctcacagagtaatctaargaactggatcaggttcccagcatttcatggctggtctgtatcctcctaactagaatgacctgtgcatgaataacacaattcagacctcctagtcctgcgt

SEQ ID NO: 163021 - DNA, 201 bp, Homo sapiens
tgagatttatgaaatgactaggcattcgggagaagatgaggaagcatgtttccattgaatgccatcagtcataggttgattctgcacttctgagctgcacrtgtgtgagctcagggtactgtgtgccagggcaggaggcaagagacaagaggcacatggcgttgagtgtaagattgggcaatgcaggtgcataaaagctgc

SEQ ID NO: 163022 - DNA, 201 bp, Homo sapiens
aataatgatgcattgagaaactacagagaatgccattgcaatttctaatcagcattggagtgggggtcctagctcatgcagtaagtcaaggaaagaatacrtgtatgctgattgaaaaatccactagatacctatttatctttccccagccggacaccattcctcttctcccttgaagtggtcatgtgactgagttctggc

SEQ ID NO: 163023 - DNA, 201 bp, Homo sapiens
gaactggatcaggttcccagcatttcatggctggtctgtatcctcctaactagaatgacctgtgcatgaataacacaattcagacctcctagtcctgcgtrggactcggggcacagactgagtgcctcgagccaagccacaggtacaccaggcagagggtcttcagttttgtgtgacttcacccactaaatctgatttctc

SEQ ID NO: 163024 - DNA, 201 bp, Homo sapiens
cagagtgatattcctcagtgtacctcgggtcatttcccttccctgtgtcagcatcttccacggcatctctactgtatgtggaatgaaatctgaactccttygcatggtctaccaggtccttcaaagtcatgtcaccatcttcccatgagacatctgtaacttctaatcagagagcctaattatcacagtatatctaagatg

SEQ ID NO: 163025 - DNA, 201 bp, Homo sapiens
caagcttagtttagcactttagtattagcccatgtaattaaccaccttagcaggtattttaaaaacatgtatgattattgaaatagatgcttaaaaagtaytgaatacaattcagtattcataaatgatttaaaaacacatataaaagatgactttcttattctgataaggagtacatgcaaaagcctatagcaagcattg

SEQ ID NO: 163026 - DNA, 201 bp, Homo sapiens
ctatgtgactggctccttctcctttaagtctcagctgaagatatcgtcctcagaaaggtcttccctgcccaccctaattaaagtagcagtcccagccctcrcccccatgaacttctgtactatcattctctccttgcttcctaactcatcatgaggtaaaatcacatgtttaattgtttattgcttattctctgactcctc

SEQ ID NO: 163027 - DNA, 201 bp, Homo sapiens
aagcccaaagtcaatttccctggacccaaatcagggtactagctgggctctgctcccccaggggctccagggaagaatccctccccggatcttccagcgtytggtgggtgccaccatgcatggcctgtggctgcatcactcaagtctctgcctctgtggccacctgcctcatcctcttctgggcatctgatctcgtcctgc

SEQ ID NO: 163028 - DNA, 201 bp, Homo sapiens
atgtgctacatgaaagaatccactcgcaaaaaaccatagagtgtatgattctatttatttgaaatgtccagaatagggaaagctgtagagacagaaataasacacattagtcattagcttggacgggggagatggtgggtttgggaatgatagctaaagtgtatggagtctctttttggagtgataaaaatgttttaaaat

SEQ ID NO: 163029 - DNA, 201 bp, Homo sapiens
taccttagtcaaaaagaaaaatcccccctccccaccgtatgcctagcaatagggataaaattcttcttagtccctttctgtagctttgaggttaaaattaygggtgttattatgaactctaaataagaacctgtgaaataaatattttaaaagtgcccatttctgggaggcaggcacccatatttctgtgtatgcagccac

SEQ ID NO: 163030 - DNA, 201 bp, Homo sapiens
tcagggtactagctgggctctgctcccccaggggctccagggaagaatccctccccggatcttccagcgtctggtgggtgccaccatgcatggcctgtggytgcatcactcaagtctctgcctctgtggccacctgcctcatcctcttctgggcatctgatctcgtcctgcatctctctaataaggacactgacagttgca

SEQ ID NO: 163031 - DNA, 201 bp, Homo sapiens
cttcttttcttcattggtctctgatctgtcttcactctcccctgcctgagctgttcagagcattatcaacatctacctaaaatttgaatttcattctctcrctgtttagggaacagcagcgacttggacctgtccaatgacactcttcaatgctggacacttgctgtaatttgctgctggcctcagtgtttcagatctcca

SEQ ID NO: 163032 - DNA, 201 bp, Homo sapiens
gctactaaatggctgcatgatcttgcgtatctgctggagcctctgtctcttcattagtaaaagtagggaatgtaattcttaccttgttgggtggggtgatrattaaagcgtgcattgcgtgtcttccatgtagccactcagcataactttgttaaggaaattaattaatacagagtagctgactctccagacatatgtaat

SEQ ID NO: 163033 - DNA, 201 bp, Homo sapiens
gggtgccaccatgcatggcctgtggctgcatcactcaagtctctgcctctgtggccacctgcctcatcctcttctgggcatctgatctcgtcctgcatctytctaataaggacactgacagttgcatttagggcccacccaaacaatcaagaatactcccgcatctcaaccccccttatttagttacatctgtgaaatctg

SEQ ID NO: 163034 - DNA, 201 bp, Homo sapiens
ctctctcagtggcactgctctcctctcaaatcccagaagccgcagtcagggtcatctttgagccttacctctacatttgagttgtccttcctcccatgagycccgatgacttcttttcttcattggtctctgatctgtcttcactctcccctgcctgagctgttcagagcattatcaacatctacctaaaatttgaatttc

SEQ ID NO: 163035 - DNA, 201 bp, Homo sapiens
cctttactgaacttcagaagttttagacagtcttttaaagttgatttcaaaggacctgggcatctctacattcccgtcagactaatttgacttgtggcttrgtctttcaaagatttttggagctgtaagtcttactggcaccatgtaggtggtagtcaggacagttctgctagtctcattgagcatgcctagtaactggaa

SEQ ID NO: 163036 - DNA, 201 bp, Homo sapiens
cacaaaataatcctggccaacatagggtgatgtttgaatgaatgaattcacatttctccacgggccacactcctactcatctttcagtggcaacaggggartgtttagtggctcccatatgtgatgtccagaccccttgtggaatgcaagatgattttacggtgtatccagatgaatcttttaaatctcagttatgtgttt

SEQ ID NO: 163037 - DNA, 201 bp, Homo sapiens
tagggagctgatgtgcgggcaaaggttataatccagaaaatgctctacaaatttaagtaaggttttggcagaattgggttgtggggagcaagtgccaggcmagtttccagtccttgccaaactgcattttctaagtgatgaaagatctggcattttattcttttccattttttaattcactgggtttgttcccttgttctt

SEQ ID NO: 163038 - DNA, 201 bp, Homo sapiens
ataatattatgaactcatggatttacacacatttgatgggtttcagtccattgcaattactatctttattgaaactcttattttcctatctttgaccagcyggagctccttcacattggctctggggtccttttaccatgacttcaggagctttcctatcttctttaccatctggtataggctcacgttgtctatttcctg

SEQ ID NO: 163039 - DNA, 201 bp, Homo sapiens
tccagaccccttgtggaatgcaagatgattttacggtgtatccagatgaatcttttaaatctcagttatgtgtttataatatatattaagaaaactgcagwgaatgtttgaagcccacaatttcctgaaggtgatggctgaggtgaagagcaggaaatggaacctacacacacagctgcattccttgcagagatgcctctt

SEQ ID NO: 163040 - DNA, 201 bp, Homo sapiens
caatctgtctcatctccccacgtagtgagctcacagcacttcaccaagagtgctgcccaccaagaactcacagcacttcaccaagagtgcagtcaatagtsttttatgaacgttgggaagaatatggttaatgcctgagaacaaagaccagaaatgtcatcttttcgtgtgaccatcatgatacagagaagttaacagagc

SEQ ID NO: 163041 - DNA, 201 bp, Homo sapiens
atggccacagatgtattttagaaaaatcagtctagcagaggccagatggatggagctgaggaagcaggcactgatgttcgaggagtttgaaggctcttgcrgaagtccaggcagcatcatgaatgagtcatctcagcttggcatgcgaacagtttttgtcatcactcctctgtttataatgaaatgctgagaatgtctgca

SEQ ID NO: 163042 - DNA, 201 bp, Homo sapiens
tggaaactgaggcccgtagatgttaggcagtttaaacaacatacattgctaataagtagtggagctgggatatgaacgtagtcagtttggctatagagttkctggccttaactcctatactctttttccatttaggttattgttaaaaatgaaacagtatgagaacagaatgtttttataatctgggtgtgaggaaagcca

SEQ ID NO: 163043 - DNA, 201 bp, Homo sapiens
agagaggctgaggagtgagtgtggtataatggcatgggcctcaaagggcttttccctaaggagaggggaatggtggttttcccctgtatgatttctttggkgcaaaccagacccgtttttctgtaagcacaaaatttgtgcttttgattagcagaatatctgctcccatttgaggaggcatctgtctgctatccgtgtgac

SEQ ID NO: 163044 - DNA, 201 bp, Homo sapiens
tcaaaattcaacaatacaagcaaatcacctgattaaaaaatggacacgagattagaacagacacttcaccaaagaagtcccttcacctacaggatgccttygtatacagaaggcaaataggaacgttaaaaggtgcccagcatcattagtcattggagaaatgcagatgacagccacgttgtgatgctactctacagcagt

SEQ ID NO: 163045 - DNA, 201 bp, Homo sapiens
ttacggtaacccaaagaagtagtaactgttatcaccacttatagatgtggaaactgaggcccgtagatgttaggcagtttaaacaacatacattgctaatragtagtggagctgggatatgaacgtagtcagtttggctatagagttgctggccttaactcctatactctttttccatttaggttattgttaaaaatgaaa

SEQ ID NO: 163046 - DNA, 201 bp, Homo sapiens
gccattgataaatatggtgacagctccaagaagattggcaggcgagagagaggctgaggagtgagtgtggtataatggcatgggcctcaaagggcttttcmctaaggagaggggaatggtggttttcccctgtatgatttctttggggcaaaccagacccgtttttctgtaagcacaaaatttgtgcttttgattagcaga

SEQ ID NO: 163047 - DNA, 201 bp, Homo sapiens
gtatatctctttgggtggagggcaggtgggcaagtctagctctcttgccatcaggtgacccaggacaagctctctgttagctttctgtctttataatggcrtcatggccactgggatcagctgggttgggcaggagaaagaatggccaagccatatgcttggggcaagtccttctgctgtcacgttccttttgcagttctg

SEQ ID NO: 163048 - DNA, 201 bp, Homo sapiens
tcccccgctctcgccgctcccgtctgccccgctgcctcggcccacgtgatggctgttcgggccccgccgagccatcttcccgttgctatggcagccggcgyggcgagcccgcccattggctgcaagcgaggaggaataaaaggctctcgtgtcctaggtctagtgccctgcgccatggccccgtgcaggtagaggcctggg

SEQ ID NO: 163049 - DNA, 201 bp, Homo sapiens
tgccaggcactgtagtaatttactaatgcatttaatccttacggtaacccaaagaagtagtaactgttatcaccacttatagatgtggaaactgaggcccrtagatgttaggcagtttaaacaacatacattgctaataagtagtggagctgggatatgaacgtagtcagtttggctatagagttgctggccttaactcct

SEQ ID NO: 163050 - DNA, 201 bp, Homo sapiens
atttttttcttttgttgcaattgcttttggcatcttcattatgaaatctttgcccattcctatgttcagggcagtataggttgtcttccagagtttttatrgttttgaggtttacttttgagttgactttttctatgtggtgtaaggaatcagtccagtttcaatcttctgcatgtggttagccagttatcccggcaccat

SEQ ID NO: 163051 - DNA, 201 bp, Homo sapiens
ggcagcactgaccgtgcatccacctgaggctggagattgtgatttttgtcatggcccccacctacctaaacaactgtgcaactttcttttgcagtgcttgrcaggctgacgtagaagtgcaaaaatagttgcttagagcgatccaggatggggattttgtgggggcaggtgtggcaggggtttaaggggaaacgagagttg

SEQ ID NO: 163052 - DNA, 201 bp, Homo sapiens
ttgggacaactgggtagccatatggaaaaaaaggttggatctctacaccgtaagccaggataaatttcagtgtttgatggaataaattccagatatatgaygataatagctcacacttgttaagtgtcttgtatgccaggcactgtagtaatttactaatgcatttaatccttacggtaacccaaagaagtagtaactgtt

SEQ ID NO: 163053 - DNA, 201 bp, Homo sapiens
ttgatggtagtgagcagttccctcactgctctcttacacagccagcctcttaaataatccccactcttaccctctaagccccaccttagacactaatacaytctaaacctcttccaaagaagcagaaagaatcagtttcctgcctgggaacagtaaaccttgataactactttctctctagatgtaaaaggtttggctggt

SEQ ID NO: 163054 - DNA, 201 bp, Homo sapiens
gggcctggagaaggacttgtgggcagcactgaccgtgcatccacctgaggctggagattgtgatttttgtcatggcccccacctacctaaacaactgtgcractttcttttgcagtgcttgacaggctgacgtagaagtgcaaaaatagttgcttagagcgatccaggatggggattttgtgggggcaggtgtggcagggg

SEQ ID NO: 163055 - DNA, 201 bp, Homo sapiens
tgtgataatgggtcagaaagtataaggtttacaaagtagctgagatgccacctgggacctactattaaaagccagggcagaatcctacaactaggaggtcmtaacagtgcttggaaggccattgaagctacagtcaggggcagaccaagggtctgggagcttgaagaagtggcggtcaaggcaaaaatggttcaaaatata

SEQ ID NO: 163056 - DNA, 201 bp, Homo sapiens
ggcaaaaaattaagactgtaccttgatggtttctcaatttttctgtgagggaggaatgagcagtgaaatgatgggggtgggagcctgaggaccgtgaagayagcttgaaatagataacttggcaggggaacgggaggttgctggctagggcctggagaaggacttgtgggcagcactgaccgtgcatccacctgaggctgg

SEQ ID NO: 163057 - DNA, 201 bp, Homo sapiens
atcattttatgtcagttgttagtaattaaatttatacaatttaattacgttttaagtgaaccagtgaaatatagatgcaaaataaaaagctttcgtttgcrttaaaattaagtcaaacatttcagaaaaagttaataaagggtagtcacttaaaaaatgccatttgaaatgggtacagataagacagctcctcatccctta

SEQ ID NO: 163058 - DNA, 201 bp, Homo sapiens
catgggaaaagcctttatcctgaccccaagtgccttggctcaacttcgtgattggtgtgcattttgggtgagtgggggtgagcaggagattaagtaagaawtttttttttctcttcaaaatacagacatatgggtgaaatacaagggtggggcagggagaggatatagttctcttggtacatgaccccatctacagctcct

SEQ ID NO: 163059 - DNA, 201 bp, Homo sapiens
tacacgtccatgatttgcatgtttaccaagagtctcctgtgtgtgttcccaaatcattttatgtcagttgttagtaattaaatttatacaatttaattacrttttaagtgaaccagtgaaatatagatgcaaaataaaaagctttcgtttgcgttaaaattaagtcaaacatttcagaaaaagttaataaagggtagtcac

SEQ ID NO: 163060 - DNA, 201 bp, Homo sapiens
actatcctagaaactggagataggtgagaatgagaaaaattcgtctacagctcccagtaaatacttgtccgcagatgggaggaggggacagaacataaccwgtaagcagatatattataatttcagatagtgctacatgtttcaaagtaaacttaaagcagaaggcctggcagggagcagaaggggatgctattatctaga

SEQ ID NO: 163061 - DNA, 201 bp, Homo sapiens
tgaaggttgaaggattctggtgctctctggtgccatcgctgttagtcgttgtgcagcacagaaatattttattcaacaaactctgcagactcctgaacttyaggggtgggctgccttctgcctggtgctctgcacagatcctggagctctcgtggtcatttatgtgcagtgaagctgctccactcacctacagcttgtcct

SEQ ID NO: 163062 - DNA, 201 bp, Homo sapiens
actctaagacctgtaatttgcccatccgtgtctggtttttgacactggcaccctagaacatgtacaaaagggtagtgacaccacgatttaaggaccagctstctgtgtatggctcagtcacttccaaaatactaagctaaaatgttttggattcttatgttttatccagcgttacctcacgtcaattcagttcagttcaat

SEQ ID NO: 163063 - DNA, 201 bp, Homo sapiens
ttggaaaattctgttttagttgacttcctggactttacctcttgtgtatgacttcaatcttgataacgttccatgctagtcttcgtctctggacttctctrtcaaatccaccgttaacccatcaaatatttattgaactctaggcactatcctagaaactggagataggtgagaatgagaaaaattcgtctacagctccca

SEQ ID NO: 163064 - DNA, 201 bp, Homo sapiens
aaggatatgggattctcattgggtgagcaagagtgctttttctgttatttggaagaggtatcactctaagacctgtaatttgcccatccgtgtctggtttytgacactggcaccctagaacatgtacaaaagggtagtgacaccacgatttaaggaccagctctctgtgtatggctcagtcacttccaaaatactaagcta

SEQ ID NO: 163065 - DNA, 201 bp, Homo sapiens
ttaccctgatggctatagaagtcactgtttcatatgctatatcagaattgacttaaaaattgcatgtaggtatttgctacatgttttggtgacatgatgtrtaccattaaggaaatttaagatctttttgatcacaaagttctcagcttacatctggttatttgttggcgttttatttattggcaagctttttctagcagc

SEQ ID NO: 163066 - DNA, 201 bp, Homo sapiens
tacacaatttagcatgtaaccgtatatgctcagtgttccctttttgaagtatattggtcttatctccgcaattggaacatgtttaccctgttggaacatamgctgttatcaagtcacaacgatcattatttttgctttccccaaagtgtcaagaatgtaacacaggatcaacaagtgttgactaattgataaccgagattc

SEQ ID NO: 163067 - DNA, 201 bp, Homo sapiens
ctctggtgaagaatctgggggtgaagaccagacaaatcgaaacggcttggcgtcatgatttaactttgtcaagccaaagagagggctcgtgtttcaatagktagcctcaccttgcatctatactgggccaagtcttctttccgtgaatcctgaaccctgaaggaatcggcctcctctggctggttttaggcattgcccata

SEQ ID NO: 163068 - DNA, 201 bp, Homo sapiens
ttgctgaaactgctagaatgccaggcatgctatcacctgcagctttgagacgtcacgctgacagtatcacaggaaaacagccttttgtgggccgtcctctrtgtgttcacaccgtgtcgtttttaagctttaaaggaaactgacaaaagcttcttttctctctgtcttgagcttcactgcgtattcttaaccatgtggagc

SEQ ID NO: 163069 - DNA, 201 bp, Homo sapiens
agatgaaaaattgtgtcagcaatatcacacccagttactgtgaaatcaaggaatcgctctggtgaagaatctgggggtgaagaccagacaaatcgaaacgkcttggcgtcatgatttaactttgtcaagccaaagagagggctcgtgtttcaatagttagcctcaccttgcatctatactgggccaagtcttctttccgtg

SEQ ID NO: 163070 - DNA, 201 bp, Homo sapiens
gcgtattcttaaccatgtggagctgggagctaacgcatcacagccaactgtatctggagtgcatttgctcatatagcccttattttattttttagtcttakttttagtttcctttgaatataataataaaaaaaaaacccaatcattgaattcttagcttcagccaatatagtgtgaggttagacatattgcagcccaagg

SEQ ID NO: 163071 - DNA, 201 bp, Homo sapiens
tttcacatatcttagatagtaatggttaggtcatttagaatttgaataaattgctgaaatggtatgaaatcactaaaaagaaatgaagtcagaagaattaytagacttcacataaaagagtactgaattaggtcacagaaaaatcagagctggtaacactggcaggaactaggatttctaggttccaggaatggcaggctg

SEQ ID NO: 163072 - DNA, 201 bp, Homo sapiens
taatgaggcttgcagtctgatgaggtttgaactgcaggtaccctctttctttcctgtgactttccctttagcaagcacagccattcctccttgccacaagsgccttcaaactgtgatggaaatgagggtcatctgtcttggaaatatgcaccgctgagtggatctgcctgcccatttccggagccctgtgcctggcgactg

SEQ ID NO: 163073 - DNA, 201 bp, Homo sapiens
tgggattacaggtgcccaccaccatgcccagctaagtttttgtatttttagtagagatggggtttcactgtgttgaccaggctggtctcaaactccgcgasctcaggtgatccgcccgcctcggcctcccaaagtgctggggttacaggcgtgagccaccgcgcccggctgagaaattctttatgcaacttctgtcctgct

SEQ ID NO: 163074 - DNA, 201 bp, Homo sapiens
ttattaaactcttccttgggagacttgtgcttgggacttagggttctaagtcttttctttcattatttttggctgtaactcacttttacgtggttgtggcsctgggcaaaattttgaaataggtaacttccctttgcattctcccagtactataagactcatacgtcctgggttttaggggtgcaagccagtccttgcatt

SEQ ID NO: 163075 - DNA, 201 bp, Homo sapiens
ctggtttttctgcccccatcattcttagcttcctctgtggctctccctctcctctgcccttttggacaatgagaacgaaggtaataggcttggtcctcctkgggggcttctcctacctgtgtgtgatgctgtctttcaagtcagtgggagccctctgcttgcaagctggaaaagtggagccacacattttgcaattacttc

SEQ ID NO: 163076 - DNA, 201 bp, Homo sapiens
atgtaccgtggctcgcacatgcacaggttgacttcttgttcatgtaacaaccaaaaacacacttcggtgggtggctttcctcacgtggcaattcagggggycatacagctttccttctgtggctctgctatctcccataaccccattgaaatctacatccagcccatcagatggacggagagcacatggagtgggcacacc

SEQ ID NO: 163077 - DNA, 201 bp, Homo sapiens
tgaggtgtctttcaccacaattacaaaagtggaatgagtgaagcttattaaggatagacagcagatggctgagaagttggcctggctggaccgttgtctgsggggagcatgtggatgaggcatgaggtggggaaataaggaacctgtctttcttccagttaattgttctttcccccttgccttccaccttcctttccctcc

SEQ ID NO: 163078 - DNA, 201 bp, Homo sapiens
aattggaccacctgccatcacaagtagatccagcaaatgtaccgtggctcgcacatgcacaggttgacttcttgttcatgtaacaaccaaaaacacacttyggtgggtggctttcctcacgtggcaattcagggggtcatacagctttccttctgtggctctgctatctcccataaccccattgaaatctacatccagccc

SEQ ID NO: 163079 - DNA, 201 bp, Homo sapiens
ggctgatgattgaagtctggagtgattctagcacagaaaagcaaccagggcgcaaggtatttctgtgtgtatttggttcgctgatcagcacttgggttacsaagatgattaaagcacagccttgccctttgggagagaaaaccattcaaagaaatgctgtgacaaaagacacaagcattgagtgatcaagtacagcatgtg

SEQ ID NO: 163080 - DNA, 201 bp, Homo sapiens
tccattatctgggatattgtttcaggtatattttaatattgctgtataatttgtccataaaatgcttatcttcataatgaaatatgaatgggtctttgtcmgacagaagacttttgttgaataagatgatggcagaacgctgtaggatcctgctatttgaatcttcttggagtcacattccttagcatctagaggaggtaa

SEQ ID NO: 163081 - DNA, 201 bp, Homo sapiens
agcttgtgtctacacaagaactctctaaacatgtgatagcgaattaaagccattaactccattatctgggatattgtttcaggtatattttaatattgctrtataatttgtccataaaatgcttatcttcataatgaaatatgaatgggtctttgtccgacagaagacttttgttgaataagatgatggcagaacgctgta

SEQ ID NO: 163082 - DNA, 201 bp, Homo sapiens
tccccttgggctgatggtggttggcagagctggagcattcaccgtggcttttctgattcctctttcccatgttggagtaatgtttttagttcattgcccawatagccttggcagctataatcagtcactggagtatatccttgattgtaggagagacttgataataatgactctttcattcatttattccacaaacatagg

SEQ ID NO: 163083 - DNA, 201 bp, Homo sapiens
ttttggcgattttcttttccctgggtgttaattctccccttgggctgatggtggttggcagagctggagcattcaccgtggcttttctgattcctctttcycatgttggagtaatgtttttagttcattgcccaaatagccttggcagctataatcagtcactggagtatatccttgattgtaggagagacttgataataa

SEQ ID NO: 163084 - DNA, 201 bp, Homo sapiens
ggtttaattttcatcagtcaggaaagatacagacaccaaatcaaaggtgttgataggatttcactgtaaggttttggcgattttcttttccctgggtgttmattctccccttgggctgatggtggttggcagagctggagcattcaccgtggcttttctgattcctctttcccatgttggagtaatgtttttagttcattg

SEQ ID NO: 163085 - DNA, 201 bp, Homo sapiens
gatggaacatgggatgggggaggagagaggttggagcagagcactgggcatttagggaaaagaatcgtgaagggaaaattcctagaaggggcaacaaacayagcctcaaaaatccacagctcttccctagactgggtctgccaggtgccctgatccagctctctggtcagccgcattctgcatagaaaggggagcagggct

SEQ ID NO: 163086 - DNA, 201 bp, Homo sapiens
aggtttgatttttgagggaagagaagtcacaaaggatggaacatgggatgggggaggagagaggttggagcagagcactgggcatttagggaaaagaatcrtgaagggaaaattcctagaaggggcaacaaacacagcctcaaaaatccacagctcttccctagactgggtctgccaggtgccctgatccagctctctggt

SEQ ID NO: 163087 - DNA, 201 bp, Homo sapiens
gctacttgggaggcgaggcaggagaatcgcttgaacctgggaagtggaggttgcggtgagccaagattgcgccattgcactctagcctgggcaacaagagygaaactccaagatggagttttatttgggccatattgaggcagaggctcaaatgtaggtgaaatggttggttaactgtatggaataatgtgaagggagctg

SEQ ID NO: 163088 - DNA, 201 bp, Homo sapiens
aatcagtatgagattagaaaaggtagaggttttttggattagaggcagtttagaaattgtgtgactggcttattattaatcgaattagcagtttctgtttyctggtttccccatcatttcacctgctactcagccgtaaaagtttatttttgattcaaatgcagagattgagttttgaaacaaatctagattagtaaacat

SEQ ID NO: 163089 - DNA, 201 bp, Homo sapiens
cattgtagagtgaaggcagccatggacagtatataaatgaatgagtgtggctgtgttcccattaaattttatttaatgacactcaaatttgaatctcttaraatttgcatgtgtcatgaagtacttctaatggttgttcagccattaaaatatatgaaaaccactcttagctcataggctgtacaaaaacaggaggcaggc

SEQ ID NO: 163090 - DNA, 201 bp, Homo sapiens
taaatttaataccacagatatactatataccactagttactgtggccctttagaagccgtagccattttcatatgtaagatatttttgtcccccaagaacygatttttgcccccttgaagtgacaccacccttattgagaaatcataatttatagaatcaggtggtttggtgctgtgcagatattctaaagagttcctatt

SEQ ID NO: 163091 - DNA, 201 bp, Homo sapiens
gactgaatcctcttacgtcctcactgttgtgtgaaaaaactcatagggagaccttgatttcctcatctgtttaatggggaccatatgtctctggcaaaatmgttgtgagcaatgtttgtatgtctgtgttcacagtagcattgtttgcagtggtaaaaaggtagaggcaacccacatgttcgttgatggatgaatggataa

SEQ ID NO: 163092 - DNA, 201 bp, Homo sapiens
aaactagaaaagaaaaagaattagaaaaattctgattctagactgggtaatcgctttgagaaatgcgatttttcccttttgccacttcatcaaaagagtgrgaatctgggcctttctagggtgtggatgaaggctgagctgcagtctccagcagaggaagctcagtgcccagaccagtagtacacacaactgagacttcta

SEQ ID NO: 163093 - DNA, 201 bp, Homo sapiens
gcagaagttaccattccaatacaccatgcaagatgcattcagacgttctcttagatttcagtatcacacggtggatcctgcattttgtcatataaaaattrcacatcatttttagctgccttcagaaccctcttcatatttattaggagtattgtgctcctatccagcagctaaagctgcttcgtgttgtccagttagggt

SEQ ID NO: 163094 - DNA, 201 bp, Homo sapiens
ccatgatgctggcagcgtgtcccagcctgtggtcacttggcaccccctggagaggtggacttgtactctggatctgcagcccaggcagcagtgggagcctytcctccagctcagccccggtgcctctgccctctcccaggtctcatggactctggtggacaaaggttcttgtcagaggaagtcgttgacagggtgccatgg

SEQ ID NO: 163095 - DNA, 201 bp, Homo sapiens
atcatattgcatatattcacattacacacacacacacacacacacacacacacacactctcacccttctctttgctggggaaaggtttgttgcagaagttrccattccaatacaccatgcaagatgcattcagacgttctcttagatttcagtatcacacggtggatcctgcattttgtcatataaaaattgcacatcatt

SEQ ID NO: 163096 - DNA, 201 bp, Homo sapiens
tgcactgcgggctacagcagagcccagttcacactggagggccacccactcagctgggctgttttctgaggaaccagttgtttgtcctcccctaaccttcyccacagcagcacagagtccaggaaccctgagcaccgggaccagggccggcttgggaggggtgggggcgggggctttgtgcacaggtcttgcctgtgggcc

SEQ ID NO: 163097 - DNA, 201 bp, Homo sapiens
tatggctggtagggacgtgggggaacagtgtgaccgacctccttgcacagggctgtcattgcactgcgggctacagcagagcccagttcacactggagggscacccactcagctgggctgttttctgaggaaccagttgtttgtcctcccctaaccttccccacagcagcacagagtccaggaaccctgagcaccgggacc

SEQ ID NO: 163098 - DNA, 201 bp, Homo sapiens
tcattggcaggtgaatggagctggggtccatacagatgccccgtccggatgaaggataagtgagtggtgggcagatgcagcacgagggctcctccggcccrtacgtctttattaacatcacatcacatgcccagtcctggggcctacagaggagagccactgtcactaagcacatacttgtaagcactgagcactcacagg

SEQ ID NO: 163099 - DNA, 201 bp, Homo sapiens
ctgtcagggaaattaatcaagtccttgccatttggggctgattgctaaaggggttgttgtttggcttcctgaactggtgactctaaacagtaggttggctycctgggctggttgctgcaggttgtgggtgaaggttctgtttttatatagtcagactagtgtccatttgtatcttcagcctctcaccattcccccaactga

SEQ ID NO: 163100 - DNA, 201 bp, Homo sapiens
caccgtggaatcctcagtgctcagcaccgtgcatggagcttagcaggcatttgatcagtatttattaatgaataaataaaatggtgctggcccatacagtraagtattctagtcgcattagctgtgtctaatacctttctctgcatagtagccacatccactttaggatttgtagtgaggtttccgtagaattcagtggtt

SEQ ID NO: 163101 - DNA, 201 bp, Homo sapiens
actgaagagcaaaaagaagaacataaaaatcacctgtaatcttagtcagtaagattcttaagactgtttaagattcttgcatcttacctatttgtgggttwgttgttgtggtggttttaattgagatggagttttgctctcgttgcccaggctggagtataatggcgtgattttggctcactgcaacctccgcctcccagg

SEQ ID NO: 163102 - DNA, 201 bp, Homo sapiens
attcagtggtacccttagtaggcagaggtggagagtggggcattctagttaacaggagtgtgctagttagcaagagaatggagtgtactagttagtagaayttgccctagccaatttatgtagtgaacccataggacatgtcagatctggaaaactgcctttcatgagtgcggaagatgtagtggtcggcctcttaggtat

SEQ ID NO: 163103 - DNA, 201 bp, Homo sapiens
tgtcaaaggaaagcaccatccttgcaaccaatgacactaaaactcaagttagattatggcaagcttgtccaacccgtgggccacatgtggcccaggatgcygttgagtgcatcctaacccatattcataaacttttttaaaacattgattttttttaaattttaagctcattagctatcgttagtgtattttatatgtggc

SEQ ID NO: 163104 - DNA, 201 bp, Homo sapiens
atgattaaggagggcccacggatctgcgtgatgaatttgaggaggatacactggtcccgcagggcaaggacgtcatcttagtcactgctgtatccccagcrttaagaagagttagaagaggacacagtccacactcaatgactgtttaatgaattaattaataaatagaaaacacacaaaaatgtaaacactatccatttt

SEQ ID NO: 163105 - DNA, 201 bp, Homo sapiens
catcattttactttgctaccagtaatgtatgagcattccagtttctctacatccttgccaacacttgttattattattttttaaatgacagccatgctaaygggtgtgaagtggtatctcattccaagtgtgtgcatattgaagatgcacttagattgatccacagttgggattttgctagaaggctctatggaaaaagag

SEQ ID NO: 163106 - DNA, 201 bp, Homo sapiens
gtggaatttttgggccatttggcaacctatgtttaactttttgaagaatgtccaaactgtttttcacaatagctgcatcattttactttgctaccagtaawgtatgagcattccagtttctctacatccttgccaacacttgttattattattttttaaatgacagccatgctaacgggtgtgaagtggtatctcattcca

SEQ ID NO: 163107 - DNA, 201 bp, Homo sapiens
tcttttcctggttggatagccaaatttctttttattatcaataatattccattgtatggatgtaccacagttgatccattcacctactgaataaatatgtkcatcacttacatggggatctataattgttttggcagttatgaataaagcctctattaaaatttttattcaagtttttgtgtggtcataagttttcaactc

SEQ ID NO: 163108 - DNA, 201 bp, Homo sapiens
aagagtggaatttttgggccatttggcaacctatgtttaactttttgaagaatgtccaaactgtttttcacaatagctgcatcattttactttgctaccartaatgtatgagcattccagtttctctacatccttgccaacacttgttattattattttttaaatgacagccatgctaacgggtgtgaagtggtatctcat

SEQ ID NO: 163109 - DNA, 201 bp, Homo sapiens
ttccttttatggctgaataataatccattttattgacataccatattttgacattttatttatccatcatcagttggtggacatttgggttctttttactrttgggttgtttttagtatttggctatctcgaataatgttgctgtgaacattggcggacaagttcttgtgtgaatatatgttttcaattatctgggggcca

SEQ ID NO: 163110 - DNA, 201 bp, Homo sapiens
gtctttgttctctaattttgtagtcacctctgacacccaagtcccagcttttatccacagtcctgcgctgtctccttattttaaaagagcaactcaccacmatcacgtagggtttattccagaaacaaaagaatagttcttaggaaagctagtagtgtaatacagtctattaattcattagaaaagagactgaccatcttg

SEQ ID NO: 163111 - DNA, 201 bp, Homo sapiens
acttctattaattctgtagcttgacagttaccctgaacaaattactttcatttcacttcttcttgacctcaaccttctttcctgccttgattctctgactsttcctatagtttgtattgctgtgtttccttatgatggaaagatacatgacttcactgatctctaagggatctaggggagtgttgctttctatacgtgaca

SEQ ID NO: 163112 - DNA, 201 bp, Homo sapiens
ggtgaagcaggtgtgtagggacccgtgacattctcccatctggagttgtctcctcctctctccctgctcctgtggctgggggtgggattcctaagtcactktccctccctttccccattcccatttcttctgagtacttactaggtgcaaaacatttttctggacatttgggaaagctcagaaaataatatgttgatattc

SEQ ID NO: 163113 - DNA, 201 bp, Homo sapiens
ctctgagtcccaggaatctcatttagttctccctcagcagctggaagatgctaccagctgtggatctagggtttcccccaaagattttacctaagcattgkgggtaggggcaaataggcaaaacgatctgatgatgagtgggtggggtaagatggacaaccctgtttctgcctttctacctcagagttaatgccctgaaga

SEQ ID NO: 163114 - DNA, 201 bp, Homo sapiens
atagctcccttctcccacgtggcaactcttccctgatggtttaaagagcagaggtcttggcaaaaccaggctttccctcagattgttcagcagagggctgycagttatctaagacctttttaagaagcagatagacagcgaggtgcggaggctcatgcctgtaatcccagcactttgggaggccaaggcgggcagatcgct

SEQ ID NO: 163115 - DNA, 201 bp, Homo sapiens
aacttaaagcagaaggcctggcagggagcagaaggggatgctattatctagagagcaagggtttgagtagaaacctgcatgaagtcagaaagtgaaatatytgcaggagaaatgttccaggcagtaggccagcaagtgcaaacaccctgtgggggtaagaatcttgagatgatcaaaagacagcgtgcagtatagcttgtg

SEQ ID NO: 163116 - DNA, 201 bp, Homo sapiens
ggtgcttcctgattatatgaggagttggagaatatcatgagaaaagtccaaagtctctcctaagttctgaactatagctcccttctcccacgtggcaactyttccctgatggtttaaagagcagaggtcttggcaaaaccaggctttccctcagattgttcagcagagggctgtcagttatctaagacctttttaagaagc

SEQ ID NO: 163117 - DNA, 201 bp, Homo sapiens
caatctcatctatgttacttactagctttgtgtccttgggcaagtccctatgctccttgtgccttagttttcctatctgtaaaatggagataataaaagtrtctaccttgtaggataattgtgagcatatcaagtgtgttaatacatgtaaaatcattaatacagcatcaggcacatacatgttaactactattactttat

SEQ ID NO: 163118 - DNA, 201 bp, Homo sapiens
tctccctattcttgtgacacctggagcaggccttgctctcaataggctcctgatcaatgccgagttgtcacatcccctcatgcgttaaataaggccgtgtytgaggatcccactggaaagtcttggaagactctgggactcttgtaagccctgcacggtgcttcctgattatatgaggagttggagaatatcatgagaaaa

SEQ ID NO: 163119 - DNA, 201 bp, Homo sapiens
tttcctgtttgagttatttaaagttacctttttgatagtgatgtctaatagtcttaagctagacaacttaaaaaatatttgtaaccctcatacactgctgstatgaagggaaaatcgtgtagtcactttggaaaccagtgtggcagttccttaaaaggttaaacatagggttagtctatgactcagcaattctactcttag

SEQ ID NO: 163120 - DNA, 201 bp, Homo sapiens
cactgtcatcagtatcaccttaggttaaatattttgtaaggaacaattcagatatatcccggaagaggtaccttttatgctttagtccaggccctctgggktttacctgtttcttgttgtagccactgctgcagcagggaaccctggaaactctaatcaccttcgtgtaggtacaacttgaaagtgcttctctcttcttgc

SEQ ID NO: 163121 - DNA, 201 bp, Homo sapiens
gaagatcactgtcaccgtatcaaagaggatggatgagagaggtgcaggcagattaccagataccagatgatggatggcagcagacaggccaaggtagtggyagtaagaatggtgagaagtgagtggattacaggggaatctagaaatactgtccgtaagaatttgtgattggtcagatgtgaggattggggagcgctgaaa

SEQ ID NO: 163122 - DNA, 201 bp, Homo sapiens
tcattttcagaaatgatttgtggtggttcttctggactgagaagagcctgggtttcacagctgggtacagcaggggtggggttgccacttggtctgagtaraaggaattctggagtaccttcgggtctctgtctgggccatctgctgcataaatccctttacaacacaagaggcagcatacttgctcttgacctggttctg

SEQ ID NO: 163123 - DNA, 201 bp, Homo sapiens
ttcaaataccttcgtatagttgtcattctctttttaacttattttgttgatattttttactttttgctcctttctaataattaattcaattcaagttataratttctattgctgtatcccaatcgttttgatagtagcagctccattataattcattttaaagattttaacattgtaattgtgatttttcctgtttgagtt

SEQ ID NO: 163124 - DNA, 201 bp, Homo sapiens
tgcttctctcttcttgccttctgcccaaggtgacacacccatgtgtgtgcaactgtgaaaatgagcctgcaaactcaaattctaaagaatatgaataatgsaaagaaaggaggcaacaatatgaagaaatgaaatataaattgactcgagttaattttttataacaaacaaaagcattttaaaatgtgtgtttaggatgtt

SEQ ID NO: 163125 - DNA, 201 bp, Homo sapiens
cctgatattttccttttggaaaacatgtttttaacttacaatccattttctaaaatagttattaaagatagtgcagccttgctttttcttctttctgggcsaactttgggaagttatatttttctaagaaatttttgacgtgaagtttttgcagtgtttttcttatctttttaggctttactgaatctgtagttatggccc

SEQ ID NO: 163126 - DNA, 201 bp, Homo sapiens
gtggaatgtctgcttctgtagcaccgtccatttgcaaactgcgttccccaaccactctttaattgtctcctacatcagttcatgggagagcttagtgaggktaggtaacccagtgctccttattcaacaaatgtaaatgtagcgctttacatttgtaaagggtgctggggggtccctggtgacctgcacacacaagtcaat

SEQ ID NO: 163127 - DNA, 201 bp, Homo sapiens
gaaaggttaaaaaagaagactgggaaaacatacgcctggtaaatgaatacaaaaaaggtaatgtaggtatcttaatattagaaaaaataattttaagaacraaagactttaatagcattaaaaatactaaacaataacaaaaggaatagtagcaagaggataataagacttgtgtatgctaatagcatagcctaaactgtg

SEQ ID NO: 163128 - DNA, 201 bp, Homo sapiens
tgcacaaaattgccatttaagtagttaaaaaatggttgagtattaacagtttcatttggttgaagctaatacctagaaggcacaagatattttgtgagctwttgagcaacgtctgacacctgaatgtagcgtccatgctgctcttcttttgagtcctgtgctatgtttagcatccattatgccatcactgacttcatatag

SEQ ID NO: 163129 - DNA, 201 bp, Homo sapiens
agtttacatgtcagacccaacaatccatgctgtacgtcatgcaggagtgatcagtgttttcagggtggaatgcaatctcataatgaagcggtgaatagtaktattgcagttgaataacctgcagcatgatgtatggtgattagaatttgtttctggcatatggttttctttttcttgtttttcccccaaagtggaatgtct

SEQ ID NO: 163130 - DNA, 201 bp, Homo sapiens
gagaatggcaatgaaagtactacatatctatacgtgagatgtatctagaacaaaccttagaggttaaaaacatgtattagaaaagaacacttgaaaataartaagctaataattcatatcaagaaggtaggaaatgagcagactaacagaccaaaaagtaaactgcaaaacaagataatagtaaagaaagagcagaaatag

SEQ ID NO: 163131 - DNA, 201 bp, Homo sapiens
aggttacactggcgggcctcccctctgaagcctctggtgctcaaagccttgctgaacaagtcagccctggagtggtctgacttaagagaaggaaaataaayaaacaaacaaacaaaaaccccaaggctctggtaagatgcatagtaattgctgaggtccattgtgggagaaatactagtctgtactctagtatctgcttgc

SEQ ID NO: 163132 - DNA, 201 bp, Homo sapiens
atatgcatccccacccctcgcaaggttgaaatgcacaaaattgccatttaagtagttaaaaaatggttgagtattaacagtttcatttggttgaagctaayacctagaaggcacaagatattttgtgagctattgagcaacgtctgacacctgaatgtagcgtccatgctgctcttcttttgagtcctgtgctatgtttag

SEQ ID NO: 163133 - DNA, 201 bp, Homo sapiens
ttgaccttgtggatcctggaaaagattctggagttccccgggggcctctgagccgcacggaactgctgatcttgattgcacaggttacccaaccctgttcrtctgcctcacagagaagcacagaagtcaaatctgaggccgttgtatcactgagcagcacagctggggcagggtcttagggaaggcctccgagtccagcgc

SEQ ID NO: 163134 - DNA, 201 bp, Homo sapiens
gcgattctcctgcctcagcctcctgagtagctgggactacaggtgcacgccaccacacctggctaatttttgtattttttagtagagatggggttttactrtgttggccaggctggtcttgaactcctgacatcaggtgatctggctgcctcggccttccagaatgctgagattgcaggcgtgagccaccatgtctggcca

SEQ ID NO: 163135 - DNA, 201 bp, Homo sapiens
ttaaaacataattgcaaaagcagttgatgaatgtgcccacactgatgttttcaaatcacatctaatggagccataatgtaatatgagaaaataaccttatggggggtcagggggttgagcttctccaggaattttatgggatatgctgggtcttaattacttcataatgactgacaatttttagagccttagaataaaggt

SEQ ID NO: 163136 - DNA, 201 bp, Homo sapiens
acttcctccttgtttattccactcaagccacactggcttccttcctgccccttagaaatagcaggcacattcttgttgcccctgtaggactgctttctctrccccttgctggggatatctgaatgggtgagtgcctcactgcctccatggctttgtttgcagtcaccttcccttggaggctcaccctatttaaaattgtgc

SEQ ID NO: 163137 - DNA, 201 bp, Homo sapiens
gttgagcttctccaggaattttatgggatatgctgggtcttaattacttcataatgactgacaatttttagagccttagaataaaggtttctttttttttyctaagttacattaaaaataaatatctgggtcaattactggcccatccatctgccaagtgaaaattgcaacaagacagaaaaacacggttgctcgtcatgg

SEQ ID NO: 163138 - DNA, 201 bp, Homo sapiens
tgctgattcacttcttttgaccagtggtgatggaatagaattttccagtcatgcagttgtacttattgccttctggttctgtatcgataagcttcattcctttttttttttttttttagcttcattctttagaaattggattctttacttagtcaagtctataatcaaaatagactttccatggtaagtaaagtaacatgg

SEQ ID NO: 163139 - DNA, 201 bp, Homo sapiens
atggttgaggattttttgtggttccttctgctggcagaaacacatttgcaaacacaaaatcttttaataaaatagcaagatttagtaagaaagaaaaatastgtgagaaaaaaataggacctgattggaggaacattattatgccagagacacttggttgacttaaacactaatatattatttttatacatattcacacaa

SEQ ID NO: 163140 - DNA, 201 bp, Homo sapiens
gttcactgaactggtgctgtggctgtgccttggggctattccagtgctttttcaggacggcagttcctggtgacgtgcagtaaaataaaacaggtggaaascagctgtgggctcactgctgcattttccttgctgcaaagtgagttgcttggtctgatggatgttatttaggggacagaagttggccaagaccctgaaggc

SEQ ID NO: 163141 - DNA, 201 bp, Homo sapiens
caaaccagagagcaaagaagctatgagacaactgaggagaaggagccaatttgaagagggtctcactggccaaagatatgactgctgaagcttacatgagrgcagtcattgaaacgatcaaatatgtttaaatgaatatgtttgtgatgatgtttaaaaaactcttcgattagcctgggagatagcaagttcgtcatcttg

SEQ ID NO: 163142 - DNA, 201 bp, Homo sapiens
cagaagtttgtcttctttatttttctttttaagactcagttttttttttgacttagttttaaattccatttgttaatcctaatagatagtctttgttctctaattttgtagtcacctctgacacccaagtcccagcttttatccacagtcctgcgctgtctccttattttaaaagagcaactcaccacaatcacgtagggt

SEQ ID NO: 163143 - DNA, 201 bp, Homo sapiens
atgtgcagactcggattggaagaacagctgcacacatataaaatgcaaaagctacccaaacccagcattatgaattctgaaagggatttcattcttttaaraatttcagaaacagagaaaaatgaaacaaaagaatttaactgatatttttattaattgttctttcagtcacactttcccttctatcacattatcatacgt

SEQ ID NO: 163144 - DNA, 201 bp, Homo sapiens
tgagaaactgaacaggtcaagtagactgtgatcttcaagggataaggtcaaaggaaaagaatggagacaatgtgttgattaaaatgacttaaagacagccrgatgtggtggctcacgcctgtaatcccagcactttgggaggcggaggggggcagatcacctgaggtcaggagttcgagaccagcctggccaacatggcga

SEQ ID NO: 163145 - DNA, 201 bp, Homo sapiens
tggttcttttccaggctctgctgtctccatatagctgtgagtgtttttggtacaccaacacatctctgtatctgggccagtaaacttttttttttttttttggtgtagggccaagcctacaatgcatatgtccttattgttcatctgttgtaactttttccacaaaaagtgtgtgaaatttagattgtggacgttccagtc

SEQ ID NO: 163146 - DNA, 201 bp, Homo sapiens
ggtagtataagtggcaaaatgtactgatatttgggtcaaatcagattatttctggaagtcaaagagcctcaaataacccaatgtcattgtatatacttaaytgcttatcatctttcttaaaaataaatggctatctaatttacggttctttggctacttattagcttataattttttgtattcagatctctttataataag

SEQ ID NO: 163147 - DNA, 201 bp, Homo sapiens
cacacaactgccctgtgaggcttacattctgtcattaacggaggaggatggtgacactcaagtggggaccagctggtccttgcagcagctgaggtcatagscgcttcttcctgatgttgggtttttgtggctgctcttggtgagatttatttaccagaagtttgtcttctttatttttctttttaagactcagtttttttt

SEQ ID NO: 163148 - DNA, 201 bp, Homo sapiens
tgttaagatgtgggttccttacagtcagaactgatcttatttccggtgaattattgtaattattgtaaaagtccaatatggtttggttttgtgtcctcacstaaatctcatttcgaattgtaattcccacctgttggaggaggggcctggtgagaggtgattgaaacatgcggggggtggactttccccttgctgttctcg

SEQ ID NO: 163149 - DNA, 201 bp, Homo sapiens
cctaaaggaaatattagcagattgaatatcagtttttagagagaacttcttttggttcacctgggtagctggtagcatgctatgtgctgtgagatggtcayacacgctgtctcatgtaggtctcacacaactgccctgtgaggcttacattctgtcattaacggaggaggatggtgacactcaagtggggaccagctggtc

SEQ ID NO: 163150 - DNA, 201 bp, Homo sapiens
agattatttctggaagtcaaagagcctcaaataacccaatgtcattgtatatacttaattgcttatcatctttcttaaaaataaatggctatctaatttayggttctttggctacttattagcttataattttttgtattcagatctctttataataagtatgggaggtaatgcatatgctcattagcttgatttagccct

SEQ ID NO: 163151 - DNA, 201 bp, Homo sapiens
ttatccagggacggggtggatcaactttgatcatttggacctggctttggtcatttcttggtacccattacatggctgggtgatggcagtccatgaatgtrtggagaatgatgtcaaacagggtgctggatgacaagttcgggtctccagagcacttatgtggtctgtgaacataaatcattccattcagtcaaacctcca

SEQ ID NO: 163152 - DNA, 201 bp, Homo sapiens
gtagtacctgttattacagcaggggcaagttgtaaacctctttccattttttcccttcattttgcccaatattttgatatctcctgtaatgtcgatgctcsctgtcttgttaaacactttattatcacttgaggcatttatttatttattctacagatatcattttcagaaatgatttgtggtggttcttctggactgaga

SEQ ID NO: 163153 - DNA, 201 bp, Homo sapiens
ggtttccgtgttatccagggacggggtggatcaactttgatcatttggacctggctttggtcatttcttggtacccattacatggctgggtgatggcagtmcatgaatgtgtggagaatgatgtcaaacagggtgctggatgacaagttcgggtctccagagcacttatgtggtctgtgaacataaatcattccattcagt

SEQ ID NO: 163154 - DNA, 201 bp, Homo sapiens
attgtggagtgggatgcaaaaaggaaagtcacatttttatgtaggttctgtctgacaagtgtggaaccattactgacctagttggaggtcaaggaagtgtsagaacttcctgtgtgcttgatttgaccaagtgtagcatcttagtctcccagtaggacaaaagggtttccgtgttatccagggacggggtggatcaacttt

SEQ ID NO: 163155 - DNA, 201 bp, Homo sapiens
gtccaaaaccagtctgaatatggccttaggctctgggttttaacaccgctagtctgtgaaagatcagttgccacagtttttggtttccacatatgtaaagwttcgtcataattagcaagttcacccttagtaggctgtatcacctcttgttccccacatcccagatttcagtccgtccttggctctcggatgggaggccac

SEQ ID NO: 163156 - DNA, 201 bp, Homo sapiens
gataatatacttaatgttcctgaagggtatgagggaggcctcccttagcccagacttctgcaagtgagagaaatataaattttttctcctttacacccccrttctcagtggttctatttggacatataatctctgacgtttgttcttaagtctctgttgcaaacattcacatcaggccttcctggagatacccattggttc

SEQ ID NO: 163157 - DNA, 201 bp, Homo sapiens
cttcaatcttgataacgttccatgctagtcttcgtctctggacttctctatcaaatccaccgttaacccatcaaatatttattgaactctaggcactatcytagaaactggagataggtgagaatgagaaaaattcgtctacagctcccagtaaatacttgtccgcagatgggaggaggggacagaacataacctgtaagc

SEQ ID NO: 163158 - DNA, 201 bp, Homo sapiens
taaacactctagagttttagtgtcttagaggtcatttagtttgcctccttgtaaccaaaccgatgaaaatctccttttctgacctcctgagaaatagatgstagaatctctgggcagcagtccttgtggtactcgtactcagtgcctagcaaagaggtccataatgagatattctgtgcgtctctgactcagaacattcct

SEQ ID NO: 163159 - DNA, 201 bp, Homo sapiens
atatttgtaatgacatttaaatattttaccagtctcttcgacgtcctcattgtgatgagtttttctcattgatctttccaaaaccaaaaggggccattcartgtttttattgtagcgaaaccaaagttaatactatgcatctgtacttttggcagccagaaccctgtagtccccagcgacgatagtttgtattttcaaata

SEQ ID NO: 163160 - DNA, 201 bp, Homo sapiens
caagtagacatatgtcaccatcattgtttaccacagagaagaattaggctgggaaaacacttaccaccctgctgggtatttaaatctgacccttgtcccastgttaacagcacagcacgtatgtccctccttaactcactgatctcatgtgaacgagtgatcagcctgttttttacaggtttctctccctggcaccatctc

SEQ ID NO: 163161 - DNA, 201 bp, Homo sapiens
ttgtacccagcattttagttatatcaggcaggaagattgcttcagatgttgatgtgccctttcttggccagggcattgcaaggcagggttagtgctcgtaracaaacaaggattttttaggaggtgatgacaccatttccatcaggggtggccaggaatgggcacgtacagacagaagcattcaagtgacttgagaggatc

SEQ ID NO: 163162 - DNA, 201 bp, Homo sapiens
ttcatctcctgccctccttctcctgccccaaatggctaccaaggtgggtccagaagaaactctcagaggtctgtagtttgtttatcttctaggctttttayacatttctttccttcataatagctcagtgaaaaatgttaaaatattttaaaaatatattgtacccagcattttagttatatcaggcaggaagattgcttc

SEQ ID NO: 163163 - DNA, 201 bp, Homo sapiens
tctctgtccccccgaggcgaagctatagtctctgaccccctgagtttcagcccagtgggagtgtttcttgtaagatttctcagtttgggaggaccttgggsttcatctcctgccctccttctcctgccccaaatggctaccaaggtgggtccagaagaaactctcagaggtctgtagtttgtttatcttctaggcttttta

SEQ ID NO: 163164 - DNA, 201 bp, Homo sapiens
tctttatataaagttaaatgcattcatgtatttatgaggcccttttaagttttgaaacttgaatgaatttctgactgtttattcagttgatataactgatratacaaacattgcaaaatcagcaatttgcaatgcctgtgagaggtgatgttatcagctttgataccgtaaagaggttgatcagtgctttagcctttacct

SEQ ID NO: 163165 - DNA, 201 bp, Homo sapiens
ctccagagtgtaagagttcagatttgcatgtgtccattcttccctttctgtggggcagagatacatgtatttctctgtccccccgaggcgaagctatagtytctgaccccctgagtttcagcccagtgggagtgtttcttgtaagatttctcagtttgggaggaccttgggcttcatctcctgccctccttctcctgcccc

SEQ ID NO: 163166 - DNA, 201 bp, Homo sapiens
agtaatactgttagaacagcaacaacagtaccaacagagtacttactaaatgctaatcaagcagttttaagtcatgtatagatcttaggtgtttatctgtrtacatatatttgtttagctgtagatgtgtatctctctatgtctttatataaagttaaatgcattcatgtatttatgaggcccttttaagttttgaaactt

SEQ ID NO: 163167 - DNA, 201 bp, Homo sapiens
agtgcagccctctccctatgggttcctccctccaacctgctcctgcccagagctgctccttccgctctttctccccttcctctgtctctggggatctggcygatgatgctctttgtgttgtcaggaaatgtgcccagcagccaagcataccctgtcattaaaccgaatctggtggtaaggatgtctttatgaagacacctc

SEQ ID NO: 163168 - DNA, 201 bp, Homo sapiens
ttctggccctagagtgctgcctcaaaacctaccaggagcttagtctgtaaagcagttgaggactagggccaagttaactttgggctgaaacacgcagtaamatgagaaggccttccacacctcgctcatcactagcccactgcaaggctgcactttgcatgctcatggaaactcgcaggattattgaggaggctgtgcaga

SEQ ID NO: 163169 - DNA, 201 bp, Homo sapiens
cccaccctaccccccacacgccttctctgtatgactggtttacgtctctgactctcccgttatatcaaaaacttttttccccatatgcatccccacccctmgcaaggttgaaatgcacaaaattgccatttaagtagttaaaaaatggttgagtattaacagtttcatttggttgaagctaatacctagaaggcacaagat

SEQ ID NO: 163170 - DNA, 201 bp, Homo sapiens
acgtttcttcatggtgctgatcatgcagtgaacatttcctgacctatggaagtgtcagaaacatttctggatggaacatgtctctaaatttccaaaaggtkgtattttaggcctagacttcagactcttatatttgaaagaagtcactgtctgaccacccagtgctcagaaaatgaggtgggaaggtttggtggacctcag

SEQ ID NO: 163171 - DNA, 201 bp, Homo sapiens
aaaccaccgaggcccctcagctgcgggagaagctttgcttaataaatcctggcctctgaggcgtggaattgtgaagtctctcagggaatgccgagggacaraactaatttcagcgtcttcgttctttgagaatgggaggtagcatcacgtctctgactggagcgttctgatgagggtgaccacctacccacaacgtgtttt

SEQ ID NO: 163172 - DNA, 201 bp, Homo sapiens
acattcaaacttctaacatgctagtgtagttaaattccagacagtatgtaaaaggcttgggtatgtatggtgggccaggggagcaggtccattgttttcaratatttgaaaaacagctgcctgagggagggaagacatcattagtatgtgtttctcagagggaccaagaccagggacagttatgggaaagcagatgttggc

SEQ ID NO: 163173 - DNA, 201 bp, Homo sapiens
actcctcagcctgggagtcatttacaaaccaccgaggcccctcagctgcgggagaagctttgcttaataaatcctggcctctgaggcgtggaattgtgaaktctctcagggaatgccgagggacagaactaatttcagcgtcttcgttctttgagaatgggaggtagcatcacgtctctgactggagcgttctgatgaggg

SEQ ID NO: 163174 - DNA, 201 bp, Homo sapiens
aggaagcctctgggaaccaggaagggagaagccccttcttcctcatgtgtccctccggcgccctctactgacaggggttagcatcaaggcatctggcaaasgacgcaatttacaaggcccagtgctattatcacagagcagagaaagaagggtaggtttggagcagagttaataactggaactcctgttacattcaaactt

SEQ ID NO: 163175 - DNA, 201 bp, Homo sapiens
taaatatctgggtcaattactggcccatccatctgccaagtgaaaattgcaacaagacagaaaaacacggttgctcgtcatgggagtgaagcacccagacktgagcggagcggcttgggaagaggtcactgttgtttcctggggccgtgcctccgatctgccggggactcctcagcctgggagtcatttacaaaccaccga

SEQ ID NO: 163176 - DNA, 201 bp, Homo sapiens
atcacgtaatctttgaaagtcactatgctagggaccggatacagtggtgaacaggataaaattgtttctgtcttcatgaagggtatataatctattacttaaaaaaaaaaaaaaaaagactataaggccagatgtggtggctcatgtctgtgatcccagcattttgggaggctgagatgggaggattgcttgaggccagga

SEQ ID NO: 163177 - DNA, 201 bp, Homo sapiens
gtttaatttgtcaagatcaggggctaatggttgaggattttttgtggttccttctgctggcagaaacacatttgcaaacacaaaatcttttaataaaatakcaagatttagtaagaaagaaaaatactgtgagaaaaaaataggacctgattggaggaacattattatgccagagacacttggttgacttaaacactaata

SEQ ID NO: 163178 - DNA, 201 bp, Homo sapiens
gctgctcagccatagaaatggggactccatgggggaatgtggaaatgggggctacttaaggagggcaggataggcaggctagctttcacccctgggtgggkatttttgggaaatggagccagtactctgcagtagttaaaacacgccaggcaggctgtgtcgtggctcacacctgtaatcccagcactttgggaggccaag

SEQ ID NO: 163179 - DNA, 201 bp, Homo sapiens
tgaaaccaaagagacgtgcacattttgctagaggtatcccaagtttgcccagttatttaaatccagcattagacatcagagaggatgaggattttctatascttcaaataactgaaggctggcaagcagcaaaacatagggccccacaatcctgctgtcctcgaatggtaaaaagaggcatttagtgcctttccttcccct

SEQ ID NO: 163180 - DNA, 201 bp, Homo sapiens
atgctagggaccggatacagtggtgaacaggataaaattgtttctgtcttcatgaagggtatataatctattacttaaaaaaaaaaaaaaaaagactatarggccagatgtggtggctcatgtctgtgatcccagcattttgggaggctgagatgggaggattgcttgaggccaggagtttgagaccaggctgggcaagaa

SEQ ID NO: 163181 - DNA, 201 bp, Homo sapiens
aactttcgtcgtaaaaattcttcataaccatctttctagaaattatgcagattgtaaaatataagtaaatagtgacataatttgaggcatggattactatrcatcttatatgcaagaaacacctgcccgtaaattcaattaaaaattgttttatctctacaaaaaattccgatttatcagacagtcaatttgcattacaaa

SEQ ID NO: 163182 - DNA, 201 bp, Homo sapiens
cctgggctggggactgcctgggcctgcagaatcagggcaagtggactgcaaattgatttgtccacgaagcatgggctgcagaccttacatataataacctrgtacgcacctgctccagtttacagtatacaagggtgatggcattgcaataagtaaaacatgcactcagccagtgctattgaattcagagcaatttttcac

SEQ ID NO: 163183 - DNA, 201 bp, Homo sapiens
attctggaaacaagtcctttatcagacataatgatttgcaaatattttatctgagtctgtggcttgtcttagcattctcttaacagtgttttttgaaaagyagaacttctaaatttcgatgagatccagtctatcggtttttttttttatggatgaaacttttgtgtcatatctaagaactatttgtctaacacaaatatt

SEQ ID NO: 163184 - DNA, 201 bp, Homo sapiens
ccggatgtggtggctcacgcctgtaatcccagcactttgggaggcggaggggggcagatcacctgaggtcaggagttcgagaccagcctggccaacatggygaaaccccatctctactaaaaacacagaattagccgggcatggtagtacgcgcttgtaatctcagctactagggagggtgcggcagaagaattgcttgaa

SEQ ID NO: 163185 - DNA, 201 bp, Homo sapiens
gctcactgcaccctccgtctcccggattcaagcgattctccatacctcagcctcttgagtagctgggattacaggcgcccagcagggtttccccatgttgkccaggctggtcttgaactcctgacctcaggagatccacctgccttggcctcccagagtgctgggattacaggcgtgagcccctctgcccggccaactttg

SEQ ID NO: 163186 - DNA, 201 bp, Homo sapiens
tcttttgagcagggctacagtctgattttcttaatagaacacattacaccattaaatggatctccacacacctggaggagctaacctattgaagagaatgmtttcctgttatcctcctggaattcaggtacaatttaacttcttgccattaaaacacaacttgatagtggtaaccttttcccacctcttgggacgcttatt

SEQ ID NO: 163187 - DNA, 201 bp, Homo sapiens
gtaatcccagcactttgggaggcggaggggggcagatcacctgaggtcaggagttcgagaccagcctggccaacatggcgaaaccccatctctactaaaawcacagaattagccgggcatggtagtacgcgcttgtaatctcagctactagggagggtgcggcagaagaattgcttgaacccgggaggtggaggttgcagt

SEQ ID NO: 163188 - DNA, 201 bp, Homo sapiens
tgccgcacccagcctgtctaagggagttttaaaatgtttagctttgaaaagtttgttgctttcgctgaaaagagtgggatgaagtatgacctgagtctctragttaggaaataagtgaataagtttttttgatcactgaaaggtaaaccactgtggtattgtgtttattgattattaattgatagagatattatgtcctgc

SEQ ID NO: 163189 - DNA, 201 bp, Homo sapiens
catgtgagtgccaccacgcccggctaatgttttgtatttttagtagagacggggtttcaccgtgttagccaggatggtctcgatctcctgacctcgtgatmtgcccacctcagcctcccaaagtgctgggattacaggcgtgagccatcgtgcctggcctgctaccgcttactctctctgtgaccgtggaaaaatgatctc

SEQ ID NO: 163190 - DNA, 201 bp, Homo sapiens
ttacccagagacgggggttcaccgtgttggccaggctggtcttgaactcctgacctcaagtgatctgcctgtctcggcctcccgaagtgctgggattacakgtgtgagccaccacgcccggccccctgtacttcttttttctctttgccatgcttctgtttacccattactgccaacccatttgaccctccttgcttagga

SEQ ID NO: 163191 - DNA, 201 bp, Homo sapiens
atggccagtctttttacttctagtgattgtaacaggtgtgtagccgtatcctactgtgtttttcacttgcattttcctgacgaccgaattatattattttstcatgaacttacttgccatgtgtatgtctttcataaattgtctgttcaaatctcttatgtatgctttttattgggttattttctcattgtaattttgaca

SEQ ID NO: 163192 - DNA, 201 bp, Homo sapiens
tttagtagagacggggtttcaccgtgttagccaggatggtctcgatctcctgacctcgtgatctgcccacctcagcctcccaaagtgctgggattacaggsgtgagccatcgtgcctggcctgctaccgcttactctctctgtgaccgtggaaaaatgatctcatctaccttgaagggtttgttatgagtgtcaaagaaga

SEQ ID NO: 163193 - DNA, 201 bp, Homo sapiens
aaatgagcaagactataatgtcaggggtggacacttagatgataaagtgtaagaaacataggaagtgattactgtgaaagtcagataacggttgctttttkggctataaggtttctgttgggattggagtgtagcacacagggaggcatgtctagggtagatggcaaacttctgattcttgacccaggtggtggttgtaag

SEQ ID NO: 163194 - DNA, 201 bp, Homo sapiens
cgtgttggccaggctggtcttgaactcctgacctcaagtgatctgcctgtctcggcctcccgaagtgctgggattacaggtgtgagccaccacgcccggcmccctgtacttcttttttctctttgccatgcttctgtttacccattactgccaacccatttgaccctccttgcttaggaattgctagcatttattttcttt

SEQ ID NO: 163195 - DNA, 201 bp, Homo sapiens
aggacagctgatgtggcttcttaaatatatgagtgtgttttttaaaaaaggggagagggccttctcaattatgtaacatttagagtacatgaccaaatacsatgtgaggactaagggatggaaattgactaggggaaaaataactttaaaaaacttttttagggtgacaataatcaggggaacttgaatatggagtgggaa

SEQ ID NO: 163196 - DNA, 201 bp, Homo sapiens
acaccagggagcaggctcttgagcactctattgctgtgtttcttgctgcacacagaagtcatgtgaacacaaatagaactgcctgcaagccctgagaagargacttggaataaacctaccttgccagaaccttgatcttggacttctcagcccccagaactgtaagaaatagaagcctgttattgaagccacgtagtctgt

SEQ ID NO: 163197 - DNA, 201 bp, Homo sapiens
cacgtggcaccccagacccttgcccacctgcatcctggtcattcatcctcctcctcatggggtcatttcttgatccctattaagcattaaaaggggattamatatctctctacttgcagctaatgttttgcttggtttggccaagaacattttaagttttaaaaacctggggctattggagtgggaccatgggcaaaggtc

SEQ ID NO: 163198 - DNA, 201 bp, Homo sapiens
tcttaaatatatgagtgtgttttttaaaaaaggggagagggccttctcaattatgtaacatttagagtacatgaccaaatacgatgtgaggactaagggatggaaattgactaggggaaaaataactttaaaaaacttttttagggtgacaataatcaggggaacttgaatatggagtgggaattagatggtgctaatgag

SEQ ID NO: 163199 - DNA, 201 bp, Homo sapiens
ttttcctttgtatatattttacaatatattaagttctaataaggataaaatgtttctggagtcattgttaaattacccactgtgtttcaaatataaaacaktgttttaaaggctgtatctatccgtctctcagtgtttgtccacccttccatccatccacccacctgtccctatcatcagtatatagctacaatctttaaa

SEQ ID NO: 163200 - DNA, 201 bp, Homo sapiens
gagctctcgtggtcatttatgtgcagtgaagctgctccactcacctacagcttgtccttttccagagaatccctatcatcctcccctcatcccaaggaatrcaacaaaggaaaattaatagtgaatgcttttgccggagacctgtggatacttaatttttatagatactcaataaatatttatttatattcactagcagca

SEQ ID NO: 163201 - DNA, 201 bp, Homo sapiens
tcagcatatgatgtggtacttttttctttttttttaggcagggtctcactttgtgggccaggctggagtgcagtggcaggatcttggcttactgcagcctygacatcctgggcttaggtgatcctcccatctcagcctcccacatagctgggactaacaggcatgtgccaccatgcctggctaagtattttttgtagagac

SEQ ID NO: 163202 - DNA, 201 bp, Homo sapiens
atcagacagtcaatttgcattacaaagggcactgtttcttttataaaatagtttgctgtagaattccattaaatgatttatgtaatttccatgggtagtctttttttttttttttggagatggacttttgctcttgttgcccaggctggagtacagtggcgcgatcttggctcaccgcaacctcggcctcctgggttcaag

SEQ ID NO: 163203 - DNA, 201 bp, Homo sapiens
ccatatgacctggctccttctgccagctcttcaagtcttcaagaaagcacaatgctttctctgggtatttctctcgcgaaaaagagagaagaaaagcagcrttttcctttgtatatattttacaatatattaagttctaataaggataaaatgtttctggagtcattgttaaattacccactgtgtttcaaatataaaaca

SEQ ID NO: 163204 - DNA, 201 bp, Homo sapiens
taaggtcaacctgtgggttgcctgggggctagtcagcctaggctgctttactctttggcctggcagttggtgctggctgctggttagcactaactgccagstggggtaatggggatgatggaccatatgtcttcagcacactggcctgagctaattcacatggtggtggatgcagagaacctaagagcagcaagagaggat

SEQ ID NO: 163205 - DNA, 201 bp, Homo sapiens
agttccatgaagtatgtcagcttctatcttttacagagggagtgtagaggctcagagaggataaataacttacctaaggtcatacctagcaggaatccctmcctcattagctctcagctcaaagtctatgccattgaccatggtgtaagtctcccagctgtcatcatatcccagccattctccattcatccctttgcactt

SEQ ID NO: 163206 - DNA, 201 bp, Homo sapiens
ttcaccatattggccagactggtctcaaactcctgacctcaggtgatctgcctgcctcggcctcccaaagtcccgggagatgggattacaggtgtgagccmctacgcctggccaatgtaaaggaaattgagggggtacccagattcgaagcggggacctcttgatctgcagtcaaatgttctaccccgaattctaccccct

SEQ ID NO: 163207 - DNA, 201 bp, Homo sapiens
acttaaggaggaggatggagtcttaaggagtgaaacttgaacttcacgctgggtttgctgaccttgaacatgctggattctgcttacagaatttgacagckgcttcatatctttggtgagcaaccctaaccctaatacaactttgcataaaatggaggggggtgtttttgccttcaaggagaagacttgataatcttttct

SEQ ID NO: 163208 - DNA, 201 bp, Homo sapiens
aggaaattcttttgtctttcttatgtttagaaggaaaaagggccaagccagttcatgcaaacagctggtatgttagaggcctctagcaagtggtaaagtayggaaaccacagagactggtaaagaactcgattggatatgaacactacctgctaagttaacagtagcattgggaagcatggttgtcatggaaacttgttcc

SEQ ID NO: 163209 - DNA, 201 bp, Homo sapiens
tcactttgttctttgtaaaagcttattatattagtcaatattctccaggaaaacagaagcaataggatgatctattgatgagttgatcgatctagaggttratgtattataaagaattggctcaggattggctcatatgattatggaggctggtgagttccaagatctaagctggagaacaagagagctgatggcatagtt

SEQ ID NO: 163210 - DNA, 201 bp, Homo sapiens
aggcagagaggagctatgatagaaaggtccctctggcacagaagtggtacagccttcagatccctgggaataacagggaaggagaacaaataaggtccctmgctagagtaattatggtaactagctaattaaagatttttgaccaaggagaggggtgggggagacataaagcaggttacactggcgggcctcccctctgaa

SEQ ID NO: 163211 - DNA, 201 bp, Homo sapiens
atattggacaaatgagagatctaatgtacatcatgactaaagttaataaaattgtattagggatttttgttaaataagtaaattttagctgcttttgtcccacacacacacacacacacacacagtaactctgaggtgatggatatgttagtctgcttcactgcagtaaccattttgccatctatatgcatcccgtatcat

SEQ ID NO: 163212 - DNA, 201 bp, Homo sapiens
tattggacaaatgagagatctaatgtacatcatgactaaagttaataaaattgtattagggatttttgttaaataagtaaattttagctgcttttgtcccacacacacacacacacacacacagtaactctgaggtgatggatatgttagtctgcttcactgcagtaaccattttgccatctatatgcatcccgtatcatc

SEQ ID NO: 163213 - DNA, 201 bp, Homo sapiens
accagtcattctcagcataacaccgagtggaaataaccatgacacagattggagcaaagtgaggaggtgaagcagggagaggatagggaagaagaatattytaggtggagagaaagagaaagcatgtataaagaccatttaaaatagcacacttctggagggccacctttttctcacagcaatctgggtcttacagccctt

SEQ ID NO: 163214 - DNA, 201 bp, Homo sapiens
ctcccctgcctgagctgttcagagcattatcaacatctacctaaaatttgaatttcattctctcactgtttagggaacagcagcgacttggacctgtccartgacactcttcaatgctggacacttgctgtaatttgctgctggcctcagtgtttcagatctccacttccaccccgaggctggctcctgctctgagctcct

SEQ ID NO: 163215 - DNA, 201 bp, Homo sapiens
gctgagcgtgggctaggagtcggttcttctacacgagcacgcctaacagctctgccacctgctttcccagtctgccctgccgtagggtccaagaagagcawttcatgtccttatttgtttgtggcttcatttgtcccacgtgaagggcagagacagaattatgagtgagcagacggtggtgtcttttaaataccgcatttc

SEQ ID NO: 163216 - DNA, 201 bp, Homo sapiens
aatttgctgctggcctcagtgtttcagatctccacttccaccccgaggctggctcctgctctgagctccttccttgcaggttgctatggtctgaatgcctrtgtgcccctactgaattcatgttgaaatcctcacccccccaggtgatgggggattatgaggtgggggctttgggaggtgattagtcatgagggtggaaca

SEQ ID NO: 163217 - DNA, 201 bp, Homo sapiens
agaaacagataagaagagggactgtgagaccatattttgttggggtgttgacagatttttaccatattactgagataaatgcactttactccagccccacygtgaccctcctctctgctgctcagtgtagtagcagctggattagtcagtagaaacacttgatacgtcagtccagatccctcaggagcatgcggtatgggt

SEQ ID NO: 163218 - DNA, 201 bp, Homo sapiens
aaagaacacacagaagatatagaaaccaggaggaccaggcggctgtggagtattttaggcagcactccctctttccctgctagtaaccatgtatatgaaaytgctttagtaattatacatctgttttaaaattggaatcggaaaggatactctttccacaatcctataggaaccctccttggttgttcaaacatttggcac

SEQ ID NO: 163219 - DNA, 201 bp, Homo sapiens
tggcctgggctggggactgcctgggcctgcagaatcagggcaagtggactgcaaattgatttgtccacgaagcatgggctgcagaccttacatataataasctagtacgcacctgctccagtttacagtatacaagggtgatggcattgcaataagtaaaacatgcactcagccagtgctattgaattcagagcaattttt

SEQ ID NO: 163220 - DNA, 201 bp, Homo sapiens
agtctcactctccccctctctcctccaaagtaaaaaaggggtgaacccacaaatacttcatttttgaataatcttttatttctatccaaaattttgcatgsttgatcctcttaaaatccttcccccccttaaaaagaagataattaaggctagcctccatggctcctgcctgtaatcccagcactttgggaagccgagaca

SEQ ID NO: 163221 - DNA, 201 bp, Homo sapiens
gatggccagtagcagagctaagggtgtgacagtaaagagcgcctgcaggagcccaggacttaggactaagaaaggaagtcattgaactggggagtggtatscttgctccctcacctccctccctttcaagcttctgcaaattggcttcctggcctgggctggggactgcctgggcctgcagaatcagggcaagtggactgc

SEQ ID NO: 163222 - DNA, 201 bp, Homo sapiens
ggagaaacaaggtggtttagaaagtctttggttctcaggcagcttctagggccttccaatttcctgtaattcaaaaatgcttggcatgccaaagccgcctmttttagggtattgttctctgagccccaacatcatagtagtacaggggaggggaaaaaaagtttgttctccaccttctaggttctccaatggagcccttgt

SEQ ID NO: 163223 - DNA, 201 bp, Homo sapiens
ggtagcacaggtgatcctggcagcaagagagggcagcccccaccccatgtacaagtgcttttcatgcctatgttagtatcacatatgctatcggggaacarggaagttttatgcagagtttcagttcagaaagatgaaaaagttctagagatagtagtgatagttgtacaacaatgtgaatgtacttaacacaactgtaca

SEQ ID NO: 163224 - DNA, 201 bp, Homo sapiens
aggtaatcattgtcacggaggaccaaagggtcttcaaaacctgtgatgccaagggggcattttactttctccttttgtgtgggtagccacaactctattcrccgtttttaatatttacttttggctttatcactccatcaagttgtttattttttattcattccttacaatagatgtagcagaatgggataaggcagcatc

SEQ ID NO: 163225 - DNA, 201 bp, Homo sapiens
agtgaggtggacagtcaaggattcagagtaggggtggctttggagtgggaaatgttaagatgtgaagagatcatagttttgtcatttggttcctgtttatsatttctgttaggctggattttttcaccagtattgagtcctggggtttcctgatagatagttcttgtgtctgctagatgctttaagtcctgtctgcgatgg

SEQ ID NO: 163226 - DNA, 201 bp, Homo sapiens
cttgtacataggtaatcattgtcacggaggaccaaagggtcttcaaaacctgtgatgccaagggggcattttactttctccttttgtgtgggtagccacarctctattcgccgtttttaatatttacttttggctttatcactccatcaagttgtttattttttattcattccttacaatagatgtagcagaatgggataa

SEQ ID NO: 163227 - DNA, 201 bp, Homo sapiens
ctagtgtgttgaatgaatacctgacttatttaagcttttcactttgaagatgtttggtagcatttccatccagtccttgtacataggtaatcattgtcackgaggaccaaagggtcttcaaaacctgtgatgccaagggggcattttactttctccttttgtgtgggtagccacaactctattcgccgtttttaatattta

SEQ ID NO: 163228 - DNA, 201 bp, Homo sapiens
acccaaaagaagttcgaatcgtacacccattctgctcctctcagtgaggtggacagtcaaggattcagagtaggggtggctttggagtgggaaatgttaaratgtgaagagatcatagttttgtcatttggttcctgtttatcatttctgttaggctggattttttcaccagtattgagtcctggggtttcctgatagata

SEQ ID NO: 163229 - DNA, 201 bp, Homo sapiens
tgccaaggcatctcatgaaaacctggccaacaagtgttaagggtccaccaactacagttactgaggcaaacacctcatctctgcattcagagttagcagakgacaaaggactcgaatgggctaaaggtcattcaggggcaagaatggcatttctggactcttctccttagtcatggaaggacaaggctgtgctgggaagag

SEQ ID NO: 163230 - DNA, 201 bp, Homo sapiens
cagctttcaaactgggtgaccatggaaccctcaggctttcagaagggttctgcaggagctccagaggtaatgatgtttgaactcggtaagattcaagctgsttggagaggccattcacagctttcagctgtattatatgttgatgtcctgactaataaccttattttgaaaagttattaagaatgttgggaaacctccaag

SEQ ID NO: 163231 - DNA, 201 bp, Homo sapiens
gtaatgctaagccatttctttctgcgtggtacaaggttctcctgcccagtacaggtgaggaaactgagtcccagtgaagttaagtggctttctagaagctstactgcccccagtgaccgctggactgggcaaggctgttgcagctgcaggcctttggctgtggttgagctgcagttgtttgtgttagtttcagcagatgag

SEQ ID NO: 163232 - DNA, 201 bp, Homo sapiens
taaccatcttccaatacaacagctttcaaactgggtgaccatggaaccctcaggctttcagaagggttctgcaggagctccagaggtaatgatgtttgaamtcggtaagattcaagctgcttggagaggccattcacagctttcagctgtattatatgttgatgtcctgactaataaccttattttgaaaagttattaaga

SEQ ID NO: 163233 - DNA, 201 bp, Homo sapiens
tgtcttgttaaacactttattatcacttgaggcatttatttatttattctacagatatcattttcagaaatgatttgtggtggttcttctggactgagaaragcctgggtttcacagctgggtacagcaggggtggggttgccacttggtctgagtagaaggaattctggagtaccttcgggtctctgtctgggccatctg

SEQ ID NO: 163234 - DNA, 201 bp, Homo sapiens
aaaatctgggatacacactttctagctcttgggctcgttaaagatgaacatgatggatcatgaagcattgcttggcagggctggggccagcttgtggtaaktatgcctggcacagcacacggaacccgttttcttctcttcttcatctgtgttcttaggaggtcaggtcatgtcacccccttttccaaatgcgtgtgattt

SEQ ID NO: 163235 - DNA, 201 bp, Homo sapiens
tcataaatatatacaatttttatttatcaataaaaacaaattaagaaaaacaactctttacataggcaataaaaatacctatgaaggaattgtaggagtaktacctgttattacagcaggggcaagttgtaaacctctttccattttttcccttcattttgcccaatattttgatatctcctgtaatgtcgatgctcgctg

SEQ ID NO: 163236 - DNA, 201 bp, Homo sapiens
aatagggaaagctgtagagacagaaataagacacattagtcattagcttggacgggggagatggtgggtttgggaatgatagctaaagtgtatggagtctstttttggagtgataaaaatgttttaaaattgattgtggtaatgattacccaactgtgaatatactaaaaaccactgagttatatttaaataggtggattg

SEQ ID NO: 163237 - DNA, 201 bp, Homo sapiens
ctgggtcgccctcaccctggcctagcccacctttccagtttatccttgatttcacctgacttgccctccctgcactctcctccggacctgtcagcaccctsagatacacctcattacccccaacccccagcctccatgtgtttggtcacggagtttcttctgcttggagcatgcccttcacaccctactcctgcctactgt

SEQ ID NO: 163238 - DNA, 201 bp, Homo sapiens
tttactgtcaggtgcttatgtgtcctgtcctgagcccgtttcctctcttgtaaaatggagcaatgctgcttgatgaaaccagtcaagttgtggttggattyttatatgtaataaacctgcacattgtgcacatataccctaaaacttaaagtatgataaaaataaaaaaaattgttgcaaatctgagtatttgagaaaatc

SEQ ID NO: 163239 - DNA, 201 bp, Homo sapiens
tttagtagctgactctggccctggtcccttgacttcctgcaagttctgttacctgactgtggccatccaccctcccacatgggtgctgattgtcttgtttgtgtaccggcttggcctttgccagtgacagtttatcctgaccccagcccgaggcctagtgtctagaaaaattatcatattttcagtggttgattataaaac

SEQ ID NO: 163240 - DNA, 201 bp, Homo sapiens
aaaagcttattatattagtcaatattctccaggaaaacagaagcaataggatgatctattgatgagttgatcgatctagaggttaatgtattataaagaaytggctcaggattggctcatatgattatggaggctggtgagttccaagatctaagctggagaacaagagagctgatggcatagttccagtccaaatgccag

SEQ ID NO: 163241 - DNA, 201 bp, Homo sapiens
tgtatatcataaatatatacaatttttatttatcaataaaaacaaattaagaaaaacaactctttacataggcaataaaaatacctatgaaggaattgtargagtagtacctgttattacagcaggggcaagttgtaaacctctttccattttttcccttcattttgcccaatattttgatatctcctgtaatgtcgatgc

SEQ ID NO: 163242 - DNA, 201 bp, Homo sapiens
agagatgcattgggagctgaaataattcatttgtcctttctaatgaatagtaataatttataatttgtactaatcaaaaacctttcatccacaaaagccarcaagttttataaacattctcctctcaccagcctctacagtaagtgcctgacaaaggtaggatcgtccataatttgcagaagggccaagatagagaacaca

SEQ ID NO: 163243 - DNA, 201 bp, Homo sapiens
gtgggaagagcggagtgtgggagtcctcgtgtgaccctctgggggtggtgatggaactgactgtatggtctgcaaaacctaaaatatttactgtcaggtgsttatgtgtcctgtcctgagcccgtttcctctcttgtaaaatggagcaatgctgcttgatgaaaccagtcaagttgtggttggattcttatatgtaataaa

SEQ ID NO: 163244 - DNA, 201 bp, Homo sapiens
cttgacccacaatctggaactcgtttgtttttaacctacttttttagttttgttccatagaaaatcattaattgctcatgaaaagtgaaatcgcactgctraaaacctgtcctctggtactgggggtttaagttccttctgttgctccaacactggctggtgtttacacactggtgcctgggcaggcctctcgctccgtgt

SEQ ID NO: 163245 - DNA, 201 bp, Homo sapiens
ctgggtctggttccaatacagtcgtcttgctttttctctgtatggagtaggtagtataagtggcaaaatgtactgatatttgggtcaaatcagattatttytggaagtcaaagagcctcaaataacccaatgtcattgtatatacttaattgcttatcatctttcttaaaaataaatggctatctaatttacggttctttg

SEQ ID NO: 163246 - DNA, 201 bp, Homo sapiens
agggccaagatagagaacacagtgcagaaatcattactaatttatctgcagcttggaatttatatttggaaagtcactttgaacttattttcatcaagctrttttgattgcccagaaatataatttatactgacctccataatggatatctgccaagatgaaagctacaaaagtcattgatccagatgttttctgttatct

SEQ ID NO: 163247 - DNA, 201 bp, Homo sapiens
atagtgccatatgtgttcatgctgcttttgtttttacaaagacttaactttttagggcagttttaggttcacagcaaaattgagaggaagatacagaaatwtccatatgccccccatgccctcacatgcacaagctccccaactatcaccatcccccaccagagtggtgcatttgttacaaatgatgaaccaaattgacac

SEQ ID NO: 163248 - DNA, 201 bp, Homo sapiens
ttgtcaagaaaagaagcatagagacctggattgtgtgcagattccttctctcataaagcggtatgcttgagcttaaggtaccatgtggtttcttggggcaratgccagaaatataggaggaggggttaacagaatccacagggccagctttaccaccgctctgtgcaacctcttatgtgatgacgcacatcagagcttcca

SEQ ID NO: 163249 - DNA, 201 bp, Homo sapiens
agaaaggtccctctggcacagaagtggtacagccttcagatccctgggaataacagggaaggagaacaaataaggtccctcgctagagtaattatggtaastagctaattaaagatttttgaccaaggagaggggtgggggagacataaagcaggttacactggcgggcctcccctctgaagcctctggtgctcaaagcct

SEQ ID NO: 163250 - DNA, 201 bp, Homo sapiens
gcgatacttttcaaatgccagacttcctcagcttgtgctatacttcccgttcacacactgccgtgtctttgctatgccctcccatacaccaaaaaaaaaamaaaaaaaaaaaaaccccaaataatccaaaaactcttgttcagatttccaaactggttcaaggtcaagatggaccaaaatttactttggctttatcttaac

SEQ ID NO: 163251 - DNA, 201 bp, Homo sapiens
atccactcatctaaccattcatccatccatccacccatccacccactcacctgttcaaccaagcaaccatccatctacccacccattcagccaaccaaccrtctatccgtccatccaaccattcgtctatcttcttttgagttgctttaaaactcagtaaagttatttcactcaattaaactaatattatttggaacagtg

SEQ ID NO: 163252 - DNA, 201 bp, Homo sapiens
aaaatgtactgatatttgggtcaaatcagattatttctggaagtcaaagagcctcaaataacccaatgtcattgtatatacttaattgcttatcatctttyttaaaaataaatggctatctaatttacggttctttggctacttattagcttataattttttgtattcagatctctttataataagtatgggaggtaatgc

SEQ ID NO: 163253 - DNA, 201 bp, Homo sapiens
gatagagaacacagtgcagaaatcattactaatttatctgcagcttggaatttatatttggaaagtcactttgaacttattttcatcaagctgttttgatygcccagaaatataatttatactgacctccataatggatatctgccaagatgaaagctacaaaagtcattgatccagatgttttctgttatctgcaaacct

SEQ ID NO: 163254 - DNA, 201 bp, Homo sapiens
gaaaggtccctctggcacagaagtggtacagccttcagatccctgggaataacagggaaggagaacaaataaggtccctcgctagagtaattatggtaacyagctaattaaagatttttgaccaaggagaggggtgggggagacataaagcaggttacactggcgggcctcccctctgaagcctctggtgctcaaagcctt

SEQ ID NO: 163255 - DNA, 201 bp, Homo sapiens
ttgaattttcctttaaaaagttttcgtattttacctttgatttaaaaaaattagtttaccattaggtattttatactttgcataggtcaaaagtcatgtgyaaaattaaaaagcatggttcagatgaggccacaaattattctttggcctgctgaaaagatctgatattttaacagattgtacccagaagggaagagtcat

SEQ ID NO: 163256 - DNA, 201 bp, Homo sapiens
agatcttgggttactattgaaaagggctgtgtgtgcctgctgggattcatggtgcacatggagagcaaaatgagtcctgggaagcagagacttaatgcagmgggggctggctgttaaaattttgaattccctagggcctggcagtgtgagttggaagacaaaaatgactgggtgcctctgggagggcctagcagtccagga

SEQ ID NO: 163257 - DNA, 201 bp, Homo sapiens
tggtgggggggaataaaaagcaaacgagattaataaggaaaggaaggaaattacattgtgtgcgtgtgtgtgtgcttaatgtcttttgtaagaggacttayctttaattcatctttgtaagacctgactttaattatgtcacttctgaatgttgtaatcgtatgactttcagagcagtgggagaggaaaataacatttgga

SEQ ID NO: 163258 - DNA, 201 bp, Homo sapiens
accatcatccattcagccatctgtccatccactcatctaaccattcatccatccatccacccatccacccactcacctgttcaaccaagcaaccatccatytacccacccattcagccaaccaaccgtctatccgtccatccaaccattcgtctatcttcttttgagttgctttaaaactcagtaaagttatttcactcaa

SEQ ID NO: 163259 - DNA, 201 bp, Homo sapiens
cttataattttttgtattcagatctctttataataagtatgggaggtaatgcatatgctcattagcttgatttagcccttcaacaatgtatacatatttgaaaagttcatgttgtatatcataaatatatacaatttttatttatcaataaaaacaaattaagaaaaacaactctttacataggcaataaaaatacctatg

SEQ ID NO: 163260 - DNA, 201 bp, Homo sapiens
attcagtatacctccagaccttatcactaccaagtgtccaacacagggctgctaagtaatcttgaaaatataccttccactcttatcagtgcaccttcttracaccaaatctgtattcttgatcctggaattcagaattctccatcaaaaacattgaaaagcaggttacttcatcagctctcctctatatactgtgttgag

SEQ ID NO: 163261 - DNA, 201 bp, Homo sapiens
ttatatgttggactggtcttcttttcctaggataaatcccacttggtcatggcttataatcctttttatattttgctgtgttcagtctgctagtattttgytcagaattttttcatctatattcgtaacgatattggtctgtagtgctttaaatttttacttatgttcattattcacatttaaaaagtgacaaaaattgta

SEQ ID NO: 163262 - DNA, 201 bp, Homo sapiens
aacccaggactagggtttcctggggaaacaagggaaagcagtccaggcgtgtgggggagagattcagggtgctttccaccctctcccggacctcagcttcyctgcacctggctttgcttttgtaggctggggctgctgctcctctcggcttcttccatggcagtcggtgccacccagctcgctggtgttcctgactcgggc

SEQ ID NO: 163263 - DNA, 201 bp, Homo sapiens
tttggagcagagttaataactggaactcctgttacattcaaacttctaacatgctagtgtagttaaattccagacagtatgtaaaaggcttgggtatgtayggtgggccaggggagcaggtccattgttttcaaatatttgaaaaacagctgcctgagggagggaagacatcattagtatgtgtttctcagagggaccaag

SEQ ID NO: 163264 - DNA, 201 bp, Homo sapiens
cctttctataaagtgttctatgcttcattaacttttgcccccctcttttagttccatccttcaaataccttcgtatagttgtcattctctttttaacttaytttgttgatattttttactttttgctcctttctaataattaattcaattcaagttatagatttctattgctgtatcccaatcgttttgatagtagcagct

SEQ ID NO: 163265 - DNA, 201 bp, Homo sapiens
ggtggatcctgcattttgtcatataaaaattgcacatcatttttagctgccttcagaaccctcttcatatttattaggagtattgtgctcctatccagcarctaaagctgcttcgtgttgtccagttagggtgaactatagaagaaatgtcctatctactgcttttcttttttaaaaaaatttttatttccttaagttttg

SEQ ID NO: 163266 - DNA, 201 bp, Homo sapiens
agtggaagcttgttcctcggtggtgacaccttgtctccacgctcatccattcgagtgaaaattcatctctttccctcccaaaaacatcatgtaatgaatgwtggttgtttttgctctgaaggagactttttttttttttttttttttttttttttagacggagtctcgctctgttgccgggctggaatgcagtggcgtgat

SEQ ID NO: 163267 - DNA, 201 bp, Homo sapiens
agccctggagtggtctgacttaagagaaggaaaataaacaaacaaacaaacaaaaaccccaaggctctggtaagatgcatagtaattgctgaggtccattrtgggagaaatactagtctgtactctagtatctgcttgcaattaagtttgtaaaactttgatcacaatccgtgaatattttgtaaagatttttacttttat

SEQ ID NO: 163268 - DNA, 201 bp, Homo sapiens
agatgttaaaaaaaaaaattaaggatataactaaagccttactctctctcacgtctgaaattggtgtagaacactttcatgcacatttttctggaattacrgcgtatacatgtagccataaacaatatattttacatgtttaaaaactttgataaaatattttaaactgttgctatccttttgcaaatgaaattagatatt

SEQ ID NO: 163269 - DNA, 201 bp, Homo sapiens
ccctgtttttaaaatgaacaaatccaggcataggcagattatctgacttgtgtaaacccccataattagtaagcggcagagccagaatggacgcagggacrgtctatgtctagagtcgttgttttgaactcctatgctgtgtctctctcaaagagaacaagaaagtacaagtcactacaatgaaaagaactccattgtcag

SEQ ID NO: 163270 - DNA, 201 bp, Homo sapiens
tatcacagagcagagaaagaagggtaggtttggagcagagttaataactggaactcctgttacattcaaacttctaacatgctagtgtagttaaattccaracagtatgtaaaaggcttgggtatgtatggtgggccaggggagcaggtccattgttttcaaatatttgaaaaacagctgcctgagggagggaagacatca

SEQ ID NO: 163271 - DNA, 201 bp, Homo sapiens
cctcttttagttccatccttcaaataccttcgtatagttgtcattctctttttaacttattttgttgatattttttactttttgctcctttctaataattaattcaattcaagttatagatttctattgctgtatcccaatcgttttgatagtagcagctccattataattcattttaaagattttaacattgtaattgtg

SEQ ID NO: 163272 - DNA, 201 bp, Homo sapiens
ctccctacttggagtggctcctcatcttccttctttagcacagtgtggaggtaggagtgaagattctggagctacattatggaggtctgggttctgactcygcccctcagtggtggtgtgatggtggctgtgccatgtaacctctctgtgcctaactgtcctcatctgtaaaatggatataatgaaaatagctcttattgg

SEQ ID NO: 163273 - DNA, 201 bp, Homo sapiens
ttgccaaggccggcaacccttgatggtggcagcacggagcagaccgagcccccagccgacttacccccgaggcctcgcgcctcccccttcacagcattgcrccttccctcttccagttcccagggtcgcttcaggctgtcccagccctctgcctagtcagctgtcagggaggggaagtggcaagtccaaggccgccagagg

SEQ ID NO: 163274 - DNA, 201 bp, Homo sapiens
atcagagcttccacaagcattatctcagcacacaggtgggtgaacacaggccaaggaaccatcggctcaagtttgctacccctgctgtgccagtgggtctkcacagcctcaacaggggagaagtgagcgagagagtgtggatgtgagtgtagaagcagtgtgtgtccagagagggtgtggattcatgtccgaatggtattt

SEQ ID NO: 163275 - DNA, 201 bp, Homo sapiens
aatgtggccaagcgcagtgactgttaggagaggagaaaggatcctgcttttcctcaccttcttgtccctctgcaactcagagggagaatcaaaattcacattttttagagaacatggatctttcagaatatgagagtttcatgagtgtttttttttttaatttaacacttaagtatagcactctgaaaaataaacactcta

SEQ ID NO: 163276 - DNA, 201 bp, Homo sapiens
ctcttttagttccatccttcaaataccttcgtatagttgtcattctctttttaacttattttgttgatattttttactttttgctcctttctaataattaattcaattcaagttatagatttctattgctgtatcccaatcgttttgatagtagcagctccattataattcattttaaagattttaacattgtaattgtga

SEQ ID NO: 163277 - DNA, 201 bp, Homo sapiens
attttcatgacttcctccccaatctttttttctttaaaaaaaaaaaaaagctggaaaaatacacataacataaaaattactaacagccatttttaagtgtrttgttcagcagtatggagcccattcccttcgtcgtgcagtcatcaccaccatccactcctcgagctctcttcatcttgtaaaaccaaaactctgtgacca

SEQ ID NO: 163278 - DNA, 201 bp, Homo sapiens
aaaatcagcctgctctgaatcacagtggagatggacagtcacttggaagagagattggtttctgtgtctgtaggatttcagagtaacctagtggaatgccytgactgtgtaaaaggagcataggtcctcagtaggaggttggtgagctagaacagcctgggagaggggaggtcctggccactctcttgggtgttctgggca

SEQ ID NO: 163279 - DNA, 201 bp, Homo sapiens
tgatggatctttgcaggtctctagcacttatcagaaatgcctggcacgttttaaacaaactaatgactggtggttggttgtcaaatgagttgttgggaaattttttttttttagttctctgtctctccactccttttacctcaacataaaagcagcccagagcttctgcctggctgccaatgtaggcagccctcccacctc

SEQ ID NO: 163280 - DNA, 201 bp, Homo sapiens
tcttttagttccatccttcaaataccttcgtatagttgtcattctctttttaacttattttgttgatattttttactttttgctcctttctaataattaattcaattcaagttatagatttctattgctgtatcccaatcgttttgatagtagcagctccattataattcattttaaagattttaacattgtaattgtgat

SEQ ID NO: 163281 - DNA, 201 bp, Homo sapiens
tttattttgtaagttgcccagtcttgggtatgtctttaccagcagcatgaaaacagactaatacaaacatccagttagatatactgtctccattaaaccaragcacttgtctgtgcccctcccatggcacctaacactttctatcctgtgttttcagtgtttgggtgagttctccaagagcaggctcagtgtatcacatgt

SEQ ID NO: 163282 - DNA, 201 bp, Homo sapiens
cttttatggttttgcataaataaaactgaccctagattccactgggagatgagttgaaagttcagtgttttcgtaccagctaattgactgaaacccagagkttcagactagaccagtgcttcctttcagcaccactcgcctttccgccatgatgctgtggtctcttttgcactgtccagtggagggcctctggccacatgt

SEQ ID NO: 163283 - DNA, 201 bp, Homo sapiens
gtggggattatttacagaaagaaaatgcaatgaaatcaggttagtcaggcagacagttctaattcttatttagaattcaataaaatgcctctctgagatayatatctcagtctattgtgagtttagtctgcacaggtcattctctccaaattgagttaacctcgggctgagttatatgacaaaaacagagttttggtcgga

SEQ ID NO: 163284 - DNA, 201 bp, Homo sapiens
ttggctttcctggtccagcccgggctggtctggtcccctccagatgatctcagcgttcatgaaggcaggttctggagacttaggaggagggacccctcccygccttccctgggacgtggaatcccctgtgagcaggatggatctagggtatgtcttttagccttctgtatatctgcatagacttttcttctgccttctcat

SEQ ID NO: 163285 - DNA, 201 bp, Homo sapiens
ttcagttgcctcctgcatttccctggagatttcctatcccttgcatgtgcccataatttcatttaaacctgttttaaaagtgtatgtaacttttaagtaayctataatcttcccttcctcaggttcattaagcactgaaccaatagtgcacaggctgagaaacttacctcacccagatgttttgggcctgaattctaaccc

SEQ ID NO: 163286 - DNA, 201 bp, Homo sapiens
cttttagttccatccttcaaataccttcgtatagttgtcattctctttttaacttattttgttgatattttttactttttgctcctttctaataattaattcaattcaagttatagatttctattgctgtatcccaatcgttttgatagtagcagctccattataattcattttaaagattttaacattgtaattgtgatt

SEQ ID NO: 163287 - DNA, 201 bp, Homo sapiens
gcatgtgcccataatttcatttaaacctgttttaaaagtgtatgtaacttttaagtaacctataatcttcccttcctcaggttcattaagcactgaaccartagtgcacaggctgagaaacttacctcacccagatgttttgggcctgaattctaacccctctgaaagccacccaccaccagcttctgcaccaggcaccca

SEQ ID NO: 163288 - DNA, 201 bp, Homo sapiens
cgatcctcccacctcagcctcccaagtagctggaactacaggtgcacaccaccatacgcaactaatttttaattttttttttttttggtagaaacagggtyttgttatgttgcccaggctggtctgaaactcttggcctcaagtgatcctccttccttgggctcccaaagtactggggttacaggcatgagccactgtgta

SEQ ID NO: 163289 - DNA, 201 bp, Homo sapiens
ttttagttccatccttcaaataccttcgtatagttgtcattctctttttaacttattttgttgatattttttactttttgctcctttctaataattaattcaattcaagttatagatttctattgctgtatcccaatcgttttgatagtagcagctccattataattcattttaaagattttaacattgtaattgtgattt

SEQ ID NO: 163290 - DNA, 201 bp, Homo sapiens
gtgcccataatttcatttaaacctgttttaaaagtgtatgtaacttttaagtaacctataatcttcccttcctcaggttcattaagcactgaaccaatagygcacaggctgagaaacttacctcacccagatgttttgggcctgaattctaacccctctgaaagccacccaccaccagcttctgcaccaggcacccagtct

SEQ ID NO: 163291 - DNA, 201 bp, Homo sapiens
ccttccttgggctcccaaagtactggggttacaggcatgagccactgtgtaaatgttttgtaggacttttagaaaacatggggttgtgcctttggccacaygcatgcttgtggatctacaagaacagcggtcctgtaactcttcagggaaggggcaccacatatctgtcctgtcaccatggcaaagctggaagggtctgca

SEQ ID NO: 163292 - DNA, 201 bp, Homo sapiens
cctagaatttttttttctttactcttcaagtttcttaatttttgccaagtgttccattattggaacgctaagcatgtgggagttatttgtatcctactcarggtcatcgccaaggtctgtttgcaaaaattcaaaaaattgcaacctcaggcataaatgggtacggactatgttcaattttgtttcttctttttacagtgt

SEQ ID NO: 163293 - DNA, 201 bp, Homo sapiens
attacaggtgtgagccactgtgcccggcctggatcctatcttaaaggaatttctgtggtgataaattatgaaatgcctttctcgtgccatccgacctcctstgttcactctctgcacctttctattgtttcactggaagtgtcatgatattccatgagcacgttggttgctattaccacgtaagacaatgggaaaaaagaa

SEQ ID NO: 163294 - DNA, 201 bp, Homo sapiens
acctgggctagtgctccatcagcaggtgtactgaacagatggagaagggttttaagtttttcagttcaattagatcaactctctaggttctggccagcgcrttccctttctcacttagtttcttcctcttggcattaaaattgttgagcatagcaaaacacaaattaagtccaggagataaaatgcatatagtgcctgcct

SEQ ID NO: 163295 - DNA, 201 bp, Homo sapiens
gtttgaaacaagaaaggtttggactgtttcagtggatgttttgttcatataactggagcaggttttctttggtggttttattttgccccattctttattawttctggatattttcaagagtgtggattatccagatttgtggcttgttctccagcctccctcccattttgttacccactaagatgcatatcatggttgtca

SEQ ID NO: 163296 - DNA, 201 bp, Homo sapiens
caagaatgtaacacaggatcaacaagtgttgactaattgataaccgagattccagattaaagacaaattttagtctgatgatcttaaaagtaattatgctrggtggaaaataccctcactttgggtatggttaaaatgactatcttgaatatctcattaagaggataatgtctcattgacatttatactgacagcccctag

SEQ ID NO: 163297 - DNA, 201 bp, Homo sapiens
gcacaaaagtattcaaaagaaaggatttctggattgttttttaaaaaacaaaactgtgatgtaaatgatgaattgtgctctgtggtctgattaggaatgtragtggatccagagtacagtggggctgaggcaatggaagtatttttttgtgtttttttttttaacttttaggtcagggatacgtgtgcatgtttgtttaat

SEQ ID NO: 163298 - DNA, 201 bp, Homo sapiens
ccgctttgggaaaggaaggagaatgtctccgggtttgcacggggtgcgtttgaatttctggggtggggttgtgagtggcaggattctgtaggcaagagaaragaagactctggatcccaggaaatggtggggcacagagtgaggcacagagcaggaattgtcattggtctaaacaccccagcacctgaagtataggatagc

SEQ ID NO: 163299 - DNA, 201 bp, Homo sapiens
tcgattggatatgaacactacctgctaagttaacagtagcattgggaagcatggttgtcatggaaacttgttcctgattggaaagggatagttatagggtyttacccatacacagaaggagagacgatttctttccctaggcttttttgttgttgttgttctgatcataaaagggaaaaacaaaaaggcagagaggagcta

SEQ ID NO: 163300 - DNA, 201 bp, Homo sapiens
attgttttttaaaaaacaaaactgtgatgtaaatgatgaattgtgctctgtggtctgattaggaatgtgagtggatccagagtacagtggggctgaggcartggaagtatttttttgtgtttttttttttaacttttaggtcagggatacgtgtgcatgtttgtttaatgggtaaacttgtgtcacgggggttcgttgtac

SEQ ID NO: 163301 - DNA, 201 bp, Homo sapiens
cacccaggtgtatcctctcaagtcttaggaatggaaatgagtagattccttcctgtaattccagacgtgacttaatggcctaagagaaaaaggttgctaaraaaacctccaagtatctattgctttatacctattatcctcaagcagcaaaatgttaacaatcagttagaatattgtgattccttgtttgctcgaaccctt

SEQ ID NO: 163302 - DNA, 201 bp, Homo sapiens
ttaaaaaattgacaagcttcgacaccacattctaattttgtttcaagggtaatcacgagaccaggagcactagcaggaaaactgtgtcaccacagacagarctggctcactgtctggaaacagaggccagggagaaagggtcgcatccctgggacgagatgtgcaaaaatcgggcttctcagcatcattcgttagcaccac

SEQ ID NO: 163303 - DNA, 201 bp, Homo sapiens
tttaccgttgggtgctttacaggaaaaaaatttgctgacctctattctaggctaacagggtaggcagatgccctcatggcaaattctgtctcgaataccarattacctctctggacttgtttctgacctaaaggatttcctttcctttcctgccagctcagatagcatttgaaatgtttttctaaaaaaaattatattcac

SEQ ID NO: 163304 - DNA, 201 bp, Homo sapiens
agaagccccttcttcctcatgtgtccctccggcgccctctactgacaggggttagcatcaaggcatctggcaaaggacgcaatttacaaggcccagtgctrttatcacagagcagagaaagaagggtaggtttggagcagagttaataactggaactcctgttacattcaaacttctaacatgctagtgtagttaaattcc

SEQ ID NO: 163305 - DNA, 201 bp, Homo sapiens
tgcattaatcacagtgcagaggtacagtggagtgtacacgtgcatatgagcacattttaaattagggaaggggctgaaaagaaaaattaatcaaattaaarcagcattaggaatgatgtggacagaaggtaattagttgccatcaaatactgaaaatatcaatcaaccgctaattgctatatggtttcttttattagcaga

SEQ ID NO: 163306 - DNA, 201 bp, Homo sapiens
aaatttgagtgaggcagtaatcttttttacatctagaagtgggccatagaacaccaattgtactggacagtttagaaacttatggtacaaaatgaaggttytgtatttggagcccaaggaagtgcatggcaacatttgcgacgtgcgtgagtgtgtgtgctcttgggagatgggttgtgattttcatcagatgttcaaaga

SEQ ID NO: 163307 - DNA, 201 bp, Homo sapiens
ctgtacagtggctcttctgcgaccaagtggcccccttggaggtggaagcaaaaggaaaggctctggacggaggttccccagctccttgataacgtgtaaaratctctggcaagtcagaggagttcattgctcacattaagagctgcttctcattgctctcttattcattcagccattagttaattaattctctcaacatga

SEQ ID NO: 163308 - DNA, 201 bp, Homo sapiens
ggaacaatcatctgtctggttttgagagtcaggtcgtaaaatggtgaaatcacatactgggggctggagtggggcggtgggcagtgtgggggcattgggargctgctggtttttttttttaaaaaacaagttttaattttttcatctaataaactgttttttgtttaaagagcagttttaggttcacagcaaaactgagca

SEQ ID NO: 163309 - DNA, 201 bp, Homo sapiens
ttggaggcttacattatgatcctcgagccaacagtgggatttggcagcttcctatctgcggatgaggcagcagctatcctaagaggtctacctgagcctaragagaggcagctgcgttataggaggtgaggataggagagagttgtaccctgcaggggcctggtgaaggaagcctctgggaaccaggaagggagaagcccc

SEQ ID NO: 163310 - DNA, 201 bp, Homo sapiens
acccagccaacgagaaaaagccctgtcgtgctgtgtgggaaggcaggtgccgggccttacctagctccacatgctcatgccatacttgctggaagctgggwtgatgggatcccttctccagggccacaggaagggagaggttcatgggtcctggatggctaggccctggctgggactagagagcctgggcgagagaattgc

SEQ ID NO: 163311 - DNA, 201 bp, Homo sapiens
aggtgtatagtgtatattaatttgccaactgttgttccactcaggatctcagttatacgtaacttcataaagccatataaaatttgagtgaggcagtaatyttttttacatctagaagtgggccatagaacaccaattgtactggacagtttagaaacttatggtacaaaatgaaggttctgtatttggagcccaaggaag

SEQ ID NO: 163312 - DNA, 201 bp, Homo sapiens
cgtttgatagtttgaaaatgctctggggaacaatcatctgtctggttttgagagtcaggtcgtaaaatggtgaaatcacatactgggggctggagtggggyggtgggcagtgtgggggcattgggaagctgctggtttttttttttaaaaaacaagttttaattttttcatctaataaactgttttttgtttaaagagcag

SEQ ID NO: 163313 - DNA, 201 bp, Homo sapiens
tcagtaggaactatttgaattttgttttagtctaagttatagtgagttgtttaatctgttagcatttaagtcgattagcatttaaaataaaaatggtattyttccaacttattctaccctaccttaaaacctgctccccagaattccacattattttacctgctccttctagtagcatccatatcttgaaataacacattt

SEQ ID NO: 163314 - DNA, 201 bp, Homo sapiens
cggaccttgtacgtgaaggttgaaggattctggtgctctctggtgccatcgctgttagtcgttgtgcagcacagaaatattttattcaacaaactctgcaractcctgaactttaggggtgggctgccttctgcctggtgctctgcacagatcctggagctctcgtggtcatttatgtgcagtgaagctgctccactcacc

SEQ ID NO: 163315 - DNA, 201 bp, Homo sapiens
agtgaagcacccagacgtgagcggagcggcttgggaagaggtcactgttgtttcctggggccgtgcctccgatctgccggggactcctcagcctgggagtyatttacaaaccaccgaggcccctcagctgcgggagaagctttgcttaataaatcctggcctctgaggcgtggaattgtgaagtctctcagggaatgccga

SEQ ID NO: 163316 - DNA, 201 bp, Homo sapiens
atgaataacagcatctgtagcaaatttaggagaaactgcacaagttagaaggtatcatgttttaatattctaaatttaaatatgactagtaagagggtggsttttaagactggtataagcaatcatgaagagtgatggtttgtgaaaaagtagaccgtgtaacagcagcaaaataaagttagtaagataattctgaaaaca

SEQ ID NO: 163317 - DNA, 201 bp, Homo sapiens
tgtttgcctaataacagtgcattgaaatatatgtttgttttgtgtggtttttttgcatcagttttgttttataacaaaaggctaaaaataagtatttaaaraaaatagtgcatactatattttatttgctgatattcataatgatcaccagattattgaaatttatgagtaattttgctataaataagcctgttttctttg

SEQ ID NO: 163318 - DNA, 201 bp, Homo sapiens
ttgacacataaaattaaccctcactcttactcgcgctttaagactaccctcaaacgaattctacaggaaagcgtccaaatgtcgatactatgtagatttaygtgtttattttttttattctacgctgtacatttcttgagggagagaaatttttgtcacattcatctttcaatcactagacactagcctaggacctggcat

SEQ ID NO: 163319 - DNA, 201 bp, Homo sapiens
ggaatacagttaaagaacaacatttccttcactttattgaaatttgttgcaggataacatctctgtcaaagcactttacaaggctttctagtaaagtaaattttttgtgtattgcagtggggagaggggagggggttgcctcttgtaaggcagaatttgattggcattatctcttaagtcttcatttccagcaacaatctt

SEQ ID NO: 163320 - DNA, 201 bp, Homo sapiens
aaaagtaatgagataaaagcagaagaggcagggcacagtgactcacgcctctaatcccagcactttgggaggctgaagtgggcggatcatgaggtcaggasttcgagaccagcctgactaacatggtgaaactcggtctctactaaaaatacaaaaattagccaggcgtggttacacgcacctgtaatccgagctactgag

SEQ ID NO: 163321 - DNA, 201 bp, Homo sapiens
ctgcacagtttgttcactgaactggtgctgtggctgtgccttggggctattccagtgctttttcaggacggcagttcctggtgacgtgcagtaaaataaarcaggtggaaaccagctgtgggctcactgctgcattttccttgctgcaaagtgagttgcttggtctgatggatgttatttaggggacagaagttggccaag

SEQ ID NO: 163322 - DNA, 201 bp, Homo sapiens
agatggacttttgctcttgttgcccaggctggagtacagtggcgcgatcttggctcaccgcaacctcggcctcctgggttcaagtgactctcttgcctcascctctcaagtagctgggattataggcacgtgctaccacgcccagctaattttgtatttttagtaaagacagagttggtcaggctggtctcgaactctcaa

SEQ ID NO: 163323 - DNA, 201 bp, Homo sapiens
gaatacagttaaagaacaacatttccttcactttattgaaatttgttgcaggataacatctctgtcaaagcactttacaaggctttctagtaaagtaaattttttgtgtattgcagtggggagaggggagggggttgcctcttgtaaggcagaatttgattggcattatctcttaagtcttcatttccagcaacaatctta

SEQ ID NO: 163324 - DNA, 201 bp, Homo sapiens
tgggagttgtcaacttatatttgctaaatgaaaccccagttgctgataagattacttgggaaaagtaatgagataaaagcagaagaggcagggcacagtgrctcacgcctctaatcccagcactttgggaggctgaagtgggcggatcatgaggtcaggagttcgagaccagcctgactaacatggtgaaactcggtctct

SEQ ID NO: 163325 - DNA, 201 bp, Homo sapiens
aaacacgtgtattattcatttggggaacatggtgtgtccctacctttggagtgtttgattcagtgtcctggagtccggcacccacctgcacagtttgttcwctgaactggtgctgtggctgtgccttggggctattccagtgctttttcaggacggcagttcctggtgacgtgcagtaaaataaaacaggtggaaaccagc

SEQ ID NO: 163326 - DNA, 201 bp, Homo sapiens
ccatgttctgatgcatttctgatctgtctctaagagatgtgctgagaagtaattcatgtcttagtggccactgttttgtacctaaaatgatgtccaaagaktcatccatccatttctgtttcctacaagctcagcatctggctggcactagggaacccagaacgtggactggaatagccatgaggagcctaacttgtatat

SEQ ID NO: 163327 - DNA, 201 bp, Homo sapiens
ttttataaaatagtttgctgtagaattccattaaatgatttatgtaatttccatgggtagtctttttttttttttttggagatggacttttgctcttgttscccaggctggagtacagtggcgcgatcttggctcaccgcaacctcggcctcctgggttcaagtgactctcttgcctcagcctctcaagtagctgggatta

SEQ ID NO: 163328 - DNA, 201 bp, Homo sapiens
tggggaaaggtttgttgcagaagttaccattccaatacaccatgcaagatgcattcagacgttctcttagatttcagtatcacacggtggatcctgcattktgtcatataaaaattgcacatcatttttagctgccttcagaaccctcttcatatttattaggagtattgtgctcctatccagcagctaaagctgcttcgt

SEQ ID NO: 163329 - DNA, 201 bp, Homo sapiens
agtcttgctatattcccagataaaagtgtactgttttggggactaggacctctaactctacagagccaagagtgtgggaacaaaagctacaaagtctcccratgggtccctgagatagtaaatgaagtcaatcctgtttctctcctttgctttccaaacacgtgtattattcatttggggaacatggtgtgtccctacctt

SEQ ID NO: 163330 - DNA, 201 bp, Homo sapiens
cactattttgcaactctccaggaattaatacatctaggcattgagcacccatcaatgctaactagacatgaaagagacaactagacattttgtgctttctmatcaaagaccatccatagccccacctctagtcttgccagaggatcaagtctgagtctgatgaagcctctggatccaattgtcaacttgcagaaagttgtc

SEQ ID NO: 163331 - DNA, 201 bp, Homo sapiens
attcatgtcttagtggccactgttttgtacctaaaatgatgtccaaagagtcatccatccatttctgtttcctacaagctcagcatctggctggcactagrgaacccagaacgtggactggaatagccatgaggagcctaacttgtatataggccttacttgaataaattaaatatgccacttactggaaaggtgccacat

SEQ ID NO: 163332 - DNA, 201 bp, Homo sapiens
tccaccctgctgtctgtccagcatggacggcaaatagtctgtcaaacacctctctagtcattgtcgtcatgggcccaaaaagactgttagcctctttaccrtatagatagatcaaatatatatttttgtcgaattctgcagtaacctgtgatgtgcgttggcctgagacaaaaattcgcttccatcctcagatccttgttg

SEQ ID NO: 163333 - DNA, 201 bp, Homo sapiens
attacaaagggcactgtttcttttataaaatagtttgctgtagaattccattaaatgatttatgtaatttccatgggtagtctttttttttttttttggaratggacttttgctcttgttgcccaggctggagtacagtggcgcgatcttggctcaccgcaacctcggcctcctgggttcaagtgactctcttgcctcagc

SEQ ID NO: 163334 - DNA, 201 bp, Homo sapiens
atcttcaaaatctagtgagaatttaaagacattcgtgtagcaacttgaacaaagaatttatctagattttcatgacttcctccccaatctttttttctttaaaaaaaaaaaaaagctggaaaaatacacataacataaaaattactaacagccatttttaagtgtattgttcagcagtatggagcccattcccttcgtcgt

SEQ ID NO: 163335 - DNA, 201 bp, Homo sapiens
gtggccactgttttgtacctaaaatgatgtccaaagagtcatccatccatttctgtttcctacaagctcagcatctggctggcactagggaacccagaacstggactggaatagccatgaggagcctaacttgtatataggccttacttgaataaattaaatatgccacttactggaaaggtgccacatgtaaagcattgc

SEQ ID NO: 163336 - DNA, 201 bp, Homo sapiens
tagtacaactgtgctagtgcagaactaaggccaaagggtggaaaattccgtgagagtgatttggattcactcttaaaatgatagcagcagcagcagcagcragactcacagcagcagagctagctaccagaaacaggtggccctagagctccttgtccccagaaatacacaggtagaggctgggtgctgtcagtctcagtc

SEQ ID NO: 163337 - DNA, 201 bp, Homo sapiens
caattaaaaattgttttatctctacaaaaaattccgatttatcagacagtcaatttgcattacaaagggcactgtttcttttataaaatagtttgctgtaraattccattaaatgatttatgtaatttccatgggtagtctttttttttttttttggagatggacttttgctcttgttgcccaggctggagtacagtggcg

SEQ ID NO: 163338 - DNA, 201 bp, Homo sapiens
agatggggtttcaccagattggccaggctactcgaactcctgacctcaggtgatgcaccctcctcggcctctcaaagttctaggattacagtgaactgccrtgcccagcttgccaaattctttactacacataaggtgactgaaaacagatagataaaaaatttatatagcctagtgatcttagtatggagggatctctta

SEQ ID NO: 163339 - DNA, 201 bp, Homo sapiens
gcagaaatgctgagctgacaggaagctcattttgttcctggaagagggctttattttatttcaaaccctcagctgcctggtgcacatttttgttctggcartaaataactttaagctcatgtttgagttctttcttctttttttttttttaatattccatagaagaaaaataaaagtttttatatgaataatttttaagac

SEQ ID NO: 163340 - DNA, 201 bp, Homo sapiens
tctatcacattatcatacgtgttcatagtatctttgctgtttgcaaaagtgttatttgcacttttaaatccttctgtcatataatactataaagcttctatttaacatttttcctttgcctttctagtgttacaagggtttggtgtctgcactctgagtgacagactcttactgaaggtctttcctgagctgtgcacaatg

SEQ ID NO: 163341 - DNA, 201 bp, Homo sapiens
ctatcacattatcatacgtgttcatagtatctttgctgtttgcaaaagtgttatttgcacttttaaatccttctgtcatataatactataaagcttctatttaacatttttcctttgcctttctagtgttacaagggtttggtgtctgcactctgagtgacagactcttactgaaggtctttcctgagctgtgcacaatgc

SEQ ID NO: 163342 - DNA, 201 bp, Homo sapiens
agtgatgggagcactctgagactaggtcattaaaagattgtggctcgtattgtgaaaactctctgttaccgcgtgagagatggtaggggaagccagttgcmacgtcatgaagcagccctgtgcagaggcttacatgacaaggacaaaagcctgccaagaactatgtgagtgagcttcgaatcccctcaaccccagtcaagc

SEQ ID NO: 163343 - DNA, 201 bp, Homo sapiens
agactggatgcagggagatgagttgggcagctattataggattccgggccagaagtaatggaagctttgtctaggatggtggaagtatgggtgggagggakggatatttaggaagtacaaagaccagaacttggaacttcactggaagtggagagtcaataagagggacaggtccaggtccaggtcatggctggtgatttt

SEQ ID NO: 163344 - DNA, 201 bp, Homo sapiens
catcacataggtccttcatccaccggttctaaaatttgagtgactctatgggggttctctggcagtatctaggcgaaatcatgtggtctctcatactcacrtaggtatgaaccctgtatgctgataggtagttcaaagttgaaaccaaagagacgtgcacattttgctagaggtatcccaagtttgcccagttatttaaat

SEQ ID NO: 163345 - DNA, 201 bp, Homo sapiens
tgaggcaggagaaatgcttgaacccaggaagcaaaggttgcactgagctgagattgcattactaaactccagcctgggcaacagagtgagactccatctcaaaaaaaaaaaaaaaaaaaaatgcagaagagagggcttagtacccgaggaactgattcctccacttgagcggtgggaggggaactgtccaaccaggcagga

SEQ ID NO: 163346 - DNA, 201 bp, Homo sapiens
ataggtagttcaaagttgaaaccaaagagacgtgcacattttgctagaggtatcccaagtttgcccagttatttaaatccagcattagacatcagagaggrtgaggattttctatagcttcaaataactgaaggctggcaagcagcaaaacatagggccccacaatcctgctgtcctcgaatggtaaaaagaggcatttag

SEQ ID NO: 163347 - DNA, 201 bp, Homo sapiens
gaggcaggagaaatgcttgaacccaggaagcaaaggttgcactgagctgagattgcattactaaactccagcctgggcaacagagtgagactccatctcaaaaaaaaaaaaaaaaaaaaatgcagaagagagggcttagtacccgaggaactgattcctccacttgagcggtgggaggggaactgtccaaccaggcaggac

SEQ ID NO: 163348 - DNA, 201 bp, Homo sapiens
atggtttatggactctctaaagactattgcatgtgctacgtgttcttcatatgaccttgatattttaatattctatagttggtttggctgttcaactcacstctctccttgaacagcttaaatcactgctgaggaacaggtgcagcggtcaaaggtcaacagactgacagactttaagtagttaaatgtgtcaatatttca

SEQ ID NO: 163349 - DNA, 201 bp, Homo sapiens
caaacagaagctggacctcggagaggggaaacgattctcccaaaattgtgtagccaagtggaagaaacattggaatctaggtgtgattccagactcttccrctgtcccatattagtttcacaccagataattttctctgatcagacgttaggaagatgttgaaaacacctaaggaatggggcaggggtgatgaacagatat

SEQ ID NO: 163350 - DNA, 201 bp, Homo sapiens
gatatgtattccagtttacaaacagaagctggacctcggagaggggaaacgattctcccaaaattgtgtagccaagtggaagaaacattggaatctaggtstgattccagactcttccactgtcccatattagtttcacaccagataattttctctgatcagacgttaggaagatgttgaaaacacctaaggaatggggca

SEQ ID NO: 163351 - DNA, 201 bp, Homo sapiens
atttctgaacataggggccattgaagtgcctgtgtgccattgcctgcttattaaaatgaattatgaacaaatatatttcttttaattcttatgcagttctstgagatatgtattccagtttacaaacagaagctggacctcggagaggggaaacgattctcccaaaattgtgtagccaagtggaagaaacattggaatcta

SEQ ID NO: 163352 - DNA, 201 bp, Homo sapiens
ggctgaaagatgggacaggatgggtttgaccttgacaattggggcaggaggggcagaggagtgagaagatcaggtctgtggtcttaaaagattactctgtkgtaaggagattaggagggcctggctcccagagttcagtgggggacacatggcatttgaggttctggttgggcagtccaggtggagatttccaagaggcag

SEQ ID NO: 163353 - DNA, 201 bp, Homo sapiens
agcaggttcgtaggtgtacactcctgaccgttgagagaatgatcctggatttactgctcgttaatgaatggttaggaatcctagtattcacacattgatgkgctacagaaatccctatggagcttgttagaaatttctatccctgggaagctctccataccctgtggttagaagatctcagagatcttgccgtctctcatt

SEQ ID NO: 163354 - DNA, 201 bp, Homo sapiens
aagagaattcaggctcaacttcgaatgcaaaggacaagtgggagttcataggtaaggagcaggagatggaggtcagtgaatggaaattatgggggaaacascaggagtaagggggattgtggctaaagtgacctaacaggattcctgctgatggcacgccagggtgatcagaccacctgggggatggcagcagatggggaa

SEQ ID NO: 163355 - DNA, 201 bp, Homo sapiens
ccttgtgtgccagggactgtgataggatcagaaaggttaaacagtttacccggagtcataaaatagatgtttaaaatagttgcagagtaggtacacaaagrtatgtcttttgacttatctagatggaccccataatgcagaagaacgagtcttggccatttgcatactgacacttgggctagcaggccagaaggttctaca

SEQ ID NO: 163356 - DNA, 201 bp, Homo sapiens
tgtttgccactattattatcaaatgatctctagttttgcatcttcaaaatctagtgagaatttaaagacattcgtgtagcaacttgaacaaagaatttatytagattttcatgacttcctccccaatctttttttctttaaaaaaaaaaaaaagctggaaaaatacacataacataaaaattactaacagccatttttaag

SEQ ID NO: 163357 - DNA, 201 bp, Homo sapiens
gtccctacttgtcttcacagaaagaacagttcttgtgtggtaatcaaaatggtatttctttgagaaaaaagatgcccctgataagaaagacaacaaatackttgatgtggaaacagcctccaacatgaagtaagatttccaactgatcagatccttaatttagatgtcaagtgagaggttgactatttgtagggctctgtg

SEQ ID NO: 163358 - DNA, 201 bp, Homo sapiens
gattacaggcatgagccaccacccctggctcgaaatatgattttaagcccatccaattggcaaatatttatatactttgtaacaccaaatgcttgcaaggstgtggcacaacagagatcctcctacactgcttataggacgattgtacctggcaaactccttttgcctacttgtccctgtagcagtgatcccagagtgccc

SEQ ID NO: 163359 - DNA, 201 bp, Homo sapiens
agcccagaaacgggactacttacaacgatgtcatataaaggtaacattggagataagtgggagaaataatggattatttaataacaatttatttgggattyttggttatgaatatggaaaaaagtaaactgaatccccacctcaccccctacataaaaattatttccatatggtctaacaacctaaaattaagcttaaaat

SEQ ID NO: 163360 - DNA, 201 bp, Homo sapiens
tccacaaggttccccacttaagccagtaatcttcgagtcagccataaccctctctttctctcaaactctgtgtcaaatctgtcaggaaatccttttggctstatcttcaaaatatatccagattctaatcatgacccatgacttcctccaccaccacttggtctaaaccaccattatctctcacttggattacagccatag

SEQ ID NO: 163361 - DNA, 201 bp, Homo sapiens
aactcctgacatcaggtgatctggctgcctcggccttccagaatgctgagattgcaggcgtgagccaccatgtctggccaaatgcttaagatctttatggrgaaaattataattataacatggtattgaaggacatccaagaagacttgaataagtggagagctatgttattgttttcatagtagtaaaataaaaccttgc

SEQ ID NO: 163362 - DNA, 201 bp, Homo sapiens
tatgatcatctcagaagaaagcatgcattgttaatattcagaactcatgcatgataaaaagcttttcaaagtaagaatggaaggaaactttctcaacctgrtaaaggatatcttgcaaaaacctacagtaaatctcatatttattggatccttcccactaatattaagatgagacaaggattcctagcattgtcattattc

SEQ ID NO: 163363 - DNA, 201 bp, Homo sapiens
atctccacacacctggaggagctaacctattgaagagaatgatttcctgttatcctcctggaattcaggtacaatttaacttcttgccattaaaacacaamttgatagtggtaaccttttcccacctcttgggacgcttatttttagttttctggagaagatgcagattggaacacaatgactacagatagataaggcata

SEQ ID NO: 163364 - DNA, 201 bp, Homo sapiens
ggaaatgagcagactaacagaccaaaaagtaaactgcaaaacaagataatagtaaagaaagagcagaaatagaaaacagaaaggaaagatgataaagaggwtcagtgaaacccaaggtttgctctgcaacgaaaacctctaaaaagagagatataaaaatatgaatacatgacaatgaaacaaagcatcccctaatgattc

SEQ ID NO: 163365 - DNA, 201 bp, Homo sapiens
gcattaatcacagtgcagaggtacagtggagtgtacacgtgcatatgagcacattttaaattagggaaggggctgaaaagaaaaattaatcaaattaaagyagcattaggaatgatgtggacagaaggtaattagttgccatcaaatactgaaaatatcaatcaaccgctaattgctatatggtttcttttattagcagaa

SEQ ID NO: 163366 - DNA, 201 bp, Homo sapiens
atgagtgcggaagatgtagtggtcggcctcttaggtatttttagagaatcacatttgaacaatcacaatcacagatctttaccagtcaggtcaaaatttgsagtgtcaatgtgtttggaaaagggctttatgaaaatttgaactttctttaaagttcttcctgaagatttcatatgagaacccaaatcttaagggaaacta

SEQ ID NO: 163367 - DNA, 201 bp, Homo sapiens
aggaaatgagcagactaacagaccaaaaagtaaactgcaaaacaagataatagtaaagaaagagcagaaatagaaaacagaaaggaaagatgataaagagratcagtgaaacccaaggtttgctctgcaacgaaaacctctaaaaagagagatataaaaatatgaatacatgacaatgaaacaaagcatcccctaatgatt

SEQ ID NO: 163368 - DNA, 201 bp, Homo sapiens
aggcaggagaaatgcttgaacccaggaagcaaaggttgcactgagctgagattgcattactaaactccagcctgggcaacagagtgagactccatctcaaaaaaaaaaaaaaaaaaaaatgcagaagagagggcttagtacccgaggaactgattcctccacttgagcggtgggaggggaactgtccaaccaggcaggaca

SEQ ID NO: 163369 - DNA, 201 bp, Homo sapiens
gtgataaccaaagagttttatgcttgagaaatggagaaactggctcaggaattctgtaggcagcgtccagagaggctgctatgaggctgcagtatggtacrtttcatctgaggactgggggccggctctgaggctgtaccacagcatgctgtgattctcagagatcagggtgaccagaggagcagctctgacctcgagtgg

SEQ ID NO: 163370 - DNA, 201 bp, Homo sapiens
gagttaattttttataacaaacaaaagcattttaaaatgtgtgtttaggatgttcaaagaggtcagtgaagaaataataaactatgacagaaaataggcaraataaaagaactaaatataaaacttggaataaaaaatagctactgaaataattccatacctggaactcttagattgaacccagttgatgaggaacttagt

SEQ ID NO: 163371 - DNA, 201 bp, Homo sapiens
gattttagataaatgatatccataggaggtaaaatttaggtattatataattaattaatgagctgctataattatcctttcattatttttgtagtttttgkagaggttaatcttgtaggcagttgtgctgaccagatgttttctgggtgttctgaacccaagcacatgggaattaaatacgtgtgtgtgtgtgtgtgtgtg

SEQ ID NO: 163372 - DNA, 201 bp, Homo sapiens
taattttgatatgttctttaagtctcttaggtgcttaagtcatgatgtaagtttgaatatttttttccttcaatttaaaactttatttctacggaatgtaratgtccttcagaagttcctaggggaggtggtggtggtgacaggtaaattcattgtgtctatgacttccaaaggccagttttcagaccactgtcatcagta

SEQ ID NO: 163373 - DNA, 201 bp, Homo sapiens
acactgatgttttcaaatcacatctaatggagccataatgtaatatgagaaaataaccttatggggggtcagggggttgagcttctccaggaattttatgrgatatgctgggtcttaattacttcataatgactgacaatttttagagccttagaataaaggtttctttttttttcctaagttacattaaaaataaatatc

SEQ ID NO: 163374 - DNA, 201 bp, Homo sapiens
ccggagttggagtctgacagtcccctacacctgctgggggatcaggaatgagtcacttagtctctcccgacaccaatttcgctatctgccagaaggggaaragtatccttctggtgtacccaagtggattcagtgagaggacatgctctccatgtacataatgggccaaaggtcatgcattttttcattttatgtggaaaa

SEQ ID NO: 163375 - DNA, 201 bp, Homo sapiens
tgagctgcacgtgtgtgagctcagggtactgtgtgccagggcaggaggcaagagacaagaggcacatggcgttgagtgtaagattgggcaatgcaggtgcwtaaaagctgcacaaagtgaatgggggcccttgcagaactgggtactgtggctggcctagcaagaggcagatggggccacagggatctaaagtgatgcatt

SEQ ID NO: 163376 - DNA, 201 bp, Homo sapiens
ccaagatggtgtctgggaatgtgtgtccgtggccagggtctggctgtctctcgtccactgagctacctttctagagttgagctcaggatatttctggtctstgcctatgttccaccttctgatcaaggacctacagctatccagctgtagccggaattgagggtccttttgttgccctggtcagaggtttcatcaaggtgc

SEQ ID NO: 163377 - DNA, 201 bp, Homo sapiens
agtgatccaagattgcatcactgcactccagcctgggtgacagagcgagactttgtctcaaaataaaataaaaataaaaataaaaataaaagggtaaacakgaaagcgtgaagtgtatactttacagcaagctaaaacaggcaaagccagtttgttactttgaacagtcagcagctgtgacggcactggggaaagtgtaca

SEQ ID NO: 163378 - DNA, 201 bp, Homo sapiens
aattatgtctctggacggctatcccaaacaatgtggagcacgggctctgccgttcatgacaacagccaagagagaagtttgtttgggttcttattgtgcaracacagtgggaggggaggctgcagtggctggggagagcaactcgtggagggaaggagttgattttggaaagacaaaatggggttgtgtagggatatgtgg

SEQ ID NO: 163379 - DNA, 201 bp, Homo sapiens
gctgcctggttgaggctatgctgtatattaaaaggaaggattaaccatcttgttcttgaccctaaaccctatcctgcaaactctcttgacaccgaagttgytattatgatcgtacaacattatttggtaggattaagtcagtgggtgatagatgaaactgccttcctctcactactttgccaaatctctgacttttttgtc

SEQ ID NO: 163380 - DNA, 201 bp, Homo sapiens
ctccgatctgccggggactcctcagcctgggagtcatttacaaaccaccgaggcccctcagctgcgggagaagctttgcttaataaatcctggcctctgargcgtggaattgtgaagtctctcagggaatgccgagggacagaactaatttcagcgtcttcgttctttgagaatgggaggtagcatcacgtctctgactgg

SEQ ID NO: 163381 - DNA, 201 bp, Homo sapiens
atatatttgattctaggtcttttcagaagtttagcattgaatctttttcaaaattttctctttttgcaacatttccagctatatttcaacttgtttatcaraacgatggctgcctgggctaaaaccagtgctgccaggcaaagctgctcccagtggagcccaggtgggtgcaacagggagctggctgtcgggcagggctga

SEQ ID NO: 163382 - DNA, 201 bp, Homo sapiens
aaaaggccccagcgcctactgcctgctttcctgcctgcgttaatatcatctcttatcttaccaactaacatataggggtgtgtgtgtgtgtgtgtatttakgtgtgtgtgtgtgtgtgtgtgtgtctgggtatatatacacacacatttatattcgttaatttccgtggaaaagaaagggatggcagcagaaacattttaa

SEQ ID NO: 163383 - DNA, 201 bp, Homo sapiens
tgcactttgcatgctcatggaaactcgcaggattattgaggaggctgtgcagagggaaggggccttttaattctctgcctccttagaggtgcaccctggcrggccaggagccccaggcagagatgtttctgtacaggtcccaggttttgcagcaaggtcccagagcatcccgttctcccagtgaaattccgttttcaattt

SEQ ID NO: 163384 - DNA, 201 bp, Homo sapiens
aaaggccccagcgcctactgcctgctttcctgcctgcgttaatatcatctcttatcttaccaactaacatataggggtgtgtgtgtgtgtgtgtatttatgtgtgtgtgtgtgtgtgtgtgtgtctgggtatatatacacacacatttatattcgttaatttccgtggaaaagaaagggatggcagcagaaacattttaaa

SEQ ID NO: 163385 - DNA, 201 bp, Homo sapiens
agagaattcccatctatcccatccccccaccatgcccgctatcaacatccccacctgagtggtgcatttgttacaccccaggaaccacactgacacgtccycagcagccatagtttgcgttgagttcactcttgatgttctgacatgtataatgagtgacctgtgtccaccatgaagttattgtacagagtaatttcgctg

SEQ ID NO: 163386 - DNA, 201 bp, Homo sapiens
cccacctgagtggtgcatttgttacaccccaggaaccacactgacacgtcctcagcagccatagtttgcgttgagttcactcttgatgttctgacatgtayaatgagtgacctgtgtccaccatgaagttattgtacagagtaatttcgctgccctaaaattctctgtgctcagcctattcagcccatcctccccccccaa

SEQ ID NO: 163387 - DNA, 201 bp, Homo sapiens
gaaagaaaatagatggtcccgctttgcacttacttcaaaatgtgccttactccctctggtgggaccatttaactccagcgcgccacccctcccccgctctsgccgctcccgtctgccccgctgcctcggcccacgtgatggctgttcgggccccgccgagccatcttcccgttgctatggcagccggcgcggcgagcccgc

SEQ ID NO: 163388 - DNA, 201 bp, Homo sapiens
aggcctgggttgaaatgaagttctaccagagaggatttctgctagctgatatcaggcaactgggggcttcatccatcaaaagcacttaacattgaaacttwcttttcttttctgagccacataagtaagaagaattcagacggcacctctgtctaggtgggtggctggtgaaaacttccaacagtacttttctctctccag

SEQ ID NO: 163389 - DNA, 201 bp, Homo sapiens
caatgatagagctatcagcactgccatttcctggcccgtgtggtatgagaatatgagtagccaataatgctgtcacagcctgggaaagagacggcaaaggrgaagaggcagccgcttgagaccacggagccacagccgcccattcccagcagagctcggagaccacagtgacacacctgcccattcccagcagagcttggt

SEQ ID NO: 163390 - DNA, 201 bp, Homo sapiens
tgggaggaccttgggcttcatctcctgccctccttctcctgccccaaatggctaccaaggtgggtccagaagaaactctcagaggtctgtagtttgtttawcttctaggctttttatacatttctttccttcataatagctcagtgaaaaatgttaaaatattttaaaaatatattgtacccagcattttagttatatcag

SEQ ID NO: 163391 - DNA, 201 bp, Homo sapiens
cggcaaaggggaagaggcagccgcttgagaccacggagccacagccgcccattcccagcagagctcggagaccacagtgacacacctgcccattcccagcrgagcttggtgccattctcaggtctcccaagctgaccccaggtgtccgtgcttttatgggttaataccaccagggtattgaagtagattttgacaatcaaa

SEQ ID NO: 163392 - DNA, 201 bp, Homo sapiens
aaaccagtccattccgtacctcctcttgcttgtttcaccctgagtaattagccaggaagtttttggtttagggctaatccccaggacctcagaaaggacaygtcctgaagagcagaatccccagaacatttcaggggaagagctgggaggaagggacttatgaggcctagatgctggagctgggtgtaccctacgggcccc

SEQ ID NO: 163393 - DNA, 201 bp, Homo sapiens
gggatagggagggggtaggctagtgtccctgtttttaaaatgaacaaatccaggcataggcagattatctgacttgtgtaaacccccataattagtaagcrgcagagccagaatggacgcagggacggtctatgtctagagtcgttgttttgaactcctatgctgtgtctctctcaaagagaacaagaaagtacaagtcac

SEQ ID NO: 163394 - DNA, 201 bp, Homo sapiens
aagacttcatatgcaaacagcaacaaaaccaaaaaataacaaaggacagagattttaaaataatctcttataaataactagttttatctacccaaccaaakaaaataatcagcactccgtatgctacctcagatcctgttcagacatatgtgggtatcaataatgaatgaatcaattgattcatcctcagtcttgctgagt

SEQ ID NO: 163395 - DNA, 201 bp, Homo sapiens
tttggtgggatggagccatggcgctgaaggctcatcgtttttgagagcatcattgcaattcacttttcaaatttctttctttaaggctattccaagggacytatgagaaatgctgatggtgtggcctcttttcctgggcagttaccctggttagcccaaagtagactctggactcttccagggacagtccaagatagaaat

SEQ ID NO: 163396 - DNA, 201 bp, Homo sapiens
ctgcccagggaaagtcaccttttggggaattccactgcccaatgcctaaccttccctgtaagccctcaacatgaagtgatccaaagaagattgcttaacgragaaaaaaaaaaaatccagccagcccagaacagatacagaatctgcagggatggatcaccactgaacgttccctgccctccccagtgttctgaacccgag

SEQ ID NO: 163397 - DNA, 201 bp, Homo sapiens
ttctatttaacatttttcctttgcctttctagtgttacaagggtttggtgtctgcactctgagtgacagactcttactgaaggtctttcctgagctgtgcrcaatgctaagtgctcatgtgtacgtgatcccatttgctccttaaagcaacctatgaaccttagacccattttgtagaggaacagaaaggcccagtgaggt

SEQ ID NO: 163398 - DNA, 201 bp, Homo sapiens
ggattcatgtccattatctctcctttgacctagagtcccctccctacttggagtggctcctcatcttccttctttagcacagtgtggaggtaggagtgaarattctggagctacattatggaggtctgggttctgactccgcccctcagtggtggtgtgatggtggctgtgccatgtaacctctctgtgcctaactgtcct

SEQ ID NO: 163399 - DNA, 201 bp, Homo sapiens
ctgggcttcctggtggtcactgcagcggtcgttactgtgggggaaacaggcgacacatgtagggtgacctccgtggtggtggctactctgtttctttataracaagttacctttctctaatcagcagtccacagcagtggctccctgactgtgcctcctggagcagctgtttggggctcagtggccgagcacatggtcgca

SEQ ID NO: 163400 - DNA, 201 bp, Homo sapiens
aaaacctgtcctctggtactgggggtttaagttccttctgttgctccaacactggctggtgtttacacactggtgcctgggcaggcctctcgctccgtgtstgggcttcctggtggtcactgcagcggtcgttactgtgggggaaacaggcgacacatgtagggtgacctccgtggtggtggctactctgtttctttatag

SEQ ID NO: 163401 - DNA, 201 bp, Homo sapiens
gtaattagttgccatcaaatactgaaaatatcaatcaaccgctaattgctatatggtttcttttattagcagaaggtattttcaaattttgtagatttcartcaagagtagggataaggaaggtgtcttgttgcattatttaacatgatgtagattttcagaaaagtaaagagcacagaagataaattgaaatgtttacat

SEQ ID NO: 163402 - DNA, 201 bp, Homo sapiens
caaaaagaagaacataaaaatcacctgtaatcttagtcagtaagattcttaagactgtttaagattcttgcatcttacctatttgtgggtttgttgttgtkgtggttttaattgagatggagttttgctctcgttgcccaggctggagtataatggcgtgattttggctcactgcaacctccgcctcccaggttcaagcat

SEQ ID NO: 163403 - DNA, 201 bp, Homo sapiens
aatatattaaaatttgattttaggatgaaaacttaaaaatgaggcataggttaaaataattattaatacgggataggtaatgttcattaatagtcattctrtttgtgcatcattgatagcataagaatttatttaacttaattagggccagttaatccaaaaaatactctttaaaaacagtcacagaagcaaaaatacata

SEQ ID NO: 163404 - DNA, 201 bp, Homo sapiens
atttgaagacttcatatgcaaacagcaacaaaaccaaaaaataacaaaggacagagattttaaaataatctcttataaataactagttttatctacccaamcaaataaaataatcagcactccgtatgctacctcagatcctgttcagacatatgtgggtatcaataatgaatgaatcaattgattcatcctcagtcttgc

SEQ ID NO: 163405 - DNA, 201 bp, Homo sapiens
ggagaatcgcttgaacctgggaggcggagattgcatcaatccgagattgcgccactgacactccagcctgggtgacagagggagactccgtctcaaaaaaaaaaaaaaaaaaaaaaaaaaagccagccatttccaatggccttgacataaggattatgttgcattaagtaaggatcattaaggatctgaatgagctaacta

SEQ ID NO: 163406 - DNA, 201 bp, Homo sapiens
gagaaacagacgtttagcttggcataccttaggcccaagtagtgtgaacagtgatgcaagaacctgtgaactttccctacattcttatgtacagagtcttraaagcccacgatcattgtattattctatgtccataaccactaggtgttattaggaaaaacacttttcatcttcctgggtcatcagtgtcccagacttaca

SEQ ID NO: 163407 - DNA, 201 bp, Homo sapiens
aagtaaataatgatgtgaccacagttttctttacttaaaaatattttttttcacaggcttcagatctgtgtgtctacttgtcatgaaaagtatattttacyttaataagctaatgatttatttcaacagaggaagcagagccctccaagtttatatgagattgattactccaaagctttgactagagacctgttcttgtag

SEQ ID NO: 163408 - DNA, 201 bp, Homo sapiens
tgggaggcggagattgcatcaatccgagattgcgccactgacactccagcctgggtgacagagggagactccgtctcaaaaaaaaaaaaaaaaaaaaaaaraaagccagccatttccaatggccttgacataaggattatgttgcattaagtaaggatcattaaggatctgaatgagctaactaccatgagtttgaatgaa

SEQ ID NO: 163409 - DNA, 201 bp, Homo sapiens
gaggcatttaacacccggttccttttctatttatttatttatttatttatttatttatttatttatttatttattttgagaaagagtctcactctgttgcygaggctggagtgtagtggtgcggtcttggctcactgcaacctctgcgtcccaggttcaagcgattcttttcctcagcctcctgagtagctgggattatag

SEQ ID NO: 163410 - DNA, 201 bp, Homo sapiens
tttggcaattatgaacaaagctgctattaacgtttgtgtacaggtttttatgtgcacataagtttttaactcatttggacaaatatttaagaatgtgattrctggatcatgtggttagcctatgtttagctttgccataaattgtcaaactgtcttccaaagtgactgtaccattttgctaccagcagtgagtgggagttc

SEQ ID NO: 163411 - DNA, 201 bp, Homo sapiens
acacccagctaagactcactggctaattggaaagcaggacctgttattatgtaaaggctcctgtcctactaggtgagattttccttgagggtagggactaygtcttttcatctccctattcttgtgacacctggagcaggccttgctctcaataggctcctgatcaatgccgagttgtcacatcccctcatgcgttaaata

SEQ ID NO: 163412 - DNA, 201 bp, Homo sapiens
agggctggcagctgccacggtgctgcaccctgcagaagatctgctttcagcaggagaggctgaggcccacgggaggaggcagaaatggtagctggtcccargctccttagctataaccatttttctgcccttcccatggcttcagtcttcagcgtttccttggattctttgaccaaaaacaaccagtctatctccctgttt

SEQ ID NO: 163413 - DNA, 201 bp, Homo sapiens
ggattgttaggactgctaactgggctaatgcttgtgaaacacagggcctagcacatggtaaatacctcataaacaggaacccttattattattgggagttrtcaacttatatttgctaaatgaaaccccagttgctgataagattacttgggaaaagtaatgagataaaagcagaagaggcagggcacagtgactcacgcc

SEQ ID NO: 163414 - DNA, 201 bp, Homo sapiens
accacttggaaacctacagcctacctacagaatcatagttcagccatccattcctaccttcctagtgtttttgtttatttgcttggctcattgtattgtgtttatgtgtacatgtttgtgagggcagctcaactgtgacctcttgtgcagtgttccaaatttacaaagttccctaaggataccaggccatccctggccctc

SEQ ID NO: 163415 - DNA, 201 bp, Homo sapiens
tctattcagctcttgaaataattgcagttgcttccagtttttggcaattatgaacaaagctgctattaacgtttgtgtacaggtttttatgtgcacataaktttttaactcatttggacaaatatttaagaatgtgattgctggatcatgtggttagcctatgtttagctttgccataaattgtcaaactgtcttccaaag

SEQ ID NO: 163416 - DNA, 201 bp, Homo sapiens
aacctggaaggtggaggttgccgtgagctgagatcttgccactgcactccagcttgggtgacagagactctgtcaaaggaaaaaaaaaaaaaagaggcagwtatatatgttcatctgttgcctttgaccttgtcaaatctattgaagttctcaatgccctgaaaacaaatggacttagatctatggccactctctggcaaa

SEQ ID NO: 163417 - DNA, 201 bp, Homo sapiens
aaggggctgtttggaggagccatgggctgtttctgccttgcagggaggattgttaggactgctaactgggctaatgcttgtgaaacacagggcctagcacrtggtaaatacctcataaacaggaacccttattattattgggagttgtcaacttatatttgctaaatgaaaccccagttgctgataagattacttgggaaa

SEQ ID NO: 163418 - DNA, 201 bp, Homo sapiens
aaatgcctatttcccaacttatatccagaaattattgcctttttttttttttttttttttttttggacagagtcttgctcttgctctgtcgcccaggctggagagtgcagtggcgtgatctcggctcactgcaacctctgcctcctgtgttcaagcagttctcctgcctcagccttccaagtagccgggactacaagcgtg

SEQ ID NO: 163419 - DNA, 201 bp, Homo sapiens
tttattttattttgcagtggggggttgcagtggaaagatttggtttatagcggcttcctcaacattcttccccaaggccctcattgtttcactttcagcgrgcaacttcccctctctaagcctccgcttttcgatgaggaggctgacaggtgaactctaaggcctctgcagctctaggcccttggcctttacctcttacgc

SEQ ID NO: 163420 - DNA, 201 bp, Homo sapiens
gaggcagttatatatgttcatctgttgcctttgaccttgtcaaatctattgaagttctcaatgccctgaaaacaaatggacttagatctatggccactctytggcaaaactgagggaattttaaactctagcatcttttgggctgtagcaaggtgacaaaattaagtttctggagtgccccagaggctaaataaatgcaat

SEQ ID NO: 163421 - DNA, 201 bp, Homo sapiens
caagaatgccccaaagcccagtcctcattaatcagtttatagagtactatggaagcattttaagcacaaggtgttgtttctgagccagtaattctctttcyactcaacactgaaagtccactgcttgctttcctggtacatcaagacagccaaatagtgtcaataatttttcctcatagtttttcaaaagccaagtggagg

SEQ ID NO: 163422 - DNA, 201 bp, Homo sapiens
aatgcctatttcccaacttatatccagaaattattgcctttttttttttttttttttttttttggacagagtcttgctcttgctctgtcgcccaggctggagagtgcagtggcgtgatctcggctcactgcaacctctgcctcctgtgttcaagcagttctcctgcctcagccttccaagtagccgggactacaagcgtgc

SEQ ID NO: 163423 - DNA, 201 bp, Homo sapiens
tgtgtagtttaagaattttagctggtgtgcagccacccataaagacaaaatccctgagacaccttagagctaagtatggccacatgtctaaattctgactrtgggggccttagtagaagtgacagcgtgcagcttctgggtttgtggccttagaggaaggggcattctcttccacttcctcccttcccacaagttagtgtg

SEQ ID NO: 163424 - DNA, 201 bp, Homo sapiens
atggccactctctggcaaaactgagggaattttaaactctagcatcttttgggctgtagcaaggtgacaaaattaagtttctggagtgccccagaggctamataaatgcaattttgtcatttctggagtgttctgtaaatatcgagcctataaaacagaatgcagttacaagaagagttaattcacaggttggtgaaagga

SEQ ID NO: 163425 - DNA, 201 bp, Homo sapiens
agttctgggatgacagaggtggccactgcgcccagctggggtgcacatttttatggatcctccagtgataacaattgggcttttagtacatttaaaaaagmaaatatattaaaatgctaccatggatttaattatactttaaattgcatgcctatcatattcaccacttccacatcatgtacttctggaaaagggaactat

SEQ ID NO: 163426 - DNA, 201 bp, Homo sapiens
agaccgtcctgggaaacccaggactagggtttcctggggaaacaagggaaagcagtccaggcgtgtgggggagagattcagggtgctttccaccctctccyggacctcagcttccctgcacctggctttgcttttgtaggctggggctgctgctcctctcggcttcttccatggcagtcggtgccacccagctcgctggtg

SEQ ID NO: 163427 - DNA, 201 bp, Homo sapiens
ttggaggtctagagataaggagtgactttgttccataggcaccgggctcctggagtctgagccataggaaactggtattcagtactagagctaggattgargaaggggtctgttcacaaggaattcagtagcagcccaggtcctacgtggtaccacagtcagagtggaaccagcagcccagactgctgtgccatcgacctg

SEQ ID NO: 163428 - DNA, 201 bp, Homo sapiens
ggtggtgaagatatgtaagactgactgttcttactcagaaaatggacattttgaaagagagcagcaggttggatttggtggtgattctgatctgtgaggcmgtagtccactccaggttcttttcagaaacaaaagtgattactaaaactactcgagcaatgctcttgcctgtgccagaattgcttatcaacaaaaagacaa

SEQ ID NO: 163429 - DNA, 201 bp, Homo sapiens
tttgtaggctggggctgctgctcctctcggcttcttccatggcagtcggtgccacccagctcgctggtgttcctgactcgggctctgcccgcctcaccccytctgtaggctctccctggtgggtgttctgctgttcacagtcctgatttggcacaggccctctgaggacctcaacacagacgctccagagaagaggcctgg

SEQ ID NO: 163430 - DNA, 201 bp, Homo sapiens
tgttcataagccacccagtccatggtatgttgttacggcagcccgaacagatcaacacagcgtgcacgttccttgctgctgtttttgagccttgcccattaaaaaaaaaaaaaaaaaaaaaaatatgtgtctttgaagtctcctttaaaacacgcagcttgccctctcttccttcttttttcctgtgggtttttaatctgc

SEQ ID NO: 163431 - DNA, 201 bp, Homo sapiens
ttttttattttattatttttttgagactgagtcttaatcctttgctcaagctggagtgcagtggcgtgatcgcgtctcactgaaccctccacctcccaggygcaagcagttcccctgcctcagcctcctgagtagctgggattacaggtgcatgccaccatacctggctaatttttcatgtttataatagagttggggttt

SEQ ID NO: 163432 - DNA, 201 bp, Homo sapiens
ggaagaaatgagcggctgtgtgtgggcgagccattgatgcaggaggctctccttgccatttggtccagttgcagcagaataaaaaaagctccacttctggwtgagggatctcacatgacaagtatgcaagagctgtttaataccaccacgcctggccagtgacaggggcacggcatcctggttagtaatgaaagtggagtg

SEQ ID NO: 163433 - DNA, 201 bp, Homo sapiens
gttcataagccacccagtccatggtatgttgttacggcagcccgaacagatcaacacagcgtgcacgttccttgctgctgtttttgagccttgcccattaaaaaaaaaaaaaaaaaaaaaaatatgtgtctttgaagtctcctttaaaacacgcagcttgccctctcttccttcttttttcctgtgggtttttaatctgca

SEQ ID NO: 163434 - DNA, 201 bp, Homo sapiens
caatccaaacaatcttatgcccattatatttgccaggtgcccttttattttttgtttttgttttttattttattatttttttgagactgagtcttaatcckttgctcaagctggagtgcagtggcgtgatcgcgtctcactgaaccctccacctcccaggtgcaagcagttcccctgcctcagcctcctgagtagctggga

SEQ ID NO: 163435 - DNA, 201 bp, Homo sapiens
ttcataagccacccagtccatggtatgttgttacggcagcccgaacagatcaacacagcgtgcacgttccttgctgctgtttttgagccttgcccattaaaaaaaaaaaaaaaaaaaaaaatatgtgtctttgaagtctcctttaaaacacgcagcttgccctctcttccttcttttttcctgtgggtttttaatctgcag

SEQ ID NO: 163436 - DNA, 201 bp, Homo sapiens
acaatggtggttggaaattttatttgaatgcatacacaagtgaaatattccatgttggcaaatatcattgtaatattcaataatgaagcaatttcaagatygcatcccagcagccttgcaggccctgctttgccagtgtgatgatctgatattatgcagcttatgaactgaaaagtcctatgcaatagatgtggtttttca

SEQ ID NO: 163437 - DNA, 201 bp, Homo sapiens
tatttactcaatattttaatatacatttagtatatacatttgtgttaattcttttttaaagctttaaaaattaatcacgtaatctttgaaagtcactatgstagggaccggatacagtggtgaacaggataaaattgtttctgtcttcatgaagggtatataatctattacttaaaaaaaaaaaaaaaaagactataaggc

SEQ ID NO: 163438 - DNA, 201 bp, Homo sapiens
tgggattacaggtgtgcaccaccatgcccagctaatttttgtattattatcattagtggagacggggtttcaccatgttggccaggctggtctcaaattcytgcccccgggtgatctgtccaccttggcctcccaaagtgctgggattgcaggtgtgagccaccatgcctggcgatgtgagccaccactcctggcaaatct

SEQ ID NO: 163439 - DNA, 201 bp, Homo sapiens
aggacatgaatttcacaggtacaagcagtactgcaaatacccacccctgatccaccaaacctccaggaccaccactgagaacaggcctacttacagaggaycctgcaagtagacatatgtcaccatcattgtttaccacagagaagaattaggctgggaaaacacttaccaccctgctgggtatttaaatctgacccttgt

SEQ ID NO: 163440 - DNA, 201 bp, Homo sapiens
aggacatgccaattagagcaaagaagaaattaaaattgctaataaccatgaaatttgtgttttacttcactaataatataaattcatcctaaataaaacartagaatcctatcttccagctatgaattgctaaggattaaaaatgttgtaatggtgactgagactggccctcaaaaacgctgccaatggaaagagaaaact

SEQ ID NO: 163441 - DNA, 201 bp, Homo sapiens
tgttcactaaatcataaagtaacagctttgaccatgtgtgggatagtaaaatatgtggtattttaatggttctatgaaacttcatcttatgagtataccaygtttgtttccctttgtttggcttgtgtatttcttataagtattctaccattgtaataatgacagagtgaattttttgtgcatgtatatatcttttctatt

SEQ ID NO: 163442 - DNA, 201 bp, Homo sapiens
tgaagtttttgtccccattttttctcccatgtaagacatttttaatctaccttgcaatgaagaggctgttaaacacttgtaccagcaccacccagcttttmcatgtctatattaagctacatattataaatatatatatgtatatatgtgtatatatacatatatatatttgttctttacacttaactctgagatgagaaa

SEQ ID NO: 163443 - DNA, 201 bp, Homo sapiens
gacaaacagcttttcaattgctgtgaaggttttggtaactgtattgaagtttttgtccccattttttctcccatgtaagacatttttaatctaccttgcartgaagaggctgttaaacacttgtaccagcaccacccagcttttccatgtctatattaagctacatattataaatatatatatgtatatatgtgtatatat

SEQ ID NO: 163444 - DNA, 201 bp, Homo sapiens
agtgcatgcttttatcctgctgccaagacataggtctgcagtgatgcataagaaatgaccagacatctgcaccaactgaatgacaaacagcttttcaattrctgtgaaggttttggtaactgtattgaagtttttgtccccattttttctcccatgtaagacatttttaatctaccttgcaatgaagaggctgttaaacac

SEQ ID NO: 163445 - DNA, 201 bp, Homo sapiens
tccatctttcttccagcacccttatatggattcagtgcttggtgacattcttattaccctttctttcaccagcattctgtttcctcagcatatgacctttrtcagggtggcagtgggcactcacattgggaagcatggaagagttttgattcatcttacaaggacattaagggaggaggactggggagggtcgtctgggga

SEQ ID NO: 163446 - DNA, 201 bp, Homo sapiens
ctcactcttactcgcgctttaagactaccctcaaacgaattctacaggaaagcgtccaaatgtcgatactatgtagatttatgtgtttattttttttattytacgctgtacatttcttgagggagagaaatttttgtcacattcatctttcaatcactagacactagcctaggacctggcataaaacaggtatcaagtaaa

SEQ ID NO: 163447 - DNA, 201 bp, Homo sapiens
tggccttccagaaccaagcctactcagggtgaatcagcactgtgttttcttaggaaaagaaattttattttatttttttgccatatgcctgttgtctcctwaaaagtcctttgaatctcattcatgtttttatgtgatgacccttttccagtttcctaatttccataattctgccacttgtcaggtcacgatggagctgtt

SEQ ID NO: 163448 - DNA, 201 bp, Homo sapiens
tcatcagtgtcccagacttacacaaagaattatatttgaccaagaccaagtttccttgctgagctcactgaccttgggagcaacagtggtgcctgcagatrgatgtctttctgatggaggtcccaccctatatccttccagatttcagctgggattccaacattcatgataatatggaaataatcagtgatacatcatggt

SEQ ID NO: 163449 - DNA, 201 bp, Homo sapiens
acagacaaagagttgcacatctagggttggaaatgacgcctcttgacccacaatctggaactcgtttgtttttaacctacttttttagttttgttccataraaaatcattaattgctcatgaaaagtgaaatcgcactgctgaaaacctgtcctctggtactgggggtttaagttccttctgttgctccaacactggctgg

SEQ ID NO: 163450 - DNA, 201 bp, Homo sapiens
aacctcagtacaatccatgaaaaaagcagggcccagagattaacatggattcctcaacatcacacagacaaagagttgcacatctagggttggaaatgacscctcttgacccacaatctggaactcgtttgtttttaacctacttttttagttttgttccatagaaaatcattaattgctcatgaaaagtgaaatcgcact

SEQ ID NO: 163451 - DNA, 201 bp, Homo sapiens
atttgaacaatcacaatcacagatctttaccagtcaggtcaaaatttggagtgtcaatgtgtttggaaaagggctttatgaaaatttgaactttctttaargttcttcctgaagatttcatatgagaacccaaatcttaagggaaactaaaatctcataataaaaaatctcatagacacagatattcatgagtaatgacag

SEQ ID NO: 163452 - DNA, 201 bp, Homo sapiens
ctctactaaaaatacaaaaattagacaggcgtggtggtgggctcctgaagtcccagctactggggaggctgaggcaggagaatcgcttgaacctgggaggyggagattgcatcaatccgagattgcgccactgacactccagcctgggtgacagagggagactccgtctcaaaaaaaaaaaaaaaaaaaaaaaaaaagcca

SEQ ID NO: 163453 - DNA, 201 bp, Homo sapiens
aattagacaggcgtggtggtgggctcctgaagtcccagctactggggaggctgaggcaggagaatcgcttgaacctgggaggcggagattgcatcaatccragattgcgccactgacactccagcctgggtgacagagggagactccgtctcaaaaaaaaaaaaaaaaaaaaaaaaaaagccagccatttccaatggcctt

SEQ ID NO: 163454 - DNA, 201 bp, Homo sapiens
tgttttaagctcactctaaaaaggcctggcaaatcaagatgtgtttgcatgaaactaaaggcactaggaggagactaaaaggtcaaatctaccttttaggwgcagcctgcattccaaatggaggcatttcagcttactcaagtctttatttagtctaaccacttggcaacctactttatttagtttaatctcctggcaacc

SEQ ID NO: 163455 - DNA, 201 bp, Homo sapiens
attttctgggtagcctctgtaccgtctttctagctatgccttttcctttaggtacccaagcatgttcactggaagaagagaacacagactgggctgcagayggagggaagatgagtatagggactctccttgtctgtccctgtacctgcccactgccacctgtctacgtcctgagatacccagcagaggacagggttccac

SEQ ID NO: 163456 - DNA, 201 bp, Homo sapiens
atggtggtggttacacatgcagtctctagcatgaaattttctcaattcacatgtcatctgtgcagtttattatcaagtacctgccacttagaaagccatawgttctatttgactcaagcagacctatgaggatgagggagaccccattatccccattttccagatgctcaaagacagagagcaatgaccttagaataaatg

SEQ ID NO: 163457 - DNA, 201 bp, Homo sapiens
cttactcaagtctttatttagtctaaccacttggcaacctactttatttagtttaatctcctggcaacctactctaaccacttggaaacctacagcctacmtacagaatcatagttcagccatccattcctaccttcctagtgtttttgtttatttgcttggctcattgtattgtgtttatgtgtacatgtttgtgagggc

SEQ ID NO: 163458 - DNA, 201 bp, Homo sapiens
cccggaggcccgtgtatctgtgttagcagttggtcccctgcagagcacgacacctgacgtttctgtaacgagatgcaattttctgggtagcctctgtaccktctttctagctatgccttttcctttaggtacccaagcatgttcactggaagaagagaacacagactgggctgcagacggagggaagatgagtatagggac

SEQ ID NO: 163459 - DNA, 201 bp, Homo sapiens
ggctaacctgggcatttatggtggtggttacacatgcagtctctagcatgaaattttctcaattcacatgtcatctgtgcagtttattatcaagtacctgmcacttagaaagccatatgttctatttgactcaagcagacctatgaggatgagggagaccccattatccccattttccagatgctcaaagacagagagcaa

SEQ ID NO: 163460 - DNA, 201 bp, Homo sapiens
ttactcagcccttccttttgtagttctagtaaattgctttgtatttgaatccgtgctagggccttctccgcggagatttttttttcttgaggcctacaccrgcagcatggccaaatgcctatttcccaacttatatccagaaattattgcctttttttttttttttttttttttttggacagagtcttgctcttgctctgt

SEQ ID NO: 163461 - DNA, 201 bp, Homo sapiens
tgggccaatactgatatgttattattaactaaagtccatagtttacattcgggttcacttttggtgttgtacatgctgtaggtttgacaattgtataatamgtgtatctaccattatagaatcatgcagaatagttcactccctaaagattccctgcgctccacctgttcatctctccaccctcacaaacccctggcaatc

SEQ ID NO: 163462 - DNA, 201 bp, Homo sapiens
tgatagtacttgtattttatttatcattatattttctgatgtggatttgcatttgacagtagagctagaagctactataaagctaatctatgttagaattwtgtaaaaagtcaggtatgcaacagcccccaggaatgagtgcagagacgaggaggctgtaactagagtgtccactggtgagcaagtagaaggacgggtgac

SEQ ID NO: 163463 - DNA, 201 bp, Homo sapiens
gaggctgaggcaggagaaatgcttgaacccaggaagcaaaggttgcactgagctgagattgcattactaaactccagcctgggcaacagagtgagactccrtctcaaaaaaaaaaaaaaaaaaaaatgcagaagagagggcttagtacccgaggaactgattcctccacttgagcggtgggaggggaactgtccaaccagg

SEQ ID NO: 163464 - DNA, 201 bp, Homo sapiens
ttcggcatccgtgagtcctgtatttggtaccggaggcccggaggcccgtgtatctgtgttagcagttggtcccctgcagagcacgacacctgacgtttctrtaacgagatgcaattttctgggtagcctctgtaccgtctttctagctatgccttttcctttaggtacccaagcatgttcactggaagaagagaacacaga

SEQ ID NO: 163465 - DNA, 201 bp, Homo sapiens
ccctcacaaacccctggcaatcactagctttttacctttgatagttccgccttttccagaatgtcaagcagctgtgtgattcgagaatgggtggaagcatmcagtaaatagcatgtttagataggtctttttcacttagcaatatgtatttaacggtactccatgtctttctggggcttgatggcttatgtctttttatca

SEQ ID NO: 163466 - DNA, 201 bp, Homo sapiens
tagtgtagtacatttgttatcactgatgggccaatactgatatgttattattaactaaagtccatagtttacattcgggttcacttttggtgttgtacatkctgtaggtttgacaattgtataataagtgtatctaccattatagaatcatgcagaatagttcactccctaaagattccctgcgctccacctgttcatctc

SEQ ID NO: 163467 - DNA, 201 bp, Homo sapiens
ttagtgctaaccctcatgacctcgtttaacttaattacctctgtaaagacccgttctccaaggaaggtcacattccgaggttttaggactccaacatatcwtttggagggagacacgattcaacccgtaacactttctcataacagtaaattgaattatgataaaagtagttctcggaaatatatacatgatatcacaaaa

SEQ ID NO: 163468 - DNA, 201 bp, Homo sapiens
agtggcgtgatctcggctcactgcaacctctgcctcctgtgttcaagcagttctcctgcctcagccttccaagtagccgggactacaagcgtgcgccaccrtgcccggctaatttttgtatttttagtagagacggggtttcaccgtgttggccaggatggtcttgatctcttgacctcgtgatccgcctgcctcggcctc

SEQ ID NO: 163469 - DNA, 201 bp, Homo sapiens
aaggcattcgtttctacaaaaccttttttttaaggactttaatttttagagcaattttaggtttaagcagaaaaagtaagcaggaagtacacagagttccratgttaccgcctgccacacatacatccattttcttggctattaacatcttagtgtagtacatttgttatcactgatgggccaatactgatatgttattat

SEQ ID NO: 163470 - DNA, 201 bp, Homo sapiens
aaaaaaaaaaaaatgcagaagagagggcttagtacccgaggaactgattcctccacttgagcggtgggaggggaactgtccaaccaggcaggacactacamtgggcaccacaggaaccaaccccaaccaagaacttaaaaagtggttcaattgtttcatcccactgtatttaattataaaggcagtatttataactactac

SEQ ID NO: 163471 - DNA, 201 bp, Homo sapiens
tgtttttttttttaatttaacacttaagtatagcactctgaaaaataaacactctagagttttagtgtcttagaggtcatttagtttgcctccttgtaacsaaaccgatgaaaatctccttttctgacctcctgagaaatagatgctagaatctctgggcagcagtccttgtggtactcgtactcagtgcctagcaaagag

SEQ ID NO: 163472 - DNA, 201 bp, Homo sapiens
ggttttcaaacgcaactgcccgcgccaccgggagctgcccctgacttcctccttccctcctggccccagctctcctgctcttgttcctgcccctgcctccmtccctaatacactcaactgcttaaatgtcatttgtgaaacaacagaaggacgtgctgtttttgcagcatcttggggaacaatttttttgattcatttggt

SEQ ID NO: 163473 - DNA, 201 bp, Homo sapiens
aaaaaacgaagaagaaattatctgtctcctcagctaagaaataatctattcatccattctagacagcttatttgaacatagcatgatcctggcactactgcccccctaatggttgagtgctttaattgcagacaaagtacccaacgaaatcaaacactgaaatttcaaaaggaaatataattagagcaaacaaaatgccat

SEQ ID NO: 163474 - DNA, 201 bp, Homo sapiens
gtttctacaaaaccttttttttaaggactttaatttttagagcaattttaggtttaagcagaaaaagtaagcaggaagtacacagagttccgatgttaccrcctgccacacatacatccattttcttggctattaacatcttagtgtagtacatttgttatcactgatgggccaatactgatatgttattattaactaaag

SEQ ID NO: 163475 - DNA, 201 bp, Homo sapiens
cacacgctcgtgggcaggtcatgagaagacgtgtctgaagtgtgatccaagtctgcatgccacaattcaaatccaccctctgcaaatgattcttaccctaggcacatccgaatcccctggagatgttttcagaccatgctaacccactgcacccctgccgcaatcccgatgaaggtgcagagctctcagtgtcatgataga

SEQ ID NO: 163476 - DNA, 201 bp, Homo sapiens
atttaacggtactccatgtctttctggggcttgatggcttatgtctttttatcactgagtaataatccactgtttggaggtaccataggttattttatctmttcagctcttgaaataattgcagttgcttccagtttttggcaattatgaacaaagctgctattaacgtttgtgtacaggtttttatgtgcacataagttt

SEQ ID NO: 163477 - DNA, 201 bp, Homo sapiens
aaaattaatcacgtaatctttgaaagtcactatgctagggaccggatacagtggtgaacaggataaaattgtttctgtcttcatgaagggtatataatctrttacttaaaaaaaaaaaaaaaaagactataaggccagatgtggtggctcatgtctgtgatcccagcattttgggaggctgagatgggaggattgcttgag

SEQ ID NO: 163478 - DNA, 201 bp, Homo sapiens
gggcagctgccccaaggaacatctttagggagccctgcagtctggccccatggcaccccagaaactaggagggctgccggctaatcccctggtgataattmtcagtctctgtgaaccactgaggcatttcctatcagggtggcatctccagtgaccttgctgagttggtgactttgacggtgaacaggctgggtgagactg

SEQ ID NO: 163479 - DNA, 201 bp, Homo sapiens
ttgccttcctagacttggtactcccttgactccctcagtcccagccaggagagtgtcattttaggccattgtcacactaggatgtaggaggtgataaagacagcttagttaggcttaggaccaaggctgtgtgagaaccaaccgaagacagacctgcaatgtgtcatctggtacttacggcctctgtttgccaggggctaa

SEQ ID NO: 163480 - DNA, 201 bp, Homo sapiens
taccataggttattttatctattcagctcttgaaataattgcagttgcttccagtttttggcaattatgaacaaagctgctattaacgtttgtgtacaggkttttatgtgcacataagtttttaactcatttggacaaatatttaagaatgtgattgctggatcatgtggttagcctatgtttagctttgccataaattgt

SEQ ID NO: 163481 - DNA, 201 bp, Homo sapiens
aggaaattacattgtgtgcgtgtgtgtgtgcttaatgtcttttgtaagaggacttacctttaattcatctttgtaagacctgactttaattatgtcacttytgaatgttgtaatcgtatgactttcagagcagtgggagaggaaaataacatttggatatttgatagatattcaaaatatagctgaaataaattttctaaa

SEQ ID NO: 163482 - DNA, 201 bp, Homo sapiens
tttgggaaagctcagaaaataatatgttgatattcccctccaggaaggtagaccgtcctgggaaacccaggactagggtttcctggggaaacaagggaaascagtccaggcgtgtgggggagagattcagggtgctttccaccctctcccggacctcagcttccctgcacctggctttgcttttgtaggctggggctgctg

SEQ ID NO: 163483 - DNA, 201 bp, Homo sapiens
acctgcagccccagttgctcaggaagctgagccagaaggatcacttgagccgaggaggttgaggctacagtaagccgtgattgggccactgcactccagcmtgggtgacagagcaaaaccctgtctccgaaaaaaaaaggaaaaataaaatgattcaggggagctgctgcatagggtgttgcagtggggaagagaattcag

SEQ ID NO: 163484 - DNA, 201 bp, Homo sapiens
tgtggccatccaccctcccacatgggtgctgattgtcttgtttgtgtaccggcttggcctttgccagtgacagtttatcctgaccccagcccgaggcctaktgtctagaaaaattatcatattttcagtggttgattataaaaccagcattaggttgggtgtttctcagtttaatggctaaactcaaaatctttattgctg

SEQ ID NO: 163485 - DNA, 201 bp, Homo sapiens
taataagttttgtatgttgaccttgtcttctgagacccattaagctcacttatttgttcttgtaacttttttgcccattccttggtattttctttctttctttttttttttttttgagacggagtttcactcttgtcacccaggctagagtacagtgacgcaatcttggctcactgcaacttctacctcctgggctcaagt

SEQ ID NO: 163486 - DNA, 201 bp, Homo sapiens
ttctcccagtaactcagactgtctgtcacagggccatctttgatttatccttcatcacctgtagacagtcagtagccttgttctcagagtgcttcagtgcytaccattcattctattaaaggacttgagttctaccatgataggaaaaaagactacatcattccaggaaggtatgtgtgcacgttcagacaataggttaat

SEQ ID NO: 163487 - DNA, 201 bp, Homo sapiens
tgttcttgtaacttttttgcccattccttggtattttctttctttctttttttttttttttgagacggagtttcactcttgtcacccaggctagagtacartgacgcaatcttggctcactgcaacttctacctcctgggctcaagtgtctaccactacgcctggctaatatttttttttttttttttttttttaagtaga

SEQ ID NO: 163488 - DNA, 201 bp, Homo sapiens
ttcatcacctgtagacagtcagtagccttgttctcagagtgcttcagtgcttaccattcattctattaaaggacttgagttctaccatgataggaaaaaaractacatcattccaggaaggtatgtgtgcacgttcagacaataggttaatgccatatgcatttttctgaaaaccctgtatctccctatatggcagcctct

SEQ ID NO: 163489 - DNA, 201 bp, Homo sapiens
ttcactcttgtcacccaggctagagtacagtgacgcaatcttggctcactgcaacttctacctcctgggctcaagtgtctaccactacgcctggctaatatttttttttttttttttttttttaagtagagacagggtttcaccatgttagtcaggtagtcttgaactcctgacctcaggtgatctgcccactttggcctc

SEQ ID NO: 163490 - DNA, 201 bp, Homo sapiens
ctgatggcatagttccagtccaaatgccagcagcctttagatccaggaagagctgatgttttagttagagttcaaaggcaggaaaaaaatcagtgtctcasctcaatccttcaagccggaggagtcctttctactcaagtgttttgttctattcaggccttcaacttactgggtgaggaccatccacatcaaggagggctg

SEQ ID NO: 163491 - DNA, 201 bp, Homo sapiens
ttttctttacttaaaaatattttttttcacaggcttcagatctgtgtgtctacttgtcatgaaaagtatattttactttaataagctaatgatttatttcracagaggaagcagagccctccaagtttatatgagattgattactccaaagctttgactagagacctgttcttgtagaagccagtctttttgtgaaagtca

SEQ ID NO: 163492 - DNA, 201 bp, Homo sapiens
gtgcgtgcagaacacctggggtcatgttaaagtacagattccaactcagcaggtccagggtggggcctgagcttctgcatttctgacaagctccagaggcrgctgctgctgctgcctgctgcctgctgcctgcacggctcgaccacacttccagtagtgaggctagaggatccgtgactgcactgctacatgtgacagatc

SEQ ID NO: 163493 - DNA, 201 bp, Homo sapiens
tttctttacttaaaaatattttttttcacaggcttcagatctgtgtgtctacttgtcatgaaaagtatattttactttaataagctaatgatttatttcarcagaggaagcagagccctccaagtttatatgagattgattactccaaagctttgactagagacctgttcttgtagaagccagtctttttgtgaaagtcag

SEQ ID NO: 163494 - DNA, 201 bp, Homo sapiens
accctcttcagctgaaatgaagaaagaaggttatgggggaggcaatttatgggaaggtgaccaggaaaactacagaaagcaagtgtaaggttcgtgttgcrgacttgaggctgtgccttctccctcgataagggtcttgtgatttaaggtcacccccgtcttcctggtacagagagggagatgctcttagaagggcagatt

SEQ ID NO: 163495 - DNA, 201 bp, Homo sapiens
tctacttgtcatgaaaagtatattttactttaataagctaatgatttatttcaacagaggaagcagagccctccaagtttatatgagattgattactccaragctttgactagagacctgttcttgtagaagccagtctttttgtgaaagtcaggtgaattttagattgccttctcaaactctacctgtgtgtcataaagt

SEQ ID NO: 163496 - DNA, 201 bp, Homo sapiens
gcctctcctccagctcagccccggtgcctctgccctctcccaggtctcatggactctggtggacaaaggttcttgtcagaggaagtcgttgacagggtgcsatgggaaacggcctctccagggaggcaagattccagcctcagctcttgctcctgtagcccctctttcggaggtgtctttctgcctggattaaacacttgc

SEQ ID NO: 163497 - DNA, 201 bp, Homo sapiens
tcactgctgctagcatgttggagcccaagggcattgaggggccttcccctgtcacccccttttgttacagacacacattccagagaggtgaaccctcgctraaggttacagtttgccttccagctaccgctgaagcttgtggcttggttaaacaggcctccctgagtagaaatgatggactcttctgagttgagagacctc

SEQ ID NO: 163498 - DNA, 201 bp, Homo sapiens
acactgccgtgtctttgctatgccctcccatacaccaaaaaaaaaaaaaaaaaaaaaaaaccccaaataatccaaaaactcttgttcagatttccaaactrgttcaaggtcaagatggaccaaaatttactttggctttatcttaaccaaagtcttcccaatcagtttcctaatatgtaaatgacatttttggtaaaagat

SEQ ID NO: 163499 - DNA, 201 bp, Homo sapiens
tgccctagagggcggagggaaccctgccatcctctctccagtcctgccttcatgggccttcctccacaccctggtgctgtactgtttttcagaagcttgctttttttttttttttttaaagtcttttttttttccccagaaactttctcttttttttttttttcttttttagaagtctcagaagacttcagtggtcccatt

SEQ ID NO: 163500 - DNA, 201 bp, Homo sapiens
gttgtttctgatctctgagttatgctgcgagaaaagaaccactttgtccactgctgctccttgagcttggggagattgtggggagaacagaaagcagccgyccgccccccgtgtttctattcagtgtaagaagaagagacgagcccattctgctttcagagtggatgcggtgccagggggtttgtttccttgccattggct

SEQ ID NO: 163501 - DNA, 201 bp, Homo sapiens
taagctaatgatttatttcaacagaggaagcagagccctccaagtttatatgagattgattactccaaagctttgactagagacctgttcttgtagaagcmagtctttttgtgaaagtcaggtgaattttagattgccttctcaaactctacctgtgtgtcataaagtcactgctatcattgttttcccctcatttccagt

SEQ ID NO: 163502 - DNA, 201 bp, Homo sapiens
cctttgaatcatacccctcaaaggccttagtattgaccctggtactttgtaggagctcaggaaatgttgcttgggttgagctcatttgaaatgaaagcagccagagaatgaacctgttatcctgcagggagttcattgagctgaaatgggggccctggcagaggaagaggtctgcagagcccagaacgagtagagctctgg

SEQ ID NO: 163503 - DNA, 201 bp, Homo sapiens
actggaaagtcagttaaacagttagatagtcccacctgctgaggagatggaagcaagggccaaatcgcagggtgggggtcaggttggcctagagccctctrtgcgatgagaagcttgaaacccatctctcagtatgtgcagccactggagctggggtacagctggggtcttggtgagtcctaagtgactgttcagattagg

SEQ ID NO: 163504 - DNA, 201 bp, Homo sapiens
gacctatgcctctcattagagtatttcagctgaaagggcctttggaatcttctcttctcccagggtaggaaatagaaactcaacaaaggtgatgactcagyattgtcaggcagctagcccatagcagggactagaccagaaccctggccttttcacttttcagagttcttttagaaacagttgaattgggctgtaagtgat

SEQ ID NO: 163505 - DNA, 201 bp, Homo sapiens
caaatgcttaataagcacgtgaaaggatcctcagaatcatgagtcactgaggcaatgcaaatcaaaactacagtgagaaaccacttcagacccattaggayggctattatcaaaacaaaacaaaacagagaataataagtgttggtgaggatgtggagaaattggaacccttgtgcattgctactgggaatggtaaatggt

SEQ ID NO: 163506 - DNA, 201 bp, Homo sapiens
cttctttgattccacctgttttgagatgcatccatgttctcggatcagcagttcactcctttttcctgctgaatgatattctcttgtatggatgaagcatscttttccctgctgatgaacagtcaggttgttttcagtttggggctgttacaaataatgctgccatcaatattcatgtaccagtgtttgtgtgggtgtgtc

SEQ ID NO: 163507 - DNA, 201 bp, Homo sapiens
tcactgaggcaatgcaaatcaaaactacagtgagaaaccacttcagacccattaggacggctattatcaaaacaaaacaaaacagagaataataagtgttkgtgaggatgtggagaaattggaacccttgtgcattgctactgggaatggtaaatggtacagccactgtggaaacagttagacagttcctcaagaagttaa

SEQ ID NO: 163508 - DNA, 201 bp, Homo sapiens
gaacttacttgccatgtgtatgtctttcataaattgtctgttcaaatctcttatgtatgctttttattgggttattttctcattgtaattttgacagctcytgatatattctggaaacaagtcctttatcagacataatgatttgcaaatattttatctgagtctgtggcttgtcttagcattctcttaacagtgtttttt

SEQ ID NO: 163509 - DNA, 201 bp, Homo sapiens
aagcagggattcaaacctgtacgcctgtgttcttagcagtattatttacaatagccaaaaagtggaagcaacttaagtgcccgtcatcagatgaatgggtaaaaaaaaatgtgacttatagatacgcaatggactacagcctgaaaagggaagaaaattctgacatgtgctacagatgggcgaaccttgaggacatcaagc

SEQ ID NO: 163510 - DNA, 201 bp, Homo sapiens
tgtgtaatatagcaaaaggcacatattggatctgtggattaaggtcactttacccaccgatggtgacagaagtcttctaccagtactgtcatattaaaatscaaaggtcaatcatacattatatatgtacatcactcaataaacccctaaagtacattgcccagttttcataatacatttaatgaaagaataataaggtca

SEQ ID NO: 163511 - DNA, 201 bp, Homo sapiens
ctaacgcatcacagccaactgtatctggagtgcatttgctcatatagcccttattttattttttagtcttatttttagtttcctttgaatataataataawaaaaaaacccaatcattgaattcttagcttcagccaatatagtgtgaggttagacatattgcagcccaagggagaatttctgcttgcaagctggtcagcc

SEQ ID NO: 163512 - DNA, 201 bp, Homo sapiens
cttctctagggaccttccctaaccccatcccagaccctgaggcggggttgccacattcattccccttgcatatttccctcattgcatgtcctgcgtcacartgatggctttgctccctgctgtgagagcaggaatttcttcagggccaagacctgtaatttttatttataactctagtgccatttcataagcatttgatga

SEQ ID NO: 163513 - DNA, 201 bp, Homo sapiens
ttttatgttatgtgtattttactacgactaaaaaaaaaaaaaaaaaaaaaaaaaaccaacaaaaaaaaaaacaccaacagggagaaccacttgagcctgaraggtcaaagttgcagtgagccatgatcacgccactgcactccagcctgggtgacagagtgagaccctgtctccaaaaacaaaacaaaacaaaaatatgtc

SEQ ID NO: 163514 - DNA, 201 bp, Homo sapiens
tccctaaccccatcccagaccctgaggcggggttgccacattcattccccttgcatatttccctcattgcatgtcctgcgtcacaatgatggctttgctcmctgctgtgagagcaggaatttcttcagggccaagacctgtaatttttatttataactctagtgccatttcataagcatttgatgaataaacaactaaatg

SEQ ID NO: 163515 - DNA, 201 bp, Homo sapiens
tatgagggagctagaggagtcaaattcagaggagacagaaagcagaatgggggttgcccggggctggggagtaggggaacagggaagtttttttgtttttktttttttcctatttgtatttttattagaattattgaaggagaggggagaggtgctattgataatattggggcttctcatctaaaaatatggggagactct

SEQ ID NO: 163516 - DNA, 201 bp, Homo sapiens
attcataacgagtattgacacaatattcatcattagctcattcacatcagaccctatgaagaatttaggaaagctgtgattccaagatcttcgggcttttyttcaaaagaagagagttatgaagccaggctgaaggcactgcagggtggaatttgtgctgcaggggagaggcacccggacacaatgggagccaggcgcctt

SEQ ID NO: 163517 - DNA, 201 bp, Homo sapiens
gttgccacattcattccccttgcatatttccctcattgcatgtcctgcgtcacaatgatggctttgctccctgctgtgagagcaggaatttcttcagggcsaagacctgtaatttttatttataactctagtgccatttcataagcatttgatgaataaacaactaaatgaatacatatgaagatgagcagagcagtcctg

SEQ ID NO: 163518 - DNA, 201 bp, Homo sapiens
atgggggctacttaaggagggcaggataggcaggctagctttcacccctgggtggggatttttgggaaatggagccagtactctgcagtagttaaaacacrccaggcaggctgtgtcgtggctcacacctgtaatcccagcactttgggaggccaagatgcgaggatcgtttgaggccaggaatttgagaccagcgtggac

SEQ ID NO: 163519 - DNA, 201 bp, Homo sapiens
attcgttttccatagaaattatgtgtgtctgcttttgaagaagcatactgaaaaaaaaaaaaaactatcctctactaggtgccttatttgtgtaatagaarttctaatccaagtttagtaatacaaagaaagagagttttgcagatggaagactgccagcttgacagcagtcatgcccaggatgctcataaggactgctag

SEQ ID NO: 163520 - DNA, 201 bp, Homo sapiens
gatgtcctttggctgaaggcttcatttctattcgttttccatagaaattatgtgtgtctgcttttgaagaagcatactgaaaaaaaaaaaaaactatcctytactaggtgccttatttgtgtaatagaagttctaatccaagtttagtaatacaaagaaagagagttttgcagatggaagactgccagcttgacagcagtc

SEQ ID NO: 163521 - DNA, 201 bp, Homo sapiens
agagcagggtttctcattggcttttgacgtttggagccagataattccgtgttgggggaggggaagctgttctacgcatgatgggatgttgaccggcatcsctggtttgacctactagatgccattagcttgctgcctcccctgcgacccacccctgccactgctaccctggttgtggcaactaaagatgtcccctggtca

SEQ ID NO: 163522 - DNA, 201 bp, Homo sapiens
tgcatatacgcaaactggcagacgcagttctggaattttgttgagacatccccaaagtgtttcacaggcctacagacacgtgggtcttttcacagaggcayaacgaaccatgcagaaaggtagaatcctcagatgctttatctaataatcacagaactgaagatccagaaggatccttgggggctgcgtgttgcactgtgg

SEQ ID NO: 163523 - DNA, 201 bp, Homo sapiens
gctgcgtgttgcactgtggttgtttaatagaagtaggccccatgaggtgaggggacctgcatgtcgggtgagttagggctgactgtgaggctgggacttaggcctgtgtggcatctggaacactgtattctatccattttaaattttaggccatgaaagtgagtaacacatgggctgtaacttagaagtcaactaagtgat

SEQ ID NO: 163524 - DNA, 201 bp, Homo sapiens
agactggctgtcagtacagccctgggggtacctggccccacaggctggagtagggagctgggccggggctaccctatgcagaggcaggccctggggttgarcagcaagagcacctctttccaggcttttgaaccaatctaggcagttacttcaaccaggcaagtccgtcatgacctgaactcattctccatccccaaaagt

SEQ ID NO: 163525 - DNA, 201 bp, Homo sapiens
tctcacttcttctcattctttctctataattgtatcaaaacttttcagtaaatcaacactgtttaccttatgctatgtttatgttatgttattgtggctcwgtgaatgtgttctcaactgaagtcgataaatacactgttagggctacttttcaggcaacacaaactattccaattacttcaagcagaacctgagaaagag

SEQ ID NO: 163526 - DNA, 201 bp, Homo sapiens
ctcaattaaactaatattatttggaacagtgtttattggttggcttccaaggactatatatgatattaatattggaattaatcaaggacatgacgtgcaartgcattattttcatcagtttagatatgagaataattcttatttgctgcctttcatattccaggtgtccttttttctgaaaatttctcataatgtgccaaa

SEQ ID NO: 163527 - DNA, 201 bp, Homo sapiens
atgacgcctcttgacccacaatctggaactcgtttgtttttaacctacttttttagttttgttccatagaaaatcattaattgctcatgaaaagtgaaatygcactgctgaaaacctgtcctctggtactgggggtttaagttccttctgttgctccaacactggctggtgtttacacactggtgcctgggcaggcctctc

SEQ ID NO: 163528 - DNA, 201 bp, Homo sapiens
tggctttcctcacgtggcaattcagggggtcatacagctttccttctgtggctctgctatctcccataaccccattgaaatctacatccagcccatcagayggacggagagcacatggagtgggcacacctatggcctgtaggccttggctcagctatggtgcacctcacgtctgctcacattcttgggagacctcacctg

SEQ ID NO: 163529 - DNA, 201 bp, Homo sapiens
gccacactaactgtgagagaacctaggaaatggaatttttagagatgagagatagagctctacctccctgtggtgacatggtaactcctagaagaaagggmagaaatggttagtatttgtgagtacagccctttactgaacttcagaagttttagacagtcttttaaagttgatttcaaaggacctgggcatctctacatt

SEQ ID NO: 163530 - DNA, 201 bp, Homo sapiens
tagaagaaagggcagaaatggttagtatttgtgagtacagccctttactgaacttcagaagttttagacagtcttttaaagttgatttcaaaggacctggrcatctctacattcccgtcagactaatttgacttgtggcttggtctttcaaagatttttggagctgtaagtcttactggcaccatgtaggtggtagtcagg

SEQ ID NO: 163531 - DNA, 201 bp, Homo sapiens
ttaccaggctctgctactaaatggctgcatgatcttgcgtatctgctggagcctctgtctcttcattagtaaaagtagggaatgtaattcttaccttgttsggtggggtgatgattaaagcgtgcattgcgtgtcttccatgtagccactcagcataactttgttaaggaaattaattaatacagagtagctgactctcca

SEQ ID NO: 163532 - DNA, 201 bp, Homo sapiens
cttctcccacgtggcaactcttccctgatggtttaaagagcagaggtcttggcaaaaccaggctttccctcagattgttcagcagagggctgtcagttatytaagacctttttaagaagcagatagacagcgaggtgcggaggctcatgcctgtaatcccagcactttgggaggccaaggcgggcagatcgcttgaggtca

SEQ ID NO: 163533 - DNA, 201 bp, Homo sapiens
ctactaatgcacacaacaacatggtcgatattgaaaatgtgctacatgaaagaatccactcgcaaaaaaccatagagtgtatgattctatttatttgaaaygtccagaatagggaaagctgtagagacagaaataagacacattagtcattagcttggacgggggagatggtgggtttgggaatgatagctaaagtgtatg

SEQ ID NO: 163534 - DNA, 201 bp, Homo sapiens
agaatatcatgagaaaagtccaaagtctctcctaagttctgaactatagctcccttctcccacgtggcaactcttccctgatggtttaaagagcagaggtyttggcaaaaccaggctttccctcagattgttcagcagagggctgtcagttatctaagacctttttaagaagcagatagacagcgaggtgcggaggctcat

SEQ ID NO: 163535 - DNA, 201 bp, Homo sapiens
ctatttatttgaaatgtccagaatagggaaagctgtagagacagaaataagacacattagtcattagcttggacgggggagatggtgggtttgggaatgakagctaaagtgtatggagtctctttttggagtgataaaaatgttttaaaattgattgtggtaatgattacccaactgtgaatatactaaaaaccactgagt

SEQ ID NO: 163536 - DNA, 201 bp, Homo sapiens
gcctttattggcagttgaaaatagagttctagccaatgtcgatggattgttaccacaaaatgcaatttgctgctgcacgttgtgctcagataatgggcaasagtagaattcatccaaacaattgtgctccaacaattgtgttcaaagaaatgataccacagagtgagccattctcagttttctgaatcatttaagtggttt

SEQ ID NO: 163537 - DNA, 201 bp, Homo sapiens
ctctgctcccccaggggctccagggaagaatccctccccggatcttccagcgtctggtgggtgccaccatgcatggcctgtggctgcatcactcaagtctmtgcctctgtggccacctgcctcatcctcttctgggcatctgatctcgtcctgcatctctctaataaggacactgacagttgcatttagggcccacccaaa

SEQ ID NO: 163538 - DNA, 201 bp, Homo sapiens
gaatcaattgattcatcctcagtcttgctgagtgtctttctgggagataccacttgtggctcttgtttacccaaagatcactttgaagatagaacattctrtagtcccagatagcatcttcttgcctggaactgacataagatccatatctctaagccacaggactggagcttctccctcttgctaaggaagttgcatgta

SEQ ID NO: 163539 - DNA, 201 bp, Homo sapiens
tttccacaccccatcattctggctgaagccccctccaatgtgttttcacagcacctgcactttgatcacaacacatgtcccctttattttagtcattactrgttcgttttcccttttggtccaaacactccttgagggcaggggttctgtcttgttcatcactgtatcttccctagtcccttgcaccgtgtctggctccag

SEQ ID NO: 163540 - DNA, 201 bp, Homo sapiens
ttcattcctttatttagcaaatatttatcagcacctgctgtgtgccaggtacgtgttgggtgcaaaggtgaacagaggacaatctgtatcctcagatctgrcaatgtctagggggagaaatggacaagagagcaaatgagcatggtctactgtagtaagtgtccataggtgatatggtttggatgtttgtctcctccaaaa

SEQ ID NO: 163541 - DNA, 201 bp, Homo sapiens
tcttccctttctgtggggcagagatacatgtatttctctgtccccccgaggcgaagctatagtctctgaccccctgagtttcagcccagtgggagtgtttyttgtaagatttctcagtttgggaggaccttgggcttcatctcctgccctccttctcctgccccaaatggctaccaaggtgggtccagaagaaactctcag

SEQ ID NO: 163542 - DNA, 201 bp, Homo sapiens
ggttagggtggggcattcattacatattttcacagcaccatccttctcttttctgacactaatgatttgtttcccatctgcctcttctctccctatcatcyagactagcgcctagcacatagtaagacctcaataagttgctgctaattgactaactatacaatcaaacaagttcacaccataaagactttcttaaaaaat

SEQ ID NO: 163543 - DNA, 201 bp, Homo sapiens
gccataggtacctgaacttgtgtgtctttgtgcacaagaaaaaataatctgtcaccttgtttaaggcgtgttcggttgcgtttgatagtttgaaaatgctytggggaacaatcatctgtctggttttgagagtcaggtcgtaaaatggtgaaatcacatactgggggctggagtggggcggtgggcagtgtgggggcattg

SEQ ID NO: 163544 - DNA, 201 bp, Homo sapiens
ggggcttactttgcaggtttttcaggctgctctgaagtgttctttcgaaggtggagggttatagttttgtgtaatagcagtgctgggaacagggtgggttyttccagactctccccccacgtacaatagtgtgtggatggcagagatgcattgggagctgaaataattcatttgtcctttctaatgaatagtaataattta

SEQ ID NO: 163545 - DNA, 201 bp, Homo sapiens
tagccttccattgtgcttctagcccagaagtgtgcttgctttacaaaagtcaggagagagatacaggaaggagcaccggagttggagtctgacagtccccyacacctgctgggggatcaggaatgagtcacttagtctctcccgacaccaatttcgctatctgccagaaggggaagagtatccttctggtgtacccaagtg

SEQ ID NO: 163546 - DNA, 201 bp, Homo sapiens
tgcttaaggcacaaatccattgctttactgagagttgcaaaatcgtattatttcaactctatgaatttgttttcatttattaattgggataattttctaaraaggagcttccatgtcattttccatttgggtactcagtggcacaggtcttacaggaaagtcagaataaatgcttaatgctttctctcgacccacttttca

SEQ ID NO: 163547 - DNA, 201 bp, Homo sapiens
tcttggcaattagaagaaccgaagaggccagagtcctccgaagacgcctgcttggaagttgagatgctgttgctgaaactgctagaatgccaggcatgctrtcacctgcagctttgagacgtcacgctgacagtatcacaggaaaacagccttttgtgggccgtcctctgtgtgttcacaccgtgtcgtttttaagcttta

SEQ ID NO: 163548 - DNA, 201 bp, Homo sapiens
ctttatcagacataatgatttgcaaatattttatctgagtctgtggcttgtcttagcattctcttaacagtgttttttgaaaagtagaacttctaaatttygatgagatccagtctatcggtttttttttttatggatgaaacttttgtgtcatatctaagaactatttgtctaacacaaatattttctcttattttttca

SEQ ID NO: 163549 - DNA, 201 bp, Homo sapiens
gcaggcccatttcccccaggccacccacctcactgggacccttccatttttggccgccagaccatggatgtggcgtgtcccacttcccaagcacggcatcstccccagtctccttgctagtgtgtgtggtaagcggcacagctgtgcacccactgctccccacgatggctttgggcttggcctggacagaacccacgatgg

SEQ ID NO: 163550 - DNA, 201 bp, Homo sapiens
atactgggtggcttatatgcaacagagataagtttctcacagttctggaggtggaaagtccaagatcaaggagccagcagatttggtgtctgatgagggcmcacttcctgcttcatagatggcaccttcttacggtgtcctcacatgctggaagggcctcttttataagggcactaatcccatccattagggccccatcct

SEQ ID NO: 163551 - DNA, 201 bp, Homo sapiens
acaataggatttacaaaataattgcacacgttttctcatttgactagctcattttcagttctgacagcccttttctctatatcatctcacttgattccctkagcagctctgtcagattgacagaattctcacatccatttcaaagatgggaaaaccaaggctcagaacagctgtggaacttacctgcagtcacagctgctg

SEQ ID NO: 163552 - DNA, 201 bp, Homo sapiens
gcaattggcctaaaccagtttgggaacagtcacaactaattgggtaagggtacccctcagctggagggagcttcttggtgcaggcatgtcagagggagctrtggggttctgatactgtgggcactgggcaccgtgtctgccagcaggaatggtgtggcttatttaatctaagccatcctgtccattctaggatcttcttcc

SEQ ID NO: 163553 - DNA, 201 bp, Homo sapiens
taggaggcagaagtgggtgattcccaaggtccattccaatctggagaagttatggacttttcagacatacctgtgttacctaaagtgagttgtgctgtatmtatagaggtcagcctacccatttatttatgtatccatgtgttatccatatgcctgattatccatctctctacccatccatccatgtatctactcatccgc

SEQ ID NO: 163554 - DNA, 201 bp, Homo sapiens
caaccaccctttcaaaaatcgttccacagcccaaggcaacattgacttaatacatttctcaacaaactgaggcctggaaatctgagaaataaataggtggrctatccactgtaatgacaaggcatgacttcctggtttgtatttcttcccatagtgttttgattacactaagcgttaccggcaggcaatagttatttgcta

SEQ ID NO: 163555 - DNA, 201 bp, Homo sapiens
ttgccttttttgaactgactaggacctcactacaatgtcaaatagaagtagagtgagtgtaaaccctagcttcattcctaatttaaggctgagaacgttcrgtctgttaccataaagtatgatgcagctgtagctttttagtagattttttttattagcttatctcccttgttgactaaaaaaagttttttaaacacaggt

SEQ ID NO: 163556 - DNA, 201 bp, Homo sapiens
tggtgctcagggtccttggaaagaattatatatgagactcattatgggctgaggaggcccttctgggcaagtttaccaccgtttataacagcatgttcatggaaaatggtttctaaatctcagacacccatttcataaacatgcttttgaaatgtgactcatttttaaattgggggtttgcccatattatattatgttctc

SEQ ID NO: 163557 - DNA, 201 bp, Homo sapiens
ataattaaggctagcctccatggctcctgcctgtaatcccagcactttgggaagccgagacaggtggatcacttgaggtcaggagtttgaggccagcctgktcaacatggtgaaacctgtctctactaaaagtacaaaaactagccaggtgtggtggcagccacctgtaatcccagctacttgggaggctgaggcaggaaa

SEQ ID NO: 163558 - DNA, 201 bp, Homo sapiens
ctgttggagactcttgtgtctccatttgacactctactggtaatcaatagttagggctcaattaatgaatggcttttctgtttaataaatttgtttctgtggtgaaacatgccattgattttgaaacaaatttgtaaatggtgggttaggttcccaggttagcccacccttcccccatatcttactgaacctatacgaagg

SEQ ID NO: 163559 - DNA, 201 bp, Homo sapiens
  misc_feature (1)...(201): n = A,T,C or G
agacttcaaagggaagtgtcttggtgtctcactggcacatatccagcatgatgttggtaaataaccgagtcccggtgtggcgtatttctccctgaatcttnactgaaaactactgaagcccattctgtgaactctggaggggcagccactcattccaggaaaaaggccagaaagaatgacattgaaatgtgtttataatta

SEQ ID NO: 163560 - DNA, 201 bp, Homo sapiens
atgcatgtcataatcttacataatttataaaacttgctcataaatttggctctatgtttcctagcagcaacatgaagaaaaatcagttggttgcatgatgsacttcatttttaaaaaattgtggtaacagatacataatatgaaatttatcattgtaaccattgtttaagcgtatggtccagtggtgttaagtaccttcac

SEQ ID NO: 163561 - DNA, 201 bp, Homo sapiens
caagggttccaatttctctgtatccttgccaacccttgttatttatttatttttaaaaattatagccatcctaatgggtgtgaaatggcgatggatttcasttttacttactgattctaaaaatgtacacgtttgggggaatcacacatattttggattctggaaccagaaagaaatttttcaagggtacttaggaggaca

SEQ ID NO: 163562 - DNA, 201 bp, Homo sapiens
catcctaatgggtgtgaaatggcgatggatttcagttttacttactgattctaaaaatgtacacgtttgggggaatcacacatattttggattctggaacsagaaagaaatttttcaagggtacttaggaggacactatatgtactacaaggcatttaggcagcactgctgatggcaccctaggagtgagcggcgcgcaag

SEQ ID NO: 163563 - DNA, 201 bp, Homo sapiens
atcacacatattttggattctggaaccagaaagaaatttttcaagggtacttaggaggacactatatgtactacaaggcatttaggcagcactgctgatgrcaccctaggagtgagcggcgcgcaagtctcgtggctgtttgccacactgctcttctctttgggctcgtgaccctctccccacaagggactatttggtcct

SEQ ID NO: 163564 - DNA, 201 bp, Homo sapiens
aggcaagcagccggtcatgggttgttgtcatggaagagagggtgactgctttctctttcctgctcaaagaaaacagaggagtgggacttagaagagaacaygtagtattttacaacttccaaaatatacccgataggggctaactttccttttttcaagcgttgctttcagtttttttttcttttgataatttattgatta

SEQ ID NO: 163565 - DNA, 201 bp, Homo sapiens
gtacccagttaaaggtggaagactgttaatttatggtgacaccaatctgtgagttcaggagattgtgcattgaagccttaagcagcccaggtatttgcatktttttttttttaaaaaaaaagattattaattgtttagtgagatctaattcacatactgtagagttctccattttataattatacaattcagtggttatta

SEQ ID NO: 163566 - DNA, 201 bp, Homo sapiens
tgtatttttgctcaaagtttgatctgtacattttgaatcatttttatcctttttccaatttcccaactaaccaatgttcagacccgagaaagcattctccraaacctttctctgtattcataaaatcatacacacacacgcacaattgttggttttttataaaaatggaccagattgtattttctgtatcttgcttttctt

SEQ ID NO: 163567 - DNA, 201 bp, Homo sapiens
gattacaggcgtgagcccctctgcccggccaactttgtatttttgctcaaagtttgatctgtacattttgaatcatttttatcctttttccaatttcccarctaaccaatgttcagacccgagaaagcattctccaaaacctttctctgtattcataaaatcatacacacacacgcacaattgttggttttttataaaaat

SEQ ID NO: 163568 - DNA, 201 bp, Homo sapiens
tctggccatggctttgctttcttctctcacgcttccaaccaccctcgtctgaaagctacatttcaccttgtgaaagttctgcccttctgtttccaaatacragatgctgtaagcctgaactcagatctaaaaccaaacttagcattttgtttccaaaagattgactacatattttaatttcccaacctctctcagtggcac

SEQ ID NO: 163569 - DNA, 201 bp, Homo sapiens
gggttcctctgagcagtatcatgccaacagacacacgcatgttatgtattatggcacataatcggtaagtccataactgttggagtaatggggacgagcayagtgcactgaagggtacaggaagcatcggggtttgggggctccggcctacatttgtggttatgttactggtttttcctatcgcatcagaaaactttatta

SEQ ID NO: 163570 - DNA, 201 bp, Homo sapiens
acggcttcttagccacgtttctaattatatttttttccctgctttttagataaagggacaaagaaatacggggcttactttgcaggtttttcaggctgctytgaagtgttctttcgaaggtggagggttatagttttgtgtaatagcagtgctgggaacagggtgggttcttccagactctccccccacgtacaatagtgt

SEQ ID NO: 163571 - DNA, 201 bp, Homo sapiens
gagacgatttccggcatgtgctacaggggaaaatggtatcaaatctacacaatgaccgggttctatggagtggctcctctgtggggaattttactttattytctttgccagaaaccttgaccccaccctgtctgtgaagtagcagcctgctttgtaaaggggcgctgatcaagacgaaggctattatcgagctgggatcca

SEQ ID NO: 163572 - DNA, 201 bp, Homo sapiens
ggggcttcccccagcactgtcctcagtattctggccctagagtgctgcctcaaaacctaccaggagcttagtctgtaaagcagttgaggactagggccaakttaactttgggctgaaacacgcagtaacatgagaaggccttccacacctcgctcatcactagcccactgcaaggctgcactttgcatgctcatggaaact

SEQ ID NO: 163573 - DNA, 201 bp, Homo sapiens
ttaaaacaaaattaaatattaattttaatagaaacaaagctgtatttcttcttctgcttttatttctgtatgtgtgacatttaattaaaatttctaattaraagataaagtgcaattggcctaaaccagtttgggaacagtcacaactaattgggtaagggtacccctcagctggagggagcttcttggtgcaggcatgtc

SEQ ID NO: 163574 - DNA, 201 bp, Homo sapiens
cccaaatttagagaccagtcctaacccttagaaaatgcatagtgttgcagactgcttttgaagattaaagagatgaaaattccattcttaacttcaagagsttccttaaacctggtccaaaagactttcctaaaagcccagccagttcagatgataggtgcagacacatcatattgcatatattcacattacacacacaca

SEQ ID NO: 163575 - DNA, 201 bp, Homo sapiens
gcccaggtattgcagctggacggctgcctggcagccatatcaacatgggatacctagttgtatggctagcctgggagtcttctgtgcatgtgattatagcrcggaaaatgtgggcaatcaggactgcctagcatccgtatgtcttgtatagtttatgacctgcacacgggcagcttgtgccccaagtaatggagtcagcac

SEQ ID NO: 163576 - DNA, 201 bp, Homo sapiens
gtggcgatatgagctgagcataaagcaggaagagtggggatgcccttgtattcagtatacctccagaccttatcactaccaagtgtccaacacagggctgstaagtaatcttgaaaatataccttccactcttatcagtgcaccttcttgacaccaaatctgtattcttgatcctggaattcagaattctccatcaaaaac

SEQ ID NO: 163577 - DNA, 201 bp, Homo sapiens
ctgagaacattaactttttacttgcctgactctagatggaagagcagttgtcccggtttcagggagaagggatcacctcctaatcccagcctatagggaarggagatttgtctttgcctcctctcatcaggcctcctggtgctcaggtgagaaagtgaaggcactcggaggtagaacaccctggccaaggtcacatgctgg

SEQ ID NO: 163578 - DNA, 201 bp, Homo sapiens
agctatcctaagaggtctacctgagcctagagagaggcagctgcgttataggaggtgaggataggagagagttgtaccctgcaggggcctggtgaaggaascctctgggaaccaggaagggagaagccccttcttcctcatgtgtccctccggcgccctctactgacaggggttagcatcaaggcatctggcaaaggacgc

SEQ ID NO: 163579 - DNA, 201 bp, Homo sapiens
tttcaggcaacacaaactattccaattacttcaagcagaacctgagaaagagaattggaggcttacattatgatcctcgagccaacagtgggatttggcascttcctatctgcggatgaggcagcagctatcctaagaggtctacctgagcctagagagaggcagctgcgttataggaggtgaggataggagagagttgta

SEQ ID NO: 163580 - DNA, 201 bp, Homo sapiens
ataattgtatcaaaacttttcagtaaatcaacactgtttaccttatgctatgtttatgttatgttattgtggctctgtgaatgtgttctcaactgaagtcrataaatacactgttagggctacttttcaggcaacacaaactattccaattacttcaagcagaacctgagaaagagaattggaggcttacattatgatcct

SEQ ID NO: 163581 - DNA, 201 bp, Homo sapiens
catatttgtcaggtcctgttagagctctacagctcattctcagcctgcctgatctcagccttgctctcaggtcctcaggaggagtttgattcttttggacygtggtgctactggctatttaatcctttatcgtcaccatgtccagctagcaaccacttgccttccagcagctgggagaactgtgctggtccagggagctgg

SEQ ID NO: 163582 - DNA, 201 bp, Homo sapiens
tctatccatgccagaaagacgtaaggtgtaaatgactgtgtggcatgccataggaaaaaatgggaagtgtgaaattcctcagattcactgcacagtaactkggggaagagctcatgatgctagtcaagttatttcttagcctctggacctcatggttcctgttatgagatttggctaagctagtggcagggaaccacggct

SEQ ID NO: 163583 - DNA, 201 bp, Homo sapiens
caaggcatttaggcagcactgctgatggcaccctaggagtgagcggcgcgcaagtctcgtggctgtttgccacactgctcttctctttgggctcgtgaccstctccccacaagggactatttggtccttgcatctctgcaggtgctagcgtgcttgtctgctggctctggtttaacccagaagttaattgcgttgtatcta

SEQ ID NO: 163584 - DNA, 201 bp, Homo sapiens
ggaagtattctatccatgccagaaagacgtaaggtgtaaatgactgtgtggcatgccataggaaaaaatgggaagtgtgaaattcctcagattcactgcamagtaacttggggaagagctcatgatgctagtcaagttatttcttagcctctggacctcatggttcctgttatgagatttggctaagctagtggcagggaa

SEQ ID NO: 163585 - DNA, 201 bp, Homo sapiens
taaaactgttcgtggttatcactgccaaatttttggggattcaagaaggggagatatttactgacccacttcttttttaatctcatacacatctcgtgtatgtatttttgtaagtggtctcaaattcttttttggaacagtgttgtgtatgaataaggtaaataaaaataaaataattcccatgaatgaaatttggctggg

SEQ ID NO: 163586 - DNA, 201 bp, Homo sapiens
gggcctagtctcaaatataagccctgaatataaatacttgttagatgaatcacgttctttacattgtcgatagaagtgggaaaaattctttttattcattwatttaatttgcccagagttgcggaagaactaattttaaaagtttaggtttgaatagaggagcaaaaagtcatagagagggacttaaagaggaagtctcaa

SEQ ID NO: 163587 - DNA, 201 bp, Homo sapiens
cactttgggaggctgaggtgggtggatcacaaggtcagactgagaccatcctggctaacacggtgaaaccccgtctctactaaaaatacaaaaaattagcygggcgtggcggcggacgcctgtagtcccagctacttgggaggctgaggcaggagaatggggtgaacccgggaggcacaacttgcagtgagccaagatcgc

SEQ ID NO: 163588 - DNA, 201 bp, Homo sapiens
aggtgggtggatcacaaggtcagactgagaccatcctggctaacacggtgaaaccccgtctctactaaaaatacaaaaaattagctgggcgtggcggcggrcgcctgtagtcccagctacttgggaggctgaggcaggagaatggggtgaacccgggaggcacaacttgcagtgagccaagatcgcaccactgcacttcag

SEQ ID NO: 163589 - DNA, 201 bp, Homo sapiens
aatgttaccactgaaagcctaagaagtgggattcagttgaagcaacatggttgaaccatgtggagaaacagacgtttagcttggcataccttaggcccaartagtgtgaacagtgatgcaagaacctgtgaactttccctacattcttatgtacagagtcttaaaagcccacgatcattgtattattctatgtccataacc

SEQ ID NO: 163590 - DNA, 201 bp, Homo sapiens
gaaagcctaagaagtgggattcagttgaagcaacatggttgaaccatgtggagaaacagacgtttagcttggcataccttaggcccaagtagtgtgaacartgatgcaagaacctgtgaactttccctacattcttatgtacagagtcttaaaagcccacgatcattgtattattctatgtccataaccactaggtgttat

SEQ ID NO: 163591 - DNA, 201 bp, Homo sapiens
gcaacatggttgaaccatgtggagaaacagacgtttagcttggcataccttaggcccaagtagtgtgaacagtgatgcaagaacctgtgaactttccctamattcttatgtacagagtcttaaaagcccacgatcattgtattattctatgtccataaccactaggtgttattaggaaaaacacttttcatcttcctgggt

SEQ ID NO: 163592 - DNA, 201 bp, Homo sapiens
ttgtacccggaacacagtaagctgatgataaatacttgttgaaagactgtagcatataacctgttgagttgtttgagaggccagggttcctctgagcagtrtcatgccaacagacacacgcatgttatgtattatggcacataatcggtaagtccataactgttggagtaatggggacgagcacagtgcactgaagggtac

SEQ ID NO: 163593 - DNA, 201 bp, Homo sapiens
aatgaagaggctgttaaacacttgtaccagcaccacccagcttttccatgtctatattaagctacatattataaatatatatatgtatatatgtgtatatatacatatatatatttgttctttacacttaactctgagatgagaaaactaaggctcagagacattgacttccccagggtcaggctactagttaatggcaga

SEQ ID NO: 163594 - DNA, 201 bp, Homo sapiens
aggaccagagtggaagcctctttgctaagcttggtctggctcctgcatgggtcccagcagcgtgccatcaatcatccgttcctccttggcagatggccagrctccttcccatgcagcagcagcagcagctggctggccctgccctcctgtttcagctgacatcggcaaccctctggggatgtatggaagactgaattctac

SEQ ID NO: 163595 - DNA, 201 bp, Homo sapiens
atgaagaggctgttaaacacttgtaccagcaccacccagcttttccatgtctatattaagctacatattataaatatatatatgtatatatgtgtatatatacatatatatatttgttctttacacttaactctgagatgagaaaactaaggctcagagacattgacttccccagggtcaggctactagttaatggcagaa

SEQ ID NO: 163596 - DNA, 201 bp, Homo sapiens
agcagagacttgctaggcatctgcagcagtggtggggaagaggtcattaagctcagtgcagtccacgtggggccttggcctgcgatcttcaggctcaggasttattgtgagcccctgcgttgggtgggggaagggaggaaaggaggacagctgaggcaaggagtgggagcctggctgggggaggagacatcagcctggggc

SEQ ID NO: 163597 - DNA, 201 bp, Homo sapiens
taagcctccaatctgatggcactgactgggggtgcatttatcaagaatttggaagcacgtaaccatacttacattctttgttgcatacatagcatttaaattgtgactctcatccaacttatcactcagatacatttttttctgtgttaaaaatataaagccatatttccagagatttttaaagggcccaaaagattatga

SEQ ID NO: 163598 - DNA, 201 bp, Homo sapiens
atatgctttgcacagtattcttttgagttgttttattcttgctaatttgtatcatattaactaatcctttgttatgctcatcgaagataccttctcaatctttttttttctcattttccttatggcaactttggaaattaactatggaatatgtttgaaaaattggaatgttttcatttttcattttcagaagtgatttta

SEQ ID NO: 163599 - DNA, 201 bp, Homo sapiens
tgaagaggctgttaaacacttgtaccagcaccacccagcttttccatgtctatattaagctacatattataaatatatatatgtatatatgtgtatatatacatatatatatttgttctttacacttaactctgagatgagaaaactaaggctcagagacattgacttccccagggtcaggctactagttaatggcagaac

SEQ ID NO: 163600 - DNA, 201 bp, Homo sapiens
ttaatgcctgagaacaaagaccagaaatgtcatcttttcgtgtgaccatcatgatacagagaagttaacagagctgccccattgtccatggggcatgttcygagtttttccagtagtggtgatagattttggctgatttctctgaacttttccctgagttatttttgtgactttggccaggatgaagggtggggaacccct

SEQ ID NO: 163601 - DNA, 201 bp, Homo sapiens
aatagctatgtactactttatgaatcctttctatggcatcttgcgttgctaattagatgtcttattgcacggaactcgcacaatctgtctcatctccccaygtagtgagctcacagcacttcaccaagagtgctgcccaccaagaactcacagcacttcaccaagagtgcagtcaatagtgttttatgaacgttgggaaga

SEQ ID NO: 163602 - DNA, 201 bp, Homo sapiens
cccatcctttttctctccaacctaagtgatctccttcttctctactggacaaatagctatgtactactttatgaatcctttctatggcatcttgcgttgcyaattagatgtcttattgcacggaactcgcacaatctgtctcatctccccacgtagtgagctcacagcacttcaccaagagtgctgcccaccaagaactca

SEQ ID NO: 163603 - DNA, 201 bp, Homo sapiens
aggatacagaattgttatttcccctctttgcatcctgcccagagctctttgattttacaacctgttccagaacgtttagtgtttccctgaagtccctgggwtgagggtattctgtacctcccacaatgtgatccttacctgctttcccagtctttttctccactgtgtccctgtagaaccccatcttctgcctaatgtgtt

SEQ ID NO: 163604 - DNA, 201 bp, Homo sapiens
agggacagagtgaatgtcacttcttccattaagtttcatagtgtttgctgcccgcacatgcttgtacctgtcttgtcacttttcccttctgcctgggagaygggtcagtaaattccaaagggccttttgctaatctaacagccagaaaaccaagcaaaggcttctcccctactgatctccaagagcttagcaagaaaatga

SEQ ID NO: 163605 - DNA, 201 bp, Homo sapiens
ggctgaggagggggctgtgtaatgaggatggatggaagacatagacttttgatgcttttttgtaacttgcttcttgtaatgtgactgcatttgtgaattamataactccactttgaagatgatctgtctcgctgtttttagtctaattgaccacctttctgtcatcttttgtcatacttacttgaagtttttttttttttc

SEQ ID NO: 163606 - DNA, 201 bp, Homo sapiens
agtcagccataaccctctctttctctcaaactctgtgtcaaatctgtcaggaaatccttttggctctatcttcaaaatatatccagattctaatcatgacycatgacttcctccaccaccacttggtctaaaccaccattatctctcacttggattacagccatagtttcttaaccattcactgcatctgtgcttggttca

SEQ ID NO: 163607 - DNA, 201 bp, Homo sapiens
cgatggtaaatagttgcaattcatatcataggtgaaggaccaatctttttaattatataagaagcttctagaaataaaaacaccaacatccattggcaagrtagacgttaggttatgaacagaccgtttacagaaaagtacaattggcttttaagcatataaaaagatgctcaacttcacttataatgagaatgcaaatac

SEQ ID NO: 163608 - DNA, 201 bp, Homo sapiens
attataaaaacttggtgtgggggtggagcgcaaagctccagcccactgaatgtctgccagttaagatgatgttgggttaggttacatctggctactgtcckgggaaaatcacttttatagagatgggcttccaggtggttttaaaatttatctttctattgacatttgtaggtcaattatatatgttgactaaatttacaa

SEQ ID NO: 163609 - DNA, 201 bp, Homo sapiens
ttgaataagtggagagctatgttattgttttcatagtagtaaaataaaaccttgcgtaagtcctcattctaccacatgttaactaaccctctagctgatartacaaacactcactgcgggattttatttataagggctctagaataaaatatgagttattcacactaaaatcacctgttaagtaatattctgaactagtta

SEQ ID NO: 163610 - DNA, 201 bp, Homo sapiens
aaataaatatctgggtcaattactggcccatccatctgccaagtgaaaattgcaacaagacagaaaaacacggttgctcgtcatgggagtgaagcacccaracgtgagcggagcggcttgggaagaggtcactgttgtttcctggggccgtgcctccgatctgccggggactcctcagcctgggagtcatttacaaaccac

SEQ ID NO: 163611 - DNA, 201 bp, Homo sapiens
ctattgaattcagagcaatttttcaccatcacataggtccttcatccaccggttctaaaatttgagtgactctatgggggttctctggcagtatctaggcraaatcatgtggtctctcatactcacgtaggtatgaaccctgtatgctgataggtagttcaaagttgaaaccaaagagacgtgcacattttgctagaggta

SEQ ID NO: 163612 - DNA, 201 bp, Homo sapiens
gaagttcgaatcgtacacccattctgctcctctcagtgaggtggacagtcaaggattcagagtaggggtggctttggagtgggaaatgttaagatgtgaaragatcatagttttgtcatttggttcctgtttatcatttctgttaggctggattttttcaccagtattgagtcctggggtttcctgatagatagttcttgt

SEQ ID NO: 163613 - DNA, 201 bp, Homo sapiens
ggggcctagtctcaaatataagccctgaatataaatacttgttagatgaatcacgttctttacattgtcgatagaagtgggaaaaattctttttattcatwtatttaatttgcccagagttgcggaagaactaattttaaaagtttaggtttgaatagaggagcaaaaagtcatagagagggacttaaagaggaagtctca

SEQ ID NO: 163614 - DNA, 201 bp, Homo sapiens
gtggtggcgatatgagctgagcataaagcaggaagagtggggatgcccttgtattcagtatacctccagaccttatcactaccaagtgtccaacacagggstgctaagtaatcttgaaaatataccttccactcttatcagtgcaccttcttgacaccaaatctgtattcttgatcctggaattcagaattctccatcaaa

SEQ ID NO: 163615 - DNA, 201 bp, Homo sapiens
caagaataaataaataaatacatgcatacaacttctcacccaacctgtgttgaggccttgtcatctcatcccttactctaaccactgcacaccctcccatrtattcagttgaaaccctactcttccttgaagtctctgtgactttcctcagtccttccccctcaacccttctttgtgcctttgtttatgggataaggttta

SEQ ID NO: 163616 - DNA, 201 bp, Homo sapiens
cttggtgtccagccctattatctctgtagcctccggtgacagagcagccatagtggcactgtgcttgatgcaaagataccattaccttctcgtctgttctytgatcagtgagtggtggcgatatgagctgagcataaagcaggaagagtggggatgcccttgtattcagtatacctccagaccttatcactaccaagtgtc

SEQ ID NO: 163617 - DNA, 201 bp, Homo sapiens
tcccagctactccagaggctgagggagtagaatcgcttgaacccagaggcagaggttgcaatgagccgagatcgcatcactgcactccaacctgggtgacrgagtgagactccatctcaagaataaataaataaatacatgcatacaacttctcacccaacctgtgttgaggccttgtcatctcatcccttactctaacca

SEQ ID NO: 163618 - DNA, 201 bp, Homo sapiens
gtcgacattgtggggacaggtgtccattctgtgtccccttggtgtccagccctattatctctgtagcctccggtgacagagcagccatagtggcactgtgsttgatgcaaagataccattaccttctcgtctgttctctgatcagtgagtggtggcgatatgagctgagcataaagcaggaagagtggggatgcccttgta

SEQ ID NO: 163619 - DNA, 201 bp, Homo sapiens
gtagtcttgtgtatggagtccagtggacagagctgagagtccctctactgacagtccctggattcatcaccaccacatttctaagaaatctgattattacytccccatcagagagagacactcctcgtggtacagctgtgatcatatcattcctttgctggggaaatcttggtcactagaaagattcctgcactccttagt

SEQ ID NO: 163620 - DNA, 201 bp, Homo sapiens
tttgaattttgttttagtctaagttatagtgagttgtttaatctgttagcatttaagtcgattagcatttaaaataaaaatggtattcttccaacttattytaccctaccttaaaacctgctccccagaattccacattattttacctgctccttctagtagcatccatatcttgaaataacacatttatacctctattcc

SEQ ID NO: 163621 - DNA, 201 bp, Homo sapiens
gtgtagaatatgtacgttttatagggtggtgatgcgcacatcatagctaggcccttaacagatagtagcttcttctcccaccaaaccagttctttttgtgkttatctggtgtcaccgttcacccacttagctataaaccagattaagaaaattacactttttacaaagggcgtgaagaactatggaaatgataggatcatc

SEQ ID NO: 163622 - DNA, 201 bp, Homo sapiens
gaactatttgaattttgttttagtctaagttatagtgagttgtttaatctgttagcatttaagtcgattagcatttaaaataaaaatggtattcttccaamttattctaccctaccttaaaacctgctccccagaattccacattattttacctgctccttctagtagcatccatatcttgaaataacacatttatacctc

SEQ ID NO: 163623 - DNA, 201 bp, Homo sapiens
agactataatgtatcgatgaagtacatcagcatttgcgtctatctcttaactcttttacctccacagaccactgggatagaatgtcagatattggttatcrgccaaatttgggcttcagtcagtgaatttgaagacaggtcagtagaaattctccaaactgtagcacatagagaaaaactattgttatggaatgaacagat

SEQ ID NO: 163624 - DNA, 201 bp, Homo sapiens
aagctattcacatgcatatttgagactacagatatgataaaattagcattcagtaggaactatttgaattttgttttagtctaagttatagtgagttgttyaatctgttagcatttaagtcgattagcatttaaaataaaaatggtattcttccaacttattctaccctaccttaaaacctgctccccagaattccacatt

SEQ ID NO: 163625 - DNA, 201 bp, Homo sapiens
tattttgcacactataggaagtctagagggtttaaggcagaggtatgacgtgacttttttttttttaaagccaccgtgagtgctctgttgaagatggcatrtttaggttggtgagagatgcagcaggaataccacttaggaagctattgcctcctagttcaatacttttggcttttgaacgtaactacttttaataataat

SEQ ID NO: 163626 - DNA, 201 bp, Homo sapiens
gaagaggctgttaaacacttgtaccagcaccacccagcttttccatgtctatattaagctacatattataaatatatatatgtatatatgtgtatatatacatatatatatttgttctttacacttaactctgagatgagaaaactaaggctcagagacattgacttccccagggtcaggctactagttaatggcagaact

SEQ ID NO: 163627 - DNA, 201 bp, Homo sapiens
gataaatatgtaaagcatatggcatgtcagattatgataagtgctgttgattaaaataaagcagggaaagagaataggaaatgctaggctaggttgagggrttgtaatttaaaataacatagtcagagaagtcatgaaggaaaaatacctgagacaggttgttttgcacagatttatggaaaaagtgtcccaggcagaagg

SEQ ID NO: 163628 - DNA, 201 bp, Homo sapiens
acacttgtaccagcaccacccagcttttccatgtctatattaagctacatattataaatatatatatgtatatatgtgtatatatacatatatatatttgttctttacacttaactctgagatgagaaaactaaggctcagagacattgacttccccagggtcaggctactagttaatggcagaactagttaatggcctgg

SEQ ID NO: 163629 - DNA, 201 bp, Homo sapiens
gtaattcgtgggtaattgtggggactttaacatttattttgcacactataggaagtctagagggtttaaggcagaggtatgacgtgacttttttttttttwaagccaccgtgagtgctctgttgaagatggcatgtttaggttggtgagagatgcagcaggaataccacttaggaagctattgcctcctagttcaatactt

SEQ ID NO: 163630 - DNA, 201 bp, Homo sapiens
tccacccgacctatttttactccctcacatttggttgtctttatcctcggaggagaatgctcacaccagcgtctttcttcaggacagctttctaccttcctttttttttgccattttaagaccgacagtggcataaggtcactgggtgaggtagagatacactgatctttttttggtggcagttagggatattgacattgg

SEQ ID NO: 163631 - DNA, 201 bp, Homo sapiens
cttaagaaagaaggaaatcctgtcgttggcaacagtattgattaacctggagaacattatgctaaatgaaataagccaggcatagaaaaacaaatagtgcrcgatctcacttgtatgtggaatgtttagaaaagtcgaactcatcaaagcagagagtacaatgatggttaccaggggctggagagatgttggtcgaagggt

SEQ ID NO: 163632 - DNA, 201 bp, Homo sapiens
ctgaaaggcagagatttccaagggaggaaaatggttgggagataggaaagtgacagaggaagtattctatccatgccagaaagacgtaaggtgtaaatgastgtgtggcatgccataggaaaaaatgggaagtgtgaaattcctcagattcactgcacagtaacttggggaagagctcatgatgctagtcaagttatttct

SEQ ID NO: 163633 - DNA, 201 bp, Homo sapiens
tcctgctgtgtgactcagagacacacactcacctgcccttggttgagactaggtgtctttgcaggttttgggtgacaaagacctggctggtgatactgagccaggagatggtgagaaggtcaatatatgaagacgcattaagcttttgcaaagctgtgggttcagaagtagccattagagagggatcatctgagttgggtg

SEQ ID NO: 163634 - DNA, 201 bp, Homo sapiens
ttggtacaccaacacatctctgtatctgggccagtaaacttttttttttttttttggtgtagggccaagcctacaatgcatatgtccttattgttcatctrttgtaactttttccacaaaaagtgtgtgaaatttagattgtggacgttccagtctccacttctgagccttgagaggttgctgaaagccctgactggctcc

SEQ ID NO: 163635 - DNA, 201 bp, Homo sapiens
gttttttttttcttttctttctttcttttttttgagactgagtcttgctctgtcgcccaggctggagtgcagtggcacaatctcggctcactgcaagctcygccttccaggttcatgccattctcctgcctcagcctcctgagtagctggtactacaggcacccgccaccacgcccaactaattttttgtatttttagtag

SEQ ID NO: 163636 - DNA, 201 bp, Homo sapiens
cgatacttttcaaatgccagacttcctcagcttgtgctatacttcccgttcacacactgccgtgtctttgctatgccctcccatacaccaaaaaaaaaaamaaaaaaaaaaaaccccaaataatccaaaaactcttgttcagatttccaaactggttcaaggtcaagatggaccaaaatttactttggctttatcttaacc

SEQ ID NO: 163637 - DNA, 201 bp, Homo sapiens
cttttttttgagactgagtcttgctctgtcgcccaggctggagtgcagtggcacaatctcggctcactgcaagctctgccttccaggttcatgccattctyctgcctcagcctcctgagtagctggtactacaggcacccgccaccacgcccaactaattttttgtatttttagtagagacaggatttcaccgtgttagtc

SEQ ID NO: 163638 - DNA, 201 bp, Homo sapiens
caggttcatgccattctcctgcctcagcctcctgagtagctggtactacaggcacccgccaccacgcccaactaattttttgtatttttagtagagacagkatttcaccgtgttagtcaggatggtcttgatcacctgacctcgtgatccacccacctcggcctcccaaagtgctgggattacaggcatgagccaccgcgt

SEQ ID NO: 163639 - DNA, 201 bp, Homo sapiens
agattctggggctctagaggcatgtttattgagggccaggatattgggtgtgggttccaccagaacaataaatctcaaagtttgctgcctggaccagcagygtcagcatcacctaggaatttgtcagaaatgcaaagtttcagggctaactcaaactacttgatcagaaactctaggatgggaccaggcaatctgttttaa

SEQ ID NO: 163640 - DNA, 201 bp, Homo sapiens
accacaaactggatggcttaaaagcaacagggatttattctctcatggttccagagggcagaagcccaaagtcaatttccctggacccaaatcagggtacyagctgggctctgctcccccaggggctccagggaagaatccctccccggatcttccagcgtctggtgggtgccaccatgcatggcctgtggctgcatcact

SEQ ID NO: 163641 - DNA, 201 bp, Homo sapiens
ggacattttggggagaccatttttcagatgaccacaggccccataatctggtctccaacctgccagtgtcatgtgtccaccccaaaatgggagactgaaaytgggggctcttcctcgggctgcttaggagaggtgggcgttgttcactaggtgggagcgcatctggcttgccctgaaccccagaacacactcaggtttccc

SEQ ID NO: 163642 - DNA, 201 bp, Homo sapiens
cagcacatactccatttccaaggaggtcattgctaactctaaatctacccctgttagttagccaaccccacgtgctcattcttagagaggttctgttcccwgaaaacagtctggagccaaatgctgtgtgagctggggcccggtcatggaaacagaaaacttccattccgtcaagctggatggattctacagaaggaattc

SEQ ID NO: 163643 - DNA, 201 bp, Homo sapiens; identical to SEQ ID NO: 30282

SEQ ID NO: 163644 - DNA, 201 bp, Homo sapiens; identical to SEQ ID NO: 30283

SEQ ID NO: 163645 - DNA, 201 bp, Homo sapiens
ttgtacagaatataactttctgtataggaaatcaatgagaaggtggagtcaaaccattagaactaatagaattctctactctttctggctgtatggaaggyatactaaaatcagggtgtttttatacaccagcactaagtaatcaaaaagtatagtagaaaaaacagtatttataacagcaccacaaatcatggggtacat

SEQ ID NO: 163646 - DNA, 201 bp, Homo sapiens
tttttctaatgcggtgttacataggagagaaaataagaaaggctagccaaccaattttctgaggccagtataaccttgataccaattctggacaaggacawtataagaaaataaagttataataaatcttcataaggaacgtaaatgacaaaatctgaaataaaatagcacaggtagttcagtgttaaaatgctctatgag

SEQ ID NO: 163647 - DNA, 201 bp, Homo sapiens
catggaaccctcaggctttcagaagggttctgcaggagctccagaggtaatgatgtttgaactcggtaagattcaagctgcttggagaggccattcacagstttcagctgtattatatgttgatgtcctgactaataaccttattttgaaaagttattaagaatgttgggaaacctccaagactgctttctttgtcgagta

SEQ ID NO: 163648 - DNA, 201 bp, Homo sapiens
acgcttatctctctcaaaccaagaggcagaaagcaggcttcaagagcagagacccttgactcatacccttaggaccaaagatatctgctcacccaaccatyttccccacacccacatccaagcagctatgcaagacagattagttcagtgaatggacccattgcctgaagaaaaagtataggtaatgagaaaacagctggt

SEQ ID NO: 163649 - DNA, 201 bp, Homo sapiens
ctttttattcctcttattttaggcgtaaaattggaccttaaacttgtagcaggcaggataaaaacgcttatctctctcaaaccaagaggcagaaagcaggsttcaagagcagagacccttgactcatacccttaggaccaaagatatctgctcacccaaccatcttccccacacccacatccaagcagctatgcaagacag

SEQ ID NO: 163650 - DNA, 201 bp, Homo sapiens
aagccctcaccacagtcaagataatgagcagatccattccccaaaaaaagttacctcgcatgccttcatcattcctccccctgccttcctcaccccgcagscctggtgcccaggcaacctctgatctgcttcctgtcatgacaggtgtgtttgcattttgtagaatttttttctggaatcacacagatttctttttgtgcc

SEQ ID NO: 163651 - DNA, 201 bp, Homo sapiens
tctttttgtgaaagtcaggtgaattttagattgccttctcaaactctacctgtgtgtcataaagtcactgctatcattgttttcccctcatttccagtagsttatgagaactccagctattagcatgtagcatttaacctcctatactattaggtcgtttctttgattgcccagaacaatcttatcattggatgaaactat

SEQ ID NO: 163652 - DNA, 201 bp, Homo sapiens
ttgctttccaaacacgtgtattattcatttggggaacatggtgtgtccctacctttggagtgtttgattcagtgtcctggagtccggcacccacctgcacrgtttgttcactgaactggtgctgtggctgtgccttggggctattccagtgctttttcaggacggcagttcctggtgacgtgcagtaaaataaaacaggtg

SEQ ID NO: 163653 - DNA, 201 bp, Homo sapiens
atatttatataattaaatatcatctgtttccccatttaattcctggtggctatcccccaaccccctggctgtttttgctgtttccttgggcaggaatggcrcaataaagttgctgcagtgctgatggattatcttcattaggtacttgggtgatgagtccccaagcactgctgaatttgatttaccctgtgcaaaggccca

SEQ ID NO: 163654 - DNA, 201 bp, Homo sapiens
atagtcagtctgtagggttctggaatactggaacttattccccccatctcaatgtattttgtacctgttaaccagtctctccctatatccccttccccccrctccttccccgcctctggtaaccactctactctctacttctataagatcaactttttcagcttccacgtatgagagagaacatgcggtatttatcttcct

SEQ ID NO: 163655 - DNA, 201 bp, Homo sapiens
tacgtctctgactctcccgttatatcaaaaacttttttccccatatgcatccccacccctcgcaaggttgaaatgcacaaaattgccatttaagtagttamaaaatggttgagtattaacagtttcatttggttgaagctaatacctagaaggcacaagatattttgtgagctattgagcaacgtctgacacctgaatgta

SEQ ID NO: 163656 - DNA, 201 bp, Homo sapiens
tggtgttcagttcttgctacaagcaatttgatcgctttttattcctcttattttaggcgtaaaattggaccttaaacttgtagcaggcaggataaaaacgsttatctctctcaaaccaagaggcagaaagcaggcttcaagagcagagacccttgactcatacccttaggaccaaagatatctgctcacccaaccatcttc

SEQ ID NO: 163657 - DNA, 201 bp, Homo sapiens
gagcccgtttcctctcttgtaaaatggagcaatgctgcttgatgaaaccagtcaagttgtggttggattcttatatgtaataaacctgcacattgtgcacrtataccctaaaacttaaagtatgataaaaataaaaaaaattgttgcaaatctgagtatttgagaaaatctgggatacacactttctagctcttgggctcg

SEQ ID NO: 163658 - DNA, 201 bp, Homo sapiens
aactgactgtatggtctgcaaaacctaaaatatttactgtcaggtgcttatgtgtcctgtcctgagcccgtttcctctcttgtaaaatggagcaatgctgsttgatgaaaccagtcaagttgtggttggattcttatatgtaataaacctgcacattgtgcacatataccctaaaacttaaagtatgataaaaataaaaaa

SEQ ID NO: 163659 - DNA, 201 bp, Homo sapiens
attttttttcacaggcttcagatctgtgtgtctacttgtcatgaaaagtatattttactttaataagctaatgatttatttcaacagaggaagcagagccytccaagtttatatgagattgattactccaaagctttgactagagacctgttcttgtagaagccagtctttttgtgaaagtcaggtgaattttagattgcc

SEQ ID NO: 163660 - DNA, 201 bp, Homo sapiens
ggcttccatgcaaactcaggaaacaccagtggagacattgtcccctgccattaggctgattgatcgagaagtcaagccgccttatgttcagtgtagtgagmtgatgggcttttgttctccaggccaaattcctacgatccgtttggtcccagaacactttgcctgtggagtttatgagaagcaagtacagaagtaaactta

SEQ ID NO: 163661 - DNA, 201 bp, Homo sapiens
attaagaaataaactataacaatcacaggcctcattgagcggaaagtgctcagagtcattttccaagggaactccatggagattactttcagaatgctcayaaataagagaaacagattccttctgcatgtgaagcgtattgcagttataaaatgctcgtgcatatatgactttattttatttccattcagtaatgttatg

SEQ ID NO: 163662 - DNA, 201 bp, Homo sapiens
tcaccgccttgaggagccaccttttgatgaattgtaaaacacctctccctcgggccaaccactttgctctcctgtacttgccacctccaggccacgttacrtacctggaatatcaggctgtcacagtgaacgacaaggaggaagccctgctttgtcaaagatgccccatggcattcactgaagaggtcctgtgggtcggct

SEQ ID NO: 163663 - DNA, 201 bp, Homo sapiens
gggcggtctcttaggaatttagaataaagtcgcccattgagagtggcagtataaaatcagcctgctctgaatcacagtggagatggacagtcacttggaaragagattggtttctgtgtctgtaggatttcagagtaacctagtggaatgccctgactgtgtaaaaggagcataggtcctcagtaggaggttggtgagcta

SEQ ID NO: 163664 - DNA, 201 bp, Homo sapiens
cttgtggttctagggcacagctgtgataaccagggaccaacacccgcaagtgtgttgaaacaataggcctgaagtccaaaagctaaaagaataagtgttasaatccaagctcaggattcacaatgagttcgagatgaactctacattcagtttttggagaaaaacagttgtattaagtagtgactgagtatttaaggatga

SEQ ID NO: 163665 - DNA, 201 bp, Homo sapiens
tgcactgtaggtcttatctcagatcacttaattcagtttattagcaatggccctgtgaagtgatgagccaaccaaggcacagaggtgttgactttccccaygtcacactgcgagtgagtagcagaggcagataggaacttgcaagggctccgatcgcgggcatcccattgctctgtctccggcgctggctggaccccactg

SEQ ID NO: 163666 - DNA, 201 bp, Homo sapiens
aggtatgtatacgaaaaaatatagtatatatagggtcccatatcctctgaggttttgagcatccaccgggggtcttggaacatatccctcatggataaggwgggcttccgtattagcaggttatggagaacatcctcgtgtgctagtcactgtacaaggcatgcactgtaggtcttatctcagatcacttaattcagttta

SEQ ID NO: 163667 - DNA, 201 bp, Homo sapiens
gccaaggtcacatgctgggtaagggaggaacgatgctgtgaacccaggactcctggctccaggcatctcgttctgctctccatcccttcctacctctgcayacttgccttgactagtcaatggggctgcaggacgaccttcattccccttcagtccttagtgccaagctgagcagccttgcctgcctcattcccctgctcc

SEQ ID NO: 163668 - DNA, 201 bp, Homo sapiens
tccactgttttctctccaagcagtccccctagagtccagggtccacagggagacccgttgtccctgctcccccaccaatttctcccaagagaaaggaggtstcagatgaggacccttttgcaaattgttgctctggaggctgaaaaatcaagctcgagctgcctgctggtcctgatttccttcctggccgttagtccctgc

SEQ ID NO: 163669 - DNA, 201 bp, Homo sapiens
cgaatgcgaatccccctgtggacaattggtgactgagggacagctgtctgcaaggggcatttcatcagtatgcatcacgactggggcttggcagtcattaraattcattataaattactctgagtcccaggaatctcatttagttctccctcagcagctggaagatgctaccagctgtggatctagggtttcccccaaaga

SEQ ID NO: 163670 - DNA, 201 bp, Homo sapiens
gtccatctccccatttgttttcactgatctacttaacaacttgtgtagacaggtagagcaggcatgacctaaatttggtggatgaagagatctagattcaraaaagttagtttacatgtcaaaggacacacagtcgtataactgacaactgtatgcaaccaggattcctacctaggtcttcccactccaaatccagcactc

SEQ ID NO: 163671 - DNA, 201 bp, Homo sapiens; identical to SEQ ID NO: 30286

SEQ ID NO: 163672 - DNA, 201 bp, Homo sapiens
ttttttgaactgactaggacctcactacaatgtcaaatagaagtagagtgagtgtaaaccctagcttcattcctaatttaaggctgagaacgttcggtctrttaccataaagtatgatgcagctgtagctttttagtagattttttttattagcttatctcccttgttgactaaaaaaagttttttaaacacaggtaggta

SEQ ID NO: 163673 - DNA, 201 bp, Homo sapiens
tgatagagtttttaaagtgaggactgtattgtttactttatgtgttgttttaaagtaggaaggaacacagtcgccctgctatcagcctctggtttcttgtsccagtggcgctaagagtcaactcttctgcctgacagtgcctgctcctaccgtgcctgtgctgagatagctcctcctggcttcagggcctttatggctgaa

SEQ ID NO: 163674 - DNA, 201 bp, Homo sapiens
ctcccactgcagctgagttctgcatgttctgatgtcagtgttgtgagctttaactggagattggtgtccaaaggcagccgatactgctctgtccatttctrttgtgctgaaaatcacatggaaaccaatcacataatgatcttgggaatgaagtattcaatgcacagtgttattaacatgtaaaagacttagggcaaatca

SEQ ID NO: 163675 - DNA, 201 bp, Homo sapiens
aattccctttgacaactcaactttgtctaagagataacaactccctttggcatctcatctttggggcagcgttttctgatcctacaagtttgagtttgatygtcatcctcccaccctaccccccacacgccttctctgtatgactggtttacgtctctgactctcccgttatatcaaaaacttttttccccatatgcatcc

SEQ ID NO: 163676 - DNA, 201 bp, Homo sapiens
gaaattgataggccagtgactctgaaccccaaatcggagttgtgactaggcatatagaaaagataacatggcttctcatagtagctgagagaggaggtgtscccatcgtgggctcactaatggggctgttcatggtgggcagtctccattgcttggtgccacttgcacccgacatgcgtagagaatacaagggggcggtct

SEQ ID NO: 163677 - DNA, 201 bp, Homo sapiens
tgcttgtagaaacatttaatgatgttttggaggcacacgttgggctccagagtgacagtatgacttgggtgataggatgagcaagttcctcggtgggcctyatgccttaattacatccacaatacctggggactctgtacaacactgagattttaatgtggcaaaaccagcatggacagatgctggggaggaaggaaataa

SEQ ID NO: 163678 - DNA, 201 bp, Homo sapiens
tcacagctgggtacagcaggggtggggttgccacttggtctgagtagaaggaattctggagtaccttcgggtctctgtctgggccatctgctgcataaatycctttacaacacaagaggcagcatacttgctcttgacctggttctgtcactgtggaattggaccacctgccatcacaagtagatccagcaaatgtaccgt

SEQ ID NO: 163679 - DNA, 201 bp, Homo sapiens
gtgccagtgggtctgcacagcctcaacaggggagaagtgagcgagagagtgtggatgtgagtgtagaagcagtgtgtgtccagagagggtgtggattcatrtccgaatggtatttctatgtggaaattgataggccagtgactctgaaccccaaatcggagttgtgactaggcatatagaaaagataacatggcttctcat

SEQ ID NO: 163680 - DNA, 201 bp, Homo sapiens
tgtaggagtagtacctgttattacagcaggggcaagttgtaaacctctttccattttttcccttcattttgcccaatattttgatatctcctgtaatgtcratgctcgctgtcttgttaaacactttattatcacttgaggcatttatttatttattctacagatatcattttcagaaatgatttgtggtggttcttctgg

SEQ ID NO: 163681 - DNA, 201 bp, Homo sapiens
ccccatcatttcacctgctactcagccgtaaaagtttatttttgattcaaatgcagagattgagttttgaaacaaatctagattagtaaacatctatactyatatatagatttataaaatataaccagattatctaaaacttataaatgcatcttaaaattttttctttcttttacaggcaggaatttatacgtgcatgtt

SEQ ID NO: 163682 - DNA, 201 bp, Homo sapiens
gcttccagtttttggcaattatgaacaaagctgctattaacgtttgtgtacaggtttttatgtgcacataagtttttaactcatttggacaaatatttaaraatgtgattgctggatcatgtggttagcctatgtttagctttgccataaattgtcaaactgtcttccaaagtgactgtaccattttgctaccagcagtga

SEQ ID NO: 163683 - DNA, 201 bp, Homo sapiens
aagtttccacagaggagacagaggaggaggaagcgggggacagaataccccacgactctagcggcacacgtacacaagcgaggcagcacgcagagttgacrggcacagatggactggtcacgtagcctggagttagggcaacagatggacaagtcattgcataaattggctacccagggaccacaaatgcctgctaggaaa

SEQ ID NO: 163684 - DNA, 201 bp, Homo sapiens
gaaaagaagcatagagacctggattgtgtgcagattccttctctcataaagcggtatgcttgagcttaaggtaccatgtggtttcttggggcagatgccaraaatataggaggaggggttaacagaatccacagggccagctttaccaccgctctgtgcaacctcttatgtgatgacgcacatcagagcttccacaagcat

SEQ ID NO: 163685 - DNA, 201 bp, Homo sapiens
ctattattgatgaaaatggggtgtaaaatgtaaacagttttatctttctaaaataaagtcttaaataagtgtggtttgtggaggatgcgctcagccctccragggcaccatgaatgatggaggggaaaagctggagtttgggagcttggtgaatagtgagcatgttgatgtgtttgctacaatatgaattctattttgaaa

SEQ ID NO: 163686 - DNA, 201 bp, Homo sapiens
tcatatgcgctagctagaccagagccaatatgggatggctccccaaaggcaaggatataggaggtatcaagaatcgggaccattatttcaacaatctaccrcatgagacagacatttcagatactggttgtgttttctgtaaggaaaaacactgaaagccgtgctataatgcagggatcagcaaactattgacttgactca

SEQ ID NO: 163687 - DNA, 201 bp, Homo sapiens
tgttgtattctctatgctgcaatgtttaaaacccatctgagtaccgaaagactgttgttttcaccaacactgaaacatcatttatttgcattggaaaaccytaaatagacatgggtaaatgtcagttgatatgttatggtttggggattacatagctcttcgtctttaaaaaattttttttatctgtgcttttgtttaaag

SEQ ID NO: 163688 - DNA, 201 bp, Homo sapiens
gaatttgtacaaagtatcagtcattgtaatagcattctaataattctgttaacaactgcttgaaatcagaaagtattatttctgttgtttagatttgcccmagcatttcttgtgtaatgttataagctgtttatgtgcctcttaatagatgagagaatgcactatgtgaagtctgaagtatctgaagtaggtaatggaacc

SEQ ID NO: 163689 - DNA, 201 bp, Homo sapiens
aatgtgatgatatcaggaagtggggcctcgggagatgattaagtcataagggtggagcccttaggcatggagttagtgctcttataagaaaggccccagaragctgccttgcgccttctgtgatgtgagaacacagtgagaagatagccatctatgaattaggaagcaggtcctcagcagacactgaatctgctggtgcct

SEQ ID NO: 163690 - DNA, 201 bp, Homo sapiens
ccaatgtgatgatatcaggaagtggggcctcgggagatgattaagtcataagggtggagcccttaggcatggagttagtgctcttataagaaaggccccaragagctgccttgcgccttctgtgatgtgagaacacagtgagaagatagccatctatgaattaggaagcaggtcctcagcagacactgaatctgctggtgc

SEQ ID NO: 163691 - DNA, 201 bp, Homo sapiens
gctccaggaattcttgtgcagtcatgtggttttgtaaattggtacgactactctggaaaaatagttcagcatgtagttaagttgaagacatgcaaacactmtacagcaacaattctatttctaggtatgtactcaagagaaactcatgcatatgtataagagaatacatgtcaagaatgttctttacagccccaggctggt

SEQ ID NO: 163692 - DNA, 201 bp, Homo sapiens
aagtccaagaaaagcaaagatacttgcataagaacaagaggatgagaggacttattcttccagatatcgagtcattataaagctacagctgttaagacatkgtgtatctgatgtagggacaaatgaatagagagttcagaaacagacccactcatgtcaaagtatgacaaatgacacagttggcatttcatagtactgggg

SEQ ID NO: 163693 - DNA, 201 bp, Homo sapiens
actgcacatcccaagccacgcgtctgctcactgcagccctggcccctcagtgccacccctcgcaggtgctgtctctctagcatgggagctgatggcgcctktctgtgtccccacaggttctttcagagcacggcttcggccccatcactaccgacatccgggagggacagactttctactatgcggaagactaccaccagc

SEQ ID NO: 163694 - DNA, 201 bp, Homo sapiens
accctttagcactcactcctcattctcctcttccccctgtccttggcaattactagttcactttttgtctatggatttgtctattctggacctttcacgtmaatagaatcatgtaataggtggtgctggtcattagcatctggcttcttttgcttagcatggtgttcatggttcatctatgttgcagcatgtatcagtatt

SEQ ID NO: 163695 - DNA, 201 bp, Homo sapiens
catgttgggtaatattccattcatttgataaatcataaatggtaattttctaagcaattcctctacttttggatatttagttgattttaagattttgttawtacaggtaatactttcatagatattatgtgtatcaccttttcttctcgtgtgtttttttcttaaggtgtattcttacgagtgggattcatgggtttaaag

SEQ ID NO: 163696 - DNA, 201 bp, Homo sapiens
caccaataaattatgatagctctaaactacttactttaaatttgtttgtgctgattcttactctctctcacctctccctctctgccattctcctggacttytccccatcgttggaaatgtcgaataacaaagtttggattatttatcaaaaaggattgatttaatgaaaatgaatggagaaggctgacatgaacataattt

SEQ ID NO: 163697 - DNA, 201 bp, Homo sapiens
atcaataaaaacaaattaagaaaaacaactctttacataggcaataaaaatacctatgaaggaattgtaggagtagtacctgttattacagcaggggcaakttgtaaacctctttccattttttcccttcattttgcccaatattttgatatctcctgtaatgtcgatgctcgctgtcttgttaaacactttattatcact

SEQ ID NO: 163698 - DNA, 201 bp, Homo sapiens
aatgacattgaaatgtgtttataattagcgaaacaatctaaattcacaagatggtcagaactgcaggctgctaactggtgcaaacttcttaaatggtagarcacttggagagataaaaataggccttcctccctgggtaatttgaagcaacttgagggggcaatggtcattggagacatagtttaagatgcattttatttt

SEQ ID NO: 163699 - DNA, 201 bp, Homo sapiens
gtcagtaaccctggagctactccactttctctcaccaaagcgctgtgttttcttgggaaggtcactcaccctgtttatgcctctttccatatttctaagawtaggaaattgaggaggaaactttctaaaatcccttctagttctattctgtatttccaacttctgatgtttcctacccccatttacaaagtgtgtttcact

SEQ ID NO: 163700 - DNA, 201 bp, Homo sapiens
cagaaggtgtaggtaaaactgttcgtggttatcactgccaaatttttggggattcaagaaggggagatatttactgacccacttcttttttaatctcatayacatctcgtgtatgtatttttgtaagtggtctcaaattcttttttggaacagtgttgtgtatgaataaggtaaataaaaataaaataattcccatgaatg

SEQ ID NO: 163701 - DNA, 201 bp, Homo sapiens
tttgctcatgtggctaaggtcaacctgtgggttgcctgggggctagtcagcctaggctgctttactctttggcctggcagttggtgctggctgctggttascactaactgccagctggggtaatggggatgatggaccatatgtcttcagcacactggcctgagctaattcacatggtggtggatgcagagaacctaagag

SEQ ID NO: 163702 - DNA, 201 bp, Homo sapiens
atacttttaagtaattcatggattaagaaggaaatgaaatggaaattacatcagaagagaatggcaatgaaagtactacatatctatacgtgagatgtatytagaacaaaccttagaggttaaaaacatgtattagaaaagaacacttgaaaataaataagctaataattcatatcaagaaggtaggaaatgagcagacta

SEQ ID NO: 163703 - DNA, 201 bp, Homo sapiens
ggcttgtcactactgttgggtgacaggctctttaaaatggaaatatgtttttttaaaaatgtttcttcaatctttattatttgtgtatatatacttgtgascttctcactttatatgtttagaagatgataatcttcctgtggagtgcaccatttagcttttgctgtggaacaaccactctaaaacatggtggcttaaaac

SEQ ID NO: 163704 - DNA, 201 bp, Homo sapiens
tctccaccttctaggttctccaatggagcccttgtaacaaaagacaattaacaaagtaaatttacaaacagaagtttattaacatgtacatctcatatgtrcatgggagaaactcagggataagtaattcaaagaggtggctggaatttgggcttcaataccctcttcagctgaaatgaagaaagaaggttatgggggagg

SEQ ID NO: 163705 - DNA, 201 bp, Homo sapiens
atcagatgttcaaagagatcctgtgcccactggtatacacacaatgtttgctagttgaatggagtgctacttttgtgagtttgtttattgttgtcattctytccctgcctcccttccaaacccttctcctgcgttcattatatccagaaataaaactcagaaaaatttacttttgggtaagcagtgatttatcacatgcaa

SEQ ID NO: 163706 - DNA, 201 bp, Homo sapiens
tgggcttgtatatttaaggctgtgggtggtggaactgggcatgggaggggaggccactgagacatctctttgctccatcccctttctgagtttcctaggcytccactgttttctctccaagcagtccccctagagtccagggtccacagggagacccgttgtccctgctcccccaccaatttctcccaagagaaaggaggt

SEQ ID NO: 163707 - DNA, 201 bp, Homo sapiens
gtatattaatttgccaactgttgttccactcaggatctcagttatacgtaacttcataaagccatataaaatttgagtgaggcagtaatcttttttacatytagaagtgggccatagaacaccaattgtactggacagtttagaaacttatggtacaaaatgaaggttctgtatttggagcccaaggaagtgcatggcaac

SEQ ID NO: 163708 - DNA, 201 bp, Homo sapiens
aactctaaatctacccctgttagttagccaaccccacgtgctcattcttagagaggttctgttccctgaaaacagtctggagccaaatgctgtgtgagctrgggcccggtcatggaaacagaaaacttccattccgtcaagctggatggattctacagaaggaattcggtgtttacagaatcgttagcagggctgttcgcg

SEQ ID NO: 163709 - DNA, 201 bp, Homo sapiens
aaacctaatctccaatgtgatgatatcaggaagtggggcctcgggagatgattaagtcataagggtggagcccttaggcatggagttagtgctcttataaraaaggccccagagagctgccttgcgccttctgtgatgtgagaacacagtgagaagatagccatctatgaattaggaagcaggtcctcagcagacactgaa

SEQ ID NO: 163710 - DNA, 201 bp, Homo sapiens
ggaaatgcaaaagtccaagaaaagcaaagatacttgcataagaacaagaggatgagaggacttattcttccagatatcgagtcattataaagctacagctrttaagacatggtgtatctgatgtagggacaaatgaatagagagttcagaaacagacccactcatgtcaaagtatgacaaatgacacagttggcatttcat

SEQ ID NO: 163711 - DNA, 201 bp, Homo sapiens
aagtgacatatgctgcttccagacctggctcagaaaaacctgctgcatgatctgtgaacttctctctctgtattcagtctgcctgctgaatgctaatgccragggaaacctttgaagcaacatattgaaggtggtgaagcttctgtcagcctaggcccctgaagagttcatgaagtagaactgttaccatctcctttttat

SEQ ID NO: 163712 - DNA, 201 bp, Homo sapiens
tgactgagttctggccagtggaatgaggaagaagtgacatatgctgcttccagacctggctcagaaaaacctgctgcatgatctgtgaacttctctctctrtattcagtctgcctgctgaatgctaatgccgagggaaacctttgaagcaacatattgaaggtggtgaagcttctgtcagcctaggcccctgaagagttca

SEQ ID NO: 163713 - DNA, 201 bp, Homo sapiens
tgcggcagaagaattgcttgaacccgggaggtggaggttgcagtgagccgagattgcgccactgaactccagcctgggtgacagagggagactccatctcaaaaaaaaaaaaagaacttaaagacgtatcaaatttaaaaaaatgagcaagactataatgtcaggggtggacacttagatgataaagtgtaagaaacatag

SEQ ID NO: 163714 - DNA, 201 bp, Homo sapiens
tgtatgtgtgtccagtggctgactttccaagcagttattagaggagatctgagtttttagcttctgcattatgattcatgttgaatatttatggaagagawgtgtttctacaaatatgtaaaaatattggtgagtgaaagaaatggctcccagtatgacagaagaaaatatcctaaagagatccacagttatctgcagttt

SEQ ID NO: 163715 - DNA, 201 bp, Homo sapiens
atggtctgcaaaacctaaaatatttactgtcaggtgcttatgtgtcctgtcctgagcccgtttcctctcttgtaaaatggagcaatgctgcttgatgaaaycagtcaagttgtggttggattcttatatgtaataaacctgcacattgtgcacatataccctaaaacttaaagtatgataaaaataaaaaaaattgttgca

SEQ ID NO: 163716 - DNA, 201 bp, Homo sapiens
atagtatagacataatagaaatatttcagatataaaaagacttaagagattttataactcatagacagttactataaaacccttttaaagatatatttcaktaagatgaagaattaaaggagagacctgaagcataagaaacagtaattagttaaacaatgattaaaatgttgatcactgaagcaattttaaaaaaataac

SEQ ID NO: 163717 - DNA, 201 bp, Homo sapiens
gttgatgaggaacttagttaatgttttagtgaatagttctgatgcacatagagcaggaaaaagaagaatgtatctatcaattaatcagcagttaaatgacrcagaggataagttgagatgtgtcaactgacatgtaaagggagttctggagaaatagaattgcgagaatagtggagaagcaatatttgagaatataatagc

SEQ ID NO: 163718 - DNA, 201 bp, Homo sapiens
gtgcatgatcattccaatgacgcaagcatccagtgcccccatagcccaagatgcccactggaggcagctgggagcccaggcactctatagcacgcatttcyaacaatggctgctagctcggggagagggatagggagaggtgaaggagtatccacaatggaaagaaactgtcccgacacagagacagtcacagtagcattg

SEQ ID NO: 163719 - DNA, 201 bp, Homo sapiens
aggttaaatattttgtaaggaacaattcagatatatcccggaagaggtaccttttatgctttagtccaggccctctgggttttacctgtttcttgttgtasccactgctgcagcagggaaccctggaaactctaatcaccttcgtgtaggtacaacttgaaagtgcttctctcttcttgccttctgcccaaggtgacacac

SEQ ID NO: 163720 - DNA, 201 bp, Homo sapiens
ccattgaagccatggccaaaggagtatctgaaaactggaagagaagacagcttctaagcaaccagaagttatgtagccaagttcatgcacaaaagccaggrtgcttgacacctgtcttggctctggttttaggcactcacacgtacgaagcttgagattcttgtttaccagtccccacaaattataagccacagattaaaa

SEQ ID NO: 163721 - DNA, 201 bp, Homo sapiens
agtcattgaaacgatcaaatatgtttaaatgaatatgtttgtgatgatgtttaaaaaactcttcgattagcctgggagatagcaagttcgtcatcttgaaracactatgtaaatggatgaagcaagcatttatcttccctgtcccatgtgaattgtaccactgagtaacaaagtagtagctgaggggaagcttttcattat

SEQ ID NO: 163722 - DNA, 201 bp, Homo sapiens
ctggttttacaggatcgccacacagccgtaggtgcgaagtgagggagggagttggtgcagcctggtgggtgctgggggagtctggcttcctattcgtgcasctcacgcgtgccctctggtcctgcttgtgcatgattcccgatgtacaacttcctctttatgatagactgtggctgtagccccttgaccttataatctggt

SEQ ID NO: 163723 - DNA, 201 bp, Homo sapiens
tggaagctgggatgatgggatcccttctccagggccacaggaagggagaggttcatgggtcctggatggctaggccctggctgggactagagagcctgggygagagaattgccgctggggctctggaggtgctcgctggggaaggtggtccgcggcaccgaagaggaaggcaggccatcaggtgtcccgtggggaaaagca

SEQ ID NO: 163724 - DNA, 201 bp, Homo sapiens
gggctattcttccctctctgaaggaaccagttgggaggatttttcccttacccctgtctttcctggccactctagagtaaggctgcagtggagctgccctrcatttccagcctgcacccatataacaaaccaaccattcaacaccccaccccccgcacccccatcccccaaatcggcctttctctctgcccccagctggtt

SEQ ID NO: 163725 - DNA, 201 bp, Homo sapiens
gtcctggatggctaggccctggctgggactagagagcctgggcgagagaattgccgctggggctctggaggtgctcgctggggaaggtggtccgcggcacygaagaggaaggcaggccatcaggtgtcccgtggggaaaagcattccccaacagtctccagcttgtgcctcgtgtgtgtctgtggcccacagaggcctggc

SEQ ID NO: 163726 - DNA, 201 bp, Homo sapiens
acttgaaaaaaaatttgaaataaaaacaaaaacacaataacattccaagcaggaaagtaattgaaaaaaactgctatcatccatattgctaattttataaygcggaaactaccacagagttataagtgcagcgatgaagatataatagacatatttttgtgtaagaaaaatgaaaattcaccttagtgactgaaagcatag

SEQ ID NO: 163727 - DNA, 201 bp, Homo sapiens
tttcagctacttctacaagatgatattgtcactttcattttagagatgagcaaatccaagtacagaaaggctaagtgacttgagcaaggtcatgcaggaargtggggcatcctttcaggtaatgaaagcaaagaaggggagatgggtgttggggatgttcaagaataggcaggctgggggttacatccagggtgttggtgc

SEQ ID NO: 163728 - DNA, 201 bp, Homo sapiens
cagttgaaattcaaagtaacccaggttcataagtaggctgtgatgttgaaagattggaaactctcaattttgtcaaagattggaactaggttgagatactktggaatgttttactagataaagaggcagggaaataaaataactgttgtttcctgtgatttgagaactacaggatggcaccagaatctcagacctgcagcc

SEQ ID NO: 163729 - DNA, 201 bp, Homo sapiens
aaacggacaacctactttcaaacacaaaaggtgggttttcacagataagccatatctcccctgctctgtgcttgttcctttgatttctccaaaaagtgcarttttccatatttctgaaaagtcatgttgtttggcccactttctaggccctaggaaccaagatgaggcccatgctaggatggccctgagtcttgccttgtc

SEQ ID NO: 163730 - DNA, 201 bp, Homo sapiens
gccaccatgcccagcctagactatgtgacattttctttgtgttcttgcaaatgtgatgaacaagaactggcatctcacaaccagaggtggatgtgaaacgsccacgttctcaccatcagactttcatcagctcccctgggtcctgggcagggtgaggtagattttagggtcatgacatgagtcagtaagggcaggtggagg

SEQ ID NO: 163731 - DNA, 201 bp, Homo sapiens
ttaaggtgagatgactagtgagaagccttgagtcttgatgaatgggcgagggagacaatcctttatatcaagtcccaggaactaacttgagagcccaatgyggagggcactggaaagtcagttaaacagttagatagtcccacctgctgaggagatggaagcaagggccaaatcgcagggtgggggtcaggttggcctaga

SEQ ID NO: 163732 - DNA, 201 bp, Homo sapiens
taccattagctccaatgtttatggggagaaagcatgaaattatggaatcaaacctactgggccctgaatgacctgaattaagcaaataatttggcctcatkgaggcttagttttctcatctttgaaatgtaaaacagacatcataatacatggagttcccatgaagatttaatacgcaattaatgcatatgaaagcatttc

SEQ ID NO: 163733 - DNA, 201 bp, Homo sapiens
accatggtccctgcttgacagattggttttgcccatatcttatcatccctgcctgtttcgcagcagagtgggagtttggtgccagtctagaaaatgggcasaggtccttttgtacccttcttattctggaaaatccagctcaaagggttagcattgggtgcgaaggccagcctctgaaatcagcaggttggatacagaaac

SEQ ID NO: 163734 - DNA, 201 bp, Homo sapiens
gttgaggataggaggaggtcatattgagagtttgtcatctcgtagaataatcagtatgagattagaaaaggtagaggttttttggattagaggcagtttaraaattgtgtgactggcttattattaatcgaattagcagtttctgtttcctggtttccccatcatttcacctgctactcagccgtaaaagtttatttttga

SEQ ID NO: 163735 - DNA, 201 bp, Homo sapiens
acggggtgcgtttgaatttctggggtggggttgtgagtggcaggattctgtaggcaagagaagagaagactctggatcccaggaaatggtggggcacagaktgaggcacagagcaggaattgtcattggtctaaacaccccagcacctgaagtataggatagcttacattttaatcaaaattcttgcttgctccttacatt

SEQ ID NO: 163736 - DNA, 201 bp, Homo sapiens
ttggtagtcagcttggtggtagctgtattgaatttcacgtgtcagggagccccccaggtggggatccccagcaagagttggaaatgcctgtcttttttaasctttctcaggtgggtggttaggggtttgacatctcgatttaagtcattctcagatggatgatatgtggtttgaactatatagaaagaggctgctctaaga

SEQ ID NO: 163737 - DNA, 201 bp, Homo sapiens
tcccagataaaagtgtactgttttggggactaggacctctaactctacagagccaagagtgtgggaacaaaagctacaaagtctcccgatgggtccctgaratagtaaatgaagtcaatcctgtttctctcctttgctttccaaacacgtgtattattcatttggggaacatggtgtgtccctacctttggagtgtttgat

SEQ ID NO: 163738 - DNA, 201 bp, Homo sapiens
cacagacagaactggctcactgtctggaaacagaggccagggagaaagggtcgcatccctgggacgagatgtgcaaaaatcgggcttctcagcatcattcrttagcaccactctgactttacatctgcatagtgacatttaaagaggaacatgggctgggcgtggtggctcatgcttgtaatcccagcacttcgggaggct

SEQ ID NO: 163739 - DNA, 201 bp, Homo sapiens
ccaccacccctggctcgaaatatgattttaagcccatccaattggcaaatatttatatactttgtaacaccaaatgcttgcaaggctgtggcacaacagaratcctcctacactgcttataggacgattgtacctggcaaactccttttgcctacttgtccctgtagcagtgatcccagagtgcccaggcaatagctgtat

SEQ ID NO: 163740 - DNA, 201 bp, Homo sapiens
agccaccacccctggctcgaaatatgattttaagcccatccaattggcaaatatttatatactttgtaacaccaaatgcttgcaaggctgtggcacaacaragatcctcctacactgcttataggacgattgtacctggcaaactccttttgcctacttgtccctgtagcagtgatcccagagtgcccaggcaatagctgt

SEQ ID NO: 163741 - DNA, 201 bp, Homo sapiens
gtagctgggactacaggcgcccgccaccacgcctggctaattttttttatttttagtagagacggcatttcactgtgttagccaggatgatctggatctcctgacctcgtgatccaccagcctcggcctcccaaagtgctgggattacaggcgtgagccaccacgcccggccaagcctatgtcgcttttaagatgaatcca

SEQ ID NO: 163742 - DNA, 201 bp, Homo sapiens
ggtgaaaatggatttcttctaaaaatggaattaatgatgatggagtgcttgtgttgggaactcaggctagtctggtgcttgccggagatgcaggatgcttkgagagctgcaggcagtgctgtcaacacagaggcatgtgttgacgtgtctgatcagcaaccctaagaagtgggtcgggcattgcgggctggtgaaggctgg

SEQ ID NO: 163743 - DNA, 201 bp, Homo sapiens
acttgtcctgatgttcactgtcagccggtaactcctgggacctcgtaaagtgatcacctagcaacaactcttagcataaacttccctttaaagttctcatkttcagacacatttatcacgtctgcaatcaggatggataaaacagagttggtacccaaagatgagctgaggcttaggaggccctctgagcagaggagaagt

SEQ ID NO: 163744 - DNA, 201 bp, Homo sapiens
atgatgatatcctggtgtttgcaatgaagattttcagttcaaggccagtgccttccgtgtgatggtgaagaggcttatcaccgaattttccagtttctatsccattgtagtttctaccctcagttttgaggggaacccacgttgattttagataaatgatatccataggaggtaaaatttaggtattatataattaattaa

SEQ ID NO: 163745 - DNA, 201 bp, Homo sapiens
taaggagagagatattaaaaaaaaaaaaaaaagaactaagtagaaattcaaagatacaataactttttaaaaaatcgccagaagggctgagttggcggaaraaagaatgaaactggaagataagtcaattgatattatccagtctgaggaacagaatttaaaatgggggaaaaacggtgatggttacataaccttgaaaat

SEQ ID NO: 163746 - DNA, 201 bp, Homo sapiens
cagcctctcaccattcccccaactgaaggtgctgctgttacttgttccctgtcctcacagaccctctttccacaccccatcattctggctgaagccccctycaatgtgttttcacagcacctgcactttgatcacaacacatgtcccctttattttagtcattactggttcgttttcccttttggtccaaacactccttga

SEQ ID NO: 163747 - DNA, 201 bp, Homo sapiens
ctagtgtgggttgaagacagtttctcaatcagaactttctggaaggatgacatacgtgtggctgttgaataatcttgtctctttccccaagggaactgccyttagaaatgtttccacttccttctcttctgtttctgtttttcctcccagtaagaccataccttgatttggaacctcaagattgttaagtgaatgaaattg

SEQ ID NO: 163748 - DNA, 201 bp, Homo sapiens
agggtctgctctgaggggatggggcctccgtggggcaggcagccctgagaggagggggtccctgtgtggccacatgggcgtggccttgtgtttcctgtgcraaatgggcagcctggcagttatctggtaatgagtgcatccaggacagatgaccaaactggagtcgcgtggtcgccagttgagaaccactgacctaggctc

SEQ ID NO: 163749 - DNA, 201 bp, Homo sapiens
tcattcacagaatcgcccatggtgcacggagctgcgctcaggcccaaacggtcagattctgcttttgacccacctgagcccactccctgcatggctcacaragccctgccttctgcaggtaccaggtcagactctgcttcggcctcacccgagcccactccccatgtgtctcacagagccctgccttctgcaggtgcagca

SEQ ID NO: 163750 - DNA, 201 bp, Homo sapiens
gctgaagggctgctgctccttttgcagagcccctgctgatctctcatctctggagatggctgtgcccttagcgaatgcgaatccccctgtggacaattggygactgagggacagctgtctgcaaggggcatttcatcagtatgcatcacgactggggcttggcagtcattagaattcattataaattactctgagtcccag

SEQ ID NO: 163751 - DNA, 201 bp, Homo sapiens; identical to SEQ ID NO: 30284

SEQ ID NO: 163752 - DNA, 201 bp, Homo sapiens
tctgggttgtatggtatatgtagttccataacaaactgccaaattgtcttctgtaccattttgcattgccaccagcaataaatgagggttcctcttgctcsacatccttcccggcagttgttgttatcagtgctttggattttagctattccacagacatttagtgggatctcattgttttaatttgcaattcccaaatga

SEQ ID NO: 163753 - DNA, 201 bp, Homo sapiens
agcaaaaatgtcctatgggtctttgatctttgccagtgcatttggattggtttctaagtacagcgtggcagccgggttatggtattgttagttctggaaayttagtcaatttgcatctggagtcacctagtcacatttgatgaaatgggttacaaagttttagcacctttctgtaaaccaggggttggcaaataatagccc

SEQ ID NO: 163754 - DNA, 201 bp, Homo sapiens
agtagctgggactacaggcgcccgccaccacgcctggctaattttttttatttttagtagagacggcatttcactgtgttagccaggatgatctggatctsctgacctcgtgatccaccagcctcggcctcccaaagtgctgggattacaggcgtgagccaccacgcccggccaagcctatgtcgcttttaagatgaatcc

SEQ ID NO: 163755 - DNA, 201 bp, Homo sapiens
gcagcaacatgaagaaaaatcagttggttgcatgatggacttcatttttaaaaaattgtggtaacagatacataatatgaaatttatcattgtaaccattktttaagcgtatggtccagtggtgttaagtaccttcacattgttttgtacccatcaccaccatctagctccagaattattttatcttctcaaagggaagct

SEQ ID NO: 163756 - DNA, 201 bp, Homo sapiens
ccccaacatcatagtagtacaggggaggggaaaaaaagtttgttctccaccttctaggttctccaatggagcccttgtaacaaaagacaattaacaaagtraatttacaaacagaagtttattaacatgtacatctcatatgtacatgggagaaactcagggataagtaattcaaagaggtggctggaatttgggcttcaa

SEQ ID NO: 163757 - DNA, 201 bp, Homo sapiens
tgtggcttctcccctctgggccttgacacagaaagctgacattagagttagatcacctctgggtccctgtggtgctagcagcctgcgttccttctggattmtaagggaccacagggaaaagctgttgcccagtgagagactcattgggtgggcagctgccccaaggaacatctttagggagccctgcagtctggccccatg

SEQ ID NO: 163758 - DNA, 201 bp, Homo sapiens
ccctatctcacctcataattatggtcgtttgaattgtataatattttgaagtaaaattattgaggcagaaatgcgttaatatttaactgctacttgatacstattattaaattccattttgatgtatgtacctgaacatacaagcacattattctacaaattaatgcgaacttctcaggaagcgttagtccagtattttat

SEQ ID NO: 163759 - DNA, 201 bp, Homo sapiens
gagacagagcaagatcagtttcagtagtgcgtatgggtcccctgtgtccaggggtccctcgtggctgcccgtacggggtggtctgcctacgagcacccctyttgtactgcaactaagggaccctgtttcctgggtggggaacagatagagcaatgaggttggccaggtgccatgtgacacacacccttaagcagaacaaag

SEQ ID NO: 163760 - DNA, 201 bp, Homo sapiens
atttttaattatattagtgtgcttttaaatgattaaggagaatgccaaggaaattcttttgtctttcttatgtttagaaggaaaaagggccaagccagttmatgcaaacagctggtatgttagaggcctctagcaagtggtaaagtatggaaaccacagagactggtaaagaactcgattggatatgaacactacctgcta

SEQ ID NO: 163761 - DNA, 201 bp, Homo sapiens
attaggcattacaatcttttcttcaggcaaaaattttgcacagaagtctattaaaacagtgtgcaagatgctgtgattgggagagggggcttcccccagcmctgtcctcagtattctggccctagagtgctgcctcaaaacctaccaggagcttagtctgtaaagcagttgaggactagggccaagttaactttgggctga

SEQ ID NO: 163762 - DNA, 201 bp, Homo sapiens
cagaagttgtagttaattgattgcagatatgaaaaagcagattataacccctcagagatctatacaaagacagggacagggaaagagaaggagaagatccrtgtctcccgaaactgaaagccatgaaaagaaaactcgtagaggaaaagtcacttgaattatttttaaaagccagcagacctcaaaggaaagcccaaatca

SEQ ID NO: 163763 - DNA, 201 bp, Homo sapiens
taacatcttagtgtagtacatttgttatcactgatgggccaatactgatatgttattattaactaaagtccatagtttacattcgggttcacttttggtgktgtacatgctgtaggtttgacaattgtataataagtgtatctaccattatagaatcatgcagaatagttcactccctaaagattccctgcgctccacctg

SEQ ID NO: 163764 - DNA, 201 bp, Homo sapiens
ttttaaaaaatcgccagaagggctgagttggcggaagaaagaatgaaactggaagataagtcaattgatattatccagtctgaggaacagaatttaaaatrggggaaaaacggtgatggttacataaccttgaaaatattttgaaaaccactgaattgtaaagtttgaaaggataggtcaggcacagtgacttatacctgc

SEQ ID NO: 163765 - DNA, 201 bp, Homo sapiens
aggcatccattatttgtgaactgtgtgggttgggcactggtggaccagagtagttctgggaaggtgaattgcaggcctccacagccaggctctgttagtcycaatattctcccagaaagtcaggttggactgttgcatgcccgaatgttggcactcacacctttcttgttcacttgcttctattgaccttgttactgggtt

SEQ ID NO: 163766 - DNA, 201 bp, Homo sapiens
aatgccagacttcctcagcttgtgctatacttcccgttcacacactgccgtgtctttgctatgccctcccatacaccaaaaaaaaaaaaaaaaaaaaaaamccccaaataatccaaaaactcttgttcagatttccaaactggttcaaggtcaagatggaccaaaatttactttggctttatcttaaccaaagtcttccca

SEQ ID NO: 163767 - DNA, 201 bp, Homo sapiens
cctgaaagagaagacagactttacagaattagtccaagaaagtcactgaacaaaggaacagcagcagcagaagcaacaccacactgtggggcaggacatckgatttccagagttgccacattattttttaaattgtctgattttcaagaaaaaaatatgtaacaaagaaacatgacggtatccgttactaaacaaagactt

SEQ ID NO: 163768 - DNA, 201 bp, Homo sapiens
accgttctcatgcgttggacttactattagtgtcttggtctggtgaatttttgctcagggctttgtttccctcataagttaaaataacgacaggcaaaggyacgtagtctagctgaatgctctccatttttgtttcagacctggatatcctacaggtgtgaagttgccaagaataagggagacccaggggtcaaggggacc

SEQ ID NO: 163769 - DNA, 201 bp, Homo sapiens
tttacacactgtgaccaagatttccaccttgcaagaaggaaagagtcaaaccttcaaagtttttcagtgtttaatttatcccaggctacctaaaatggatsaaaacatgaacaggcctacttgggtgagtggtgaaaactgaacctgccctggactgcctcatttgcagcctgctgtgttcaggttagggggcatctgggc

SEQ ID NO: 163770 - DNA, 201 bp, Homo sapiens
gaaaaccattggaaatttcccatcatttaatatacttccacctactgtgagccagcaatcccagtcctagatttttacctacgagaaataagacgacacaraaacccattcccaaatgtttacagcagctttgttcataatagccagaaacaggaaacaacctaagtggccttcagttgggaaatggaaacaccacactga

SEQ ID NO: 163771 - DNA, 201 bp, Homo sapiens
ccaccgtcggtcctcttcacagccacccgctgggggaccccaggggaggtgactcagtggaggagccctgctctgacaaagtcagtcccacagaatcgcastggccgggctctctccctgcacagcgcctcttcctggggtccccagctcagagaagcctcctggaggaagcaagactcgaggggaccctgaaagcaggca

SEQ ID NO: 163772 - DNA, 201 bp, Homo sapiens
acatatgatgtcagctgtaggcttttttgcagatgctgtttattgagttacggtagttcctctttattcctaacttcctcagtgtttttatcaggaaaagkgtcttctaccacctgtttaaataaagttttattggaacacaggcatgcttattgctttagctgttttctgtgtctgcgttctcagtgtaacaccagaatc

SEQ ID NO: 163773 - DNA, 201 bp, Homo sapiens
tttctgactgtttattcagttgatataactgataatacaaacattgcaaaatcagcaatttgcaatgcctgtgagaggtgatgttatcagctttgataccrtaaagaggttgatcagtgctttagcctttaccttaaaaagttatgtggtttctaatacattcacaaaatggggaaaattgccgatctaaccaactgcttt

SEQ ID NO: 163774 - DNA, 201 bp, Homo sapiens
ttgatataactgataatacaaacattgcaaaatcagcaatttgcaatgcctgtgagaggtgatgttatcagctttgataccgtaaagaggttgatcagtgstttagcctttaccttaaaaagttatgtggtttctaatacattcacaaaatggggaaaattgccgatctaaccaactgctttattcactgagggaaggaga

SEQ ID NO: 163775 - DNA, 201 bp, Homo sapiens
tacattcacaaaatggggaaaattgccgatctaaccaactgctttattcactgagggaaggagagcagggagctgaagaggtgacccccggactgggcttycctgtgttttatatctagggtaagcttgaacaagctcctgaaaccacagaggtgtttaaggtagggagggtcatttcttaacactcctcgattatggtct

SEQ ID NO: 163776 - DNA, 201 bp, Homo sapiens
ggactgggctttcctgtgttttatatctagggtaagcttgaacaagctcctgaaaccacagaggtgtttaaggtagggagggtcatttcttaacactcctsgattatggtctagaactctgtactgtagtcagaaacatttagtttgatttctaaaagtggggaaattctgcccatgactcattctgttcattttacatac

SEQ ID NO: 163777 - DNA, 201 bp, Homo sapiens
tatggtctagaactctgtactgtagtcagaaacatttagtttgatttctaaaagtggggaaattctgcccatgactcattctgttcattttacatacactkctttcctcttcagaaggcttggtgtttctggccccatcactacattcgggacatttgtcttctttgagcgctgctgggacccctatacactaactgtaat

SEQ ID NO: 163778 - DNA, 201 bp, Homo sapiens
ctggccccatcactacattcgggacatttgtcttctttgagcgctgctgggacccctatacactaactgtaatgttgacttaggttactaatttaatagtsttcttcactagcctgctcccagtgaccccctagtacccagcttcttcagcagcttctttatatgtgaagtttggagtgacagtattgcttaccacagagc

SEQ ID NO: 163779 - DNA, 201 bp, Homo sapiens
gtctgtgttcacagtagcattgtttgcagtggtaaaaaggtagaggcaacccacatgttcgttgatggatgaatggataaacaaacaaaatacacccaatrgaatattattcagccctaaaaaggaagaaaattcagacacatgcaacaacatgggtgaaccttgaggacattacgccgagttaagtaagacagtcacaaa

SEQ ID NO: 163780 - DNA, 201 bp, Homo sapiens
ttgcttcctaactcatcatgaggtaaaatcacatgtttaattgtttattgcttattctctgactcctctagaaggtgggctttgtattaaatgttttctcrttgaactagtgagtgaacctctgtttctgcatctgtaatagtttgtgccttctcagtgtcggggcgcacacgggcgcggagcctgccgtgcagagcgtgg

SEQ ID NO: 163781 - DNA, 201 bp, Homo sapiens
aatgaggaagaagtgacatatgctgcttccagacctggctcagaaaaacctgctgcatgatctgtgaacttctctctctgtattcagtctgcctgctgaakgctaatgccgagggaaacctttgaagcaacatattgaaggtggtgaagcttctgtcagcctaggcccctgaagagttcatgaagtagaactgttaccatc

SEQ ID NO: 163782 - DNA, 201 bp, Homo sapiens
ttttggctatttaggttctttccctccatatatatatttgatcagcttattaatttttaccaaaaaacatcagctaggattttgatagcagtcgctttgcrttaatttggttgataaattgtaggaaaattccatgtgcatttaaaaacaaatggccatcttaccaacattgagtctttcaatccatgaacatggaattta

SEQ ID NO: 163783 - DNA, 201 bp, Homo sapiens
tcatcttatttaaagccacagttctcaccatagacctcattaggccatcaacacacattcagcctttttcttcccagtgaaatgcagggttttcatggacrctaactcatgggtggaactgcgcttgaacataagtgaggctagccactgctcaaaccccatttttgtagagtctgttagttgacccagccacatcactgc

SEQ ID NO: 163784 - DNA, 201 bp, Homo sapiens
agaactcctcagtacctgctccaccacgccccaggagcacactagctttcttccttgtcacttagttgtgcctgatttgcacactagataaagggcaacaygctcctatctccggtagcagccttggctgtgggtacatttttatcaacagaagctgatccccactccttgcttcaggcggctgtttttggtgctgccttt

SEQ ID NO: 163785 - DNA, 201 bp, Homo sapiens
tttagtttttagtatacaagatttgcatttcttttgttaaatttattccaaagtattttattttttctgttgatgttatgaatggaatagttttcttaatytcatttttggattgtttggtgctagtgcatagaaagaattaatttttgtatgttgaagttatattctacttccttgctaaacttgtttgttagtagatgg

SEQ ID NO: 163786 - DNA, 201 bp, Homo sapiens
actgatgactattatttatagatgtttgcacttttgtctgaacattttcttagaaaaactcctagatttagaatttctgggtcaaagagtatgattttttwaaaaaagctatggacatacattgccacattctcttttggaaattgttattcttctacccgaagtgtatgagtatggctctttccccattcatctaccaac

SEQ ID NO: 163787 - DNA, 201 bp, Homo sapiens
catttcattttgaaatagtagaaatcaagatgggagtttaataagaacatttgtaatgaatgagtaattctctccagcaataaacattaatgaaaatatayaaagacctgcttatatttcttcagataaatcatctgaaacacagataattctaataaattttttccatttcatttattacaggagaagtaaaaacttata

SEQ ID NO: 163788 - DNA, 201 bp, Homo sapiens
ttcatttttggattgtttggtgctagtgcatagaaagaattaatttttgtatgttgaagttatattctacttccttgctaaacttgtttgttagtagatgkttagtggatttcttggaattttctacatacggacttaagccattgtgaatgaagagagttttaattcttccttaccagtctgtatacctttacgtttttt

SEQ ID NO: 163789 - DNA, 201 bp, Homo sapiens
ttctcaggtaggagcagaaggaagacactgttactcattggggctgtggcccagttggcttgaggaagtacaggcagggtgggtccttactggggcagctrgaggggcacagactgctctgccggaaggtaggtgatgatatgagagcataagaactggtatgtaatatcatctgcagcttccagcttgtgtagctcaatc

SEQ ID NO: 163790 - DNA, 201 bp, Homo sapiens
ggagattttctcatattagtacatatagtgagacttgcatttaacaattgtgcaatatcccaccatatgaacatatcagttcagtgctgataattatttargttgcttccagttcatgtaatttgaaaaatagtttcaagtatgtttgtacaatacattattacaaataaaattgctggttgtatatactttctttgaata

SEQ ID NO: 163791 - DNA, 201 bp, Homo sapiens
aaattacctatctccaagtcacgtcttcctttatatttatactttatttttgattcccagtgatattcttcaacttgagtggtggcacaaaggctctgttwggggattctgtctcctcatttcagtaatagccttcaataactcctaataataataaaaacaaggcccattaagtaaattgtgaacataagaatttctaga

SEQ ID NO: 163792 - DNA, 201 bp, Homo sapiens
gagagctaagctggccagggaacacattatagaggaagtgagacttaagcaaaatcttaaggagtgatagaatttatttaactgaatagggaagagaggarttttagatggaggggttgatgcaaagcacctgtggcatgggaggaatgaacagatgagactgcagtaacaatttgcatagaagaatgggcactggcatgg

SEQ ID NO: 163793 - DNA, 201 bp, Homo sapiens
ggatatcaattgcagaggtcctttaatctttttgaacattatttgattggcaattggaagcaattgaagattttggagcaggtaaatagcaataacaattrccattttggagattaatgtattaagtgaaaaaataagcacagtcttggccattgaaagtaatttgtaatcacggtcttggccattatgaccattatggct

SEQ ID NO: 163794 - DNA, 201 bp, Homo sapiens
tatgtcacccattttgtgaaaaacctcagtgagtctcagtgcttccaagataaattttaaattctccaacccggaattaaacttgtcagtctatctccggracttacctgcatccttatctctcactcctcacttcctagacctgtgcaccagcctataacctgcacttcccattccatctgcactgcttcctcctcactg

SEQ ID NO: 163795 - DNA, 201 bp, Homo sapiens
cattaagtagatactatgtgccagtttttctgctaggtcctgataactgttaagatgaacaagacagggtttctagttccaaggagcacagaatctggtgragacagcagatatgccagtgaaggattatgacagaaggtgactgagcctcctgtaaatatgagcagcactctgttttctcctgacctcatattgcgttcc

SEQ ID NO: 163796 - DNA, 201 bp, Homo sapiens
tatccaccctgaaatgcttccagctccccagtgatgttccagtggcctttagatctgagacccagctgctctaccccttaatctggctcagctgaaaaccstgggggattctccagcctccgaggccaaggcctgcttcatttaaaagaggctttgttgctggtgggtttgacctggcttatgattttattacgtggtctg

SEQ ID NO: 163797 - DNA, 201 bp, Homo sapiens
tgtgatccttagctcttttggcacactagtgacataatcggtgcagttatttaagaagataaatgtatgcatgcaagaaggacttgatggaggaattctgmccactggatgctagttaagaagcatttgacagtgttagaggtctaacacctaaacgtctgccctaagatgatgaaaccaagacagaaaaaatatgttaat

SEQ ID NO: 163798 - DNA, 201 bp, Homo sapiens
tcaagattacagttataatcatgccactgtactacagcctgggtgacatagcaagaccttgtctcttaaaaaaataaaagaaaaaaatgctcagaatgactgtgtgtgtgtgtgcagaaagaacactagaactgacaaaatgtttgttaactcagcaaacatactgggcacctttttgcagagcactggataaaatgcaga

SEQ ID NO: 163799 - DNA, 201 bp, Homo sapiens
caagattacagttataatcatgccactgtactacagcctgggtgacatagcaagaccttgtctcttaaaaaaataaaagaaaaaaatgctcagaatgactgtgtgtgtgtgtgcagaaagaacactagaactgacaaaatgtttgttaactcagcaaacatactgggcacctttttgcagagcactggataaaatgcagaa

SEQ ID NO: 163800 - DNA, 201 bp, Homo sapiens
ggtggatcacctgaggtcgggcatttgagaccagcctggccaacaggcgaaaccccatctctactaaaaatacaaaaaattagccaggagttgtggcacaygcctataaccccagctacttgggaggctgaggcaggatagtcgcttgaacctgggaggtggaggctgcagtgagccgagatcatgccattgcactccagc

SEQ ID NO: 163801 - DNA, 201 bp, Homo sapiens
tatggggtccagtagtaaatcaaggggtagcctaagtcagaaaatttcattaggggagcacatggagggctcacagacctgcaagggtttgtatttaattytgtaggccacggaaaatcactgaagacttctagatacgggagtataaagattactgtgatggtggtcaacaggatgggctggaggtggggtgaatcagag

SEQ ID NO: 163802 - DNA, 201 bp, Homo sapiens
gctacttgggaggctgaggcaggatagtcgcttgaacctgggaggtggaggctgcagtgagccgagatcatgccattgcactccagcctgggcaacagagsaagactccatctcaaaagaaacaaaaaaaacaaaacaaaaacaaaaacaaaccacacttaatactggtatagtagacatacaaatggccaacaggtatat

SEQ ID NO: 163803 - DNA, 201 bp, Homo sapiens
ccatttggctgcttattgacacagtttgcttccaaaccttggctactgtgaatagtgctgcaataaacatgggagtacagatatctgatttcctttttggrgggtacattaaaatggggtatgtacccataccagtgggatttctggatcacatgatagctctgtttttagttttctgtggaaatttcaaactgctctccc

SEQ ID NO: 163804 - DNA, 201 bp, Homo sapiens
aacaatgtacaagggttccattttctccacatcctcactagcattttttattgcctgtctgttgaataaaagtcattttaactgggttgggagaatatcaygttgtagttttgatttatatttctctgatgaccaataatgttaagcaccttttcatacacctgtttaccatttgtatgtcttcttttgagaaatagctat

SEQ ID NO: 163805 - DNA, 201 bp, Homo sapiens
aaaattcaaacaaacaacaaaaaaaatcagctgggcatagtggcacatgcctgtggtcccacctacttgtgatgctgaggtcagaggattgcattagcccrggagtttgaggctgcagtgaactaagtgccactgcaccccagcctgggtgacagagcaagaccctgtctcaaaaaacaaaaacaaaaaaccctagcctgt

SEQ ID NO: 163806 - DNA, 201 bp, Homo sapiens
tagttttgatttatatttctctgatgaccaataatgttaagcaccttttcatacacctgtttaccatttgtatgtcttcttttgagaaatagctattcagrtcttttgcccattttttaatctggtaattagattttttcctatagtgttccttatatattctggttattaatcccagataggtagtttgcaaatattttc

SEQ ID NO: 163807 - DNA, 201 bp, Homo sapiens
tcttttgagaaatagctattcaggtcttttgcccattttttaatctggtaattagattttttcctatagtgttccttatatattctggttattaatcccasataggtagtttgcaaatattttctcccattctatggattgtctcttcactttgttgattgtttcctttgctgtgtagaagtgttttaacttaatgtgatc

SEQ ID NO: 163808 - DNA, 201 bp, Homo sapiens
aagataaatagctaatgcatgctgtgcttaatacctaggtgacaggttgataggtgtagcaaaccaccatggcacatgtttacctatgtaacaaatctgcrcagactgcacctgtatcccaaaattttaaattaaattgaaaagaaaacatagtcatctctctggtcagttctaaaggaaagcatactgcagcgatctgtg

SEQ ID NO: 163809 - DNA, 201 bp, Homo sapiens
atccaaagtgttcctatcctcatgaaactcacattgcagtaggaaaaagttaaaaaaaataacttcataaataaaatagtttcaggtggagataagtgctrtgaagaataaaatagggtaaagtgagtgagtttctgggcagaagatggagataagtttagaaggatggttagggaagaccactctgaggaaatgacatgc

SEQ ID NO: 163810 - DNA, 201 bp, Homo sapiens
ttcccaaacgtataccaggccttttatactataaggtactacaagggataaaaaatacacagaaatgttgatctgagtttggcatgatttataactcaggkatgaccatggttagaaagtgatacaatacatgacacatgtttgaacctgaaacaatctgagggggacagagcagtggatgcatgctaaattgggcatgca

SEQ ID NO: 163811 - DNA, 201 bp, Homo sapiens
acaagtgccccatggcaaccaggtcacagaccctatggtcccagatgctcatttccaacagagtcccctcttgtgccaatggaaagcacggagtagtacattttcagtgtcatcttctacaaaaggttttgctgtaactgaatatgaatattgtttccaaacttcttagtagacaatataaaggggaaattaaggtggaaa

SEQ ID NO: 163812 - DNA, 201 bp, Homo sapiens
tgcagtttatcttcatcttatatttccctgccctctacacagacatgtgggctctggacagtagagttggcagttaacattgtaaaactgtgtttactgtsaaatgcatgttttgcttcccaactagatggtaaaactcttgcatgcagggactgagattaatacatcttggccccagtttctagttttatgtcccagaca

SEQ ID NO: 163813 - DNA, 201 bp, Homo sapiens
tttgaaccttgtctaggataatcatcttacaggtaattagttctttttaaactgggctggactaagacagtcattggtgattttccaggacagactgtctyctaataggtgtgaattatatgggagacccagaaaagtcatttcttggtagcaatattgtaagtttctttttttataacaaatgaattttggacagtatct

SEQ ID NO: 163814 - DNA, 201 bp, Homo sapiens
ctactagagaaaggggagaaagatttattgatccaatattttcattgagagttaatatcttcaataattttatctgtcttatgtgattttatggtgagttragaaatatctatctgatgccaatgcatctagaaaattcaatctaaaaattacataatttttgacagacaggattgtcagtattatgtagaaaaatctaat

SEQ ID NO: 163815 - DNA, 201 bp, Homo sapiens
ggtgtggaggagatggatagtggaaagcaattccaagtgcccatgacaaaaccaggtaagttgtgtcagaggtctgctccatcttgaagaagaacattggygtcaactcttttctggtctcagaggtgtcttaaagagctcatcttaatgtcaatgtgtttcagccatcatctagtcactctggtatgagatcatcattca

SEQ ID NO: 163816 - DNA, 201 bp, Homo sapiens
aaggaggatagaaaaggaagagtgccaaaaaattttacaaagtaaggatgaatgagttaagggaatgaagcagaaaaagaaaatctacgtggctgcaagaktgatggcaccattgatggaaataagatagtatagagacagtattagtcagaatttatattatcatattcacgacttggaaattttgcatttcatgcatat

SEQ ID NO: 163817 - DNA, 201 bp, Homo sapiens
tgaacctgaaacaatctgagggggacagagcagtggatgcatgctaaattgggcatgcagtgtggacaaagccacagggctttgggaaaatggagggatcratgttatattgtaattggaaaagaatcggtgcctgaggtgagcccagagcatgggtgggcttagactgactggaaggagaaaggagaatgaaatcatcgt

SEQ ID NO: 163818 - DNA, 201 bp, Homo sapiens
tctccaagtcacgtcttcctttatatttatactttatttttgattcccagtgatattcttcaacttgagtggtggcacaaaggctctgtttggggattctstctcctcatttcagtaatagccttcaataactcctaataataataaaaacaaggcccattaagtaaattgtgaacataagaatttctagaacaattgtta

SEQ ID NO: 163819 - DNA, 201 bp, Homo sapiens
gatacgatcatgagcaaaaagaagcctggtatttgctttaatgcagcttacagtctaacatgagaaagagacattagtgaagcaatcatacatacacacayatgcacacatgatatatatatgtgtgtgtatatgtatacacatatacatactatatatgtgtgtaaatatatatatggtgtgtgtgtatatatacactta

SEQ ID NO: 163820 - DNA, 201 bp, Homo sapiens
tagtccaaggttacaagtgccccatggcaaccaggtcacagaccctatggtcccagatgctcatttccaacagagtcccctcttgtgccaatggaaagcayggagtagtacattttcagtgtcatcttctacaaaaggttttgctgtaactgaatatgaatattgtttccaaacttcttagtagacaatataaaggggaaa

SEQ ID NO: 163821 - DNA, 201 bp, Homo sapiens
tacacatatacatactatatatgtgtgtaaatatatatatggtgtgtgtgtatatatacacttacatatacacacatataattaaaaacttaggcacatgytataaatgaataagatagtttactgaaaggctactatataccaggcactgtgataagtgctttatagatatcatatcctacaagtctcaacaactcttaa

SEQ ID NO: 163822 - DNA, 201 bp, Homo sapiens
tgtggctcatgcctgtaatcccagcactttgggaggtcaaggtgggaggatcacttgcatccaggagttcaagaccagcctgggcaacttagtgagacccsatctctacagaaaatacaaaattagccaggtatggtggtgtgcacctgtagtcccagctgctactcaggaggctgaggtaggaggtaggaggatctcttc

SEQ ID NO: 163823 - DNA, 201 bp, Homo sapiens
ggaggtaggaggatctcttcagcccgggaggttgaggctgaagtaagcataatggctccactgcactccagcctgggcaacagggtaagaccctctctctstttaaataaataaataaataaataaataaataaataaataaatatataaatacaggatatatcattgttaaaacaaagttcaaggcaaataatgcatctt

SEQ ID NO: 163824 - DNA, 201 bp, Homo sapiens
gtacaggcagggtgggtccttactggggcagctggaggggcacagactgctctgccggaaggtaggtgatgatatgagagcataagaactggtatgtaatrtcatctgcagcttccagcttgtgtagctcaatctggccatcacctgtggtggccagtgaattggcactcagctcagctgccttggagactcccttggcag

SEQ ID NO: 163825 - DNA, 201 bp, Homo sapiens
aaatgttgatctgagtttggcatgatttataactcagggatgaccatggttagaaagtgatacaatacatgacacatgtttgaacctgaaacaatctgagsgggacagagcagtggatgcatgctaaattgggcatgcagtgtggacaaagccacagggctttgggaaaatggagggatcgatgttatattgtaattggaa

SEQ ID NO: 163826 - DNA, 201 bp, Homo sapiens
agaggtctaacacctaaacgtctgccctaagatgatgaaaccaagacagaaaaaatatgttaatggaatagacacagaagaaataatgtctgatatttggrtactaacttcccatagtcactaataggtgcaaagatccagctgctcagggctgctttggtaacacattcttgttcctgtccaccttccacagtgagtcat

SEQ ID NO: 163827 - DNA, 201 bp, Homo sapiens
gttaatggaatagacacagaagaaataatgtctgatatttgggtactaacttcccatagtcactaataggtgcaaagatccagctgctcagggctgctttkgtaacacattcttgttcctgtccaccttccacagtgagtcatagcattagtcaactgcagtatcccaattacattcaactgaaaaattaatcagttaata

SEQ ID NO: 163828 - DNA, 201 bp, Homo sapiens
aagagcaataataatgcacacaggcctgtgttttgcctttaggcccaatgattcatgctgaggtgggcaacaccgtcctgatcatatttaagaacaaagcyagtaggccctactccatctcagcccagggtgtggaggagatggatagtggaaagcaattccaagtgcccatgacaaaaccaggtaagttgtgtcagaggt

SEQ ID NO: 163829 - DNA, 201 bp, Homo sapiens
tattaagttcctagttctgttcaaaacactctgtatacattgcctcatttagttcttatatccctgtaggatagatatcaacatttcagttttactgatasagaacagagacattgagaatttaagtaacttgcctcaagtcccatagcaaataaattttaattcagttatgtttgattccaaagctctggccctctctac

SEQ ID NO: 163830 - DNA, 201 bp, Homo sapiens
agctattcaggtcttttgcccattttttaatctggtaattagattttttcctatagtgttccttatatattctggttattaatcccagataggtagtttgyaaatattttctcccattctatggattgtctcttcactttgttgattgtttcctttgctgtgtagaagtgttttaacttaatgtgatcccatttgtccact

SEQ ID NO: 163831 - DNA, 201 bp, Homo sapiens
ttgggtgtgggtccatctgagccaggcaccggctataatctcctggtgtgccgtttgctaagaccattggaaaagcgcagtattagggtaggagtgacccrattttccaggtgccatctgtcacagcttcccttggtcggaaagggaattccctgaccccttgtgcttcccaggtaaggcgatgcctctccctgcttcggc

SEQ ID NO: 163832 - DNA, 201 bp, Homo sapiens
ttccctgaccccttgtgcttcccaggtaaggcgatgcctctccctgcttcggctcacgctcggtgggctgcacccactgtcctgcccccactgtctgacargccgcagtgagatgaacccggtacctcagttggaaatgcagaaatcacctgtcttctgcgtcgctcacactgggagctgtagactggagctgttcctatt

SEQ ID NO: 163833 - DNA, 201 bp, Homo sapiens
tgagagaaaattgaaaataataaccgtccaacaaattttagatttatatatacctttctcagaaaagcaattaaaaccatggcttgaatcagcaaggaatygatatgtgtggccagaccaccaactgtcagtgtatctccctgtgaatgtagaatgcaccagatacccaagagagagccatagggatcaggcacttctgaa

SEQ ID NO: 163834 - DNA, 201 bp, Homo sapiens
ctttttttctccttggtgaagaacgttccttctcaagctcaaacaatatttcttgtccttattgtgactcttatgatctcacatgttggatctgaccacamtctctgctaacattattttgcagtttatcttcatcttatatttccctgccctctacacagacatgtgggctctggacagtagagttggcagttaacattg

SEQ ID NO: 163835 - DNA, 201 bp, Homo sapiens
ctcccacctgtggcttcagtctcatagtctggaggctacactttgtttccctggtcactttccagatgtattctttgcatatgggtaaatgtgcattgttmcacacacacacacacacacacacacacacacacacaaatgggataatactttacatacggctctgcaatttgctttttttttattagtatcttggtgatc

SEQ ID NO: 163836 - DNA, 201 bp, Homo sapiens
aattagaaaatgtcaaggtggctgtaaaccccatttgttagcaggtcccaacagtctttgggaggcatacccagcaaactgaagcctataaggttgttatrgtaggtagctagtcaggcatgagcagggcaggagaggggtccgcctgaccaggaatgtcaggtaaccaccaggtgatggtcaggcggttgttaactgtct

SEQ ID NO: 163837 - DNA, 201 bp, Homo sapiens
caagcaagtgcattgaggggcaaaacggcggagtttaactggtatatgaccttccagggacattccactggtaagggaagaatgcctcacgtgagcatgcrtacagctccagtaaacacaccgcacctgctcatctcccaagtgctaggaggccactgcacatatggacaacccatgccaagggaagaatcaggggagaag

SEQ ID NO: 163838 - DNA, 201 bp, Homo sapiens
accaggccttttatactataaggtactacaagggataaaaaatacacagaaatgttgatctgagtttggcatgatttataactcagggatgaccatggttrgaaagtgatacaatacatgacacatgtttgaacctgaaacaatctgagggggacagagcagtggatgcatgctaaattgggcatgcagtgtggacaaagc

SEQ ID NO: 163839 - DNA, 201 bp, Homo sapiens
tcgtgggcatatgtgacaacttttgaagtagtctttatttttctttctccattttttcccctgtcctttaagaattatctccaattcctcacttcatacaygaagctttcccccatgaccctggcttgtactgatctgtttccttcctaaccactcatggagcttggggtctttatcatgaacttggacactgcattttct

SEQ ID NO: 163840 - DNA, 201 bp, Homo sapiens
catttgagaagaagcggagataggaccctgtggtattttggaaatggaaagagaggaaaaggaagaaaaatgcttcctttgtttctggcttgtggctgaayattggtagtgccttttactgggagtagtggcagtggctgaggaccaagcttggtagaggagagctaatgatccctggaaaaggttgcatttgcaatcttc

SEQ ID NO: 163841 - DNA, 201 bp, Homo sapiens
ggccagggaacacattatagaggaagtgagacttaagcaaaatcttaaggagtgatagaatttatttaactgaatagggaagagaggagttttagatggasgggttgatgcaaagcacctgtggcatgggaggaatgaacagatgagactgcagtaacaatttgcatagaagaatgggcactggcatggagaaatagagaa

SEQ ID NO: 163842 - DNA, 201 bp, Homo sapiens
atatgaagcataccataagtgctccagtccctacagggactcagcaaacacttcactgcccctcctgatacttattttgcctcttatttagtgcctttgcmagacaactcatggtaagacctggtcttgtggaggtgatggagaaaggtcttgggcagaggtggggtcaggacctcttagcagattaaaagcaggagtaca

SEQ ID NO: 163843 - DNA, 201 bp, Homo sapiens
cagcattgtactgatacaaagtcagacacatagagcaattgagcaaaatagagaactcagaaataagacagcacatctacaaccatctgatctttgacaarcctgacaaaaacaaacagtggggaaaggattccctatttaataagtgatgctgggagaactggctagccatatgcagaaaattgaaactggacccccttc

SEQ ID NO: 163844 - DNA, 201 bp, Homo sapiens
acagacaacctggagagttggaggacatctttgcaatctatccatctgatgaaggtctaatatccagaatctacaaggaacttaaacaaatttacaagaaraaaaactcattaaaaagtgggcaaaagacgtgaacagacacttctcaaaagaagacatctatgcagccaataaacctatgaaaagaagctcaacttaact

SEQ ID NO: 163845 - DNA, 201 bp, Homo sapiens
tgcagaaaagatgacatttaagtaaagaaagataataaaacttcacaaagaaagtcccagactagacaggcaagcagatgccaccctgggccactgggagyaggagggccagctgaatccgataccaaggaataacatcccccaaatcaggcatgaagttaaacagagccctggtgagcatacagttgtaatgactcagta

SEQ ID NO: 163846 - DNA, 201 bp, Homo sapiens
taatccaggatgatctccccatctcaagatccttaacttaatcacatctgcaaagacccatttttccaataagtttctgtggatgaggactgcggagttayctttgggacttaggatctgcacatactcagacacagtgcctgccacttgagagcacttgatcagctctcgtggtagctctgccgtctcacggggttcttt

SEQ ID NO: 163847 - DNA, 201 bp, Homo sapiens
gaagcacagagaatgagagtgggacaggtgtgctctcccactctgggcacactcctcactcctcaaagagtggagtgtgtgtgccgagttgccaaaacttwaaaatgtcttctacatcaactttttctattttttttttcttgagtaactcttcattgttcgagagtatactgaagcattacttccttaaggaaacttccc

SEQ ID NO: 163848 - DNA, 201 bp, Homo sapiens
tatgctgcacgtagcaagtaaagatgtaccaagatagttgtgcctgccttttcaaatatggagaaaataggggcatttttaagtgtaatttttgtcttcawtcctccatctgtttctggaaagcataccttaatagagttaatggtgtcctgaaaaatcatttaggccagtgattctaaagctttatagggctacaaattc

SEQ ID NO: 163849 - DNA, 201 bp, Homo sapiens
agtccctgctcccctcccctacctcagttctctcctgttttccatgattcacaggcatcctcttagtccccatcttgcttttcccacctccatatgatggrcccccaaggcctggttagcaggatctgaaagataactcattgacagtataataagttagctaagtgtcactgagtatttactatgctccaggcattgctt

SEQ ID NO: 163850 - DNA, 201 bp, Homo sapiens
ccccactggtaacttctattctattttctatgtctatgaatgtgccttttgtgtctggcttatttcacttagcataatattttcaatgcttatgtatattktagtatgcatcataatgtaattccttttaaggctgaatactattcaattgcatgtatataccacactttgtttatccgttcatctgttgatgaatgcttt

SEQ ID NO: 163851 - DNA, 201 bp, Homo sapiens
tgcaccctagtttattacatttaccaactaaattctggtaaaatgtagaagctttgctccataaagctccattctctccccctcctttgtgctattattgatatctatctatctatctatctatctatctatctatctatctatctatctatctataatgcccttctctaaataaacccagcaatacgttgttatatactt

SEQ ID NO: 163852 - DNA, 201 bp, Homo sapiens
gcaccctagtttattacatttaccaactaaattctggtaaaatgtagaagctttgctccataaagctccattctctccccctcctttgtgctattattgatatctatctatctatctatctatctatctatctatctatctatctatctatctataatgcccttctctaaataaacccagcaatacgttgttatatacttg

SEQ ID NO: 163853 - DNA, 201 bp, Homo sapiens
accctagtttattacatttaccaactaaattctggtaaaatgtagaagctttgctccataaagctccattctctccccctcctttgtgctattattgatatctatctatctatctatctatctatctatctatctatctatctatctatctataatgcccttctctaaataaacccagcaatacgttgttatatacttggt

SEQ ID NO: 163854 - DNA, 201 bp, Homo sapiens
cgtggttttcctctgttctgcagctggtatgctggggcaatacaatgttgataactgcaaaagtgatattttctaccccaagatgaagggtcaacagaggygctactttatagcagctgaaaaaattctttgggattatgctcctcaaggctataacaaattcagtggtcttcctctaaacgcctctggcaggtaagcacg

SEQ ID NO: 163855 - DNA, 201 bp, Homo sapiens
acaatgtacaagggttccattttctccacatcctcactagcattttttattgcctgtctgttgaataaaagtcattttaactgggttgggagaatatcacrttgtagttttgatttatatttctctgatgaccaataatgttaagcaccttttcatacacctgtttaccatttgtatgtcttcttttgagaaatagctatt

SEQ ID NO: 163856 - DNA, 201 bp, Homo sapiens
tctgttggatatttgaatgcttgcttcttttctgacaggcagaaccagttgcattctgcatccatgttccatttcctaaagatgagtttagttgataaaaytcaggaacagcacagggcctaccagcaagtctttaagagccagggccccttgtctttgaggaaagaccaaagatccagttggcttggaaatacagcttcc

SEQ ID NO: 163857 - DNA, 201 bp, Homo sapiens
cttcggcaaactaaagcaggaacaggaaaccaaacaatgcatgttctcacttataagtgggagctgaacaatgagaacacatggacacagggaggggaacracacacactgcggcttgtggtggtaggggtggagggaggaagagcatcaagataaatagctaatgcatgctgtgcttaatacctaggtgacaggttgata

SEQ ID NO: 163858 - DNA, 201 bp, Homo sapiens
agatttacttgttttcatctttatctgtaaaagtgatttacgtattaatcttttgtcatatgtgtcacaaatatccctcctgttgccatttatcctttttwaaaaaactttctttatggtccaattttctgtacagaagcctaaatgttcaagagccaaatctatcagtcttttcctatatgattccttttgtgatcattt

SEQ ID NO: 163859 - DNA, 201 bp, Homo sapiens
tcctgaatacacaccagttgacaatagaaaaatgcaaactagagggaaggctggagcctgaaatgacaaatctgccatttcattttgaaatagtagaaatyaagatgggagtttaataagaacatttgtaatgaatgagtaattctctccagcaataaacattaatgaaaatatataaagacctgcttatatttcttcaga

SEQ ID NO: 163860 - DNA, 201 bp, Homo sapiens
tgttgaatttctgagagcagctgggtctcagatctaaacaactcaagtgtgttttctcccagtagtaagatatgatgtcatccaggtgtagagaggacccraagactctggagcactgtgtggcctggccatttgtgtagggtaagaagagcaactatgtgcttggagtgcccccaccctcatatccacagcggacatcta

SEQ ID NO: 163861 - DNA, 201 bp, Homo sapiens
ttgtcaataaaatggactccctttagagacagccagtcttccaagtatgtgattatgaagatttctgttttatgacttttctcttctatggctctgtcatytccattaaagccttttgctgattttatatggtgggttatccttgtaggtataggtcttcaccaaacttcacacttgcctgacactattggaaggaagcaa

SEQ ID NO: 163862 - DNA, 201 bp, Homo sapiens
gacacggaatgatgtggatcgagagtttgttataatgtttactcttgtggatgagaatcaaagctggtacctcaatgaaaatatcaaacatttctgcaccraccctgattcagttgacaagaaagatgctgttttccagaggagtaacaaaatgcatggtgagtacctcccatgttcccaaacgtataccaggccttttat

SEQ ID NO: 163863 - DNA, 201 bp, Homo sapiens
caggcacaatggctcatgcctataatcccagcactttgagaagcaggtgtgggaggattgcttgaggccagaagttcaaaaccagcctgggcaacataggkagatccgttatctacaaaaaattcaaacaaacaacaaaaaaaatcagctgggcatagtggcacatgcctgtggtcccacctacttgtgatgctgaggtca

SEQ ID NO: 163864 - DNA, 201 bp, Homo sapiens
gcaagaccctgtctcaaaaaacaaaaacaaaaaaccctagcctgtatgctgaagtagatgtgtgtttgcaaacaatccttcaagactggaaaagggtgggrtattgtggcacacgcctgtaatcccagcactttgggaggccaaggtgggaggatcacttgaggccaggagttcaagaccagcctggccaacatggcaaaa

SEQ ID NO: 163865 - DNA, 201 bp, Homo sapiens
gatgctgtgactgggacataagtggagttcagtgtgtgtactctgtgttgtgccatttccccaggagcaggaaggagccatcgtggatgatgtaatcatgyccctctctcagcctcctggagggtgaataggctgcctttctgaggacagtctgttgttttggatattcacacttgggcaaatgtctgatatttaaaggac

SEQ ID NO: 163866 - DNA, 201 bp, Homo sapiens
aaatccattgacctatagcttccttcatgtcctatgataggtgcatgataaacatttgttggcttaaatgcctgttgaatgacctggtcctggtttcttcrgacatcatacactatgtcctttcttagctggaccataatgttccttacagagaagtgatgacagaagagcctgggaggctcatcaggccccttagcaaag

SEQ ID NO: 163867 - DNA, 201 bp, Homo sapiens
tgcaaaagtgatattttctaccccaagatgaagggtcaacagaggcgctactttatagcagctgaaaaaattctttgggattatgctcctcaaggctatarcaaattcagtggtcttcctctaaacgcctctggcaggtaagcacgctttgttggtgtttctaagcctctcgtcagagaagcatgtgttaggctttctccg

SEQ ID NO: 163868 - DNA, 201 bp, Homo sapiens
cgctactttatagcagctgaaaaaattctttgggattatgctcctcaaggctataacaaattcagtggtcttcctctaaacgcctctggcaggtaagcacsctttgttggtgtttctaagcctctcgtcagagaagcatgtgttaggctttctccgtgatctaatttgtattccaaccactgctctgatgagcttatactg

SEQ ID NO: 163869 - DNA, 201 bp, Homo sapiens
caaactatagtgcaaagtgccattagaaatactaagctgacaaagaatagagtaaggcctttacacatatggagcagacagtcttgaagagggaatgacargagatggagatgacctggcctaagagggttaccctttttggttcaaggatatcctgatttaagttgtgtcccctttatgtcctacaaatattcttttcct

SEQ ID NO: 163870 - DNA, 201 bp, Homo sapiens
atcttggaattcttggtacagtaaaaccatcccccatgcattgaacccagggagatgttttagctgggcatgtacatctgcacagaatgactcttctgctytacttctttctgtctcttttcattctcttctctctcttcttctggatattttttcaggcccagtcatcaaggcagaggtgggtgataccctgttagtgac

SEQ ID NO: 163871 - DNA, 201 bp, Homo sapiens
acttaggatctgcacatactcagacacagtgcctgccacttgagagcacttgatcagctctcgtggtagctctgccgtctcacggggttctttggagagcrggagccctgggggaaagaccttggctggtcacattttcctcttttctaacaaagctttacgctttaccagaaataatcataactgtcattgattcagcac

SEQ ID NO: 163872 - DNA, 201 bp, Homo sapiens
atggccatggtaggagcccatctggtttttgaaccatttgtgggtacaggctatccctgagacatttattatcctggtcagcacaggccctctgccccacyttgggacctagaagtctttctttggggcttcctaaaacatgctgggaaggtctcagcatcccagaaagccaacaaatgggaccatcggtacaatgtccag

SEQ ID NO: 163873 - DNA, 201 bp, Homo sapiens
ccctagtttattacatttaccaactaaattctggtaaaatgtagaagctttgctccataaagctccattctctccccctcctttgtgctattattgatatctatctatctatctatctatctatctatctatctatctatctatctatctataatgcccttctctaaataaacccagcaatacgttgttatatacttggtg

SEQ ID NO: 163874 - DNA, 201 bp, Homo sapiens
tggctcagagggtcctacgcccacggagtctcgctgattgctagcacagcagtctgagatcaaactgcaaggcggcagcgaggctgggggaggggcgcccrccattgcccaggcttgcttaggtaaacaaagcagccagaaagcttgaactgggtggagcccaccacagctcaaggaggcctgcctgcctctgtaggctcc

SEQ ID NO: 163875 - DNA, 201 bp, Homo sapiens
ggaatctgccaaagatttagctctgtgctcagcatccacataatataaggcagagcctaccgtgcctcctgtaacagctaaggccaggccaaacttgccartggactctaacactttggcagccatgtttccttctgctggaccctttcgcagccagcttccattctctgttctttaaattaagtcagtttttccttcctg

SEQ ID NO: 163876 - DNA, 201 bp, Homo sapiens
gttatatacttggtgctttatattactttatgacttttaaaaaataaaataaaggaaaatatatttatagaaccttttatattaagtcatatatttcccayttctggtgcttttcatttcttcctgtgaattcaagttactctttggtgtcatttccatttattatgaagtttgattgtcctttagtattccttgtaaggc

SEQ ID NO: 163877 - DNA, 201 bp, Homo sapiens
tgctaatgcctgagccagacctcttatatacattccttcatttaatgatagaatgaactagtgctttcttgacctacatctgaaatatgcttaagtattaggactatttaaaaataaattttattgttttttaaattttatttttattttatttgttttatttctatagagatggggtctcgctatgttgcctagactaga

SEQ ID NO: 163878 - DNA, 201 bp, Homo sapiens
gaatctctgcttgttgtggttaggatttggcaggcctctttttctgtgtgctgcttttattacagaatctttagagatccacatggaatgctaattggaaktattcttcttggacaaggtttctcaaatcaaaattacttggggaccatttaaacatccattattcagatactacagactaattaaatcagaatctccaga

SEQ ID NO: 163879 - DNA, 201 bp, Homo sapiens
aagtaagggagagaaggaaaggggaaggcagggaggcagagaaaacaatgaaggatggagtcaatgaagacataaattcaaatcattgctgtgaccagttrtaatgcatatcctttacaaaatgggagtgatgatctcaaatattgcagaaaactactaattgtgattacttaagactcacctgcccaaataattcctctt

SEQ ID NO: 163880 - DNA, 201 bp, Homo sapiens
ttctgtagctcaagcttttataccactgccttctaaagcatcatgtaattaaggaaataactatatataaggaatagtaggcgcaaggagtactcacctcrttgatgaggagttaggaaagcatcacagaagtgggcagctaagcagaaccatgaggttgcttagtggtttgcaagagaaaagagtggcagactatcaaag

SEQ ID NO: 163881 - DNA, 201 bp, Homo sapiens
tcaagtcttcattgttttcttctgtagctcaagcttttataccactgccttctaaagcatcatgtaattaaggaaataactatatataaggaatagtaggmgcaaggagtactcacctcgttgatgaggagttaggaaagcatcacagaagtgggcagctaagcagaaccatgaggttgcttagtggtttgcaagagaaaa

SEQ ID NO: 163882 - DNA, 201 bp, Homo sapiens
gctccccttcatgctttttctttcccttatttcctacctctcctctttcttgctcttctttatgttgacacagaactcctcagtacctgctccaccacgcmccaggagcacactagctttcttccttgtcacttagttgtgcctgatttgcacactagataaagggcaacatgctcctatctccggtagcagccttggctg

SEQ ID NO: 163883 - DNA, 201 bp, Homo sapiens
ttcatgctttttctttcccttatttcctacctctcctctttcttgctcttctttatgttgacacagaactcctcagtacctgctccaccacgccccaggarcacactagctttcttccttgtcacttagttgtgcctgatttgcacactagataaagggcaacatgctcctatctccggtagcagccttggctgtgggtac

SEQ ID NO: 163884 - DNA, 201 bp, Homo sapiens
catctctacagaaaatacaaaattagccaggtatggtggtgtgcacctgtagtcccagctgctactcaggaggctgaggtaggaggtaggaggatctcttsagcccgggaggttgaggctgaagtaagcataatggctccactgcactccagcctgggcaacagggtaagaccctctctctgtttaaataaataaataaat

SEQ ID NO: 163885 - DNA, 201 bp, Homo sapiens
acacagtcccaagacttcagcctcaatgcctgagaggagagttggcaagccagaggttgagcagggatagtgagcagatgccatgctctctgctccagagrccaatccccttgcagagcagaactcaatccaacaacaccctttgttgtggcagctttgtttttagaaatagaaggcatgcaagagaattttggccccttg

SEQ ID NO: 163886 - DNA, 201 bp, Homo sapiens
ggtaggaggatctcttcagcccgggaggttgaggctgaagtaagcataatggctccactgcactccagcctgggcaacagggtaagaccctctctctgtttaaataaataaataaataaataaataaataaataaataaatatataaatacaggatatatcattgttaaaacaaagttcaaggcaaataatgcatcttaat

SEQ ID NO: 163887 - DNA, 201 bp, Homo sapiens
agtgaattttatccaccctgaaatgcttccagctccccagtgatgttccagtggcctttagatctgagacccagctgctctaccccttaatctggctcagytgaaaaccgtgggggattctccagcctccgaggccaaggcctgcttcatttaaaagaggctttgttgctggtgggtttgacctggcttatgattttatta

SEQ ID NO: 163888 - DNA, 201 bp, Homo sapiens
ctttttttcccccagtttgacaatctctacattttgattgtggtgttagaccattcacagttaatgtaattatttattagtttgatttatatttgtcattktgctaattattttctatatgtcttctgtattttttgttcctctggtcctcttttactgccttcttttgtgttaaacaaatatttcttagaataatgtttt

SEQ ID NO: 163889 - DNA, 201 bp, Homo sapiens
ttttcttcttcatgctaccttgtctaagatcctctttgttcttagaggagacaattcctcaactattgaagtgccatgatcaatacataaaaaataggctkcctggaaaaaacaaatgtaggggacagtctttccaagtctgtcttcaaaggtatcttctctgtggtttcatataaagacccttcctcatgtgtcctcatc

SEQ ID NO: 163890 - DNA, 201 bp, Homo sapiens
acccagcctggttgcttccaacagaaatgcacacaccagaggggctgaagagtgcttgtctccttgggtaaacaaatattgagaaacagagttagatgtgyatttgtgaagtcactatattaatcataaattaatacataaatgattttatttccctctactctttcagattccttttacacacattatttcattggatct

SEQ ID NO: 163891 - DNA, 201 bp, Homo sapiens
tttgaataattgttttgtttatatcctcaggatttgtgaaaccaggggcgcatgttaaaccaggtgaaaccttcacatacaagtggacagtgcctgagagygtaagcccaactgctggtgatcctccctgtctgacctatctttacttctcagcagttgatccaattaaggacaccagctctggcctggtagggcctttgc

SEQ ID NO: 163892 - DNA, 201 bp, Homo sapiens
ctgaaagtcaccatatcatgtggatatggcttttcctggagatgatttctcagtagtaaaaaagcatttaccaagtacttatggtgtatcagtgcactgamgtaaacacttttagatacattatcttattcaacccttactataatcccacataaaagttattactaaactgatgttacagatgaggaaactgaaactcag

SEQ ID NO: 163893 - DNA, 201 bp, Homo sapiens
tgttctcgctctctttgtagaaggatttctcagttatctgaattttgggtctagaatggtaggacactgctaggggtgagtgagattgttgcatgtttacyagacagatgaaaatatcagtgacctaaagatcttctggaaacatttaaaaaatcagcttatcttttaactaaccaaaggttattttcttatcacctttta

SEQ ID NO: 163894 - DNA, 201 bp, Homo sapiens
aagttattactaaactgatgttacagatgaggaaactgaaactcagacagattacatcacttacccaaggcccctctaataaatgaaggaagcagaatttwaacccattgctaaagactacatgatatttaatactacacaatgttgctctctaaagtggagtagagttatatatgcctttctcggaaaaacaactaaagc

SEQ ID NO: 163895 - DNA, 201 bp, Homo sapiens
cttacccaaggcccctctaataaatgaaggaagcagaatttaaacccattgctaaagactacatgatatttaatactacacaatgttgctctctaaagtgragtagagttatatatgcctttctcggaaaaacaactaaagccaaactattttatttgactaactactgcctatatttaaattacactaatgttgaaagag

SEQ ID NO: 163896 - DNA, 201 bp, Homo sapiens
ggacgtttacattgtcaatggttgacttgagtagctgcaacagagactatatggcccacaaagtcaaaaatatttactatctggtgattttttttttcccaaaaaaaaaaaaaaaaaaaaaaagtttggtgacccttgacttaaagtatggggaataaaaacaaaatcccaatgtttcaattaccaaatttagaacttaaa

SEQ ID NO: 163897 - DNA, 201 bp, Homo sapiens
gtactaacatatactgttcacaaaatagctgtgtgctgcagacaccagccactactcagatgttccatatatatatatatggagaaagagacacacagagmgatatttattatgaggaattggctcatatgattatggagactgatagatctcagcacctgcaggctgagtcaacaggcagaagacccaggagagccaatg

SEQ ID NO: 163898 - DNA, 201 bp, Homo sapiens
gagggaattagggcttagagaggataaatcacttgctccaggcttcacagtgggtgaacagaagaatagcattagaacctaggtttttctgttcacatagmccatgatcttttaaaatatattttgatcctttatgttcttccaatttttaatattttattctgaaaaatttcaagtcttcattgttttcttctgtagctc

SEQ ID NO: 163899 - DNA, 201 bp, Homo sapiens
ggtccttcttgagatccttcaaagtggaaaagcattaccatgtacagaaagatgcatatgaaatctggagaaactcagggtggtagagggtggacgtgtatgtgtgtgtgtgtgtgtgtgtgtgtgtgtgatgacacacacatgaagatgcaagtgtgtaaggttagatggtcccagaagagaggcgcaacctcaaaggat

SEQ ID NO: 163900 - DNA, 201 bp, Homo sapiens
tcaacaaatgttaaattctatcaaatggtttttctgcatctattgagatgatcagatgctttttcttctttaatctgttgctgaattacatttattgattktggagtttttaaacactttttcattcccaggataaaccttacttggtcatgatgtattattcctttttgtggaattgatttgctagtattttgttatgga

SEQ ID NO: 163901 - DNA, 201 bp, Homo sapiens
gatgacgagttagtgggtgcagcgcaccagcatggcacatgtatacatatgtaactaacctgcacattgtgcacatgtaccctaaaacttaaagtataataaaaaaaaaaaaaaaaaaaaaaaaaaaaaaaactgcatgaattgctcattctggcccagagtgggtggattgaatactctgttagacattaattcctttgg

SEQ ID NO: 163902 - DNA, 201 bp, Homo sapiens
catgagacctacacaggtggtgaatctgaaataagtccccaagaagtgtttattcattatttcttcttaggcttctccttcccttcttgagtcgatgtcawctgaggggaattgaaatcttcctggttgatatggtagcctcatcagaaagagtccttattatgaacatttattaagttcctagttctgttcaaaacactc

SEQ ID NO: 163903 - DNA, 201 bp, Homo sapiens
gtgggtgcagcgcaccagcatggcacatgtatacatatgtaactaacctgcacattgtgcacatgtaccctaaaacttaaagtataataaaaaaaaaaaamaaaaaaaaaaaaaaaaaaactgcatgaattgctcattctggcccagagtgggtggattgaatactctgttagacattaattcctttgggaaaggctggga

SEQ ID NO: 163904 - DNA, 201 bp, Homo sapiens
aagtatgctaagtcatgtttttcaacgtttaaaagagggggaagtcacaggagatttgcctgctattttcagggtttccttgagtctacttagaattagckctttcactggtaaaaagtttattccagctccaagtcattcttgctgagggcaatatcttatcccagaacctatagcatagctaggtgagatggcgccacg

SEQ ID NO: 163905 - DNA, 201 bp, Homo sapiens
aattcagttcaaaatattttacaatttcccttgtgatttcttctttgacctgtgggttacttagaagtgtatcattttatttccaaatatttagatgattkcaaagatttctttctgtagatatttaatttaattccattgtgattgaaaaatatgctttgtatgatagtaatccttttcaatgtattgaaacttatttta

SEQ ID NO: 163906 - DNA, 201 bp, Homo sapiens
atagtatgtttcctcctacaagaagataagtgcaatggagcaaggaccttgcctatcttatcttcctttcccagaacaatgcatggcacattgttgacatkcaacaaatatttctggttggataaatgcaatacagggtaagtactcttatccccaaggttaagaagtttagttagcagaaaatgccatattacacacatc

SEQ ID NO: 163907 - DNA, 201 bp, Homo sapiens
tcctgttgccatttatcctttttaaaaaaactttctttatggtccaattttctgtacagaagcctaaatgttcaagagccaaatctatcagtcttttcctrtatgattccttttgtgatcatttatgcctcagctcgtggttttcctctgttctgcagctggtatgctggggcaatacaatgttgataactgcaaaagtga

SEQ ID NO: 163908 - DNA, 201 bp, Homo sapiens
gtaggaggatctcttcagcccgggaggttgaggctgaagtaagcataatggctccactgcactccagcctgggcaacagggtaagaccctctctctgtttaaataaataaataaataaataaataaataaataaataaatatataaatacaggatatatcattgttaaaacaaagttcaaggcaaataatgcatcttaatt

SEQ ID NO: 163909 - DNA, 201 bp, Homo sapiens
taggaggatctcttcagcccgggaggttgaggctgaagtaagcataatggctccactgcactccagcctgggcaacagggtaagaccctctctctgtttaaataaataaataaataaataaataaataaataaataaatatataaatacaggatatatcattgttaaaacaaagttcaaggcaaataatgcatcttaattc

SEQ ID NO: 163910 - DNA, 201 bp, Homo sapiens
aggaggatctcttcagcccgggaggttgaggctgaagtaagcataatggctccactgcactccagcctgggcaacagggtaagaccctctctctgtttaaataaataaataaataaataaataaataaataaataaatatataaatacaggatatatcattgttaaaacaaagttcaaggcaaataatgcatcttaattca

SEQ ID NO: 163911 - DNA, 201 bp, Homo sapiens
ggaggatctcttcagcccgggaggttgaggctgaagtaagcataatggctccactgcactccagcctgggcaacagggtaagaccctctctctgtttaaawaaataaataaataaataaataaataaataaataaatatataaatacaggatatatcattgttaaaacaaagttcaaggcaaataatgcatcttaattcaa

SEQ ID NO: 163912 - DNA, 201 bp, Homo sapiens
aagcctcctttccaatgacatacagtgcttaccccacagaagttccacaggttgcaattttctccaacttcaatgtcatttccagtgaattttatccaccytgaaatgcttccagctccccagtgatgttccagtggcctttagatctgagacccagctgctctaccccttaatctggctcagctgaaaaccgtgggggat

SEQ ID NO: 163913 - DNA, 201 bp, Homo sapiens
ttcaatgtcatttccagtgaattttatccaccctgaaatgcttccagctccccagtgatgttccagtggcctttagatctgagacccagctgctctacccyttaatctggctcagctgaaaaccgtgggggattctccagcctccgaggccaaggcctgcttcatttaaaagaggctttgttgctggtgggtttgacctgg

SEQ ID NO: 163914 - DNA, 201 bp, Homo sapiens
ccaaaccccatctcaaacagctaatcaaagcctcctttccaatgacatacagtgcttaccccacagaagttccacaggttgcaattttctccaacttcaaygtcatttccagtgaattttatccaccctgaaatgcttccagctccccagtgatgttccagtggcctttagatctgagacccagctgctctaccccttaat

SEQ ID NO: 163915 - DNA, 201 bp, Homo sapiens
ggtaagtctcactctgggcttagggaggaaacaggacgggtgagcaaagcacttagaaataaacagtcctggttcaaatcctggtcctttccattacctgycctgagagcttgggcaatcacttaaactttctgaacctgattctctcctgtcaaatgcagataacaatactcacctcacagggctttggaaagggatgga

SEQ ID NO: 163916 - DNA, 201 bp, Homo sapiens
taagaatcatcacagcattctgagactttattgttattttaaaaaatgatatttcataacacaatgtatagaaaagtgagaaatttagtcaaatgaccagkaatgccttctgcttcattatttcacccaaataatcatttgctattttatcccttattagttgacttagcatgtctgtagtttgtcaataaaatggactcc

SEQ ID NO: 163917 - DNA, 201 bp, Homo sapiens
gcaagaggatctcttgagggaattcaagattacagttataatcatgccactgtactacagcctgggtgacatagcaagaccttgtctcttaaaaaaataamagaaaaaaatgctcagaatgactgtgtgtgtgtgtgcagaaagaacactagaactgacaaaatgtttgttaactcagcaaacatactgggcacctttttg

SEQ ID NO: 163918 - DNA, 201 bp, Homo sapiens
gtcagatgtgtcaaggacacatcatccaagatgagctcaaaggtggctacttagtctgcaaggtcgttgctaacctgcctggagaccagctctctctgggkgatcagttctccatcatcaaagtaagccatcagtaacatgaggatcttttcacatcatccaggatgagctcaaaggtggctgcttgctccgtaaggtcgt

SEQ ID NO: 163919 - DNA, 201 bp, Homo sapiens
atgtaaattagttcaaccattgtggaagacagtatggtgattcctcaaagacctagaaccagaaataccatttgacccagcagttccattactgggcatayaccaaaaggaatataaatcattctatcacaaagatacatgcatgtatgtgttcattgcagcactactcacaacagcaaagacatggaatcaactgaaaag

SEQ ID NO: 163920 - DNA, 201 bp, Homo sapiens
cctgtggatccttcttcccagcttgactcagatgtcctttcctccatctgcctaagtgattcttctaccttctaaggtggttcccatcttctgctccatgygggatggattccaggctgctcaatatgttgatctctagctccatcatcctgaaaagtctgcagggtgggcaaagccaccatttattattaagactgctta

SEQ ID NO: 163921 - DNA, 201 bp, Homo sapiens
gtgattcttctaccttctaaggtggttcccatcttctgctccatgcgggatggattccaggctgctcaatatgttgatctctagctccatcatcctgaaawgtctgcagggtgggcaaagccaccatttattattaagactgcttaggagctttgaagtaggagctgctttgaagtaggagtgcctgagtcactgtatact

SEQ ID NO: 163922 - DNA, 201 bp, Homo sapiens
gactcctccttctaatcaccacggtgattctctccctcagactctgctctgcaatgaagcagacagattaccagcaagtccagtcctgtgctctccccacggatgctctgtgaaccatctggtctccctcaacaggaaagggtgatgtcccacagctggccagatggcagccaacagggaaactggaccaaggcatcactc

SEQ ID NO: 163923 - DNA, 201 bp, Homo sapiens
gtttgtctttctgtgcctggcttatttcacttaacataatgacctccggttccatccacattgttgcaaattctttcttgtggctgaatagtactccattktgtatatgtaccacatctttatccatttggctgcttattgacacagtttgcttccaaaccttggctactgtgaatagtgctgcaataaacatgggagtac

SEQ ID NO: 163924 - DNA, 201 bp, Homo sapiens
taaatctctccatatagaaaagaatcttccaagccatgcattttattcagagggctttggacaaaggcagtgtaaggtaataccactcagtcatattttattttatatatatatatatatatatatatacacgcactggggtagatcttgaagatacgatcatgagcaaaaagaagcctggtatttgctttaatgcagctt

SEQ ID NO: 163925 - DNA, 201 bp, Homo sapiens
taaacatgggggtcactggtgtgtggctgatgggtggcactgtggggatgagtgctatcagctgaggagaaagcacaaggcatggaaggaagaagccagcrttatactttgaggatttctgacaaaaaaatggcagatacaagagaatgaactggaaaagtggactgaaaaagagtggtcaaagagtatgatgtgatgtcc

SEQ ID NO: 163926 - DNA, 201 bp, Homo sapiens
aaatctctccatatagaaaagaatcttccaagccatgcattttattcagagggctttggacaaaggcagtgtaaggtaataccactcagtcatattttattttatatatatatatatatatatatatacacgcactggggtagatcttgaagatacgatcatgagcaaaaagaagcctggtatttgctttaatgcagctta

SEQ ID NO: 163927 - DNA, 201 bp, Homo sapiens
cctccgaggccaaggcctgcttcatttaaaagaggctttgttgctggtgggtttgacctggcttatgattttattacgtggtctggggcaggctggatacytcagctggctagacagcgggagtgataatcactttttagcttgacttttaaaccttgctgcgctctctttaaattattttctttttaattttgctatgct

SEQ ID NO: 163928 - DNA, 201 bp, Homo sapiens
aatctctccatatagaaaagaatcttccaagccatgcattttattcagagggctttggacaaaggcagtgtaaggtaataccactcagtcatattttattttatatatatatatatatatatatatacacgcactggggtagatcttgaagatacgatcatgagcaaaaagaagcctggtatttgctttaatgcagcttac

SEQ ID NO: 163929 - DNA, 201 bp, Homo sapiens
ctgggagttggggcaaagagggaggaaatgaggttggagagaaaagctgttgcttcaaagaggactttttctgctttgatttgaacctgtggatccttctycccagcttgactcagatgtcctttcctccatctgcctaagtgattcttctaccttctaaggtggttcccatcttctgctccatgcgggatggattccagg

SEQ ID NO: 163930 - DNA, 201 bp, Homo sapiens
tctctccatatagaaaagaatcttccaagccatgcattttattcagagggctttggacaaaggcagtgtaaggtaataccactcagtcatattttattttatatatatatatatatatatatatacacgcactggggtagatcttgaagatacgatcatgagcaaaaagaagcctggtatttgctttaatgcagcttacag

SEQ ID NO: 163931 - DNA, 201 bp, Homo sapiens
tctccatatagaaaagaatcttccaagccatgcattttattcagagggctttggacaaaggcagtgtaaggtaataccactcagtcatattttattttatatatatatatatatatatatatacacgcactggggtagatcttgaagatacgatcatgagcaaaaagaagcctggtatttgctttaatgcagcttacagtc

SEQ ID NO: 163932 - DNA, 201 bp, Homo sapiens
ctcctagatttagaatttctgggtcaaagagtatgatttttttaaaaaagctatggacatacattgccacattctcttttggaaattgttattcttctacmcgaagtgtatgagtatggctctttccccattcatctaccaacactgagaattattagtctttctaatctttactaatctgatcaatgaacaatagtatca

SEQ ID NO: 163933 - DNA, 201 bp, Homo sapiens
tccatatagaaaagaatcttccaagccatgcattttattcagagggctttggacaaaggcagtgtaaggtaataccactcagtcatattttattttatatatatatatatatatatatatacacgcactggggtagatcttgaagatacgatcatgagcaaaaagaagcctggtatttgctttaatgcagcttacagtcta

SEQ ID NO: 163934 - DNA, 201 bp, Homo sapiens
ttaaaaggctaccataactaaagaaataattgtataataactttgtcatgtgtacaatcttagcccatgaatgtataaaaatatagcctttatgatgttcwtacaactaatatgaactcctactttaagtctccatcccacggggctagcaggaaggtctagcttcagtcttctgagactccctcccaagtgacataagga

SEQ ID NO: 163935 - DNA, 201 bp, Homo sapiens
catcctccgtggctgcgagacaaacacgacatgctactgttcctatcttaacacaagtatttcttttcttatttattggcctttgttttgaggggctgtasttatggaaaagagattataatggttctaccttctggatacttttttttttaagatttcccttaagaacaggagaattttaaatccattcaattactcact

SEQ ID NO: 163936 - DNA, 201 bp, Homo sapiens
gtgtgtgtgtatatatacacttacatatacacacatataattaaaaacttaggcacatgctataaatgaataagatagtttactgaaaggctactatataycaggcactgtgataagtgctttatagatatcatatcctacaagtctcaacaactcttaagaggtaggcatttatgattatcaccacctaacagataagaa

SEQ ID NO: 163937 - DNA, 201 bp, Homo sapiens
tcaatcaatgtttaatgtgatatatgaaagcacaaagtgcaagatgacatgagggatgcaaggatatctaaagcaataaaatgcagaggaagaagctgggytcacaagagtagagaagtaactgcaagttacaaataaaagtgaggtgagttgtcctggtagtgagttatctggatgctcagagagagctaagctggccag

SEQ ID NO: 163938 - DNA, 201 bp, Homo sapiens
ttaaatctgggaagaaactgtagatttaaaatcaagatattagcagccatttgagactagtaagatcgctaaattagcccgatagttgtggacataagctrgtatttatacgttccctgaaatacagtatttctaaattgtccatgccttcagaaaaaagttattgtaaaaaaattagaaaatacatataattggaggttt

SEQ ID NO: 163939 - DNA, 201 bp, Homo sapiens
ctgggaaaacaaagattaacaagagaaggtttctattctcaaagagtcttatgctgttaaatctgggaagaaactgtagatttaaaatcaagatattagcwgccatttgagactagtaagatcgctaaattagcccgatagttgtggacataagctggtatttatacgttccctgaaatacagtatttctaaattgtccat

SEQ ID NO: 163940 - DNA, 201 bp, Homo sapiens
gtccttcttgagatccttcaaagtggaaaagcattaccatgtacagaaagatgcatatgaaatctggagaaactcagggtggtagagggtggacgtgtatgtgtgtgtgtgtgtgtgtgtgtgtgtgtgatgacacacacatgaagatgcaagtgtgtaaggttagatggtcccagaagagaggcgcaacctcaaaggata

SEQ ID NO: 163941 - DNA, 201 bp, Homo sapiens
tgtattgcccaggctagtcttaaactcctagcctcaagtgatcctcccaccttggcctcccaaaatgctgggattaggcatgagccaccacacccagcctyaacaaatttttatcaaatagttactatagtttttgttttgtgtgaagtatcttcctagggcaccttcatgggtcaaccctgtcctactcttgatgtggag

SEQ ID NO: 163942 - DNA, 201 bp, Homo sapiens
tccttcttgagatccttcaaagtggaaaagcattaccatgtacagaaagatgcatatgaaatctggagaaactcagggtggtagagggtggacgtgtatgtgtgtgtgtgtgtgtgtgtgtgtgtgtgatgacacacacatgaagatgcaagtgtgtaaggttagatggtcccagaagagaggcgcaacctcaaaggatac

SEQ ID NO: 163943 - DNA, 201 bp, Homo sapiens
ccttcttgagatccttcaaagtggaaaagcattaccatgtacagaaagatgcatatgaaatctggagaaactcagggtggtagagggtggacgtgtatgtgtgtgtgtgtgtgtgtgtgtgtgtgtgatgacacacacatgaagatgcaagtgtgtaaggttagatggtcccagaagagaggcgcaacctcaaaggatact

SEQ ID NO: 163944 - DNA, 201 bp, Homo sapiens
atagccttcaataactcctaataataataaaaacaaggcccattaagtaaattgtgaacataagaatttctagaacaattgttatttgtagtgatttgtaycatataatcaattcaaaataagtgatctcaatcgaaacttcgagacaagtccactgcttacccactctcactcaactcctgaacctctgtatataaatct

SEQ ID NO: 163945 - DNA, 201 bp, Homo sapiens
ccatgacatcagggcagtctaactggtgtatgataccctaaagcttctttccaacccctatactgagccaggaaattttcttttaaatcctccagcagatagatagatatatatatatatatatatatatatatatatatatatatataaaactttaagttctagggtacatgtgcaccacctgcaggattgttacatatg

SEQ ID NO: 163946 - DNA, 201 bp, Homo sapiens
agaacaattgttatttgtagtgatttgtaccatataatcaattcaaaataagtgatctcaatcgaaacttcgagacaagtccactgcttacccactctcaytcaactcctgaacctctgtatataaatctctccatatagaaaagaatcttccaagccatgcattttattcagagggctttggacaaaggcagtgtaaggt

SEQ ID NO: 163947 - DNA, 201 bp, Homo sapiens
catgacatcagggcagtctaactggtgtatgataccctaaagcttctttccaacccctatactgagccaggaaattttcttttaaatcctccagcagatagatagatatatatatatatatatatatatatatatatatatatatataaaactttaagttctagggtacatgtgcaccacctgcaggattgttacatatgt

SEQ ID NO: 163948 - DNA, 201 bp, Homo sapiens
cctccagcagatagatagatatatatatatatatatatatatatatatatatatatatataaaactttaagttctagggtacatgtgcaccacctgcaggwttgttacatatgtatacatgtgccatgttggtgtgctgcacccattaactcatcatttacattaggtatatctcctaatgctatccctcacccctgcccc

SEQ ID NO: 163949 - DNA, 201 bp, Homo sapiens
atggtacctttgaggtttgctagaagcacctcatagtctgtgggaattgttgcctaagccaaatactattcatggtcagtccacttacacaaaattcatgaaaaaaaaaaagtaccctgaaacatcctatacctataacttggctgagagagaaaaccatttggccagatggaaaggtatgttcaattcaagagttactta

SEQ ID NO: 163950 - DNA, 201 bp, Homo sapiens
gactttttaatgatcgccattgtaactggtatgagatggtatctcactgtggttttgatttgcatttctctgatggccagtgatgatgagcattttttcaygtgtctgttggctgcataaatgtcttcttttgagaagcatctgttcatatccttcacccacttgttgatagggttgtttttttcttgtaaatttgtttga

SEQ ID NO: 163951 - DNA, 201 bp, Homo sapiens
gtaccctgaaacatcctatacctataacttggctgagagagaaaaccatttggccagatggaaaggtatgttcaattcaagagttacttatgaaatacctrctatgtgccaggccctctataagcaaaatggtcagtcttcttctaggcaggtggagagatgaaaatgggaataagtgtttgcgtctctttccagtaaatt

SEQ ID NO: 163952 - DNA, 201 bp, Homo sapiens
tgaaaacagttggtttggcatcagatttgagtgagatggtttcaaaatgcatggtcccatatgatagtgcgtttgttcttagaagcagctggcatgctaargtgtcatacctagaacgccaaggtccccaaacatttctttctggtatgcgaagggacagagtttgtgtcagacagactgctacctcttggaagggaaatc

SEQ ID NO: 163953 - DNA, 201 bp, Homo sapiens
aaaaaaaaaaaaaaaaaaactgcatgaattgctcattctggcccagagtgggtggattgaatactctgttagacattaattcctttgggaaaggctgggayaggtttcctttggaaaggattgggaaagaaaagaaaaacagaaaaaattattagggccacagaaaagtagaacagagaagtgctccatgatacctgacac

SEQ ID NO: 163954 - DNA, 201 bp, Homo sapiens
ccaattggatggggtacactcatgtcgggaagtacaatcagttttattcagtctactgattcaattgttaatctcatccaaaaacatcctttcagaaacayccaggataatgtgtgagcaaaaatctgggcacactgtggcccagttaagttattcataaattcaccatcactcagggttctgtcaccttccttctaatgt

SEQ ID NO: 163955 - DNA, 201 bp, Homo sapiens
tgaaaactggatatttttaagaatataatgtagcatatctggattctcattccttcatcaactctaggttattttttttgcttgcttctttgtttagtaayctgtgggctaaatctgtggattatctttcctatagtgtgtggccactgagatgtctgctttttttattatttatttttatttttaagcctggcttctgag

SEQ ID NO: 163956 - DNA, 201 bp, Homo sapiens
gaaaaagcaaaggggaacatgttgagtggaaaggggcaaatttgtagtgtggctttagagttctttggatttgttttagtttgattgtgaatactgcttgkgccctttggcttgccacttcattgctgaatctcatttccacattagtaaattgaggataatcttccgagccctacagaggttgcagcttatagtgaacac

SEQ ID NO: 163957 - DNA, 201 bp, Homo sapiens
tatgttgagataagctcataggaattcctgtaaatgtaggaggctcccagcatccttctctgagcctttcctccttcccaggggcacctggactgaagaargtcctctaatgctttccttcagactgaaccagcctagccactgattggctggcagcaaagtcattgaggctttgtactaacttgtagggacatgtatttc

SEQ ID NO: 163958 - DNA, 201 bp, Homo sapiens
gaaagttggcagtaaaacacaggaccttgaacatccaactttgtccttttccaatgcatcctcttgcttcctcgcagctaaatacctaagccaaggagatktagtgccagaaaatgtttgaaaggtagtgctaattttgcccccgctgtgtccgtttaatggtacctttgaggtttgctagaagcacctcatagtctgtgg

SEQ ID NO: 163959 - DNA, 201 bp, Homo sapiens
tttaatatttctatttgcttattaagattctctatttgttgagttgtttttcccacttttcttcagccctttacacataattccttttagttgtttgaacrtatttattatagctgctttgaagtctttctctgctaaattcaacctataaggacatatagagagatagtttccactggctgcctttttttctctattaat

SEQ ID NO: 163960 - DNA, 201 bp, Homo sapiens
cttggaaaatattttaggaggaaaggaagtaagggagagaaggaaaggggaaggcagggaggcagagaaaacaatgaaggatggagtcaatgaagacatamattcaaatcattgctgtgaccagttgtaatgcatatcctttacaaaatgggagtgatgatctcaaatattgcagaaaactactaattgtgattacttaag

SEQ ID NO: 163961 - DNA, 201 bp, Homo sapiens
gtgagtgagattgttgcatgtttactagacagatgaaaatatcagtgacctaaagatcttctggaaacatttaaaaaatcagcttatcttttaactaaccraaggttattttcttatcaccttttaaagccattaatggaaagatttttgggaatctccatggcctcataatgaacgaagatacaatgacaaactggtatt

SEQ ID NO: 163962 - DNA, 201 bp, Homo sapiens
agagtttgcaacaccatcccagctttagcttgccaatatggggacaaactcacacttgtttgtttgtttttaagtgccaaagccattaaacaccaactctkccaggcgagttgctggggcttaggaataaaaaggatgtttaaaggggtattgtcttcaatgagctcacaaaccagagatgtgcatatctcactgtaacac

SEQ ID NO: 163963 - DNA, 201 bp, Homo sapiens
gatgtgcatatctcactgtaacacgctttggtgagtaccattattagcacatgaacagagcactgtgtatgtagagaggaggaaaagaggaagagtgtgartctacctcaaagggtgcttggcaggtagagaatgaggaagaccactgaggcccaggaaaaagaatgtgctgaagtcttaaaatgctgaaaggacatggtg

SEQ ID NO: 163964 - DNA, 201 bp, Homo sapiens
gggtgatcagttctccagtatcaaagtaagcaatcggtaacatgaggatctcttagtgatgtacagcagcacacgctcatcatagtcctttccaatgctgktgaagatgtgaggaagctggctagtgacaggctggaagacaatgcactctgtgatcttgacattctgtaaatcttcactaccagtgatgactggtgtgtt

SEQ ID NO: 163965 - DNA, 201 bp, Homo sapiens
attacaaccgtgatttccaagggtgggccatggactggtgctgggctgcccatatcagaactgaaggagctttaaagtgcagatgcctggcctcactcccrgaaagtatggtgcaaaaggcctgctccccagggagcacttgatcacagccaggtttggggagcacttctccagaatacccctgaatcacttagaagcgct

SEQ ID NO: 163966 - DNA, 201 bp, Homo sapiens
aaagtaagccatcagtaacatgaggatcttttcacatcatccaggatgagctcaaaggtggctgcttgctccgtaaggtcgttgttaaccggcttggagaycagctctctctgggtgatcagttctccagtatcaaagtaagcaatcggtaacatgaggatctcttagtgatgtacagcagcacacgctcatcatagtcct

SEQ ID NO: 163967 - DNA, 201 bp, Homo sapiens
ggtgtttatagtattctctgatggtagtttgtatttctgtgggatcagtgatgatatcccctttatcattttttattgcgcctatttgattcttctctctyttcttctttgatagtcttgctggcagtctgtcaattttgttgatcttttcaaaaaaccagctcctggattcattgattttttgaagggttttttgtgtct

SEQ ID NO: 163968 - DNA, 201 bp, Homo sapiens
gagtttctgggcattaacaaatatcccaaggcagcctaacttgtgaggcagctgctccagccatgtctctataagcagcgagaggagagaactctgatggygaacacacaactgggattgccctttgttctgggctcttttcctccacctggagtgcagccaagatttggtagttcttagttgttgaggatgagcacaaaa

SEQ ID NO: 163969 - DNA, 201 bp, Homo sapiens
tcaattgttttaatttttagttcccacaaacaagtgagaacatgtgaagtttgtctttctgtgcctggcttatttcacttaacataatgacctccggttcmatccacattgttgcaaattctttcttgtggctgaatagtactccattgtgtatatgtaccacatctttatccatttggctgcttattgacacagtttgct

SEQ ID NO: 163970 - DNA, 201 bp, Homo sapiens
cctgggggtcttggaatgtatctctcctggacaaagggggactactgtagtaaacataaaaattaacacattaactgccttcaaaatgaagcattatcctstgtatttaatgacattatttcatttaatcctcacaacaattagaaaactatgatgaccaacccactttacagataaggatactaaaggttagtgacatta

SEQ ID NO: 163971 - DNA, 201 bp, Homo sapiens
atctagacatgctggacgtttacattgtcaatggttgacttgagtagctgcaacagagactatatggcccacaaagtcaaaaatatttactatctggtgattttttttttcccaaaaaaaaaaaaaaaaaaaaaaagtttggtgacccttgacttaaagtatggggaataaaaacaaaatcccaatgtttcaattaccaaa

SEQ ID NO: 163972 - DNA, 201 bp, Homo sapiens
aaaaaaaaaaaaaagtttggtgacccttgacttaaagtatggggaataaaaacaaaatcccaatgtttcaattaccaaatttagaacttaaaaagataaarggtttgaagcaaaagaggatatgtaaatatacaacaataaaataaatataacttagagtacaatttatgtatggttttggatgtgtgaaatctgtttatt

SEQ ID NO: 163973 - DNA, 201 bp, Homo sapiens
aacaaattcagtggtcttcctctaaacgcctctggcaggtaagcacgctttgttggtgtttctaagcctctcgtcagagaagcatgtgttaggctttctcygtgatctaatttgtattccaaccactgctctgatgagcttatactgcatagatggcataatgtagctgcttaaggtgttcttaatactgcaaaagcactg

SEQ ID NO: 163974 - DNA, 201 bp, Homo sapiens
tatggggaataaaaacaaaatcccaatgtttcaattaccaaatttagaacttaaaaagataaaaggtttgaagcaaaagaggatatgtaaatatacaacawtaaaataaatataacttagagtacaatttatgtatggttttggatgtgtgaaatctgtttattttaaatgcattattatcagggctactagggctcagga

SEQ ID NO: 163975 - DNA, 201 bp, Homo sapiens
atcccaatgtttcaattaccaaatttagaacttaaaaagataaaaggtttgaagcaaaagaggatatgtaaatatacaacaataaaataaatataacttaragtacaatttatgtatggttttggatgtgtgaaatctgtttattttaaatgcattattatcagggctactagggctcaggagaagaaagttcactctaaa

SEQ ID NO: 163976 - DNA, 201 bp, Homo sapiens
ttgggcctctgtaccaggctccttatgcctggaatgtcatcccctgacctttgcgtggctagttcttcttgtcactcctcagagaagccttctctgatcamcaggctaaggtcactttcttttatatcacctgattttactatcacttaccaccataagacagtttccttgtttatttatttgcttatgtgtatagtatgt

SEQ ID NO: 163977 - DNA, 201 bp, Homo sapiens
acaaggtaaaaaggataaagaccagagttgatatgtttagaatggtacaatcaaaccacacagtcactagtgctcatccagtacctactgttagatagagycttgtatgtactatatttaattaggtaataaatatacaggaaaatataacgctcatctctttgatattctatcaacagatatttattgaccacttctgta

SEQ ID NO: 163978 - DNA, 201 bp, Homo sapiens
aggtaatacttgcctcatagaaggaattggaaagtctccactcttctgttttctgaaagattttgtaaaggattggcatggattttttttttagtatttgwtagaatttttatataaaaccactggacctgaatttactttcagggaggatctttagttactaattcaatttcttgttataggtatattccaattttttat

SEQ ID NO: 163979 - DNA, 201 bp, Homo sapiens
tcaaaccacacagtcactagtgctcatccagtacctactgttagatagagccttgtatgtactatatttaattaggtaataaatatacaggaaaatataaygctcatctctttgatattctatcaacagatatttattgaccacttctgtatgaaaaaagtggggaagtgattaaaaattgatgagaccttcgaggaacct

SEQ ID NO: 163980 - DNA, 201 bp, Homo sapiens
attggatatttgagagggaccaaaattgagggtagaaagaagtcttcaacaggactcagatctcagtctagggctcctcttgcactatctaagtccatccrggtattaggaccctggggggcaacaatcaggcctacccatttcaacagaagcagattcttcaatctacactcagttagttcacacttgtttccactggtc

SEQ ID NO: 163981 - DNA, 201 bp, Homo sapiens
tgggaaaaacacatgttctttttgagcaactgtaagtagagtaataaggttttagcactggaaaggactttctggataataaggaccaatcccccctcgamttatttaatttcgttttgaacatctcttgtgagtagttatagcagctcatctcatctctggactgctctattggaatgttcttcctcaaattgagacaaa

SEQ ID NO: 163982 - DNA, 201 bp, Homo sapiens
ggttttaaagtattcggtcctggatttacgccataaacttaataagattctgctccagcaacatgtagtaaaaactgtttttctcttggctttttaaagtraacaaacaaacaaacaaaacagttctcataaattccttttaatcaattccttttctttccatcttactacatgcttttgtcacttcattaagtagatact

SEQ ID NO: 163983 - DNA, 201 bp, Homo sapiens
tcccccctcgacttatttaatttcgttttgaacatctcttgtgagtagttatagcagctcatctcatctctggactgctctattggaatgttcttcctcarattgagacaaaatccattgacctatagcttccttcatgtcctatgataggtgcatgataaacatttgttggcttaaatgcctgttgaatgacctggtcct

SEQ ID NO: 163984 - DNA, 201 bp, Homo sapiens
tgctttattctccagttgtcccatgtgtttaatacgtattctagtctgcccaacagaactatatgatccccagaggcaggaagaatgtcttacacttcctycctatctctcatgagacctacacaggtggtgaatctgaaataagtccccaagaagtgtttattcattatttcttcttaggcttctccttcccttcttgag

SEQ ID NO: 163985 - DNA, 201 bp, Homo sapiens
ggtaacattagattttttagttttatctttgctttggtttgtcttggccacactggctcttgctgtgttatttgaatttgtattcctaatgcctagcacaytggtagcatgtgttcaatattgaattcacattcttgaatgactgtgtaaatgaatgaatggcaaatggatgtggaatgtgtgcacttccatctccttctc

SEQ ID NO: 163986 - DNA, 201 bp, Homo sapiens
ctatagtctccagctcaatgatgttaagtgattcctccatgccactaaattggaaagtggtgggaactcacattcaaacccaggtctgaccaacttcaaasgccaggaggctgtttccttcattccatggctgctccctcaagagtaactgtgcatggggataagagtaactcttttccaaggttgatcaaggtctctttc

SEQ ID NO: 163987 - DNA, 201 bp, Homo sapiens
gagtgaacagacaacctggagagttggaggacatctttgcaatctatccatctgatgaaggtctaatatccagaatctacaaggaacttaaacaaatttamaagaaaaaaaactcattaaaaagtgggcaaaagacgtgaacagacacttctcaaaagaagacatctatgcagccaataaacctatgaaaagaagctcaac

SEQ ID NO: 163988 - DNA, 201 bp, Homo sapiens
tttggatattcacacttgggcaaatgtctgatatttaaaggaccaggagagccaggtgctcagaattccaccatgaatggaaagaacctgaaatagaaatycagagacctaacttctaatgcttgctctgcccaacttgctgtgtaatcttgaacatgtcatataatctctctgaatatcactttccttaatttgtgtaag

SEQ ID NO: 163989 - DNA, 201 bp, Homo sapiens
atttggaaaccaaagttaggcacatccttatgcacaaggacgagatcgaaaatgaattgaaatcattttgctgagactctatagccctcagatggtgcaawttaacttttatgcttggtacctatgcttgattatagggttcaaaaatataattgagtctataatcactaatgtttcctagaaagtataggatttaggagt

SEQ ID NO: 163990 - DNA, 201 bp, Homo sapiens
gcctacttgctaaaatttatttttaaccccaaaatcaattcctgtgacatttttgtggtcatttgcaggtacatgtagagtggcaaaaaatttacgttgcytgatgcacacattttcagctgaggtcaaacaaggagtctctctgccttcttgtttcagctctcatactgtaaacaaatgtccttgttttcagattattta

SEQ ID NO: 163991 - DNA, 201 bp, Homo sapiens
tttaggagttagattctatttagaaatactttctccagataaatatacttctcctcctccttggagtaaatggggacactgggctcctttgagttgcctgrggatggtgtcagtattttgatctatttataccagtcctgctcaggctcataaagtccttaattaaggtgtgcgtttggtggtaaagcctgatccttaatg

SEQ ID NO: 163992 - DNA, 201 bp, Homo sapiens
gaggctgaggcaggagaattgcttgaacccggaggtggaggttgcagtgagccaagttcgtgccactgcacagcctgggcgacagagtgagactccgtctaaaaaaaaaaaaaaaaatttaaactagccaagttcacagtatatcataaatgtagaaaattactgacaaactactctcccttgggttcacaataacattaa

SEQ ID NO: 163993 - DNA, 201 bp, Homo sapiens
gggacactgggctcctttgagttgcctgaggatggtgtcagtattttgatctatttataccagtcctgctcaggctcataaagtccttaattaaggtgtgygtttggtggtaaagcctgatccttaatggaagtagggtggggtcatcttatttaaagccacagttctcaccatagacctcattaggccatcaacacacat

SEQ ID NO: 163994 - DNA, 201 bp, Homo sapiens
acctgctccaccacgccccaggagcacactagctttcttccttgtcacttagttgtgcctgatttgcacactagataaagggcaacatgctcctatctccrgtagcagccttggctgtgggtacatttttatcaacagaagctgatccccactccttgcttcaggcggctgtttttggtgctgcctttgtgaagcagccct

SEQ ID NO: 163995 - DNA, 201 bp, Homo sapiens
ttctgaagtgcttttgtgtcatcatcattgttgatttttgcacttagcacaattttaatgacatgatctgtctttcccagtgcgtttccgggaaacccatktgcttgggcctttgtcagtcttactctctcagtggttttctctgcatctggcctgaggcctggtgagtggctggtgctcagtcaacacccatgagcagct

SEQ ID NO: 163996 - DNA, 201 bp, Homo sapiens
aggcggaggaaaaagagatgcagcagtcagaagcccaggtgaggctgcgaggcgggatcttgttcacaaggctgctcagtaagcaagctgctgcatccctkctggtgctgcccttctgaaatgtttctcccatcagagccccaggcatttgcagcccgtggcttcctgtgttagtagatacgggtttcacggcaggcatcc

SEQ ID NO: 163997 - DNA, 201 bp, Homo sapiens
gaagcaggcccaccgcatgcacatcctcctggggctcatggggctgcaggtgggtgagctccatggcaacttgtcacagacgcagcggctggaggccctcyggtaacatttggggtggggactgaggctcccaccatccttctggggcagagaggatagaaggaagaagaggaccctgagcattctattagaacattagca

SEQ ID NO: 163998 - DNA, 201 bp, Homo sapiens
ccggggacgaggaagaggaggtatgagcacggttctggtctttgggtttccttgactgcttcccttcctcgcgattcctcaggtccctgtccccgaatcctcatcatcccctgccagccccggaagtttcccgaaaaggatctcaccgggaccccaagatcttcctcagtttccccgccactaggttatctctacgtccgc

SEQ ID NO: 163999 - DNA, 201 bp, Homo sapiens
agtatgtaccaatgtgtacagctatccctccacggtctaaggggcgcagtgaccttgtggttggtgagaactaggatttgaacgccagcttttctgactcyggagcctaaggcctcaccagctgctacttggaggagctggtgaggacagaatgaagatagtctttggatgccagagtatccactgaacttggaatcatta

SEQ ID NO: 164000 - DNA, 201 bp, Homo sapiens
aacaacacctggcttatttttgtatttttttttttgtggagatggtttcgccctgttgcccaggctggtcttgaactcctgggctcaggccatctgcccartgtggcctcccaaagtgctgggattacagatgtgagccaccatgcctggcctaagggatgtgtattgcatgtgcataagttctctctgggaggactcagg

SEQ ID NO: 164001 - DNA, 201 bp, Homo sapiens
atatcccatgtgctcacatttagaatctatccctatttttttttttttttgagacggagtctcgctctgtcgcccaggctggagtgcagtggcgcaatctyggcttactgcaagctccgcctcccaggttcacgccattctcctgcctcagcctcccaagtagctgggactacaggcgcccgccaccatgcctggctaatt

SEQ ID NO: 164002 - DNA, 201 bp, Homo sapiens
ttgactagcagaccaccatacaggaggccttccacatgaccacattttaccggttgactgtgcccacacttgagttttatggtgaccatttctgaacacarctgcacacagtcctcaccacatgggtggctgcatctgtgcccacatctcagagacttggagcaaggctcctggcagcagaaatctgactcaggcacggaa

SEQ ID NO: 164003 - DNA, 201 bp, Homo sapiens
ccccatgaggatttctctgaatccagttactgagaaataattatacgaatccagactgtgagaaggatgaggggccttttcgttcctttttttttttttttgagtcagggtcttgctttgtcacccaggctggagtgccatggtgtgaacaccagctcattgcagcctctacttcctagactcaggtgatcctcccatctc

SEQ ID NO: 164004 - DNA, 201 bp, Homo sapiens
ccgccaccacgcctggctaattttttgtatttttagtagagacaggttttcaccgtgttagccaggatggtctcgatctcctgacctcgtgatccgcctgycttggcctcccaaagtgctggaattacaggcatgagccaccgcacccagccgacatgttttcatagtgctttaggtgggtgggatttgattgagacttaa

SEQ ID NO: 164005 - DNA, 201 bp, Homo sapiens
tcctgcctcagcctcccgagtagctgggactaccgccaccacgcctggctaattttttgtatttttagtagagacaggttttcaccgtgttagccaggatrgtctcgatctcctgacctcgtgatccgcctgtcttggcctcccaaagtgctggaattacaggcatgagccaccgcacccagccgacatgttttcatagtg

SEQ ID NO: 164006 - DNA, 201 bp, Homo sapiens
agtctcgctctgtcgcccaggctggagtgcagtggcgcaatcttggctcactgcaagctccgcctcccgggttcacgccattctcctgcctcagcctcccsagtagctgggactaccgccaccacgcctggctaattttttgtatttttagtagagacaggttttcaccgtgttagccaggatggtctcgatctcctgacc

SEQ ID NO: 164007 - DNA, 201 bp, Homo sapiens
ctcctgtgttcaggtgattctcctgcctcagcctccccagtagctgggtttacaggtgcccgccaccacacccggctgatttttgtatttttagtagagasagggtttcaccatgttggccaggctggtctcgaattcctgacctcaagtgatacacctgcctcagcctctcaagagtgctgggatttacaggtgtgagcc

SEQ ID NO: 164008 - DNA, 201 bp, Homo sapiens
agccactgtgcctggccataaaatttttgtaacacaaaaaagatatactggtgcaattgagagagtaaaggacttttttttttttttttttttttttttttgagacggagtctcgctctgtcgcccaggctggagtgcagtggcgggatctcggctcactgcaagctccgcctcccgggttcacgccattctcctgcctca

SEQ ID NO: 164009 - DNA, 201 bp, Homo sapiens
gcagcttagtacaaggcacatagcatgggggtcggttgcagggctcagagcagagtttggtgcactggtagtgctggcagcgccagacacagggttccacrcagggactacacagctccccacatttcttcttgcactggctgtggacacagcggttctgacaggtccgctggcagggtgggcactcaccaatgcatggtt

SEQ ID NO: 164010 - DNA, 201 bp, Homo sapiens
ggatagggacccagggtgggcagaagggtgttacggccagggctgggctctaggttgacttaccaaaggctggtttgctaaataaatattcttggttttttgaactatttcatttttattttttattttgtagagataggggtctcactttgttgtccaggctggtcttgaattcctaggttcaggttcaagcgatcgatt

SEQ ID NO: 164011 - DNA, 201 bp, Homo sapiens
ggactacaggcacacgctgccacgccctgctaattttttgtatttttagtagagatggggtttcaccgtgttagccaggatggtctcgatctcctgacctygtgatccgcccgcctcagcctcccaaagtgctgggactacaggcgtgagccaccgcgcccggccgagaactctcttaagcaatgagttccatcgtgtccc

SEQ ID NO: 164012 - DNA, 201 bp, Homo sapiens
ccacccctaactggactttctgcttctctctttgcctccctcaactcttgtccatacagttgccagagaactccctttttttttttttttttttttgagayggagtctcactctgtcgcccaggctggagtgcagtggcacaatctcggctcactgcaacctccacctcccgggttcacgccattctcctgcctcagcctc

SEQ ID NO: 164013 - DNA, 201 bp, Homo sapiens
tcctgagggcagggtttttatttcttttatttactgctgtgtcctcagtgtctagagcaccacctcacacatagtaggcgttcagtgaatgtttgtggaaygaatgattggtggggattggtgtggtccccacttgtctggaaacctgccctgtttgtgttgtgctgagacttcccccgctcaaccctgtctgacccagtt

SEQ ID NO: 164014 - DNA, 201 bp, Homo sapiens
ttcaatctgatggcgacttcatcatccttctgttcattcatgtagcggtctagggcttgcacctcaaagatgtggctgcagtcttccagctgcacaaagcrggcatcaggctcatcctcaaagccaaagaatatttgggtgacctcatccatgtggcagatccggcatttcttggggcatggctccccacagagaccaatg

SEQ ID NO: 164015 - DNA, 201 bp, Homo sapiens
cgcagggcaggctgcagcctccttcgggtactttttggaagtcagaagctttggatactaaggtgtgggtttcagggtggttctggcagcagagccggagyatggggcctatttgattgttctctcgaagtgtatgaatgatcttgctccacaggggcaccttggccagcatctgcatgtttccgatgcagtacattccct

SEQ ID NO: 164016 - DNA, 201 bp, Homo sapiens
gccttaagaggaaagaagaaaaggaagaagtttatgaaggatgccaaaaaaaagggggagatgacagtgagtggcctcccttttggagtttgggcccactyggtggggtgggtcagagtggcctggtgtgttccacactcacacctccccactccccctaggcagaggaaaggtctcagtttgaaatcctcaaggcgcaga

SEQ ID NO: 164017 - DNA, 201 bp, Homo sapiens
tcgttctgctctggccacactggcctccttgctggccctcaaataggttaggcctcctcttcctcagggcccttgcactttctgttccctctgcctggaaractcttccagaaatcttttggggtgctctctagcttccttcagggttcaactcagtatcccttgctcagtgagaccttccctggcagccctaccgtgaat

SEQ ID NO: 164018 - DNA, 201 bp, Homo sapiens
tgagaggatgtccggtctagtagtgggccacaagtttcaaagggtctgatgaaggtcattttcatttaatcctcttggggtatccctgatctctgtgaccrtggcctcctggccctgccatatcagaggaggaaatttttttttttttttttttgagacagagtctcgctctgttgcccaggctggagtgcagtggcgcaa

SEQ ID NO: 164019 - DNA, 201 bp, Homo sapiens
ctagcgagaggaggatgatgtcattctcttccccttggtatttgtccacaacatggaccctgacgccagcaaatgtcttggcaggcatcagtttgcgcagrcagaagagctgcccggtataggtagtgaggatggtgatctgggaaggcaggtattcctggcacaggaagtacttgcacagctctaccacaaagtgagcct

SEQ ID NO: 164020 - DNA, 201 bp, Homo sapiens
gtgcccacatctcagagacttggagcaaggctcctggcagcagaaatctgactcaggcacggaacaagggaccatttgttcatggccgcaccgaggaatgrttttgggcaccttcacctgacaaggctgacactcctggaagcaaacaaggggacaccggtgcccttcctgacagatgaccttctggcatggcttcatgca

SEQ ID NO: 164021 - DNA, 201 bp, Homo sapiens
cgcagccacccctaactggactttctgcttctctctttgcctccctcaactcttgtccatacagttgccagagaactccctttttttttttttttttttttgagacggagtctcactctgtcgcccaggctggagtgcagtggcacaatctcggctcactgcaacctccacctcccgggttcacgccattctcctgcctca

SEQ ID NO: 164022 - DNA, 201 bp, Homo sapiens
gtggcccgatctcggctcactgcaagctctgcctcctgggttcacaccattctcctgcctcagcctcccgagtagctgggactacaggcgcccgccaccaygcccggctaatttttttgtatttttagtagagacggggtttcaccgtgttagccaggatggtctcgatctcctgacctcgtgatccgcccgcctcggcct

SEQ ID NO: 164023 - DNA, 201 bp, Homo sapiens
agtacattcccttcttggctcgggacaaggccacacagatgcggttggatatctgcagaaaacccaccttgccttcttggttgctccgcactagcgagagraggatgatgtcattctcttccccttggtatttgtccacaacatggaccctgacgccagcaaatgtcttggcaggcatcagtttgcgcaggcagaagagct

SEQ ID NO: 164024 - DNA, 201 bp, Homo sapiens
agcccatgttttcctcttttttctctttctctattatggtggttaagtgataaggctggtcaaatgttggtcctgccacttcctaagggagatttggaaayatttagattctcaaaacaaatcttttctcatttgtaaatgggagataaggacatacgcacaccatagtgttgaggagctgaggagggaggaagaggaagt

SEQ ID NO: 164025 - DNA, 201 bp, Homo sapiens
ctctctgtgcacagccaagaagcaaaagcaggggaagaaatctgtatttgatgaagaactcaccaacacaagcaagaaggccctgaaacagtatcgagctrggtaggattttaagtcatcatggagcccttggtattctttttttttgagacggagtctcgctctgtcgcccagggtggagtgcagtggtgcatcttagct

SEQ ID NO: 164026 - DNA, 201 bp, Homo sapiens
acctcccttgcttaaaactctccagcctgctggtagagacccccgggcctgtccaccttgcaaagactcctcaggcagcgtctgggtcccgtacactgtcsccatttccccgatgtcccctgtgggcgcgggcggccacccaggcctgctggctgcggccccctctcggacaggccttggctcagcccgctgcgtgggagg

SEQ ID NO: 164027 - DNA, 201 bp, Homo sapiens
tctgggtcccgtacactgtcgccatttccccgatgtcccctgtgggcgcgggcggccacccaggcctgctggctgcggccccctctcggacaggccttggytcagcccgctgcgtgggaggtcatgggccagtccccgaggagccaggcccctgtacagtgcccggtcacacccatgatgcggggtgtgtttgtcacaccc

SEQ ID NO: 164028 - DNA, 201 bp, Homo sapiens
accactgattttctcaatcatcgtttttaattggctttataagctaaagtgcatagtaaagacaaaaaaaggaaatgcatacataggaaagggacacttaraaaggacctgagatacctaaatgtctgttctaaggaacactggaaggagggaatgcagatgcaggcagcaggcctgggtctggcttctggcctgggtttg

SEQ ID NO: 164029 - DNA, 201 bp, Homo sapiens
gagaaatgctgtaaggggttgggcttgctgaaaacatggaatccaaggaatctcacagattactattatgtataaagagaaagaggatcctttacagtggygtgatctggcagacactatagccaagtgaccaacctcacatccacagttctggaacaaaccggccgtcagtatctcatgatggagcgtgaatgcagggca

SEQ ID NO: 164030 - DNA, 201 bp, Homo sapiens
tgtgcccagcagcgctgtccccatgaggatttctctgaatccagttactgagaaataattatacgaatccagactgtgagaaggatgaggggccttttcgytcctttttttttttttttgagtcagggtcttgctttgtcacccaggctggagtgccatggtgtgaacaccagctcattgcagcctctacttcctagactc

SEQ ID NO: 164031 - DNA, 201 bp, Homo sapiens
agtgccatggtgtgaacaccagctcattgcagcctctacttcctagactcaggtgatcctcccatctcagtcccccgacgtagctactactacaggcacaygctaccatgcctggcttattttatattaaataaatagagacggggtctcgctatgttgtcaaggctggtcttgaactcctgggcttaagacacccttctg

SEQ ID NO: 164032 - DNA, 201 bp, Homo sapiens
gtgtaatggctgagagcaggtactttgcagttcagagccagatttgaattccagccctgctgcttccttgccgagtgaccatgtgcaggtttcacctcacytctctgagcttgcctcctgtgtgtagaagggaattatgacagaattgtaaacacagtgccccatttaggtggaaattgagaagagaaggttgcttggggc

SEQ ID NO: 164033 - DNA, 201 bp, Homo sapiens
ggtctcgctatgttgtcaaggctggtcttgaactcctgggcttaagacacccttctgcctcggcttcccaaagttttgggattataggcatgagccacctkgcccggccccagctcatttttgtattttttgtggagatgaggttttgctatgctgcccaggctgagggggcttttctagatgcaggaagactagagacgt

SEQ ID NO: 164034 - DNA, 201 bp, Homo sapiens
aaacctggctttgtgcttggcaggtgaaagatctggcttctgtctccttgaagaatcctgtccggatatttgtgaacagcaacacagatgtggctcccttyctgcggcaggagttcatccggatccggcctaatcgtgaaggagaccgggaagccatcgtggcaggtggcagcacagggcaagcctgggcagggtgggctg

SEQ ID NO: 164035 - DNA, 201 bp, Homo sapiens
cagagggcagccactacattagatgagaagattgagaaagttcgaaagaaaaggaaaacagaggtgagaagaaaagtggctatttttcgttgttagggccyactctttactctcaccacgaccccagcatctctctggaagcccttatagagcggggcatggctggggcaggcgcactcttctgtgtgtttgctgtgaatc

SEQ ID NO: 164036 - DNA, 201 bp, Homo sapiens
actgttctctgtcgcctggatcgttgcgcagcctcttgctcgagctccctgcttccactcggccttttgtgactctctgcattgcagagcatttacaatgwttgcttgcagaagacattcgtacttattatgtccttatttgaacaccctgcggtggcttccattggtcttagactaaaatccaaacatcttagtttttta

SEQ ID NO: 164037 - DNA, 201 bp, Homo sapiens
ggtgagaagaaaagtggctatttttcgttgttagggcccactctttactctcaccacgaccccagcatctctctggaagcccttatagagcggggcatggytggggcaggcgcactcttctgtgtgtttgctgtgaatctgtactgagaatccccacagccgttcattcaggccggagagcttcctatcgctctacttagg

SEQ ID NO: 164038 - DNA, 201 bp, Homo sapiens
acaccctgcggtggcttccattggtcttagactaaaatccaaacatcttagttttttaggactcttcgggcctggcccttgcctgcccgggatcccagccktggaggcttgctcatggctccagccacattcgcctgcttgcacttttttttttttttctttgaggcagagtcttgctctgtcgcccaggctggagtacac

SEQ ID NO: 164039 - DNA, 201 bp, Homo sapiens
  misc_feature (1)...(201): n = A,T,C or G
ctggcatcaagcaatcctcttgcctcaacctcccagagtgctgggatttgagccactgtgcctggccagtagtggcttattttggcaaccatgggattatngcagccacccctaactggactttctgcttctctctttgcctccctcaactcttgtccatacagttgccagagaactcccttttttttttttttttttttt

SEQ ID NO: 164040 - DNA, 201 bp, Homo sapiens
tcaccactggtagcatttaggtgtatgtcttttcaaaccatttttcctttcttaaatgtcccttttatttttttcattttcattgtcttcatttaatcagygactagttattgagtcctgctgtgggcctagtgctattgattctgttctaggtgctggggatacagcagggaacaaagcagagctgtggttctgggagaa

SEQ ID NO: 164041 - DNA, 201 bp, Homo sapiens
cagagtcttgctcggtcgcccagggtggagtgcagtggcgcgatctcggctcaccgcagcctccccctcccgggttcaggcaatcctcctgcctcagcctmcctagtagctgggactacaggcatgcgccaccacgcccggctaatttttgtatttttagtagagacagggtttcaccatattggccaggctggtcttgaa

SEQ ID NO: 164042 - DNA, 201 bp, Homo sapiens
  misc_feature (1)...(201): n = A,T,C or G
ccactgatgtggcagcccgtggacttgacattgagggggtcaaaacggtgagcagacactatcttccttggacttttggtggaagtctttttgcctcttcncaccccccttcccttgccaggcctgacgttcatttttgaccttctaggtaatcaacttcacaatgcctaataccatcaaacattatgtccaccgggtggg

SEQ ID NO: 164043 - DNA, 201 bp, Homo sapiens
aaaaatattctatgaaaaataagttcctttattttccccaaccagacgtagtttttctgtgctctggtgaaaacctaaccctggagggagctaaacttctwctcattgcttccttgctgtccctccctccaggtaaaactgccgcctttgccctgcctgttttggagcgtctgatttataaaccccgccaggctccagtca

SEQ ID NO: 164044 - DNA, 201 bp, Homo sapiens
cagacgtagtttttctgtgctctggtgaaaacctaaccctggagggagctaaacttctactcattgcttccttgctgtccctccctccaggtaaaactgcygcctttgccctgcctgttttggagcgtctgatttataaaccccgccaggctccagtcacccgcgtgctggtgctagtgcccacccgagagctgggcatcc

SEQ ID NO: 164045 - DNA, 201 bp, Homo sapiens
tagtcggggtttcaccatgttggccatgctgatcccaaactcctgacctcaggtgatccacccacctcagcctcccaaagtgctgagactacaggcacgarctactgcactcggccaagaagtgcttgccgcttttcattttaatctgctaacttaccaattgaaaacgtgcacttcttatcgtaagcttaaaaaaagata

SEQ ID NO: 164046 - DNA, 201 bp, Homo sapiens
ccatgcattctcttctgaagtgcttttgtgtcatcatcattgttgatttttgcacttagcacaattttaatgacatgatctgtctttcccagtgcgtttcygggaaacccatgtgcttgggcctttgtcagtcttactctctcagtggttttctctgcatctggcctgaggcctggtgagtggctggtgctcagtcaacac

SEQ ID NO: 164047 - DNA, 201 bp, Homo sapiens
gagatacctaaatgtctgttctaaggaacactggaaggagggaatgcagatgcaggcagcaggcctgggtctggcttctggcctgggtttggagcctgcaraagctgctggcatgctagctctacccagggaacagctccaagagggagtgttgggatgaaggatcacacttgggataggtgctgctggtaccaaatgtga

SEQ ID NO: 164048 - DNA, 201 bp, Homo sapiens
tctgtgcctgtgcagccactgggacaggtgaaaaggatagggacccagggtgggcagaagggtgttacggccagggctgggctctaggttgacttaccaawggctggtttgctaaataaatattcttggttttttgaactatttcatttttattttttattttgtagagataggggtctcactttgttgtccaggctggtc

SEQ ID NO: 164049 - DNA, 201 bp, Homo sapiens
atgtgcttgggcctttgtcagtcttactctctcagtggttttctctgcatctggcctgaggcctggtgagtggctggtgctcagtcaacacccatgagcarctgacctggccgcctggtggggctctcttctctttgcaggcggcttggatgtgaagtctcaggaagcagctcttcgggcagcgcctgacatcctcatcgc

SEQ ID NO: 164050 - DNA, 201 bp, Homo sapiens
gaaaaagagatcattttaagccaaggggatgtgatctggtttaggttttaaagggggagggaaactattcaagtatgtacctcaaaagaccaaaaaaggcrgaggaagtatttgagatttagatcaggagacagctctgtgtgatacctggacctagactgtagcctgcactggggagagaaatgctgtaaggggttgggc

SEQ ID NO: 164051 - DNA, 201 bp, Homo sapiens
actccagcctgggcaacaagagtgaaactccatctcaaaaaaaaaaaaaaaaagacacttggaacctggaggcagctgaaggaatttgaacgtggcctgtrctttagatattcacgcactcgaaagtcttgggtgtgttgatgaagttgtgtttctgtaagagaaggtcctagtgcttaggagttgtgtgctgaaatattt

SEQ ID NO: 164052 - DNA, 201 bp, Homo sapiens
ccatttcctagttctatactgtaaagcagcggtccccaacctttcggcaccaaggaccagtatcgtggaagacaatgtttccacatttggggtgtgggggktgcattagattctcataaggagtgcacaccctagatccctcgcatgcgcacttcacaatagggttagtgctcttatgagaatctaatgctgctgctgatc

SEQ ID NO: 164053 - DNA, 201 bp, Homo sapiens
gagatgaccctcatgtccttggatgcttgtccctagcatgggagctgttgtgtggcgtgacagaggaagctggcttggaaaggcaacacatggtctcttcytggaagctttctgagagtggtgaacattcctgggtctgattgaacaagatttagagtcaaagttagcagccattacttgagcatctactttgccaggcac

SEQ ID NO: 164054 - DNA, 201 bp, Homo sapiens
taatacgccatggactggaaccggtatgcagcctgggggttggggaccactgttgtaaaggatgtaaacagggactcaaacagatacttagatgccagtgytctttgaattactgttcataatagcaaaaaggtggaaacaaactatgttcatcaacaagtgaatggataaacaaaatttggggtgtgtgtttatatacac

SEQ ID NO: 164055 - DNA, 201 bp, Homo sapiens
gtcttcactgtctttggctgagttgcttctgaaaattgaggatacacgtggaccactgattttctcaatcatcgtttttaattggctttataagctaaagkgcatagtaaagacaaaaaaaggaaatgcatacataggaaagggacacttagaaaggacctgagatacctaaatgtctgttctaaggaacactggaaggag

SEQ ID NO: 164056 - DNA, 201 bp, Homo sapiens
gatggaggtaatcagtggaagaagtgcttgcggcttttcttttcttttttttttttgaggcagggtctcgctctgtcgcccaggctggagtgcagtggcgygatctcagctcactgcagcctccccttcctaagttcaagcaattctctcacctcagcctcccgagtagctgggattacaggtgcaccaccatgcccagct

SEQ ID NO: 164057 - DNA, 201 bp, Homo sapiens
cactgtagacagtgccttccctgtgcccgtcttcactgtctttggctgagttgcttctgaaaattgaggatacacgtggaccactgattttctcaatcatygtttttaattggctttataagctaaagtgcatagtaaagacaaaaaaaggaaatgcatacataggaaagggacacttagaaaggacctgagatacctaaa

SEQ ID NO: 164058 - DNA, 201 bp, Homo sapiens
ctgatctgacaggaggccaagcacaggtggcaatgcttggttgcccaatgctcacgtcctgctgtgcagcctggttcctaatacgccatggactggaaccrgtatgcagcctgggggttggggaccactgttgtaaaggatgtaaacagggactcaaacagatacttagatgccagtgttctttgaattactgttcataat

SEQ ID NO: 164059 - DNA, 201 bp, Homo sapiens
tctcaaactcctgacctcaggtgatccacctgccttggcctcccaaagcgtgggattacaggcatgagccactgtgcctggcttttttttttttttttttktagagacagagtctggccacgttgcccaggctggcctcaaattcctgggctcaagcaatcctcccacctcaatctcccagagtgccgggttacaggtgtg

SEQ ID NO: 164060 - DNA, 201 bp, Homo sapiens
ccttcctgacagatgaccttctggcatggcttcatgcattggaactccttgtgtgaagagtcataagggtggcaggcacgggtgcagacatgcccacagcycaggcggaactcgcagggcaggctgcagcctccttcgggtactttttggaagtcagaagctttggatactaaggtgtgggtttcagggtggttctggcag

SEQ ID NO: 164061 - DNA, 201 bp, Homo sapiens
ttgttggcaaaccgaaaggagtttaaggtcgtttgggtttcttggctctttttgttgaattctcttctctcttttggttttctggtgtaggaagcaggagkattttttgaagatgcatctcagtacgatgaaaacctctcgttccaggacatgaacctttcccgccctcttctgaaggtagcagcttcttgtcaaaaattt

SEQ ID NO: 164062 - DNA, 201 bp, Homo sapiens
tggtgtcatcttggcttactgcaacctccgcctcgtgggttcaagcagttctcctgcctcagccttctgagtagtagctgggattacaggcgtgtgccccsacacccagctgatttttgtatttttaatagagacggggtttcacagcattggccaagctggtctcaaactcctgacctcaggtgatccacctgccttggc

SEQ ID NO: 164063 - DNA, 201 bp, Homo sapiens
ggtgtgtgccaccatgatggctaatttttttttttttttagatggagtctcgctcttttgcccaggctggagtgtagtggtgtcatcttggcttactgcarcctccgcctcgtgggttcaagcagttctcctgcctcagccttctgagtagtagctgggattacaggcgtgtgccccgacacccagctgatttttgtattt

SEQ ID NO: 164064 - DNA, 201 bp, Homo sapiens
ttttgttttttgttttcagacggagtcttgctctgtcactgaggctggagtgcagtggcgcaatctcggctcactgcaagctctgcctcctgggttcaccmcattctcctgcctcagcctcctgagtagctgggactacaggtgcctgccaccgcacctgggtaattttttgtatttttagtagagatgggatttcaccgt

SEQ ID NO: 164065 - DNA, 201 bp, Homo sapiens
tgcctcgaactcctgggttcaagcagttcttctcctcagcctcctgagtaggtgggactacaggtgtgtgccaccatgatggctaatttttttttttttttagatggagtctcgctcttttgcccaggctggagtgtagtggtgtcatcttggcttactgcaacctccgcctcgtgggttcaagcagttctcctgcctcag

SEQ ID NO: 164066 - DNA, 201 bp, Homo sapiens
ttgcggacctcggcttaatcggaaccataggcgaggatgacgaggtgccggtggagcccgagtctgactccggggacgaggaagaggaggtatgagcacgrttctggtctttgggtttccttgactgcttcccttcctcgcgattcctcaggtccctgtccccgaatcctcatcatcccctgccagccccggaagtttccc

SEQ ID NO: 164067 - DNA, 201 bp, Homo sapiens
aaatgtaattctgtgtcaaagagctcaccactggtagcatttaggtgtatgtcttttcaaaccatttttcctttcttaaatgtcccttttatttttttcaytttcattgtcttcatttaatcagtgactagttattgagtcctgctgtgggcctagtgctattgattctgttctaggtgctggggatacagcagggaacaa

SEQ ID NO: 164068 - DNA, 201 bp, Homo sapiens
gcctggtgtgttccacactcacacctccccactccccctaggcagaggaaaggtctcagtttgaaatcctcaaggcgcagatgtttgctgaacggctagcraagaggaatcgcagagccaagcgggcccgagcaatgcccgaggaggagccagtgagaggtcctggtaggtgaatggggagcccaaaggagcttgtacaag

SEQ ID NO: 164069 - DNA, 201 bp, Homo sapiens
agggatgatgacagtagcccacattatttgagtaattagtatgtaccaatgtgtacagctatccctccacggtctaaggggcgcagtgaccttgtggttgktgagaactaggatttgaacgccagcttttctgactccggagcctaaggcctcaccagctgctacttggaggagctggtgaggacagaatgaagatagtct

SEQ ID NO: 164070 - DNA, 201 bp, Homo sapiens
ggcctggtgtgttccacactcacacctccccactccccctaggcagaggaaaggtctcagtttgaaatcctcaaggcgcagatgtttgctgaacggctagygaagaggaatcgcagagccaagcgggcccgagcaatgcccgaggaggagccagtgagaggtcctggtaggtgaatggggagcccaaaggagcttgtacaa

SEQ ID NO: 164071 - DNA, 201 bp, Homo sapiens
gtgccactgcactgcagcctgggcaaaagtgcaagaccctgtctctaaaaaatgaaatgaaaagtacgtatttattgttggaaattagtaaataaaaaaaatgtaattctgtgtcaaagagctcaccactggtagcatttaggtgtatgtcttttcaaaccatttttcctttcttaaatgtcccttttatttttttcattt

SEQ ID NO: 164072 - DNA, 201 bp, Homo sapiens
ccaccatgcctggctaattttttgtatttttagtagagacggggtttcaccgtgttagcgaggatggtctcgatctcctgacctcgtgatctgcccacctyggcctcccaaagtgctgggattacaggcgtgagccaccgtgcccagcctctatccccattttaatgccctgttctgtcctctgctggctcaggctcttgt

SEQ ID NO: 164073 - DNA, 201 bp, Homo sapiens
ccatgtgctcacatttagaatctatccctatttttttttttttttgagacggagtctcgctctgtcgcccaggctggagtgcagtggcgcaatcttggctyactgcaagctccgcctcccaggttcacgccattctcctgcctcagcctcccaagtagctgggactacaggcgcccgccaccatgcctggctaattttttg

SEQ ID NO: 164074 - DNA, 201 bp, Homo sapiens
ctcggagactgactactcatcagctgatgagaacatcctcaccaaagcaggtagacgttacggcggaggtgtcagtaatggggacaggagatcagaaggcrtcctcctttactttgtagggtttcctccactcttctgcacagtttatctttaagctgttctgcctactacattgaactcctttctttctttttttttttt

SEQ ID NO: 164075 - DNA, 201 bp, Homo sapiens
ggtctcgctctgtcgcccaggctggagtgcagtggcgtgatctcagctcactgcagcctccccttcctaagttcaagcaattctctcacctcagcctcccragtagctgggattacaggtgcaccaccatgcccagctaatttttgtatttttagtagtcggggtttcaccatgttggccatgctgatcccaaactcctga

SEQ ID NO: 164076 - DNA, 201 bp, Homo sapiens
gtggttggtgagaactaggatttgaacgccagcttttctgactccggagcctaaggcctcaccagctgctacttggaggagctggtgaggacagaatgaaratagtctttggatgccagagtatccactgaacttggaatcattaccttgaacttaaggggatttaggagcttgggccaaagacaaccatatgtaacccat

SEQ ID NO: 164077 - DNA, 201 bp, Homo sapiens
ttggggaatggcagctccatccttccagctgttctgaattcttagcgtgtcctcctgttttcacattccacagcccgcctgtcgacacagcctggccacaygcccccactttgtggcttctgcatttgccatttcctcagcctggagccatctcctgccccttcaggtttctgttccagttgttatcttgttagtggggcc

SEQ ID NO: 164078 - DNA, 201 bp, Homo sapiens
ctgcatccctgctggtgctgcccttctgaaatgtttctcccatcagagccccaggcatttgcagcccgtggcttcctgtgttagtagatacgggtttcackgcaggcatccttttgttatctctacagatcaatacagcaaagcggctcctggagaaggggaaggaggcagtggtccaagagcccgagaggagctggttcc

SEQ ID NO: 164079 - DNA, 201 bp, Homo sapiens
aatgttcttattttcatgtacaaaatgtcagaatacaatctgatggcattaaaaaaatcactttactgaagtatggttgacattctgatgtcattttgacsaaagtctggattgattttattcattgcatgtgtgcgcagttgagtttgtaacttctgtattagtttgctagggctgccataacaaaatgtcacagactgg

SEQ ID NO: 164080 - DNA, 201 bp, Homo sapiens
gaaaaaaatctgaaggccttgtagtgccagtggagcccgattttcagaacaagctagctgtgatttttgccactttagaactcttgtagctactcgacttyctgggaagaacccagacatgggatgtttaaatcaccaggtgggggaaaaagcactgatagaaccaattgttgaagaagccagtaccatttatagtagtga

SEQ ID NO: 164081 - DNA, 201 bp, Homo sapiens
ttagctcctaaatataatacaggttattgaatcagctttgggagtttgtggagaaaaaaatctgaaggccttgtagtgccagtggagcccgattttcagarcaagctagctgtgatttttgccactttagaactcttgtagctactcgactttctgggaagaacccagacatgggatgtttaaatcaccaggtgggggaaa

SEQ ID NO: 164082 - DNA, 201 bp, Homo sapiens
cagagaaaattagaaaccatgaagcagataaacaatatagttagctagaagagtgtgaactacctgacagcctgataataagagaggagaaagggaagaaacataaactttcaaaaaaaaaaaaaaaaaagaaatcagttactaacattttgtgtagggattttatttagccagtgaaggcttagttacatgacaaagacc

SEQ ID NO: 164083 - DNA, 201 bp, Homo sapiens
tggatttttcttatgtattcatctgaaggaaacttttaacaaaggtgacaatggtgaaggaaataaggcagaataaacaatctcccatgattattttcatytttcatgttattttacgatttcattacagaagggaaaaattcatttatagaatgttcctgaatgcatttttgcatccttgattttttttcccccctggat

SEQ ID NO: 164084 - DNA, 201 bp, Homo sapiens
attttaagttgcttaccaaatatgtatcctatgttaattatacttatattaatgaggtttgaaatgttgaatgagagtaacgtatttaatcttcctatttrgttcagtatttggctcagactttcttatttatagaactctgtaacatagctctaattattaaattacttttgcagcagagtaccatatctgtttcttatc

SEQ ID NO: 164085 - DNA, 201 bp, Homo sapiens
ccccagggctctccgggctctgccgcacccgccctcccggggcagcgttgcatcaaggcggagaatccggggcccggccaggggcggagccggcgcggcgrgcctggctagcccggcgggtcccggggacaggagagggaaggatggggccggcgggcggaactggagtccgctgggaccgggcgcggcctcgtccgcgtg

SEQ ID NO: 164086 - DNA, 201 bp, Homo sapiens
ggcgagggtttccttatattggtcaggctggtctcgaactcctgacctcaaatgatccacccacctcggcctcccaaagtgctgggattacaggcgtgagstgctgcgcccagccgtggctgcaccatttcacatcccctccagggttcaggtttctgcacatccttatcaacacttgttgttatcttttttttttaagcg

SEQ ID NO: 164087 - DNA, 201 bp, Homo sapiens
catactgttcctaacagcttcacttatggtttcttatatagtaggttcctgaagagtagatgtctctgtttttattggggtggttgacattacatcatcaygtagtctagaatgaatgtacaagtgattttaaaatgttttaattacgaaaattttgacagttaatttagttttgtggctagaactagagatgacttcatt

SEQ ID NO: 164088 - DNA, 201 bp, Homo sapiens
aggcgagggtttccttatattggtcaggctggtctcgaactcctgacctcaaatgatccacccacctcggcctcccaaagtgctgggattacaggcgtgasctgctgcgcccagccgtggctgcaccatttcacatcccctccagggttcaggtttctgcacatccttatcaacacttgttgttatcttttttttttaagc

SEQ ID NO: 164089 - DNA, 201 bp, Homo sapiens
cattggattttaaaatgcatgatactggaaaaagcaggtatcactggcaaccactaatctactttttgtctgtatggatttgcctatttgggatatttcayattagtggaatcctataatatgtgatttgatcttttgtgccaggcatctgttgctcaacataattctttttttttttcttttttgagacagagttttgct

SEQ ID NO: 164090 - DNA, 201 bp, Homo sapiens
actttctgaaaaactaccaaagtgttttccatagtggctgcacctttttttttttttttttttgagacagggtctcactttctcgcccagactggagtgcwgtggcgctatcttggcttaccgcaacctctgcctcccaggctcaaggcgttctcctgcttcagcatcctgagtagctgggattacaggtgcccgccacta

SEQ ID NO: 164091 - DNA, 201 bp, Homo sapiens
cggtcagtgaatgtgtatttttgattctcttgggtatatatctaagcgtagacttgctgattcatatgataattcttacgtttaactttctgaaaaactascaaagtgttttccatagtggctgcacctttttttttttttttttttgagacagggtctcactttctcgcccagactggagtgctgtggcgctatcttggc

SEQ ID NO: 164092 - DNA, 201 bp, Homo sapiens
catatactgtgtctttttaaatttaattatacagtttattttgctctcatatttgaaattaaaaagcatttttcatgaaaagtaccaaaaatgtgactttmttaacccttgggaagaactgaaattacatatataataagagttctaagttttattttctcagggtcctcgtcctgctttatttgtgcctgaggtttcatt

SEQ ID NO: 164093 - DNA, 201 bp, Homo sapiens
attcacattcttcctctgtaggttcataaattgtattagtaatctcagattgcttatcaaatagaggctgatagagaacagcatacttcctttcaagatcrtgaacttcctcatagaatttggcttctatctgtgcacctttaacttgcaggtttttgagagcattcactcctcttttaactaccctagctaggcaggttg

SEQ ID NO: 164094 - DNA, 201 bp, Homo sapiens
aggtggtggaggttgcagtgagctgagatcgcaccactgcactccagcctgggcaacagagagagactctatctccaaaaaaaaaaaaaaaaaatatataatatatatatatatatataaattatattaattaaatataaattaaatatttaatatatatataaaaaataataatatatataataatatatatagaagcca

SEQ ID NO: 164095 - DNA, 201 bp, Homo sapiens
ttttccaagaagtgactcagtctaattctgaaatgacaaaagcagttcatatcattttattcacacttgaactccactggagtcagggatgaaatgtcatsttctattccaagaatgaagtcttcagataatgtccaggtgcttcagaactaactagtcatcataagaacacagagtccataatttctccaatgtatagtt

SEQ ID NO: 164096 - DNA, 201 bp, Homo sapiens
ccaggtggtggaggttgcagtgagctgagatcgcaccactgcactccagcctgggcaacagagagagactctatctccaaaaaaaaaaaaaaaaaatatataatatatatatatatatataaattatattaattaaatataaattaaatatttaatatatatataaaaaataataatatatataataatatatatagaagc

SEQ ID NO: 164097 - DNA, 201 bp, Homo sapiens
acccaggtggtggaggttgcagtgagctgagatcgcaccactgcactccagcctgggcaacagagagagactctatctccaaaaaaaaaaaaaaaaaatatataatatatatatatatatataaattatattaattaaatataaattaaatatttaatatatatataaaaaataataatatatataataatatatatagaa

SEQ ID NO: 164098 - DNA, 201 bp, Homo sapiens
gaacccaggtggtggaggttgcagtgagctgagatcgcaccactgcactccagcctgggcaacagagagagactctatctccaaaaaaaaaaaaaaaaaatatataatatatatatatatatataaattatattaattaaatataaattaaatatttaatatatatataaaaaataataatatatataataatatatatag

SEQ ID NO: 164099 - DNA, 201 bp, Homo sapiens
tgaacccaggtggtggaggttgcagtgagctgagatcgcaccactgcactccagcctgggcaacagagagagactctatctccaaaaaaaaaaaaaaaaaatatataatatatatatatatatataaattatattaattaaatataaattaaatatttaatatatatataaaaaataataatatatataataatatatata

SEQ ID NO: 164100 - DNA, 201 bp, Homo sapiens
ttgaacccaggtggtggaggttgcagtgagctgagatcgcaccactgcactccagcctgggcaacagagagagactctatctccaaaaaaaaaaaaaaaaaatatataatatatatatatatatataaattatattaattaaatataaattaaatatttaatatatatataaaaaataataatatatataataatatatat

SEQ ID NO: 164101 - DNA, 201 bp, Homo sapiens
cttgaacccaggtggtggaggttgcagtgagctgagatcgcaccactgcactccagcctgggcaacagagagagactctatctccaaaaaaaaaaaaaaaaaatatataatatatatatatatatataaattatattaattaaatataaattaaatatttaatatatatataaaaaataataatatatataataatatata

SEQ ID NO: 164102 - DNA, 201 bp, Homo sapiens
aagagaaaagaatgtaaaataatacatggtatataatacatgtacatataacatgatacagggatagaagtaggattataacctgttaatatggctggctrcctgacttcccatgtgtttcatcaggttttgattgttaaaaaaaagttttaggaatcatgatttaattcatttttaaaagcattaatgtctatgtacttg

SEQ ID NO: 164103 - DNA, 201 bp, Homo sapiens
ccaccaccatgcctggctaatatttgtttttttagtagagatggggtttcaccacgttggcaagattgatctcaaactcctaacctcaggtgatctgcccrccttggcctcccaaaatgctgggattacaggcgtgagccactgtgtgggccccgtatgaattttagatttggcttctccatttctgtaaacaagacagtt

SEQ ID NO: 164104 - DNA, 201 bp, Homo sapiens
gggataagcattcttagaatgggataagcattctcacttcagagcaagtctgaatttctaaaatctgtttgaaatgtgatgctgtactatattttttctcycttttattatgatcttggtattgctaaagaatccgttgccctaaagggagaaaagagagagaatttttttttttttttgaaatagggtctctctctgttg

SEQ ID NO: 164105 - DNA, 201 bp, Homo sapiens
caccatgcctggctaatatttgtttttttagtagagatggggtttcaccacgttggcaagattgatctcaaactcctaacctcaggtgatctgcccacctyggcctcccaaaatgctgggattacaggcgtgagccactgtgtgggccccgtatgaattttagatttggcttctccatttctgtaaacaagacagttggga

SEQ ID NO: 164106 - DNA, 201 bp, Homo sapiens
cgttggcaagattgatctcaaactcctaacctcaggtgatctgcccaccttggcctcccaaaatgctgggattacaggcgtgagccactgtgtgggccccrtatgaattttagatttggcttctccatttctgtaaacaagacagttgggattttgatggggattgtgttgcctctataggttgcttcaggttttattggc

SEQ ID NO: 164107 - DNA, 201 bp, Homo sapiens
aatggcacgatctcagctcactgcaacctctgcctctcgggttcaagcaattctcctgcttcagcctcccgagcagctgggattacaggcgtctgccactrtgcctggctaatttttgtatttttagtagagatggggttttaccatgttagtcaggctggtctcaaactcctgatctcaggtgatccacccgccttggcc

SEQ ID NO: 164108 - DNA, 201 bp, Homo sapiens
gtggcccctatggtttctgatgagaagtctgttgtatctgttgttagtcttactgaggatcccttgttcatgactcttagcttctctcttgctgcttttarcatttgtctttgtctttcaacagtttgattataatttatctcaatgtgtgtatttctttgtgtttatcctgctttgagttcatcgagcttcttggatgtg

SEQ ID NO: 164109 - DNA, 201 bp, Homo sapiens
gaatcgctctgttgaggctgagagacgctacggtgcgtgagcgccagtgttttcctgcagtataattccaccaggtttcgagaacgccgaagcagcatttwaaaaaaagaaaaacaaaacgtgtatctagagttctgcgggtgttgggaaggaatatccgatttttctgcgtaggctgtgctttttgtcttccacagtttt

SEQ ID NO: 164110 - DNA, 201 bp, Homo sapiens
gctattatgaataaatgcttattgaagagttttgaaataaagatgatgaaaagaaggtaaagtatcaagaattgttgcttttgtttttttttttgagacasagtctcactctgttgcccaggctggagtgcagtggcgcgttcttggctcactgcaatctccacctcctgggttcaagtgattctcgtatctcagcctccc

SEQ ID NO: 164111 - DNA, 201 bp, Homo sapiens
gggctttagaatacacaattttacttttaaatccttcctttctaaccttttttaggttactgatgcatcacatcagagattgtttaccagagttgaaaacragaataaatgttctagctgctcagtatcagtctcttctaaatagctacggtgaacccgtggatgataaaagtgctactttactccaacttattaccaaat

SEQ ID NO: 164112 - DNA, 201 bp, Homo sapiens
tgttaatcatactaaactactaccttttagcagaatccaatccttctcgtccatgaacaagctttgttacttctgctgccagtcgtttctgaggaccccgyctttctggctctttgacatgcagctgcatgatatgatcaatctctggaaggggcaggaaagtgaacagcttcaggtacctttgagacaaaaaataaagag

SEQ ID NO: 164113 - DNA, 201 bp, Homo sapiens
cgtatttgaatgtgttcccgttagattatgataccatgtttttgctgtacatttcctatgtttagatacacaaatactattgtgttacagttccctattcrgtacagtaacatgctgtacatgtttgcagcctggagcaataggctatcccatatagcttaggcgtgtcataggctataccatctacgtttgtgtaagtac

SEQ ID NO: 164114 - DNA, 201 bp, Homo sapiens
tggctactatgagaagccaggcggctggagctgtgcaggcagtgactcagggcagcagtggtggtggggaggagcaagaggcagcactgcaagcagatggygctaaaaaaagagaccctatctctgaaaatggaaaaaaaaaccactcttaatttcaccaacctgagataattcctaaaatttggcattgacctaggcatt

SEQ ID NO: 164115 - DNA, 201 bp, Homo sapiens
ggtttcgagaacgccgaagcagcattttaaaaaaagaaaaacaaaacgtgtatctagagttctgcgggtgttgggaaggaatatccgatttttctgcgtargctgtgctttttgtcttccacagttttgtgatcgtgacctaaattgggcatcagtttctctggtcttctcatagctaactcatttttttttgaatgcaga

SEQ ID NO: 164116 - DNA, 201 bp, Homo sapiens
ggtgggctggctgttcccatcactgttggctttcgtgagacgggtgttttatttccctccttgccttgcccagggactgcggagttagttttggaatcgckctgttgaggctgagagacgctacggtgcgtgagcgccagtgttttcctgcagtataattccaccaggtttcgagaacgccgaagcagcattttaaaaaaa

SEQ ID NO: 164117 - DNA, 201 bp, Homo sapiens
tattgtttttgtctatagttaatggtaataatgaggcctactctatttaggcactagttacttacaattcacttagttcaagtcttggctatgccagttastgtgtgacctggggtaagttagtttttgtgagcctcagttccttgctatacaatggggtaataatacctgccacataaaattattgtgagaattaaataa

SEQ ID NO: 164118 - DNA, 201 bp, Homo sapiens
gctggtttgttaatatagtttattgaattaacaaaaaatgtgttaagaaactcattttgctcttgtatatattctgttttcagagcagcggaaagagctcmgtgctagaaagcctggtggggagggacctgcttcccagaggtactggaattgtcacccggagacctctcattctgcaactggtccatgtttcacaagaag

SEQ ID NO: 164119 - DNA, 201 bp, Homo sapiens
cttgggaggttgaggcaggagaatcgcttgaacccgggaggcggaggttgcggtgagccgagatcgtgccattgcactccagcctagccaacaagagcgaractccgtctcaaaaaaaaaaaaaaatagtctctgcactaatttttcctttaaaataattctgtatgctggtttgttaatatagtttattgaattaacaaa

SEQ ID NO: 164120 - DNA, 201 bp, Homo sapiens
ctcagaatattactcagtcctaggagtaattttttcttcttttcctccctttaacactccattggaactaactgagtaaaggcatacaagtttaaaatggkttttgagtgatttaaagataatagtattttgaattcactgacataaatgcttaaaagtagatttaagcatttatttaagcatttaagcatcaagcttttt

SEQ ID NO: 164121 - DNA, 201 bp, Homo sapiens
actgttttgttaccttcaagaatagttttaaatttagtattttggtaggaaattcagagatttcctagatttcagagatggaattgtatttttggacattycctttcctctttaaagatcttgagatctgttcagtactaatagatctaatgcttctttcttatgcttccagttagtttgcacttgttaccctatatatag

SEQ ID NO: 164122 - DNA, 201 bp, Homo sapiens
ccatctcatacattctgtatgtaggagccttgggctggctggctgtgtcactcttagtcctcctggtccttccttttaggcttcggggtgatgagagctgytctcttgttactagcctgggttactgcattatcccttgtgatttcctataagcctcacccacagctttgtaaatagtccttatgtaaataaaccctcttt

SEQ ID NO: 164123 - DNA, 201 bp, Homo sapiens
gcttgaacccgggaggcggaggttgtagtgagccgagatcgagccattgcactccagcctgggcaacagagcaagactccgtcttaaaaaaaaaaaaaaaatgcaaacatacatgtttcgtagaataatgcttaaaatcttggtataatttgaaattttacccccatttcattaagtaacctatttgtaaaagcaatcagt

SEQ ID NO: 164124 - DNA, 201 bp, Homo sapiens
gctggctgtgtcactcttagtcctcctggtccttccttttaggcttcggggtgatgagagctgttctcttgttactagcctgggttactgcattatccctygtgatttcctataagcctcacccacagctttgtaaatagtccttatgtaaataaaccctctttaaattaatctaatttgagtgggccatctgcttcctgc

SEQ ID NO: 164125 - DNA, 201 bp, Homo sapiens
cgcttgaacccgggaggcggaggttgtagtgagccgagatcgagccattgcactccagcctgggcaacagagcaagactccgtcttaaaaaaaaaaaaaaaatgcaaacatacatgtttcgtagaataatgcttaaaatcttggtataatttgaaattttacccccatttcattaagtaacctatttgtaaaagcaatcag

SEQ ID NO: 164126 - DNA, 201 bp, Homo sapiens
tctaatttgagtgggccatctgcttcctgcagaccctgtctgacataactgatgaaattaggacttttgcatttgtagaaaataaatttttaaagtacaarttttgactaagaaaaaaatagagtacagaatatactgtatagaaaaataagtttattgcaaacttaagaaaaatggcaaatttagaaatttttaaaatgt

SEQ ID NO: 164127 - DNA, 201 bp, Homo sapiens
gttttaaaaaattatacacaatgtttaacattatttttaaaaaagcactggtaagtaaggcattaccaaaatgatgacagaggtaatactaagtgggattrtagatgagggttttcctttattaacactaaatagttgtatttaatggatcattttctttcttttctttgcccttttttctttttgcatttaccaggtcgc

SEQ ID NO: 164128 - DNA, 201 bp, Homo sapiens
ggatgatagttttgacaaaattgaacttattttaatttctgtgtctgattttttcatttactgtaggagctgttggtggtgatgacttgaattttttttttaatggggaaaaaaaacctcatgagcatctgctatgactctagaatgttagtcactgaagcaaattagtgtagttgtagatgttgcaagtaatatttttag

SEQ ID NO: 164129 - DNA, 201 bp, Homo sapiens; identical to SEQ ID NO: 30321

SEQ ID NO: 164130 - DNA, 201 bp, Homo sapiens
tcagtaaatctgcctacctactgtttttttccaagcttagtgctgattttgtatatatatttgcttaaaatgacaactcaactaccccaaacacaatatakattatataaatttgagtactagatttcacgtgttttattctagcatagacagttcgttagtttttcatcaaagcttctttatccttagaataaacaattc

SEQ ID NO: 164131 - DNA, 201 bp, Homo sapiens
atataaatttgagtactagatttcacgtgttttattctagcatagacagttcgttagtttttcatcaaagcttctttatccttagaataaacaattctagyatatcataaatcattctaacccagagaaaattagaaaccatgaagcagataaacaatatagttagctagaagagtgtgaactacctgacagcctgataat

SEQ ID NO: 164132 - DNA, 201 bp, Homo sapiens
gatgaaattaggacttttgcatttgtagaaaataaatttttaaagtacaagttttgactaagaaaaaaatagagtacagaatatactgtatagaaaaatamgtttattgcaaacttaagaaaaatggcaaatttagaaatttttaaaatgtataatagaggtttatatagtacttgattatttatcgcattagctgttagt

SEQ ID NO: 164133 - DNA, 201 bp, Homo sapiens
aaattttttttcctttaatgcaggcattacaaggagccagtcaaattattgctgaaatccgggagactcatctttggtgaagagaactatgtaatactgasactttgttgactcaaaacttgctagttactgcctacctgagtagaatcttatttatgaactcctgtgtattgcaatggtatgaatctgctcatgtggaga

SEQ ID NO: 164134 - DNA, 201 bp, Homo sapiens
tgtttttttggcttttaaatagttgaagcaatagaaattgttttagaaacacatttccttggtctgcgataggattgggaaagattctgctcaatcttgcytacgtattctagtatttgtaacaatatttgtaatgtttggagactcagaagcatcaaacaaattacgaggattattttttattgaacataattttgttca

SEQ ID NO: 164135 - DNA, 201 bp, Homo sapiens
aattttttttcctttaatgcaggcattacaaggagccagtcaaattattgctgaaatccgggagactcatctttggtgaagagaactatgtaatactgagwctttgttgactcaaaacttgctagttactgcctacctgagtagaatcttatttatgaactcctgtgtattgcaatggtatgaatctgctcatgtggagac

SEQ ID NO: 164136 - DNA, 201 bp, Homo sapiens; identical to SEQ ID NO: 30319

SEQ ID NO: 164137 - DNA, 201 bp, Homo sapiens; identical to SEQ ID NO: 30320

SEQ ID NO: 164138 - DNA, 201 bp, Homo sapiens; identical to SEQ ID NO: 30310

SEQ ID NO: 164139 - DNA, 201 bp, Homo sapiens
tctgtaacaaagtaatgaaaggcacagctaatccaagcagacttaaccctattcaacaaacagctgaaaaaatactttggttcttcaaggaaaaaattacraaaaaaaaaagtgtttcctttaacagttgttaattttcatagctgtactccaagagctatataaatattccagaagaaccaaattatgtagcagcgaatg

SEQ ID NO: 164140 - DNA, 201 bp, Homo sapiens
gtaagaatgtcagtcagtttggattatgggcccagcaccccagtagccttgttttttttagatggagtctcgctctgtcgccaggctggagtgcagaggcrcgatctcggctcactgtaacctctgcctccctggttcaagcgattctcctgcctcagcctcccaagtagctgggactataggcacgtgccaccacaccca

SEQ ID NO: 164141 - DNA, 201 bp, Homo sapiens
gggaagcagaaggtagaccctaccacaaagaaaagatgcttagttaatggaggttaaatttaaaagtacagtgaaattcaggctaacttctgaaaaatccygttttattcacctcactgtggtaccagtaactatactgagtcaggttactttacagttaactatgtcacctataacacaataatccattaacaatctaat

SEQ ID NO: 164142 - DNA, 201 bp, Homo sapiens
gtgtctaaatttcctcttcttgtaagaatgtcagtcagtttggattatgggcccagcaccccagtagccttgttttttttagatggagtctcgctctgtcrccaggctggagtgcagaggcgcgatctcggctcactgtaacctctgcctccctggttcaagcgattctcctgcctcagcctcccaagtagctgggactat

SEQ ID NO: 164143 - DNA, 201 bp, Homo sapiens
tgaagcttttggatttggatttttcttatgtattcatctgaaggaaacttttaacaaaggtgacaatggtgaaggaaataaggcagaataaacaatctccyatgattattttcatttttcatgttattttacgatttcattacagaagggaaaaattcatttatagaatgttcctgaatgcatttttgcatccttgatttt

SEQ ID NO: 164144 - DNA, 201 bp, Homo sapiens
ttgcaatatagaagatgcacacagaaaaagtaatttaaagaggaaattatcctgcactttttgaatttcaacccattggtatttaaattttgcttgttaawttgcatgttttaacatatcttttaacagttaattcaggacagcagaagagaaactaaaaatgtgagtctcttgcttcagaatggaaatgttggtaccttt

SEQ ID NO: 164145 - DNA, 201 bp, Homo sapiens
cgagaaagagtttaaggtggcaggattttaatagattggttttaatccctggcattagtgatgcttctgtgtaattgccaggatgtgacttggagaaattktattaaaggtatcctaatttataaatagttggtattaaaaactgggaaaaggaaactagtattgagtgtctaattaaaggtgacaagattttaatagatt

SEQ ID NO: 164146 - DNA, 201 bp, Homo sapiens
ggctaaagtgggtgggtcacttgagcccaggagttcgagtccagcctaggcaatatagggggaccctgtctctataaaaactaaaaaaaattagccccgcktggtggcatgcacctgtagtcctagctacttggaaggctgagtcgggaggatggcttgaggatgtgaggttgaggctgcagtgagccgtgattgtgccac

SEQ ID NO: 164147 - DNA, 201 bp, Homo sapiens
ggagttttccccatacatcaagcaaggaattctccaggggattctagctgaatgtcctttaattcaatgctaacactgtttacctggagatagtgtcagckcccacaggttgagggttcagtcccacaagactgcccccaagtcagatgccagttgtaagcacaggttgtagcctgtgtttctgactgacaggctataagt

SEQ ID NO: 164148 - DNA, 201 bp, Homo sapiens
accttcatgtgttcaactctctgaagactccatgaactgtgtccttttgagtttttatggaagcttcattggccattggtgatcagctcaatgtttggccyctctcctctcttctgaggctgttctggtgaccagctcccatcctgaagctatctagggacccccagccaccagtcatctcattagcatgcagagacactc

SEQ ID NO: 164149 - DNA, 201 bp, Homo sapiens
gagaaacggattttagaaattagtatattgatattaagtgctttcatttcttaatagtatcttttctattgagaaggagcggtttccccatcattttccakgaggtacatagtatagggtataagtgctatcagaaggaacttactgttcaaagtattagtggctatccaaacactggaaactatagacaccctgtactcg

SEQ ID NO: 164150 - DNA, 201 bp, Homo sapiens
cagtgtattgtatccttcaggtgtgtgggcagaaaaaaaaaagattaagaagctttgggttaaatgatttcttatttattttaaaatatgataattatggyatgagtcccaacagtgagaggatgtatctgtaagttactccacacttttcaattaacatgaacattttttagtaggcatatatctcaatacttggataat

SEQ ID NO: 164151 - DNA, 201 bp, Homo sapiens
aacattcttaaaaacaggtaaccaaaattcaggaattcctttggggtcttctttttcttcatcgtttttctcatcttcagtcttggccttttctttcaackcctctgaaatctcatcttcttcatctggtttccattcacattcttcctctgtaggttcataaattgtattagtaatctcagattgcttatcaaatagagg

SEQ ID NO: 164152 - DNA, 201 bp, Homo sapiens
catgttggtcaggctggtatccaactcccgacctcaggtgatccacccgtctcggcctcccaaagtgctgggattacaggtgtgaaccaccccgcctggcytaagaatcactttgaaactaagtttcctggatcctgtctccagagattttgattttataagcctgggttgggtgagggaccataggtgattctgatacag

SEQ ID NO: 164153 - DNA, 201 bp, Homo sapiens
aggtgcatgccaccacgcccagctaatttttgtatttttagtagagatggggtttcactgtgttggtcaggctggtctcgaactcctgacctcatgatccwcttgccttggcctcccaaagtgctggaattacagacatgagccactgtgctcggcctaatttttgtatttttagtagagacagcattttacaacgttggc

SEQ ID NO: 164154 - DNA, 201 bp, Homo sapiens
ttactgcacagagtaataaacagtctaatacttcatattgaaataaatgatttttgtctgtagaaccatttatcttttttgcttgtagactttttaaaccygtagcttgtagtagaaataacagttcctagtgttttacactgtgggcctgaagaaaaaaattccatttgtttccttccttgcccccatcctctgcagaag

SEQ ID NO: 164155 - DNA, 201 bp, Homo sapiens
gcccggccagtaatttggattttaatttctaatttgcaaatcaacttttaaaaatttaacattaaaaatactgaaatattcatgtaacacaaaattcaccmttataaagtatacacaactcagcagcgtttagtatgttcacaaagttgtaccaccatagtgtaattccaaaatattttcattacctgaaaaagaaaactc

SEQ ID NO: 164156 - DNA, 201 bp, Homo sapiens
ataaatattacattgtatagatacagcacagtttattcatcaattgatgaatttttgggttgtttctattttttggctattatgaataaataatgctctgygaacattcgtttacaagtttttgtgtgaatgtgtattttttttttttttttgagatggagtctcgctctgtcacacaggctggaatgcagtggcgtgatc

SEQ ID NO: 164157 - DNA, 201 bp, Homo sapiens
cccggtcttgattcccccatctcatacattctgtatgtaggagccttgggctggctggctgtgtcactcttagtcctcctggtccttccttttaggcttcrgggtgatgagagctgttctcttgttactagcctgggttactgcattatcccttgtgatttcctataagcctcacccacagctttgtaaatagtccttatg

SEQ ID NO: 164158 - DNA, 201 bp, Homo sapiens
gtggatcacctgaggtcgggagttcgagaccagcctaatcaacatggagaaaccccgtctctactaaaaatacaaaaaattagccaggcgtggtggcacaygcctgtaatcccagctacttgggaggttgaggcaggagaatcgcttgaacccgggaggcggaggttgcggtgagccgagatcgtgccattgcactccagc

SEQ ID NO: 164159 - DNA, 201 bp, Homo sapiens
tcagaaaagtgcctaaaatagagtaggctgccagtaaacacttggtaattgaatgaatgagtgaatgaatttgtatctagccaatcaacattgaccagttyttaacatgggactgtattaaatcaacttttgatatttgcaagagttacactttgagacttgacacattaccagattcataaataccattgtagtatatta

SEQ ID NO: 164160 - DNA, 201 bp, Homo sapiens
actgtaacctctgcctccctggttcaagcgattctcctgcctcagcctcccaagtagctgggactataggcacgtgccaccacacccagctaatttttgtwtttttagtagagacggggttgggttttcaccatgttggccaggatggtctcaatctcttgacctcgtgatccacccgccttggcctcctgaagtgctggg

SEQ ID NO: 164161 - DNA, 201 bp, Homo sapiens
atttctctacaccctcattagaacacctttttattttgaaataattatagactcacaggaagttgcagggtgatgtacagggaggtcccatgcaccctccactgtgtaccctttcccccatctcccccactgttggacatcttgcataactatagtacaataacaaagtgagaaaattggacatgggtacaatccacagag

SEQ ID NO: 164162 - DNA, 201 bp, Homo sapiens
tacaggcagaagtcacaaagtctcttacctttataagtaaaggaaaatcagggccaggtgtggtagctcatacctgtagtcccaacacttttgggaggccraggtgggggtatcgcttgagcccaggagtttgagaccagcctgggcaatatagtgagaccctgtctacacacacacacaaacacacacacacacacacac

SEQ ID NO: 164163 - DNA, 201 bp, Homo sapiens
gcatctgagaacttcactttggtatctttcacatgcttcagaataggttcatcatgtttctgaagcatatcactgagcaagtcaacattcttaaaaacagrtaaccaaaattcaggaattcctttggggtcttctttttcttcatcgtttttctcatcttcagtcttggccttttctttcaactcctctgaaatctcatct

SEQ ID NO: 164164 - DNA, 201 bp, Homo sapiens
ttcagtagcttctccagtaaactataacactgatcttgggattgtatgctcacgtaaaaagtgaccaattttgaagtctgcagcaaggatagcttcagcakcatcatccagatctccactctcaggaacttcaggaggggcaagaaaattaaagaaagagtcattggaaactgttttagtcacaatacgaattgtcccatg

SEQ ID NO: 164165 - DNA, 201 bp, Homo sapiens
aaacaagacagttgggattttgatggggattgtgttgcctctataggttgcttcaggttttattggcatcttaaccattttaagttagaatttttgatggsgaggttttttcttttagcactttatcttactgcctctggctcctatggtttcttttctcttttctttctttgaaaacaagtttattaaagtaaaggaata

SEQ ID NO: 164166 - DNA, 201 bp, Homo sapiens
tacaagttaagaagtgttttattatgttgcctttttgaattcctaaagataaaaagtagtttccatagtttccaataaatgagtttttcttttttccaggrgtggaagcagaagaatggggtaaatttcttcacaccaaaaataaggtaatcacacatgcatataatgaagaaataatgttgaaaaaaatatattgtatga

SEQ ID NO: 164167 - DNA, 201 bp, Homo sapiens
ttggatttggatttttcttatgtattcatctgaaggaaacttttaacaaaggtgacaatggtgaaggaaataaggcagaataaacaatctcccatgattaytttcatttttcatgttattttacgatttcattacagaagggaaaaattcatttatagaatgttcctgaatgcatttttgcatccttgattttttttcccc

SEQ ID NO: 164168 - DNA, 201 bp, Homo sapiens
caagtgctttggcacctgcctcccaggagccctcccccgctgcttctgctgaggctgatggcaaggtctgttctgattcttaatctaagcctgcatgcctwgttctctggtacaacataatcttctggaaacaatacactgaatagaagaatattaatatgggatactgtgctaaggtcagatcactttagtctaatatat

SEQ ID NO: 164169 - DNA, 201 bp, Homo sapiens
atagcttcacatatgcttcagaagcttaagcaaattaaaaaaacaaatggggactgtgagagtttgagactgttttcaattcttgataaccattttagagraaaattaaataatgtataaattattcagactcatcgctatttcaagattttctgccatttagctcctttccttaattatccagatttaaagttctgaact

SEQ ID NO: 164170 - DNA, 201 bp, Homo sapiens
aaaattagcccttttataaaatgtataattcagtgtcatttagtgcattcataatgacatctctgtctaggtccaaaacaatttcatcacgaaagaaaackactattgagctgtcactccctcttctttcttttccatttaatggctgagtaatattctgttatatgtataaaccacattggtttattcaatcacctattg

SEQ ID NO: 164171 - DNA, 201 bp, Homo sapiens
agtttccaataaatgagtttttcttttttccaggggtggaagcagaagaatggggtaaatttcttcacaccaaaaataaggtaatcacacatgcatataaygaagaaataatgttgaaaaaaatatattgtatgaatacttgataatttagtttctaatcattggcaattacgttattttaaagtaactataactattcct

SEQ ID NO: 164172 - DNA, 201 bp, Homo sapiens
atagtggctgcacctttttttttttttttttttgagacagggtctcactttctcgcccagactggagtgctgtggcgctatcttggcttaccgcaacctcygcctcccaggctcaaggcgttctcctgcttcagcatcctgagtagctgggattacaggtgcccgccactactgcccggctactttttgtatttttagtag

SEQ ID NO: 164173 - DNA, 201 bp, Homo sapiens; identical to SEQ ID NO: 30341

SEQ ID NO: 164174 - DNA, 201 bp, Homo sapiens
agtctggctctgtcgcccaggctggagtgcagtggcacaatctcggctcactgcaagcgccgcctcccaggttcacgccattctcctgcctcagcctcccragtagctgggactacaggcgcccaccaccacacccagctaattttttgtatttttagtagagacggggtttcaccatgttagccaggatagtctctaact

SEQ ID NO: 164175 - DNA, 201 bp, Homo sapiens
taacatagaatgactaggacctcatgtatcagctagaaaaagctattaaaaatgagagattcttttgttctatctggctgccacattttgagtcatttaakaaaatctttttcctaaattttaatttagtagtttcattaattattttggctagtaacactgacttgcctttttaatttaacttggttttccaaagtatca

SEQ ID NO: 164176 - DNA, 201 bp, Homo sapiens
aacatgctgtacatgtttgcagcctggagcaataggctatcccatatagcttaggcgtgtcataggctataccatctacgtttgtgtaagtacactctgtgctgtgcatgtaatgaaatcacctaataatgcatttctcaaagcatatccgtgtcattaagtgacatatcttttgtgtgaataatactagattatgtagat

SEQ ID NO: 164177 - DNA, 201 bp, Homo sapiens
taacatgctgtacatgtttgcagcctggagcaataggctatcccatatagcttaggcgtgtcataggctataccatctacgtttgtgtaagtacactctgtgctgtgcatgtaatgaaatcacctaataatgcatttctcaaagcatatccgtgtcattaagtgacatatcttttgtgtgaataatactagattatgtaga

SEQ ID NO: 164178 - DNA, 201 bp, Homo sapiens
aaatgaaatggtgagctactatagcatagatcattgtaattactattagtaaaagtttaaatttttgcttggctgctttttaataagcattatatggttactttagagtgtaggcataatgttttccagtgtattgggaggaaaaacaagttgagtttcagtctcattttaaaggaaaatttttaataattctggtataaa

SEQ ID NO: 164179 - DNA, 201 bp, Homo sapiens
agttctaagttttattttctcagggtcctcgtcctgctttatttgtgcctgaggtttcatttgagttactggtgaagcggcaaatcaaacgtctagaagakcccagcctccgctgtgtggaactggttcatgaggaaatgcaaaggatcattcagcactgtagcaattacagtacacaggtaacggagagaaatgtaacag

SEQ ID NO: 164180 - DNA, 201 bp, Homo sapiens
gaaagagctcagtgctagaaagcctggtggggagggacctgcttcccagaggtactggaattgtcacccggagacctctcattctgcaactggtccatgtktcacaagaagataaacggaaaacaacaggagaagaaaatggtaaatttcagatttgagataattattttacagctcttcatttttgatctattcttaaaa

SEQ ID NO: 164181 - DNA, 201 bp, Homo sapiens
gaagaactgaaattacatatataataagagttctaagttttattttctcagggtcctcgtcctgctttatttgtgcctgaggtttcatttgagttactggkgaagcggcaaatcaaacgtctagaagagcccagcctccgctgtgtggaactggttcatgaggaaatgcaaaggatcattcagcactgtagcaattacagt

SEQ ID NO: 164182 - DNA, 201 bp, Homo sapiens
tacaagcttctaaattgaaataggagggaggaaaaaaaaaagctttcttaaacgggaaagagaatcagactggcattagattccaatctgtcacagtaaaygttactgcatggagaaatgtttaatagagttcttagggaaattgtgattataaaattctgtattcattcatactataaccattttctctttttttctttt

SEQ ID NO: 164183 - DNA, 201 bp, Homo sapiens
tagaataagatttacatttaagcaaaattaattaaaatctaagcagagagatcaagttaagcacaggctccaggaagtcctgctgggatctcaggaatagmgacaacatgttaaaagttttagtttgaatgtctggaatttgtttgtttgtttgtttgttttggtgcattctagagtctccaagagtcagtcaccatgagt

SEQ ID NO: 164184 - DNA, 201 bp, Homo sapiens
tagatggctgccttcttgctgtgtccgtggtgtctctgtgtctaaatttcctcttcttgtaagaatgtcagtcagtttggattatgggcccagcaccccartagccttgttttttttagatggagtctcgctctgtcgccaggctggagtgcagaggcgcgatctcggctcactgtaacctctgcctccctggttcaagcg

SEQ ID NO: 164185 - DNA, 201 bp, Homo sapiens
gcgtaggctgtgctttttgtcttccacagttttgtgatcgtgacctaaattgggcatcagtttctctggtcttctcatagctaactcatttttttttgaaygcagaaatgttggcaaaataactgttatttctagagtgacagaggagaagtataattttccttttctctgctacttcgattagagttcagagaaacggat

SEQ ID NO: 164186 - DNA, 201 bp, Homo sapiens
agtttattttctcacagttctggaggctagaagtccaagatcaaagtgtcagcaggtttggtttcttttgaggcctttttccttggctcgtagatggctgycttcttgctgtgtccgtggtgtctctgtgtctaaatttcctcttcttgtaagaatgtcagtcagtttggattatgggcccagcaccccagtagccttgtt

SEQ ID NO: 164187 - DNA, 201 bp, Homo sapiens
agaggcgagggtttccttatattggtcaggctggtctcgaactcctgacctcaaatgatccacccacctcggcctcccaaagtgctgggattacaggcgtragctgctgcgcccagccgtggctgcaccatttcacatcccctccagggttcaggtttctgcacatccttatcaacacttgttgttatcttttttttttaa

SEQ ID NO: 164188 - DNA, 201 bp, Homo sapiens
gcaacaaccctatttccaaataatgttatagtctgagttactggggattagaatttcaacatatgaattttgagggaatacacagcaatccataaaaatgyatttgtatcattttaagccattgcatttgtagtaacctgttaacactgtgatagattcctaaagcaattgtaataagaaagtgaaataccagtaagagta

SEQ ID NO: 164189 - DNA, 201 bp, Homo sapiens
agagctaaaaacaaatccgtggagctttggaatctgagagagaataccatgatccccagttgctgtgagaaagcagtggccacggtgggcctggcagggayctcacttggtcacatgttgcttctgggcatcggaggaagttctacttcaggtcccacttctgacaccatctgttaaaagaaaaaccttatgcaaatttaa

SEQ ID NO: 164190 - DNA, 201 bp, Homo sapiens
atactcacaacctgtatgtaaattcttcacttttagaatctgctttttattcctgcctttgaaaattgtttagtactatgatagattattttacaattatwaatattcaactgaagaaatctttaccattatattatcaaaatctaacacttacagaaataaagacattcagttgttcctcattatatgccatacaaaatc

SEQ ID NO: 164191 - DNA, 201 bp, Homo sapiens
gctcatatatggaaatatcctatttgaaagagctgcaagaaacattagtgagaagtgaggacatattcagtaagtggtgcggtaccaagtggctacccttkgattaaaaatgagtatggattctgatctcatatcatatatgaaaatcaattccagatagatataggaattaaatctgagaggcaaaattttaacttcaca

SEQ ID NO: 164192 - DNA, 201 bp, Homo sapiens
acttatatttaactgacaattttgaaaccatattttgccaacaatttaaaaactagttttatttaccaaattttatcacatacacttaacatatatagtasacatatgaacacagaagcagatcttctagttttcataaagctagcttataaataatttttcctttctctctttagactatccctctttcaatcacatgct

SEQ ID NO: 164193 - DNA, 201 bp, Homo sapiens
tagaggggttccaaggaaggccgaggagcgctggatgaaagaagactgcactcactgcatttgtgaggtttgtgctgcgagttttccagtccaactccccrtttcacttctagccagccagttgaagcatacttgaaaaattcaaaaggagaaaaaatatattttatgtcaatagattctaggcatatttttaagatcaag

SEQ ID NO: 164194 - DNA, 201 bp, Homo sapiens
acactgcacgctctgagggcagaagctctcggccagaaatctgaacatgaagccctttcagaggtgagctgctctgagtcctcagttgggcagggctgggsgtggttcccccaggcctgcagcctttaggaggattgtgtgctgcatttttccccagggttcccctgtcctctcaagcacactgtggcctctatattccta

SEQ ID NO: 164195 - DNA, 201 bp, Homo sapiens
gaacattataattcatcaaggtctttattaaagtgtgatgcccagaagtaggcatagctttaaaggtatgttgtggatattgacagaattgtccaatctgwtatatttcttacctactcaaaaacaaacctacaagccctccattaggaaaaaaataaaaatcatgtggttaatctccaaaaaaagtcagggatcctttct

SEQ ID NO: 164196 - DNA, 201 bp, Homo sapiens
tacccattgttagctcccactcataagtgagaacatgtgctatttgcttttatgtttctgagttatttcacttaggataatggcctcaagttccatccacrttgctgaaaaagacatgatttcactctttttatggctgagtattattccgttgtattagtccatttccacactgttatagaggtactacctgagattgga

SEQ ID NO: 164197 - DNA, 201 bp, Homo sapiens
tagccattttctttcttggagtcttgagacataggaatgctttttagttgtatacttctttgtaccattgtactcaataggtaatcttcaatactcactcycctcccactctcctacctttcggagtctccagcatgttattccactctgtctatccatgggtacccattgttagctcccactcataagtgagaacatgtg

SEQ ID NO: 164198 - DNA, 201 bp, Homo sapiens
aatttgctcaaactcagagagctaaaaacaaatccgtggagctttggaatctgagagagaataccatgatccccagttgctgtgagaaagcagtggccacrgtgggcctggcagggacctcacttggtcacatgttgcttctgggcatcggaggaagttctacttcaggtcccacttctgacaccatctgttaaaagaaaa

SEQ ID NO: 164199 - DNA, 201 bp, Homo sapiens
agtgtagaagactttatatttgcttaatttttttctcctgtctgttcttctggttggaaatattctattgatttttcttgctagttcacagactttctacygtcatcttcaatctcctcttatatatatcaagtgaaattttcattttgattattgtactagttctagaatttacatttttatgattcttaattttctttc

SEQ ID NO: 164200 - DNA, 201 bp, Homo sapiens
aaaggtcatggaaacagctactgaaaggagctcaccaggaagccatagcacatctcagtcatttgtacaggatccccaagcccagccctcctttatgcatytgctgacaactgcacttaggatagtatcggcgtctccttccaaatcttatatcagtgcctctcattggtagactctaacccaaaaccacaaagggaaaga

SEQ ID NO: 164201 - DNA, 201 bp, Homo sapiens
ctcacttggtcacatgttgcttctgggcatcggaggaagttctacttcaggtcccacttctgacaccatctgttaaaagaaaaaccttatgcaaatttaaytgagcaaagaatgatttgtgaattaagaagactcctgagccagagtaggctcagagactccagcacagccatgtggtggaagaagatttacggacagaaa

SEQ ID NO: 164202 - DNA, 201 bp, Homo sapiens
ttggtcacatgttgcttctgggcatcggaggaagttctacttcaggtcccacttctgacaccatctgttaaaagaaaaaccttatgcaaatttaattgagyaaagaatgatttgtgaattaagaagactcctgagccagagtaggctcagagactccagcacagccatgtggtggaagaagatttacggacagaaaaagag

SEQ ID NO: 164203 - DNA, 201 bp, Homo sapiens
tacatgcatatttgtatacatgtatgggtatgtttatatgtgtacacaaaagtgtatacgtgaatggttgtatacatgcatgtataggtatatacgtgtcygggatacacatgagtaagtgtacacatgtataggtgtgtgcatatatataggtggaaaatgcttgtctttactactcattgcttttttttttttttttgc

SEQ ID NO: 164204 - DNA, 201 bp, Homo sapiens
acataggagaaaaccagtatacttataacttagtccattaatacagcactctggaaggattaatactggtaaggataatgagactatattctgattcaaayaatgggatattctggccaaagattatgttgcttgttgtccatgaggaggggtttttgtttttctgggtacttgagaaaatgctattccattgacagtgtc

SEQ ID NO: 164205 - DNA, 201 bp, Homo sapiens
atattctggccaaagattatgttgcttgttgtccatgaggaggggtttttgtttttctgggtacttgagaaaatgctattccattgacagtgtccaaattrtgtcaaaacaacttacaagttgactcagagcttatataaacagtagggtggtttgggggataattatcagatgaatcagctgcttgattggagtttttgt

SEQ ID NO: 164206 - DNA, 201 bp, Homo sapiens
ggagcaggagagcccctgtttcctggccggggaccaccgggccaacgagcatctggctctggccgccatgcacaccctgtggttccgggaacacaacaggrtggccacggagctgtccgccctgaacccccactgggagggaaacacggtttaccaggaagccaggaagatcgtgggcgcggagctgcagcacatcaccta

SEQ ID NO: 164207 - DNA, 201 bp, Homo sapiens
agatataagtggaattgatgaataaatctaatagctggcttaaaaaataaaagaaggagaagtaataactataagaaattatatattcatctaatatctartatgtattatataggtataatatatatataatacatagtaatatacacaataacataataataacatgctttttccaataatgacaaagagagaaaaatg

SEQ ID NO: 164208 - DNA, 201 bp, Homo sapiens
tattctatcacataagaaagaaaaatttttctatatcaggattaggtaattcattagcagggcttcaccaagttgcttaatttaagaaaatggtttcttartactagaactttattttaccataaaataagtgcctcttggtattttcccatcagatatgttcctcttagtattttcccgttagatatgtgccttttagta

SEQ ID NO: 164209 - DNA, 201 bp, Homo sapiens
tgtatctttttttttttgatacaagctcttgcattgagcttcgcctttctctggtccctctctgattagcttaataaataacctcctgaattctttttctsgtaagtcagggatttcttcttggtttggatcctttgctggtgaactagtgtgatttttgggatcattgatgagccttgtgttgtcatattaccagggttg

SEQ ID NO: 164210 - DNA, 201 bp, Homo sapiens
tttttgctatttttaatagaacaccataaggacatctcccactctccttgggtctgttaatacctaatatcttgtgtgaaaaacttgttgaaatcaaggtragaacattacagtaggaaaaagggcaaataagtagccctgaaatgatacaaaacagaatgagtgttcagtgatatagatgattaatcaaactctactgat

SEQ ID NO: 164211 - DNA, 201 bp, Homo sapiens
tagcattcttagtacttatatctaaatttatcaagatggagtgtttttgcctgtttaattgtctgtctcttccattccactgttaatttcttaatagttgygactatttcacaggggtatcttcagagcctgatacaaagtctgtgtttaaaaatagccagtttctttgtgttggaacatgaaaagttagctctagatctc

SEQ ID NO: 164212 - DNA, 201 bp, Homo sapiens
ccggtgctgagctcgaattctcccagggcctcagctgcctccctgcggggcaggactcggacctgcagcccaccatgcccgagcctcccccaacccttgcygtgggctcctgtgcagcccgagcctccctgacgatcaccgtcccctgctctggggcacccagtcccatcgaccgcccaagggctgaggagtgccggcgca

SEQ ID NO: 164213 - DNA, 201 bp, Homo sapiens
catgtggctaagagccaagtccatccaacatggcggttcctgctcccttttccttgtcaccacttgtgcgggtgtcatggccgctgccaggtagaagctgmatttgcggctgggcgcgatggctcacacctgtaatcccagcactttgggaggccgaggtgggcggatcacctgaggtcaggagctcgagaacagcttggc

SEQ ID NO: 164214 - DNA, 201 bp, Homo sapiens
ttaaactttttatttgccatttgtaaaaagtctcttttaaaaaacagtaaagatattaaaatctttttagaagcttttgcctatcaataggcatccctagktaagactaatttaagaattctcattttctttttcttttcttttcttttttttttttttttttttttttttgagatggaatctcactctgttgcccaggct

SEQ ID NO: 164215 - DNA, 201 bp, Homo sapiens
ttgagctagacacagggtgctgattggtgcatttacaaaccttgagctagacacagagtgctgattggtgtatttacaatcccttagctagacataaaggktctccaagtccccaccagattagctagatacagagtgctgattggtgcatttacagaccttgagctagacacagagtgctgattggtgtatttacaatcc

SEQ ID NO: 164216 - DNA, 201 bp, Homo sapiens
gttgtggagataacatttttctgatttttatttattatggagagggcctcatggaagggaactgtgggtggcctccaggtggccttcagtaacacaaccaygaggaagtgagttctgctaacacagattctgccccagatgacatgagaatgtagcccaactaacagattggagcctcatgagactgagcaaaggacctgc

SEQ ID NO: 164217 - DNA, 201 bp, Homo sapiens
atttttttttatggtgggaattatcttcctgattcatgagagtaagtcgagggcagtgtgcagtggatggttgttgagatgaccacacactaatgtaaccytgaggagtcacgccctcatgtcatcccttttcttcagtgagagcagaacctgtgacctgcttctaatcagcagaatacagcaaaggtgatgaaatgtccc

SEQ ID NO: 164218 - DNA, 201 bp, Homo sapiens
ttctctgtagatctccccaacaaaggaggggagagaaatgtacatttctgaaatactgatctgtttctggtacccatgctttaacacatatttttttttttccatttgcctgaaatgccttttccctgcttgttctcctgaaagacatggtcatctctcacagctcaaatgcttttttccatatatcatatattagtctgc

SEQ ID NO: 164219 - DNA, 201 bp, Homo sapiens
aaaaggaaaacattttgaaagcagcaaaagagaaacattaccctgccatttacatgctgaatggtgaatgcttgaatgctttccccataaaactgcaaggtattgcaaacaaggcaaggatgtccattctcaccactcttattcaacctaatgctggaagttcttgccagtgcaataagtcaagaaaatgaaaaggcctat

SEQ ID NO: 164220 - DNA, 201 bp, Homo sapiens
gttgtatacatgcatgtataggtatatacgtgtccgggatacacatgagtaagtgtacacatgtataggtgtgtgcatatatataggtggaaaatgcttgyctttactactcattgcttttttttttttttttgcttttctcttttcctaaagtggcctatcaagtaatgctttcaaattgagtacttgtgtaaagtattc

SEQ ID NO: 164221 - DNA, 201 bp, Homo sapiens
acttcttttcctttttgtattaatttacaagtgtggttttaggactttgtttttaaatcacttcagtccactgggtggaggcccttgtctctgcctctaaratgtatcttgagccccgcatcctcacatggccaagtggagggaagacaaaaggagcaaatgtcgtgtgaagcctcttttataattcattaataactttaa

SEQ ID NO: 164222 - DNA, 201 bp, Homo sapiens
  misc_feature (1)...(201): n = A,T,C or G
aaaattaggagacaggtaatgttattaccaaataacaattatagaaagtgaaacagttaagattaaataggttatgacatacgtaaggaacagattgatgntcagtgtggctggagattagctaatcaaaattgtcaaaacaatgtacaaggagcctggtgaggcagaaagtttctagatgagaagacctaataagctcat

SEQ ID NO: 164223 - DNA, 201 bp, Homo sapiens
ccccgcatcctcacatggccaagtggagggaagacaaaaggagcaaatgtcgtgtgaagcctcttttataattcattaataactttaatgaggacttcacyctcattgagaggtgacggcatgctggcagccctcgcagcaatccctcgctctgggcacctcctcggcctcggtacccactcaggccgctgttgaggagcc

SEQ ID NO: 164224 - DNA, 201 bp, Homo sapiens
tgaattttttattgtttttttctttaagcactctatttcattgaatatttctcctttcacttcttgtatctttttttttttgatacaagctcttgcattgrgcttcgcctttctctggtccctctctgattagcttaataaataacctcctgaattctttttctcgtaagtcagggatttcttcttggtttggatcctttg

SEQ ID NO: 164225 - DNA, 201 bp, Homo sapiens
tttcttaaaattaggagacaggtaatgttattaccaaataacaattatagaaagtgaaacagttaagattaaataggttatgacatacgtaaggaacagaytgatgttcagtgtggctggagattagctaatcaaaattgtcaaaacaatgtacaaggagcctggtgaggcagaaagtttctagatgagaagacctaataa

SEQ ID NO: 164226 - DNA, 201 bp, Homo sapiens
ttcatattttcttattcttttttctttgtctttgttggattgggttagttcaaagaccttgtcttcgaggcctgaatttctttcttctacttgttcaattytattgctgagactttccagagcatttcacatttctaaaagtgtgtccaaagtttcctgaattttttattgtttttttctttaagcactctatttcattga

SEQ ID NO: 164227 - DNA, 201 bp, Homo sapiens
ctaacccaaaaccacaaagggaaagagatccaggaaagatggtacatgacgccagaaaaacactttgtggtcacaaagacagaattctgttctgaatgccrattacataaaacaaataaacaaactgatataaacagagatatggagatcactatgtcggccactataatttgttaatctaaaattaattaggtctggaaa

SEQ ID NO: 164228 - DNA, 201 bp, Homo sapiens
catcttacttgcataggattcctggactgtggtctttcccattctttgccagtgttcctttcctgatttctagtttcttatattgcaattggatggatatrtgcgataggtgccagtctggattttttttcccctgcttaaataggggtctctaatgcttttttaatgggattccgtaagatcttttgttcagaattagag

SEQ ID NO: 164229 - DNA, 201 bp, Homo sapiens
taacataatcccagacttattggaggctttgttcatattttcttattcttttttctttgtctttgttggattgggttagttcaaagaccttgtcttcgagscctgaatttctttcttctacttgttcaattttattgctgagactttccagagcatttcacatttctaaaagtgtgtccaaagtttcctgaattttttatt

SEQ ID NO: 164230 - DNA, 201 bp, Homo sapiens
ggacatcacagagtccggaaaccctatttcatcctcgtgagttaatgtgtatcagggaagagatgttgtaacagcaaagaaaagtcctcagagctgggctrgagaaggtgggcccaaacaatttaaacattaactcatatatcactcaacaaactattttttcataaatttaatttatggatttacagacacaggtagatt

SEQ ID NO: 164231 - DNA, 201 bp, Homo sapiens
caattacattgcaacagtgatctcaggtttgtctttgacagtttttgctatttttaatagaacaccataaggacatctcccactctccttgggtctgttartacctaatatcttgtgtgaaaaacttgttgaaatcaaggtaagaacattacagtaggaaaaagggcaaataagtagccctgaaatgatacaaaacagaat

SEQ ID NO: 164232 - DNA, 201 bp, Homo sapiens
gcagagcagagacttctaggcctatgtggccacaggaccagcgctatgtaccccagggcatttttgagaataaaagagggcactatgaatgctagttagaktgaacatccttcaggtcaagatgccactttaacacagggtttggcaaaccacagcatgcaggctggccgttgttcttatgaatagtttgttacatagtca

SEQ ID NO: 164233 - DNA, 201 bp, Homo sapiens
cttcaatatagaacagaaaatgatttactctcatttattttagaaattaaaaacttacacctaaggcaggtgggatgtttcctaagacaagataagtgacrtactaagacactataccactcgattaaataaaacttccttcaaataaaacaattgcacaaagagtcaacagatgtatattttctactgggatttattgaa

SEQ ID NO: 164234 - DNA, 201 bp, Homo sapiens
tcttatctgccatttaattttaattttgaattccactcataccattttccttttaagatcacaaagaacaccaatcacaatgccttgtacatgccaaatgwccaaagaagatttgatgatattttaaaattctcacacgacttttatttttcagcattttatttgcttcttgttataaataggcaacaagataaaatatat

SEQ ID NO: 164235 - DNA, 201 bp, Homo sapiens
cccagcattttactggaagtcattctgggaatgctgtgatttgcacaggaactgccatcagtagtaccagagaatgtggaaacatggcagaggcgaggcartccaggagttctgtgctgcttctgtgtgtactcttgcctcaggtagatggatgtctttggtacaagatacataggagaaaaccagtatacttataactta

SEQ ID NO: 164236 - DNA, 201 bp, Homo sapiens
ttttttgaaagtttcagtaaactcaaagaaacatatcttaaattcaacccaaggtttccttatatccttttattatcaacaagactgagctattttgcatsaggttaaaggttagatttttgtcactcatagtatccttatcttattttagttcttgccatgaatttataatagagaaagcagcttccctacctggctact

SEQ ID NO: 164237 - DNA, 201 bp, Homo sapiens
cttgagttatttttcccatttgtttacttttctgtgctatttctgttacagagatgtttgttaacatagagctttatatatagttttctaaaatgcatacgtttttaattgtagaagaatttatttttacaaaaatgtgatgtccttaagatttttgaggaaattagatatctagagtcccgagatagcttttaataaaaa

SEQ ID NO: 164238 - DNA, 201 bp, Homo sapiens
gggctgggctatgacatcagcctcccgcaggctaaagcaggaagacaacccacttattcagttcattcttggctttctgagaagtggagacacactgcacrctctgagggcagaagctctcggccagaaatctgaacatgaagccctttcagaggtgagctgctctgagtcctcagttgggcagggctgggcgtggttccc

SEQ ID NO: 164239 - DNA, 201 bp, Homo sapiens
tgttgctcaatgagtaaagagttttacttatgcaagacaaattagttctagagattcgctgcacaacctagtacccatagttaataaatggtactgtatastttcaaatagattgagaagatacatctcatattaagtatcatcatgaaaataaacaaacaaaaaccaaaacaaaccacatgcacacgtgaaaaaaaataa

SEQ ID NO: 164240 - DNA, 201 bp, Homo sapiens
ttcagttcattcttggctttctgagaagtggagacacactgcacgctctgagggcagaagctctcggccagaaatctgaacatgaagccctttcagaggtragctgctctgagtcctcagttgggcagggctgggcgtggttcccccaggcctgcagcctttaggaggattgtgtgctgcatttttccccagggttcccct

SEQ ID NO: 164241 - DNA, 201 bp, Homo sapiens
cttggtctcactgacttcaagaatgaagtcgcagaccctcgccgtgagtgttacagttcttaaaggtgatgtgtccagagtttgttccttctgatgttcgracatgttcggagtttcttccttctggtgggttcatagtcttgctggcttcaggagtgaagctgcagaccttcgcagtgagtgttacagctcttaaggccg

SEQ ID NO: 164242 - DNA, 201 bp, Homo sapiens
gctaattggtgtatttacaatcccttagctagacataaaggttctccaagtccccactagactcaggagcccagctggcttcacccagtggataccgcacrgggctgcaggtggagctgcctgccagtcccctgctctgctcctgcactcctcagcccttgggcagttgatgggacctggtgctgtggagcaggagcaggc

SEQ ID NO: 164243 - DNA, 201 bp, Homo sapiens
gtctatagacctctataaaaaacaaacaaaaaacccaaaatgaatgaatgaatgagttggtgtgttcaataactaggaatgaagaacattcttccagaacrttctgaaagaaggttgaggcaaagagtgaagagctgtaaattccagggtgaggaaatgaaatatattttgtgttcctggagctaatccaggcaaggtaat

SEQ ID NO: 164244 - DNA, 201 bp, Homo sapiens
tttaccagcataaaagataaagcaaaaattttcaaattttctttgagatttaatattttatatcacttaacatactttacagaacatttcacattaaattmctaggttcttttctttccttagctaccttaggtacggattttctttttttttttttttattctttttttgagatggagtttcactcttatcaccactgga

SEQ ID NO: 164245 - DNA, 201 bp, Homo sapiens
taaatacctttgattagacactgaagatttacagaagagagcattatgaaagtaaaatgtccaaccatttgcattaatattatccctaacaatacttgtayatttaaactgttttaacacagtactgtatagaagctagcatgtggtcagtactgattcatggtgcctctagctcacagtgcctcagaggacatggagtta

SEQ ID NO: 164246 - DNA, 201 bp, Homo sapiens
tgcacaccaagacacatcatagtcacacttttgacaacaaaataaaaaggaaaacattttgaaagcagcaaaagagaaacattaccctgccatttacatgytgaatggtgaatgcttgaatgctttccccataaaactgcaaggtattgcaaacaaggcaaggatgtccattctcaccactcttattcaacctaatgctgg

SEQ ID NO: 164247 - DNA, 201 bp, Homo sapiens
agtactgattcatggtgcctctagctcacagtgcctcagaggacatggagttatccagtgactaaactactgctgttggtaacttttgttatttttctttktttcccttttttaaattccctgattaatgtaaactctatactatgtctctgatttatgacttgttttacaagctcatagaatgtactgtttctggcaagc

SEQ ID NO: 164248 - DNA, 201 bp, Homo sapiens
acaaaaacaagatgagcagagcctcagaagcctgtgggattataataaaacatccaacatttgtgtcattcaggtcttggatagaaagaagagagaagggraggacaattccaaagaaatgcacaccaagacacatcatagtcacacttttgacaacaaaataaaaaggaaaacattttgaaagcagcaaaagagaaacat

SEQ ID NO: 164249 - DNA, 201 bp, Homo sapiens
accagaaggaagaaactctgaacacgtccgaacatcagaaggaacaaactccggacacaccacctttaagacctgtaacactcaccgtgagggtccgcaasttcattcttgaagtcagtgagaccgagacctcaccaattccgaacacatcatgacctaatcaccacctaaggccccgcttattaataccataacatcgga

SEQ ID NO: 164250 - DNA, 201 bp, Homo sapiens
agttttatgacatcattttctgcagcattggaaatgccctgtttgtattattattatttattattgttactattttaaacagatgttcttttgtcatctcygtctcttgggtcatgttttcactgagaaagtggctcttctctctgataactattcgggaccctttcatggacagtgacttttttttatcttggctcaagt

SEQ ID NO: 164251 - DNA, 201 bp, Homo sapiens
ttttttttatcttggctcaagttgtcaagtttatctccatggcagaaacctagcagaaggagacaggttcactgggctgggctatgacatcagcctcccgyaggctaaagcaggaagacaacccacttattcagttcattcttggctttctgagaagtggagacacactgcacgctctgagggcagaagctctcggccaga

SEQ ID NO: 164252 - DNA, 201 bp, Homo sapiens
gaggtgggtgggggctgggtgtggttccttggcatctactcctcagagttcactgctgtcagatccacagaccacagcatttgccagaaggatttgtgacrtgtacaaatatcctgcctccttcagtaccaagagctcaggaaatctttttttcatttttttcttggtcaaaagtgttttattattttttaaagagcttat

SEQ ID NO: 164253 - DNA, 201 bp, Homo sapiens
gcctggagactgcacttaattaatttatgtgacttttaagggcctaattttctttgctgcccactcatcccacctcagttcccactaacatgttctctgtrgatctccccaacaaaggaggggagagaaatgtacatttctgaaatactgatctgtttctggtacccatgctttaacacatatttttttttttccatttgc

SEQ ID NO: 164254 - DNA, 201 bp, Homo sapiens
gtgtcaatttctggatcgtgggatgcccagctatctggttaaacaatatttctggatgtttctgtgagagtatttctgaagagattagcattagaattggkggactgagaaaagcaggtgcccttccccagtgtaggggtgcattcttcaatttgttcagggcctgactggaacaaaaaagtgaaggaagcctccagcaac

SEQ ID NO: 164255 - DNA, 201 bp, Homo sapiens
ctcactgctcacctaaagtcaggggtcaagtcctgctagtttattagtgtattagctggtacatatcaggtactgaatatatctattgagtaatgaatggrtggatgccactgcccaagtgtaggcactcatgctaaattatcttccaagaaccaaccctcctgtcctacttcaatacaaaagcagtgaaaagaatttaca

SEQ ID NO: 164256 - DNA, 201 bp, Homo sapiens
cagccctagcaaactaagataccgtttttgcagaaatgaaacagcctgtcgaaaattcatatggaattataagggatgctgaatagccacattttttttttaatattgccctgtagttcttagattttatattagttttccattctcagttttttctttgcattttagtttgggaagttactattgacatatcttcaggtc

SEQ ID NO: 164257 - DNA, 201 bp, Homo sapiens
catctggttattgtgaagccttgtcattcaagcctgcattgtaatatttgtcttatcatcctctccattctcactgctcacctaaagtcaggggtcaagtyctgctagtttattagtgtattagctggtacatatcaggtactgaatatatctattgagtaatgaatgggtggatgccactgcccaagtgtaggcactcat

SEQ ID NO: 164258 - DNA, 201 bp, Homo sapiens
ctgggtcctgcaggagcagtctgcttcctgcagagggtctgtggatcctctcgggattgctggtttgttcttgcagttgatctggagttaagtttcacaaygcaagcctccgcaatgctgcagtatccggatctgcaatctagtcctgcctcctgtctgctatcatctatcggaagtccttatccattgtattctgaaagc

SEQ ID NO: 164259 - DNA, 201 bp, Homo sapiens
ttagcttatttaaatttgaaaaagctttactgtcctaagtgcctaaagtttagaatagatatgcattttcccagtgtttttggacataaaagttttctatrtgtcctagtctgctaggacatattcattaatatctttagagatttttttgtgattttcatacttcaaacccatgaccccactcaagaatggattatttgg

SEQ ID NO: 164260 - DNA, 201 bp, Homo sapiens
tcttcctaaggaacaccgattattcttaggtttggtcatataacataatcccagacttattggaggctttgttcatattttcttattcttttttctttgtytttgttggattgggttagttcaaagaccttgtcttcgaggcctgaatttctttcttctacttgttcaattttattgctgagactttccagagcatttcac

SEQ ID NO: 164261 - DNA, 201 bp, Homo sapiens
aaaaatgttaatgaggtcttcacagatattacaaaaatgtgtgcatgcatgtactcgaggtactacaaataggagaggttttaataaaagaagttagagaktctcacaactgttggagcagtgagaacaaaggtcatggaaacagctactgaaaggagctcaccaggaagccatagcacatctcagtcatttgtacaggat

SEQ ID NO: 164262 - DNA, 201 bp, Homo sapiens
ctcctgacctcaggtcatctgcccgcttcgacctcccaaagtgctgggactacaggtgtgagccactgtgcctggccatccaatgtgctttttttttttttgagatggagtctcgctctgttgcccaggctggagtgcagtggtgaaatcccagctcgctgcaacctctgcttcccaggtttaagcacagcctcagcctcc

SEQ ID NO: 164263 - DNA, 201 bp, Homo sapiens
gctgtggtctgtatcagtgccttcacttgaccagaaatagccaccattgaaatcacttgtccaatctgaatcttttttcccttttttttttttttttttttgagatggagtctcgctctgtcacccaggctggagtgcaatgacatgatcttggctcactgcaacctacctctgcctcccgggctcaagtaattctcctgc

SEQ ID NO: 164264 - DNA, 201 bp, Homo sapiens
acaaaaaattcttaatttctttcctctttctactcttgggtttcaggagatcaaaccgcatgattccttcccaaaaacttgcattctctgtctttgtcttyctttgcccgaaaaggttgcccctttcctgtgggcttggcttttccttcttctgcatgttcagctgtcattcctctgctaaatatttatcaactttcatat

SEQ ID NO: 164265 - DNA, 201 bp, Homo sapiens
ttttccttcttctgcatgttcagctgtcattcctctgctaaatatttatcaactttcatattcatgtcagcctttaaagaccttgcatcgacaccaccccstcacctttcctgagtgtttagtaggcccaggagcaactttaattgctgtaaaacagtgattgttgaccatttcatgtaagaccatttcccaaatctagta

SEQ ID NO: 164266 - DNA, 201 bp, Homo sapiens
gcctgagcaaataaaaagtgacaaggccatattaaaaataaggtggtcagtcaattatcctccaaggtccatttcttagaaggcgtgcagctctatttgtytagcaaaaacagagtgcaaaataatttaacgccttaaagtatgacattaatttaacatcagttgtgtagacagtggtgagtcttagtaacgcgttttaga

SEQ ID NO: 164267 - DNA, 201 bp, Homo sapiens
catggtggaaggcaaaggggaagcaagcaccttcttcacatggcagcaggagagagagagcaaatgggggaggaactgccacacacctttaaaccatcagwtctcatgagaattcactaccccgagaacagcatgggggaaatctgcccccaagatccaatcacctcccactaggtccctcccccagcatttggaattaca

SEQ ID NO: 164268 - DNA, 201 bp, Homo sapiens
agaagtggagacacactgcacgctctgagggcagaagctctcggccagaaatctgaacatgaagccctttcagaggtgagctgctctgagtcctcagttgrgcagggctgggcgtggttcccccaggcctgcagcctttaggaggattgtgtgctgcatttttccccagggttcccctgtcctctcaagcacactgtggcc

SEQ ID NO: 164269 - DNA, 201 bp, Homo sapiens
ttcccctgcttaaataggggtctctaatgcttttttaatgggattccgtaagatcttttgttcagaattagagcagaatatgcttagatgtaactttcctyatcaatccagtgtcaaacttagggaacaatttcaattcatagatttgcatatttcttcaacaaggggaaatttatacatatatttccttatttactgtat

SEQ ID NO: 164270 - DNA, 201 bp, Homo sapiens
gtgtcaaacttagggaacaatttcaattcatagatttgcatatttcttcaacaaggggaaatttatacatatatttccttatttactgtatatatctgtaygtgtcctccaaatatttttttccttctgaaacgttctttatttgagcattaggtctaccctccaaatctcttttcttttccttcatattactctctttta

SEQ ID NO: 164271 - DNA, 201 bp, Homo sapiens
ggacacaaagccaaaccatatcaactgcccttctgctccccttgggattcctaaagaccgttattatctaaaggcttatagctgtggtttattggcctttmtaccaaattgtaaagttggagagaccctggtctgcttgctttcatctttgaaacttaataaatatttgttaaataaatattattttataacaacttgggg

SEQ ID NO: 164272 - DNA, 201 bp, Homo sapiens
atgaaaaaatatgtgcaaatgcatctgaagaagccacatcagatactgtctgcttagatgacctccttcagggaccacttcttgatattctctgtataatyacttatctttgggccacccagcattttactggaagtcattctgggaatgctgtgatttgcacaggaactgccatcagtagtaccagagaatgtggaaaca

SEQ ID NO: 164273 - DNA, 201 bp, Homo sapiens
gctagatgaaatggtagttccatgttgctttttgaggagtctccatactgttttccacagtggctactccaacccacatttccaccaacgttgtataatcytcactaacatttttgttatcttttgttttttggtaatagtcatcctaacaggtgtgaggtgctatgtcattgtagttctagaggacattatgctaagtga

SEQ ID NO: 164274 - DNA, 201 bp, Homo sapiens
gtgttgccaacttctttcttttaccttgtggattaatttctctgcccatgttattttgacacatagatttatactctctattgtgtgtgtatactgactcygattttgtcaatatgagcaagttgcatctaaatatgtatgaaaaaatatgtgcaaatgcatctgaagaagccacatcagatactgtctgcttagatgacc

SEQ ID NO: 164275 - DNA, 201 bp, Homo sapiens
catacctcttaacacatttgtcagtgtacaatacagtattgttcatctgtccattgatggacacttatattgtttccatattgtgctaattatgaataatkttgcaggtaacatgggagtgcagacatctctttgatatcctcatttcaattattttggctgtatacccaggcgtgggattgctagatgaaatggtagttc

SEQ ID NO: 164276 - DNA, 201 bp, Homo sapiens
gccagtgttcctttcctgatttctagtttcttatattgcaattggatggatatatgcgataggtgccagtctggattttttttcccctgcttaaatagggktctctaatgcttttttaatgggattccgtaagatcttttgttcagaattagagcagaatatgcttagatgtaactttcctcatcaatccagtgtcaaact

SEQ ID NO: 164277 - DNA, 201 bp, Homo sapiens
taagtataagtttatttgtcactcataatcacagggatgtgtaactgcctcggctttatttatttatttattttgagacggagtctttctctgtcacccasgctggagtgcagtggtgcgatctcggcttgctgcagcgtccacctccaagattcaagtgattctcctgcctcagcctcccgagtagctgggattacaggt

SEQ ID NO: 164278 - DNA, 201 bp, Homo sapiens
gtaaaaccttattttttatatattttattttactttattaattttattttattgtgataagaacacttaacatgagatcatacctcttaacacatttgtcmgtgtacaatacagtattgttcatctgtccattgatggacacttatattgtttccatattgtgctaattatgaataattttgcaggtaacatgggagtgca

SEQ ID NO: 164279 - DNA, 201 bp, Homo sapiens
accaatccaaaaattcaaaattcctgaaatgctcaaaaatcaaaaatccaaaattttttagtactatcatgatgccacaagtggaaaattccatcctgaaytcatgtgaccagtttcagttaaaacaggtgcacaaaagcatcctcaagggaaaaaagacttccacagcccccttcagctgcaatatatcttttaaggtgt

SEQ ID NO: 164280 - DNA, 201 bp, Homo sapiens
tggtggggggggcatggcttccatagccagtgaagtcattagcttattttgtatttttaattacctgaaataataattgaaaatgaattaaaatatataamcatttgtgctatatataatattaaaaccttttctttgtttttcttgcctgttccattatggggaaatgtgacataaaagctactttaaacagagaatgat

SEQ ID NO: 164281 - DNA, 201 bp, Homo sapiens
tgtatcagtctagatatgcgagattatggtaatcaacaaccaaaaatctcacaggatgagcatagcagatatttttcacttacattaagtgtctaactcargttggaaagaataaatagaaaagcgaaagttaataaagtaaaaagttgaaaaaaagactgattaatatattcccaaactgaaagttaagttacaaaaaca

SEQ ID NO: 164282 - DNA, 201 bp, Homo sapiens
aaaagatgataacctacttgatttattagctgaaattagcatgcctctggtataaaccttaagaaaggatctgtaatgttaaccctgaagtcattttttayagggaataacattaaaaaatgcttgtcagtcaaatcatgaatagtttaagaatagtgcaacatgattaaggaggaataattaatataagtccagaatata

SEQ ID NO: 164283 - DNA, 201 bp, Homo sapiens
tctttcaaataaattgtgcttatgtttgtgaactaatgaaagtttaatttctttcataagagactaattttattaccatcgtatttcatgacactgtagtwttttcatgcttaacttataaaatgccttcgaagtattactaaagaagtaagatttctgcaactcctataaagctttaatgaagcaattacattgcaacag

SEQ ID NO: 164284 - DNA, 201 bp, Homo sapiens
atagtatagacagctacaacccctggatatcacgtttaaaacaaacataagatgactcagaatggtgaagagcaagaaagcagactgatcagggaccttgkgctccaggaacaatgtgatgctctttcctgggtagtttttcctcacgtagctcaggcttgaaactgaagaagccagcaacctgagcacatcaacagacac

SEQ ID NO: 164285 - DNA, 201 bp, Homo sapiens
cttcctcaggaccttggaggagagaatcctttgcttttcctagtttctggtggtttcccggcaacccttggtttccctggcttgcagctgcagtgcctcaktccctgcctctgctgtaggacagcattctcactctcggtctttgttcaaactgcccttttaaagataaggacaccatggcccggagcggtggctcacaca

SEQ ID NO: 164286 - DNA, 201 bp, Homo sapiens
ggctagaatgcagtggtgcaatctcggctcactgcaacctctgctttgcaggttcaagcgattcttgtgcttcagcctcctgagtagctcagattacaggygcctgccaccacgcttggctaatttttgtatttttagcagagatggggtttcaccatgttggccaggctggtcttgaaatcctgacctcaagtgatccac

SEQ ID NO: 164287 - DNA, 201 bp, Homo sapiens
ttaataatctttcatgtaatattcctcttgaatttaatttacatatgataaggtgaagatgtaagtggttttcactttctcttcttttaagaataacttgytagctgcccagaacaaaagtactctctgcctattttccaatttatgctgcctaatataatgtgttaaattcgattgcatggtaagatgctctcgggttgt

SEQ ID NO: 164288 - DNA, 201 bp, Homo sapiens
tggcgttttatacagcggcttggtctagattaagccatgaattagacaggttttgctaagttatgctctagtaacaacccaaatcttggtttatggcaacmaggaggattgtttttcactcacgttgcttgctctttggggttcagctgtgtctgtcctccacagtttttcaatcttccaacccagaggaaggagcatctc

SEQ ID NO: 164289 - DNA, 201 bp, Homo sapiens
ccatgggctctgagcccacatcatctgagaatctatttcatttaaagataattcattaggtttcatttttaatcttatactaagatgaaacttatcataayaggtttctatttggtcatttttctccttgtggagaaacgtgggataattctaattctcctttggtgtgacatcatgtttatcctgtgaagatggctttct

SEQ ID NO: 164290 - DNA, 201 bp, Homo sapiens
gggataattctaattctcctttggtgtgacatcatgtttatcctgtgaagatggctttcttttttataatgaatcttttcttctgcactaaacagacaccytccatcccagactccctagtttcttcatgctgcatgatttagagttgcttcattattctgattttacttatcagtttttctttcagaacattataattca

SEQ ID NO: 164291 - DNA, 201 bp, Homo sapiens
aacataataattcagtgctgtaggtaaggcctagggaatagtaagtgcccactgaaaatattaagaaaagataaggaaccaagagagctccgacagaggcrtagctggtgaagtgataagcagcaagtgttcaaaatgttgtttgattggattttcttttaaggaaaagggaaaagggaaacctcatgagacaaatgctaa

SEQ ID NO: 164292 - DNA, 201 bp, Homo sapiens
tcatgtggttaatctccaaaaaaagtcagggatcctttcttccctaggcatcctatttgttccactctggtgttgccaacttctttcttttaccttgtggrttaatttctctgcccatgttattttgacacatagatttatactctctattgtgtgtgtatactgactccgattttgtcaatatgagcaagttgcatctaa

SEQ ID NO: 164293 - DNA, 201 bp, Homo sapiens
ttttgcttccttctctgtctcgtaatttctaaatgcatatcaattactgtgattccgccttgcatttgcataggttttgctttatgcttcatttgggtggraatgtagaaaccccaggaatgttgcctaagctccgctgatgtggggtggctgaacttccaaatgctgttggccatgctaatcttggcagggcttggtttt

SEQ ID NO: 164294 - DNA, 201 bp, Homo sapiens
cgaagggaaactgaggccactgtcatgagtttccctcttctcaggctccccagtcttaggctgcttgttgtccagtgtttggaagctgtgggctcacacawgttgtcctcttttgtgattgtttataatgggaaaactagtctcctttccatcacaccatagccagaaacagaagcttacattcattctaaattatatttt

SEQ ID NO: 164295 - DNA, 201 bp, Homo sapiens
taaaatatgattgcttcttttggatgtgaacacgtctagtcccaggtggagcggtgtgattaccaggtgcatatgcttccctgagaggctcacattgggargctaagctgcctgcagctgtggtctgtatcagtgccttcacttgaccagaaatagccaccattgaaatcacttgtccaatctgaatcttttttccctttt

SEQ ID NO: 164296 - DNA, 201 bp, Homo sapiens
ccctgctgtagctgtgtttattgccgatctatagaaccgatttatttctcagccaagtgcagctaagatccattagtgtcagtacctgtagcaagagaggygtaagtagtcataaattagctataatcttagataatcttcctttagaaaaacaagaaaggagcagtggggagctgtgggattgtcctgtgacagtcccat

SEQ ID NO: 164297 - DNA, 201 bp, Homo sapiens
ttgccagttgttctggctcatgccttatttcatttttccaaaaacttgaggatgaatcaacaagaaggaaaagacttgtattagaaattgcgatgtagatrtttttattcaaaaatatatgtctgatttctttcaaggcatggtgccaagctgtctgcttcttagacagtaatgtcactgtgaggtatatgcttttcttca

SEQ ID NO: 164298 - DNA, 201 bp, Homo sapiens
tgtaaacctgatcattctttaaatcacccaccactctctatggatggaaaatagactgtgtactggttaggagcaaggcccttttttttttttttttttttgaatcttaatcagcatcccagctgtgcagtttaacagctctatatactgtggacatgttaacaactttctaagctgcagtattcttacctgaaacacagg

SEQ ID NO: 164299 - DNA, 201 bp, Homo sapiens
gctgcccagaacaaaagtactctctgcctattttccaatttatgctgcctaatataatgtgttaaattcgattgcatggtaagatgctctcgggttgttaycctgttttattttttcaggtattttcccaccaatattaagaatttttatttttgaacttcatatatagtagttttactatctgagaatgttgattcctac

SEQ ID NO: 164300 - DNA, 201 bp, Homo sapiens
aaataagcacctgtgggtcccttagtataatgtacagctttatctagaatgtcttgacttcaccgttataaaagtagcaataggtcgggcgcggtggctcrtgacagtaatctcagcactttgggaggccgaggcatgagccactgcacccggcctccagaaattttttatccaattatggtaatatacaacaatatgata

SEQ ID NO: 164301 - DNA, 201 bp, Homo sapiens
ctaaacccactcctcgtgtgtgtccgtgtcctgaattttttctcggtaagagataaagaaccagggtatataccccagacaacagagatgtttcatatgcratatgaatgcattcattctcaaagtgtccctcaaatttattgtcagttttgtaagtttgctttcagttatttgtacttttcccctttttgcaagcaaata

SEQ ID NO: 164302 - DNA, 201 bp, Homo sapiens
aggtcaggctgcaagcatagatatgcatgtgtaaatacatgtggctaagagccaagtccatccaacatggcggttcctgctcccttttccttgtcaccacktgtgcgggtgtcatggccgctgccaggtagaagctgaatttgcggctgggcgcgatggctcacacctgtaatcccagcactttgggaggccgaggtgggc

SEQ ID NO: 164303 - DNA, 201 bp, Homo sapiens
aatatactcagttcctttatgagaactagaagccactttgctattaatacaggagttattaagaaattattttgggaagttagcgagggtaaaagttctcrgtggaattttcctttaataaaaagcagccccaaatcatttcttctctaacaaaaagcagtctgaaaggtcaggctgcaagcatagatatgcatgtgtaaa

SEQ ID NO: 164304 - DNA, 201 bp, Homo sapiens
caacaaccctatttccaaataatgttatagtctgagttactggggattagaatttcaacatatgaattttgagggaatacacagcaatccataaaaatgcrtttgtatcattttaagccattgcatttgtagtaacctgttaacactgtgatagattcctaaagcaattgtaataagaaagtgaaataccagtaagagtat

SEQ ID NO: 164305 - DNA, 201 bp, Homo sapiens
gcatcttacttgcataggattcctggactgtggtctttcccattctttgccagtgttcctttcctgatttctagtttcttatattgcaattggatggatakatgcgataggtgccagtctggattttttttcccctgcttaaataggggtctctaatgcttttttaatgggattccgtaagatcttttgttcagaattaga

SEQ ID NO: 164306 - DNA, 201 bp, Homo sapiens
ctcttctctaaaatttcttggtttgtctaaaatgttcattgtaaataaatttaatcatgaaataatgggaaacagcaggctggagaatgtaagttagtcaygtaatctgtttactgttccaagactaaccaagaataaaaaccaagaaatacaaacctaagcagcctctcctgagtggacatgtgctcttctattgcttgg

SEQ ID NO: 164307 - DNA, 201 bp, Homo sapiens
tggatatctatcatagagtaattccgtgtactcattatgggaatatgaatcatacatcaatttcatatagcagtttggcattaactattaaaattgaagayactatactctgccctcagaattctagctcttgcacaacgtaatctagagcagggatctgcaaaccacagccaagtggccaaatctgacctacttttctaa

SEQ ID NO: 164308 - DNA, 201 bp, Homo sapiens
aatgacacatgctgttgtagtgttcactgaatgccaaacattcttttaagcatcaaacaaatattaactcacttaacgaaagtgcttatatgagtactgawgtgaaatccaatcatggagtgagtagtgcagagcaaggggtgattaattcttattggggccctttgaccgggtagacagaggagggctcttgaaggataa

SEQ ID NO: 164309 - DNA, 201 bp, Homo sapiens
tttttgtttgtttgttgtttttaaaaattgcttcaaatcttaggtcaaatacttattgcctttttatcaagagaaaacttacctaacactttttatcttaycatctccgcaaattatgattttctattgactttttagcatacctagcatatacactgatgtggacatttctcaatgctgaattgttaattttctatgtat

SEQ ID NO: 164310 - DNA, 201 bp, Homo sapiens
ctcaggttaacaatagggaagataatattgagtatgggttattgtaaagtttcaaataaataactcatgtaaagcctaagaacagagcttgaaaacatgtrtgtatatatacacatgcacatagatatatatgtatgcatatgtatatatttatataagataaatatgcatagggataaaatcaaagcatctactatacta

SEQ ID NO: 164311 - DNA, 201 bp, Homo sapiens
cctgtctccaaatagagtcaccttcgaaggtactggggcataggacttcaacatatacattttagggggacacagctcagtccataacatcaagatagtgrcaagaagtctttttgcctaccatcttaatttcctgctctatactcagcacaaaaaagtgcttggcatgtgatattcaaatatttactgaatgaatgaacc

SEQ ID NO: 164312 - DNA, 201 bp, Homo sapiens
taaaccctgtctcttctgttgaaaagctgtaggactttgtacaagataatataatctttctgtgcctcaggttaacaatagggaagataatattgagtatrggttattgtaaagtttcaaataaataactcatgtaaagcctaagaacagagcttgaaaacatgtgtgtatatatacacatgcacatagatatatatgtat

SEQ ID NO: 164313 - DNA, 201 bp, Homo sapiens
cacatgcttcattgccctaagcaactgccagccaggcaattccaaatctgtacttctaaagggccaactcccaggccaaacaagaaaatctgtatttcaamagcacagagctaagactttagacctaaatattgtatcatcagctcaaaccaaaaaaaaaatagtggaagtaaaagttcagttaagacaagatagtctgaa

SEQ ID NO: 164314 - DNA, 201 bp, Homo sapiens
gggccaactcccaggccaaacaagaaaatctgtatttcaaaagcacagagctaagactttagacctaaatattgtatcatcagctcaaaccaaaaaaaaartagtggaagtaaaagttcagttaagacaagatagtctgaaaagcactttaaaaaaggtttgacttgttatgtaaattgaaaacaatggcaagagtttcta

SEQ ID NO: 164315 - DNA, 201 bp, Homo sapiens
agagtagactacagtctgtttacacatccagttaggttacagttcactatgtctggaaaaacatttaggctgaacttaaaatatgtaaggaagtagctttrgtctaaacctaatttaacaacatgcgtatgtatgtgtgtatataactgtgtacgtggataggtatgtgtatgcatgagtgtgtacacatatgggtgtgtg

SEQ ID NO: 164316 - DNA, 201 bp, Homo sapiens
agtagactacagtctgtttacacatccagttaggttacagttcactatgtctggaaaaacatttaggctgaacttaaaatatgtaaggaagtagctttggkctaaacctaatttaacaacatgcgtatgtatgtgtgtatataactgtgtacgtggataggtatgtgtatgcatgagtgtgtacacatatgggtgtgtgca

SEQ ID NO: 164317 - DNA, 201 bp, Homo sapiens
atataactgtgtacgtggataggtatgtgtatgcatgagtgtgtacacatatgggtgtgtgcatgtgtagttgtgtacatatatacatgtgtatgcataarcatgtacatgtagatgtatgtattgtataggcatgtatagctatgtgcacgcatgatacatgcatgtttaagttatgcatatgtacatgtatagtcatat

SEQ ID NO: 164318 - DNA, 201 bp, Homo sapiens
gggtgtgtgcatgtgtagttgtgtacatatatacatgtgtatgcataagcatgtacatgtagatgtatgtattgtataggcatgtatagctatgtgcacgyatgatacatgcatgtttaagttatgcatatgtacatgtatagtcatatgcatgaataggtattgtatgtataggcatgtacaggtgtgtatatgcagatg

SEQ ID NO: 164319 - DNA, 201 bp, Homo sapiens
cagtactttccattacccttttaattttgcatacaaaaggttttcagcaacatgaattggttaataagaaagctcttctaaattttccgtaactgtttccktacagctcccagtgaaaagacacttacatgattgtatcagggccatcactgaagaagataacttggtaattcttgttgttgtgatgagagttttttcttt

SEQ ID NO: 164320 - DNA, 201 bp, Homo sapiens
tctcaggttcacagattgagaggaattttctctcaggatcagtcatactctagtcttacccataattggtttagatgatattttaatgagatttgaggctyggaatggattaagactttaggggctattgcaatggggtgaattgattattttgcatgtgagaaagacatgaattttaggggttcaaagggtgtagtgtta

SEQ ID NO: 164321 - DNA, 201 bp, Homo sapiens
cttctccagtgggggtgtgtgtccgggaaaggagggtttccttttcccacttctgcagttggggcacttacagtatttggggtgtctcctgggtcctgcargagcagtctgcttcctgcagagggtctgtggatcctctcgggattgctggtttgttcttgcagttgatctggagttaagtttcacaatgcaagcctccgc

SEQ ID NO: 164322 - DNA, 201 bp, Homo sapiens
aggtttaagtaatttgctctcagttatttattagcagacctagggatagagctcagactccccattgccaagtccatttgttttcctcaccccaccatgtsacctcatcgttagttttcctttcgttatactttctgtaattttctccaaatctctttcaccagtagttaacataggaactcttctttagctgggtggcct

SEQ ID NO: 164323 - DNA, 201 bp, Homo sapiens
ccacccctgtatttcacttggcttggctctctaactcaactcagctccaggtaaagtcgggaacatctcccacaaacagaccttaagcttctccagtgggkgtgtgtgtccgggaaaggagggtttccttttcccacttctgcagttggggcacttacagtatttggggtgtctcctgggtcctgcaggagcagtctgctt

SEQ ID NO: 164324 - DNA, 201 bp, Homo sapiens
ggatttgaagtttcattaaaactacaagtatacatttccaggaatgagattcaactgttcctcatggtcaccaacattcctcctttaaaaatatttttttraaaacagtttcacaaagaagttttgtctgtagtaggttaaatataggagactaatatttattaatattttaaggtatatttctgtgaaatatttcaaaga

SEQ ID NO: 164325 - DNA, 201 bp, Homo sapiens
aagtaatttgctctcagttatttattagcagacctagggatagagctcagactccccattgccaagtccatttgttttcctcaccccaccatgtcacctcrtcgttagttttcctttcgttatactttctgtaattttctccaaatctctttcaccagtagttaacataggaactcttctttagctgggtggccttctttt

SEQ ID NO: 164326 - DNA, 201 bp, Homo sapiens
tgattggtccattttacagagagctgattggtctgttttgacagggtgctgattggtgagtttacaatccctgagctaggcacaaaagttctccaagtccycactagattagctagacagagcagtgactggtgcatttacaaaccttgagctagacacagggtgctgattggtgcatttacaaaccttgagctagacaca

SEQ ID NO: 164327 - DNA, 201 bp, Homo sapiens
ttctccaaatctctttcaccagtagttaacataggaactcttctttagctgggtggccttcttttttagaatcttgtcctaaaaaattgcaaatgcaacartcttgacattttaacatcaaattaattttcagtatcagctaatcaatagatcaagagtctttgcataatactgtaggcattacagatgcaattaaataat

SEQ ID NO: 164328 - DNA, 201 bp, Homo sapiens
agcagcaagatttattgcaaagcgcaaaagaacaaatcttccacagagtggaatggtaccccagaggattgccactgctggctggggcagcctgctttttyacccttttctggccccacccacatcctgctgattggtccattttacagagagctgattggtctgttttgacagggtgctgattggtgagtttacaatccc

SEQ ID NO: 164329 - DNA, 201 bp, Homo sapiens
tatgtttctgagttatttcacttaggataatggcctcaagttccatccacgttgctgaaaaagacatgatttcactctttttatggctgagtattattccrttgtattagtccatttccacactgttatagaggtactacctgagattggataatttacaaataaaagagggtttctgactcacagtttcacatggctggg

SEQ ID NO: 164330 - DNA, 201 bp, Homo sapiens
cactcccctcccactctcctacctttcggagtctccagcatgttattccactctgtctatccatgggtacccattgttagctcccactcataagtgagaayatgtgctatttgcttttatgtttctgagttatttcacttaggataatggcctcaagttccatccacgttgctgaaaaagacatgatttcactctttttat

SEQ ID NO: 164331 - DNA, 201 bp, Homo sapiens
catctcccactctccttgggtctgttaatacctaatatcttgtgtgaaaaacttgttgaaatcaaggtaagaacattacagtaggaaaaagggcaaataagtagccctgaaatgatacaaaacagaatgagtgttcagtgatatagatgattaatcaaactctactgatgatgttgactttacatagagtacaaagcattc

SEQ ID NO: 164332 - DNA, 201 bp, Homo sapiens
tgattattgtgggaataactagagccataattacactcagaacattttattatttctatttgagattgtatctagtttacctgactgtggagagggcatgratgtgtgtgtgtgtgtgtgtgtgtgtgtgtgtgtgtgtgtagggtatataatgaacaatgagatgagatataagaatttacacttttaattataataaaa

SEQ ID NO: 164333 - DNA, 201 bp, Homo sapiens
cttttgcctatcaataggcatccctaggtaagactaatttaagaattctcattttctttttcttttcttttcttttttttttttttttttttttttttgaratggaatctcactctgttgcccaggctggtgtgcagtggcaagacctggggttcaagtaattctcctgcctcagcctcccaagtagctgggactacaggt

SEQ ID NO: 164334 - DNA, 201 bp, Homo sapiens
agtaaagatattaaaatctttttagaagcttttgcctatcaataggcatccctaggtaagactaatttaagaattctcattttctttttcttttcttttcytttttttttttttttttttttttttgagatggaatctcactctgttgcccaggctggtgtgcagtggcaagacctggggttcaagtaattctcctgcctc

SEQ ID NO: 164335 - DNA, 201 bp, Homo sapiens
tcactcagagagctcggtttttcagacgtgagtcttgcgaaacctcccggctgaataaagcccttccttctttaactcagtgtctgaggggttttgtctayggcttgtcctgttacagtaccttcactaatgtcttcccccaggtaccttccctaatgtcttcccctatatgccatttagccacgtggcacccaggaggac

SEQ ID NO: 164336 - DNA, 201 bp, Homo sapiens
ctgtgaaaatccctgtcctgttctgttccattctaattaccggtgtatgcagcccccagtcatgtaccccctgcttgctcaatcaatcactaccctctcaygtggaacccctagagttgtaagcccttaagagagacaggaattgctcactcagagagctcggtttttcagacgtgagtcttgcgaaacctcccggctgaa

SEQ ID NO: 164337 - DNA, 201 bp, Homo sapiens
ctcacttacactggcccttcatcttccatctatcaaagcataaagttgtctatgtatataaggctggcttcaatatctttcacaaaataaaagtatacccyatgagtccacacaaccatctcctttttcacttttattgttcatagaagtataagcaaggaaaaaaaatagaaagataagagtcttatgatagcagagaag

SEQ ID NO: 164338 - DNA, 201 bp, Homo sapiens
tttctctgtgagtgtctttaaaaaatgtctgaaaattaataagccagcagtaaacatctactccttaactggatacaaacatacagtgtttttttttttttatggcactataaaaatgctcagaagtcatgtcagtagcaaaattacctaaagatatgaatatgcctgatgtagttccaatcctaatgtaatgtttgtaat

SEQ ID NO: 164339 - DNA, 201 bp, Homo sapiens
ctttctctgtgagtgtctttaaaaaatgtctgaaaattaataagccagcagtaaacatctactccttaactggatacaaacatacagtgtttttttttttttatggcactataaaaatgctcagaagtcatgtcagtagcaaaattacctaaagatatgaatatgcctgatgtagttccaatcctaatgtaatgtttgtaa

SEQ ID NO: 164340 - DNA, 201 bp, Homo sapiens
tgttggcaggctggtctcgaactcttgacctcaaatgatctgcctgccttggtctcccaaagtgctgggattacaggcatgagccgctgtccctggtgacmaactacatatttttaatgcataaattatacattttatattttacaaaactgcaaaagcaaatcctaaacatttggttaagatccttctgcactctcctcc

SEQ ID NO: 164341 - DNA, 201 bp, Homo sapiens
ttctcactttcagggacaatgccctcggatgccatctcagattacagatgtctttgctgtcataaaaccatgccgctttgtattggattatcattttaagrtatggaacaaatggtttgggggcgaaagttgacaagtgaaatgacataccaaagctattaatacagaagctgctttataatcttactaatgaccaattat

SEQ ID NO: 164342 - DNA, 201 bp, Homo sapiens
aggggaggcctgtcccctggggttgtgggggaggggaagaaggcccatctttggggtgctcatcttcagggcaccgtgctcccaaatccctgtgagctcaktgtccgcgtgctgcaatgagcgtcctgtgatgaggacctcatgctggggccaggcgagaccattcctcttgtctttggttgaggtacatgctgatcaagg

SEQ ID NO: 164343 - DNA, 201 bp, Homo sapiens
gctgatcaaggcctgagctcttcagggagagcacaggcatgtgagctttcctgtctgacagcattaatcagcatatttggtttttcaaggtcacagaagaycctgtttaatcatttttttacacactattatgggggccaggaatgtaccgacacaaggtcggagaaaaccagttttgatctgaagctaaggggtgacctg

SEQ ID NO: 164344 - DNA, 201 bp, Homo sapiens
attttactttccacactagactcatccatccattcattcagttaacaaataatgaccctattatttgcaagttgcataagccagaaatctaggagttaacyttcttctgttttcctcattctgtgctgtagtgttatggcttttgagtctgactgtccggatttaaaccctgtctcttctgttgaaaagctgtaggacttt

SEQ ID NO: 164345 - DNA, 201 bp, Homo sapiens
cattaatcagcatatttggtttttcaaggtcacagaagatcctgtttaatcatttttttacacactattatgggggccaggaatgtaccgacacaaggtckgagaaaaccagttttgatctgaagctaaggggtgacctggaattcagttctaaaacactgatttctttgaagacgaaaaagctcttagaaggatcctcag

SEQ ID NO: 164346 - DNA, 201 bp, Homo sapiens
caaggtcacagaagatcctgtttaatcatttttttacacactattatgggggccaggaatgtaccgacacaaggtcggagaaaaccagttttgatctgaarctaaggggtgacctggaattcagttctaaaacactgatttctttgaagacgaaaaagctcttagaaggatcctcaggattatcgtaagtaaaaagcaaaa

SEQ ID NO: 164347 - DNA, 201 bp, Homo sapiens
aggtcacagaagatcctgtttaatcatttttttacacactattatgggggccaggaatgtaccgacacaaggtcggagaaaaccagttttgatctgaagcyaaggggtgacctggaattcagttctaaaacactgatttctttgaagacgaaaaagctcttagaaggatcctcaggattatcgtaagtaaaaagcaaaact

SEQ ID NO: 164348 - DNA, 201 bp, Homo sapiens
acattataattcatcaaggtctttattaaagtgtgatgcccagaagtaggcatagctttaaaggtatgttgtggatattgacagaattgtccaatctgatrtatttcttacctactcaaaaacaaacctacaagccctccattaggaaaaaaataaaaatcatgtggttaatctccaaaaaaagtcagggatcctttcttc

SEQ ID NO: 164349 - DNA, 201 bp, Homo sapiens
ttgttaaagtatgacattgataattaatgaaatttggtttcaaatatgttcccataaaaggcaaaatatttggtaaacaggatatatgctctgcagatcaytagggaaaaccaacaatgtggagtttaaaggaaacattgaagaacaaaaatcttaaaatcctcataagacccaaatgtgcctgaagtttcagtgcattaa

SEQ ID NO: 164350 - DNA, 201 bp, Homo sapiens
taatggtcacatataaaagcatacatcaaagttaagtcaggcacacagaaacaggagtggcaataacaatacacagttgaatgtaagtaagaaaagcattmactgcaacgaagtttatttcaatctcaattttgaaatagcttagcatccattcagcacagcttaatagaattgtgtctgaatattactaatgagatcaat

SEQ ID NO: 164351 - DNA, 201 bp, Homo sapiens
gtcacatataaaagcatacatcaaagttaagtcaggcacacagaaacaggagtggcaataacaatacacagttgaatgtaagtaagaaaagcattaactgmaacgaagtttatttcaatctcaattttgaaatagcttagcatccattcagcacagcttaatagaattgtgtctgaatattactaatgagatcaatttgtg

SEQ ID NO: 164352 - DNA, 201 bp, Homo sapiens
tattttcttttgctcaggaaatatattttcaaatggctgtaagtgagactactcccaatagtgtactctctaatcttctctttacattaaaattgaggaaytttgatattaatttttatgccaatcaatttctcctaacctcacaatagaaatggcaccactgttgctgttgaaaatctgtgctttcaagacaggtatgcc

SEQ ID NO: 164353 - DNA, 201 bp, Homo sapiens
tattttcccgttagatatgtgccttttagtaaacatgagaactgtctttagctgatgaccttcccttttagaatcttatgctaatgaattacaaatgcaayaatcttgacattttaacatcaatttaagctaatttttcatatcagctaatcagtaggatcaagagtgttcgcataatactttaggcattgcaggtgcaat

SEQ ID NO: 164354 - DNA, 201 bp, Homo sapiens
catagtctttgtcctttaatcaatctgtatgagctctctgcaaatgctgtgtgttaacaatggtgagggtgaacatcccaggcttgccactaaattgaaayggtttcatcatttacccagcagcaacatgcttgcttccttttatatgaatttttttttttttttttttttttttttgagacaagagtcttgctctgtcgc

SEQ ID NO: 164355 - DNA, 201 bp, Homo sapiens
taaacaacattcacaagtccttgttaccaatctacttatttcagcaaattttgtaattgtccatttgtttgtgccataatcaaataagtcaaaattctacygataaaattgacttagcataagcatgatgataaatgataaaaattagaaaatttagaaatcctcattacatttgtaattattaatattgttaaagtatga

SEQ ID NO: 164356 - DNA, 201 bp, Homo sapiens
gagaaaagacagctaaataaatatgaatgtactgagaaagcctgaataaagatataagtggaattgatgaataaatctaatagctggcttaaaaaataaargaaggagaagtaataactataagaaattatatattcatctaatatctaatatgtattatataggtataatatatatataatacatagtaatatacacaat

SEQ ID NO: 164357 - DNA, 201 bp, Homo sapiens
gttacaaagttcagctaaggaagtccttctctccagtgcggttttatcccctgctcctccagcctctctcctgatggatccctgcagtgtcaggcaggaawgggctgcttggggattcagtgagctcccagggcctccctgctgcctcctccacccctgtatttcacttggcttggctctctaactcaactcagctccagg

SEQ ID NO: 164358 - DNA, 201 bp, Homo sapiens
tacgggtgtgagtcactgcaccggcagggagtagtattgtaataagaagtgagttagggaaggaggccttggggaaacacactacaaacaggcagagagcytcatcctttctacctaacgctcagggctctgatgggcatgaatttggtcggcactggctctgcttgctgcttccaactgcctcaccagcacttttctgaa

SEQ ID NO: 164359 - DNA, 201 bp, Homo sapiens
atcaataataagaatactctttctctgtgagtgtctttaaaaaatgtctgaaaattaataagccagcagtaaacatctactccttaactggatacaaacawacagtgtttttttttttttatggcactataaaaatgctcagaagtcatgtcagtagcaaaattacctaaagatatgaatatgcctgatgtagttccaatc

SEQ ID NO: 164360 - DNA, 201 bp, Homo sapiens
gacagttctggcaaaaacaaagttctcccaagatttcagcacgtttgcagcggaaattcaggaaaccatcacagcactcagagagcaggtttgttttctcytcaaataacatgtccttattgtatgcgttggaataactaaacataaaagatttgtccagtaactctccacaattacagcacagtatcagaataataaaaa

SEQ ID NO: 164361 - DNA, 201 bp, Homo sapiens
aaagaagagtatgctacccaaccagaaattcgtttcgtgaaatgcataggaattaagagagagagagagatgtatttcaaataaagctatgtaacaagaaracagaaatgcaaatcaaaacatttcagaggaaaaatctctcagaaaaagaattgaaacaggaggaaacaataacacaacattcaaaccagaattaaacag

SEQ ID NO: 164362 - DNA, 201 bp, Homo sapiens
taatcttatgtagtgtgtaaacataacatttaatgacattgtcctacacagtggaaagtgttttttttttttcctttttagctatttttctgcttctgtgrttatgatgtagggagtctcacctggagactgtgtgtctttaacacttgatgtttatttagtcaatcttttaaataaaaggggaatatgtctcaggcccag

SEQ ID NO: 164363 - DNA, 201 bp, Homo sapiens
tggattatcatcttatctgccatttaattttaattttgaattccactcataccattttccttttaagatcacaaagaacaccaatcacaatgccttgtacrtgccaaatgaccaaagaagatttgatgatattttaaaattctcacacgacttttatttttcagcattttatttgcttcttgttataaataggcaacaaga

SEQ ID NO: 164364 - DNA, 201 bp, Homo sapiens
tccagcaccaagtactaagttgtcaagtgaaattctggaaacctggaagttatcaacaccatttacaaatctgagagtgtccagaaatggctttggctttktgtgtgtgtgtgtgtgtgtgtgtgtgtgtgtgtgtgtgtgtgtaaagggtagagtgccacttcagatttgatggtgacattaaagcagaatgaaatgaaa

SEQ ID NO: 164365 - DNA, 201 bp, Homo sapiens
gcacgattgaagaaggatattctttgatgagtttttctaatatgtctcaggacttaggaatgatactgttcctcttcagagttataattttctcacctcartatgagacagtcaaatcaaaaaagtccccaaatggaagccatatttttcttgttaacctcttaggttttatggatgggatagctttactctaatagtaat

SEQ ID NO: 164366 - DNA, 201 bp, Homo sapiens
cctccacacctccctgcaagctgagggagccggctccggcctcgttcagctcagagaggggttcccacagtgcggcggcgggctgaaaggcccctcaagcrcggccagagtggcctctggccactgaggctgaggaggccgcgacagcgagtgagggctgccagggctgccagcacgctgtcacctctcaattgcaccact

SEQ ID NO: 164367 - DNA, 201 bp, Homo sapiens
ttccaaagagaagaaaaggtaaagaagtctaacaagttgtgcattgtgttgtaatgataattagaagacttacagatagttattaaagagtggagacaacraacattctcaggtgtagaaagattcagtaatattgataggtcagtacttcccacaaatgatatacttattgtagtgccaatgaagagcttagtagtgctt

SEQ ID NO: 164368 - DNA, 201 bp, Homo sapiens
tttaataaaaagtattctgggaaaattttctttcaagtaaagaaacaatttttctgtctggtgttgttaatgacaaattaaccataagattttttttttttgtcattcacctttatttcagtgctggtaaccataagattattttgtaccatgtgtctgatctgactaatcatgctagtggggtaggatgttttcattgtt

SEQ ID NO: 164369 - DNA, 201 bp, Homo sapiens
tggagtgcagtggtgctatcttggctcactacaacctccacctcctgggttcaagcaatttttctgcctcagcctccctagtagctgggactacaggtgcrtgccaccatgcttggctaatttttgtatttttagtagagacgacgtttccatctatcatctatttatccacttaactacctatatatatattatctattt

SEQ ID NO: 164370 - DNA, 201 bp, Homo sapiens
ctgcctccgctccttaaaagaatagctcatatttcaccaattaagtaacttgtattcagtatatgtacctattttatgatagcttcactctatattaaaaatagacaaattaacaaaaaattcttaatttctttcctctttctactcttgggtttcaggagatcaaaccgcatgattccttcccaaaaacttgcattctct

SEQ ID NO: 164371 - DNA, 201 bp, Homo sapiens
acgtccgaacatcagaaggaacaaactccggacacaccacctttaagacctgtaacactcaccgtgagggtccgcaacttcattcttgaagtcagtgagascgagacctcaccaattccgaacacatcatgacctaatcaccacctaaggccccgcttattaataccataacatcggagatgaagcttccacatttgaatt

SEQ ID NO: 164372 - DNA, 201 bp, Homo sapiens
aggctcattttatggcctatcatatgatctatcttggagaaagttccatgggctgttgaatagaatgtgtattctatggttgttgaatggagtgttctgtrtatatctgttatgtccatttgttacaaggcatagtttagatccattatttccttgttgattttctgtcttgatgacctgtctagtgctgtcagtagagta

SEQ ID NO: 164373 - DNA, 201 bp, Homo sapiens
ttctgatttttatttattatggagagggcctcatggaagggaactgtgggtggcctccaggtggccttcagtaacacaaccatgaggaagtgagttctgcyaacacagattctgccccagatgacatgagaatgtagcccaactaacagattggagcctcatgagactgagcaaaggacctgctaacctgtgccaggagtc

SEQ ID NO: 164374 - DNA, 201 bp, Homo sapiens
aaggcaaaggagaagaaagcaccttcttcagaaggtggcgggaggaagagagagcaaaggggaagtgtcatacttttaaaccatcagatctcgtgagaacmccctcactatcatgagaacagcatgggggaaaccaccctcatggtccaatcacctcccaccaggtccctccctggacatgtggggcttacaattagagtt

SEQ ID NO: 164375 - DNA, 201 bp, Homo sapiens
agcccaactaacagattggagcctcatgagactgagcaaaggacctgctaacctgtgccaggagtcctgcattctggccacggaaggtgtgatgtgctgcrtgtggtagtttgcttgggattctgtaacaaagcaccacaaacgagacagcaaaatgtgtctccccactccagaggctgggagtctaagatcaagtgctgg

SEQ ID NO: 164376 - DNA, 201 bp, Homo sapiens
ttatacttattaaatatcacaaaagttgtttttgacccaaaatgtatatgtttaacattgtgattcatatttttatgatttaatgcatattgagtataatraatatcagatagcattaggtgacagaacttttgtaaccaccaatattatcagataacatttatttttgtaaatctttgtaagaagagaagaaacagaatt

SEQ ID NO: 164377 - DNA, 201 bp, Homo sapiens
tctggtatgttttaataccagtgagttcatatgtataagttttactcttattttgtctagcattatagcatttgcagtttgttgtgttattttaaaaatcwtcctaaatttcatattcatgttagcttaataatctttcatgtaatattcctcttgaatttaatttacatatgataaggtgaagatgtaagtggttttcac

SEQ ID NO: 164378 - DNA, 201 bp, Homo sapiens
tatttataagggcattaatcatgttgaattagtggcccatctactccagtgtggtctcttaacgaattactctgcaacaaccctatttccaaataatgttwtagtctgagttactggggattagaatttcaacatatgaattttgagggaatacacagcaatccataaaaatgcatttgtatcattttaagccattgcatt

SEQ ID NO: 164379 - DNA, 201 bp, Homo sapiens
caattggcaatagtttaaaaatatatgtagtcaaagactgaaaataattgaaaaaccttcagtttgggggttaagctgtcttccccatatatattagtttrccaggctgttgtaacaaagtcccatagcttggatagcttagacaacagaaatttgttattcttacaattctggaggttagatgctgatcaaggcatcagc

SEQ ID NO: 164380 - DNA, 201 bp, Homo sapiens
ttaatggggtgctactggaaccgtctcacttcaaaacaattgtggggatagttcagtattgattctaattgaggtgaaacatcatctaaagatatgatgtmttaatatactcagttcctttatgagaactagaagccactttgctattaatacaggagttattaagaaattattttgggaagttagcgagggtaaaagttc

SEQ ID NO: 164381 - DNA, 201 bp, Homo sapiens
ttgatctggtgaaaaagctacccacatcaatggtgttatcttcttctggggagaaattttcctggttagctttaaccttaaggtttccagtgggaatacartaagagtgtggaggggaccttctgagttgtgaggtcatgaacccaaggttcaaggtctcaaagttttgctacaatgtgatggcaaaggacaactctgatg

SEQ ID NO: 164382 - DNA, 201 bp, Homo sapiens
agcagccccaaatcatttcttctctaacaaaaagcagtctgaaaggtcaggctgcaagcatagatatgcatgtgtaaatacatgtggctaagagccaagtycatccaacatggcggttcctgctcccttttccttgtcaccacttgtgcgggtgtcatggccgctgccaggtagaagctgaatttgcggctgggcgcgatg

SEQ ID NO: 164383 - DNA, 201 bp, Homo sapiens
ctctcactctcgctctctactctttcttcttggtactcttgccctctctgactgttaaagaaatgatctagatgagatcatgacatcgcatctcacatgaygctattgtggttacttctttccccacagactgtaggagtagaggacagttcagagcagtgacgcaagagtctcaaaagaaacgctcagctcaatacagct

SEQ ID NO: 164384 - DNA, 201 bp, Homo sapiens
gtggttacttctttccccacagactgtaggagtagaggacagttcagagcagtgacgcaagagtctcaaaagaaacgctcagctcaatacagctatcctgwtgataaggatatggagttaagtcatctaagaagtaggtatgtatagaaatatctcatttctttaggcaacttactatagatttgcttcaaacctacaatt

SEQ ID NO: 164385 - DNA, 201 bp, Homo sapiens
gggaagattcacacacacacacaccccccacacacacccacccaccgttatgcctcttgaacacgagttatctggctgtatcttcatccacatctgttgcygtcttcaaacaccctatctgctgtaattcatacccgcatgtcacacatagaccagaaatttaagctgatctaaatttaagtcatttcattttactttcca

SEQ ID NO: 164386 - DNA, 201 bp, Homo sapiens
ttactatagatttgcttcaaacctacaatttgtttttatcttttttaatagagaccacagttaacttatttacatataggatgaatcacatgaaaaggagmaaacacagaatgaattctgtaatgtgtttgggttccatttcactctgcaatagcccaaccagagcgtatttggcaatgaatttttctcagtaaagtgcag

SEQ ID NO: 164387 - DNA, 201 bp, Homo sapiens
cttgctcttggcagttaagaaaggcttcctggagaaggctgacatgacacctatggcatttgtcactcaagtgagaccaaatgaagttggagcaggatcaytggctgtggattgtgcattagggagaaatgagactggagaggcaagaaggtgctgcatagggaagaaccttgtttcacccactaagaatctaggtcacca

SEQ ID NO: 164388 - DNA, 201 bp, Homo sapiens
ttcagagtggccaggtcacctgtgtggtggagatttgtcccccggctccctgtcccagtcctgaattggtgaaaggaacctgctgtccagtttgcagagamcgaggaatgccaagtgattccccagagaagcgctaataaaagttttgtgctgttgagccccaaatgggaaatttctcaggaagagacatttaggacttca

SEQ ID NO: 164389 - DNA, 201 bp, Homo sapiens
aaatgagctcatactatgagcattttttattatattgagacagtcagcttattagattatgtattataagaaacatttatttgtcttttaagtactttgaytataagaaacatggaggtgatatgtgcatgctgcctttcagagtggccaggtcacctgtgtggtggagatttgtcccccggctccctgtcccagtcctga

SEQ ID NO: 164390 - DNA, 201 bp, Homo sapiens
gaattaatgtcactctgtcatcatcgtaaatgtcaagtaattttgtgtgttcatgagggttacagtaggggcaaccttcttttgttggaatctactgttcwcagggggagaaaatggtcactttaggacctatctccttccttaaagtttcagtttggttatgctgcttttagcataagtgcctccattttgcttttgtct

SEQ ID NO: 164391 - DNA, 201 bp, Homo sapiens
ggctcacgcttttaatcccagcactttgggaggctgaggcaggcagatcacctgaggttaggagttcgagagcagcctggccaaaatggcaaaatcctgtytctactgaaaatacaaaaatcagctgggcatggtggcaggcccctgtagtcccagctaccggagactaaggcacgatatcgcttgaacctaggaagtgga

SEQ ID NO: 164392 - DNA, 201 bp, Homo sapiens
atcctgatgtctctgtgttctccctgtgtgcctttcactgtcttgaaactgccatctcaataatctaaaaaacaataggtccaaagtctctttctgtcctmatttttccttgtttctttgcagctgtcatagctttgctgctagtatctccttgacagtattgatgcccacactgtcttctagaaagtctgttctctttta

SEQ ID NO: 164393 - DNA, 201 bp, Homo sapiens
aaagctgcaaagctttatgaggctaggagtgagggaggcctctgagcattgtttgtcatttcttcacagataaaattttatcgccagtgcaggaaatcgcyttcttttagagatttacatcagcatttattattttaccgtggctttaaatatgcagcttttttttttccaggatgctatctctgaatattcttagaaagt

SEQ ID NO: 164394 - DNA, 201 bp, Homo sapiens
ttacctaatgtccttcttctgttctgggatctcacctatggcaccatacaccatattacatttagttctcatgtcttcttaggcttcttttggctgtgacrtttttctcaggctttccttgtttctgatgaccttgaccgttttgaggagtacttactggtgaagtattttgtggagtgtctctcactgagatttgtctga

SEQ ID NO: 164395 - DNA, 201 bp, Homo sapiens
agagagaaacagagggagaaagaagagattgggatttaatttaagggactggttcatgtagttgtgggggctggcaaatctgaaatctgcaaggtaggccraaagctggaaattcatgcaagagttgatgttgcagcttgagtttcaaggctggaaacacaggctgatttttatccagagttctggaggcagaattccttc

SEQ ID NO: 164396 - DNA, 201 bp, Homo sapiens
tagatactgcagtagaaaatattttcaattgggttctgacagatctaaattctgcagtaaaatacattttctgtcaatatattttcagataataaatagcytctgatttgaatatatagtccataactgggtggccatctaaataactcatatccatgtattcattcttttatttgtctgtccgtccacccatccatccat

SEQ ID NO: 164397 - DNA, 201 bp, Homo sapiens
gttaagatttaggaaatactagaggttttgtaggcatattgaaaataatctgtgaatacaacagttgatcccttgatatggtgactgccgttatcattccyaggtttcagatgaggtgattgaggcctagggagattaagaaacctttgcctggttgacacaggtagtaagggtggatttggggatccagccagtcatgtg

SEQ ID NO: 164398 - DNA, 201 bp, Homo sapiens
tgccacataccagctgttgatggaaagttgggtgcattaggtaaatagaaaaaaaattcattgtacagggcaagatgctttaattgtgaagagtccaggccttggttgcaaaataggccaacaaaaatattctgaagactttatctcgtaatatattgctaatccttaaactatatttggcccctgtgccaggtcgccaga

SEQ ID NO: 164399 - DNA, 201 bp, Homo sapiens
gtttccgtagaatgttgagctgaatgtagagggaccaagcataaatatggaccatatatagaccatctttctagaagttttgtgggaaaggcaaggagggwtttagggacaacgtttagagaatagtcaagtgttttttttttgtttttttttttttttaagttaagatttaggaaatactagaggttttgtaggcatatt

SEQ ID NO: 164400 - DNA, 201 bp, Homo sapiens
gtgccacataccagctgttgatggaaagttgggtgcattaggtaaatagaaaaaaaattcattgtacagggcaagatgctttaattgtgaagagtccaggccttggttgcaaaataggccaacaaaaatattctgaagactttatctcgtaatatattgctaatccttaaactatatttggcccctgtgccaggtcgccag

SEQ ID NO: 164401 - DNA, 201 bp, Homo sapiens
tgtgccacataccagctgttgatggaaagttgggtgcattaggtaaatagaaaaaaaattcattgtacagggcaagatgctttaattgtgaagagtccaggccttggttgcaaaataggccaacaaaaatattctgaagactttatctcgtaatatattgctaatccttaaactatatttggcccctgtgccaggtcgcca

SEQ ID NO: 164402 - DNA, 201 bp, Homo sapiens
ttgtgccacataccagctgttgatggaaagttgggtgcattaggtaaatagaaaaaaaattcattgtacagggcaagatgctttaattgtgaagagtccaggccttggttgcaaaataggccaacaaaaatattctgaagactttatctcgtaatatattgctaatccttaaactatatttggcccctgtgccaggtcgcc

SEQ ID NO: 164403 - DNA, 201 bp, Homo sapiens
aaacaggtgtatagactgatggagtggaacagagatctcagaaataacaccacacatctacagccacctgacctttgacaaacctgacaaaaacaagcaayggggaaaggattccctgtttaataaatggtgctgggaaaactggctagccatgtgcagaaaactgaaactggaccccttccttgcactttatacaaaaat

SEQ ID NO: 164404 - DNA, 201 bp, Homo sapiens
ccatgatcaagaaaggacctggccatgttgttggaggagtctttgttgcttatattggtttatctggaatatgcttgtttcctgtttgtgtttttgttttrgggttggggatggctcaagttggccaccagctttctggttgttggcacagacaggagactattaccatttagcaagtccacatttccttcatcttctgcc

SEQ ID NO: 164405 - DNA, 201 bp, Homo sapiens
ctccatggtagctgggataataggtgcatgccagcacaccaggctaaattttgtagttcaccatgttgaccaggctggtctcgaactcctgacctcaggtkatctgcccgtctcagccttccaaattgctgggattacaggcgtgagccaccgtgcctggccaggagcagcttttaatagaaatccatcgagctgtcttcc

SEQ ID NO: 164406 - DNA, 201 bp, Homo sapiens
tgaccaggctggtctcgaactcctgacctcaggtgatctgcccgtctcagccttccaaattgctgggattacaggcgtgagccaccgtgcctggccaggarcagcttttaatagaaatccatcgagctgtcttccctcaccttttagaaattataaatataacaacagccctaaagagatttttgatactcccagtagtca

SEQ ID NO: 164407 - DNA, 201 bp, Homo sapiens
gacatcttatactgttgcattggggattcagtttcaacatggattttggagggggatgcaggcattcaaaccatagcatctgggttctgcggtaggaattrcctgcctcttgtggccttcttcctgtagttacttagcttttagctttctctttttgctgaatcactcactacctttgtctgctttccagcaccacccccc

SEQ ID NO: 164408 - DNA, 201 bp, Homo sapiens
ttttagctttctctttttgctgaatcactcactacctttgtctgctttccagcaccacccccctaccgccgcccattattttgggcatttctcttttgctsttgttctccagtcttgttcatgttgctctggcaagttgtgccctcttcatttagtgagaattgaggagggagggcagataaatgttttgagtacaatctt

SEQ ID NO: 164409 - DNA, 201 bp, Homo sapiens
ttctagaggttgtatgaggaaaggccaatccttcagtatgtctggaagagatttgttcatgataaagggggttaacaggaaatagaatagagagggtattwtggagcaaattcatgagggactctgcacagaggctaaagagtagaacctttcttttttttttttgtaggataaagtcataattagaacattgctttaaga

SEQ ID NO: 164410 - DNA, 201 bp, Homo sapiens
cctctggggcttttgttgtttttgattgtttatttgttcagtgacttggctgtactattttattttatttatttatttatttatttatttatttatttatwcatttttgagatggagtctcactttgttgcccaggctggagtgcagtggcaggatctcagctcactgcaacctcctctacctgggttttctcctgcctca

SEQ ID NO: 164411 - DNA, 201 bp, Homo sapiens
tgaaatttccacattttcttatgaaatttttagtttttactatctcttgtactgtaaaaagacttttcagtctgctgtggaagaatatcagtaacataatygattcattttttttttttttttgcctgaaggaggaagacaatggtcctataatgcccttggataagaaaaggaaacttttgagctgcaccttcagtttat

SEQ ID NO: 164412 - DNA, 201 bp, Homo sapiens
ttttagtttttactatctcttgtactgtaaaaagacttttcagtctgctgtggaagaatatcagtaacataattgattcattttttttttttttttgcctraaggaggaagacaatggtcctataatgcccttggataagaaaaggaaacttttgagctgcaccttcagtttatcctcaaagcctgcgttgtttgtcttca

SEQ ID NO: 164413 - DNA, 201 bp, Homo sapiens
agagacttgagaacaaattatatttatagagtttcttctagtaagcttttaatttaccatttctggttatgttcattttgtcttgtaaatttgagtcaccrtctggtgtgatttcttactccagtactactttgttcttatttacctcctttgtgttgtcattgtcaaatatgtcacatttgtatatgttctgggtctaaa

SEQ ID NO: 164414 - DNA, 201 bp, Homo sapiens
tttaatcccagcactttgggaggctgaggcaggcagatcacctgaggttaggagttcgagagcagcctggccaaaatggcaaaatcctgtctctactgaaratacaaaaatcagctgggcatggtggcaggcccctgtagtcccagctaccggagactaaggcacgatatcgcttgaacctaggaagtggaggttgcagtg

SEQ ID NO: 164415 - DNA, 201 bp, Homo sapiens
cttagctgatgttgttttcctatatgagaagcacattatttgttatctcaaacaagtactattgtcatatatatatatatatatatatatatatatatatattctgcatttattatttatttaatagaattgtaagtcatttgggaattaggaatgaaggggtctgtgtgctcttgagctaccatccatctgtgattatta

SEQ ID NO: 164416 - DNA, 201 bp, Homo sapiens
ctctaatgtttataatgctgaggtaaatgtgtgctgtaattcggtaacatatattttctttttcagttctttcgggaggaccattgcctcaagggcatgartttgaactgtacgaagtgagatttcactggggaagagaaaaccagcgtggttctgagcacacggttaatttcaaagcttttcccatggaggtaagaataa

SEQ ID NO: 164417 - DNA, 201 bp, Homo sapiens
gcttcttatgatgttactggaaaaaccttagtttgatcaccttataccttgtgaaatatgaggacaggtacatgcaggtgcagtaatctgcgttttgtccraaattgttgattagcttaaatcacttagataatcataattctctgttttgctactttgtgaaaccaaagattagaatttactgacataacgtggcattca

SEQ ID NO: 164418 - DNA, 201 bp, Homo sapiens
aattcatctctctctctctgctccctgtatgcttgatagggcactgccatggcgctggccccatgggttgtaccatttagtctccacagcgtctttcttgmtgcctgtgagctcctgaggaccgaagctccctctcaccccctttttactcccatcatttgcccactgccaggcacagtggagatagacagttcacactgg

SEQ ID NO: 164419 - DNA, 201 bp, Homo sapiens
ggttgttctgcttcttatgatgttactggaaaaaccttagtttgatcaccttataccttgtgaaatatgaggacaggtacatgcaggtgcagtaatctgcrttttgtccaaaattgttgattagcttaaatcacttagataatcataattctctgttttgctactttgtgaaaccaaagattagaatttactgacataacg

SEQ ID NO: 164420 - DNA, 201 bp, Homo sapiens
tgacacttctgtgtcacctctctctcctgtcccatcctcagccaacctgacaaggaaaaattcataccagaatgcatcaaaaaggaaagaagacacaaaayaatccaagacagttaaccccactgggtcgcgggtcacaaagtgaggggcaggaccaccctggactgtcagcgcctttgccctgcctccctctttgggttt

SEQ ID NO: 164421 - DNA, 201 bp, Homo sapiens
aaaaaatttggaaagactatgggaatatgtatgtacacagatatatacatatgcacactttaaaatactacacttgcatttctgataaggggcgtctattyactagcatgagagttagggttctgactgtcactaagtatgttgaaagttacagctgtttcccaggtactgaacgtaattgaactaataagcagaagaaat

SEQ ID NO: 164422 - DNA, 201 bp, Homo sapiens
aatgcatcaaaaaggaaagaagacacaaaataatccaagacagttaaccccactgggtcgcgggtcacaaagtgaggggcaggaccaccctggactgtcarcgcctttgccctgcctccctctttgggtttgaaaggccatttcatcatttcatctcagcccccaaagacagactctagtaacaaaagttctagggaaagg

SEQ ID NO: 164423 - DNA, 201 bp, Homo sapiens
agcagagttaaaatgtagacacacacagacacacatttacgtatattaaaaatgtaatttagagtgatttagaaaaaattataatcttaggggaatataartcagtctgtccttgaatgttttacttggtgctgctcatagaatttcacaggaagcagagtaaaaatggaaaaggtccaaagaaggcagcaaaagtgagag

SEQ ID NO: 164424 - DNA, 201 bp, Homo sapiens
ctgaggaagacagtgttagcgtgaagaattcgtttttggcttggagactttggggagaaagtgtttctgcctctggtcttttcgtgaagcctgctagcaaygctcaagtctttctaaaacatgtcctaaatttcagactgaatcattgggtttggcgagaagcggttgactttctgaaaaactcgagtttcctagatttat

SEQ ID NO: 164425 - DNA, 201 bp, Homo sapiens
gggtaatttcctaaaagtagatcagatcttttagtgaaactttttttttcttggccaggcgtggtggctcacgcctgtaatccaagcacttcaggaggctkaggtggacggatcacctgaggtcaggagttagagacctgcctggccaacacggtgaaaccctgtctctactaaagatacaaaaattagccaggtgtggtg

SEQ ID NO: 164426 - DNA, 201 bp, Homo sapiens
gtaccttttatgtcttctgagtagtcaagaagagcagcggtacattttactaaacacctgaggaagacagtgttagcgtgaagaattcgtttttggcttgragactttggggagaaagtgtttctgcctctggtcttttcgtgaagcctgctagcaatgctcaagtctttctaaaacatgtcctaaatttcagactgaatc

SEQ ID NO: 164427 - DNA, 201 bp, Homo sapiens
aatgtgattctaggagttagaccaagaaaaattgagaagcctcaagaattgagaaggggaggagagagatgcttgacatataacatagcaaaaggaacaawgaatggcaggtagtttccacatagctgattatattgagaaattaaaaattttgcattaaattaaagagcagtgttttcttctataccataaggtttatgt

SEQ ID NO: 164428 - DNA, 201 bp, Homo sapiens
attgtgccacataccagctgttgatggaaagttgggtgcattaggtaaatagaaaaaaaattcattgtacagggcaagatgctttaattgtgaagagtccaggccttggttgcaaaataggccaacaaaaatattctgaagactttatctcgtaatatattgctaatccttaaactatatttggcccctgtgccaggtcgc

SEQ ID NO: 164429 - DNA, 201 bp, Homo sapiens
aaataacaccacacatctacagccacctgacctttgacaaacctgacaaaaacaagcaatggggaaaggattccctgtttaataaatggtgctgggaaaastggctagccatgtgcagaaaactgaaactggaccccttccttgcactttatacaaaaattaactcaagatagattaaagacttaaatgtaaaactgaaag

SEQ ID NO: 164430 - DNA, 201 bp, Homo sapiens
gccacctcaagcacaggggcatggccagcagcacagtgtagagtaagaccaggtacccttttgggaacatggttttttttccagtgttttttgttttttgktttttttgaggtcatgttccatattttacttacattttaagactgactttttttttttctcaaaatcacacatccatgcacctttttcttttttgttgat

SEQ ID NO: 164431 - DNA, 201 bp, Homo sapiens
agccaacctgacaaggaaaaattcataccagaatgcatcaaaaaggaaagaagacacaaaataatccaagacagttaaccccactgggtcgcgggtcacaragtgaggggcaggaccaccctggactgtcagcgcctttgccctgcctccctctttgggtttgaaaggccatttcatcatttcatctcagcccccaaagac

SEQ ID NO: 164432 - DNA, 201 bp, Homo sapiens
atgtgtgatgtatatatgttatttgaccaagagcagtggagcatcactgttcaacattacacagttatgaaatttattttattcactaaatatttattgartgtcttctgtgtatgctctaggcagttttaggtattaggataacacattagtgaaaagatatgcggaaatcacttcccttacaaacttttccttctaatg

SEQ ID NO: 164433 - DNA, 201 bp, Homo sapiens
ttctaataaatttttccagacattctatatatttgtatgtatctatgtttatatatgtatgcatatgtagaaatgtgtgtgtgtatatatatatatatatwgtgtgtgtgtgtgcaggtgtgtccacagatacatatatactatatatgcataattctgaaatactgcatagtaatataatttattaaggaaaggaggcta

SEQ ID NO: 164434 - DNA, 201 bp, Homo sapiens
cgctggagagaggaaggattcatgctctgggcgagatgtagcagcatggcgtgcgatttcatcacactactcagaatttaaaacatatgaactgtttattwctgcaattttccatttaatatttttggaccagagttaactgaaaccacggaaagcaaaactgtgttactgtaacattgaaaagacctcactcacctaacc

SEQ ID NO: 164435 - DNA, 201 bp, Homo sapiens
aaattggatagaagagctgggatttggacttggttctccctcattccaaatccataccccagattgtgatttcattgaaacattttttcagttaatctggyatttgcagtaaacaagatcaagtgtacatttttgaggcaggtaaagctaataagatcatcatcatatgatcttggcataggtgggtgtcatttctttgaa

SEQ ID NO: 164436 - DNA, 201 bp, Homo sapiens
cattgtataatagaaaatttctctttatgagtaagcttccttattatttagatgtagataaatgaatatttggagaaaatcccaaagggaggagttcagcyttaacttcatatattcaaagtgttacttctttaggtggttttaccaaataaatttgtattctgattactaactaatgtagttattgtaggaactttagaa

SEQ ID NO: 164437 - DNA, 201 bp, Homo sapiens
ttaactgtggaggatacatttctagactcccagtaggtgcttaaaactgtagctagtaacaaacctatatatattaatagttcgttttttcctatacaaaygtatctgtgataaagtttaatttatgtattaggcacagtaagagattaacgagaaccaatactaaaacagaacaattataacaatatgccaacatcacta

SEQ ID NO: 164438 - DNA, 201 bp, Homo sapiens
atactttagttagttatcaatgagctgagccaaaatcactggaacttacatcagtactgtgacctgcagcaacctctgaggagtaagatgtgtgtgaacaygtgatttttaaatttttggtagcttttcaggaaattctccagtagtgatttgctttgcactcattcccttgggcctcttcataaaagataattcaaggtt

SEQ ID NO: 164439 - DNA, 201 bp, Homo sapiens
agaaggggcctactggttttctggggtctcttttataagggcagtaatcccaatcactaggcctctgcccacatgatcaatataatcacctctctaaggcytcacctcatcaccttagtggttaagattttaacataggagttctggttagagaagaaaccatgtaacagaaaggtaaacactgacaaccctcagaagggt

SEQ ID NO: 164440 - DNA, 201 bp, Homo sapiens
gaaggagcagagaggaaagccagctttgttcagggaaaacccctccttacagaaaccaggaatagggaagcagcggtcccattagtaagattgatgactcyctcaaattccccacttaccctttaaagctcactggcactggacgctagcaagaggacaaagctctgggaatcagtaaaggaaacgttgtttcctttcact

SEQ ID NO: 164441 - DNA, 201 bp, Homo sapiens
gatttgtaccagctgtctggagagtgttgagaaggattctgaatccacatctgagcacagtgagagtgatggaattgatggggaggattgtggtggttgttattgtcatccacaaaataaggtagtattattggcattttatttaaatatctgagctatttatatgaagtcttttaaaaatgggccctggaaaactgatct

SEQ ID NO: 164442 - DNA, 201 bp, Homo sapiens
tgatttgtaccagctgtctggagagtgttgagaaggattctgaatccacatctgagcacagtgagagtgatggaattgatggggaggattgtggtggttgttattgtcatccacaaaataaggtagtattattggcattttatttaaatatctgagctatttatatgaagtcttttaaaaatgggccctggaaaactgatc

SEQ ID NO: 164443 - DNA, 201 bp, Homo sapiens
ttgatttgtaccagctgtctggagagtgttgagaaggattctgaatccacatctgagcacagtgagagtgatggaattgatggggaggattgtggtggttgttattgtcatccacaaaataaggtagtattattggcattttatttaaatatctgagctatttatatgaagtcttttaaaaatgggccctggaaaactgat

SEQ ID NO: 164444 - DNA, 201 bp, Homo sapiens
aggaggtggtggtttagagctgctgtgtacccatgacttgctcttaccatttaatgatgaaggggcaggagctaggagtgggagagcagcagtgaagatggataggagcagaggaagagggaaggatgtgttcacaggagaggccaagaggcagcgggggtgggatgagggttgcaaagcgtgaatttatgcatttctcca

SEQ ID NO: 164445 - DNA, 201 bp, Homo sapiens
ggcatttagatttttctggatcagtgcaatttacaaaaaagtggggctgggcacagtggctcacacctgtaatcccagcactttgggaggccgaggcgggyggatcatgaggtcaggagattgagaccatcctggctaatatggtggaaccccgtctctactaaaaatgcaaaaattagccgggtgtggtgacgggcgcct

SEQ ID NO: 164446 - DNA, 201 bp, Homo sapiens
accttgtaaatttcctaagtgcataggtcattgtacatcactggcaaaccacagcttcccaaggggaaggcatctgttggaatagaacctagggaagcagygaaatctcatctctataaacaatttaaaaattagctgggtgtggtggcatacgcttgtagtcccaactattcaggaggctgaggtgggaggatcacttga

SEQ ID NO: 164447 - DNA, 201 bp, Homo sapiens
ctctactaaaaatgcaaaaattagccgggtgtggtgacgggcgcctgtagtcccagctacttgggaggccgaggcaggagaatggcgtgaacccgggaggyggagcttgcagtgagccaccatcacgccactgcactccagcctgggcgaaagtgatggggagaccaacagtgtgtcaagttttaatttttccagttaaga

SEQ ID NO: 164448 - DNA, 201 bp, Homo sapiens
tcaacagaggaaatgtggtgaaagttgtgttaaaaagagattagtcgggcttcataatgtaaatgccagggcccaggagaggtctagatgagctctggagmtaaaggcacgggggtcccaggtctcaagcctggcaagcggggcaggagggggagttctatgaagagtgtgtgagtgggaagctcctttgaagagggttga

SEQ ID NO: 164449 - DNA, 201 bp, Homo sapiens
tgcagttaggagatgtcacagaatttgtatgagtgcccagggctggggaaaaggaaatttgtgagtcataattgccttttcagtgtttactactttttccsttcctcatgattcattctttggtactttgctgccgtcgtattatttatgttagtaataaacctcatttgtcgtgaagatagctttctgttaagctgccat

SEQ ID NO: 164450 - DNA, 201 bp, Homo sapiens
ttctttcttatttcctaggctatccttgtgaatactgttattattatgtctgttatacacatgtggaaactgaggtttgaagaggtgaagtcatttgatcktttgggtcttaggtggcagagcacgacaagaattggcctttgggtgcagagtccactgccctcaccgtgatattcttctttttgaaaaagcataagattc

SEQ ID NO: 164451 - DNA, 201 bp, Homo sapiens
ctgagatagcatttccggaccgaatgtccagactggtctggttacttggtgacgtttcagcagctccggtccattaagcacaggtaatggtttgttttgartgaagattaaatcctggtagtgaggctttgtttctgcagaaatatttgtatttaggataatggaattgctgactatgatttttccaaaatatgtggtgaa

SEQ ID NO: 164452 - DNA, 201 bp, Homo sapiens
aaactgaggtttgaagaggtgaagtcatttgatcgtttgggtcttaggtggcagagcacgacaagaattggcctttgggtgcagagtccactgccctcacygtgatattcttctttttgaaaaagcataagattctctcactgaccaggttccttttcactctgtacttagggaaaactttaaggtgaaagcaaataataa

SEQ ID NO: 164453 - DNA, 201 bp, Homo sapiens
atccttatgataattttcctgaatattttaatataaatgctaaaataaatagtggttgaattttagctatgtcttttggtgttagaactaattttaaaatraggcgacgttgtaaggcggtaagtaattataacgatgaaaagctatagtgatgaaggtaatattctaggcagaaggtttacctacctactattatactag

SEQ ID NO: 164454 - DNA, 201 bp, Homo sapiens
atcagttcttacctctaccactaggactcctatgctgttgttgcagccggagaagggaagattaaaattgtcttttattattgagagattataggacatcrttttcttaaaagcagtgcctttcagttgcatttactgggtagtcacagtctctgtgagtttttcacagcctcacagcctgacctggctgagtgggccatg

SEQ ID NO: 164455 - DNA, 201 bp, Homo sapiens
aaggcaatcagttcttacctctaccactaggactcctatgctgttgttgcagccggagaagggaagattaaaattgtcttttattattgagagattatagracatcattttcttaaaagcagtgcctttcagttgcatttactgggtagtcacagtctctgtgagtttttcacagcctcacagcctgacctggctgagtgg

SEQ ID NO: 164456 - DNA, 201 bp, Homo sapiens
ttctcttcctccttcttccacccctgcccactgaagaagaagtgtctgcacttctgtctaggcctgatttggatactcatgatccagaacccttttttccygcctccctggagaccttcctccttcagattccccttatcctctctgtcatggtaataatttcctccttattgttctttcccttccaatatttctgcaaac

SEQ ID NO: 164457 - DNA, 201 bp, Homo sapiens
aaaatgcacatcacagtgctttgtggaggattagcattaaatgtgagcaattactattattatcattatagattttgactagctatagatttttccattgkttaatttttttattgaaaaaacaatggattagatttgtccctggcttgcttattaacctttatatagttttcggtaagatttccgctgattattttgagt

SEQ ID NO: 164458 - DNA, 201 bp, Homo sapiens
tccttattatttagatgtagataaatgaatatttggagaaaatcccaaagggaggagttcagccttaacttcatatattcaaagtgttacttctttaggtkgttttaccaaataaatttgtattctgattactaactaatgtagttattgtaggaactttagaaaatacacaaaggcataaaaatgaacttatatttcaaa

SEQ ID NO: 164459 - DNA, 201 bp, Homo sapiens
attgtgaagagtccaggccttggttgcaaaataggccaacaaaaatattctgaagactttatctcgtaatatattgctaatccttaaactatatttggccyctgtgccaggtcgccagatatcccacatttcttcttctctttccaggcggcacatggtagcatctagtatttagtgttctcttagtaaaagtgaatggtc

SEQ ID NO: 164460 - DNA, 201 bp, Homo sapiens
tatgtattttaatatatagaattcaatgtatgtattccttactcttaaggaactaacaaaataaaatatcacaaacacggaagagataaaatataaaacaractatatattggattatttatttaccttgtaaatttcctaagtgcataggtcattgtacatcactggcaaaccacagcttcccaaggggaaggcatctgt

SEQ ID NO: 164461 - DNA, 201 bp, Homo sapiens
tggaaaaataagacattcgaagcgcatgtaagtacagagagaaaaaaaaaaaacccacagaaaagaagctggctttctgacccggattctaatcgaactakccgtttaatttttttccaactctatgtatgagtgtgttgaattagaatgttgtgggattcaactcttggagtcagggagcctctcctgaggaaaatgcac

SEQ ID NO: 164462 - DNA, 201 bp, Homo sapiens
agtgacatggaaaaataagacattcgaagcgcatgtaagtacagagagaaaaaaaaaaaacccacagaaaagaagctggctttctgacccggattctaatygaactagccgtttaatttttttccaactctatgtatgagtgtgttgaattagaatgttgtgggattcaactcttggagtcagggagcctctcctgaggaa

SEQ ID NO: 164463 - DNA, 201 bp, Homo sapiens
aattagaggaagattttgaagacatttcttagaatgcaaatacattgtttgagatgtgaatgactgtcaaccacacaaaatatttatcaactactatgtgraagacattgtgctagatataaccagtcacgggtcactgtaggctagactaacttaagtaacccaacaaaatgagaatcagacacagggtaggaaaatttt

SEQ ID NO: 164464 - DNA, 201 bp, Homo sapiens
acctggctgcacagcacaaggtgagtggtgggccagtgagcattacctcctgagtccgcctcctgttggatcagcggtggcattaaattttcataggagcrtgaaccctattgtgaactgcgcatgtgagggatctacgttgcacactcctgatgagaatttaatgcctgatgatctgttactgtctcccatcacccctag

SEQ ID NO: 164465 - DNA, 201 bp, Homo sapiens
acctatatatattaatagttcgttttttcctatacaaacgtatctgtgataaagtttaatttatgtattaggcacagtaagagattaacgagaaccaatamtaaaacagaacaattataacaatatgccaacatcactacttctacactttaggactgttatttagtaaaataagggttacttaaacatgagcactgccgt

SEQ ID NO: 164466 - DNA, 201 bp, Homo sapiens
attaatagttcgttttttcctatacaaacgtatctgtgataaagtttaatttatgtattaggcacagtaagagattaacgagaaccaatactaaaacagamcaattataacaatatgccaacatcactacttctacactttaggactgttatttagtaaaataagggttacttaaacatgagcactgccgtggtaccatga

SEQ ID NO: 164467 - DNA, 201 bp, Homo sapiens
gcactgatcctgcccacagactagcaggagatcatgtatggggaacctgactttcttgccttctgggcctaaaagctatgattgaagagtgaattgccaaraaggaggtctagccatattgtatgttggacccttatctttctttatattgtatttaaagagcatctgttgctctgtgtactctgaaaggacttagtgatg

SEQ ID NO: 164468 - DNA, 201 bp, Homo sapiens
ggatcttggctgttttatgtctttgtaacacttgcctcctgttggtgggctggggggaagagttataaggagtgaggaaggactcagctttaattgttacrgaaaaccactttcttctaccctgaggtgcccaagtgtaggaggaggccaaaccttttgcctttggagggagaatggctgaagggagcctggaggcagatt

SEQ ID NO: 164469 - DNA, 201 bp, Homo sapiens
gatagtttaaattcacctcacagttgtgataaatttctcattttggctttgtgaatttaatctgtagagcccatgagagcattttggtggaaaaaaaaaaagtctctaatgtttataatgctgaggtaaatgtgtgctgtaattcggtaacatatattttctttttcagttctttcgggaggaccattgcctcaagggcat

SEQ ID NO: 164470 - DNA, 201 bp, Homo sapiens
aggtgcccaagtgtaggaggaggccaaaccttttgcctttggagggagaatggctgaagggagcctggaggcagattctttcagcaggagggattctgctrttgttgttggtagccatagtaggtcttgggttcaggctgcaagaggcagcccctcagccacctgctgtgcagtgtgtttaccaggtagagcaggtccagg

SEQ ID NO: 164471 - DNA, 201 bp, Homo sapiens
tagttgtgggggctggcaaatctgaaatctgcaaggtaggccgaaagctggaaattcatgcaagagttgatgttgcagcttgagtttcaaggctggaaacrcaggctgatttttatccagagttctggaggcagaattccttctcccttgggggacctcagtctgtgctcttaaaccctttaactgattgtatgaggccta

SEQ ID NO: 164472 - DNA, 201 bp, Homo sapiens
ttttgtgtatggtatttgataataacagatcattcaaataatgaatgcaaaaacaaatagaattaccatatttcatctgtatagtgatggtatcattactytcttcatgatatcaagggttctaagtgtttagtttttacatgttaaattttactgtaatttattttttaacctgtttttaatttatttcattttgttctt

SEQ ID NO: 164473 - DNA, 201 bp, Homo sapiens
aggtgtctcttgactttgttgaaacccctgaattagttgctgtcttgtgtttcatttccctttatgaatggtagaattctatagctatgtcatattaaggwtctttgtggatataatcccttgatacacagatggtgaacttttggtggattgatgctgcccaaatcacgtttgctcaataccctggggtatgtgaaggag

SEQ ID NO: 164474 - DNA, 201 bp, Homo sapiens
ggctttcgtgggccccctaaagtctctataggtgtctcttgactttgttgaaacccctgaattagttgctgtcttgtgtttcatttccctttatgaatggyagaattctatagctatgtcatattaaggttctttgtggatataatcccttgatacacagatggtgaacttttggtggattgatgctgcccaaatcacgtt

SEQ ID NO: 164475 - DNA, 201 bp, Homo sapiens; identical to SEQ ID NO: 30433

SEQ ID NO: 164476 - DNA, 201 bp, Homo sapiens
gcatatcattcagggctttcgtgggccccctaaagtctctataggtgtctcttgactttgttgaaacccctgaattagttgctgtcttgtgtttcatttcyctttatgaatggtagaattctatagctatgtcatattaaggttctttgtggatataatcccttgatacacagatggtgaacttttggtggattgatgctg

SEQ ID NO: 164477 - DNA, 201 bp, Homo sapiens
cagttcttgaggattcatagcctagtgaaaagccagttctttaaagtactagtgtacacttgatgtggcaagtgttacaaagggttgtgggagcagagagsaatgactaagcacatatactccactgcatctgtgtgtgcctagtcctgctctgagataaaatttacttcatcaatttgaacttaccattttcttctgcta

SEQ ID NO: 164478 - DNA, 201 bp, Homo sapiens
gatcaaatataatattaggctgaaagcctattaaaaattatagaggaatatgtggaagacacattcataatacagagtatgaatatttttagattctctgktattggatttagatgtgcttgttctattttgtaaaacaaagaattgccctatatctttgatctgtgtgtttagatttttttagtgacagacaccttataa

SEQ ID NO: 164479 - DNA, 201 bp, Homo sapiens
cagcccatctctctcctccaggaccccttctttttggtatttcctggagtacggatgaaaatgaataggtgagcagcctctgggctaggccaggcacacargggtcccgagtgaccttgggagacttgcgggcttctggaaggaaggctcgggcggccaagcaggagtcgccgcagcgaggaagcgccaggaggcggcggg

SEQ ID NO: 164480 - DNA, 201 bp, Homo sapiens
tgctttagaaaaattggcatttcagaaagacacattttcccctccatctctgttgatgttggaagtcttcaaagtgttgctgtgatcagagaaaaacattycttgtgaaatagttttctctgagagtacagtgatttgagactggctggctgttgattcagatcatctcttctggaagaagttgttttcacagaatgtgct

SEQ ID NO: 164481 - DNA, 201 bp, Homo sapiens
tcagcctcctgagtagctgggattacaggtgtgcaccaccaagcctggctgatttttgtatttttagtagagacagggtttcaccgtgttgatcaggctgstgttgaactcttgaccttgtgacctgcccaccttggccacccaaagtgatgggattacaggcgtgagccactgtgcccggcctgtatcatttttacatta

SEQ ID NO: 164482 - DNA, 201 bp, Homo sapiens
tttgaggcagtgaagattggaataaatgtcttagaccaattggagtgcacctgtcgttcaaagaacagtggctgttgaatctagtaccttcagaagatggsgacttctccatgaaatgttcaatgttggtgccccgcattcagttttctcttaaattggttaaaaacaaataacacatactatgtttaagtggagtagcat

SEQ ID NO: 164483 - DNA, 201 bp, Homo sapiens
tgtgagtttttcacagcctcacagcctgacctggctgagtgggccatgggtacagtgttttcctagttatctgttctattattggtagaggacttcattasctccccctagtggtcagttttataatatcagattctacctgggtaaattcagcagtggaaaaatccaatttgtggccatccttatgataattttcctgaa

SEQ ID NO: 164484 - DNA, 201 bp, Homo sapiens
gcccaccttggccacccaaagtgatgggattacaggcgtgagccactgtgcccggcctgtatcatttttacattaacaaatggagcagatttctttatctrtttgagttgttcagagatcttgatatgtctacttctgttgtcatttcttgaaagggtcctctctaacgtcttaggtctggaagaattaagtctgtttttt

SEQ ID NO: 164485 - DNA, 201 bp, Homo sapiens
gttttagatagaacattatataatggggtaggagagaaatgaggcaaaaacaaggctgcagtacatgaaaggtggagagtcctctctgtctatatctgtcyctgtatacatatatggactgtttaagtacaatttgcttttgactttttaatttgattagtaccatttggaattgtgttattctgactcttgttattgata

SEQ ID NO: 164486 - DNA, 201 bp, Homo sapiens
gattaaagagtcatgacagagtgagagttggtttatgaatgagaggttggtaaggaagagggagcattggttttagatagaacattatataatggggtagragagaaatgaggcaaaaacaaggctgcagtacatgaaaggtggagagtcctctctgtctatatctgtccctgtatacatatatggactgtttaagtacaa

SEQ ID NO: 164487 - DNA, 201 bp, Homo sapiens
attctgttataacagcacaaaacagatgaagacatccatggttttcagacttgagcatgtgtcagatcccctggaaggcttgttgaagcacagattgctgsgttccacccctgtgttgctgattcagtaggtctggggtagttgctgacaacttaaacttttattctgggaggatactttgagaaccactgtttcatatgt

SEQ ID NO: 164488 - DNA, 201 bp, Homo sapiens
gacttccagcctccagaactgtgagaaaatacatttctgttctttatatatcatccagtctcaggtattctgttataacagcacaaaacagatgaagacakccatggttttcagacttgagcatgtgtcagatcccctggaaggcttgttgaagcacagattgctgggttccacccctgtgttgctgattcagtaggtctg

SEQ ID NO: 164489 - DNA, 201 bp, Homo sapiens
ccagactattggtcctattatctcctagagcatggagaattttattaaggctgccacatgtatcatttagcttctcagcaggacaagtgggtcactgtctyaggaatcttgacatttaaggtacacaggcaaattaaaattaaacatctttgcagtggtataaagaggattgtaagcataaaaaataattacagatttcta

SEQ ID NO: 164490 - DNA, 201 bp, Homo sapiens
cagttaaaacttgttttcattacatacaaagctaaaataatctagataatgcccagtactagataatgcccagattatctaaaataatctagataatgccyagaatctgaaatatttattggataatatggagatttctccagtcaagaagtttgccaccaggtagcaccaggtaataaattaattgttaaaactgtaaaa

SEQ ID NO: 164491 - DNA, 201 bp, Homo sapiens
tagatgtgtcaaagacatctcaaactcaacatatacaatattgaatttatggtcttccttcacagacctgcctctcttccagttttctttgaaacgtgagycgtgcatgacacctctcttctttaccttaccccatatttccgttttatcaagttctgcagatttgccttctgatagctctcaaagccatctatgtgtttc

SEQ ID NO: 164492 - DNA, 201 bp, Homo sapiens
gtaacaatgccacctctttggatcagaagagttcctgtttgttatgcaatgtgtgcacttcattatttacacgatttcactaggtgaatgggagctgtgtrcacagccaggtgagcctgcagcagcgccccagactctgacagcgaacaccctctgtctactgccttctgctagccctgctttgaaacaatacccttttct

SEQ ID NO: 164493 - DNA, 201 bp, Homo sapiens
tttagatgtgtcaaagacatctcaaactcaacatatacaatattgaatttatggtcttccttcacagacctgcctctcttccagttttctttgaaacgtgrgccgtgcatgacacctctcttctttaccttaccccatatttccgttttatcaagttctgcagatttgccttctgatagctctcaaagccatctatgtgtt

SEQ ID NO: 164494 - DNA, 201 bp, Homo sapiens
acttttggtatcatgacattggtactcatcttccagcaaaatgattatttgattatttgcctttttacttcataaagtgttagcccatttttaaaaggctrttctgacgctcaaagactgtctcgcttgtgacctaaatattgttaagctgtatacatgtttacagtaactataatgaattataattattttctgtaaaaa

SEQ ID NO: 164495 - DNA, 201 bp, Homo sapiens
acaagtttaaggtccagtttacttgttacttttggtatcatgacattggtactcatcttccagcaaaatgattatttgattatttgcctttttacttcatraagtgttagcccatttttaaaaggctgttctgacgctcaaagactgtctcgcttgtgacctaaatattgttaagctgtatacatgtttacagtaactata

SEQ ID NO: 164496 - DNA, 201 bp, Homo sapiens
acagctaagaggtggcagagtcaggattggaatccaggcagtccagtgcaaagtgagcctgttcctgagcaccacattgagtggccttagggttcatatgyggactcttcaaagagtttacaacccaacaggagatgcctgagatgaaaacagaccccaagtgcagacgtaggcctcccagtgctatagcatggttaaacc

SEQ ID NO: 164497 - DNA, 201 bp, Homo sapiens
ttaaatgtagtggtacctgcatttctatttaacatatttcttgtattatcattatttacttgtattatagttataattatttacttgtattatagttttartaattataattatttactcctctcctcccccagagaactgtgaatttctcgagagcagaagcagtattttattccttttttttttttttttttggttctc

SEQ ID NO: 164498 - DNA, 201 bp, Homo sapiens
atatactccactgcatctgtgtgtgcctagtcctgctctgagataaaatttacttcatcaatttgaacttaccattttcttctgctaccttctcaaacacmaattttctttaatcttctgcctcactctaaaacagagactatggaccaacatctgggccctctcaccatgaagtgtgtttcttcctcacctagcattttg

SEQ ID NO: 164499 - DNA, 201 bp, Homo sapiens
catatactccactgcatctgtgtgtgcctagtcctgctctgagataaaatttacttcatcaatttgaacttaccattttcttctgctaccttctcaaacayaaattttctttaatcttctgcctcactctaaaacagagactatggaccaacatctgggccctctcaccatgaagtgtgtttcttcctcacctagcatttt

SEQ ID NO: 164500 - DNA, 201 bp, Homo sapiens
tctaaactcagccagagatttaaatggtaaacaaacctcttccttttatttatttatttatttatttatttaagttccatcccatgaaacttctcctaccmcttgcaaacctatttgagatggatctgaaatgttctgtgcaaaagttgttaggtaattaccaaggaaatcagtttttggctttatcgtaggaaagaggaa

SEQ ID NO: 164501 - DNA, 201 bp, Homo sapiens
aaagaggaaatcagatttttaaaaaatgtagcattaatagcatgcatttcatagtgaataataactgtctttttcttttgggaaaaattaaagtatgttgwaatattaggacgtacttgataaatagagactgtgctcgaaaattaattccaagttgataaagttgatacctcaaactataaaatctttaggtttgttatt

SEQ ID NO: 164502 - DNA, 201 bp, Homo sapiens
ggagctggagcagtgaagtctgaaaagttgaaagggatgaaatcctaagcacacagggagactggcttttgctgagaggatgggcactctctgtgctgcartgggaaggaagaaagaaggaggtggtggtttagagctgctgtgtacccatgacttgctcttaccatttaatgatgaaggggcaggagctaggagtgggag

SEQ ID NO: 164503 - DNA, 201 bp, Homo sapiens
gttgcagcaggctaaaggccataggaagggaggagctggagactccaggtcgcagccaccttggtgggctggggtggggcaggaggccgcagcaacagagrcggggtgggattgaagaagtctttttttttttcttttttaaacaaaagaaatagaacttgtctatatgctggggtgtgggaaaggagcaagtagatggag

SEQ ID NO: 164504 - DNA, 201 bp, Homo sapiens
ttacgggccaaagtaatacagtgattgagcagtggagctgaaggagatccaggcagcttgactggcagagccctttttcttcaccacgacatgggcagagsttagagagttttgccacactggcggtcgagtgacacatcaaggagggatgtggttgcagcaggctaaaggccataggaagggaggagctggagactccag

SEQ ID NO: 164505 - DNA, 201 bp, Homo sapiens
caccagtcatgtcccagtgaccaaggagcacataggaggggacttggggagcgtgtgagcctcagtgtggacccttctcgtctcctgcagaattgatcctyttgtttctcaggggagggagcatatctggcatgcattgaaatacttcttctatggaagtgccttttatatgataaattgagaagcacttattaattatct

SEQ ID NO: 164506 - DNA, 201 bp, Homo sapiens
tggaaatcaagaaaccagtgttgaagaatgagttttaattgcttctgattttacattaaatataaaacataaaaatgatgtagtttttcttttctttgatstatgactgcaccaagcttttcccaatcttttatagtgaatttcataaaggaagcttcatttttgggagaagagtccaatggtgttataaagccctgttcc

SEQ ID NO: 164507 - DNA, 201 bp, Homo sapiens
ttaccttgttacaacattgaaagggaacttgggctctgtatttcaggtcactagtgtgttaaaagtcagttttctagaatgtcctttaaaataagttgatygcctatagcactgttattttattaacaggagagtcttacacaaatctcagcgaagcataattccctttaattagcactagaaataatgtggtttatgatg

SEQ ID NO: 164508 - DNA, 201 bp, Homo sapiens
gatatgaagggagctaaaaagccttgggacaactagacttttgtttcttgagcacatttaaatttgagccttctttgtaggaaaaattatacttgattgcyctactctaatttcagaagcattttgaatgcattattgaataaattttgagttttatggcaggcagcagggagttgggcaaagatttgaaagaatggcaga

SEQ ID NO: 164509 - DNA, 201 bp, Homo sapiens
agatcccttctccctagcctgagttctgaacaaattaggaaagaaggtactcttagagtcatcagatggagaacaaaacatcacctctattgtggccagarcgatactggagacatagcttaattcgagagaagagtgtctgtccagaattaggcgggggcgggaaaggtagggcggtggggggctgggggtgttccaggt

SEQ ID NO: 164510 - DNA, 201 bp, Homo sapiens
acatatgacggatcttctcttaggacattcgcgtgcatcaggttgtcttccctccctcgctcctccttgtcctttctttttcctgtggaggctgcttttcytttctgctctccaggcctctcctaacagcctcttctcgcagctccttggacctcaagcctgggaagtccccttgtttgtctcctgtgttagatcggatgt

SEQ ID NO: 164511 - DNA, 201 bp, Homo sapiens
tcgctcctccttgtcctttctttttcctgtggaggctgcttttcttttctgctctccaggcctctcctaacagcctcttctcgcagctccttggacctcamgcctgggaagtccccttgtttgtctcctgtgttagatcggatgtttcctggatgccgtggaagtcccctcgtttgtctcctgtgttagatcgaatgtttt

SEQ ID NO: 164512 - DNA, 201 bp, Homo sapiens
ttttcttttctgctctccaggcctctcctaacagcctcttctcgcagctccttggacctcaagcctgggaagtccccttgtttgtctcctgtgttagatcrgatgtttcctggatgccgtggaagtcccctcgtttgtctcctgtgttagatcgaatgttttctggatgccgtgccatcctcttttttgagttgctccgtc

SEQ ID NO: 164513 - DNA, 201 bp, Homo sapiens
ataggccaatgctagtagtcaactgcatatttgaatagtaatacattgctggctatatgcaaaattgtctttttactgtaaaagtaaatactaataattcwatctttcagcctatcttttgtaaatatggcacagtatttattcatggaaaattcagttttttaccatggtgattgtaccatcctctggtttgataaacat

SEQ ID NO: 164514 - DNA, 201 bp, Homo sapiens
atggtatttgataataacagatcattcaaataatgaatgcaaaaacaaatagaattaccatatttcatctgtatagtgatggtatcattactctcttcatratatcaagggttctaagtgtttagtttttacatgttaaattttactgtaatttattttttaacctgtttttaatttatttcattttgttcttaggtgttg

SEQ ID NO: 164515 - DNA, 201 bp, Homo sapiens
atctttatagcaatgatctataaatgccagagttaaacatggaagggtttgaacatgtactgagtagttttaattcaaaaatatccttgatatttttatataacagtattttataatttgatatactacatatagcaaagtgagtgattcctatacacagtaaagagaatttagaatgagttcttggacatttacgtaact

SEQ ID NO: 164516 - DNA, 201 bp, Homo sapiens
ctacagaatgggagaaaatttgtgaaatctgcccatctgacaaggtctaatatccagaatctacaaggaacttaaataaatttacaaggtaaaaaaaaaamacatcaaaaactgggcaaagtatatgaacagacacttctcaaaagaagacatttatgcgaccaacaaacatatgaaaaaaagctcaacagcactgatcat

SEQ ID NO: 164517 - DNA, 201 bp, Homo sapiens
ctcctgagtagctgggacttcaggggtgtgccaccatgcccagctaattttttgcatttttagtagagacagggtttcactgtgttagccaggatggcctygatctcctaaccttgtgatccacccaactcggcctcccaaagtgctggggttacaggcatgagccaccacactcagccctattagtttttttttagttaa

SEQ ID NO: 164518 - DNA, 201 bp, Homo sapiens
gaatgcttttatgctgttgttgtgaatgtaaattagttcaaccattgtggaatacagtgtggcgattcctcaaggatctagaaccagaaataccatttgayacgcaatcccattactgggtatatacctaaaggaatataaatcatttgactataaagacacatgctcacatgtgtttattacagtgcaattcacaatggc

SEQ ID NO: 164519 - DNA, 201 bp, Homo sapiens
gcttatccagtggtgatggtgtaataaagaggcctccacggtgccctccgcctccactctggttttgttgtagtggttgtttgccagtcccagatatgaasagttacagatatttgaagaagaactgtaaatgaaagaacccaaatcagacaataaagtgagttaaaagacataaatactttgtaagaagagaaaaactgt

SEQ ID NO: 164520 - DNA, 201 bp, Homo sapiens
aagggggttaacaggaaatagaatagagagggtattatggagcaaattcatgagggactctgcacagaggctaaagagtagaacctttcttttttttttttgtaggataaagtcataattagaacattgctttaagaaaatcaagctggcagcactgaatgagatgggatctgggagagagtgtgagccagtttgaaggtt

SEQ ID NO: 164521 - DNA, 201 bp, Homo sapiens
gctgaggtgggcggatcacctgaggtcaggagttcaaaaccagcctgaccaacatggtgaaacaccatctctactaaaagatacaaaaaattagccgggcrtataggcacgtgccttaatcccagctactacggaagctgagacaggagaatcgcttgaacccgggaggcggaggttgtagtggcctgagatcgcatcatt

SEQ ID NO: 164522 - DNA, 201 bp, Homo sapiens
ttgttttctgactgtttaacctcaattccttcattagtacataaggatattaaaattctacctacccttatacaactcaggaagagactataaaaattaaycgtttaggccgagtgtggcggctcatgcctgtaatcctagcattttgggaggctgaggtgggcggatcacctgaggtcaggagttcaaaaccagcctgac

SEQ ID NO: 164523 - DNA, 201 bp, Homo sapiens
aatatggaccatatatagaccatctttctagaagttttgtgggaaaggcaaggagggatttagggacaacgtttagagaatagtcaagtgttttttttttgtttttttttttttttaagttaagatttaggaaatactagaggttttgtaggcatattgaaaataatctgtgaatacaacagttgatcccttgatatggtg

SEQ ID NO: 164524 - DNA, 201 bp, Homo sapiens
gctgtggggaagccgcacggaatcgccatcattgctctgtttgttcaggtaaacggtctgctgtgattatcgtattgtttagagatgctaatttctaaatmattttgtaaaatttttttattctcaattttattgcttagagatgaaattacacacatagagagaacacctgataaaaacagaaaacttgatccttatggt

SEQ ID NO: 164525 - DNA, 201 bp, Homo sapiens
tttcctggatgccgtggaagtcccctcgtttgtctcctgtgttagatcgaatgttttctggatgccgtgccatcctcttttttgagttgctccgtcatctyagggaatttcttggtttatttgcttgtacagttcatcttccaggaacttcctgagaaaaggggcaagtgagggctacatgcttggatgcctatgtgtctg

SEQ ID NO: 164526 - DNA, 201 bp, Homo sapiens
gtttttagagagttaatagaaatcactgaaagagcaaaactttttattagtctagttatttccttatgtgaatttccccaggtgtggagaatggaaagtctggacgtaaagtggggatgccggttatttctgtaagtcactcataggctttgaaatagttttgccttggtgtgtacaggaaaattctgcatgtgcggggtg

SEQ ID NO: 164527 - DNA, 201 bp, Homo sapiens
atcttccaggaacttcctgagaaaaggggcaagtgagggctacatgcttggatgcctatgtgtctgtaagtgtctttattatacttcacacttgattggarttagcctggagcggcagtctgggttggaagtattcttgacttcgtttgatgtttgacatcatgattacattgcttgaagcttccagcgttgcagttgaaa

SEQ ID NO: 164528 - DNA, 201 bp, Homo sapiens
agtttttagagagttaatagaaatcactgaaagagcaaaactttttattagtctagttatttccttatgtgaatttccccaggtgtggagaatggaaagtctggacgtaaagtggggatgccggttatttctgtaagtcactcataggctttgaaatagttttgccttggtgtgtacaggaaaattctgcatgtgcggggt

SEQ ID NO: 164529 - DNA, 201 bp, Homo sapiens
ttttaatcgtttagtcttttgattgaactcttactttctgctttcttgtttttaatttctaaaacattgaacttacgctgcaattaaaaaccttttttttwaaaaaaaatacaacatccagtatttatttcatgaatgtatgatctttcttcattcttttctatattgcttcttttctatccctacctgtctctgtttact

SEQ ID NO: 164530 - DNA, 201 bp, Homo sapiens
gttatgcaataactttccctattgcatctgtatcaatagagaaaaatcttttaagaaacatctgagtcacatgacaggactattttcctctaaagtctaawcaatttaaatgacatgatttaaaatgatgatcttaaatgtgaattgttgaataagagcacaaatgattcccttgaaatttgtatctagctttgataaaca

SEQ ID NO: 164531 - DNA, 201 bp, Homo sapiens
tagaaatagaaattccatctttggtggtaatatagtgcagggacctgagaagagaaggtcttaaggtgctgttaattagcaaaaatctgaaccccacagtstcaaagcaattaaggctgttaattgaatatttgggtgcttagaggattggctcatatgtggctggacagggaaccctaggcttgcatacaggagttacat

SEQ ID NO: 164532 - DNA, 201 bp, Homo sapiens
gttaattaaatatttcatttaaggattatcctctatggtgctctttttgcttatggtttagttgcagagagacaacacaatgggctttgtccttgcacccyctaatgatataaggagttttgatgtctgtaagcaccccacattcagaaggggactgctttcaccttccacaggagggtggtagtgaggctgtggcaccct

SEQ ID NO: 164533 - DNA, 201 bp, Homo sapiens
tgcagggacctgagaagagaaggtcttaaggtgctgttaattagcaaaaatctgaaccccacagtctcaaagcaattaaggctgttaattgaatatttggrtgcttagaggattggctcatatgtggctggacagggaaccctaggcttgcatacaggagttacattctacaaataatcatgaacaattcagaaggagcaa

SEQ ID NO: 164534 - DNA, 201 bp, Homo sapiens
agtaatctgcgttttgtccaaaattgttgattagcttaaatcacttagataatcataattctctgttttgctactttgtgaaaccaaagattagaatttaytgacataacgtggcattcaaggtagacttctcaggttaattttctctactgtattagtttgccaaaaataattttaactaataacaataagaaacagcct

SEQ ID NO: 164535 - DNA, 201 bp, Homo sapiens
tttatttatttatttaagttccatcccatgaaacttctcctaccacttgcaaacctatttgagatggatctgaaatgttctgtgcaaaagttgttaggtamttaccaaggaaatcagtttttggctttatcgtaggaaagaggaaatcagatttttaaaaaatgtagcattaatagcatgcatttcatagtgaataataac

SEQ ID NO: 164536 - DNA, 201 bp, Homo sapiens
ggcagctgttgatttccagctatggatttattttattcattgtaaatgtttctaagctttaatttagaatccatgagatagtcatagattcatgtagtctycttcgctgttctgagtttagtcagcatgtgagcattgcccaaaagagttactgggctttatatgtacttagtcagagtcagtttaagatggaaatttcga

SEQ ID NO: 164537 - DNA, 201 bp, Homo sapiens
gacaaaagcaaaactccgtctcaaaaaaaaaaaggtgaataatactctttctgcctgtggttctttctgcctgtggttatcccctgctcttccccacctayggctgctgttccctagtaacaactactttgaaactttctagctgtttctcctgtggttacctccaagaatgtaagaatataataatgctgttatgctttg

SEQ ID NO: 164538 - DNA, 201 bp, Homo sapiens
actccgtctcaaaaaaaaaaaggtgaataatactctttctgcctgtggttctttctgcctgtggttatcccctgctcttccccacctacggctgctgttcyctagtaacaactactttgaaactttctagctgtttctcctgtggttacctccaagaatgtaagaatataataatgctgttatgctttggtatgtaagcta

SEQ ID NO: 164539 - DNA, 201 bp, Homo sapiens
agcacgtttaagggtaacaatgccacctctttggatcagaagagttcctgtttgttatgcaatgtgtgcacttcattatttacacgatttcactaggtgamtgggagctgtgtacacagccaggtgagcctgcagcagcgccccagactctgacagcgaacaccctctgtctactgccttctgctagccctgctttgaaac

SEQ ID NO: 164540 - DNA, 201 bp, Homo sapiens
acttaagtagtgagaaaatgtgtgagactgcccacacttgtgcagtagtgtcactccagctgactacaagcaatgtcttaagggtaatgacatttttaatsaaccatcattatgggagaaattgccaatcaagataggtcatttgtgcccttcactgtttcttattatagaaactttaattaggatattttatttctgggt

SEQ ID NO: 164541 - DNA, 201 bp, Homo sapiens
gtttataatgctgaggtaaatgtgtgctgtaattcggtaacatatattttctttttcagttctttcgggaggaccattgcctcaagggcatgaatttgaaytgtacgaagtgagatttcactggggaagagaaaaccagcgtggttctgagcacacggttaatttcaaagcttttcccatggaggtaagaataacaaatca

SEQ ID NO: 164542 - DNA, 201 bp, Homo sapiens
gatttacatctaacctctgcaatctcaggcaagctagtaaacctcttccaacctgcctataaaacttatctatgaaaaagggctagacattagctcagagktcagcgaagagtaaaccctgctgtgtttcctgtttttaggaggagatggggaacatcaaaggtgggattgggattgtgaggataaaaatcttgtcaaaac

SEQ ID NO: 164543 - DNA, 201 bp, Homo sapiens
tacatctcctgatggaaatactgggtgatgcagtatttgattatgcaggtattcatcctttgaatgagttctagtgtttgtgcccagacctggagttttgyttcatggagattcaaaaggatgacatccaaggaaagataactgaatcaatgtgaagtctgtgagtccctccagttgtcttcctcctcatcaggactaaaa

SEQ ID NO: 164544 - DNA, 201 bp, Homo sapiens
ggaggagatggggaacatcaaaggtgggattgggattgtgaggataaaaatcttgtcaaaacatcctgagggggatgcaaaaagctttttggattgggcgycagtggctcacgcttttaatcccagcactttgggaggctgaggcaggcagatcacctgaggttaggagttcgagagcagcctggccaaaatggcaaaatc

SEQ ID NO: 164545 - DNA, 201 bp, Homo sapiens
tttttgaattttgttcatttttaaaaatttttttttctttgtctttgtcagattgggttaattcaaaagccttgtcctcaagctctgcagttctttcttcyacttgtttgagcctattgttgaattgtttcatccatatcctattttattcttttaacttctttaagttagttttcacttttctctgctaccttcttcagt

SEQ ID NO: 164546 - DNA, 201 bp, Homo sapiens
tccagcaccatttgttgaatagggtgtcctttccccactttatgtttctgtttgctttgtcaaagattagttggatataagtattggactttatttctggrtactctattctgttccgttggcgtatgtgtgcctgtttttataccagtaccatgctgttttggtcaccatagccttatagaatagtttgaagttggataa

SEQ ID NO: 164547 - DNA, 201 bp, Homo sapiens
tctttttaaaattaagttataaccatgccatcattgtacaaaaataatgatattaatttcttaatataatcaaatattcagactattcctttttccttcartctcataatttttaacaatttgatcaaatcagaatcccttacaatccatatgttgtattttaatgattacctcttgtctcttttaatctaattttcacct

SEQ ID NO: 164548 - DNA, 201 bp, Homo sapiens
caaaagagaaatcactttctaaccagcaaaagcttttacagaagtcttcagattctgtatttttaaaagtaatgagaattaacttttcagaagcctggaartagaactcaacacacctgtttgagaagataagcgacgagaggcaccttagcttagcctgcgaggttaaaagttaagactccagtctgtattctcaaacca

SEQ ID NO: 164549 - DNA, 201 bp, Homo sapiens
acagtggttttccttgtactatttaagttttgtaccatgtacaaatacgtgttccaaaagcagtgttacttctattcattttaggagttaatatgaaagtmctgacattaaatctgtttaggctggtgatctaatattgctagttccttggtgagggttgtggtactttcactaccacatccgtctgtttagtagttcagt

SEQ ID NO: 164550 - DNA, 201 bp, Homo sapiens
cttgaacccgtgaggcagaggttgcagtgagccaagatcgcactaatgcattccagcgtgggcgacagagtgagactccatctcaaaaaaaaaaaaaaaaaatgatgtaatggactttggggcctctgggggaagtgggagaggagaatcagggataaaagactacacattgggtatagtgtacatttcttgggtgacagg

SEQ ID NO: 164551 - DNA, 201 bp, Homo sapiens
ttctcctttatcatatgacatgagatttattgacttcacatcaacatttaagtattgctaactttatgtagtagtatttgggttggtgtttggtgcatttscagttgcacaaaggatagctgtattatgttacgtgtaattatgaccttattattgtctttatttgaagattatgtatgatctcaggagatgtgtatggat

SEQ ID NO: 164552 - DNA, 201 bp, Homo sapiens
tctcctatgcatgcttgcaaggtagagcctaatcgtgggagtgacttatagcacgtttaccatttttctattggctggatgcaagtcccaggttcactgaycctttatacagagcatgacagtggggtcctcactagggtctgtctgccactctacatatttgaaacaggagtggcttctcagaatccagtgaacctaaat

SEQ ID NO: 164553 - DNA, 201 bp, Homo sapiens
catgcaggagtccggcaggagaatctcctatgcatgcttgcaaggtagagcctaatcgtgggagtgacttatagcacgtttaccatttttctattggctgratgcaagtcccaggttcactgaccctttatacagagcatgacagtggggtcctcactagggtctgtctgccactctacatatttgaaacaggagtggctt

SEQ ID NO: 164554 - DNA, 201 bp, Homo sapiens
tggccagggaaatgcagacagatggtgaccccactcatggctgcagacaccaggtggttcaagtcactgtaggtaggtgtgggcagctttagggttctgargcagatgtcatagagagctttatttattatcattgcagaaggtctagttttgagaagtttggtttgatggtcagtccgtggaaaagtgtggcatgagcca

SEQ ID NO: 164555 - DNA, 201 bp, Homo sapiens
tcataagcatggtacctatctcccaaagtgccagagtgacagtgaggacttgtcaagagccattcatctctagaagcactgtgaactttagccaagcatayggttcagttattcaggatctttaaagacattattgaaccagcgggagtgggcttgttatgtcttaactttaggggggaaaagggggtggggtagagattt

SEQ ID NO: 164556 - DNA, 201 bp, Homo sapiens
ttactggcagcacactgccatcctgatttcctgttatgagaaaaagctcagcaattgctccaaaacacaggatccccttactccaccaaatgctggttatktactagctcttcctctaaaacaccagggagagcttatccagcctgtaccagagattggacaagcatagacatagaattacgtatttcctctcaacaggac

SEQ ID NO: 164557 - DNA, 201 bp, Homo sapiens
tctttaaagacattattgaaccagcgggagtgggcttgttatgtcttaactttaggggggaaaagggggtggggtagagatttaggcttttgcatttatarcatatactttttagggaaaagtgttaattaagcataattttattttcagcatttataagataaacatgatgtagcatcaactgttcattgtccatagctt

SEQ ID NO: 164558 - DNA, 201 bp, Homo sapiens
agtagagacagggtttcaccatgttggccaggctggtctcaaactcctgacctgaagtgatccaccagcctcggccttacaaagtgctaggatcacagccrtcagccaccatgcctggctgtgaggctaaatttttataagaaatgttctatctgtgtttaaattttgtaaaatttactttgaaaaaatagactcacatac

SEQ ID NO: 164559 - DNA, 201 bp, Homo sapiens
ttgtttctattacgttagtttcagaaagtgcctttctacaaggttttgaagttgttaatattttctgtagttccattggaaggtaagaacaaagatcaaargaaagaaagagacacttttacccaaggatcagtagtgaaaatagtacattgtaggcaggtagatgtgttgagaatcatactaagacttgggccttatttt

SEQ ID NO: 164560 - DNA, 201 bp, Homo sapiens
aaactgtttgcttagtactaggatgccttttatgtaagagattcgcaaattattacattaagtcacaacataatatcttatttggcagctttggtaacctmaggaacaactcagcctcgtaatgtcaagaagctgcttccaattaataggaaactccagcccctgccacaccctgagagcggtttgcttcctgcctgtggc

SEQ ID NO: 164561 - DNA, 201 bp, Homo sapiens
tattttctgtagttccattggaaggtaagaacaaagatcaaaggaaagaaagagacacttttacccaaggatcagtagtgaaaatagtacattgtaggcakgtagatgtgttgagaatcatactaagacttgggccttattttcaggataaaggtgtattttgattgccaatttctgctgctatgctactgttttttgttt

SEQ ID NO: 164562 - DNA, 201 bp, Homo sapiens
cttagccaggtaaccttaagatcttctactatttttctgtttatgagacatatggataacctgccctcttaatgtttccttggaagttcaaagtctctaayaagtgccttttgtgggatcttgcatgtgttaaccttctcagtaactgagtgccattattgagagtgtgtgcatactggctggagggtccactagttgaca

SEQ ID NO: 164563 - DNA, 201 bp, Homo sapiens
cttgaattaactgaatcaagacaaagaaaaagaattttaaaatgaaattttaaaagaaatttgggtttatgttaaatggccaaacctaagaataattggtsttcctgcagaagaagagaaatctgaaagtttggaaaacttatttgaggaaaactttgctggccttgctacagatctagacatccaaatacaagaagctca

SEQ ID NO: 164564 - DNA, 201 bp, Homo sapiens
ccagaagcaatttgccttcagctggcaaggccagcagtataccttgactgtcctacctcaagggtatatcaactcttcagttttgtgtcataatcttattsagagagaacttgatcgctttttgctcccacaagatatcacaatggtccattacattgatgacagtacgctgattggatccagtgagcaagaagtggcaaa

SEQ ID NO: 164565 - DNA, 201 bp, Homo sapiens
ttctccctgatcattgtcttatgcaccagaccccatacctcacacctagtaaggacatcagtctagtaactacccatttcataatcatttttctccttatkattgaatcactttttcagcacacaaatatactttatttctcccattaaaattcttgaccccaattctatgtgctggctcatttttaagcttttcattggc

SEQ ID NO: 164566 - DNA, 201 bp, Homo sapiens
caaaatgtagtggaaagcttcaacaataggctagaacaagtagaagaaagaacttcagagcttgaagacaaggctcttgaattaactgaatcaagacaaaraaaaagaattttaaaatgaaattttaaaagaaatttgggtttatgttaaatggccaaacctaagaataattggtgttcctgcagaagaagagaaatctga

SEQ ID NO: 164567 - DNA, 201 bp, Homo sapiens
tttgaattataaaaacagactcacagcccctcaaccaatttccagacttgagctagtttacagacccagaaccccttgaatgaaggggaggccaggtcccsttgaggaaggaccccactatattaccaacaatttatgctgtgaatctttctcccgtccttccccaaggagacctccgaccttttaccagggtaactgtgc

SEQ ID NO: 164568 - DNA, 201 bp, Homo sapiens
gagtatctgatgggttaggaagtcacgaaatgaggagttcttgccacatttgcagagtccctccttgataaggtttggcggtgtccccacccaaatctcaygttgaattgtagttcccataatccccacatgttgtgggagggacccagtgggaggtaattaaatcatgggggtggttacccccacactgctgttctcatg

SEQ ID NO: 164569 - DNA, 201 bp, Homo sapiens
agtaaaattcataggaggcctactgcattcctacttaatttacataagcagaaacttctaggtcaaatggacaaaaaactaatttgaattataaaaacagrctcacagcccctcaaccaatttccagacttgagctagtttacagacccagaaccccttgaatgaaggggaggccaggtcccgttgaggaaggaccccact

SEQ ID NO: 164570 - DNA, 201 bp, Homo sapiens
aaccgagtactgagggaagccatttcggagataccactgcgcattgattttctctgacttctaggaaagtacgtcttttacttggttttttttttttttttaaaaagtggcaggcgaagtttgtatatgtatgtatagcatgtttctggatagttatccacagaatgtatcagaatgctgctagtcttcctctgaagcaca

SEQ ID NO: 164571 - DNA, 201 bp, Homo sapiens
actgctggtgtgaatgtaaactagtacaatggaaagccatatagagattccttacagaactaaaagtagaactaccatgtgatccagcaatcccactcctrtgcgtctacccagaggaaaataagtcattatatgaaaaagacacttgcacatgcatgtttatagcagcacaacttacaattgtaaaaactatggaaccaa

SEQ ID NO: 164572 - DNA, 201 bp, Homo sapiens
tattcccctggatgaggttcattcttacgttctgttccataacctagttgtgttattaacttcccatcatacatccttttattaaaaatcctacactaccrgtttttgagttcctattaggtgtcacaatcagttaatcccacttacggcatacagcagtcattattccagtttatacttgaagaaacttaggcccttact

SEQ ID NO: 164573 - DNA, 201 bp, Homo sapiens
aggccttggcttaggcaaagagttcatgatcaacaacccaaaagcaaatgcaacaaaaactaagacaaatagatgcagcttaattcatctaaaatgcttcrgcacaacaacaaaaaataataatcagtggaataaatgaccacccgcagaaagggagaaaatattcgcaaactatgcattcaatagaggaccaatatccag

SEQ ID NO: 164574 - DNA, 201 bp, Homo sapiens
gtgaaacttgcaaacatatcagtaaggagaaggatgagatttcttttttaatagtcttctttatcaggaatgttttgcagatattgattttttttttttttacaatgagaaaaatatgaccaaaaactgaatattaaaggaagcagagtgtgattcccggtgctaaacagtttctataaaatgtggctaataacatattgg

SEQ ID NO: 164575 - DNA, 201 bp, Homo sapiens
agtaccaccatcattcttcacagaaatataaaagtatcatatttctgccaaaagcaatccacaaattcaatgcagtttccttcagaataccaccatcattsttcacagaaatataaaaaaaaaaatcctaaaatttatgtgagaccaaaaaaagagcccatatagccaaagcaagactaagcaaaaagaacaatctggagg

SEQ ID NO: 164576 - DNA, 201 bp, Homo sapiens
agctcactgtagcctctacctcctgggcttaagcaatcctcagcccgtctagtagctaggattacaggaatctgccactgtgcttggtaatttttttttttaaggagatggggtctcactatgttgcccaggctggtttcaaactcctggcctcaagcagtcttcctgctttggcctccccaaagtgctgggattataggc

SEQ ID NO: 164577 - DNA, 201 bp, Homo sapiens
aaagtggtgctaatgggaaagttcatagcattaaattcctacatcaaaaagtctgaaggaggacaaatcaacaatctaaggtcacacttcaaggaactagraaaacaagaacaaagcaaacccaaacctagcagaagaaaagaaacagcagagatcagagcagaactaaatgaaattgaaacaaaaaaatacaaaagataa

SEQ ID NO: 164578 - DNA, 201 bp, Homo sapiens
tcagtgcctatgcctcctgctggattgtgtttgattaatccatttcttttaacttgtacaaggtccccattgttagagccacaagtcatttggccactgarggtaaaagatggttaggagtgggatttgttccacttctttgcagcgattaaacagtcagtttgaactggggaaagtatttgacctttagtctgtcctaaa

SEQ ID NO: 164579 - DNA, 201 bp, Homo sapiens
caggcacctatagtcccagctacttgggaggctgaggcaggagaatcgcttgaacctgggaggcagagcttgcagtgagccaagattgtgccactgcactscagcctgggtgacagagactccatgtcaaaaaaaaaaaaaagtaaagaaaagacagggctaacgtgcagcttccacaaggacggacagaatagcatatgg

SEQ ID NO: 164580 - DNA, 201 bp, Homo sapiens
gcttactgtactcacagcctgctcctagagcttctgctatgggagagagggttgtccagtccaggccactgtggcttctgcctttcagggattcattatartttccagtctatcagaagcattcttggttgtttcctgatggaatgaaactgttttgaaattgcccattctgtaggtcagaaatggttgaatatcagcagt

SEQ ID NO: 164581 - DNA, 201 bp, Homo sapiens
tgccctacgttttggttacttatagaatatagaaggccttcaaatgtttgttgatttttatggaaggctttgaaatatttgttgattgatgttcagtaatyttcagatttcaaaaaaataactagggcttggcaggaatggagaagagcatatgaataaatgaatttgcttagaatcttatttctaataaaaattaccaaa

SEQ ID NO: 164582 - DNA, 201 bp, Homo sapiens
caattgtttttaactgatagccaatgttgttcatctacttccccactccctctgtccctaccttaccagattattttgaagatactctgaaaaaataattkaacttcattcataaaaatttagacttctgctttaaggctcttgcattttttctttttctataaaaggagcaaaaaaacagatggtaatttgcaggtggaa

SEQ ID NO: 164583 - DNA, 201 bp, Homo sapiens
ctgggtgacagagactccatgtcaaaaaaaaaaaaaagtaaagaaaagacagggctaacgtgcagcttccacaaggacggacagaatagcatatggagacrctatgatcttttgttccaagaaccactgtaggaacttaccgggaaaaccaaaagaattcaaagatcctttgaaagaagtggcacaccactgcaaattctg

SEQ ID NO: 164584 - DNA, 201 bp, Homo sapiens
catatggagacactatgatcttttgttccaagaaccactgtaggaacttaccgggaaaaccaaaagaattcaaagatcctttgaaagaagtggcacaccaytgcaaattctgcaaaacaggcaagaaactgagttcccaaagtgtgagtcggggagaacctacctctgaatacacatccccactggggaaatctaaaaatc

SEQ ID NO: 164585 - DNA, 201 bp, Homo sapiens
tcttctaatttgtggccaataggtcacaccacactaattaggggacaggctgatgactaataggatgaattattgttacgaagcggcatttgagtggaaakaattgttttggggaattagaacatacctgatgttagttgaatgtgtaactgagctagaaataaaatgctcctccttttataggagaggttgcttgttctc

SEQ ID NO: 164586 - DNA, 201 bp, Homo sapiens
tgatgggcgcctcacactttgatgttttgagaaaatggctacttagtatgtaaatcacttctcattctgttgctggaaatcagatactcatttcagaccayagactcatttcagactgtacttttcaaatctacattcaaatcttctaatttgtggccaataggtcacaccacactaattaggggacaggctgatgactaa

SEQ ID NO: 164587 - DNA, 201 bp, Homo sapiens
gccaaagtggtgataagttaaaaagctagtagctgaatccccagggagctggctgagagtaatttcagagtcagcagttcatatctgtgtcccagatgagkatatgggctggatggtttcttagcctcctcatgacctgtggtgcttcagaggtccacggaatgaaggataagatggagaagccaggctaaggaaggattg

SEQ ID NO: 164588 - DNA, 201 bp, Homo sapiens
gccaggccaaagtggtgataagttaaaaagctagtagctgaatccccagggagctggctgagagtaatttcagagtcagcagttcatatctgtgtcccagrtgagtatatgggctggatggtttcttagcctcctcatgacctgtggtgcttcagaggtccacggaatgaaggataagatggagaagccaggctaaggaag

SEQ ID NO: 164589 - DNA, 201 bp, Homo sapiens
catacactggaagacttaatattgttaagatgtcagtactacccaaagtgatctaacagactcaacacaatccctataaaaatctcaatggcatttttttkgcagaaacataaaaattcactctaaaatttccatgaaatctcaaaggaccccccagtagccaaaacaatcttgaaaaagaaagacattggaagtctgaca

SEQ ID NO: 164590 - DNA, 201 bp, Homo sapiens
gatgaggtcattaagaaagagttttcctcccctctgagatgattcactcagatacctggagtcactgtttctgtgcttgttctgtgaccttcgtcatgaayttgacctctctgagcatgttgtctcataacatggagacaaataacttttctaataaggtataatgttatggaggactccaggggatattgggagagggca

SEQ ID NO: 164591 - DNA, 201 bp, Homo sapiens
ttcctgattacctgtattcctaggtattttattcttcttgtggcagttgtgaatgggattgcattcctgatttggctctctgcttgactgtcattggtgtrtaggaatgctagtaatttttgtacattgattttgtatcctgaaattttgctgaagttgtttatgtggtgaaggagattttgggctgagactggggttttc

SEQ ID NO: 164592 - DNA, 201 bp, Homo sapiens
tgcagtgctcagatcgggctgtgccagctccagctctggctcgcttaccttatcgtgagcttgaggcactcagaggcagcccatctccctggcatgagctrgtctcaaccgcttggggtgatggtattttgaaaatgccattatagagtgctgggttccttacggcagtgtgcccaggcctcaaagtgatggtgaatggtt

SEQ ID NO: 164593 - DNA, 201 bp, Homo sapiens
gatgtccagttgtcccttcataatgcgatcgatcaggtgccagaggtgctggggttttgtttattattattattattattattattattattattattatttaactgcacaagtaatatatattgttcctttacccccccaaaaaaacaacaataatagactgccaaatttttggaccttttctgcatttagaggtagttg

SEQ ID NO: 164594 - DNA, 201 bp, Homo sapiens
cctggccaacatggcaaaacctcatctctactaaaaatacaaaaattaaacaggcatgatggtaggcacctgtaatcccagctactcaggaggctgagctyagcaggaaaatagcttgaacccagaaggcgggaggttgcagtgagccaagattgcgccactgcactccagcctgggcaatagagaaaaactccatctcaa

SEQ ID NO: 164595 - DNA, 201 bp, Homo sapiens
tctcatacagctaggcttccaggattttgcaaggccctgacaggcctcaaagccatgtcagcctaataatgagggcctccgtctgctgtgcttgccaaaaytgttatggcaaccagagctaaaggactgcagtgctcagatcgggctgtgccagctccagctctggctcgcttaccttatcgtgagcttgaggcactcaga

SEQ ID NO: 164596 - DNA, 201 bp, Homo sapiens
tgatgtccagttgtcccttcataatgcgatcgatcaggtgccagaggtgctggggttttgtttattattattattattattattattattattattattatttaactgcacaagtaatatatattgttcctttacccccccaaaaaaacaacaataatagactgccaaatttttggaccttttctgcatttagaggtagtt

SEQ ID NO: 164597 - DNA, 201 bp, Homo sapiens
agagacaaactttgcttcataacaacccactctcactggaactaatccaacccaatgagagcaagaacaccctcccctgggactgcatgaatcccttaatkggggtggattattaccatggctcatgactcaaactcctcttaaaggtactacctcccagcatcactatatttggggaccaagcctcaacatgagttttga

SEQ ID NO: 164598 - DNA, 201 bp, Homo sapiens
gtgatgtccagttgtcccttcataatgcgatcgatcaggtgccagaggtgctggggttttgtttattattattattattattattattattattattattatttaactgcacaagtaatatatattgttcctttacccccccaaaaaaacaacaataatagactgccaaatttttggaccttttctgcatttagaggtagt

SEQ ID NO: 164599 - DNA, 201 bp, Homo sapiens
ttggacttctagcctccagaactgtgagaagataagtttctcttgcttatggggaaaacctatttccttgcctttttcagcttctggaggcaccagcactwcttggcccatggccccacatcatgtccccttttctctccctctgcttctatcattatatcactttcttcctcatttgaccttcttgcctccttgtgattt

SEQ ID NO: 164600 - DNA, 201 bp, Homo sapiens
tgtgatgtccagttgtcccttcataatgcgatcgatcaggtgccagaggtgctggggttttgtttattattattattattattattattattattattatwatttaactgcacaagtaatatatattgttcctttacccccccaaaaaaacaacaataatagactgccaaatttttggaccttttctgcatttagaggtag

SEQ ID NO: 164601 - DNA, 201 bp, Homo sapiens
agctccatcaggtcatttaaggacttctctacactggttattctagttagccattcgtctaatcttttttcaaggtttttagcttctttgcattgggttcraatttccttctttagctcagagaagtttgattgtctgaagccttctctcaactcgtcagtcattctccatccagctttgttccattgctggcgaggagct

SEQ ID NO: 164602 - DNA, 201 bp, Homo sapiens
catctgatcttcaatcactgataccctttcttccagttgatggaatcggctactgaggcttgtgcattcgtcacgtagttctcgtactatggttttcagcyccatcaggtcatttaaggacttctctacactggttattctagttagccattcgtctaatcttttttcaaggtttttagcttctttgcattgggttcgaat

SEQ ID NO: 164603 - DNA, 201 bp, Homo sapiens
ggagaccccctgtgttagtctgtggtcattgctagagaatcacttaattttttctagactctaggagaaaacagttggtggtgtactcatcacgggttaayaatttcttctctccttccataggcatggaaggcagcacaccatcatgccttcaaaggtcaactaccaggcgaacatctgggctttgaaggaagagggctg

SEQ ID NO: 164604 - DNA, 201 bp, Homo sapiens
attggtctaaaattgtcttttttggttgtgtctctgccaggctttggtatcaggatgatgctggcctcataaaatgagttagggaggattccctctttttytattgattggaatagtttcagaaggaatggtaccagctcctccttgtacctctggtagaattcggctgtgaatccatctggtcctggactttttttggtt

SEQ ID NO: 164605 - DNA, 201 bp, Homo sapiens
agggcatccctgtcttgtgccagttttcaaagggaatgcttccagtttttgcccattcagtatgatattggctgtggggttgtcataaatagctcttattrttttgagctacgtcccatcaatacctaacttattgagagtttttagcatgaagggctgttgaattttgtcaaaggcctattctgcatctattgagataat

SEQ ID NO: 164606 - DNA, 201 bp, Homo sapiens
cagcatgatttataatcctttgggtatatacccagtaatgggatggctgggtcaaatggtatttctagttctagatccatgagaaatcgccacactgtctkccacaatggttgaactagttcaccttcccaccagcagtgtaaaagtgttcctatttctccacatcctctccagcacctgttgtttcctgacattttaatg

SEQ ID NO: 164607 - DNA, 201 bp, Homo sapiens
gtccaaaaaggtgccctacgttttggttacttatagaatatagaaggccttcaaatgtttgttgatttttatggaaggctttgaaatatttgttgattgakgttcagtaattttcagatttcaaaaaaataactagggcttggcaggaatggagaagagcatatgaataaatgaatttgcttagaatcttatttctaataa

SEQ ID NO: 164608 - DNA, 201 bp, Homo sapiens
ctccatttggcaaggttaatatccaacttgtggagacatgttttttagttttttcatttctccttgctggcttgatttttgaattaaaaaaaaaaaaaaaaagaattgcttttgttttggcagcccagggctgtctgctcccagcagagagggccagaagttctgctgttgggttccatcagctgagaaggtgtctgatgg

SEQ ID NO: 164609 - DNA, 201 bp, Homo sapiens
ctcaagcctcagcagtggtgggcgcccatcccccagccttgccgccgccttgcagtttgatctcaggctgctgtgctagcaataagcgaggctctgtgggygtgggaccctccgagctatgcacgggatataatctcctggtgtgccgtttgctaagacagttggaaaagcacagtattagggtggcagtgacccgatttt

SEQ ID NO: 164610 - DNA, 201 bp, Homo sapiens
ccaagaattttgtatccagtaaaactaagcttcataattgaaggagagatagtctttttcagacaaacaaatgctgagagaatttgccactattgagccarcactacaagaaatgcttaaaggagttctaaatcttgaaacaaaacctcaaaatacaccaaaatagaacctcattaaagcgtaaatctcacaagacctata

SEQ ID NO: 164611 - DNA, 201 bp, Homo sapiens
attggcagaagaaatgtttagaagcatattttccataaatgatagtgacaagtgccaagcacttgcttcatgttgtctcattcagttttcacggggacttyataaggtaagtgggattactcccgtttaaggaaactgatataactgaggtgcagagagacgagagtgactttcccagaggcacacagctagtgagtggta

SEQ ID NO: 164612 - DNA, 201 bp, Homo sapiens
gctgctgtttgattcttgggatatattttaaatgatgggtagattcacttcccctaaaccgtcctccttatgagcagccgttattctgctctgccagtaarttaattgactcacgattctgcatgttggggcttgttgtggatacagaccgtattctgaaatgtcctcagaggtcgatgattgtgtttgcttctgccaggg

SEQ ID NO: 164613 - DNA, 201 bp, Homo sapiens
gttatagcagcagaaaacagactaagaaaaatgttgtgcttgtaagagattgggacacggacacatacagagggaagaccatgtgaagacacatggagaaygctgccatctacaagccaaggagactgaccttagaagaaatcaatcccaatctcaccttaatgttggacttctagcctccagaactgtgagaagataagt

SEQ ID NO: 164614 - DNA, 201 bp, Homo sapiens
acagtggcgccacagctcactgcagcctttacctcccaggctcaggtgatcttgccacctcagccccccaagtagctgggactacaagggtgtgacaccayacccagctaattttttgtatgtttttgtagagacagggtttcactatgttgcctgggctgatcttgaacatctaaactcaagggttccacccaccttggc

SEQ ID NO: 164615 - DNA, 201 bp, Homo sapiens
acaaatccaaaatgagtcttacagggctaaaattaacatgtgtatcgggctggttcctcttagaaaaaccatttccttgcctttttcagtcttctgaacckgtagaaccatgagctaaataagcctcttttctttataaattaccctatctcaggtattctgttatagcagcagaaaacagactaagaaaaatgttgtgct

SEQ ID NO: 164616 - DNA, 201 bp, Homo sapiens
ttttaacttctttaagttagttttcacttttctctgctaccttcttcagtagcttaataatcaatcttctgatttgttttctggaaactcagagatttcgwcttagtttggatccattgctggtgatctagtgtgatcttttgggggtgttatagcaccttgttttgtcatattaccagaattgtttctctgttttcttct

SEQ ID NO: 164617 - DNA, 201 bp, Homo sapiens
gcagccagtggaattggagagtgatggcagggcgaaggaagctcccaaatgaaatcagtagtggtttcagctggtcacaaattttctcaggcagagtccargggactaatgggagccgcagcagatacaagtgagtacaggagctgctgctgatggagtgggcaggtgggaaggggtgaggtccaaaggccatgcttgctt

SEQ ID NO: 164618 - DNA, 201 bp, Homo sapiens
ttgtcaccacctatgtagagtgaggatttttatttttgtgctattgtttagcatgatctcatgaaatataatagaaaataaggggaaactatggtacctgyttattgagcagccttccttgactgggatataaacatccattggttttcctcctttttcatgccaccacaagcactcaggggcactcttgataccagaaca

SEQ ID NO: 164619 - DNA, 201 bp, Homo sapiens
catggtggctcatgcctgtaatcatagcactttgggaggctgaggtggatagactgcttgagctcaggcgttcaagaccagcctgggcagcatggtgaaasctcatctctgcaaaaaaaaaaacaaaaaaattagccaggcgtggcggtgcacgcttgtagttcagctccttgggggctgaggtaggagggtcacttgaac

SEQ ID NO: 164620 - DNA, 201 bp, Homo sapiens
aaaataagacttggccaggcgcggtggctcatgcctgtaatcccaacactttgggaggcccagctgggcagattacctgagctcagaagttcaagaccagmctgggcaacatggtgaaaccccatttctacaaaaaatacaaaaattagccaggcacggtgctgcacgcatgtaatcccagctactcaggaggccaaggtg

SEQ ID NO: 164621 - DNA, 201 bp, Homo sapiens
ccaaacctaagaataattggtgttcctgcagaagaagagaaatctgaaagtttggaaaacttatttgaggaaaactttgctggccttgctacagatctagrcatccaaatacaagaagctcaaagaacacctgggaaatttattgcaaaaagatgatcagctaggcacatatttatcaggctatctaaagtcaagatgaaa

SEQ ID NO: 164622 - DNA, 201 bp, Homo sapiens
ctggttagggggccagaggctgggatgctgaggggcctctttgctgtaggagcagagtgggtggcaggttgagggagggaggaagccacctggagtgagartaattcaagcaatcttttttgtggttcactgcagtgagagatggtccaggcagggagtgaggatattacctggggggtagccatggagagaggcagcagg

SEQ ID NO: 164623 - DNA, 201 bp, Homo sapiens
ttgcccaggctggtttcaaactcctggcctcaagcagtcttcctgctttggcctccccaaagtgctgggattataggcatgagccactgcacccagctacrtattttttagaaaaggatcagatgagtaggacttgctcaactgctatcactgtcagaaatatctcaaggtgaaacttgcaaacatatcagtaaggagaag

SEQ ID NO: 164624 - DNA, 201 bp, Homo sapiens
tggtgtgaaactgggaggcggagcttgcagtgagccgagatcgcaccactgcactccagcctgggcgacagagtgagactccgtctcaaaaaaaaaaaaaagaaagaaatttatggtctaggccctagagcaggttgcttagttctgagggcactttagaaccacctgcggagctttaaaaacaaactacgccttgcccaa

SEQ ID NO: 164625 - DNA, 201 bp, Homo sapiens
catagcactttgggaggctgaggtggatagactgcttgagctcaggcgttcaagaccagcctgggcagcatggtgaaacctcatctctgcaaaaaaaaaaacaaaaaaattagccaggcgtggcggtgcacgcttgtagttcagctccttgggggctgaggtaggagggtcacttgaacccaggaggttgaggctgcagtg

SEQ ID NO: 164626 - DNA, 201 bp, Homo sapiens
tcatagcactttgggaggctgaggtggatagactgcttgagctcaggcgttcaagaccagcctgggcagcatggtgaaacctcatctctgcaaaaaaaaaaacaaaaaaattagccaggcgtggcggtgcacgcttgtagttcagctccttgggggctgaggtaggagggtcacttgaacccaggaggttgaggctgcagt

SEQ ID NO: 164627 - DNA, 201 bp, Homo sapiens
ggttagtattccgagagagaattacagcacgtaaagaaaaattgatgataaaacttaagacctcttctaggcagtttattactggctaagaatgcgttcthgtttgatttttagaaatttttggcctatgggataggaaggtctgcgatcttctccaaagcatctcgattccctacactcgactgcagttttcccgggaga

SEQ ID NO: 164628 - DNA, 201 bp, Homo sapiens
agcaacctggatggagttggagaccattattctcagtgaagtaactcgggaatggaaaactaaatatcgttatgtcctcatttgtaagtgggagctaagcyatggggatgcaaaggcataagaatgatataatagggccgggcgcagtggctcatgcctataatcccagcactttgggaggccgaggtgggtggatcacaa

SEQ ID NO: 164629 - DNA, 201 bp, Homo sapiens
tggcatttgcagcaacctggatggagttggagaccattattctcagtgaagtaactcgggaatggaaaactaaatatcgttatgtcctcatttgtaagtgkgagctaagctatggggatgcaaaggcataagaatgatataatagggccgggcgcagtggctcatgcctataatcccagcactttgggaggccgaggtggg

SEQ ID NO: 164630 - DNA, 201 bp, Homo sapiens
gctgacctagccttaatctgggtgggtacaatctaatcagctgccagcatggctaggatataagcaggcagaaaattgttaaaagagagactagcctagtmccccagtctacatctttctcccatgctggatgcttcctgccctccaacatcaaactccaagttcttcagttttggaacttggactgtctctccttgctcc

SEQ ID NO: 164631 - DNA, 201 bp, Homo sapiens
gcgtgaacccgggaggtggagcttgcagtgagctgagatcacgccactgcactccagcctgggcaacagagcgagactccgtctcaaaaaaaaaaaaaaaagccatctatgacaaacccacagccagtgttatattgaacagggaaaagttgaaagcattccctctgagaactgaaacaagacaagattcccactttcacc

SEQ ID NO: 164632 - DNA, 201 bp, Homo sapiens
tttcataccagtgatgaagggatggtttaacataggcaagtcaataaatgtgatacatcacataaacataatttaaaacaaaaatcacatggtcatctcartagatgcagaaaaagcatttgacacaatcctccatctagttataattaaaaccctcagcaaaattggcatagaagggacgtacctcaaggtaataaaagc

SEQ ID NO: 164633 - DNA, 201 bp, Homo sapiens
agagtgatggcagggcgaaggaagctcccaaatgaaatcagtagtggtttcagctggtcacaaattttctcaggcagagtccaagggactaatgggagccrcagcagatacaagtgagtacaggagctgctgctgatggagtgggcaggtgggaaggggtgaggtccaaaggccatgcttgctttcccagtggggtagctc

SEQ ID NO: 164634 - DNA, 201 bp, Homo sapiens
tttctcaggcagagtccaagggactaatgggagccgcagcagatacaagtgagtacaggagctgctgctgatggagtgggcaggtgggaaggggtgaggtycaaaggccatgcttgctttcccagtggggtagctcacagcctggggcaaggtctgagcagggcactgcaggagtgagactagcctcaccaactgcatagt

SEQ ID NO: 164635 - DNA, 201 bp, Homo sapiens
ctgctaagctagtgtcccttcaaacccttgtttcctgtagctcatgagtcagatcccatctggtagcatttagttcagagtcttaagtcgcatgcctatgmcctacctgcaaaagaggaaggaaaagtaagcatctggtatttttagctcctataatggatcatccacacttagcacatgtctgtaatactatgaattccc

SEQ ID NO: 164636 - DNA, 201 bp, Homo sapiens
tgggtatgtgcagtcagtctttgtgtctttctcattcaagtaaattccatagcaattaaagtgaaaataatcatctttcatttgtgagtagagcatccatrgaaagcaacatatatcttggtctagaacttaaattccaaaagaatgtgttatatttttcattttcccgtttttgttgcacagggacgagtttcctgatgc

SEQ ID NO: 164637 - DNA, 201 bp, Homo sapiens
cagaaggtactttccactaccatacttgcctacttttaggtttgattttctaccttgagttggttaaaatacctctctatgctgacttgtaattcagacaktcagaagtaaatgtgatgtagtccaaaaaggtgccctacgttttggttacttatagaatatagaaggccttcaaatgtttgttgatttttatggaaggct

SEQ ID NO: 164638 - DNA, 201 bp, Homo sapiens
aagtgtgagccactgtgcctggccaggctccttttccctacactgcccgtgtattctctccagggacttacctagaaccacacacattggcctattgccgwaagtttgtcagcacgttgtctcagaaaaaaaaaaaaatcctcatcctaaagtgttcttcaaaggctagcgagattgtttaataatacggctattcttatt

SEQ ID NO: 164639 - DNA, 201 bp, Homo sapiens
ttcccagatcttttactcacatgtcttaaatgtagatgtttcacatactggctctttcaagaaagcagttgggtcagaagatggagactagaaagaaaacmggtattgccatcagatctggtttcattctatcttagccaggtaaccttaagatcttctactatttttctgtttatgagacatatggataacctgccctct

SEQ ID NO: 164640 - DNA, 201 bp, Homo sapiens
gaacacaaagaagggaacaactgatgccaaggcccacctaaggatgcagagtgagaggagagttaggattgaaaaactacctcttaggtactatgcttatkacctgggtgatggaataatctgtataccaaactccatgacatacagtttaccattgtaacacacctgcacaggcatccctaaaacaaaacttgtaaagaa

SEQ ID NO: 164641 - DNA, 201 bp, Homo sapiens
tattcctcatgcttcctcccactttctcctatagcagaggggttgtcctgtctactcaagcatttcttctggatattaccccaggaggacagggaacctcwaatacaaaattttctccattcctctaatcacttccataccctcctcaatgtgcttaaggactctcaaggtcatatttaaagggagggaagtgcagcctct

SEQ ID NO: 164642 - DNA, 201 bp, Homo sapiens
tcttctccaaagcatctcgattccctacactcgactgcagttttcccgggagaaggcgaatttctgcggtcagtgtgtaatcagccagattagtttattamgcccttgcaggtttaaatgagccacttagaatgagaggaatggtgaagggtgttgcatccagacttatatatgaaacttattttgtcattttgaaaagaa

SEQ ID NO: 164643 - DNA, 201 bp, Homo sapiens
tttgacagccactgacctagagagctttggaaagggtggccatctacatttttaacaagttcttcccttagtgttatagtttcctgttgctgctataacarttttcacaaatggagtggcttaagacaacacacatgaggccgggcatggtggctcatgcctgtaatcatagcactttgggaggctgaggtggatagactg

SEQ ID NO: 164644 - DNA, 201 bp, Homo sapiens
tactaataatccctttttctggggtagtattgttagcactgaaatgtgtatcattcattccctcactaagtcatttcagaaacacttagcacctgctataygtcaaggtctggtttgcaaagataaagagttgtgatgatgatcctatggtgtttggagatatagacacataaaaatttcaatgatttcttacagtggggt

SEQ ID NO: 164645 - DNA, 201 bp, Homo sapiens
taatccctttttctggggtagtattgttagcactgaaatgtgtatcattcattccctcactaagtcatttcagaaacacttagcacctgctatacgtcaakgtctggtttgcaaagataaagagttgtgatgatgatcctatggtgtttggagatatagacacataaaaatttcaatgatttcttacagtggggtaaggat

SEQ ID NO: 164646 - DNA, 201 bp, Homo sapiens
tgaagcaagtttttctattaataggggaaaaaagacctcataaaagagtcaaagtaaatgagacttagagaaatgtagaagcatgactatgcatcactggrcctttgcttagtttttattcatcagccatggagaagaaaggcatgactctttcctgcctcccacacccaccggacttgtaaagctcgacttcgatgatgc

SEQ ID NO: 164647 - DNA, 201 bp, Homo sapiens; identical to SEQ ID NO: 30438

SEQ ID NO: 164648 - DNA, 201 bp, Homo sapiens; identical to SEQ ID NO: 30441

SEQ ID NO: 164649 - DNA, 201 bp, Homo sapiens; identical to SEQ ID NO: 30444

SEQ ID NO: 164650 - DNA, 201 bp, Homo sapiens
tcccggcccctgtgtttgctataaactggatttagttctggtggcctgatcagaaccaggtttgaattcttggcaaggatccttccttctgcatcctgtcrgaaggcatgtgatgtccagttgtcccttcataatgcgatcgatcaggtgccagaggtgctggggttttgtttattattattattattattattattatta

SEQ ID NO: 164651 - DNA, 201 bp, Homo sapiens
tagctggagactattatcctaagtaaactaacgcaagaacagaaaaccaaatacctcatattctcacttataagtagaagctaaacactgagtacacatgracacaaagaagggaacaactgatgccaaggcccacctaaggatgcagagtgagaggagagttaggattgaaaaactacctcttaggtactatgcttatta

SEQ ID NO: 164652 - DNA, 201 bp, Homo sapiens
gagaggagagttaggattgaaaaactacctcttaggtactatgcttattacctgggtgatggaataatctgtataccaaactccatgacatacagtttacsattgtaacacacctgcacaggcatccctaaaacaaaacttgtaaagaaaataccaaaatacacattgacaaaagaaaaagaagatactaaagacaaccta

SEQ ID NO: 164653 - DNA, 201 bp, Homo sapiens
gtatcgccatggcgacagattatgactgctggaaggagcacgaggaagcagtaggtggaattcttttctaagcacatatagcatgggtttctgggtgccartagggtgtcttaactgtttgtttctattacgttagtttcagaaagtgcctttctacaaggttttgaagttgttaatattttctgtagttccattggaagg

SEQ ID NO: 164654 - DNA, 201 bp, Homo sapiens
ggggaatggagtgtcttagcgtccagttgcctgtgtgtgtgcccgctagggtttcgggggtttttacaggcacaggatggggggcgtggcatttccctgcycccctccctgtatcaaatagactgcagtttaaacataaggcaataaattaaaaccagcataaattgaaaaaaagtttaaattagttatgtttctcccctg

SEQ ID NO: 164655 - DNA, 201 bp, Homo sapiens
agatgtccattggctcattgccaggatagacactaattagaaccccagttcttccagctccttatgacttaccatacacttttcatccctgttatgctccrgggtcaagtttttggtggcttttgaagcagtttttatggctgcataggacatcactctgtggttctttaaggatctcacctacttgctttttttgagtta

SEQ ID NO: 164656 - DNA, 201 bp, Homo sapiens
cccaaacacctccccatgttcactttcagcaggtgactttagttccctcttcacagacagaactgaagcatcagcagaacactttcaagacccccctctgytgctctctcccaaactgttttccctcctgttaccatctgtgatagtgcttctcaaacgggagcacgcatcgtcatcacctggagggcttattaaaacagg

SEQ ID NO: 164657 - DNA, 201 bp, Homo sapiens; identical to SEQ ID NO: 30439

SEQ ID NO: 164658 - DNA, 201 bp, Homo sapiens
atgccttctcgcccccgcgccgggggaccgcgcctccgggggccatgcgcccggcccgtgcgtcccttgccgccgcggggagggactggggcgcggcactsgggactcacttgccgcgcgaggagagggtacgcttgcaaatgatccccctgccgcaccgccaacacacacacacacacacacacacacacacacacacac

SEQ ID NO: 164659 - DNA, 201 bp, Homo sapiens
ttttttatggttggtgctttttgtgtgttccaagaaatctttgcctactcatttaattacctgtgtgcccttgtcaaaatcatttaattttgactactcayttaattaccttgcctactcatttaattacctgtgtgcccttgtcaaaatttactgtttatctgtgaatctggatgatctatttatgtcatttatctatgt

SEQ ID NO: 164660 - DNA, 201 bp, Homo sapiens
tccatccaggttgctgcaaatgccattatttcattcctttttatagctgggtagtattacatggtgtgtgtgtgtgtgtgtgtgtgtgtgtgtgtgtgtgkatacagatcacattttcttcatccactcgttgaatgatgggaatttgagctggttccatatttttgcagttgtgaattgtcctgctataaacatgcctat

SEQ ID NO: 164661 - DNA, 201 bp, Homo sapiens
tttattaaaaaattagattgttttgttttattattgaatagtaagaattgtttatatattctggatacactctttttcagatatgtgtgttgtgactattsttagtctttagcttgccttttcattttcttaattatgtctttcaaagaacaagtttttcattttgacgaagcctagtttatcaattttttttatggttgg

SEQ ID NO: 164662 - DNA, 201 bp, Homo sapiens
ccatattcaggatgatccagatgtataaagtattacagatgatactgtaaagtctgaattgggcactgagccttgggttaatctgttacttaaacagtatractatacgctgttgcatttcccagatcttttactcacatgtcttaaatgtagatgtttcacatactggctctttcaagaaagcagttgggtcagaagatg

SEQ ID NO: 164663 - DNA, 201 bp, Homo sapiens
cccaaagcgcaaagtgctgggattacaggcgtgagccactgcacccagcctgtgttaagcttttcattgtgagtttttgttttttaattttaattgacaartgataaatgtatatatgaggtataacattatattttgatatatgtatgcattgtacaatgattagcaaagctaattaacatattaccccacatatcatct

SEQ ID NO: 164664 - DNA, 201 bp, Homo sapiens; identical to SEQ ID NO: 30440

SEQ ID NO: 164665 - DNA, 201 bp, Homo sapiens; identical to SEQ ID NO: 30443

SEQ ID NO: 164666 - DNA, 201 bp, Homo sapiens
ccaactctgaaaggaaatagccagcaagtttaatatcatggctaaaacctcaaccatggccagagcaaattaacactttagcagttgtagtcctccaaaaytgtcaaggactagatatgttaatggcagcacagggaggaatttgtttagctttagatgaaaaatgttgcttttgggtaaatcaatcagtaaaagtacaaa

SEQ ID NO: 164667 - DNA, 201 bp, Homo sapiens; identical to SEQ ID NO: 30447

SEQ ID NO: 164668 - DNA, 201 bp, Homo sapiens
gagcatcatgggaaagctgtagtttagtgacttagcccttagtgattaatagatttgcatgtacatagaagtctttgttggccttataatctgctgttatrtttggcatggattttcatggttttgagaatgacatcctggccctgtggtccccgagggtcatggtccttgtgacctggcccctgttcactgcccccttcg

SEQ ID NO: 164669 - DNA, 201 bp, Homo sapiens; identical to SEQ ID NO: 30442

SEQ ID NO: 164670 - DNA, 201 bp, Homo sapiens; identical to SEQ ID NO: 30445

SEQ ID NO: 164671 - DNA, 201 bp, Homo sapiens
ggtttacccagggctcaagccctggaggaaccaagagtggagcttagctcaaaccctaccctttggccccattatatccaagtctcctggccctggagccytcccttccctacccagggccatcctctggacaccaccccctcaagttatgctcccttcaagaagttagttgacctactagagttcagactccatttaata

SEQ ID NO: 164672 - DNA, 201 bp, Homo sapiens
cttagtctgtctggactgttgtaacaaaataccatagcatgggtggcttctgaataacaagtttatttttcacatttctgtaagttgagaagtccaagatmaagggactggcacatttggtgtctagtgagagcccactttctggtagacagccatcttctcactggaacctcacacggtggaaggggccctcgaagaata

SEQ ID NO: 164673 - DNA, 201 bp, Homo sapiens
cgattaagaaaagaggtttaatacctggggataatcctgatcccacagagaacataagctttctccagaatggatacaggccatccttagaatacctaccmcaaccacctaaaagcaactttgggcttttctggggatcacaagatattccagactttcaatactggcatatggtggaattattaagtccttatatcaggt

SEQ ID NO: 164674 - DNA, 201 bp, Homo sapiens
aaagaggtttaatacctggggataatcctgatcccacagagaacataagctttctccagaatggatacaggccatccttagaatacctaccccaaccaccyaaaagcaactttgggcttttctggggatcacaagatattccagactttcaatactggcatatggtggaattattaagtccttatatcaggttctaaaaga

SEQ ID NO: 164675 - DNA, 201 bp, Homo sapiens
ctttttaaagaacctagacccagtagtgcaagggtggccacactgcctaaaggtagtggctgcagcagcccttttacccaaggaggccctcaaaatcacartgggacagtcggtcaggctcctgacattccaactaataggccccttattggatataaaaagaccgcaatggatcactgacaacagactgctaaactacca

SEQ ID NO: 164676 - DNA, 201 bp, Homo sapiens
aactcattccctgctttgaactccccaggtcattgcagagtgacagtgattcatctttttttccccaagtaacttaacaggttagtaatgccctaggcatraagtggtaccctcactttgcctgagaactgcaatcttcaggaaaagtggaaagaatttaccaaaccctgaaatgcatcctcaataatctctgtcaggaaa

SEQ ID NO: 164677 - DNA, 201 bp, Homo sapiens
gctcatgcagtacttgaaatttctagttccagcctgatgattataaccaatgtctgcaaattgccaacctcagctccacagcagaatgggttctaatggastaaactcaaaattctctttttttgggaaaatgaaaccaagggagctaatcagagccaaaccccatgtacccaagtgttagcaggcatgaatgtagctacc

SEQ ID NO: 164678 - DNA, 201 bp, Homo sapiens
ccatgggaattctatcttgcccagggtgaaaagggctatccaattaattccccttcttatgggcctcagcattatagctggtatgggaacctaaactgcckgaatctcaaaagcctccttgacctatagccaactctgaaaggaaatagccagcaagtttaatatcatggctaaaacctcaaccatggccagagcaaatta

SEQ ID NO: 164679 - DNA, 201 bp, Homo sapiens
gagcaaattaacactttagcagttgtagtcctccaaaattgtcaaggactagatatgttaatggcagcacagggaggaatttgtttagctttagatgaaamatgttgcttttgggtaaatcaatcagtaaaagtacaaaacaacatcagacaactcctaaatcgagcctccagcttacaagaacaagcctctcgtggttag

SEQ ID NO: 164680 - DNA, 201 bp, Homo sapiens
tacacaaaaattaactcaaaatggattaataacttaaacacaagaccaacaaccatgaaagcactagaaggaagaaaacatacaggggaaagatttatgayattaaatttagcattatttttgtggatatgacatcaaaagcacaggcaacaaaagccaaaatagacaaatggaactagatcaaactttaaaacttctgtg

SEQ ID NO: 164681 - DNA, 201 bp, Homo sapiens
caaaccccatgtacccaagtgttagcaggcatgaatgtagctaccagctacctgggtgtgttgtcatccttggtatttttgggggctgtcctcatctcttmttttgttttgacatctctacttgtcttaaaacccaaggagccttctgtgtttgtggccaatcagtttaccaatgcctcctcattaaatggactggaactt

SEQ ID NO: 164682 - DNA, 201 bp, Homo sapiens
cttactccaccaaatgctggttatttactagctcttcctctaaaacaccagggagagcttatccagcctgtaccagagattggacaagcatagacatagarttacgtatttcctctcaacaggaccctaatctgaaagagctatttgggtctgcaaataacattttttgcaaaagcaaagcagtatttacttgacatccac

SEQ ID NO: 164683 - DNA, 201 bp, Homo sapiens
tcaagtgtcatttagtgtcttctcccggcccctgtgtttgctataaactggatttagttctggtggcctgatcagaaccaggtttgaattcttggcaaggrtccttccttctgcatcctgtcggaaggcatgtgatgtccagttgtcccttcataatgcgatcgatcaggtgccagaggtgctggggttttgtttattatt

SEQ ID NO: 164684 - DNA, 201 bp, Homo sapiens
tacccagggctcaagccctggaggaaccaagagtggagcttagctcaaaccctaccctttggccccattatatccaagtctcctggccctggagccttcccttccctacccagggccatcctctggacaccaccccctcaagttatgctcccttcaagaagttagttgacctactagagttcagactccatttaatatgca

SEQ ID NO: 164685 - DNA, 201 bp, Homo sapiens
aaattagccgggcgtagtggcgggcgcctgtagtcccagctacttgggaggctgaggcaggagaatggcgtgaacccgggaggcggagcttgcagtgagcmgagatcccgccactgcactccagcctgggcgacagaacgagactccgtctcaaaaaaaaaaaaaaaaaaaaaaaaagagtgattaatggactttgggggc

SEQ ID NO: 164686 - DNA, 201 bp, Homo sapiens
cctttagagagagaggtcgtggatgggagaggctgcacccatgccaccaccattcctgagaaccactcttcttccaagaaagacacccggctggagtcagsaggtgtccgggcgcctgcagcttctgtgaccgtctcctggtgccttgcgggactccagcttccgctctctgactctgcttgttgcctgcggcccacgtgg

SEQ ID NO: 164687 - DNA, 201 bp, Homo sapiens
ctgtgtttcgaaagacagagagaaggagagagagggagggagggagggagggaggaaggaaaggaaggaaggaaggaaggaaggaaggaaggaaggaaggagggagggaaggaaggaaaataacctagttaaaagtttgtacttggttgaatagcttccctccaaaattcatgtatacctggaaactgaatgtggcctcat

SEQ ID NO: 164688 - DNA, 201 bp, Homo sapiens
actgtgtttcgaaagacagagagaaggagagagagggagggagggagggagggaggaaggaaaggaaggaaggaaggaaggaaggaaggaaggaaggaaggagggagggaaggaaggaaaataacctagttaaaagtttgtacttggttgaatagcttccctccaaaattcatgtatacctggaaactgaatgtggcctca

SEQ ID NO: 164689 - DNA, 201 bp, Homo sapiens
gactgtgtttcgaaagacagagagaaggagagagagggagggagggagggagggaggaaggaaaggaaggaaggaaggaaggaaggaaggaaggaaggaaggagggagggaaggaaggaaaataacctagttaaaagtttgtacttggttgaatagcttccctccaaaattcatgtatacctggaaactgaatgtggcctc

SEQ ID NO: 164690 - DNA, 201 bp, Homo sapiens
cgactgtgtttcgaaagacagagagaaggagagagagggagggagggagggagggaggaaggaaaggaaggaaggaaggaaggaaggaaggaaggaaggaaggagggagggaaggaaggaaaataacctagttaaaagtttgtacttggttgaatagcttccctccaaaattcatgtatacctggaaactgaatgtggcct

SEQ ID NO: 164691 - DNA, 201 bp, Homo sapiens; identical to SEQ ID NO: 30446

SEQ ID NO: 164692 - DNA, 201 bp, Homo sapiens
aaaactaccattcaacccagcaatcccattactgggtatatacccaaacgaatataaactgttcaaccataaagactcatgcatgcttatgttcatcacarcactattcacaatagcaaagacatggaatcaaccttgatgcccatcaacagtggactgggtaaagaaaaagaggtaaatatacatcacgcaatactatgc

SEQ ID NO: 164693 - DNA, 201 bp, Homo sapiens; identical to SEQ ID NO: 30437

SEQ ID NO: 164694 - DNA, 201 bp, Homo sapiens
tcaaggactagatatgttaatggcagcacagggaggaatttgtttagctttagatgaaaaatgttgcttttgggtaaatcaatcagtaaaagtacaaaacracatcagacaactcctaaatcgagcctccagcttacaagaacaagcctctcgtggttagttagattggtaaggaacctggaaatgggatcttccctgggt

SEQ ID NO: 164695 - DNA, 201 bp, Homo sapiens
agatatgttaatggcagcacagggaggaatttgtttagctttagatgaaaaatgttgcttttgggtaaatcaatcagtaaaagtacaaaacaacatcagayaactcctaaatcgagcctccagcttacaagaacaagcctctcgtggttagttagattggtaaggaacctggaaatgggatcttccctgggttcttccctt

SEQ ID NO: 164696 - DNA, 201 bp, Homo sapiens
catattttgtgtttcttttattttaggccatctcttttagtaaatgtccttgaatgtttcttaagttgctgtatgttcatggaccatttccagagactttrattggttgttttaaaataattttcacccattctgtaggttgcctgttaatgctgatggtagtttcttccgctgtgcagaaaagaactctggactcagttc

SEQ ID NO: 164697 - DNA, 201 bp, Homo sapiens
ggtacatatggtgctaggactgcctgctgatttctcttttaatttagaacagatgacagctttgccgtagagattccatgatgccagcaccgtattccccrgacttctaaggcaacattctgtatagaagatgtgaggtgccagtgtccagagcaaaataggttaataaaaaccacatcctattcccaaattatagaatga

SEQ ID NO: 164698 - DNA, 201 bp, Homo sapiens
catgatgccagcaccgtattccccagacttctaaggcaacattctgtatagaagatgtgaggtgccagtgtccagagcaaaataggttaataaaaaccacrtcctattcccaaattatagaatgatggggctggagtgttccttcaagaccatccatatagccacacaaacccgttttgcgggtgtaaagttgaggcccag

SEQ ID NO: 164699 - DNA, 201 bp, Homo sapiens
gtaatacagctaaccaaggaggtgaaagttctccacaaggagaattacaaaacactgctcaaagaaatagagatgatacaaacgagtggaaaaacattccrtgctcatagataggaagcatcaacaccattaaagtagccatactgtccaaagcaatttacagattaaatgccattcctatcaaactgccaatgacgtttt

SEQ ID NO: 164700 - DNA, 201 bp, Homo sapiens
ctttgtcagattgggttaattcaaaagccttgtcctcaagctctgcagttctttcttccacttgtttgagcctattgttgaattgtttcatccatatcctrttttattcttttaacttctttaagttagttttcacttttctctgctaccttcttcagtagcttaataatcaatcttctgatttgttttctggaaactcag

SEQ ID NO: 164701 - DNA, 201 bp, Homo sapiens; identical to SEQ ID NO: 30449

SEQ ID NO: 164702 - DNA, 201 bp, Homo sapiens
cactttgggaggtcgaggcgtgcagatcacgaggtcaggagatcgagaccatcctggctaacacggtgaaatcctgtctctactaaaaatacaaaaaaatyagccgggcgtggcagcgcgtgcctgtagtcccagctactcgggaggctgaggcaggagaatggtgtgaacccaggaggcggagcttgcaatgagctgaga

SEQ ID NO: 164703 - DNA, 201 bp, Homo sapiens
tcctggctaacacggtgaaatcctgtctctactaaaaatacaaaaaaattagccgggcgtggcagcgcgtgcctgtagtcccagctactcgggaggctgasgcaggagaatggtgtgaacccaggaggcggagcttgcaatgagctgagatcgcaccgctgcactccagcctgggcgacagagcgagtctccgtctcaaaa

SEQ ID NO: 164704 - DNA, 201 bp, Homo sapiens
ctgtcccacctcctttccccgaaccatccattaggccaacaacgcttgtagagctcagtctgggctgtaatgtggcactggtgggctgggacaccagggartaagataaatgccttgctgaaacatggctgtgtttacagcctgctctggcaggacagcccagagcctggctgcccatcatgtggtcccacccaatcaagg

SEQ ID NO: 164705 - DNA, 201 bp, Homo sapiens
cagcttcttttcctgtgtgtactctgttcagttcctttagaaaacagatgcccagaggactcccaacccctggtctggggtcaggaaacagccagcgagasttaggggccttagggcacaggacagttcttccatttaagtactctggcctgacccttacttgcttccccaaacccctgggcctccccaatttgcgcctgt

SEQ ID NO: 164706 - DNA, 201 bp, Homo sapiens
tgagtcctgtgagtccttctaacaaattgtcaaacatgacagtgtctcagggaccccaagcttgcagttggggtcagaaatcatggtgctcttggggattycctacatttgtaatatctttatgtagtcatgtctcctttagtatgggctggacttagggacttgcttctatcaaataaaatatgacagaagtgacaggat

SEQ ID NO: 164707 - DNA, 201 bp, Homo sapiens; identical to SEQ ID NO: 30451

SEQ ID NO: 164708 - DNA, 201 bp, Homo sapiens
aatcggtcagcactggaggacctcagcagccatgttgaagccccatagtgaagccgggactgccttcattcagacccagcagctacatgcagccacggctsacacattcctggagcacatgtgccacctggacattcacacaccacccatcccagcctggaacactggcatcatctgtaccattagcccagcttcccaatc

SEQ ID NO: 164709 - DNA, 201 bp, Homo sapiens
tctgttcagttcctttagaaaacagatgcccagaggactcccaacccctggtctggggtcaggaaacagccagcgagagttaggggccttagggcacaggrcagttcttccatttaagtactctggcctgacccttacttgcttccccaaacccctgggcctccccaatttgcgcctgtccccaccctccactcagctgtc

SEQ ID NO: 164710 - DNA, 201 bp, Homo sapiens
acatgtagctcccagagtccagtagctagtcctgtgtccttcagaaggcgagggtggggtttgataattttgaggtgagggacccctcttccccttccccrtcccactgccatccccgccccagaggaagaccctggacctatctctacagccggcctcggcgcaggccagcgggaagaccttgccaatcccggtccagat

SEQ ID NO: 164711 - DNA, 201 bp, Homo sapiens
cccagctaggaggactttgagaattcaagcattctcaggtctggattagagacaggaatctgtctccacttccttacatggctagacacagagcccgggakggcaaaggaaaattggaggccccttcttcccatgagccattttctctgcatcccctgcccataagccttcactggcctctgatcaccctcatggttgact

SEQ ID NO: 164712 - DNA, 201 bp, Homo sapiens
tgaagaaactcagtcttggaactcagacagcaatggagacgggatgtgagtgggaccagcaaggggctaaggtccattatgagggtgaggaagggcttctrgaagtaacaaacatcccaggtccctgactggggagaatgaagacactgaccaagagatgtgaagccactcagggctgtgcagggtctgaggatctcactg

SEQ ID NO: 164713 - DNA, 201 bp, Homo sapiens
ctgtaagggcttccacatcgtgggctacttctccaaggtcagtgcctgcccaagctgtccctgtgccctgtcctgagccagatcccttccctgacactcayctgtcccccttctccaggagaaagaatcaacggaagactacaatgtggcctgcatcctaaccctgcctccctaccagcgccggggctacggcaagctgct

SEQ ID NO: 164714 - DNA, 201 bp, Homo sapiens
acgacatcctccaggcaatgagatttaccgcaagggcaccatctccttctttgagattgatggacgtaagaacaaggttagtgcttgagaggcagtgaggygctggggtgaatcaaatgacagcttcttcttgctcaggtaaacactgaccagtcaagccagcagatcagtccagcccatttttattgagttcctgctgtc

SEQ ID NO: 164715 - DNA, 201 bp, Homo sapiens
gacacagaggctttacctgatcaaggttatggtccattcgagaaattttattggttaaatgatgcccagatggggtcacatcctcagaacttctcagcctrgtagcacaagtggatgcttgaagaaactcagtcttggaactcagacagcaatggagacgggatgtgagtgggaccagcaaggggctaaggtccattatga

SEQ ID NO: 164716 - DNA, 201 bp, Homo sapiens
gcacatgtagctcccagagtccagtagctagtcctgtgtccttcagaaggcgagggtggggtttgataattttgaggtgagggacccctcttccccttccscatcccactgccatccccgccccagaggaagaccctggacctatctctacagccggcctcggcgcaggccagcgggaagaccttgccaatcccggtccag

SEQ ID NO: 164717 - DNA, 201 bp, Homo sapiens
gcggccagggggtagtggacccactatcggtgcctcacaggcagatgggccaggctactgtgattctcaaccctggctgtgcagcccagcctctaggggarccagccagaaataacagtggcactctcccggggttctctccgttcaggctgactgccctgcttatctggggtaggttctcagccccccagtttgctcctt

SEQ ID NO: 164718 - DNA, 201 bp, Homo sapiens
attaggagacaggcagaacatggttcaaatgagtcattggggccgggcaccatggctcatacctgtaatcccagcactttgggagtccaaccaaggctggyggatcacctgaggtcaggagtttgagaccagcctggccaacatggtgaaaccttgtttctactagaaatacaaaaattagccaggcgtggtggcgggtgc

SEQ ID NO: 164719 - DNA, 201 bp, Homo sapiens
acggaaggtggaggtggtttcaccagcaactccagtgcccagcgagacagccccggcctcggtttttccccaggtgagttccccaaaccatctcttgttcycttcctctcttctactctctggtggcttttttcaggctcatttcacagccatcccttcttttcctactatctcggcagaatggagccgcccgtagggcag

SEQ ID NO: 164720 - DNA, 201 bp, Homo sapiens
atgcaggcagggtggagagttatttagtgatgagtttaaaaataaagaaggggtggtgggcagagctagtgttggtgggattaggagacaggcagaacatkgttcaaatgagtcattggggccgggcaccatggctcatacctgtaatcccagcactttgggagtccaaccaaggctggcggatcacctgaggtcaggagt

SEQ ID NO: 164721 - DNA, 201 bp, Homo sapiens
tgactgccctgcttatctggggtaggttctcagccccccagtttgctccttggccagggttctaagtgccactcagctttccccaaatctgacttacgtgmtcctgcctggagccatgggcagaaggttagtgagccgctggtgctgatgtatctggtaacgtgtgccatgatacgagtactggggcaaggaccagtggct

SEQ ID NO: 164722 - DNA, 201 bp, Homo sapiens; identical to SEQ ID NO: 30453
